United States Patent Application Publication US 2014/0259212 A1 - sequence listing, part 32

SEQ ID NO: 109117 - DNA, 792 bp, Hordeum vulgare var
  CDS (1)..(792)
atggggaggggaagggtcgaactgaagcgcatcgagaacaagatcaaccggcaggtcaccttctccaagcgccgcaacggcctcctcaagaaggcctacgagctctccgtgctctgcgacgccgaggtggcgctcatcatcttctccagccgcggcaagctctacgagttcggcagcgccggcacaacaaaaacattggagaggtaccaacactgctgctataatgctcaagattccaatggtgcactatctgaaactcagagctggtaccaggaaatgtcaaagctaaaggcaaaatttgaagctttgcagcgaactcagagacacttgcttggggaggaccttggaccgctaagcgtgaaagaactgcagcagctggagaaacagctagaatgttcactgtcacaggccagacagcgaaagacgcaacttatgatggagcaggtggaggaacttcgcaggaaggagcgtcagctgggagacatcaacaggcaactcaagcacaagctcgacgctgaaggcagcaacagcaacaactacaggaccatgcagcagatcacctgggctgccggcaccgtcgtcgatgaaggcgccgccgcatatcacatgcagcagcagcagcagcagcagcagcagcaccctaatcattccgctgcgatggactgtgaacccactctgcaaattgggtaccctcatcatcagttcgcggctcctgatcaggtagccaataatattccacggagcagcgcccccggaggggagaacaacttcatgctggggtgggttctttga

SEQ ID NO: 109118 - protein, 263 aa, Hordeum vulgare var
MGRGRVELKRIENKINRQVTFSKRRNGLLKKAYELSVLCDAEVALIIFSSRGKLYEFGSAGTTKTLERYQHCCYNAQDSNGALSETQSWYQEMSKLKAKFEALQRTQRHLLGEDLGPLSVKELQQLEKQLECSLSQARQRKTQLMMEQVEELRRKERQLGDINRQLKHKLDAEGSNSNNYRTMQQITWAAGTVVDEGAAAYHMQQQQQQQQQHPNHSAAMDCEPTLQIGYPHHQFAAPDQVANNIPRSSAPGGENNFMLGWVL

SEQ ID NO: 109119 - DNA, 699 bp, Lilium longiflorum
  CDS (1)..(699)
atggggaggggaaagattgagataaagaggattgagaacactactaacaggcaagtcaccttttgcaagaggaggaatggtctgctgaagaaagcttatgaactctcagtcctctgtgatgcggaagtcgcgctaattgtcttctccagccgcggccgcgtctacgagtactccaacaacagcatcaaacaaactatcgataggtacaagaaagcttgtgatagttcaaattcaaattccctgatacaggtcaattctcaacaatactttcagcaagaatcagcaaagctgcgtcatcagattcagattttaactaatgcaaacaggcacctagtgggagaagctctgagttctctgactgtgaaggagctcaagcaattggaaaacagacttgaaagagggctcacaaggattagatcaaaaaagcatgagttgctgtttgcagaaattgagttcagtcagaaaagggaggtggagcttcaaagtgacaacatgtacctgagagctaagatagcggagaatgagcgaactcaagcagctatcgtgcaagcaagggctgagttcgatgcgcttccaacatttgattccagaaacttctaccaggtcaacaacatgctggaggctccaccccactatcatcatcaggatcagacagcccttcatcttggctacgaagccaaagacgattcagttccatga

SEQ ID NO: 109120 - protein, 232 aa, Lilium longiflorum
MGRGKIEIKRIENTTNRQVTFCKRRNGLLKKAYELSVLCDAEVALIVFSSRGRVYEYSNNSIKQTIDRYKKACDSSNSNSLIQVNSQQYFQQESAKLRHQIQILTNANRHLVGEALSSLTVKELKQLENRLERGLTRIRSKKHELLFAEIEFSQKREVELQSDNMYLRAKIAENERTQAAIVQARAEFDALPTFDSRNFYQVNNMLEAPPHYHHQDQTALHLGYEAKDDSVP

SEQ ID NO: 109121 - DNA, 657 bp, Eustoma grandiflorum
  CDS (1)..(657)
atggggagaggaaagatagacataaagaggatagagaacaacacaaataggcaggtgacattctgcaagagaaggaatggacttctgaaaaaggcttatgaactatcagtgctgtgtgatgctgaagttgctctcatcatcttctctagccgtggccgtgtttacgaatatgccaacaacaacataaagtcaacaattgaccgttacaggaaagcaacttcagatgcatccactgtcttcaccacgcaagagatcaatgctcaattttaccagcaagagtccaagaagctgcgccagcaaattcaagtcctccaaaactccaacaggcatctgatgggagagggtttaagctccctaaatgtgaaagagctcaagcagctggagagccgtctggaacgtgggatctcaagaaccagatcaaagaagcatgaaatgatacttgctgaagttgaataccttcagaagagagaaattcagctggaacaggaaaatgcatgcatcagatctaagatagcagaacaggaaaggcttcaggaactaagcatgatgccgccagggcaagattacaatgctatgcaggcctatctagctcagaactttatgcaggttaatggtctcatggaagggccgcctgtttactctatgcttcacaagtaa

SEQ ID NO: 109122 - protein, 218 aa, Eustoma grandiflorum
MGRGKIDIKRIENNTNRQVTFCKRRNGLLKKAYELSVLCDAEVALIIFSSRGRVYEYANNNIKSTIDRYRKATSDASTVFTTQEINAQFYQQESKKLRQQIQVLQNSNRHLMGEGLSSLNVKELKQLESRLERGISRTRSKKHEMILAEVEYLQKREIQLEQENACIRSKIAEQERLQELSMMPPGQDYNAMQAYLAQNFMQVNGLMEGPPVYSMLHK

SEQ ID NO: 109123 - DNA, 738 bp, Lilium longiflorum
  CDS (1)..(738)
  misc_feature (465)..(465): r is g or a
atgggtaggggtaagatagagatcaagaggatcgagaacaccaccaaccggcaggtcaccttctgcaagcgccgcaatggcctgctcaagaaggcctatgagctctcagtgttgtgtgatgcagaggtcgctcttatcgtcttctccacccgcggccgtctctatgagtatgccaacaatagtgtgaaagggactattgaacgttacaagaaagcaagcagtgatgcgtttaataccggatctgtctcggaagctaatgcacagtactaccaacaagaatcatccaaactgcgtaaccaaattgttagcttgcagaatgcgcacaggagcatgttgggtgagtctattggctccatggggactcaaggaactgaaatacatggagaaaaagctgggaaaatggacaacaataaaataaggacaaaaaagaatgagttgctatttgctgagattgagtacatgcaraaaagggaggcagagttgcagaacaatagtatgttccttcgtactaagattgctgaaaatgagaggtcacaacagcaacaaatggacatggagagatcacagcagcaacacatggacatggacagatcgcatcagcgccacttggaaatgctgcccacaacaagcgcgttcgaaaccatgccgacattcgattcgcggaacttcttcgatattaatctaattgaagcacatcaccactatcagcagcagcagactgccctccaactaggttaa

SEQ ID NO: 109124 - protein, 245 aa, Lilium longiflorum
MGRGKIEIKRIENTTNRQVTFCKRRNGLLKKAYELSVLCDAEVALIVFSTRGRLYEYANNSVKGTIERYKKASSDAFNTGSVSEANAQYYQQESSKLRNQIVSLQNAHRSMLGESIGSMGTQGTEIHGEKAGKMDNNKIRTKKNELLFAEIEYMQKREAELQNNSMFLRTKIAENERSQQQQMDMERSQQQHMDMDRSHQRHLEMLPTTSAFETMPTFDSRNFFDINLIEAHHHYQQQQTALQLG

SEQ ID NO: 109125 - DNA, 675 bp, Nymphaea sp
  CDS (1)..(675)
atggggagggggaagattgagatcaagcgcattgagaacacgacgaataggcaggtcaccttctgcaagcgccggagcgggcttctgaagaaggcctacgagttgtctgtgctgtgtgacgccgaggtcgccctcatcgtcttctccagccgcggccgtctctatgagtacgcaaacaacagtgtaaggggaacgattgaaagatacaagaaggcatacgcagagagttcaagctcgggtgctgtagctgaaacaaatgcacagtattaccaacatgaagcacataaactacgccaacagatcagcaaaatacaacaagacaacaggcaaatgctaggcgaaggtgtcagtgaaatgtctctaagagatctcaaatccttagagaataaattggagagaagcattagcaaaataagaggcaaaaagaatgatttgctgaacggtgaaattcagtacatgcaaaactggaatgaagatctgcagaaggagaacacgttccttagagcaaaggtttgtgagaatgaaagagcgcagcagcagcacataagcatcttggctgcagggccagcggagtacgaattgccaccagcagtacccttccagcacatcaatctaatggaatcctcccaccaccaatattcgcaccaagaaaggactgccttgcaacttggatga

SEQ ID NO: 109126 - protein, 224 aa, Nymphaea sp
MGRGKIEIKRIENTTNRQVTFCKRRSGLLKKAYELSVLCDAEVALIVFSSRGRLYEYANNSVRGTIERYKKAYAESSSSGAVAETNAQYYQHEAHKLRQQISKIQQDNRQMLGEGVSEMSLRDLKSLENKLERSISKIRGKKNDLLNGEIQYMQNWNEDLQKENTFLRAKVCENERAQQQHISILAAGPAEYELPPAVPFQHINLMESSHHQYSHQERTALQLG

SEQ ID NO: 109127 - DNA, 681 bp, Saruma henryi
  CDS (1)..(681)
atgggacgaggtaagatcgagatcaaaaggattgaaaacacaaccaaccgtcaggtgacgttctgcaagcgccgaaatggacttctcaagaaggcttatgaattatctgtgctctgcgaggctgaggtagcccttatagtcttctcaagccgcgggcgcctctacgaatatgcaaacaatagtgttagaacaaccattgacaggtacaagaaggcatctgactcttcaaatcccgcatcagtttctgagaccaattctcaatactaccaacaggaagcaacaaaactacgccagcaaatcgggatcctacagaatgccaacaggcacttgatgggcgagtctctcagctctatgagtgttaaggagctcaagcaactagagactagactagagaaaggcattagcagaatcagatcaaaaaagaacgaactattatttgctgaaattgagtatatgcagaagagggaggttgagttgcaaaacgataatatttttcttcgaggaaagattgttgaaaatgaaagagcccaacagaacatgaatatgttgccaggtgggggagggtatgaggttatgtcacaacaccctccatacgattctaggaactacctaccagttaatcttttggaacacaatcaacatttttctcaccaggagccaactgccctccaactaggatga

SEQ ID NO: 109128 - protein, 226 aa, Saruma henryi
MGRGKIEIKRIENTTNRQVTFCKRRNGLLKKAYELSVLCEAEVALIVFSSRGRLYEYANNSVRTTIDRYKKASDSSNPASVSETNSQYYQQEATKLRQQIGILQNANRHLMGESLSSMSVKELKQLETRLEKGISRIRSKKNELLFAEIEYMQKREVELQNDNIFLRGKIVENERAQQNMNMLPGGGGYEVMSQHPPYDSRNYLPVNLLEHNQHFSHQEPTALQLG

SEQ ID NO: 109129 - DNA, 678 bp, Meliosma dilleniifolia
  CDS (1)..(678)
atgggacgagggaaaatcgagatcaagcggattgaaaacactaccaatcgccaggttaccttctgtaagcgccgtaatggcttactcaagaaggcctatgaattatctgtcctctgcgatgccgaagttgccctaatcgtcttctccactcgcggccggctttatgaatatgcaaacaatagtgttaaagcaacaattgataggtacaaaaaggcatgtgcagatacctctaatactgggtcggtttcagaagccaatgctcagttttatcagcaagaatcctcaaaactgcgccaacagattgtcattttacaaaactcaaacagacatttgatgggtgaggctctcagtgcaatgactgttaaggaactgaagcaactggaaggtagactggagaaaggcattagcagaatccgatccaagaagaacgagatgttatttgctgaaatagaatacatgcaaaaaagggagattgacatgcaaaatgacaacatgtatcttcgagctaagatagctgaaaacgagagagctcaacaacacatgagcatgatgcctacatctgaatatgaagcaatgcctcctcaacaatttgactcaaggaacttcctgcaagtaaatctactagaacccaatcaccattactcccgccaggagcaaactgccctccaacttgggtga

SEQ ID NO: 109130 - protein, 225 aa, Meliosma dilleniifolia
MGRGKIEIKRIENTTNRQVTFCKRRNGLLKKAYELSVLCDAEVALIVFSTRGRLYEYANNSVKATIDRYKKACADTSNTGSVSEANAQFYQQESSKLRQQIVILQNSNRHLMGEALSAMTVKELKQLEGRLEKGISRIRSKKNEMLFAEIEYMQKREIDMQNDNMYLRAKIAENERAQQHMSMMPTSEYEAMPPQQFDSRNFLQVNLLEPNHHYSRQEQTALQLG

SEQ ID NO: 109131 - DNA, 681 bp, Thalictrum dioicum
  CDS (1)..(681)
atgggaaggggaaaaattgaaattaagaggatcgaaaacacgacaaatcgtcaagttaccttctgtaagcgtagaaatggcttacttaaaaaagcttatgaattatctgtgttatgtgaagctgaagtagcccttgtcgtcttctctagccgcggtcgcctttatgagtactctaacaacagtgtcaaaaaaactattgagaggtacaagaaggctagcacagactctcccaactctggatctgtttatgaagctaatgtgcagttttaccagcaagaagcgtcaaaaatgcgtaatcagatagccagtttacaaaaccataacaggaacttgttgggagagtctctcagcaatctcaatatcagggagctcaggcaaatcgagaagaagatagagggtggaatcagcaaaatccgagccaaaaagaatgaactgctgttttctgagatcgagtatatgcagaagagggaaatagacttgcagactgataacaagtatctcggggcaatgatcgctgcaaacgagagagtccccccagaacatatgaatctgatgcctgcaaatgaatatcacatcatgtcgtctgcaccctttgattctcggaacttcttgcctgcaaacctattggaccacaataacaattactctcactcagatcaaacgacacttcaacttgggtga

SEQ ID NO: 109132 - protein, 226 aa, Thalictrum dioicum
MGRGKIEIKRIENTTNRQVTFCKRRNGLLKKAYELSVLCEAEVALVVFSSRGRLYEYSNNSVKKTIERYKKASTDSPNSGSVYEANVQFYQQEASKMRNQIASLQNHNRNLLGESLSNLNIRELRQIEKKIEGGISKIRAKKNELLFSEIEYMQKREIDLQTDNKYLGAMIAANERVPPEHMNLMPANEYHIMSSAPFDSRNFLPANLLDHNNNYSHSDQTTLQLG

SEQ ID NO: 109133 - DNA, 735 bp, Dendrocalamus latiflorus
  CDS (1)..(735)
atggggcgcgggaaggtgcagctgaagcggatcgagaacaagatcaaccggcaagtgactttctccaagcgccggtcggggctgctcaagaaggcgcatgagatctccgtcctctgcgacgccgaggtcggccttatcatcttctccaccaagggcaagctctacgagtacgccaccgactcatgtatggacaaaattcttgaacggtacgagcgttactcctatgcagaaaaggttcttatttcagccgaatctgaaactcagggcaactggtgtcacgaatataggaaactgaaggcgaaggttgagacgatacagaaatgtcaaaagcacctcatgggagaggatcttgaatctttgaatctcaaggagctgcagcaactcgagcagcagctggaaagttcagtgaaacatatcagatccagaaagagccagcttatgctcgagtccatttccgagcttcaaaagaaggagaagtcactgcaggaggagaacaaggttctgcagaaggaactcgtggagaagcagcaggtccataaacggttagtgcaatgggaccaaactcagccgcaaactagttcctcttcctcgtccttcatgatgagggaagctctcccaacaacaaatatcagtatttacgctgcggcagccggcgagagggcagaggacgcagcagggcagcctcagattcacattgggctgccgccatggatggtgagccacatcaacggctaa

SEQ ID NO: 109134 - protein, 244 aa, Dendrocalamus latiflorus
MGRGKVQLKRIENKINRQVTFSKRRSGLLKKAHEISVLCDAEVGLIIFSTKGKLYEYATDSCMDKILERYERYSYAEKVLISAESETQGNWCHEYRKLKAKVETIQKCQKHLMGEDLESLNLKELQQLEQQLESSVKHIRSRKSQLMLESISELQKKEKSLQEENKVLQKELVEKQQVHKRLVQWDQTQPQTSSSSSSFMMREALPTTNISIYAAAAGERAEDAAGQPQIHIGLPPWMVSHING

SEQ ID NO: 109135 - DNA, 726 bp, Asparagus officinalis
  CDS (1)..(726)
atgggaagagggagagttgagttgaagaggatagagaacaagatcaacaggcaggtgaccttctccaagaggaggaatgggttgttgaagaaagcctacgagctgtcagtgctttgcgatgctgaggtggcgcttattatcttttcgagccgtggcaagctctatgaattcggaagtgctggaacaagcaaaacacttgagcgataccagcggtgctgttacacttcccaagatgctgccattgccagccatgaaacacagagctggtaccaagaagtttccaagttgaaggcaaaatttgagtccctgcagcgttcccaaagacatttacttggagaggaccttggtccattgagtgtgaaagaattgcagcagctggaacgacaactggaatctgctctgtcacaagctcggcaaagaaagacacagataatgctggaccagatggaagaactccggaagaaggagcgtcatcttggagaaatcaataagcagcttaaagctaagctcgaagctgaaggtgcaagttttagagccattcaaggttcatgggaatctgaagcaggagttggcggaaatgcattttctatgcatccttctcaatccagtgccatggactgtgaacccactctccagattgggtatcaccatcttgttcaacctgaagctgctctcccaaggagctctggcggagagaacaatttcatgcttggttgggttctttag

SEQ ID NO: 109136 - protein, 241 aa, Asparagus officinalis
MGRGRVELKRIENKINRQVTFSKRRNGLLKKAYELSVLCDAEVALIIFSSRGKLYEFGSAGTSKTLERYQRCCYTSQDAAIASHETQSWYQEVSKLKAKFESLQRSQRHLLGEDLGPLSVKELQQLERQLESALSQARQRKTQIMLDQMEELRKKERHLGEINKQLKAKLEAEGASFRAIQGSWESEAGVGGNAFSMHPSQSSAMDCEPTLQIGYHHLVQPEAALPRSSGGENNFMLGWVL

SEQ ID NO: 109137 - DNA, 717 bp, Petunia hybrida
  CDS (1)..(717)
atgggaagaggaaaaattgtgattcaaaggatagacaatacaacaagcaggcaagtgactttctcaaagagaagaagtgggttgctcaagaaggctaaagagctatcaatcctttgtgatgctcaagttggacttattattttctcaagcactggaaagctctatgaatttgccagcaacagcatgagatctgtaattgagagatactataagatgaaggaggagcatcacctcatgagtcctatgtccgaggtcaagtattggcaaagggaagtagcaagtctaaggcaacaactgcattacttgcaagaaaatcacaggcagcttctaggtgaaaaactttctggactcggtatcaaagatctaacacatctggaaaacaaacttgaaatgagtctgaaaggcgtccgaaagcaaaaggaacagattttaactgatgaaatcaaagaaataactcggaagggcaatcttattcatcaagaaaatatagaactctataaaaaggtaaacctcattcgacaagagaatacagacttgcagaaaaaggtttatgagaaaggatgtggaagtgaacctaatgaaggtgttcaggccacatttgcaatcagcaatggatatgatctacatgcacctatatatctccagctaaggcccccacaaacccagaagaatcaaacatcaacaagtgtcatgcagtttgggttacaactgcattag

SEQ ID NO: 109138 - protein, 238 aa, Petunia hybrida
MGRGKIVIQRIDNTTSRQVTFSKRRSGLLKKAKELSILCDAQVGLIIFSSTGKLYEFASNSMRSVIERYYKMKEEHHLMSPMSEVKYWQREVASLRQQLHYLQENHRQLLGEKLSGLGIKDLTHLENKLEMSLKGVRKQKEQILTDEIKEITRKGNLIHQENIELYKKVNLIRQENTDLQKKVYEKGCGSEPNEGVQATFAISNGYDLHAPIYLQLRPPQTQKNQTSTSVMQFGLQLH

SEQ ID NO: 109139 - DNA, 741 bp, Petunia hybrida
  CDS (1)..(741)
atgggtagaggaagagtagagttgaagaggatagaaaataagataaataggcaagtgacttttgcaaagagaagaaatgggttgcttaaaaaagcttatgaattatctgtgctttgtgatgctgaagttgctctcatcattttctctaatcgtggcaagctctatgaattctgcagctccaacaatatgttcaaaagccttgaaaggtaccaaaagtgcagctatggtacattggaagtcaaccaatcaagcaaagataatgagcaaaacaactatagggaatacctaaaactcaaagccaaatatgagtcactgcagcgatatcaaagacaccttcttggagaagacttggggcctcttaatatagatgatcttgagaatcttgaagtccaactagatacttccctcaagcacattaggtccaccaggacacaactgatgcttgaccagctttctgatcttcaaactaaggagaaattatgggttgaggccaacaaggtacttgaaagaaagctggaagaaatatatgctgaaaacagcttgcaacaatcatggggaggtggcgagcaaagtgttacttatggtcaccaacataatgctcaatctcagggtttcttccaacctcttgagtgcaactctactttgcaaatagggtacaatccaataacaacttcaaggcaaataacagcagtaacaaatgcccaaaacgtcaatggtatggtgcctggctggatgctgtga

SEQ ID NO: 109140 - protein, 246 aa, Petunia hybrida
MGRGRVELKRIENKINRQVTFAKRRNGLLKKAYELSVLCDAEVALIIFSNRGKLYEFCSSNNMFKSLERYQKCSYGTLEVNQSSKDNEQNNYREYLKLKAKYESLQRYQRHLLGEDLGPLNIDDLENLEVQLDTSLKHIRSTRTQLMLDQLSDLQTKEKLWVEANKVLERKLEEIYAENSLQQSWGGGEQSVTYGHQHNAQSQGFFQPLECNSTLQIGYNPITTSRQITAVTNAQNVNGMVPGWML

SEQ ID NO: 109141 - DNA, 726 bp, Brassica campestris
  CDS (1)..(726)
atggcgagagaaaagattcagatcaggaaaatcgacaacgcgacggcgagacaagtaacgttctcaaaacgaagaagaggtcttttcaaaaaagctgaagagctctccgttctctgcgacgctgatgttgctctcatcatcttctcttccactggaaagctctttgagttttgtagctccagcatgagggaagtgttagagaggcataacttgcagtcaaagaacttggagaagcttgatcaaccatctcttgagttacagctagtcgagaacagcgatcacgccctgttgagcaaagagattgcggaaaagagccaccgattaaggcaaatgagaggagaggaacttcaaggacttaacattgaagaacttcaacagctggaaaaggcccttgaatccggtttgactcgcgtaattgaaacaaagagtgagaagattatgagtgagatcagtgaccttcaaagaaagggaatgaaattgatggatgagaacaagcggctaaggcagcatggaacacaactaacagaagagaacgagcgactaggcaagcaaatatataataatatgcatgaaagatacggtggtgttgagtcggagaagaccgccgtgtacgaggaagggcagtcgtcagagtccattactaacgccggaaactccaccggcgctcctgttgactccgagagctccgatatctcccttaggctcggcttaccgtatggtggttag

SEQ ID NO: 109142 - protein, 241 aa, Brassica campestris
MAREKIQIRKIDNATARQVTFSKRRRGLFKKAEELSVLCDADVALIIFSSTGKLFEFCSSSMREVLERHNLQSKNLEKLDQPSLELQLVENSDHALLSKEIAEKSHRLRQMRGEELQGLNIEELQQLEKALESGLTRVIETKSEKIMSEISDLQRKGMKLMDENKRLRQHGTQLTEENERLGKQIYNNMHERYGGVESEKTAVYEEGQSSESITNAGNSTGAPVDSESSDISLRLGLPYGG

SEQ ID NO: 109143 - DNA, 759 bp, Triticum aestivum
  CDS (1)..(759)
atggggagagggagggtggagctcaagcggatcgagaacaagatcaaccgccaggtcaccttcgccaagcgccgcaacggcctgctcaagaaggcctacgagctctccgtcctctgcgatgccgaggtcgcgctcatcatcttctccaaccgcggcaagctctacgagttctgcagcggccagagcatgcccaaaacacttgagagataccagaaatgcagttatggtgggccagatacagcaatacaaaataaggagaatgagttagtgcagagcagtcgaaacgagtacctcaaactgaaagcacgagtcgagaatttgcagagaacccaacgaaatttgcttggtgaagatctcgggtcacttggcatcaaagatctggagcagctcgagaaacaacttgattcatccttaaggcacataagatccacaaggacacagcatatgcttgaccagctcactgatctgcaaaggaaggaacaaatgctgtgtgaagcgaataagtgccttcgaagaaaactggaggagagcagccagcagatgcagggccaaatgtgggagcagcacgccgccaacttgctcggctacgaccagctgcggcagtccccgcatcagcagcaggcgccacaccacggcggcaacggcttcttccaccccctggaccctaccactgagcctacacttcagatagggtatactcaggagcagataaacaacgcatgcgtggcggcgtcgttcatgccgacatggctgccctga

SEQ ID NO: 109144 - protein, 252 aa, Triticum aestivum
MGRGRVELKRIENKINRQVTFAKRRNGLLKKAYELSVLCDAEVALIIFSNRGKLYEFCSGQSMPKTLERYQKCSYGGPDTAIQNKENELVQSSRNEYLKLKARVENLQRTQRNLLGEDLGSLGIKDLEQLEKQLDSSLRHIRSTRTQHMLDQLTDLQRKEQMLCEANKCLRRKLEESSQQMQGQMWEQHAANLLGYDQLRQSPHQQQAPHHGGNGFFHPLDPTTEPTLQIGYTQEQINNACVAASFMPTWLP

SEQ ID NO: 109145 - DNA, 633 bp, Elaeis guineensis var
  CDS (1)..(633)
atggggcgagggaagattgagattaagcggatcgagaactccaccaaccggcaagtgaccttctccaagcggcggaatgggatcatcaagaaggcacgggagatcagcgtcctctgcgatgcccaggtctccgtcgtcatcttctccagctccggcaagatgtccgagtactgcagcccctccaccacgctgtctaggattctcgagaggtaccagcataactctggcaagaagctctgggatgccaagcacgagagtcttagtgctgagatcgaccggatcaagaaagagaatgacaacatgcagatcgagctgaggcatttgaagggtgaggatctgaactcactgagcccaaaggaactcattccaattgaagatgccctccagaatggtctcatcagtgttcgggacaagcagatggagttcttgaagaagctcaagaagaatgagagattgctggaagaggagaacaagcatctgacttatctattgcaccagcaggaattggcaatggatgcaaatgtaagggaactggagcttggatatccttcgaaagatagggattttgcttcccacatgccactagccttccatgtgcaaccaatccagcctaatttgcaagagaacaattaa

SEQ ID NO: 109146 - protein, 210 aa, Elaeis guineensis var
MGRGKIEIKRIENSTNRQVTFSKRRNGIIKKAREISVLCDAQVSVVIFSSSGKMSEYCSPSTTLSRILERYQHNSGKKLWDAKHESLSAEIDRIKKENDNMQIELRHLKGEDLNSLSPKELIPIEDALQNGLISVRDKQMEFLKKLKKNERLLEEENKHLTYLLHQQELAMDANVRELELGYPSKDRDFASHMPLAFHVQPIQPNLQENN

SEQ ID NO: 109147 - DNA, 771 bp, Silene latifolia
  CDS (1)..(771)
atgggaagaggaagagtagaattgaagagaatagagaataaaataaatagacaagtaacatttgcaaaaagaagaaatggattattgaagaaagcttatgaattatctgtgctttgtgatgctgaagttgctctaattatcttttctaaccgtggtaaactctatgaattctgcagtggaccaagcagcatgctcaaaactcttgagcggtaccagaagtgcagctatggtgcggttgaggtcaacaaaccatctaaagagcttgagagcagctataaggagtacttaaagctgaaagctcgatatgaatcactccaaagagctcataggaacctacttggggaggacttggggccattgaatgtgaaggagcttgatcagcttgaaaggcaacttgagtcttcccttaagcaaataagatgtataaagacccagtcgatgctcgatcaacttactgaccttcaatccaaggaacatgcattaatggaagcaaataaatctttgaaggctgagctggagagaataatggtgaaagacaatcaggtgcggcagtcatgggaagggcatcatgagcatcagaatgttcattatgagcatcaacatgctcattctcagcatcaacatgctcattctcaggggcttttccagcccattgactgcaatcctaatttgcatttagggtataacgcagaaacatcagatcatcaattaactgctgggacatctcatgctcaagtcccaggtttcctaccaggatggatgcaaatgtag

SEQ ID NO: 109148 - protein, 256 aa, Silene latifolia
MGRGRVELKRIENKINRQVTFAKRRNGLLKKAYELSVLCDAEVALIIFSNRGKLYEFCSGPSSMLKTLERYQKCSYGAVEVNKPSKELESSYKEYLKLKARYESLQRAHRNLLGEDLGPLNVKELDQLERQLESSLKQIRCIKTQSMLDQLTDLQSKEHALMEANKSLKAELERIMVKDNQVRQSWEGHHEHQNVHYEHQHAHSQHQHAHSQGLFQPIDCNPNLHLGYNAETSDHQLTAGTSHAQVPGFLPGWMQM

SEQ ID NO: 109149 - DNA, 681 bp, Asparagus virgatus
  CDS (1)..(681)
atgggtagagggaagatagaaatcaagcggatagagaacacgactaatcgacaggtcaccttctgcaagcgccgaaatgggcttctcaagaaagcctatgagctatcggtgctgtgcgacgctgaggtggccctcatcgtcttctcaagccgaggtcgcctctatgaatatgcaaacaatagtgtgaaagcgaccattgaacggtacaagaaagcttgcactgatacaaccaacactggaactgtctctgaagctaattctcagtactaccaacaagaagcctccaaattgcgccagcaaataaccaacttacagaattcaaacaggaatttgatgggtgagtctcttagttcaatgggtctaagggacctgaagcagctggagagcaggctggagaaaggcatcagcaaaataagaagcaagaagaatgagttgttgtatgctgagattgaatacatgcaaaaaagggagatggagttgcaaaatgataatatgtacttaaggaacaagatagctgaaaatgagagagcccagcagcaaatgaacatgttacctgcagcaacctcgaacgaatatgaaggcatgccccaattcgattcacgaaactttctccaagtgaacttgcttgatcccaatcaccactactctcaacagcagcagactgctctccaactaggttga

SEQ ID NO: 109150 - protein, 226 aa, Asparagus virgatus
MGRGKIEIKRIENTTNRQVTFCKRRNGLLKKAYELSVLCDAEVALIVFSSRGRLYEYANNSVKATIERYKKACTDTTNTGTVSEANSQYYQQEASKLRQQITNLQNSNRNLMGESLSSMGLRDLKQLESRLEKGISKIRSKKNELLYAEIEYMQKREMELQNDNMYLRNKIAENERAQQQMNMLPAATSNEYEGMPQFDSRNFLQVNLLDPNHHYSQQQQTALQLG

SEQ ID NO: 109151 - DNA, 633 bp, Asparagus officinalis
  CDS (1)..(633)
atgggtcgagggaagatcgagatcaagcggatcgagaactcgacgaatcggcaggtgaccttctcgaagaggcgaaacgggatcatcaagaaggcgagggagatcagcgtcctctgcgaggcccaggtttctgtcctcatcttctccagctccggcaagatctctgattactgtagtgctaacacctcgttctcaaggattttggagaggtaccagcagaattgtgggaagaagctttgggatgctaaccatgagagtctaagtgcccagattgaccgaattaagaaagagaatgataacatgcaaattaagctaaggcatttaaaaggggaggatttgaaccctttgacaccaaaggaactgattccaatagaggatgtcctgcagaatggacttgatagtgtccgagataaacagatgaactacttgaagatgctgaaaaagaatgaaagactgctggaggatgagcaaaagagattgacttatatcctgcaccatcagcaactagcaatggaggagaatgtcagggatctggatcttggctttcatcagaaaaacggtgcatttgctactcatatgccaatggcctttcgtgttcagccaatccagccaaatctacaggagaacaaatag

SEQ ID NO: 109152 - protein, 210 aa, Asparagus officinalis
MGRGKIEIKRIENSTNRQVTFSKRRNGIIKKAREISVLCEAQVSVLIFSSSGKISDYCSANTSFSRILERYQQNCGKKLWDANHESLSAQIDRIKKENDNMQIKLRHLKGEDLNPLTPKELIPIEDVLQNGLDSVRDKQMNYLKMLKKNERLLEDEQKRLTYILHHQQLAMEENVRDLDLGFHQKNGAFATHMPMAFRVQPIQPNLQENK

SEQ ID NO: 109153 - DNA, 621 bp, Asparagus officinalis
  CDS (1)..(621)
atggggagggggaagatcgagatcaagcggatcgagaactcgaccaatcgccaggtcacgttctcgaagcgcaggaatgggatcatgaagaaggcgagggagatcagcgtgccctgtgagagtgagatctccgttgttgtcttctcgagtcttggcaagattagcgagttctgtagccctaatactacattgccgaaaatgttggagaagtatcagcagcattctgggaagaagctttgggatgcgaagcacgagaatttgagtgcggagattgaacggatcaagagggagaatgataacttgcagatcaagctcaggcacttgaagggtgaagatctgaactcgttgaatccgagagaactgataccaattgaagaagccttgcagaatggcatgactaacgttcgcgctaagcaaatggatttcttgaagatgctcaagctaaatgggaagatgttggaagaggagaatgagaaattggcttattatctgcaccatcaggaattagcaatggaacggaaccggcatggatgccaccagggagggacagattatgcatcggaggtgcagatggctttgggagtgcaaccaatgcagccaaacttgcaattggctaaatag

SEQ ID NO: 109154 - protein, 206 aa, Asparagus officinalis
MGRGKIEIKRIENSTNRQVTFSKRRNGIMKKAREISVPCESEISVVVFSSLGKISEFCSPNTTLPKMLEKYQQHSGKKLWDAKHENLSAEIERIKRENDNLQIKLRHLKGEDLNSLNPRELIPIEEALQNGMTNVRAKQMDFLKMLKLNGKMLEEENEKLAYYLHHQELAMERNRHGCHQGGTDYASEVQMALGVQPMQPNLQLAK

SEQ ID NO: 109155 - DNA, 735 bp, Ipomoea nil
  CDS (1)..(735)
atggaatttccgaatcaagcattggaggaggaggagtcgtctcacaggaaatctggaaggggaaagattgaaatcaagcggatagagaacaccaccaatcgacaagtcaccttctgcaagcgccgtaatggccttctcaagaaggcttatgagttgtctgtgctttgtgatgctgaggttgctctcatcgtcttctccactcgcggccgtctttatgaatatgctaataacagtgttagagcaacgattgacaggtacaagaaacatcattctgattccacaaatactggatctgtttctgaagctaacactcagttttaccagcaggaatcagccaaactgcggcgccaaataagagagatacaaacttcaaacaagcaaattcttggagagtcgctcggcgttttaaaccacaaggaactcaagaatctggaagggaaagtggagaaagccattggaagagtccgctccaaaaagaatgagttgctgttttctgagatagagctgatgcaaaagagggagattgaactgcaaaatgccaacatgtatctgcgagcaaagatatctgagtttgaaagagcacaacagcaaatgaacctgatgccaggatctgaataccaggagactatgacaacttcccagacttacgacgctcacaactttcttccattaactctcctcgagcctaatcaacattactctcgccacgaccaaacagctcttcaactcgtgtaa

SEQ ID NO: 109156 - protein, 244 aa, Ipomoea nil
MEFPNQALEEEESSHRKSGRGKIEIKRIENTTNRQVTFCKRRNGLLKKAYELSVLCDAEVALIVFSTRGRLYEYANNSVRATIDRYKKHHSDSTNTGSVSEANTQFYQQESAKLRRQIREIQTSNKQILGESLGVLNHKELKNLEGKVEKAIGRVRSKKNELLFSEIELMQKREIELQNANMYLRAKISEFERAQQQMNLMPGSEYQETMTTSQTYDAHNFLPLTLLEPNQHYSRHDQTALQLV

SEQ ID NO: 109157 - DNA, 744 bp, Ipomoea nil
  CDS (1)..(744)
atggaattccaaagtgatcaatccagagagatgtcccctcagcggaaaatgggtcggggcaagatcgaaatcaagcggatcgagaacaccacgaaccggcaggtgaccttctgcaagcgcagaaatgggttgctgaagaaggcctacgagttgtctgttctgtgtgacgctgaggtggctctcatcgtcttctccagccgcggccgcctctacgagtatgctaacaacagtgtgaaggcaacaattgataggtacaagaaggcatgctcagattccactaatactggatccatttctgaagccaatactcagttttatcagcaggaagcgaacaaattgcgtcaacaaattagtaatctgcagaaccagaataggaactacatgggtgaaggtttaggtggttttaaccttagggatctcaagaacctggaatccaaaatagagaaaggaatcagcaaaatccgtgccaagaagaacgagctcctgtttgcagaaatcgactacatgcaaaagaggcaggaaatcgatttacataataacaaccaataccttcgggcaaagataattgagacggagagagctcagcagcagcagcagcagatgaacttgatgcctgggagttctagctatcatgagctggcgccgccccagcaatttgatgcaagaaactacctccaactcgatggatttcaatccacctctagttactccaagcaagatcatctcccccttcagttagtgtaa

SEQ ID NO: 109158 - protein, 247 aa, Ipomoea nil
MEFQSDQSREMSPQRKMGRGKIEIKRIENTTNRQVTFCKRRNGLLKKAYELSVLCDAEVALIVFSSRGRLYEYANNSVKATIDRYKKACSDSTNTGSISEANTQFYQQEANKLRQQISNLQNQNRNYMGEGLGGFNLRDLKNLESKIEKGISKIRAKKNELLFAEIDYMQKRQEIDLHNNNQYLRAKIIETERAQQQQQQMNLMPGSSSYHELAPPQQFDARNYLQLDGFQSTSSYSKQDHLPLQLV

SEQ ID NO: 109159 - DNA, 729 bp, Malus domestica
  CDS (1)..(729)
atggagttcccaaatcaagcacccgagagctcctcccagaaaaaattgggaaggggcaaaattgagattaagcggatcgaaaacactacaaatcgacaagttaccttctgcaaacgccgcaacggattgcttaagaaagcctatgaattgtctgttctttgtgatgctgaagttgctcttatcgtgttctccaaccgtggccgcctctatgagtatgctaacaacagtgttagagcaacaatcgacaggtacaaaaaagcatacgctgatcctacgaacagtggatctgtttcagaagccaacactcagttttatcagcaggaagcatccaaactgcgaagacagatccgagaaattcagaattcaaacaggcatatactgggtgaagctcttagctccttgaacgccaaggaactgaagaacctagaaggaagattggagaaaggaatcagcagaataagatccaaaaagaatgaaatgctgttttctgaaatcgaattcatgcaaaaaagggagaccgagctgcaacaccacaacaattttctgagagcaaagatagctgaaaacgagagggaagagcagcagcatacacacatgatgccgggaacttcctacgatcagtcaatgccttcgcattcttatgacaggaacttcctcccagcggtgatcttggagtccaacaataaccattaccctcaccaagtccagacagctctccaacttgtttga

SEQ ID NO: 109160 - protein, 242 aa, Malus domestica
MEFPNQAPESSSQKKLGRGKIEIKRIENTTNRQVTFCKRRNGLLKKAYELSVLCDAEVALIVFSNRGRLYEYANNSVRATIDRYKKAYADPTNSGSVSEANTQFYQQEASKLRRQIREIQNSNRHILGEALSSLNAKELKNLEGRLEKGISRIRSKKNEMLFSEIEFMQKRETELQHHNNFLRAKIAENEREEQQHTHMMPGTSYDQSMPSHSYDRNFLPAVILESNNNHYPHQVQTALQLV

SEQ ID NO: 109161 - DNA, 744 bp, Malus domestica
  CDS (1)..(744)
atgggaagaggtaaggtgcagatgaagcggatcgagaacaagataagcaggcaagtaacgttttcaaagaggaggagtggattgctcaaaaaagctcatgagatctctgttctgtgtgatgctgaggtggcagttattgtcttctccaccgtagggaagctctttgagtattctactgatttcagcatggtgaggattctggatcgatacgaccaatattcctatgcagaacggcaacgcaccggagctgattctgaatcacaggaaaactggccggtggaataccccaagcttgcggcaaggattgaagtcttacaaaggaaactaaggaatttggtgggagaagatttagaccccttaagcttgagagagcttcaagatttggagcaacagcttgatacagctcttaagcgcatacgaacaagaaagaaccaactcgtgcatgaatccatttcagagatggacaagaagcgaaaggctctacgggaactaaacaagtcgctagcaaagaaggtgaaggagaataaaacgatgcttgaggaagaacatgaccaggtgcaggtagtagggcagcagcaaactaaccaaggccgccacaactcatccaccctcatgctcatgccgccgccgccccaacccccatcaacaccaacactacctacttttcgaaccaccaggtacgatctctctctctctctctctctcagcgatgtttctgttaagcaatatgcagaaggagaatag

SEQ ID NO: 109162 - protein, 247 aa, Malus domestica
MGRGKVQMKRIENKISRQVTFSKRRSGLLKKAHEISVLCDAEVAVIVFSTVGKLFEYSTDFSMVRILDRYDQYSYAERQRTGADSESQENWPVEYPKLAARIEVLQRKLRNLVGEDLDPLSLRELQDLEQQLDTALKRIRTRKNQLVHESISEMDKKRKALRELNKSLAKKVKENKTMLEEEHDQVQVVGQQQTNQGRHNSSTLMLMPPPPQPPSTPTLPTFRTTRYDLSLSLSLSDVSVKQYAEGE

SEQ ID NO: 109163 - DNA, 816 bp, Malus domestica
  CDS (1)..(816)
atgggaagaggtaaggtgcagatgaagcggatcgagaacaagataagcaggcaagtaacgttttcaaagaggaggagtggattgctcaaaaaagctcatgagatctctgttctgtgtgatgctgaggtggcagttattgtcttctccaccgtagggaagctctttgagtattctactgatttcagcatggtgaggattctggatcgatacgaccaatattcctatgcagaacggcaacgcaccggagctgattctgaatcacaggaaaactggccggtggaataccccaagcttgcggcaaggattgaagtcttacaaaggaaactaaggaatttggtgggagaagatttagaccccttaagcttgagagagcttcaagatttggagcaacagcttgatacagctcttaagcgcatacgagcaagaaagaaccaactcgtgcatgaatccatttcagagatggacaagaagcgaaaggctctacgggaactaaacaagtcgctagcaaagaaggtgaaggagaataaaacgatgcttgaggaagaacatgaccaggtgcaggtagtagggcagcagcaaactaaccaaggccgccacaactcatccaccctcatgctcatgccgccgccgccccaacccccatcaacaccaacactacctacttttcgaaccaccagaaaatcatgcagtgggggagtccaggcaagaggagcagtggatgacaatgattctgataaaggcggaagacctccacctcgaccggctgctgctacaaacacacgcatgccactgtggatgctttcgccatttgaatga

SEQ ID NO: 109164 - protein, 271 aa, Malus domestica
MGRGKVQMKRIENKISRQVTFSKRRSGLLKKAHEISVLCDAEVAVIVFSTVGKLFEYSTDFSMVRILDRYDQYSYAERQRTGADSESQENWPVEYPKLAARIEVLQRKLRNLVGEDLDPLSLRELQDLEQQLDTALKRIRARKNQLVHESISEMDKKRKALRELNKSLAKKVKENKTMLEEEHDQVQVVGQQQTNQGRHNSSTLMLMPPPPQPPSTPTLPTFRTTRKSCSGGVQARGAVDDNDSDKGGRPPPRPAAATNTRMPLWMLSPFE

SEQ ID NO: 109165 - DNA, 744 bp, Houttuynia cordata
  CDS (1)..(744)
atggggagagggagggtggagctgaagaggattgagaacaagataaacaggcaggtgaccttttctaagaggaggaatggactgcttaagaaggcctacgagttgtcggtcctctgcgatgctgaggttgccttgatcatcttctccaacagagggaagctctatgagttttgcagctcttccagcatgatgacgaccctggagaggtaccaggaatgtagctacagcatgccagaagctaccggcccaacaagagagacagagaaaagctatcaggaatacttgaagttgaaagggaaagttgaacttttgcaacgcactcaaagaaatctactgggtgaagacttgggcccattaagtagcaaggagctagagcagcttgagaatcagcttgagcactcactgaggcaaattagatctaccaagacacaggccctgcttgaccaactttctgatcttagaaggaaggagcaacagatgttagaatcaaataagatcctgaaaaagaaattggcagaacatggtcctgaaaatctcctccaactcgcatggcaaagctgtggacaaagcaacccctacagccgccagcctgctcattcagaggctttctttcagcctttagactgtaatccaacattacagattggttaccatccagtgggtcaggaagagattactatggcagctccagccatagccccaccacagaatgtcaatggcttcattcctggctggatggtatga

SEQ ID NO: 109166 - protein, 247 aa, Houttuynia cordata
MGRGRVELKRIENKINRQVTFSKRRNGLLKKAYELSVLCDAEVALIIFSNRGKLYEFCSSSSMMTTLERYQECSYSMPEATGPTRETEKSYQEYLKLKGKVELLQRTQRNLLGEDLGPLSSKELEQLENQLEHSLRQIRSTKTQALLDQLSDLRRKEQQMLESNKILKKKLAEHGPENLLQLAWQSCGQSNPYSRQPAHSEAFFQPLDCNPTLQIGYHPVGQEEITMAAPAIAPPQNVNGFIPGWMV

SEQ ID NO: 109167 - DNA, 741 bp, Houttuynia cordata
  CDS (1)..(741)
atgggaagagggagggtggagctgaagaggattgagaacaagataaacaggcaggtgacctttgccaagaggaggaatggactgctgaagaaggcctacgagttgtcggtcctctgcgatgccgaggttactttgatcatcttctccaacagtgggaagctctatgagttttgcagctcttccagcatgatgaagaccctggagaggtaccagaaatgtagctatagcatgccagaagctaccggcccatcaagggagacagagaaaagctatcaggaatacttgaagttgaaagggaaagttgagcatttgcaacgcattcaaagaaatctactgggtgaagacttgggcccattaagtagcaaggagctggagcagcttgagaatcagctcgagcagtcactgaggcaaattagatctaccaagactcagtccctgcttgaccaactttctgatcttagaaggaaggagcaacagttactagaatctaaaaagatcctgaataagaaattggcagaacatggtccggaaaatccactccagctctcatggcaaagctgtggacaaagcaacccctacagcagccagcctgctcattcagaggctttctttcagcctttggactgcaatccaacattacagattggttacccttcagtcggtcaggaacagattatggcagctccagccacagccgcaccacagaatgccaatggctttattcctggctggttggtatga

SEQ ID NO: 109168 - protein, 246 aa, Houttuynia cordata
MGRGRVELKRIENKINRQVTFAKRRNGLLKKAYELSVLCDAEVTLIIFSNSGKLYEFCSSSSMMKTLERYQKCSYSMPEATGPSRETEKSYQEYLKLKGKVEHLQRIQRNLLGEDLGPLSSKELEQLENQLEQSLRQIRSTKTQSLLDQLSDLRRKEQQLLESKKILNKKLAEHGPENPLQLSWQSCGQSNPYSSQPAHSEAFFQPLDCNPTLQIGYPSVGQEQIMAAPATAAPQNANGFIPGWLV

SEQ ID NO: 109169 - DNA, 732 bp, Houttuynia cordata
  CDS (1)..(732)
atggggaggggaagggtggagctgaagaggatcgagaataagattaaccggcaggtgacctttgccaaacgcaggaacgggctcatgaagaaagctttcgagctttccgttctctgcgatgctgaggtcgctctcatcgtcttctccagccgcggcaagctctacgagttctgcagcagctccggcatgatgaagacaattgagaggtatcagaaatgcaactatggagcaccggaggcaacagtatccacaaaggaaattcagagcagctatcaggaatacatgaaacttaaagcacgcgttgagtcactacaacgatcccagaggaatttgttgggtgaggatttgggcccactgactggcaaagagcttgaacaactcgaaagacaattggatatgtctttgaagcagatcagatcaacgcggactcaatgtatgcttgatcagctttctgatcttcaaagaagggaacaaatgctcagcgaagctaataaagcactgaggagaaggcttttgcagttggatgatggaagccaaacaaaccctcaccactcctgggatccaaatgctcatggagtggggtacagccgacacccagggcagccccagggtgaagtaattttcgatcctttggattgtgaacccacgcttcatataggctatcaacctgaccagataacaatagctgcaccaggtccaaacggcaattacatgcaagggtggcttccataa

SEQ ID NO: 109170 - protein, 243 aa, Houttuynia cordata
MGRGRVELKRIENKINRQVTFAKRRNGLMKKAFELSVLCDAEVALIVFSSRGKLYEFCSSSGMMKTIERYQKCNYGAPEATVSTKEIQSSYQEYMKLKARVESLQRSQRNLLGEDLGPLTGKELEQLERQLDMSLKQIRSTRTQCMLDQLSDLQRREQMLSEANKALRRRLLQLDDGSQTNPHHSWDPNAHGVGYSRHPGQPQGEVIFDPLDCEPTLHIGYQPDQITIAAPGPNGNYMQGWLP

SEQ ID NO: 109171 - DNA, 708 bp, Oryza sativa subsp
  CDS (1)..(708)
atggggaggggcaagatagtgatccggcggatcgacaactcgacgagccggcaggtgacgttctcgaagcggcgcaacgggatcttcaagaaggccaaggagctggccatcctgtgcgacgccgaggtcggcctcgtcatcttctccagcaccggccgcctctacgagtatgccagcaccagcatgaagtcagtgattgatcgatatgggcgagctaaggaggagcagcagcacgtcgcaaaccccaactcggagctgaagttctggcaaagggaggcagcaagcttgagacaacaactgcacagcttgcaagaaaatcatcggcagttgatggggcaagatctttctggattgggtgtcaaggaactgcaaactctagaaaatcagctagaaatgagcatacgctgcatccggacaaaaaaggaccagctcatgattgatgaaatccacgaactgaatcgaaagggaagtctcatccaccaagaaaacatggaactgtacagaaaggtcaacctgattcgccaagaaaatgctgagctgtacaagaagctctatgagacaggggcagaaaatgaagcgaatcgagattcaacaactccatacaactttgcggttatcgaggaagccaacactcctgctcgtcttgaactcaatcccccaagccaacaaaatgatgctgagcaaaccacacctcctaaactagggtaa

SEQ ID NO: 109172 - protein, 235 aa, Oryza sativa subsp
MGRGKIVIRRIDNSTSRQVTFSKRRNGIFKKAKELAILCDAEVGLVIFSSTGRLYEYASTSMKSVIDRYGRAKEEQQHVANPNSELKFWQREAASLRQQLHSLQENHRQLMGQDLSGLGVKELQTLENQLEMSIRCIRTKKDQLMIDEIHELNRKGSLIHQENMELYRKVNLIRQENAELYKKLYETGAENEANRDSTTPYNFAVIEEANTPARLELNPPSQQNDAEQTTPPKLG

SEQ ID NO: 109173 - DNA, 726 bp, Solanum lycopersicum
  CDS (1)..(726)
atgggaaggggtagggttgagctaaagagaatagagaacaagatcaacaggcaagtgacctttgctaagagaagaaatgggcttttgaagaaagcttatgagctttcagttctttgtgatgctgaggttgctctaatcatcttctctaataggggaaaactctatgagttctgcagtagttctagcatgctaaagacgttggagaggtaccagaagtgcaactatggagcacctgaaccgaatatatcaacacgagaagcactggaaattagtagccagcaggagtacttgaagcttaaaggacgttacgaagcattgcagcgatcacagaggaatcttcttggtgaagatcttggtcctttgaacagcaaagaacttgaatcacttgagagacaacttgatatgtcgctcaaacagatcagatcaactcggactcagttaatgttggatcaacttacagattatcagagaaaggaacatgcattgaacgaagccaacagaaccttgaaacaaaggttgatggaaggaagccaactaaatctgcagtggcagccaaatgcacaagatgtgggctatggccggcaaacaactcaaactcagggcgatggcttctttcatcctttggattgtgaacctactttgcaaattgggtatcagaatgatccaattacagtaggaggagcagggcctagtgtgaataactacatggctggctggttgccttga

SEQ ID NO: 109174 - protein, 241 aa, Solanum lycopersicum
MGRGRVELKRIENKINRQVTFAKRRNGLLKKAYELSVLCDAEVALIIFSNRGKLYEFCSSSSMLKTLERYQKCNYGAPEPNISTREALEISSQQEYLKLKGRYEALQRSQRNLLGEDLGPLNSKELESLERQLDMSLKQIRSTRTQLMLDQLTDYQRKEHALNEANRTLKQRLMEGSQLNLQWQPNAQDVGYGRQTTQTQGDGFFHPLDCEPTLQIGYQNDPITVGGAGPSVNNYMAGWLP

SEQ ID NO: 109175 - DNA, 717 bp, Triticum monococcum
  CDS (1)..(717)
atgggtcgcggcaaggtggtgctgcagcggatcgagaacaagatcagccgccaggtgacgttcgccaagcgccgcaacggcctgctcaagaaggcctacgagctctccctcctctgcgacgccgaggtcgcgctcgtcctcttctcccacgccggccgcctctaccagttctcctcctcctccaacatgcttaagaccctcgagaagtaccagaggtacattttcgcttcccaagatgctgccgtgccgactaccgatgagatgcagaacaactatctggagtatatggagctgaaggcaagagttgaggttttacaacgctcacaaaggaatctcctaggcgaggatttggctccactgagtacaatcgagcttgaacagcttgagggtcaagtaggcaagaccttgaggcaaataaggtcaagaaagactcaagtactgctggatgaaatgtgcgacctgaagagaaaggagcaaatattgcaggatgcaaacatgaccctgaaaagaaagctgggcgagatcgagctggaggcgacacctgatcccccgcagcagccgcagcagcagcagatgtggcagggcgaccggggcgtgccgccccacacgcctccgcagccagagcacttcttccaggccctagaacgctatccttccctgcagccagtatttcgtggcatggatgtgaaccagccgccgcctgcatggatggcatag

SEQ ID NO: 109176 - protein, 238 aa, Triticum monococcum
MGRGKVVLQRIENKISRQVTFAKRRNGLLKKAYELSLLCDAEVALVLFSHAGRLYQFSSSSNMLKTLEKYQRYIFASQDAAVPTTDEMQNNYLEYMELKARVEVLQRSQRNLLGEDLAPLSTIELEQLEGQVGKTLRQIRSRKTQVLLDEMCDLKRKEQILQDANMTLKRKLGEIELEATPDPPQQPQQQQMWQGDRGVPPHTPPQPEHFFQALERYPSLQPVFRGMDVNQPPPAWMA

SEQ ID NO: 109177 - DNA, 735 bp, Triticum monococcum
  CDS (1)..(735)
atggggcgcgggaaggtgcagctgaagcggatcgagaacaagatcaaccggcaggtgaccttctccaagcgccgctcggggcttctcaagaaggcgcacgagatctccgtgctctgcgacgccgaggtcggcctcatcatcttctccaccaagggaaagctctacgagttctccaccgagtcatgtatggacaaaattcttgaacggtatgagcgctattcttatgcagaaaaggttctcgtttcaagtgaatctgaaattcagggaaactggtgtcacgaatataggaaactgaaggcgaaggttgagacaatacagaaatgtcaaaaacatctcatgggagaggatcttgaatctttgaatctcaaggagttgcagcaactggagcagcagctggaaagctcactgaaacatatcagatccaggaagaaccaacttatgcacgaatccatttctgagctgcagaagaaggagaggtcactgcaggaggagaataaagttctccagaaggaactcgtggagaagcagaaggcccatgcggcgcagcaagatcaaactcagcctcaaaccagctcttcttcttcttccttcatgctgagggatgctccccctgccgcaaataccagcattcatccagcggcggcaggcgagagggcagaggatgcggcagtgcagccgcaggccccaccccggacggggcttccaccgtggatggtgagccacatcaacgggtga

SEQ ID NO: 109178 - protein, 244 aa, Triticum monococcum
MGRGKVQLKRIENKINRQVTFSKRRSGLLKKAHEISVLCDAEVGLIIFSTKGKLYEFSTESCMDKILERYERYSYAEKVLVSSESEIQGNWCHEYRKLKAKVETIQKCQKHLMGEDLESLNLKELQQLEQQLESSLKHIRSRKNQLMHESISELQKKERSLQEENKVLQKELVEKQKAHAAQQDQTQPQTSSSSSSFMLRDAPPAANTSIHPAAAGERAEDAAVQPQAPPRTGLPPWMVSHING

SEQ ID NO: 109179 - DNA, 732 bp, Agapanthus praecox
  CDS (1)..(732)
atggggcgagggagagttgagctgaagaggattgagaacaagatcaataggcaagtgactttctcaaagaggaggaatgggctacttaagaaagcttacgagctctccgtgctttgcgatgccgaggttgccctcattgttttctcgagccgcggcaagctttatgaatttggcagcgctggaacaagcaagacgcttgaacgataccagagatgttgttacacttctcaagatgccactattgctgaccgcgaaaaacagaattggtaccaagaagtggccaggttgaaggctaaatttgaatctctacagagtgcccaaaggcatttgcttggagaagacctaggtccattgagtgtgaaagaattgcaacagttggaacgccaacttgaagcttctctgtctcaggctcggcaaagaaagacacagataatgtttgaccagatggaagaacttcggaagaaggaacaccatcttggagaaatcaataagcagctgaaaactaagctcgaggcagaaggtgagaatctaagagccattcaaggttcatgggaatctgatgcaactaatgtcggaggtggaaatgtattttctatgcatccttctcactcaagtgccatggaatgtgaaccaactctacagattgggtatcatcagcttgtccaacctgaaggttcactcccaaggaactcgggcggagagaacaatttcatgcttggttgggttctctag

SEQ ID NO: 109180 - protein, 243 aa, Agapanthus praecox
MGRGRVELKRIENKINRQVTFSKRRNGLLKKAYELSVLCDAEVALIVFSSRGKLYEFGSAGTSKTLERYQRCCYTSQDATIADREKQNWYQEVARLKAKFESLQSAQRHLLGEDLGPLSVKELQQLERQLEASLSQARQRKTQIMFDQMEELRKKEHHLGEINKQLKTKLEAEGENLRAIQGSWESDATNVGGGNVFSMHPSHSSAMECEPTLQIGYHQLVQPEGSLPRNSGGENNFMLGWVL

SEQ ID NO: 109181 - DNA, 708 bp, Agapanthus praecox
  CDS (1)..(708)
atggggaggggaaagatcgagatcaagaggatcgagaacacgacgaatcgccaagtgactttttgcaagaggaggaacgggctactcaagaaagcgtatgaactctcagttctttgcgatgcggaggttgcgctgatcgttttctctacccgtggccgcctctatgaatactcaaacaacagcataaaatcaaccattgagaggtacaagaaggcatgtgctgacagttccaactcaaccgctgttgttgaagtcaatactcagcaatattatcaacaagaagcagcgaaactacgccatcagattcagagtttacaaaattctaacaggcacttaatgggtgattctctgagttcattgagcataaaagaactcaaacaacttgaaaacagacttgaaaggggcatcaccaggattcgctcgaagaagcatgagctgttgtttgcggaaattgagtacatgcagaaaagggaagcggaacttcaaaatgacaacatgtacctcagagcgaagataacggataacgagagagcgcaccaggtaagcgtcgtgcaatctggcacggaatacgatactctcccaacattcgactcaaggaactactacacccacgtcactatgctcgaggccgcaccgcacttttcgcaccatcaggaccatacggccctccatctcgggtacgaaaccaaagctgatcccacagaatga

SEQ ID NO: 109182 - protein, 235 aa, Agapanthus praecox
MGRGKIEIKRIENTTNRQVTFCKRRNGLLKKAYELSVLCDAEVALIVFSTRGRLYEYSNNSIKSTIERYKKACADSSNSTAVVEVNTQQYYQQEAAKLRHQIQSLQNSNRHLMGDSLSSLSIKELKQLENRLERGITRIRSKKHELLFAEIEYMQKREAELQNDNMYLRAKITDNERAHQVSVVQSGTEYDTLPTFDSRNYYTHVTMLEAAPHFSHHQDHTALHLGYETKADPTE

SEQ ID NO: 109183 - DNA, 762 bp, Helianthus annuus
  CDS (1)..(762)
atgggaaaaggaaggttagagttgaagagaattgagaacaagataaacaggcaggttacctttgccaagagaagaaatggtcttctcaagaaagcttatgaactttctgtcctttgtgatgctgaagttgctctcatcatcttctccactcgtggcaaactctatgagttctctagcacctctagcatgctgaaaacacttgagaggtatgagaagtgtagttttgggccaccagaacaaagaaagccagccaaggaggatcttcaggaacaaagcagttaccaggaatacatgaggcttaaagaacgctacgatgctttgaaacaactcgaaaggaattactatggtgaggagattgactcgttgactaccaacgagctcgagtcgcttgaaaggcagcttcattgttcattgaaacagattaggacaataaggactcagtcgctgatcgataagctttacgaacaacaaaagatggaacaccaactttacgagtacaacaagacgcttcgactcagattagatgaagaaagccaagcagaggcactccaatgggatgtacacgctcacgcacacgcgaatggaatggtttatgggcatcatcatcagcaccaagtgtctcatcctgcacatggtgcgttttatcatccgactggctgcgaaaccacattgcaaatcgggtaccagactgaacaaatctcgggagcgacctcgtcgagcatgagccatcatcatcatcaaatgcagggttggcctgcatga

SEQ ID NO: 109184 - protein, 253 aa, Helianthus annuus
MGKGRLELKRIENKINRQVTFAKRRNGLLKKAYELSVLCDAEVALIIFSTRGKLYEFSSTSSMLKTLERYEKCSFGPPEQRKPAKEDLQEQSSYQEYMRLKERYDALKQLERNYYGEEIDSLTTNELESLERQLHCSLKQIRTIRTQSLIDKLYEQQKMEHQLYEYNKTLRLRLDEESQAEALQWDVHAHAHANGMVYGHHHQHQVSHPAHGAFYHPTGCETTLQIGYQTEQISGATSSSMSHHHHQMQGWPA

SEQ ID NO: 109185 - DNA, 756 bp, Helianthus annuus
  CDS (1)..(756)
atgggtagagggaaggtacaactaaggaggatagagaacaagataaacaggcaggtaactttctcaaagaggagaggtggcttattgaagaaagcccatgagatttcagttctttgtgatgctgaagttgccttaattgtcttctccaacaaaggaaaactatttgagttttctactgactcttgcatggagagcatcttggagcgatatgagagatattgttactccgaaagacaactagtcgcaacagatgctactccgagaagctggaccctagaatacaacaaacttaaatctagggctgagctattacaaagaaatcacaggcactatatgggtgaagatatcgagtcactgagcttgaaagaaatccaaaatttggagcaacagcttgatactggacttaagaatattcgtgcaagaaaaaaccaactcctgcatgaatcaatcaatgagctccagaaaaagggaaaggccatacaggagcagaacactactttgacaaagcaactcaaggagaaggagaaagacaagaccataccgcaaaacactcaatgggaacaacataactatgtggaccatgatacaaccttcttcttgccacagccacatcccgctctcaacatcggaggagattacaaccaagctactacttctgctgctagtggtggtgaaggagctgatggaaggaccagccagctggacctcagtctgcagccaatatattcgcaccacctaaggtgctttccgtcgtaa

SEQ ID NO: 109186 - protein, 251 aa, Helianthus annuus
MGRGKVQLRRIENKINRQVTFSKRRGGLLKKAHEISVLCDAEVALIVFSNKGKLFEFSTDSCMESILERYERYCYSERQLVATDATPRSWTLEYNKLKSRAELLQRNHRHYMGEDIESLSLKEIQNLEQQLDTGLKNIRARKNQLLHESINELQKKGKAIQEQNTTLTKQLKEKEKDKTIPQNTQWEQHNYVDHDTTFFLPQPHPALNIGGDYNQATTSAASGGEGADGRTSQLDLSLQPIYSHHLRCFPS

SEQ ID NO: 109187 - DNA, 753 bp, Chrysanthemum x morifolium
  CDS (1)..(753)
atgggaagaggaagagtagaactaaagagaatcgaaaacaaaatcaaccgacaagttaccttctcaaaacgaagaaatggtttgctcaaaaaagcttacgagctttcggtcctttgcgacgctgaagttggcctcatcatcttctctagccgcgacaaactctacgagtttggcagcgtcggtgttatgaaaacccttgaacgctatcaacgatgttgctttaatcctcaagacaacaacaatgaacgtgagacacaaagttggtatcaagaagtttccaagttaaaagctaagtttgaatccctccaacgcacccaaaggcatttacttggggaagatcttggacctcttagtgttaaggaactacataatcttgagaaacaactcgagggggcccttacacaagctagacaaagaaagacgcagatcttggtagaacaaatggaagagcttcgttgtaaggaacgagaactcggagacatgaacaagcacctaaagatcaaggtctcacacgagttatcaacgtttgagacagaaggacaaggttacaggacacatcagctcccatgcccatggaactctagtaacaacaacacattcctaatgcacccttcacagtccaacccaatgggctgtcaacaagaacagcccatcttacaaataggggataaccagtttatgcaaggtgagggatcatcagggcaaaggaatatggttgatgagacaaatattcatgggaattgggtcatttga

SEQ ID NO: 109188 - protein, 250 aa, Chrysanthemum x morifolium
MGRGRVELKRIENKINRQVTFSKRRNGLLKKAYELSVLCDAEVGLIIFSSRDKLYEFGSVGVMKTLERYQRCCFNPQDNNNERETQSWYQEVSKLKAKFESLQRTQRHLLGEDLGPLSVKELHNLEKQLEGALTQARQRKTQILVEQMEELRCKERELGDMNKHLKIKVSHELSTFETEGQGYRTHQLPCPWNSSNNNTFLMHPSQSNPMGCQQEQPILQIGDNQFMQGEGSSGQRNMVDETNIHGNWVI

SEQ ID NO: 109189 - DNA, 798 bp, Chrysanthemum x morifolium
  CDS (1)..(798)
atggcaaattctgatgcttttgagcttgatttcagctgcatagatcgatccatgtcgtttccagatgaatccgcggacatgtctccacaacgaaagttgggcaagggaaagatcgagatcaagcggatcgagaacaccacgaatcgacaagtgactttctgtaagcgtcgcaacgggttgctcaagaaggcgtatgaattgtctgttctttgtgatgctgaggttgctcttatcgtcttctcgagccgtggacgcctttatgagtatgccaacaacagtgttagagggacaatcgacaggtacaaaaaggcatgcctagatccaccaagcagtggctcggtttctgaagccaatgctcagtattaccaggaagaatctggaaaactgcgttcacaaatcgcaaaccttcagaatcaaaacaggcaattttacaggaacatcatgggtgaatctttgacggacatgccaatgaaagatctgaagaaccttgaaactaagttagagaaagcaattacccgaattcgatcaaaaaagaatgaattgttatttgctgaaatcgagtatatgcagaagagggaacttgagttgcataacaataatcagttccttcgagcaaagatagctgaaaatgaaagatcagctcagcagcagcacatgagcttgatgcctggaagttctgactatgagcttgtgacacctcaccaacccttcgatggtcgaaactatcttcagtcgaatgaaatgcaacccagtaatgattactcttgccaagaccaaactcctctccagttagtgtaa

SEQ ID NO: 109190 - protein, 265 aa, Chrysanthemum x morifolium
MANSDAFELDFSCIDRSMSFPDESADMSPQRKLGKGKIEIKRIENTTNRQVTFCKRRNGLLKKAYELSVLCDAEVALIVFSSRGRLYEYANNSVRGTIDRYKKACLDPPSSGSVSEANAQYYQEESGKLRSQIANLQNQNRQFYRNIMGESLTDMPMKDLKNLETKLEKAITRIRSKKNELLFAEIEYMQKRELELHNNNQFLRAKIAENERSAQQQHMSLMPGSSDYELVTPHQPFDGRNYLQSNEMQPSNDYSCQDQTPLQLV

SEQ ID NO: 109191 - DNA, 750 bp, Chrysanthemum x morifolium
  CDS (1)..(750)
atgggaagaggtcgagttgagctaaagcgaatcgaaaacaagattaaccgacaagttacttttgcgaaaagaagaaacgggttgttgaaaaaagcttacgagctttcggttctttgtgatgctgaagttgctttgatcatcttttcaaaccgcgggaaattgtatgagttttgtagtagctcaagcatgctgaagacactcgagaggtatcaaaaatgcaactatggagcacctgagacaaatgtgtccgcaagggaggcgctggagttaagtagtcagcaggagtacttgaaacttaaagcacgttatgaagcgctacaacggtcccagaggaatcttttgggtgaggatcttggcccattgaactgcaaagagctcgagtcacttgaaaggcaactcgatacatctctaaagcagatcagatcagcccggactcagttcatgctggatacactcacagatcttcaaaaaaaggagcacgcactaaacgatgccaataggaccttgaagcaaaggttgatggaaggacatcaagtaacttcactccattggaatccacatgtccaacaagaaatgggatacgaccagcaacatgaacctcaacatcaaaacggcgaagccttctttcatccacttgattgtggacccactttacaaatggggtatccatcggattcattaacggcagaagcagccgcatcagtagcagggccaagttgcagtaattatatgccaggatggtatcagtga

SEQ ID NO: 109192 - protein, 249 aa, Chrysanthemum x morifolium
MGRGRVELKRIENKINRQVTFAKRRNGLLKKAYELSVLCDAEVALIIFSNRGKLYEFCSSSSMLKTLERYQKCNYGAPETNVSAREALELSSQQEYLKLKARYEALQRSQRNLLGEDLGPLNCKELESLERQLDTSLKQIRSARTQFMLDTLTDLQKKEHALNDANRTLKQRLMEGHQVTSLHWNPHVQQEMGYDQQHEPQHQNGEAFFHPLDCGPTLQMGYPSDSLTAEAAASVAGPSCSNYMPGWYQ

SEQ ID NO: 109193 - DNA, 666 bp, Ginkgo biloba
  CDS (1)..(666)
atgggccgtgggaagattgagataaagaggattgagaacactacaaaccgacaggtcactttctgcaagcgtcgaaatggtctgttgaagaaagcgtatgaattatccgtgctttgtgatgcggaagtggctctcatcgtcttctccagtcgcgggagactctatgagtttgctaataacagtgtgaagagaacaatcgacagatacaagaagacttgcgctgacaactctcagggtggagccatttcagagtgtaattctcagtactggcaacaggaggcaggaaaactgagacagcaaattgatattctgcaaaatgcaaatagacacttgatgggggacgcgcttacatctttaagtgtaaaggagcttaagcagctagaaattcgacttgagaggggcattagcagggttcgatcaaagaagaatgaaatgttgcttgaggagatagagattatgcaaagaagggaacacatattactggcggagaaccagtttcttcgcactaagatagctgaatgtgaaagcagccaaaatgcaaatatgctgccgggtcccgaattcgatgcattgcctggatttgattctcgacatttcctacatgcaagtataatggatgctcaccattatgcacaacaggatcaaacggcccttcaacttggatga

SEQ ID NO: 109194 - protein, 221 aa, Ginkgo biloba
MGRGKIEIKRIENTTNRQVTFCKRRNGLLKKAYELSVLCDAEVALIVFSSRGRLYEFANNSVKRTIDRYKKTCADNSQGGAISECNSQYWQQEAGKLRQQIDILQNANRHLMGDALTSLSVKELKQLEIRLERGISRVRSKKNEMLLEEIEIMQRREHILLAENQFLRTKIAECESSQNANMLPGPEFDALPGFDSRHFLHASIMDAHHYAQQDQTALQLG

SEQ ID NO: 109195 - DNA, 744 bp, Vitis vinifera
  CDS (1)..(744)
atggggagaggaagggttcagttgaagcggatcgagaacaagatcagtcggcaagtaactttctccaagagaagatctgggctgctgaagaaagctcatgagatttctgtgctgtgcgatgctgaggtagccttgatcgtcttctctactaaagggaagctcttcgagtactccactgattccagcatggaaaggatccttgaacgatatgaaagatactcactttcggagagacagcttctctcaacagatcctgacccacagggaaactggtcgatggattaccctaaactcactgctaggattgaagttttacaaaggaacctgaggcactttgtgggagaagatctggatcccttaagtctgagagagctacaaaatttggagctacagcttgatacagctcttaagcgcatcagaacaagaaagaaccagcttatgcatgaatcgatttcggagcttcagaagaaggagaaatcactggtggagcaaaacaacgcattagcaaagaaggtgaaggagaaggagaaggtcgaacagaataatcgtgcacaatgggagcagcaaaacaacataggccaaaactcatctgcctatgtggtgccaccacccccactacagctcccttcactcaccatgggtggtagttttgtggggagagctgtagaggaagacggagctgaagctcgacctagtcccaataccctcatgccaccatggatgctgcgccacgtcaatgaataa

SEQ ID NO: 109196 - protein, 247 aa, Vitis vinifera
MGRGRVQLKRIENKISRQVTFSKRRSGLLKKAHEISVLCDAEVALIVFSTKGKLFEYSTDSSMERILERYERYSLSERQLLSTDPDPQGNWSMDYPKLTARIEVLQRNLRHFVGEDLDPLSLRELQNLELQLDTALKRIRTRKNQLMHESISELQKKEKSLVEQNNALAKKVKEKEKVEQNNRAQWEQQNNIGQNSSAYVVPPPPLQLPSLTMGGSFVGRAVEEDGAEARPSPNTLMPPWMLRHVNE

SEQ ID NO: 109197 - DNA, 642 bp, Brassica rapa subsp
  CDS (1)..(642)
atggtgaggggcaaaactcagatgaagcgaatagagaatgcaacaagcagacaagtgactttctctaagcgaaggaatggtttgctgaaaaaagcctctgagctctcagttctttgtgatgctgaagtttctctgatcatcttctctcctaaggcaaaactttatgaatttgccagctccaatatgcaagataccatagatcgttatctgaggcataccaaggatcgtgtcagcaccaaacctgtttctgaagaaaatttgcagcatttgaaacatgaagcagcaaacatgatgaagaaaattgaacaacttgaagcttccaaacgtaaactcttgggagaaggcataggatcatgttcgatagaggagctgcagcaaattgagcaacaacttgagaaaagtgtcaaatgtatccgagcaagaaagactcaagtgtttaaggaacaaattgagcagctcaagcaaaaggagaaagctctagctgcagaaaacaagaagctcactgaaaagtggggatctcatgaaatcgaagtctggtcgaataagaaccaagaaagtggaaaaggtgacgaagagagtagcccaagttctgaagtagagacagagttgttcattgggttaccttgttcttcaagaaagtga

SEQ ID NO: 109198 - protein, 213 aa, Brassica rapa subsp
MVRGKTQMKRIENATSRQVTFSKRRNGLLKKASELSVLCDAEVSLIIFSPKAKLYEFASSNMQDTIDRYLRHTKDRVSTKPVSEENLQHLKHEAANMMKKIEQLEASKRKLLGEGIGSCSIEELQQIEQQLEKSVKCIRARKTQVFKEQIEQLKQKEKALAAENKKLTEKWGSHEIEVWSNKNQESGKGDEESSPSSEVETELFIGLPCSSRK

SEQ ID NO: 109199 - DNA, 750 bp, Fragaria ananassa
  CDS (1)..(750)
atggggaggggaagagtggagctgaagagaatagagaacaagataaacaggcaagtcacatttgcaaagagaagaaatgggctcttaaagaaagcttatgagctctctattctctgtgacgctgaggttgctctcatcatattctctaaccgtgggaagctctatgagttctgcagcagctccagcatgctcaaaacccttgaaaggtaccaaaaatgtagctacggtgcaatggaagtccaaaaacctgccaaggaacttgaggagagcagctatcgtgaatacttgaagctgaaaactagatgcgagtctcttcaacaaactcagagaaaccttcttggagaagacttagggccattaaacacgaaggagcttgagcagcttgagcgtcagctagagtcctccttgaagcatgttaggtctactaagacccagcatatgattgatctgctttctgaccttcagagcaaggaacatatgctaattgaagccaacagagatttgaaaacgaagttggatgaaattgattcaagaactcaacttagacaaacttgggaacatggtcatgatcaccagactatgctatatggaactcaacatgctcagacacagggacttatgttccagcctttagattgcaatcccaccttgcaaatagggtacaatgctgtggtgtcacaggaaatgcctgcagccacaccagcccatgctcaacccgtcaatggtttcattcctggttggatgctctga

SEQ ID NO: 109200 - protein, 249 aa, Fragaria ananassa
MGRGRVELKRIENKINRQVTFAKRRNGLLKKAYELSILCDAEVALIIFSNRGKLYEFCSSSSMLKTLERYQKCSYGAMEVQKPAKELEESSYREYLKLKTRCESLQQTQRNLLGEDLGPLNTKELEQLERQLESSLKHVRSTKTQHMIDLLSDLQSKEHMLIEANRDLKTKLDEIDSRTQLRQTWEHGHDHQTMLYGTQHAQTQGLMFQPLDCNPTLQIGYNAVVSQEMPAATPAHAQPVNGFIPGWML

SEQ ID NO: 109201 - DNA, 738 bp, Lolium perenne
  CDS (1)..(738)
atgggtcgcgggaaggtggagatgaggcggatcgagaacaagataagccggcaggtgaccttcgccaagcgccggaacgggttgctcaagaaggcgtacgagctctcgttgctttgcgacgccgaggttgcgctcattatcttctccagccgcggtcgcctcttcgagttctccagctcatcgtgcatttataaaacacttgaaaggtaccgcacttgcaaccacaactcacaggaagcaaaccctccactggaaaacgaaattagttaccaggaatatttaaagctgaagaccagagtcgaattccttgaaagttcacagagaaatattctcggtcaagatctgggtccacttagcattaaggagcttgatcagattgagaacgacatagatgtatccctcaagcatatcaggtcaagaaagagtcaagtattagttgaccagctatctgacctgaaaaataaggagcaagaactgcaggatcaaaacaaagacttgaggaagaagttgcaagacaccatccttgaaaagaacgcagttcacatgctctggcaagatggaggacagaatagtgggcatgccattgagccctatcagggactcctccaatacccggatcacggttcctccatgcaaattggctatcatcagtcctacacggaccagctgaacaacaaagacatagcttctcagaacaacccaaatggagaacctggatcatctgcaggctggatatga

SEQ ID NO: 109202 - protein, 245 aa, Lolium perenne
MGRGKVEMRRIENKISRQVTFAKRRNGLLKKAYELSLLCDAEVALIIFSSRGRLFEFSSSSCIYKTLERYRTCNHNSQEANPPLENEISYQEYLKLKTRVEFLESSQRNILGQDLGPLSIKELDQIENDIDVSLKHIRSRKSQVLVDQLSDLKNKEQELQDQNKDLRKKLQDTILEKNAVHMLWQDGGQNSGHAIEPYQGLLQYPDHGSSMQIGYHQSYTDQLNNKDIASQNNPNGEPGSSAGWI

SEQ ID NO: 109203 - DNA, 687 bp, Lolium perenne
  CDS (1)..(687)
atgggtcgtggtaaggttgagctgaagcggatcgacaacaagatcagccggcaggtgacgtttgccaagcgccggaacgggctgctcaagaaggcgtacgagctgtcggtgctctgtgacgccgaggtcgccctcatcatcttctccacccgcggccgcctctttgagttctctacctcatcatgcatgtataagacgcttgagaggtaccgcagctgcaactacaactccaaagcaacagcaactccggagactgaattaagcaattaccaagagtatttaaagatgaagacaagagttgagttcctacagacaactcagagaaatcttcttggtgaagacttgggcccacttagcattaaggagcttgagcaacttgagaaccaaattgagatatctctcaaaaatataaggtcgacaaagagccagcagtcacttgatcagctctttgagctcaagcgtaaggaacaacaactgcaagatgttaacaaagacttaagaaggaagatacaagaaactagtgcagaaaatgtgctgcatatgtcttgccaggatgttggacctagtgggtctagtggacaggctaatcaagcgaacgagcaggaactatttcactctgcagtttgtgacccgactctgcatatagggtttcatcaatcttacctggatcaactgaacaataactga

SEQ ID NO: 109204 - protein, 228 aa, Lolium perenne
MGRGKVELKRIDNKISRQVTFAKRRNGLLKKAYELSVLCDAEVALIIFSTRGRLFEFSTSSCMYKTLERYRSCNYNSKATATPETELSNYQEYLKMKTRVEFLQTTQRNLLGEDLGPLSIKELEQLENQIEISLKNIRSTKSQQSLDQLFELKRKEQQLQDVNKDLRRKIQETSAENVLHMSCQDVGPSGSSGQANQANEQELFHSAVCDPTLHIGFHQSYLDQLNNN

SEQ ID NO: 109205 - DNA, 741 bp, Lolium perenne
  CDS (1)..(741)
atggggcggggcagggtggagctcaagcggatcgagaacaagatcaaccgccaggtcaccttcgccaagcgcaggaacgggctgctcaagaaggcctacgagctatccgtgctatgcgacgccgaggtcgcgctcatcgtcttctccaaccgaggcaagctctacgagttctgcagcacccagagcatgacgaagacactggaaaagtatcagaaatgcagttatgcaggacctgaaacaactgtgcagaacagagaaaatgagcaactgaagaacagccgcaatgagtacctgaaactaaaggcacgtgttgataatttacagcggacacaaaggaatttgcttggtgaagaccttgattcattaggcataaaggagctggagagccttgagaagcaactcgattcatctttgaagcacatcagaacaacaaggacacaaattatggttgaccaactgacagaacttcagagaagggaacaaatgttctccgaagcaaataagtgtcttcgaataaaattggaggagagcaatcaggttcatgggcagcagctctgggagcacaacaacaacttactcagctacgaacgtcagcccgaagtgcagccaccgatgaatggcggcaacggattcttccacccacttgatcctgctggtgaaccgacccttcacatagggtatcctcaagagtcactgaatggctcatgcatgaccactttcatgtccccatggctaccatga

SEQ ID NO: 109206 - protein, 246 aa, Lolium perenne
MGRGRVELKRIENKINRQVTFAKRRNGLLKKAYELSVLCDAEVALIVFSNRGKLYEFCSTQSMTKTLEKYQKCSYAGPETTVQNRENEQLKNSRNEYLKLKARVDNLQRTQRNLLGEDLDSLGIKELESLEKQLDSSLKHIRTTRTQIMVDQLTELQRREQMFSEANKCLRIKLEESNQVHGQQLWEHNNNLLSYERQPEVQPPMNGGNGFFHPLDPAGEPTLHIGYPQESLNGSCMTTFMSPWLP

SEQ ID NO: 109207 - DNA, 738 bp, Lolium perenne
  CDS (1)..(738)
atggggcgcggcaaggtgcagctcaagcggatcgagaacaagatcaaccgccaggtcaccttctccaagcgccgctcggggctgctcaagaaggcgcacgagatctccgtgctctgcgacgccgaggtcgggctcatcatcttctccaccaagggaaagctctacgagttcgcaaccgactcatgtatggacaaaattcttgagcggtatgagcgctactcctatgcagagaaagtgctcatttcaaccgaatctgaaattcagggaaactggtgtcatgaatataggaaactgaaggcgaaggttgagacaatacagagatgtcaaaagcatctaatgggagaggatcttgaatcattgaatctcaaggagttgcagcaactagagcagcagctggaaagttcactgaaacatattagagccagaaagaaccagcttatgcacgaatccatatctgagcttcaaaagaaggagaggtcactgcaggaggagaataaaattctccagaaggaactcatagagaagcagaaggcccacacgcagcaagcgcagtgggagcaaactcagccccaaaccagctcttcctcctcctcctttatgatgggggaagctaccccagcaacaaattgcagtaatcccccagcagcggccagcgacagagcagaggatgcgacggggcagccttcagctcgcacggtgcttccaccatggatggtgagtcacatcaacaatggctga

SEQ ID NO: 109208 - protein, 245 aa, Lolium perenne
MGRGKVQLKRIENKINRQVTFSKRRSGLLKKAHEISVLCDAEVGLIIFSTKGKLYEFATDSCMDKILERYERYSYAEKVLISTESEIQGNWCHEYRKLKAKVETIQRCQKHLMGEDLESLNLKELQQLEQQLESSLKHIRARKNQLMHESISELQKKERSLQEENKILQKELIEKQKAHTQQAQWEQTQPQTSSSSSSFMMGEATPATNCSNPPAAASDRAEDATGQPSARTVLPPWMVSHINNG

SEQ ID NO: 109209 - DNA, 756 bp, Zea mays
  CDS (1)..(756)
atggggcgggggccggtgcagctgcgccggatcgagaacaagatcaaccgccaggtgaccttctccaagcgccggaacgggctgctgaagaaggcccacgagatctccgtgctctgcgacgcagaggtcgcgctcatcgtcttctccactaaggggaagctctacgagtactctagccattccagcatggaaggcattcttgagcgttaccagcgttactcatttgaagaaagggcagtacttaacccaagtattgaagaccaggcaaattggggagatgaatatgtccggttaaaatccaaacttgatgcacttcagaagagtcaaaggcagctgttaggagaacaattgagttcactgaccataaaagaactccagcaactggagcaacaactggacagttctttgaagcatattaggtcaagaaagaatcagctcatgttcgattcaatttccgcgcttcagaaaaaggagaaagcacttacagatcaaaacggtgtcctgcaaaagttcatggaggcagagaaggagaaaaacaaggctttgatgaacgcgcagctccgggagcagcaaaatggagcatcaacaagctccccatcactttcaccaccaatagttccagattccatgccaactctaaatatagggccatgtcaacatagaggggcagcagaatctgagtctgaaccgtctcctgctcctgcacaagcaaacaggggcaacctgccaccatggatgctccgcactgtcaagtaa

SEQ ID NO: 109210 - protein, 251 aa, Zea mays
MGRGPVQLRRIENKINRQVTFSKRRNGLLKKAHEISVLCDAEVALIVFSTKGKLYEYSSHSSMEGILERYQRYSFEERAVLNPSIEDQANWGDEYVRLKSKLDALQKSQRQLLGEQLSSLTIKELQQLEQQLDSSLKHIRSRKNQLMFDSISALQKKEKALTDQNGVLQKFMEAEKEKNKALMNAQLREQQNGASTSSPSLSPPIVPDSMPTLNIGPCQHRGAAESESEPSPAPAQANRGNLPPWMLRTVK

SEQ ID NO: 109211 - DNA, 732 bp, Zea mays
  CDS (1)..(732)
atggggaggggtcgggtggagctcaagcggatcgagaacaagatcaaccgccaggtcaccttcgccaagcgccgcaacggcctgctcaagaaggcgtacgagctctccgtgctctgcgacgccgaagtcgcgctcatcatcttctccaaccgcggcaagctctacgagttctgcagcggacagagcatcaccaaaacacttgagaggtatgaaaaaaacagttatggaggaccagatactgctgtacagaacaaggagaacgagttagtccagagcagtcgtaatgagtacctcaagctgaaagcgagggtggataatttacagaggactcagaggaatttgcttggtgaagatctggggtcacttggtgtcaaagagcttgagcagcttgagaagcaacttgattcatccttaaggcacataagatccacaaggacacaacatatgcttgatcagctcactgatcttcagaggagggagcaaatgctgtgtgaagcaaataagtgccttagaagaaagctggaggagaccagcaaccaggtgcatggccaagtgtgggagcacggtgccaacttactcggctacgagaggcactctcctcaacagcaggccccatcacatgttggcaatggtttgttctttcatcccctggaagctgcagcagagccaaccctgcagatcgggttcgctcctgagcatatgaataacttcatgccaacatggctaccctga

SEQ ID NO: 109212 - protein, 243 aa, Zea mays
MGRGRVELKRIENKINRQVTFAKRRNGLLKKAYELSVLCDAEVALIIFSNRGKLYEFCSGQSITKTLERYEKNSYGGPDTAVQNKENELVQSSRNEYLKLKARVDNLQRTQRNLLGEDLGSLGVKELEQLEKQLDSSLRHIRSTRTQHMLDQLTDLQRREQMLCEANKCLRRKLEETSNQVHGQVWEHGANLLGYERHSPQQQAPSHVGNGLFFHPLEAAAEPTLQIGFAPEHMNNFMPTWLP

SEQ ID NO: 109213 - DNA, 723 bp, Zea mays
  CDS (1)..(723)
atggggaggggccgggtcgagctcaagcggatcgagaacaagatcaaccgccaggtcaccttcgccaagcgccgcaacggcctgctcaagaaggcgtacgagctctcggtgctctgcgacgccgaggtcgcgctcatcatcttctccaaccgcggcaagctctacgagttctccagcacgcagagcatgccaaaaacacttgaaaagtaccaaaaatgcagttttgcagggcctgaaacagcactccagaatagagagaatgagcaactgaaaagtagccgcaatgagtacctcaaactgaaggcacgtgttgataatttacagcggactcaaaggaacttgcttggtgaagatcttgagtcattaggcataaaagagctggagcacctggagaagcagctcgattcgtccttgaagcacataagatctacaaggacacaacacatggttgatcaactgacagaacttcagaaaaaagaacaaatgttttgtgaagcaaataagtgtcttcgaagaagactggaggagagcaaccaggttatatggcagcatgcgtgggagcaaagcgagcggcattctgaagtgcagccgcagcagctcaatggcaataacttcttccatcccctcgatggtgctggtgaacccacccttcagatagggtatccttcagaggcactgactagctcatgcatgaccaccttcctgcccccgtggttgccatga

SEQ ID NO: 109214 - protein, 240 aa, Zea mays
MGRGRVELKRIENKINRQVTFAKRRNGLLKKAYELSVLCDAEVALIIFSNRGKLYEFSSTQSMPKTLEKYQKCSFAGPETALQNRENEQLKSSRNEYLKLKARVDNLQRTQRNLLGEDLESLGIKELEHLEKQLDSSLKHIRSTRTQHMVDQLTELQKKEQMFCEANKCLRRRLEESNQVIWQHAWEQSERHSEVQPQQLNGNNFFHPLDGAGEPTLQIGYPSEALTSSCMTTFLPPWLP

SEQ ID NO: 109215 - DNA, 726 bp, Zea mays
  CDS (1)..(726)
atggggcgcggcaaggtggtgctgcagcggatcgagaacaagatcagccgccaggtcaccttcgccaagcgccggaacggcctgctcaagaaggcgtacgagctctccatcctctgcgacgccgaggtcgcgctcgtcctcttctcccacgccggccgcctctaccagttctcatcctcctccgatctgcttaagactctagagcggtaccagaggcacatctatgcttcagctgatgctgcagtgccatctagcgatgagatgcagaataactatcaagaatatgtgaagctgaaagcacgagttgaggttttacaacactcgcaaaggaatcttcttggtgaagaactggctccacttagcccaagtgaacttgaccagcttgagagtcaagtagacaagaccttgaagcaaataagatcaagaaagactcaggtgttacttgatgaactttgcgacttaaagagaaaggaacaaatgctgcaagacgctaacagggttctgaaaaggaagctgcacgagtttgaggcagaggctgcttctcccccacaattggcgtggcaaggcggaggcggcatgttgtcccatgaccctccacagccagaacacttcttcgtggctctggagagcaacgcgcctctgcaacctacataccatactatggacatgaaccagcagccagagccagcgccgggcggctgctaccctcctgcgtggatggcttag

SEQ ID NO: 109216 - protein, 241 aa, Zea mays
MGRGKVVLQRIENKISRQVTFAKRRNGLLKKAYELSILCDAEVALVLFSHAGRLYQFSSSSDLLKTLERYQRHIYASADAAVPSSDEMQNNYQEYVKLKARVEVLQHSQRNLLGEELAPLSPSELDQLESQVDKTLKQIRSRKTQVLLDELCDLKRKEQMLQDANRVLKRKLHEFEAEAASPPQLAWQGGGGMLSHDPPQPEHFFVALESNAPLQPTYHTMDMNQQPEPAPGGCYPPAWMA

SEQ ID NO: 109217 - DNA, 723 bp, Zea mays
  CDS (1)..(723)
atggggcgcgggaaggtggtgctgcagcggatcgagaacaagatcagccggcaggtgaccttcgccaagcgccggaacggcctgctcaagaaggcgtacgagctctccgtcctctgcgacgccgaggtcgcgctcgtcctcttctcccacgccggccgcctctaccagttctcatcctcctccaatctgcttaagactctagagcggtaccagaggtacatctatgcttcagccgatgctgcagtgccatctagcgatcagatgcagaataactatcaagaatatgtgaagctgaaggcacgagttgaggttttacagcactcacaaaggaatcttcttggtgaagatctggccctacttagcccaagtgaacttgaccagcttgagaatcaagtagacaagaccttgaagcaaataagatcaagaaagactcaagtgttacttgatgaactttgtgacttaaagagaaaggaacaaatgctgcaagatgcaaacagggttctgaaaaggaagctgggcgagtttgaggcagaggcggcttctcccccgcagttagcgtggcaaggcgaaggcggcatgttgtcccatgaccctccacagccagaacacttcttccaggctctggagagcaacccatgtctgcaacctacataccatacgatggacatgaaccagcagccagtgccagcgccgggcggctgctatcctgcatggatgtcttag

SEQ ID NO: 109218 - protein, 240 aa, Zea mays
MGRGKVVLQRIENKISRQVTFAKRRNGLLKKAYELSVLCDAEVALVLFSHAGRLYQFSSSSNLLKTLERYQRYIYASADAAVPSSDQMQNNYQEYVKLKARVEVLQHSQRNLLGEDLALLSPSELDQLENQVDKTLKQIRSRKTQVLLDELCDLKRKEQMLQDANRVLKRKLGEFEAEAASPPQLAWQGEGGMLSHDPPQPEHFFQALESNPCLQPTYHTMDMNQQPVPAPGGCYPAWMS

SEQ ID NO: 109219 - DNA, 738 bp, Nicotiana tabacum
  CDS (1)..(738)
atggggagaggaagagtgcaactgaagagaattgagaacaagatcaatcgacaagtcaccttctcaaaaagacgatctggtttgctcaagaaagctcatgagatctctgtactttgtgatgctgaggttggtttaattgttttttctacaaaaggcaaactctttgagtattccaccgattcttgcatggaaaggattcttgaaaggtatgaaaggtactcatatgctgagaggcagcttactgctactgatcatgaaaccccggggagctggactttggaacatgctaagcttaaggcaagatttgaggttttgcaaagaaaccaaaggcattatgcaggagaagatttggactcattaagtatgaaagagctgcagaatcttgagcaccaggtcgattctgctttaaagcacattcgatcaagaaagaatcaattgatgcatgaatccatttctgagctgcaaaagaaggacaaggcattgcaagagcaaaacaacaagctctcgaagcaggtgaaagaaagggagaaagagctggctcagcagactcagtgggagcaacagagccatgatcatctcaactcatctacattcgttttgtcacagcccttgagctctcttcaccttggggaagcgtactcaactgcaggagacaacggagaagttgaaggatcatcgcggcaacaacaacagaacactgtaatgccgccatggatgcttcgccatcttaataactga

SEQ ID NO: 109220 - protein, 245 aa, Nicotiana tabacum
MGRGRVQLKRIENKINRQVTFSKRRSGLLKKAHEISVLCDAEVGLIVFSTKGKLFEYSTDSCMERILERYERYSYAERQLTATDHETPGSWTLEHAKLKARFEVLQRNQRHYAGEDLDSLSMKELQNLEHQVDSALKHIRSRKNQLMHESISELQKKDKALQEQNNKLSKQVKEREKELAQQTQWEQQSHDHLNSSTFVLSQPLSSLHLGEAYSTAGDNGEVEGSSRQQQQNTVMPPWMLRHLNN

SEQ ID NO: 109221 - DNA, 759 bp, Brassica oleracea var
  CDS (1)..(759)
atgggaagagggagagtggagatgaagaggatagagaacaaaatcaataggcaagtgaccttctcaaaaagaagaaatggtttgttgaagaaagcttatgagctctctgttctctgtgatgctgaagttgctctcatcgtcttctctagccgtggcaagctctacgagttcggcagtgtcggagttgaaagaactattgaacggtatcatcgttgctacaactgttctgtgaccaataataggcctgaagagtctaaacagaactggtgtcaggaggtggcaaagctgaaagccaaatacgaatcgcttgttcgcactaataggcatttgcttggagaagatattggagaaatgggcgtgaagcaactgcaagcgttggagcggcagctggaagcagctcttactgcgactcgacaacggaagacacaagttatgatggaagaaatggaagatcttcggaaaaaggagcggcaactcggagacataaacaaacaactcaagattaagtttgaagccggaggccatgctttcaaatcctttcaagacttctggccaaactcggcagcatcgatggccggtgatcctaacaattctaaatttccggttcagccttctcatcctgattcagtggattgcaacaccgaaccctttttacaaatagggttccaacaacattactacgtgcaaggtgaaggttcttcggtaccaaagagtaatgtggcatgtgagactaatttcgtccaagattggtttctttga

SEQ ID NO: 109222 - protein, 252 aa, Brassica oleracea var
MGRGRVEMKRIENKINRQVTFSKRRNGLLKKAYELSVLCDAEVALIVFSSRGKLYEFGSVGVERTIERYHRCYNCSVTNNRPEESKQNWCQEVAKLKAKYESLVRTNRHLLGEDIGEMGVKQLQALERQLEAALTATRQRKTQVMMEEMEDLRKKERQLGDINKQLKIKFEAGGHAFKSFQDFWPNSAASMAGDPNNSKFPVQPSHPDSVDCNTEPFLQIGFQQHYYVQGEGSSVPKSNVACETNFVQDWFL

SEQ ID NO: 109223 - DNA, 780 bp, Brassica oleracea var
  CDS (1)..(780)
atgggaagagggagagtggagatgaagaggatagagaacaaaatcaataggcaagtgaccttctcaaaaagaagaaatggtttgttgaagaaagcttatgagctctctgttctctgtgatgctgaagttgctctcatcgtcttctctagccgtggcaagctctacgagttcggcagtgtcggagttgaaagaactattgaacggtatcatcgttgctacaactgttctgtgaccaataataggcctgaagagtctaaacagaactggtgtcaggaggtggcaaagctgaaagccaaatacgaatcgcttgttcgcactaataggcatttgcttggagaagatattggagaaatgggcgtgaagcaactgcaagcgttggagcggcagctggaagcagctcttactgcgactcgacaacggaagacacaagttatgatggaagaaatggaagatcttcggaaaaaggagcggcaactcggagacataaacaaacaactcaagattaagtttgaagccggaggccatgctttcaaatcctttcaagacttctggccaaactcggcagcatcgatggccggtgatcctaacaattctaaatttccggttcagccttctcatcctgattcagtggattgcaacaccgaaccctttttacaaataggtttggtacttgtatacattaggttccaacaacattactacgtgcaaggtgaaggttcttcggtaccaaagagtaatgtggcatgtgagactaatttcgtccaagattggtttctttga

SEQ ID NO: 109224 - protein, 259 aa, Brassica oleracea var
MGRGRVEMKRIENKINRQVTFSKRRNGLLKKAYELSVLCDAEVALIVFSSRGKLYEFGSVGVERTIERYHRCYNCSVTNNRPEESKQNWCQEVAKLKAKYESLVRTNRHLLGEDIGEMGVKQLQALERQLEAALTATRQRKTQVMMEEMEDLRKKERQLGDINKQLKIKFEAGGHAFKSFQDFWPNSAASMAGDPNNSKFPVQPSHPDSVDCNTEPFLQIGLVLVYIRFQQHYYVQGEGSSVPKSNVACETNFVQDWFL

SEQ ID NO: 109225 - DNA, 753 bp, Brassica oleracea var
  CDS (1)..(753)
atgggaaggggaagagtagagctgaagaggatagagaacaagatcaacagacaagtaacgtttgcaaaacgtaggaacggtttgttgaagaaagcttacgaattgtctgttctttgtgatgctgaggttgctctcatcatcttctccaaccgtggcaagctctatgagttctgcagctcctctaacatgatcaagacactggaacggtaccagaaatgcagttatggttctattgaagtcaacaacaaacctgccaaagaacttgagaatagctacagagagtatctgaagctcaagggtagatatgagggccttcagcgtcaacaaagaaatcttcttggggaggatttaggacctctgaattcaaaggagttagagcagattgagcgtcaactagatggctctctcaagcaagttcgctccatcaagacacagtacatgcttgaccagctctctgaccttcaaaccaaagagcaaatgttgcttgaaaccaatagagctttggctatgaagctggatgatatgattggtgtgagaagtcatcatatgggtggaggaggaggaggatgggaaggcaatgaacataatgtttcctatgcgcatcatcaagctcagtctcaaggactattccagcctcttgaatgcaatccaactcttcagatggggtatgacaatccagtatgctcagagcagataactgcaacaacacaagctcaggcacagcccggttacattccagactggatgctctga

SEQ ID NO: 109226 - protein, 250 aa, Brassica oleracea var
MGRGRVELKRIENKINRQVTFAKRRNGLLKKAYELSVLCDAEVALIIFSNRGKLYEFCSSSNMIKTLERYQKCSYGSIEVNNKPAKELENSYREYLKLKGRYEGLQRQQRNLLGEDLGPLNSKELEQIERQLDGSLKQVRSIKTQYMLDQLSDLQTKEQMLLETNRALAMKLDDMIGVRSHHMGGGGGGWEGNEHNVSYAHHQAQSQGLFQPLECNPTLQMGYDNPVCSEQITATTQAQAQPGYIPDWML

SEQ ID NO: 109227 - DNA, 771 bp, Brassica oleracea var
  CDS (1)..(771)
atgggaagagggaaagttgagttgaagaggatagagaacaagatcaacaggcaagttacttttgcaaagagaaggaatggtttgcttaagaaggcttatgagctttctgtgctttgtgatgctgagattgctcttctcattttctctaaccgtggcaagctctacgaattctgcagcaaccctagtggtatggccaagatggttgagaagtatagaaaacatagttatgcaacaatggatccaaatcaatcagctaaagacttgcaggagaggtaccaagactacttgaatctcaaatcaagagttgaagtccttcaacattcacaaaggcatttgctaggtgaagagatagccgggataggagtggatgagcttgagcagctagaatgtcaagtagatacatcactaaggcaaataagatccacaaaggcccggtcgatgcttgatcaactatctgacctcaaaagcaaggaggaaatgttactggaaaccaacagagatcttaagagaaagttggaggaaagtgatgcagcccttaatcaaacactatggggagcttcatcttctgcggaacattcccaacaacaacaagaaggcatgacttcttatcatgcgaaccctcttagtcaagaagtgggtttctttaggcctttacagggcaatgtagcattgcagatgagtcattacaatcctggtgtgccaaatgcaagcaactctgcaacaacatcacagaatgttattaatgggttcttccctggatggatggtctga

SEQ ID NO: 109228 - protein, 256 aa, Brassica oleracea var
MGRGKVELKRIENKINRQVTFAKRRNGLLKKAYELSVLCDAEIALLIFSNRGKLYEFCSNPSGMAKMVEKYRKHSYATMDPNQSAKDLQERYQDYLNLKSRVEVLQHSQRHLLGEEIAGIGVDELEQLECQVDTSLRQIRSTKARSMLDQLSDLKSKEEMLLETNRDLKRKLEESDAALNQTLWGASSSAEHSQQQQEGMTSYHANPLSQEVGFFRPLQGNVALQMSHYNPGVPNASNSATTSQNVINGFFPGWMV

SEQ ID NO: 109229 - DNA, 747 bp, Helianthus annuus
  CDS (1)..(747)
atgtcgtttcaaaacgaggactcgggggacatatctccacagagaaggattgggaagggaaagatcgagatcaagcggatcgagaacactacgaaccgacaagtgactttctgcaagcgtcgtaatgggttgctcaagaaggcctatgagttgtctgttctttgtgacgccgaggttgctcttatcgtcttttcgagccgtggccgtctttatgagtatgctaacaacagtgttacaggaacaattgataggtacaaaaaatcatgcttagatccacctagcacgggttccgttgctgaagccaatgctcagttttaccaacaagaagctaccaaactgcgtcagcaaattgcaaaccttcagaatcaaaacaggcaattttacaggaacatcatgggtgaatctttggcagatatgccggggaaggagcttaagaaccttgaaagtaagttagagaaagcaattaacagaattcgtgcgaaaaagaatgaactattatttgctgaaattgagtacatgcagaaaagggaacttgagctgcataacagcaatcaattccttagagcaaggatagctgaaaatgaaagagctcagcagcagcacatgagcttgatgcctggaagttctggttataatgaccttggaccacaccagtccttcgatggtctaaacgatcttcaaacgaatgagttgcaactcaataacaactactcttgccaggaccaaacccctctccagttggtgtag

SEQ ID NO: 109230 - protein, 248 aa, Helianthus annuus
MSFQNEDSGDISPQRRIGKGKIEIKRIENTTNRQVTFCKRRNGLLKKAYELSVLCDAEVALIVFSSRGRLYEYANNSVTGTIDRYKKSCLDPPSTGSVAEANAQFYQQEATKLRQQIANLQNQNRQFYRNIMGESLADMPGKELKNLESKLEKAINRIRAKKNELLFAEIEYMQKRELELHNSNQFLRARIAENERAQQQHMSLMPGSSGYNDLGPHQSFDGLNDLQTNELQLNNNYSCQDQTPLQLV

SEQ ID NO: 109231 - DNA, 606 bp, Solanum lycopersicum
  CDS (1)..(606)
atggctcgtggtaaggttcaaatgaagaggatagagaatccagttcatcgacaagtcactttctgcaaacgtcgagcaggccttcttaagaaggccaaagagctctccgtgttgtgtgatgccgaagttggtcttttcattttctccgctcacggaaagctctatgaacttgctactaaaggaagcatgcaagggctgattgagaggtacatcaagtcaaccaagggagttgaggtggctgaggaagccaaagatacacaacctctggacccaaaagaggagatcaacatgctgaagaatgagattgacgtactccagaaaggcttaagctacatgtatgggggaggcgcaggaacaatgacactagatgaacttcattcacttgaaaagtaccttgaaatttggatgtatcatattcgttcagcaaagatggatatcatgtttcaagagatccaactgttgaagaataagggagggatactggaagctgcaaacaaatatttacaggataagatagatgagcaatacactgtgactaacatgacccagaatttgactgactttcaatgcccactaactgtacaaaatgagatatttcagttttaa

SEQ ID NO: 109232 - protein, 201 aa, Solanum lycopersicum
MARGKVQMKRIENPVHRQVTFCKRRAGLLKKAKELSVLCDAEVGLFIFSAHGKLYELATKGSMQGLIERYIKSTKGVEVAEEAKDTQPLDPKEEINMLKNEIDVLQKGLSYMYGGGAGTMTLDELHSLEKYLEIWMYHIRSAKMDIMFQEIQLLKNKGGILEAANKYLQDKIDEQYTVTNMTQNLTDFQCPLTVQNEIFQF

SEQ ID NO: 109233 - DNA, 672 bp, Solanum lycopersicum
  CDS (1)..(672)
atgggtcgaggaaagatagagataaagaggattgaaaacaacacaaatcggcaggtgacgttctgcaagagaagaaatggattactgaaaaaggcatatgaactttcagttctatgtgatgctgagattgctctcattgttttctctactcgtggtcgactctatgaatactctaacaacaatgtaaaggcaactatagaacgatacaaaaaggcaacagcagaaacgtctagtgcgtacactactcaagagctcaatgcacagttttaccaacaagaatcaaagaagttgcggcaacagatacaaatgatgcagaacacaaataggcatctggtgggtgaagggctgagctctttgaatgtgagggaactgaagcaattggagaacagacttgaacgaggcattacaagaattaggtccaaaaagcatgaagcaatactagctgagactgaggatttgcacaagagggaaattcaacttgaacaggaaaatgcattccttagatcaaagatagcagaaaatgagaggttgcaggaactaagcatgatgccatctggtggggaagagtataatgcatttcaacaatatttagcaagaaatatgctacagctcaacatgatggaaactgcactaccatcttatgatccattgtctcctgatcacaaaaggtaa

SEQ ID NO: 109234 - protein, 223 aa, Solanum lycopersicum
MGRGKIEIKRIENNTNRQVTFCKRRNGLLKKAYELSVLCDAEIALIVFSTRGRLYEYSNNNVKATIERYKKATAETSSAYTTQELNAQFYQQESKKLRQQIQMMQNTNRHLVGEGLSSLNVRELKQLENRLERGITRIRSKKHEAILAETEDLHKREIQLEQENAFLRSKIAENERLQELSMMPSGGEEYNAFQQYLARNMLQLNMMETALPSYDPLSPDHKR

SEQ ID NO: 109235 - DNA, 810 bp, Solanum lycopersicum
  CDS (1)..(810)
atggtttttcctattaatcaggaattacttgtcgatgagtcgtcttctcagttgagaaaaacaagtggaggaactggtggaggaggtagagggaagattgaaattaaaaggatcgaaaatacgacaaatcgacaagttacgttctgcaagcgtagaaatgggctattgaaaaaagcttatgaactttctgtcttgtgcgacgctgaagtttcactaattgtattttccagccgcggccgtctctatgaatatgccaataacagtgttagggcaactattgataggtacaagaaacaccatgctgattccactagtactggatctgtttctgaagctaacactcagtactaccagcaagaagcatccaaactgcgacgacaaattcgagatatacagacttataacaggcaaatagttggagaggcattgggcagtttaagccctagagacctcaagaatttggaagggaaacttgaaaaggccattggtagagtccgttccaaaaagaatgaattgcttttctcagaaatagagctcatgcaaaagagggagattgagctgcagaacgccaacatgtatctacgcgcaaagatagcagaggtagagagagcacaagagcaaatgaacttgatgcctggaggcggaggcggaggcggaggcggaggaggaggaggatctgatcatcaataccatcatcagccaaattacgaagatgctcgcaataactccctgcctgtaaatctcctggaaccaaatcctcattactctcgtcgcgacaatggtgaccaaactcctctccagcttgtctga

SEQ ID NO: 109236 - protein, 269 aa, Solanum lycopersicum
MVFPINQELLVDESSSQLRKTSGGTGGGGRGKIEIKRIENTTNRQVTFCKRRNGLLKKAYELSVLCDAEVSLIVFSSRGRLYEYANNSVRATIDRYKKHHADSTSTGSVSEANTQYYQQEASKLRRQIRDIQTYNRQIVGEALGSLSPRDLKNLEGKLEKAIGRVRSKKNELLFSEIELMQKREIELQNANMYLRAKIAEVERAQEQMNLMPGGGGGGGGGGGGGSDHQYHHQPNYEDARNNSLPVNLLEPNPHYSRRDNGDQTPLQLV

SEQ ID NO: 109237 - DNA, 672 bp, Gossypium hirsutum
  CDS (1)..(672)
atgggaagaggaaaaatagagataaagaggatcgaaaacacaacaaatcgtcaggttaccttttgcaaacgcaggaatggcctgctgaagaaagcttacgaactgtcagtcctgtgtgatgctgaagttgctctcattgtcttctccagtcgaggccgtctgtatgagtactccaacaacaacataagatcaacaatagacaggtacaagaaggcttgctcagatacttctaacacaaacactgttactgaaatcaatgctcagtattatcaacaagaatcagccaagttgagacagcagattcaaatgttacagaattctaacaggcacctaatgggagattccttgagttccttaactgtgaaagagttaaagcaggtagaaaacaggcttgaaagaggaattactaggatcaggtccaagaagcacgaaatgctgctagctgaaatagagtttttgcagaaaagggaaatcgaattggaaaatgaaagtgtttgtctccgaaccaagattgcagaaatagagaggcttcagcaggcaaacatggtgactggacctgagcttaatgctattcaagctttagcctctcgcaatttctttagccccaatgtcattgagcatccatctgcttactcccatccctctgacaagaagattctccatcttgggtag

SEQ ID NO: 109238 - protein, 223 aa, Gossypium hirsutum
MGRGKIEIKRIENTTNRQVTFCKRRNGLLKKAYELSVLCDAEVALIVFSSRGRLYEYSNNNIRSTIDRYKKACSDTSNTNTVTEINAQYYQQESAKLRQQIQMLQNSNRHLMGDSLSSLTVKELKQVENRLERGITRIRSKKHEMLLAEIEFLQKREIELENESVCLRTKIAEIERLQQANMVTGPELNAIQALASRNFFSPNVIEHPSAYSHPSDKKILHLG

SEQ ID NO: 109239 - DNA, 711 bp, Gossypium hirsutum
  CDS (1)..(711)
atgggaagaggtagggttgaacttaagaggattgaaaacaagatcaacaggcaagtcacttttgcaaagagaagaaatggtcttttgaagaaagcttatgagctttccgttctttgtgatgctgaagttgctctcatcatcttctccaatagaggaaagttgtacgaattttgcagcagctcaagcatgatcaaaatattggagaggtaccaaaaatgcaactatggagctcctgagccaaatgtgtcatcgagggaggctgctttggaattaagcagtcggcaggaatatttgaagcttaaagcacgttacgatgccttacaaaggtcccaaaggaatttactgggagaagatttgggacctttgagcagcaaggaactcgagtcacttgagaaacagcttgattcatcattgaagctaattagatcgacgcggacccaatacatgcttgatcagctcaatgatcttcaaagaaaggaacatcttcttaatgaagccaataggaccctaaaacaaaggttggtggaagggtatcaagtaaattcgttacaattgaatccaaatgcaacggaagacgtcggctatggccgtcaacaggttcatcatcagcctcatggcgatgccttcttccatccattggattgtgagccgactttacaaatcggatatcagcatgatccaatgtcagtggtgactgcagggccagtgtga

SEQ ID NO: 109240 - protein, 236 aa, Gossypium hirsutum
MGRGRVELKRIENKINRQVTFAKRRNGLLKKAYELSVLCDAEVALIIFSNRGKLYEFCSSSSMIKILERYQKCNYGAPEPNVSSREAALELSSRQEYLKLKARYDALQRSQRNLLGEDLGPLSSKELESLEKQLDSSLKLIRSTRTQYMLDQLNDLQRKEHLLNEANRTLKQRLVEGYQVNSLQLNPNATEDVGYGRQQVHHQPHGDAFFHPLDCEPTLQIGYQHDPMSVVTAGPV

SEQ ID NO: 109241 - DNA, 741 bp, Daucus carota subsp
  CDS (1)..(741)
atgggaagaggcaaggtggagctgaagagaattgaaaacaagataaatcggcaagttacctttgccaaaagaaggaatggactcctcaagaaggcttatgagctctctgttctatgtgatgctgaagttgctcttatcatcttctccaatcgtggcaaactctatgaattctgcagcacctccagtatgaataagacgctggggagatatcatagatgcagttatggggcacttgagaccgggcaaactgacagggatacacagagtagctaccaggagtatataaagcttaaagcaaaggtcgaggccctgcaacaatctcaaaggcatctccttggagaagaactgggacagttgggcacaaaggagcttgaggagctggagaggcaacttgattcaaccttgaggcaagtcaggtccactaagactcagtatatgcttgaccaactttcagatcttcaacaaaaggagcaagaactagttgaaatcaataaagctttaagaaacaagctggaagagaatgatgtaagaattcaatctcaatgggaagctgcagaacgcaacaatgttgcatatagaagccatccagctgaacaccctcctgatcacggagttttcgagtctctggaatgcaacaatacaatgcacatgggctacaattcagcaatgaatgatcatcaaatggcttctgcaacaccgacacagaatgccagtggagtcattccagggtggatgctctga

SEQ ID NO: 109242 - protein, 246 aa, Daucus carota subsp
MGRGKVELKRIENKINRQVTFAKRRNGLLKKAYELSVLCDAEVALIIFSNRGKLYEFCSTSSMNKTLGRYHRCSYGALETGQTDRDTQSSYQEYIKLKAKVEALQQSQRHLLGEELGQLGTKELEELERQLDSTLRQVRSTKTQYMLDQLSDLQQKEQELVEINKALRNKLEENDVRIQSQWEAAERNNVAYRSHPAEHPPDHGVFESLECNNTMHMGYNSAMNDHQMASATPTQNASGVIPGWML

SEQ ID NO: 109243 - DNA, 768 bp, Daucus carota subsp
  CDS (1)..(768)
atgtcatttgtggatgatcaatctggggatctctcactacatgagagaaaatcagggagaggaaagattgagatcaagcggatcgagaacacaaccaaccgtcaagttactttctgcaaacgccgcaatggtctgctcaagaaggcctatgagctctctgttctttgtgatgctgaagttgcactgattgttttctccaacagaggccgcctttacgagtatgcgaacaacagtgttagaggaacaattgaaaggtacaaaaaggccaactcggatacccccaacacggctactgtttctgaagccaatactcagtattaccagaaagaagctgcaaggctgcgccagcaaatttccaacctgcaaaacagtaacaggcatctgatgggcgaagcgctgggggctgtgccagcaaaggaacttaaaggcctggaaactaaattgcagaatggacttagcagagtccgctccaagaagaatgaacttctctttgctgaaatcgaattcatgcggaagagggaaattgacttgcataacaataatcagtaccttagagcaaagatttctgagaatgagagagcacagcagcagatgagtttgatgccaggtgcatctgggagttctgagcagtatcgtgatgtaggacaacctcatgagtcttttgatgcgcggaactacctccaagtcaatggcctccagcccaacaatgctaattactcgtctcaccaggaccaccaaactcaacatgttcctctccagttagtataa

SEQ ID NO: 109244 - protein, 255 aa, Daucus carota subsp
MSFVDDQSGDLSLHERKSGRGKIEIKRIENTTNRQVTFCKRRNGLLKKAYELSVLCDAEVALIVFSNRGRLYEYANNSVRGTIERYKKANSDTPNTATVSEANTQYYQKEAARLRQQISNLQNSNRHLMGEALGAVPAKELKGLETKLQNGLSRVRSKKNELLFAEIEFMRKREIDLHNNNQYLRAKISENERAQQQMSLMPGASGSSEQYRDVGQPHESFDARNYLQVNGLQPNNANYSSHQDHQTQHVPLQLV

SEQ ID NO: 109245 - DNA, 672 bp, Daucus carota subsp
  CDS (1)..(672)
atggcaagggggaaaatacagatcaagaagatagagaacgcaacaaacaggcaagtgacgtactcgaaacgaagaaacgggttgttcaagaaggctcatgaactcagtgttctgtgtgatgctaaggtttcgattattatggtttcctccactaataagcttcatgaattcatcacccctaacctctcgcaaaaacagttgtatgatcagtaccagaaggctaaaccttgtgatctctggagtaaccactaccaggctatgcaggaacagctgaggaagctgagagaggtgaataggaatcttaggaatgagattagccacaggaagggcgaaagtttgaatggagtgtcgcatgaggaattatacatcctggagcagaagatgcaagaagcagttgacatcactcgtgcacagaagatgaaaacaattactaaccagattgagaagtccaagaagaaggtcaggaatggggaacaagttcaaagaactctcctgcaagatctcgagctatttaaagaagaggatcctcattacggtttagttgacaatggaggggattatgagactgttttcggatgttcaaatgcatatcctgggcttctagctttaagattgcagtctaatcactacaattttcatggcggagcaggatcagacctcacctttgcttaa

SEQ ID NO: 109246 - protein, 223 aa, Daucus carota subsp
MARGKIQIKKIENATNRQVTYSKRRNGLFKKAHELSVLCDAKVSIIMVSSTNKLHEFITPNLSQKQLYDQYQKAKPCDLWSNHYQAMQEQLRKLREVNRNLRNEISHRKGESLNGVSHEELYILEQKMQEAVDITRAQKMKTITNQIEKSKKKVRNGEQVQRTLLQDLELFKEEDPHYGLVDNGGDYETVFGCSNAYPGLLALRLQSNHYNFHGGAGSDLTFA

SEQ ID NO: 109247 - DNA, 651 bp, Daucus carota subsp
  CDS (1)..(651)
atggggagagggaagatagagatcaagaggatagagaactcgaacaacaggcaggtgacttactccaagagaaggaatgggttgatcaagaaagctaaggagattactgttctttgtgaggctgctgtctctgttgttatcttttcttctccttccaagctctatgagtattgcagcccctccacaagcataactgaaatgttggatcggtatcaccagcactctggacagaggttgtgggatcctgaacatgaggctctcagcaatgaaattaagagaattaaggaagagaatgagaagatgcaaattgatctcaggcacttgaatgcagaagacatctcttctttgaatatcaaagaactcatgactattgaaaatgacctcgagaatgggctgatgaatattggcgaaaaacggagggagtcgtataagaggatgcagaaagatgggcaacgtctggaggaggagaatatgcagctccgatacgtctatcaacaacagatggaagctatggctggcaaagtgcgagacatcgaaaatgaatttaatcatctgaaagtgaatgatcagtcgtatgaagctcagatgccctttgccttccgcttgcagcctaatcagccaaatctgcataaccagatgcttctggactaa

SEQ ID NO: 109248 - protein, 216 aa, Daucus carota subsp
MGRGKIEIKRIENSNNRQVTYSKRRNGLIKKAKEITVLCEAAVSVVIFSSPSKLYEYCSPSTSITEMLDRYHQHSGQRLWDPEHEALSNEIKRIKEENEKMQIDLRHLNAEDISSLNIKELMTIENDLENGLMNIGEKRRESYKRMQKDGQRLEEENMQLRYVYQQQMEAMAGKVRDIENEFNHLKVNDQSYEAQMPFAFRLQPNQPNLHNQMLLD

SEQ ID NO: 109249 - DNA, 729 bp, Daucus carota subsp
  CDS (1)..(729)
atggggagagggaaggttcaattgaagagaatagagaacaagatcaacagacaggtgacgttttctaagaggagaggtggcttgttgaagaaagctcatgagatctcagttctgtgtgatgctgaggttgcccttattgtcttctccaacaaagggaagctctttgagtactccaccgactcttccatggaggagatcctggagcggtatgaaagatactcttatgccgagaggcaggttattgcaaatgatcctgaatcaactggaaactggactctcgagtacacgaaactgaaggctagaattgatctcttacaaagagaccataggcactatatgggagaggatctggattccttaactctgaaagagattcagaatttggagcagcagcttgacactgctctgaaacacattcggtcccgaaagaaccaactcattttcgagtccatctctgatcttcagaaaaaggagaaggctatacaagaggaaaatggcaaattaacgaagaagatcaaggaaagggagaagacaatggtccagcaggctcagtgggagaagcaaaatccatctccaaatttgtcaacatttctcatgcctcaggaaaatccctttcttaacatcggtggcactttccagggggaatcatcacaagggatgacgaggaatgacctagatcttactcttgaaccaaatcactatccctgcaacctcagatgtttcgcttga

SEQ ID NO: 109250 - protein, 242 aa, Daucus carota subsp
MGRGKVQLKRIENKINRQVTFSKRRGGLLKKAHEISVLCDAEVALIVFSNKGKLFEYSTDSSMEEILERYERYSYAERQVIANDPESTGNWTLEYTKLKARIDLLQRDHRHYMGEDLDSLTLKEIQNLEQQLDTALKHIRSRKNQLIFESISDLQKKEKAIQEENGKLTKKIKEREKTMVQQAQWEKQNPSPNLSTFLMPQENPFLNIGGTFQGESSQGMTRNDLDLTLEPNHYPCNLRCFA

SEQ ID NO: 109251 - DNA, 675 bp, Cycas edentata
  CDS (1)..(675)
atgggccgaggaaaaattgagataaagaggatcgagaatactactaaccggcaagtgacgttctgtaaacgtcgaaatggtttgctgaagaaggcatacgaattatcggtgctatgtgatgcagaagtggctcttattgtcttctccagccgaggaaggctgtatgagtttgctaataacagcgtgaagagaacaatcgagaggtacaaaaagacttgcgctgacaacacgcagggaggagccatttcagagtccaattctcagtactggcaacaggaggcaggaaaactcaggcagcagattgacattctacaaaatgctaacagacacctaatgggagatgcactcacatctttaagcgtaaaggaacttaagcagcttgaaattcgactagaaagaggcctcagccgagtacgatcaaagaagaatgaaatgctgctcgaagagatcgagattatgcaaagaagggaacacatattactagccgagaatcagtttcttcgcactaagattgcggaatatgaaagcaaccagaatacaaatgtcctaatcccgggacctgaatttgatgcattgcctgcatttgattctcgaaactttcttcatgcaaatctaatcgaggccgcagctcatcattacacgcagcaggaccaagcggcccttcagcttggatga

SEQ ID NO: 109252 - protein, 224 aa, Cycas edentata
MGRGKIEIKRIENTTNRQVTFCKRRNGLLKKAYELSVLCDAEVALIVFSSRGRLYEFANNSVKRTIERYKKTCADNTQGGAISESNSQYWQQEAGKLRQQIDILQNANRHLMGDALTSLSVKELKQLEIRLERGLSRVRSKKNEMLLEEIEIMQRREHILLAENQFLRTKIAEYESNQNTNVLIPGPEFDALPAFDSRNFLHANLIEAAAHHYTQQDQAALQLG

SEQ ID NO: 109253 - DNA, 705 bp, Lycopodium annotinum
  CDS (1)..(705)
atgggaagaggaaaaatagagataaagcggattgaaaactctacaagtcgtcaagtaactttctcgaagcgacgcggcggactattaaagaaggctcacgaattagccgttctgtgtgatgctcaggttgcactgatcatattttccaatactggaaagctcttcgagtatgcaagcaccagtatgaaggagattttggacagataccgcaaatatccagatggtattcaaacggggagagttatggaatatgataatgatgtaatggtacagcattggagtcgtgaagtcatgaggatgaagcaacagatagaacgctcatatcagacacaaaggcatatgatgggtgaagatcttggacttcttccattgaaagaattgcagcacttggaacagcagcttgatactggacttaatcgtgttcgagcaagaaaggatcaagttcttcgggaacagattgatagtcttcgaataaaggagcttcaatggcacgaggagaacgagattctgcgccgaaagatagctggtgcacatgggatgacagaagttgcagtgagatcattctcttcgcaaaacatagttaacccactggagacaagggaacctcccagtataggacaagtgtcggtgcctttctctttacatgtaaaccagaaaaatttgagagagaaccaaaacttgcaaacatctctgcagctggggtag

SEQ ID NO: 109254 - protein, 234 aa, Lycopodium annotinum
MGRGKIEIKRIENSTSRQVTFSKRRGGLLKKAHELAVLCDAQVALIIFSNTGKLFEYASTSMKEILDRYRKYPDGIQTGRVMEYDNDVMVQHWSREVMRMKQQIERSYQTQRHMMGEDLGLLPLKELQHLEQQLDTGLNRVRARKDQVLREQIDSLRIKELQWHEENEILRRKIAGAHGMTEVAVRSFSSQNIVNPLETREPPSIGQVSVPFSLHVNQKNLRENQNLQTSLQLG

SEQ ID NO: 109255 - DNA, 714 bp, Lycopodium annotinum
  CDS (1)..(714)
atggggcgcggtaagatagaaatcaagaggatagagaatgcaacatgtcggcaggtgaccttctcaaaacggaggagcgggctgttaaagaaagctcatgagctgtcagtactgtgtgatgcgcaagttgcagtaattatattttcgagcacagggaaacttttccaatttgcgagcacaagaatgaaagagatcttggaaaggtatgagagaaattctgatccattgcagatagatgcagtcattcctcgtgaccttgagtactggagtcgagaggctgcaaaagcaaaggatgagttggatcgatgccatcagaaaaacaggcatatgctaggtgaagacctttcagctctgaacctaaatgaattggaggaactcgaacaacagctcgatagtggattgaggcgtgtacgttgcaggaaggatcaggttctgcgtgaccgaatcgaggagcttacgaaacaggaatctttcttgcgggaggaaaatcgaatgttgcgcagcaagattgctgtgccgaaggagagtacagaaccgatattagatgagatgaacatggagacaagggaacctcctagtatggctatcgtagaggaggagctctcacttaagctaaatagcaagacatggccagacatccatttttcattacaattgggtcagtaccaaccgcctcgaactgagacgcctactgcaaatcatcggcctaattga

SEQ ID NO: 109256 - protein, 237 aa, Lycopodium annotinum
MGRGKIEIKRIENATCRQVTFSKRRSGLLKKAHELSVLCDAQVAVIIFSSTGKLFQFASTRMKEILERYERNSDPLQIDAVIPRDLEYWSREAAKAKDELDRCHQKNRHMLGEDLSALNLNELEELEQQLDSGLRRVRCRKDQVLRDRIEELTKQESFLREENRMLRSKIAVPKESTEPILDEMNMETREPPSMAIVEEELSLKLNSKTWPDIHFSLQLGQYQPPRTETPTANHRPN

SEQ ID NO: 109257 - DNA, 696 bp, Lycopodium annotinum
  CDS (1)..(696)
atgggccgggggaagatagaaatcaagaggatcgagaatgcgactagtcgacaagtgacattttccaaacggcgagggggactgctgaagaaggctcacgagctttcggtcctgtgcgatgcgcaggttgctctcattattttctctagcacggggaagctgtttgagtatgctagccccagtatgaaggagatactggatagatatggcaagtatcccgagggggttcaaaccggaaccgtcacagatcctaataatgatgtaatgctacagtacttgaatcgtgaggttataaggatgaagcagcagatagaacgaacccatcaaacacagaggcatatgatgggtgaagatcttgccattcttcccttgaaagatttgcagcaactagaggaacaacttgatattggattgcgtcgtatacgtgccagaaaggatcagcttcttgttgaacagcttgaagaacttcatcgaaaggaacggcactggctcgaggaaaatgaagccttgcgaaggaagcttgcgggcggacaagcattatcaggacctgtgcctagtccccttagcattgtcaaccccctggagacaagggaacctccatctttaggaactgtatctcttcctttctctgtgcagttcaaccagcaaaatatgcaagacactccaaatttgcagacatcactacagttggggtag

SEQ ID NO: 109258 - protein, 231 aa, Lycopodium annotinum
MGRGKIEIKRIENATSRQVTFSKRRGGLLKKAHELSVLCDAQVALIIFSSTGKLFEYASPSMKEILDRYGKYPEGVQTGTVTDPNNDVMLQYLNREVIRMKQQIERTHQTQRHMMGEDLAILPLKDLQQLEEQLDIGLRRIRARKDQLLVEQLEELHRKERHWLEENEALRRKLAGGQALSGPVPSPLSIVNPLETREPPSLGTVSLPFSVQFNQQNMQDTPNLQTSLQLG

SEQ ID NO: 109259 - DNA, 672 bp, Vitis vinifera
  CDS (1)..(672)
atggggagaggaaagatcgagatcaagaggatcgaaaacacgaccaaccgtcaggtcacattctgcaagcgaaggaatgggcttttgaagaaggcttatgaattatcagtgctatgtgatgcagaagttgccctcatcgtcttctccagccgcggtcgagtctatgagtactcaaacaacaacataaaatcaaccatagataggtacaagaaggccagctcagatagtacaaatggaggctttaccatggagatcaatgcccaatattaccagcaagaatcagcaaagctgcgccagcaaatacagatgctgcagaattctaacaggcacttaatgggtgattccttggcttccttgactgtgaaggagctaaagcagctcgagaacaggcttgaacgaggcatcacaagaatcaggtcgaagaagcatgagttgctgttggctgagattgaatacttgcagaaaagggaaattgagctggaaaatgaaagcgtatatctccgaaccaagattgcagaagtggagaggcttcagcaagcaaacatggtatcaacacatgagttcaatgccatccaggcattagtttctcgcaatttctttcagcccaatatgattgagggtggatccacaggctacccacttcatgataagaaggtcctccatctcgggtaa

SEQ ID NO: 109260 - protein, 223 aa, Vitis vinifera
MGRGKIEIKRIENTTNRQVTFCKRRNGLLKKAYELSVLCDAEVALIVFSSRGRVYEYSNNNIKSTIDRYKKASSDSTNGGFTMEINAQYYQQESAKLRQQIQMLQNSNRHLMGDSLASLTVKELKQLENRLERGITRIRSKKHELLLAEIEYLQKREIELENESVYLRTKIAEVERLQQANMVSTHEFNAIQALVSRNFFQPNMIEGGSTGYPLHDKKVLHLG

SEQ ID NO: 109261 - DNA, 729 bp, Vitis vinifera
  CDS (1)..(729)
atggggagaggtagggttgagttgaagaggattgagaacaagatcaacaggcaagtgaccttcgctaagagaagaaatggccttctcaagaaggcgtacgaactttcggtgctctgcgacgccgaggttgctctcatcatcttctccaatagaggaaaactctacgagttctgcagtagctcgagcatgctcaaaacccttgagaggtatcagaagtgcaattatggagcaccggagacaaatgtatccacaagggaggccctggagttaagtagtcagcaggaatatttgaaacttaaagcacgttatgaagccctacaactatcccagaggaatcttcttggggaggatcttggccctttgagcacgaaggaacttgagtcactggaaaggcagcttgatgtatcactgaagcagatcaggtcaacgcgaacacagtacatgctggatcaactcaccgatcttcagagaaaggaacacatgctcaatgaagcaaacaagaccctgaagcaaaggttgttggaaggaacacaggtaaaccagctccagtggaatccaaatgcacaagacgtgggctatggtcggcaacaagctcagcctcagggcgatggcttcttccatcccttagagtgtgagcccacgttacaaatcggataccagcccgatccaataacggttgcagcagcaggccccagtgtgaataactacatgccgggatggttgccatga

SEQ ID NO: 109262 - protein, 242 aa, Vitis vinifera
MGRGRVELKRIENKINRQVTFAKRRNGLLKKAYELSVLCDAEVALIIFSNRGKLYEFCSSSSMLKTLERYQKCNYGAPETNVSTREALELSSQQEYLKLKARYEALQLSQRNLLGEDLGPLSTKELESLERQLDVSLKQIRSTRTQYMLDQLTDLQRKEHMLNEANKTLKQRLLEGTQVNQLQWNPNAQDVGYGRQQAQPQGDGFFHPLECEPTLQIGYQPDPITVAAAGPSVNNYMPGWLP

SEQ ID NO: 109263 - DNA, 735 bp, Vitis vinifera
  CDS (1)..(735)
atggggagaggaagagtggagctgaagaggatagagaacaagatcaaccgtcaagttaccttctccaaacgcagaaatggtctgctcaagaaggcctatgaactttctgtgctttgtgatgctgaggttgctctcatcatcttctctagccgcggcaagctctatgagtttggcagtgctggtactaccaaaaccctagagcggtatcaacgtgtctgctacactcctcaagacaacaatatggaatgtgaaacacagagttggtaccaagaggtgtcaaagttaaaggcaaaatatgaatctctccagcgcacccaaaggcatttgcttggagaagatcttggaccgctgagtgtcaaagaactgcaaaatcttgagaaacagcttgaaggagctctagcacaagctaggcaaaggaagacccaaatgatgatagaacaaatggaagaccttcgcaggaaggagcgacagcttggggatctaaacaaacagctcaaacttaagcttgaggccgagggacaaagtcttaaagccattcaaggttcatggaaccccagtactgcaactgctggaaacagcagcttccctgtgcatccttcccaatctaacccaatggactgcgaacccgaacccatcttgcaaattgggtaccatcactatgttccagcagaagggccgtctgtttcaaagagcatggctggtgagagcaacttcatccaagggtgggttctttga

SEQ ID NO: 109264 - protein, 244 aa, Vitis vinifera
MGRGRVELKRIENKINRQVTFSKRRNGLLKKAYELSVLCDAEVALIIFSSRGKLYEFGSAGTTKTLERYQRVCYTPQDNNMECETQSWYQEVSKLKAKYESLQRTQRHLLGEDLGPLSVKELQNLEKQLEGALAQARQRKTQMMIEQMEDLRRKERQLGDLNKQLKLKLEAEGQSLKAIQGSWNPSTATAGNSSFPVHPSQSNPMDCEPEPILQIGYHHYVPAEGPSVSKSMAGESNFIQGWVL

SEQ ID NO: 109265 - DNA, 735 bp, Vitis vinifera
  CDS (1)..(735)
atggggaggggaagagtggagctgaagaggatagagaacaaaataaacagacaggtgacatttgcaaagagaagaaatggacttctcaagaaagcttatgagctctcagtcctttgtgatgctgaggtcgctctcatcatcttctccacccgtggaaagctctatgagttctgcagcagctcaagcatgctcaagacactcgaaagataccaaaaatgcagttatggtgcagtggaagtcagccgaccctccaaggagcttgagcagagcagctatagggagtacttgaaactgaaatctaagtttgaggcccttcaacgaactcagagaaaccttcttggggaagacttgggtccattgaacacaaaagagcttgagcagcttgaacgtcaacttgagacatccttgaagcaagtcaggtctactaagacccaattcatgcttgatcagctttctgatcttcagaacaaggaacaagttttggttgaatctaacaaggctttgacgaggaagctggatgaaattagtgtcaaaaatcaccttcaattatcatgggaaagtggtgagcagagtatgccatacggccaccagcaagctcagtctcaggggttcttccagcctttagaatgcaatcccacattgcaaataggatataatcctgcaggctcaagccagctatctgctccgagtaatgcccaaaatgtcaatggatttatccctgggtggatgctttga

SEQ ID NO: 109266 - protein, 244 aa, Vitis vinifera
MGRGRVELKRIENKINRQVTFAKRRNGLLKKAYELSVLCDAEVALIIFSTRGKLYEFCSSSSMLKTLERYQKCSYGAVEVSRPSKELEQSSYREYLKLKSKFEALQRTQRNLLGEDLGPLNTKELEQLERQLETSLKQVRSTKTQFMLDQLSDLQNKEQVLVESNKALTRKLDEISVKNHLQLSWESGEQSMPYGHQQAQSQGFFQPLECNPTLQIGYNPAGSSQLSAPSNAQNVNGFIPGWML

SEQ ID NO: 109267 - DNA, 846 bp, Physcomitrella patens subsp
  CDS (1)..(846)
atgggtcgcggcaaaattgagatcaagaagattgagaatacaaccagcaggcaggtgacattctccaagaggcgcggtggtcttttgaagaaggcgcacgagcttgcggttctgtgtgatgccgaggtggcgctggttattttctccagcactggaaagcactttgagtttgccagttcaggcagcatgcgggacatcattgagcggtacaggaagagctcggatggtgcagtgaagcgtggcaccaatactgatttacttggtcgggaggtgattaagttaaaacagcaagtagaacgattggaaagctctcaaaggcatatgcttggtgaggatctttcagctttgaaggtatctgaccttttggagctggagcagcagcttgatcagggtgcttcacgagtgagagcaaggaagaatcaactcattttagaagagatcgaagacttgcggagaaaggagcatgaactgatgattgcaaacgaggctcttcgcaagaagattgcagacgctgaaggtgctgcggaagcagcagctcgagctaatttcccggatgctcggctagaaagccccaaaccgttcgccagcgatttctcacgagatatgagtgtgagttcgcagctggcagcatcagtctaccctcatcccaaccttctacaggcgcaaagatcacagacgtcattacagcttggatggctatctgagcaacagatccccagcacggaagaaggttgtgcaggtgaatctagcttgaaatgggatcatccgcactttcacattcagaatagactccatgcaaacatatcaccaagtgtgagaacttataagttacatgtcgatcgataa

SEQ ID NO: 109268 - protein, 281 aa, Physcomitrella patens subsp
MGRGKIEIKKIENTTSRQVTFSKRRGGLLKKAHELAVLCDAEVALVIFSSTGKHFEFASSGSMRDIIERYRKSSDGAVKRGTNTDLLGREVIKLKQQVERLESSQRHMLGEDLSALKVSDLLELEQQLDQGASRVRARKNQLILEEIEDLRRKEHELMIANEALRKKIADAEGAAEAAARANFPDARLESPKPFASDFSRDMSVSSQLAASVYPHPNLLQAQRSQTSLQLGWLSEQQIPSTEEGCAGESSLKWDHPHFHIQNRLHANISPSVRTYKLHVDR

SEQ ID NO: 109269 - DNA, 699 bp, Hordeum vulgare var
  CDS (1)..(699)
atggggagagggaggatcgagatcaagcgcatcgagaacacgacgaaccggcagctcaccttctgcaagcgccgcaacggactcctgaagaaggcgtacgagctctcggtgctctgcgacgctgaggtcgcgctcgtcgtcttttccagccgcgggcgcctctatgagtactccaacaacagcgtcaaggcaaccattgagagatacaagaaggcaactagtgacacctccagcgctggtacagtcgcagagatcaatgcccagcactaccagcaggaatctgcaaagctgaggcaacagataaccaccttgcagaactccaacaggactctaataggcgataccatggctaccatgagccacagagacctaaagcagctggagggaaggctggacaaaggcctaggaaagattagagcaagaaagaatgaattactaagcgctgaaattgagtacatgcagagaagggaaatggagctgcagaataacaacttctacttgagggaaaaagtcgctgagactgagagggggcaacagcagacgttgaacatgatgggggcggcttccacatctaatgagtacgaccaaaatatgatacaatgtgatccgagaaccttcctgcagttcaacatcatgcagcagcctcagtactacacccagcaggaggatagaaaaaccctcaactcagttgagaggtga

SEQ ID NO: 109270 - protein, 232 aa, Hordeum vulgare var
MGRGRIEIKRIENTTNRQLTFCKRRNGLLKKAYELSVLCDAEVALVVFSSRGRLYEYSNNSVKATIERYKKATSDTSSAGTVAEINAQHYQQESAKLRQQITTLQNSNRTLIGDTMATMSHRDLKQLEGRLDKGLGKIRARKNELLSAEIEYMQRREMELQNNNFYLREKVAETERGQQQTLNMMGAASTSNEYDQNMIQCDPRTFLQFNIMQQPQYYTQQEDRKTLNSVER

SEQ ID NO: 109271 - DNA, 735 bp, Gossypium hirsutum
  CDS (1)..(735)
atggtgtaccccaatgaatcccttgaagactctccccagaagaaaatggggagaggaaagatcgagatcaagcggatcgaaaacacgacgaaccgccaagttaccttttgtaagaggcgcaatggtttgctcaaaaaggcttatgagctatcggttctttgtgatgctgaggttgctttggttgccttctctagccgtggtcgactctatgagtatgctaacaatagtgttaaagcaacaattgagaggtataaaaaggcttctgattcctccaatactggatcagttgctgaagttaatgctcagttctatcagcaagaagctgacaaactccgaaatcaaatccggaatttgcagaatgcaaacaggcatatgctgggagagtccatagggggattgcctatgaaagagcttaagagcttggagagtcgtttagaaaaaggaattagcagaatccgttccaaaaagaatgagctgttgtttgctgaaattgagtatatgcagaaaagggaaattgacttgcataacaataaccaacttcttcgagccaagatagctgagaacgagaggaagcagcagagcatgaatttgatgcccggaggttcaagtgctaacttcgaggccctacattctcaaccatatgactctcggaactacttccaagtcgatgctttacaacccgccaccaattattataaccctcagctgcagcaagaccagatagctcttcactag

SEQ ID NO: 109272 - protein, 244 aa, Gossypium hirsutum
MVYPNESLEDSPQKKMGRGKIEIKRIENTTNRQVTFCKRRNGLLKKAYELSVLCDAEVALVAFSSRGRLYEYANNSVKATIERYKKASDSSNTGSVAEVNAQFYQQEADKLRNQIRNLQNANRHMLGESIGGLPMKELKSLESRLEKGISRIRSKKNELLFAEIEYMQKREIDLHNNNQLLRAKIAENERKQQSMNLMPGGSSANFEALHSQPYDSRNYFQVDALQPATNYYNPQLQQDQIALH

SEQ ID NO: 109273 - DNA, 747 bp, Helianthus annuus
  CDS (1)..(747)
atggggagaggaaaggtacaactaaggaggatagagaacaagatcaacaggcaggtaactttctcaaagaggagaggtggcttattgaagaaagcccatgaaatttcagttctttgtgatgctgaagttgctttaattgtcttctccaacaaaggaaagctctttgagttttctactgactcttgcatggacagcatcttggagcgatatgagcgatattcttacactgagagacagctagttgcagcggatgctactccgagaagttggaccctagagtacaataaactgaaatctagggctgagcttttgcaaagaaatcacaggcactatatgggtgaggatattgagtcactgagcttgaaagaaatccaaaatctggagcaacagcttgacactggtctcaagaacattcgaacaagaaagaaccaactcctgcatgaatcaatctccgagcttcagaaaaagggaaaggccatacaggagcaaaacactactttgacaaagaagatcaaggagaaggagaaagacaagacaataccacaaaacactcaatgggagatgcacaactatgtcgaccacgacacaaccttcctcatgccgcccccacctcccgctctcaatatggggggtgattacaaccatggtggtggtggtagtagtgaaggagctgatgggaggaccaatgagcttgacctaagtctgcagccaatatattcttgccacatgaggtgctttccttcctaa

SEQ ID NO: 109274 - protein, 248 aa, Helianthus annuus
MGRGKVQLRRIENKINRQVTFSKRRGGLLKKAHEISVLCDAEVALIVFSNKGKLFEFSTDSCMDSILERYERYSYTERQLVAADATPRSWTLEYNKLKSRAELLQRNHRHYMGEDIESLSLKEIQNLEQQLDTGLKNIRTRKNQLLHESISELQKKGKAIQEQNTTLTKKIKEKEKDKTIPQNTQWEMHNYVDHDTTFLMPPPPPALNMGGDYNHGGGGSSEGADGRTNELDLSLQPIYSCHMRCFPS

SEQ ID NO: 109275 - DNA, 720 bp, Phalaenopsis equestris
  CDS (1)..(720)
atggactcttcaagcatggagccgaaggagaagatggggagggggaagatagagatcaagagaatagagaacacaacaaacagacaagttaccttttgcaagcgccgtaatggcctcctgaagaaggcttatgagctctctgttctgtgtgatgctgaggttgccctaatcatcttctctacccgtggccgcctctatgaatatgcaaacaacagcgtgaaaggaaccattgaacgatacaaaaaggcaagcactgataattccaatactggatcaatatctgaagcaaattcgcagtattaccaacaagaggccacaaaactgcgtcagcaaattacaaacttacagaattccaacaggaatttgctgggtgatgctctcaccaccatgagcctgagggacctgaagcaactggaaacaagattggagaaaggcatcaacaaaataagagctaagaagaatgaactgctgcatgctgagattgactacatgcagaaaagggaaatggaactccaaactgacaacatgtttctgcgcaataagatatctgataatgaaagagcacagcagcagcatcagcatatgagcatattgccatcaacaagcacagagtatgaagtgatgcctccatttgattccagaagctttcttcatgtcaatctaatggatcccaatgaccgttattcccaccagcagcaaacagctctgcaacttgggtga

SEQ ID NO: 109276 - protein, 239 aa, Phalaenopsis equestris
MDSSSMEPKEKMGRGKIEIKRIENTTNRQVTFCKRRNGLLKKAYELSVLCDAEVALIIFSTRGRLYEYANNSVKGTIERYKKASTDNSNTGSISEANSQYYQQEATKLRQQITNLQNSNRNLLGDALTTMSLRDLKQLETRLEKGINKIRAKKNELLHAEIDYMQKREMELQTDNMFLRNKISDNERAQQQHQHMSILPSTSTEYEVMPPFDSRSFLHVNLMDPNDRYSHQQQTALQLG

SEQ ID NO: 109277 - DNA, 729 bp, Solanum lycopersicum
  CDS (1)..(729)
atgggtagagggaaagtagaattgaagagaattgagaacaaaataaatagacaagttacctttgcaaagagaagaaatggactcctaaagaaagcttatgaactttctatactttgtgatgctgaaattgctcttattattttctctagtcgtggcaagctttatgaattttgcagcaattcaagtatgtccaagacattggagagataccacagatacaattatggtacacttgaaggaacccaaacttcatcagattcacagaacaactaccaagagtatttgaagcttaaaacaagagtggaaatgttacaacagtctcaaaggcatttgctaggtgaggatttgggacaattgggcacaaaagacttggaacagcttgaacgtcaattggattcatcattgaggcaaattaggtcaacaaagacacaacacattcttgatcaacttgctgaacttcaacaaaaggaacaatctcttactgaaatgaacaaatctttgagaataaagttggaagaacttggtgttacctttcaaacatcatggcattgtggtgagcaaagtgtacaatatagacatgaacagccttctcatcatgagggattttttcaacatgtaaattgcaataatacattgcctataagttacggatacgataatgtacaacccgaaaatgcagcaccatcaacacatgatgctactggagttgtacctggatggatgctttga

SEQ ID NO: 109278 - protein, 242 aa, Solanum lycopersicum
MGRGKVELKRIENKINRQVTFAKRRNGLLKKAYELSILCDAEIALIIFSSRGKLYEFCSNSSMSKTLERYHRYNYGTLEGTQTSSDSQNNYQEYLKLKTRVEMLQQSQRHLLGEDLGQLGTKDLEQLERQLDSSLRQIRSTKTQHILDQLAELQQKEQSLTEMNKSLRIKLEELGVTFQTSWHCGEQSVQYRHEQPSHHEGFFQHVNCNNTLPISYGYDNVQPENAAPSTHDATGVVPGWML

SEQ ID NO: 109279 - DNA, 735 bp, Solanum lycopersicum
  CDS (1)..(735)
atgggaagaggaaaagttgaattaagaaaaatagagaataaaataaatagacaagtaacattttcaaagagaagaggtggattagtgaaaaaagctcatgaaatttcagttttatgtgatgctgaagttgctttaattgttttctctcaaaagggaaaaatctttgagtattcttctgattcatgtatggaacaaattcttgaacgatatgaaagatactcatatgcagagagacgtttgcttgcaaataattctgaatcaccggtgcaggaaaactggagcttggaatatactaaactcaaggctaggattgatctccttcaaaggaaccacaagcattatatgggagaagatcttgattcaatgagcttgaaggacttgcaaaacttggaacaacagcttgattctgctcttaagctaattcgatcgagaaagaaccaactcatgcatgaatcaatctctgaactgcagaaaaaggaaagagctatcctagaggagaataacatgctaaccaagaagattaaggagaaggataagatagtagaacagcaaggtgaatggcaccagcaaactaatcaagtttctacttcaacatctttcctcttacaaccacatcaatgcctaaatatgggaggtaattaccaagatgaagtagcagaagcaaggaggaataatgagcttgacctaaatcttgattcattatatccactttacaacatgaataaacatctatga

SEQ ID NO: 109280 - protein, 244 aa, Solanum lycopersicum
MGRGKVELRKIENKINRQVTFSKRRGGLVKKAHEISVLCDAEVALIVFSQKGKIFEYSSDSCMEQILERYERYSYAERRLLANNSESPVQENWSLEYTKLKARIDLLQRNHKHYMGEDLDSMSLKDLQNLEQQLDSALKLIRSRKNQLMHESISELQKKERAILEENNMLTKKIKEKDKIVEQQGEWHQQTNQVSTSTSFLLQPHQCLNMGGNYQDEVAEARRNNELDLNLDSLYPLYNMNKHL

SEQ ID NO: 109281 - DNA, 738 bp, Malus domestica
  CDS (1)..(738)
atggcctatgaaagcaaatccttgtccttggactctccccagagaaaattgggtaggggaaagatcgagattaagcggatcgaaaacacaacgaatcgtcaagtgaccttctgcaagaggcgcaatgggttgctcaagaaggcctatgaactctctgtgctctgtgatgcagaggttgctctcatagtcttctctaaccgtggccgcctctatgagtatgccaacaatagtgttaaaggaacaattgagaggtacaagaaggcaagtgcagattcttcaaatactggatcagtttctgaagctagtactcagtactaccagcaagaagctgcgaaattgcgtgcgcggatagtgaaattgcagaatgacaaccggaatatgatgggtgatgcattgaatagtatgtctgtcaaggacctgaagagcctggagaataaactggagaaagcaattagcagaatccgatccaaaaagaatgagctcttgtttgccgaaattgagtacatgcagaaaagggaactggacttgcacaacaataaccagctcctacgagcaaagatagctgagaatgagagggccagcagaacattaaatgtgatggccggaggaggaacttcaagctatgacatcctgcagtctcagccatacgactctcggaactatttccaagtgaacgcgttacaacccaatcatcagtacaatccccgccacgatcagatttctcttcaattagtatga

SEQ ID NO: 109282 - protein, 245 aa, Malus domestica
MAYESKSLSLDSPQRKLGRGKIEIKRIENTTNRQVTFCKRRNGLLKKAYELSVLCDAEVALIVFSNRGRLYEYANNSVKGTIERYKKASADSSNTGSVSEASTQYYQQEAAKLRARIVKLQNDNRNMMGDALNSMSVKDLKSLENKLEKAISRIRSKKNELLFAEIEYMQKRELDLHNNNQLLRAKIAENERASRTLNVMAGGGTSSYDILQSQPYDSRNYFQVNALQPNHQYNPRHDQISLQLV

SEQ ID NO: 109283 - DNA, 741 bp, Solanum lycopersicum
  CDS (1)..(741)
atgggtagaggaagagttgagctgaagaggatagaaaacaagataaatagacaagtcacttttgcaaagaggagaaatggattgctcaaaaaagcttatgaactatctgtgctttgtgatgctgaagttgctctactcgttttctctaatcgtggaaaactctatgaattctgcagcacaaacaatatgctcaaaacacttgataggtaccaaaagtgcagctatggaacattggaagtcaatcgatcaatcaaagataatgagcaaagcagctatagggaatacttgaaactcaaagccaaatatgagtcgctgcagcgatatcaaagacaccttcttggagatgagttggggcctctgactatagatgatcttgagcatcttgaagtccaactagatacttccctcaaacacattaggtccaccaggacacaaatgatgcttgatcagctttctgatcttcaaactaaggagaaattgtggaatgaggctaacaaggttcttgaaagaaagatggaagaaatatatgctgaaaacaacatgcaacaagcatggggtggtggtgagcaaagtctcaattatggtcagcagcaacatcctcaatctcagggtttcttccaacctctagagtgcaactcttccttgcaaattgggtacgatccaataacaacttcaagccaaataacagcagtaacaaatgcccaaaacgtgaatggtatgatacctggttggatgctgtga

SEQ ID NO: 109284 - protein, 246 aa, Solanum lycopersicum
MGRGRVELKRIENKINRQVTFAKRRNGLLKKAYELSVLCDAEVALLVFSNRGKLYEFCSTNNMLKTLDRYQKCSYGTLEVNRSIKDNEQSSYREYLKLKAKYESLQRYQRHLLGDELGPLTIDDLEHLEVQLDTSLKHIRSTRTQMMLDQLSDLQTKEKLWNEANKVLERKMEEIYAENNMQQAWGGGEQSLNYGQQQHPQSQGFFQPLECNSSLQIGYDPITTSSQITAVTNAQNVNGMIPGWML

SEQ ID NO: 109285 - DNA, 738 bp, Populus tremuloides
  CDS (1)..(738)
atggggagaggtagagtggagctgaagaggatagagaacaagataaacaggcaggtgacatttgcaaagaggagaaatgggttgttgaagaaagcttatgagttatctgtgctctgtgatgctgaggttgctctcatcatcttctctaaccgtggcaagctctacgagttttgtagcacatctaacatgctgaagaccctggaaaggtatcagaagtgcagctatggtgcagaagaagtcaataaaccagccaaggagctcgagaacagctacagggagtacttgaaagtgaaagcaagatttgagggcctacaacgaactcagaggaaccttcttggagaggacctcggacctctgaataccaaagaccttgagcagctcgagcgtcagttagagtcgtcattgaaccaagttcggtcaactaagacccagtatatgctcgaccaacttgctgatcttcaaaataaggaacatctgttgcaggaagctaacagaggtttgacaataaagctggatgaaatcagtgcaagaaatagcctccgaccatcatgggaaggtgatgatcagcaaaatatgtcctacggccaccagcatgctcagtctcaggggctattccaggctttggaatgcaatcccactttgcaaataggctacaaccctgttggttcagaccaggtgtctgcaataacacatgccacccagcaagtccatgggttcattccaggatggatgctttga

SEQ ID NO: 109286 - protein, 245 aa, Populus tremuloides
MGRGRVELKRIENKINRQVTFAKRRNGLLKKAYELSVLCDAEVALIIFSNRGKLYEFCSTSNMLKTLERYQKCSYGAEEVNKPAKELENSYREYLKVKARFEGLQRTQRNLLGEDLGPLNTKDLEQLERQLESSLNQVRSTKTQYMLDQLADLQNKEHLLQEANRGLTIKLDEISARNSLRPSWEGDDQQNMSYGHQHAQSQGLFQALECNPTLQIGYNPVGSDQVSAITHATQQVHGFIPGWML

SEQ ID NO: 109287 - DNA, 678 bp, Vitis vinifera
  CDS (1)..(678)
atgggaagagggaagatcgaaattaagcggatcgagaacaccactaatcgacaagtcaccttctgtaagcgccgcaacggcttgctcaaaaaggcctatgaattatcggtcttatgtgatgcagaagttgctctcatcgtcttctccagccgtggccgcctctatgaatatgctaacaacagtgtgagaacgacaatcgaaaggtacaaaaaagtgtgttctgattcctccaataccggatctgtttctgaagctaatgctcagttttaccagcaagaagcctccaaattgcgccgtcaaatcagggatatacagaatttgaacaggcatattctgggtgaggctcttagctctctgaactttaaggaactcaagaatctggagaccaggctggagaaaggtatcagcagaatcagatccaaaaagaatgaattgctgtttgctgaaatcgagtacatgcaaaagagggagattgagctccaaaacagtaacttatttctgcgagcacagatagctgagaatgagagagcccaacagcaaatgaacctgatgccagggtctcagtacgagagcgtgccgcagcagccatacgactctcaaaacttgctccctgttaacctcctggaccctaatcaccattactctcgccacgaccaaacagctctccaactagtgtga

SEQ ID NO: 109288 - protein, 225 aa, Vitis vinifera
MGRGKIEIKRIENTTNRQVTFCKRRNGLLKKAYELSVLCDAEVALIVFSSRGRLYEYANNSVRTTIERYKKVCSDSSNTGSVSEANAQFYQQEASKLRRQIRDIQNLNRHILGEALSSLNFKELKNLETRLEKGISRIRSKKNELLFAEIEYMQKREIELQNSNLFLRAQIAENERAQQQMNLMPGSQYESVPQQPYDSQNLLPVNLLDPNHHYSRHDQTALQLV

SEQ ID NO: 109289 - DNA, 780 bp, Poa annua
  CDS (1)..(780)
atggggcggggaagagttgagctgaagcgcatcgagaacaagatcaaccggcaggtcacattctccaagcgccgcaatggcctcctcaagaaggcgtacgagctgtccgtgctctgcgacgccgaggtcgcgctcatcatcttctccagccgcggcaagctctacgagttcggcagcgcaggcacaactaagacattagaaagataccaacattgctgttacaatgcccaagattcaaatagtgcactgtctgaaactcagagctggtaccaggaaatgtcaaagctgaaggcaaaattcgaagctttgcagcgcactcagagacatctgcttggggaggaccttggaccacttagcgtgaaagaactgcagcagctggagaaacagctagaatgttctctgtcacaagccagacagcgaaagacacagcttatggtggagcaagtggaggaacttcgcaggaaggagcgtcagctgggagaaatcaacaggcagctcaagcacaagctcgacgctgaaggcagcagcagcaacaactacagggccatgcagcagctcacctgggctgctggcaccgtcgtcgatgaaggcgccgccgcatatcacatgcagcatcaacagcagcagcaacctaatcactccgctgctatggactgtgaacccactctgcaaattgggtatccgcatcagtttgcggctcctgagcaggcagctaataatattccaaggagcagcggccaaggaggggagaacaacttcatgctggggtgggttctttga

SEQ ID NO: 109290 - protein, 259 aa, Poa annua
MGRGRVELKRIENKINRQVTFSKRRNGLLKKAYELSVLCDAEVALIIFSSRGKLYEFGSAGTTKTLERYQHCCYNAQDSNSALSETQSWYQEMSKLKAKFEALQRTQRHLLGEDLGPLSVKELQQLEKQLECSLSQARQRKTQLMVEQVEELRRKERQLGEINRQLKHKLDAEGSSSNNYRAMQQLTWAAGTVVDEGAAAYHMQHQQQQQPNHSAAMDCEPTLQIGYPHQFAAPEQAANNIPRSSGQGGENNFMLGWVL

SEQ ID NO: 109291 - DNA, 699 bp, Brassica oleracea
  CDS (1)..(699)
atggcgagagggaagatccagatcaagaggatagagaaccagaccaaccgacaagtgacgtattctaagagaagaaatggtttgttcaagaaagctcacgagcttacagttttatgtgatgctagggtttcgattatcatgttctctagctctaacaagcttcatgagttcattagccctaacaccacaacaaaggagatcatagatctgtaccaaaccgtttctgatgttgatgtttggagcgctcactatgagagaatgcaagaaaccaagaggaagctgttggagacaaatagaaagctccggactcagattaagcagaggctaggtgagtgtttggacgaacttgatattcaggagctgcgtagtcttgaggaagaaatggaaaacactttcaaactcgttcgtgagcgcaagtttaaatcccttgggaatcagatcgaaaccaccaagaaaaagaacaaaagtcaacaagacatacaaaagaatctcatacatgagctggagctaagggcagaagatcctcactatggacttgtagacaatggaggcgactacgattctgttcttgggtatcaaatcgaaggatcacgtgcttacgctcttcgttatcatcagaaccatcatcaccattaccccaaccatgcccttcatgcaccatctgcctctgacatcattaccttccaccttctcgaatga

SEQ ID NO: 109292 - protein, 232 aa, Brassica oleracea
MARGKIQIKRIENQTNRQVTYSKRRNGLFKKAHELTVLCDARVSIIMFSSSNKLHEFISPNTTTKEIIDLYQTVSDVDVWSAHYERMQETKRKLLETNRKLRTQIKQRLGECLDELDIQELRSLEEEMENTFKLVRERKFKSLGNQIETTKKKNKSQQDIQKNLIHELELRAEDPHYGLVDNGGDYDSVLGYQIEGSRAYALRYHQNHHHHYPNHALHAPSASDIITFHLLE

SEQ ID NO: 109293 - DNA, 723 bp, Pisum sativum
  CDS (1)..(723)
atgggaagaggtagggttcagttgaagaggatagaaaacaagatcaatcgtcaggttactttctctaaaaggagagctggacttctcaagaaagctcatgagatctctgttctttgtgatgctgaagttgctttgattgttttctcccacaaaggaaaactctttgaatatgccactgattcttgcatggagaagattctggagcgctatgaaaggtattcatatgcagagagacaactagttgcaaatgattctgagtcacagggaaattggaccattgagtatacgagactgaaggcaaagattgatcttttgcaaagaaactataggcattacatgggagaagatttgggtacaatgagcctcaaagagcttcagagtttggaacagcagttagatactgctctcaaactcattcgtacacgcagaaaccaactcatgtacgagtccatttcagagcttcagaaaaaggagaaagtgattcaggagcagaataacatgcttgcaaaaaagatcaaggagaaagaaaagattgcagctgagcagcaggtacaatgggagcacccaaaccaccatggagtcaatccaaattacttactacaccagcaacttccaagcttgaacatgggtggtaattaccgtgaggaagcaccagaaatggggaggaatgagcttgacttgacccttgaaccactgtatacctgccaccttggatgcttttga

SEQ ID NO: 109294 - protein, 240 aa, Pisum sativum
MGRGRVQLKRIENKINRQVTFSKRRAGLLKKAHEISVLCDAEVALIVFSHKGKLFEYATDSCMEKILERYERYSYAERQLVANDSESQGNWTIEYTRLKAKIDLLQRNYRHYMGEDLGTMSLKELQSLEQQLDTALKLIRTRRNQLMYESISELQKKEKVIQEQNNMLAKKIKEKEKIAAEQQVQWEHPNHHGVNPNYLLHQQLPSLNMGGNYREEAPEMGRNELDLTLEPLYTCHLGCF

SEQ ID NO: 109295 - DNA, 711 bp, Cucumis sativus
  CDS (1)..(711)
atgggaagaggtaagattgaaataaaaagaattgaaaatactacaaatcgtcaagtcaccttttgcaagagaagaaatggattgcttaaaaaagcttatgagctgtctgttctttgtgatgctgaagttgctctcatcgtcttctctactcgtggtcgtctctacgaatacgcaaataatagtgttagaggaacgattgagaggtacaagaaagcatttgctgattcttccaattccggattatcagttgccgaagctaatgtacagttttaccaacaagaagccaccaagttgaagagacagattagggaaattcagaactcaaacaggcatatcctgggagaagcactcagctcattgccattaaaagagctcaaaagtcttgagggcagattggagagaggtatcagcaaagttagggctaaaaagaacgaaaccttgtttgcagaaatggaattcatgcaaaaaagggaaatggaacttcagagccacaataactatctgagagcacagattgcagaacacgaaagaatacaacagcagcagcagcaacaacagcaaacgaacatgatgcaaagggcaacatatgagagtgtgggagggcaatatgatgatgagaatagaagtacttatggggctgtaggggcgcttatggattcagacagccattatgctcctcaagaccatctcactgcccttcagcttgtttaa

SEQ ID NO: 109296 - protein, 236 aa, Cucumis sativus
MGRGKIEIKRIENTTNRQVTFCKRRNGLLKKAYELSVLCDAEVALIVFSTRGRLYEYANNSVRGTIERYKKAFADSSNSGLSVAEANVQFYQQEATKLKRQIREIQNSNRHILGEALSSLPLKELKSLEGRLERGISKVRAKKNETLFAEMEFMQKREMELQSHNNYLRAQIAEHERIQQQQQQQQQTNMMQRATYESVGGQYDDENRSTYGAVGALMDSDSHYAPQDHLTALQLV

SEQ ID NO: 109297 - DNA, 648 bp, Petunia hybrida
  CDS (1)..(648)
atggttagagggaagactcagatgaggcgaattgaaaacgccacaagcaggcaagtcactttctccaagaggagaaatggtttgttaaagaaagcttttgagctttcagttctttgtgatgctgaggtttcacttattatcttctccaccagaggcaagctctatgaattctccagctcaagcatgcaagagattatcgaacgttatcggagacatagtgaagatgttcagggtgaaaaaccagctgtggaacagaataatatgcagaatttgaagcttgacgcagcaagtctgatgaagaagattgagattcttgaaacatctaaaaggaagctcttgggagaagatcttggatcttgcagtcttgaagaactacaacaaatagagaaacagttggaacggagtatcagcactatccgtgcaagaaagatggaagtctttagggaacagattgaaagattgaaaggaaatgtgaaagtcctagcaactgaaaatgcaatgctgtgggagaagtgtggtgatctggaaatgcaacaaacatcaggtggagaagacctttctatagaaggtagcgaaaaatcagatgtagagactgaattatttattggactaccagagtgcagaacaaagcgccccttacagaattga

SEQ ID NO: 109298 - protein, 215 aa, Petunia hybrida
MVRGKTQMRRIENATSRQVTFSKRRNGLLKKAFELSVLCDAEVSLIIFSTRGKLYEFSSSSMQEIIERYRRHSEDVQGEKPAVEQNNMQNLKLDAASLMKKIEILETSKRKLLGEDLGSCSLEELQQIEKQLERSISTIRARKMEVFREQIERLKGNVKVLATENAMLWEKCGDLEMQQTSGGEDLSIEGSEKSDVETELFIGLPECRTKRPLQN

SEQ ID NO: 109299 - DNA, 738 bp, Petunia hybrida
  CDS (1)..(738)
atgggaaggggaagagttgagctgaagagaatagaaaacaaaataaacaggcaagttacttttgctaagagaagaaatggacttctcaagaaagcctatgaactttctgttctctgtgatgctgaagttgcacttattatcttctctaatcggggtaaactctatgagttctgcagcacttcaagcatgacgaaaacaattgaaaaatatcaacgttgcagctatgcgactttggaagccaaccaatcagctactgataatcagaacaactaccacgagtatctgaggctaaaagctagagttgagctccttcaacgatctcagagaaaccttcttggggaagatttggggacactaagcacgaaggaccttgagcagcttgagaatcaattagagagttccttaaagcaaatcaggtcaaggaagacacaattcatgttggatcagcttgctgacctacaacaaagggagcaaatgctggcagaatcaaataaacaactccgtcaaaagctggaagaaagtgtagcaggaattccacatcgattgtgttgggaagatggattacaagccatgcaacataatagccgtctccctcaaacagagggtttctttcagcctctaggattgaattcttctaattctccacaatttggatacaatcctgcgggtacggatgtggagaatgcagcagcaaccacccacaatatgaatggatttattcatgggtggatgctctaa

SEQ ID NO: 109300 - protein, 245 aa, Petunia hybrida
MGRGRVELKRIENKINRQVTFAKRRNGLLKKAYELSVLCDAEVALIIFSNRGKLYEFCSTSSMTKTIEKYQRCSYATLEANQSATDNQNNYHEYLRLKARVELLQRSQRNLLGEDLGTLSTKDLEQLENQLESSLKQIRSRKTQFMLDQLADLQQREQMLAESNKQLRQKLEESVAGIPHRLCWEDGLQAMQHNSRLPQTEGFFQPLGLNSSNSPQFGYNPAGTDVENAAATTHNMNGFIHGWML

SEQ ID NO: 109301 - DNA, 651 bp, Petunia hybrida
  CDS (1)..(651)
atggtgagaggaaaaactcagatgaggcgtatagaaaatgccacaagtaggcaagttacattctctaaacgcagaaatgggttgttaaagaaagcttttgaactttcagtactttgtgatgctcaagttggattggtcattttttcacctagaggcaagcaatatgaattttccagttcaagcatgcaggagataatcgagcgttataaggggcatactaaagataaagttcaaactgaaaatcaagctggggaacagaatctgcagcatgagacagcaggtttgatgaagaagatagagttccttgaaacatctaaaaggaaactgctgggagaaggtttagggtcctgtacgcttgaagaactacaaaagatagagaaacagttggaacggagtgtcagcatcatcagggcgcgaaagatgcaagtgtttaaggaacagattgaaaagttaaatgaaaaggagaaagcccttgcagctgaaaatgcaatgttgagggagaagtttggaggccttcaacagagacaagcatcaagcggagagaaggaaggagaagttgtttgtacagaaggtagtgataaatcagatgtggagactgaattgtttattggaccacctgagtgcagaataaggcatcgcttacagaattaa

SEQ ID NO: 109302 - protein, 216 aa, Petunia hybrida
MVRGKTQMRRIENATSRQVTFSKRRNGLLKKAFELSVLCDAQVGLVIFSPRGKQYEFSSSSMQEIIERYKGHTKDKVQTENQAGEQNLQHETAGLMKKIEFLETSKRKLLGEGLGSCTLEELQKIEKQLERSVSIIRARKMQVFKEQIEKLNEKEKALAAENAMLREKFGGLQQRQASSGEKEGEVVCTEGSDKSDVETELFIGPPECRIRHRLQN

SEQ ID NO: 109303 - DNA, 738 bp, Petunia hybrida
  CDS (1)..(738)
atgggaaggggaagagtagagctaaagaggatagagaacaaaataaacaggcaagttacttttgctaagagaagaaatggacttctcaagaaagcttatgagctctctgtgttatgtgatgctgaagttgctcttatcattttctctagccgtggcaaactctatgaattctgcagcacttccagcatgatgaaaacacttgaaaagtatcaacagtgcagctacgcttctttggaccccatgcaatcagctaatgatactcagaacaactaccatgagtatctgaggctaaaagcaagagttgagctccttcaacgatctcagagaaatctccttggggaggatttgggctcactaaattcgaaggaacttgagcagcttgagcaccaattggattcatccttaaagcaaatcaggtctaaaaagacacaacacatgctggatcagctcgcagaccttcagcaaaaggagcaaatgctggcagaagcaaataaacaactcaggaggaagctggaagaaagtgcagctagaattccacttcgattgtcatgggacaatggaggacaaccaatgcaacacaaccgtctccctccccaaactgagggattctttcaacctctgggattgaattcttcatctccacaattcgggtatagtcccatgggtgcaaacgaggttaataatgcagtatcaactgctcaaaatatgaatggatttattccaggatggatgctgtaa

SEQ ID NO: 109304 - protein, 245 aa, Petunia hybrida
MGRGRVELKRIENKINRQVTFAKRRNGLLKKAYELSVLCDAEVALIIFSSRGKLYEFCSTSSMMKTLEKYQQCSYASLDPMQSANDTQNNYHEYLRLKARVELLQRSQRNLLGEDLGSLNSKELEQLEHQLDSSLKQIRSKKTQHMLDQLADLQQKEQMLAEANKQLRRKLEESAARIPLRLSWDNGGQPMQHNRLPPQTEGFFQPLGLNSSSPQFGYSPMGANEVNNAVSTAQNMNGFIPGWML

SEQ ID NO: 109305 - DNA, 723 bp, Petunia hybrida
  CDS (1)..(723)
atgggaagagggaaggtagaactgaagagaattgagaacaaaataaatagacaagtgacttttgcaaagagaagaaatggacttctcaagaaggcttatgaactttctgttctttgtgatgctgaggttgctcttattatcttttcaaaccgtggcaaactctatgaattttgcagcagctcaagtatgtccactacattggagaaataccatagatactgttatggtgcacttgaaggaagccaaccttcaacagattcacagaacatctaccaggagtatctgaagcttaaaacaagagtggaagctttacaacagtctcaaaggcatatgctaggagcggatttaggacaattaggcacaaaagaccttgaacagctcgaacgtcaactggactcatcattgagacaaataaggtcaacaaggacacaaaacatgcttgatcaactgtccgaacttcaagaaaagcaggaacaatctcttattgaaatgaacaaatctttgaggatgaagttagaagaacttggtgttgcctttcagacatcaatgcattcaggagaggaaagtgtacaatatagacaacagcctgctgagcctgagggattatttcaccctgtggaatgcaataattcactgcctatcaggtacaataccttgccacgggaacatgttgtaccatcagcacaagattctacaggagttctacctggatggatgctttga

SEQ ID NO: 109306 - protein, 240 aa, Petunia hybrida
MGRGKVELKRIENKINRQVTFAKRRNGLLKKAYELSVLCDAEVALIIFSNRGKLYEFCSSSSMSTTLEKYHRYCYGALEGSQPSTDSQNIYQEYLKLKTRVEALQQSQRHMLGADLGQLGTKDLEQLERQLDSSLRQIRSTRTQNMLDQLSELQEKQEQSLIEMNKSLRMKLEELGVAFQTSMHSGEESVQYRQQPAEPEGLFHPVECNNSLPIRYNTLPREHVVPSAQDSTGVLPGWML

SEQ ID NO: 109307 - DNA, 648 bp, Malus domestica
  CDS (1)..(648)
atgggacgtgggaaggttgagatcaagaggattgagaactcaagtaacaggcaggtgacctactccaagaggaggaatgggattatcaagaaggcaaaggagatcactgttctatgtgatgctaaagtatctcttatcatttattctagctctgggaagatggttgaatactgcagcccttcaactacgctgacagaaatcttggacaaataccatggacaatctgggaagaagttgtgggatgctaagcatgagaacctcagcaatgaagtggatagagtcaagaaagacaatgacagcatgcaagtagagctcaggcatctgaagggagaggatatcacatcattgaaccatgtagagctgatggccttagaggaagcacttgaaaatggccttacaagtatccgggacaagcagtccaagttcgtcgacatgatgagagacaatggaaaggcactggaagatgagaataagcgcctcacttatgagctgcaaaaacaacaggagatgaaaataaaagagaatgtgagaaacatggaaaatgggtatcatcagaggcagctggggaactacaacaacaaccagcagcagataccttttgccttccgcgtgcagcctattcagccaaatctccaggagagaatctaa

SEQ ID NO: 109308 - protein, 215 aa, Malus domestica
MGRGKVEIKRIENSSNRQVTYSKRRNGIIKKAKEITVLCDAKVSLIIYSSSGKMVEYCSPSTTLTEILDKYHGQSGKKLWDAKHENLSNEVDRVKKDNDSMQVELRHLKGEDITSLNHVELMALEEALENGLTSIRDKQSKFVDMMRDNGKALEDENKRLTYELQKQQEMKIKENVRNMENGYHQRQLGNYNNNQQQIPFAFRVQPIQPNLQERI

SEQ ID NO: 109309 - DNA, 852 bp, Physcomitrella patens
  CDS (1)..(852)
atgggtcgcggtaaaattgagattaagaagattgagaataccacaagcaggcaggtgacattctccaagaggcgtggaggtctattgaagaaggcacacgaacttgcggttctgtgcgatgccgaggtggcgctggttattttctccagcactggaaagctcttcgagtatgccagctcgggcagcatgcgagacatcatcgagcgctataagaagagcccgaatggcgcaatgaagtctggcgccagcactgatttcctgggtcgcgaggtcctgaagttacaggagcaagtggagcggttgaaaagctctcaaaggcgcatgcttggcgaggatctttctgcgcttaaggtgcctgacctgttgcagttggaacagcaactcgatctgggtgcatcaagagtgagagcaagaaagaatcaactcattctggaagagatcgagggattgcagaaaaaggaacaggaactgatggttgcaaatgaggatcttcgcaagaagattgcagatgcagaagcagtagcccgagctaatctatccgaggctcggcccgagagccctagacatttggctagaactctttcacgagacgtgagtgcgagttcgcatccggcagcaactgtgtaccctcatcctaaccttcgagacgtgcaaagatcacagacgtcgttacagctgggcatgttctcttctgagtcatatcccccaagctctagcagatggccatctgagcaacagttcccctctgcctccgaaggctgtgcaggtgaatcttccatgaaatgggaccatccgcactatcacattcagaatagactccatgcaaacattttaccaagtgtgagaatttaa

SEQ ID NO: 109310 - protein, 283 aa, Physcomitrella patens
MGRGKIEIKKIENTTSRQVTFSKRRGGLLKKAHELAVLCDAEVALVIFSSTGKLFEYASSGSMRDIIERYKKSPNGAMKSGASTDFLGREVLKLQEQVERLKSSQRRMLGEDLSALKVPDLLQLEQQLDLGASRVRARKNQLILEEIEGLQKKEQELMVANEDLRKKIADAEAVARANLSEARPESPRHLARTLSRDVSASSHPAATVYPHPNLRDVQRSQTSLQLGMFSSESYPPSSSRWPSEQQFPSASEGCAGESSMKWDHPHYHIQNRLHANILPSVRI

SEQ ID NO: 109311 - DNA, 855 bp, Physcomitrella patens
  CDS (1)..(855)
atgggtcgggggaaaattgagattaagaagattgagaatactacgagcaggcaggtgacgttctccaagaggcgaggagggcttctgaagaaagcgcacgagcttgcggttctgtgcgatgcggaagtggcacttgttattttctccagcaccgggaagctctttgagtatgccagctcaggcagcattcgagacatcatcgaccggtacaagaagggctcggatggaatgcaaaatggcgccagaaatgatttcatgggttgtgaagtagtaaagttacgcgagcaattggagcaactaaaagcctctcacaggcacatgctcggtgaagatctgtcgctgcttaaggtgcctgatctattgcaactggagcaacaactagatttgggtgcctctcgagttcgagcaaggaaaaatcaacttatattggaagaggtcgagtcattgcggagaaaggagcacgagctgctaattgcaaatgaggaccttcgccagaagcttgcagatgctcaagggattgctgacgcagttacagctcgagcgaacgtgtctgaaagccctaggcccttgacgagcgctctcacacgagacatcgttatgagctcacagcagcaggaagtcactgtgcatcctcaccccaaccttcgagacgcacaaaggtcacagacgtctttacaactgggcatgttctcttctgagtcatacctcccaagctctagcagggggccatctgagcatccgattcccgttgggccagaaggttgtgcaggtgaatctgccatgagatgggagcaccctcactttcacagtcagaatagactccatgcaaacatatcaccaagtgtgagaatttag

SEQ ID NO: 109312 - protein, 284 aa, Physcomitrella patens
MGRGKIEIKKIENTTSRQVTFSKRRGGLLKKAHELAVLCDAEVALVIFSSTGKLFEYASSGSIRDIIDRYKKGSDGMQNGARNDFMGCEVVKLREQLEQLKASHRHMLGEDLSLLKVPDLLQLEQQLDLGASRVRARKNQLILEEVESLRRKEHELLIANEDLRQKLADAQGIADAVTARANVSESPRPLTSALTRDIVMSSQQQEVTVHPHPNLRDAQRSQTSLQLGMFSSESYLPSSSRGPSEHPIPVGPEGCAGESAMRWEHPHFHSQNRLHANISPSVRI

SEQ ID NO: 109313 - DNA, 813 bp, Zea mays
  CDS (1)..(813)
atggggcgcggcaaggtgcagctgaagcggatagagaacaagataaaccggcaggtgaccttctccaagcgccggaacgggctgctgaagaaggcgcacgagatctccgtcctctgcgacgccgaggtcgccgtcatcgtcttctcccccaagggcaagctctacgagtacgcctccgactcccgcatggacaaaattctagaacgttatgagcgatattcctatgctgaaaaggctcttatttcagctgaatctgaaagtgagggaaattggtgccacgaatacaggaaactgaaggccaaaattgagaccatacaaagatgccacaagcacctgatgggagaggatctagagtctttgaatccaaaagagctccaacaactagagcagcagctggagagctcactgaagcacatcagatcaagaaagagccaccttatggccgagtcaatttctgagctacagaagaaggagaggtcactgcaggaggagaacaagattctacagaaggaactttcagagaggcagaaggcggtcgctagccggcagcagcagcagcagcaggtgcagtgggaccagcagacacaggtccaggtccagacaagctcatcgtcttcttccttcatgatgaggcaggatcagcagggactgccacctccacaaaacatctgcttcccgccgttgagcatcggagagagaggcgaagaggtggctgcggcggcgcagcagcagctgcctcctccggggcaggcgcaaccacagctccgcatcgcaggtctgccgccatggatgctgagccacctcaatgcataa

SEQ ID NO: 109314 - protein, 270 aa, Zea mays
MGRGKVQLKRIENKINRQVTFSKRRNGLLKKAHEISVLCDAEVAVIVFSPKGKLYEYASDSRMDKILERYERYSYAEKALISAESESEGNWCHEYRKLKAKIETIQRCHKHLMGEDLESLNPKELQQLEQQLESSLKHIRSRKSHLMAESISELQKKERSLQEENKILQKELSERQKAVASRQQQQQQVQWDQQTQVQVQTSSSSSSFMMRQDQQGLPPPQNICFPPLSIGERGEEVAAAAQQQLPPPGQAQPQLRIAGLPPWMLSHLNA

SEQ ID NO: 109315 - DNA, 699 bp, Zea mays
  CDS (1)..(699)
atggtgcggggcaagacgcagatgaagcgaatagagaacccgaccagccgccaggtcaccttctccaagcgccgcaacggcctgctcaagaaggcgttcgagctctccgtcctctgcgacgccgaggtcgccctcgtcgtcttctccccgcgcggcaagctctacgaattcgccagcggaagtgcgcagaaaacgattgaacgttatagaacatacacaaaggataatgtcagcaacaagacagtgcagcaggatattgagcgagtaaaagctgatgcggatggcctgtcaaagagactcgaagcacttgaagcttacaaaaggaaacttttgggtgagaggttggaagactgctccattgaagagctgcacagtttggaagtcaagcttgagaagagcctgcattgcatcaggggaagaaagactgagctgctggaggagcaagtccgtaagctgaagcagaaggagatgagtttgcgcaagagcaacgaagatttgcgtgaaaagtgcaagaagcagccgcctgtgccgatggcttcggcgccgcctcgtgcgccggcagtcgacaacgtggaggacggtcaccgggagccgaaggacgacgggatggacgtggagacggagctgtacataggattgcccggcagagactaccgctcaagcaaagacaaggctgcagtggcggtcaggtcaggctag

SEQ ID NO: 109316 - protein, 232 aa, Zea mays
MVRGKTQMKRIENPTSRQVTFSKRRNGLLKKAFELSVLCDAEVALVVFSPRGKLYEFASGSAQKTIERYRTYTKDNVSNKTVQQDIERVKADADGLSKRLEALEAYKRKLLGERLEDCSIEELHSLEVKLEKSLHCIRGRKTELLEEQVRKLKQKEMSLRKSNEDLREKCKKQPPVPMASAPPRAPAVDNVEDGHREPKDDGMDVETELYIGLPGRDYRSSKDKAAVAVRSG

SEQ ID NO: 109317 - DNA, 738 bp, Eucalyptus globulus
  CDS (1)..(738)
atggggagggggagggtgcagctgaagaggatagagaacaagataaacaggcaagtgacgttctcgaagcggagatgcgggctgctgaagaaggcccacgagatctccgtcctctgcgacgccgacgtcgccctcatcgtcttctccaccaagggcaagctcttcgagtacgccaccgactgttgcatggagaggatcctcgagcgttatgagagatattcatatgcagagagccaggttctcacaaacaatgccgaaaccaatgggaactggactttggaacatgcaaaactcaaggccaggatggagattctgcagaaaaatcaaaagaatctgatgggagaagaactcgattctctaagcctcaaagagcttcagaatttggagcatcagcttgacactgctcttaagaacattcggtctagaaagattcaactcatgtgtgaatccatctctgagcttcagagaaaggataaggcgctgcaagaacaaaacaacatgctggcaaagaaggtgaaagagaaggagaaggcactggcacagcaaactcaatgggacaacccgcaagatgatggcctcacctcttcctcggttattctctctcaatctttgcagcctctcaacattgggggtccttaccatccgagtggaattgaggagggagcggccctcggtccacctcaacatcgtaatgccaccctttttccttcatggatgcttagccacctccaagaataa

SEQ ID NO: 109318 - protein, 245 aa, Eucalyptus globulus
MGRGRVQLKRIENKINRQVTFSKRRCGLLKKAHEISVLCDADVALIVFSTKGKLFEYATDCCMERILERYERYSYAESQVLTNNAETNGNWTLEHAKLKARMEILQKNQKNLMGEELDSLSLKELQNLEHQLDTALKNIRSRKIQLMCESISELQRKDKALQEQNNMLAKKVKEKEKALAQQTQWDNPQDDGLTSSSVILSQSLQPLNIGGPYHPSGIEEGAALGPPQHRNATLFPSWMLSHLQE

SEQ ID NO: 109319 - DNA, 618 bp, Eucalyptus globulus
  CDS (1)..(618)
atggggagggggagggtgcagctgaagaggatagagaacaagataaacaggcaagtgacgttctcgaagcggagatgcgggctgctgaagaaggcccacgagatctccgtcctctgcgacgccgacgtcgccctcatcgtcttctccaccaagggcaagctcttcgagtacgccaccgactgttgcatggagaggatcctcgagcgttatgagagatattcatatgcagagagccaggttctcacaaacaatgccgaaaccaatgggaactggactttggaacatgcaaaactcaaggccaggatggagattctgcagaaaaatcaaaagaatctgatgggagaagaactcgattctctaagcctcaaagagcttcagaatttggagcatcagcttgacactgctcttaagaacattcggtctagaaagattcaactcatgtgtgaatccatctctgagcttcagagaaaggataaggcgctgcaagaacaaaacaacatgctggcaaagaaggtgaaagagaaggagaaggcactggcacagcaaactcaatgggacaacccgcaagatgatggcctcacctcttcctcggggtccttaccatccgagtggaattga

SEQ ID NO: 109320 - protein, 205 aa, Eucalyptus globulus
MGRGRVQLKRIENKINRQVTFSKRRCGLLKKAHEISVLCDADVALIVFSTKGKLFEYATDCCMERILERYERYSYAESQVLTNNAETNGNWTLEHAKLKARMEILQKNQKNLMGEELDSLSLKELQNLEHQLDTALKNIRSRKIQLMCESISELQRKDKALQEQNNMLAKKVKEKEKALAQQTQWDNPQDDGLTSSSGSLPSEWN

SEQ ID NO: 109321 - DNA, 735 bp, Eucalyptus globulus
  CDS (1)..(735)
atggggagggggaggctgcagctgaagaggatagagaacaagatcaaccgacaaatcaccttctccaagaggagggcgggtctgctcaagaaggcccacgagatctccgtcctctgcgacgccgaggtcgccctcatcgtcttctccgccaagggcaagctcttcgagtactccaccgattcctgcatggagagaattctcgaacgctatgaaagatactcatatgcggagcaccaagttcttgcaagcgagacggaatcgattggtagctggactttggagcatgctaagctcaaggccagacttgaagttttacacagaaattataggcatttcatgggagaagatcttgattctttgagtctcaaggacctccaaaatttggagcagcaactggagtctgctcttaaacacataagatcgagaaagaatcagctcatgcatgaatcaatctcagtgcttcagaaaaaggatagggcattgcaggagcaaaataacctgcttacaaagaaaataaaggagaaggagagggcactagcacagcaagctcagtgggagcagcaagaccatgcccttgactcacctgttgttctaccccactacttgccatctctcgacatcaatggctcttatcaagcgagacacaacggacacgatgacggagagaacctgactcagcctcgggctggtacacttcttcctccgtggatctctgcatctcaattaaggctttga

SEQ ID NO: 109322 - protein, 244 aa, Eucalyptus globulus
MGRGRLQLKRIENKINRQITFSKRRAGLLKKAHEISVLCDAEVALIVFSAKGKLFEYSTDSCMERILERYERYSYAEHQVLASETESIGSWTLEHAKLKARLEVLHRNYRHFMGEDLDSLSLKDLQNLEQQLESALKHIRSRKNQLMHESISVLQKKDRALQEQNNLLTKKIKEKERALAQQAQWEQQDHALDSPVVLPHYLPSLDINGSYQARHNGHDDGENLTQPRAGTLLPPWISASQLRL

SEQ ID NO: 109323 - DNA, 741 bp, Hordeum vulgare
  CDS (1)..(741)
atggggagggggagggtggagctgaagcggatcgagaacaagatcaaccgccaggtcaccttcgccaagcgcaggaacggcctgctcaagaaggcctacgagctctccgtgctatgcgacgctgaggtcgcgctcatcgtcttctccaaccgcggcaagctctacgagttctgcagcacccagagcatgacaaagacactggacaagtatcaaaaatgcagttatgcaggacctgaaactactgtgcaaaacagagaaaatgagcaactgaaaaacagccgcaatgagtacctgaaactaaagacacgggttgataatttacagcgaacacaaaggaatttgcttggtgaagatcttgattcattaggcataaaagagcttgagagccttgagaagcaactcgattcgtccttgaagcacattagaacaacaaggacacaacatatggttgaccaattgacagaactccagagaagggaacaaatgttttcggaggcaaataaatgtcttcgaataaaattggaggagagcaaccaggttcatgggcagcagctctgggagcacaacaacaacgtactgagctatgaacgtcagccggaagtgcagccgcagatgcacggcggcaatggattcttccacccccttgatgctgctggtgaacccactcttcacatagggtaccctcctgagtccctgaatagctcatgcatgactactttcatgcccccgtggttgccttga

SEQ ID NO: 109324 - protein, 246 aa, Hordeum vulgare
MGRGRVELKRIENKINRQVTFAKRRNGLLKKAYELSVLCDAEVALIVFSNRGKLYEFCSTQSMTKTLDKYQKCSYAGPETTVQNRENEQLKNSRNEYLKLKTRVDNLQRTQRNLLGEDLDSLGIKELESLEKQLDSSLKHIRTTRTQHMVDQLTELQRREQMFSEANKCLRIKLEESNQVHGQQLWEHNNNVLSYERQPEVQPQMHGGNGFFHPLDAAGEPTLHIGYPPESLNSSCMTTFMPPWLP

SEQ ID NO: 109325 - DNA, 831 bp, Hordeum vulgare
  CDS (1)..(831)
atgggtcgcggtaaggtgcagctgaagcggatagagaacaagataaatcggcaggtgaccttctccaagcgccgcaacgggctcctgaagaaggcgcacgagatctccgtcctctgtgacgcagaggtcgccgtcatcgtcttctcccccaaaggcaagctctatgagtacgccaccgactccagcatggacaaaattcttgaacgttatgagcgctactcttatgctgaaaaggctcttatttcagctgaatctgaaagtgaggggaattggtgtcatgaatacaggaaacttaaggcgaagattgagaccatacagaagtgtcacaagcacctcatgggagaggatctggattctctgaacctcaaagaactccaacaactggagcagcagctggagagttcattgaagcacatcagatcgagaaagagccatcttatgatggagtccatttctgagctacagaagaaggagaggtcactgcaggaggagaacaaggccctacagaaggaactggtggagaggcagaaggcggccagcaggcagcagcagctgcagcagcagcaacaacaacaacaaatgcaatgggagcaccaagcccagacccaaacccatacccatactcaaaaccagccccaagcccagactagctcatcatcttcctctttcatgatgagggatcagcaggcccatgcccctcaacagaacatttgtagctacccaccggtgacgatgggtggggaggcgacggcggcggcggcggcgccggagcagcaggctcagcttcgcatatgcctaccgccatggatgctgagccacctcaacgcttga

SEQ ID NO: 109326 - protein, 276 aa, Hordeum vulgare
MGRGKVQLKRIENKINRQVTFSKRRNGLLKKAHEISVLCDAEVAVIVFSPKGKLYEYATDSSMDKILERYERYSYAEKALISAESESEGNWCHEYRKLKAKIETIQKCHKHLMGEDLDSLNLKELQQLEQQLESSLKHIRSRKSHLMMESISELQKKERSLQEENKALQKELVERQKAASRQQQLQQQQQQQQMQWEHQAQTQTHTHTQNQPQAQTSSSSSSFMMRDQQAHAPQQNICSYPPVTMGGEATAAAAAPEQQAQLRICLPPWMLSHLNA

SEQ ID NO: 109327 - DNA, 753 bp, Hordeum vulgare
  CDS (1)..(753)
atgggtcgtgggaaggtggagatgaggcggatcgagaacaagataagccggcaggtgaccttcgccaagcgccggaacgggctgctcaagaaggcctacgagctctcgctgctctgcgacgccgaggtcgccctcatcatcttctccggccgcggccgcctcttcgagttctcaagctcctcatgcatgtacaaaactcttgagaggtaccgcacctgcaactccaactcacaggaagcaacacctcaggtagaaaatgagattaattaccaggaatatttaaagctgaagacaagagttgaatttcttcaaagttcacaaagaaatattctcggtgaggatctgggcccacttagcatgaaggagcttgaccagatagagaaccaaatagatgcatccctccagcatatcaggtcaaaaaagaatcaagtattactcgatcagctatttgaactgaaaagtaaggagcaagaattgcaggatgaaaacaaagacttgaggaagaagctgcaagacaccaccaccaccagctgcggagagaatgcggtccatatgtcctggcaagacggtgggcagagtagctccagaaggcatgccactgagccttacccgggagtactccaacacccggagcatgatacctccatgcaaattgggtatcctcaggcctacatggaccagctgaacaacagagatcacatggcttcacagcgccctggtggacatcctggatcgtctgcaggttggatatga

SEQ ID NO: 109328 - protein, 250 aa, Hordeum vulgare
MGRGKVEMRRIENKISRQVTFAKRRNGLLKKAYELSLLCDAEVALIIFSGRGRLFEFSSSSCMYKTLERYRTCNSNSQEATPQVENEINYQEYLKLKTRVEFLQSSQRNILGEDLGPLSMKELDQIENQIDASLQHIRSKKNQVLLDQLFELKSKEQELQDENKDLRKKLQDTTTTSCGENAVHMSWQDGGQSSSRRHATEPYPGVLQHPEHDTSMQIGYPQAYMDQLNNRDHMASQRPGGHPGSSAGWI

SEQ ID NO: 109329 - DNA, 735 bp, Hordeum vulgare
  CDS (1)..(735)
atggggcgcaggaaggtgcagctgaagcggatcgagaacaagatcaaccgccaggtcaccttctccaagcgccgctcggggctgctcaagaaggcgcacgagatctccgtgctctacgacgccgaggtcggcctcatcatcttctccaccaagggaaagctctacgagttctccaccgagtcatgtatggacaaaattcttgaacggtatgagcgctactcttatgcagaaaaggttctcgtttcaagtgaatctgaaattcagggaaactggtgtcacgaatataggaaactgaaggcgaaggttgagacaatacagaaatgtcaaaagcatctcatgggagaggatcttgaatctttgaatctcaaggagttgcagcaactggagcagcagctggaaagctcactgaaacatatcagagccaggaagaaccaacttatgcacgaatccatttctgagcttcagaagaaggagaggtcactgcaggaggagaataaagttctccagaaggaacttgtggagaagcagaaggcccaggcggcgcagcaagatcaaactcagcctcaaaccagctcttcttcttcttccttcatgatgagggatgctccccctgtcgcagataccagcaatcacccagcggcggcaggcgagagggcagaggatgtggcagtgcagcctcaggtcccactccggacggcgcttccactgtggatggtgagccacatcaacggctga

SEQ ID NO: 109330 - protein, 244 aa, Hordeum vulgare
MGRRKVQLKRIENKINRQVTFSKRRSGLLKKAHEISVLYDAEVGLIIFSTKGKLYEFSTESCMDKILERYERYSYAEKVLVSSESEIQGNWCHEYRKLKAKVETIQKCQKHLMGEDLESLNLKELQQLEQQLESSLKHIRARKNQLMHESISELQKKERSLQEENKVLQKELVEKQKAQAAQQDQTQPQTSSSSSSFMMRDAPPVADTSNHPAAAGERAEDVAVQPQVPLRTALPLWMVSHING

SEQ ID NO: 109331 - DNA, 798 bp, Hordeum vulgare
  CDS (1)..(798)
atggggcgcgggccggtgcagctgcggcggatcgagaacaagataaaccggcaggtgaccttctccaagcggcgcagcgggctgcttaagaaggcgcacgagatctccgtgctctgcgacgccgaggtcgcgctcatcgtcttctccaccaagggcaagctatacgagtactccagccaggacagtagcatggatgtgattcttgaacgttaccaacgttactcatttgaagaaagagctgtactggatccaagtactggagaccaggcaaattggggagacgaatatggaagtttgaagataaaactcgatgcactccagaagagtcaaaggcaactcttaggtgaacaattggacccactcaccacaaaagaacttcaacagttggaacaacagcttgatagttctttgaagcacataaggtcaagaaagaatcaacttctctttgagtcaatatctgagcttcaaaagaaggagaaatcattaaaagatcagaatggcgtcctgcagaagcacctcgtagagacagaaaaggagaaaaataacgttttgtcaaatattcatcaccgggagcagttgaatgaagcaacaaatattcatcaccaggagcagctgagtggagcaacaacaagctcaccgtcacctacaccaccgacggcccaagattccatggcacctccaaatattgggccatatcaatctagaggaggaggggatccagaacctcagccgtcaccagcacaagcaaacaacagcaatctgccaccgtggatgctccgcaccatcggcaacagatga

SEQ ID NO: 109332 - protein, 265 aa, Hordeum vulgare
MGRGPVQLRRIENKINRQVTFSKRRSGLLKKAHEISVLCDAEVALIVFSTKGKLYEYSSQDSSMDVILERYQRYSFEERAVLDPSTGDQANWGDEYGSLKIKLDALQKSQRQLLGEQLDPLTTKELQQLEQQLDSSLKHIRSRKNQLLFESISELQKKEKSLKDQNGVLQKHLVETEKEKNNVLSNIHHREQLNEATNIHHQEQLSGATTSSPSPTPPTAQDSMAPPNIGPYQSRGGGDPEPQPSPAQANNSNLPPWMLRTIGNR

SEQ ID NO: 109333 - DNA, 684 bp, Hordeum vulgare
  CDS (1)..(684)
atggcggggaagagggagaggattgcgatacggaggatcgagaatctggcggccaggcaggtcaccttctccaagcgccggaggggcctcttcaagaaggccgaggagctctccatcctctgcgacgccgaggtcggcctcgccgtcttctccgccaccggcaagctcttccagttcgccagctccagcatgaaccagatcattgatcggtataactctcattccaagatacttaagaaagtagacgagccatctcagctggatttgcatgaggacagtaattgtgcaagactaagggacgagcttgcagaagcaagcctctggctccagcagatgagaggggaggaactccagagcctgaacgtccagcagcttcaggctctagagaagagcctcgagtccgggctcagctccgttctgaaaaccaagagccagaagatcatggaccagatcagcgagctagaaaaaaagagggtgcaactgatagaggagaacgcaaggctaaaggagcaagcgtccaagatggagatgcaggtcgccgctgatccactggtggtggtgtacgatgaagggcagtcatctgagtctgtcaccaacacgtcgtatccacgccctcccctcgacaccgaggacagctccgacacatctctcaggctcggattatcactcttcaactcgaagtga

SEQ ID NO: 109334 - protein, 227 aa, Hordeum vulgare
MAGKRERIAIRRIENLAARQVTFSKRRRGLFKKAEELSILCDAEVGLAVFSATGKLFQFASSSMNQIIDRYNSHSKILKKVDEPSQLDLHEDSNCARLRDELAEASLWLQQMRGEELQSLNVQQLQALEKSLESGLSSVLKTKSQKIMDQISELEKKRVQLIEENARLKEQASKMEMQVAADPLVVVYDEGQSSESVTNTSYPRPPLDTEDSSDTSLRLGLSLFNSK

SEQ ID NO: 109335 - DNA, 690 bp, Hordeum vulgare
  CDS (1)..(690)
atggcggggaagagggagaggattgcgatacggaggatcgagaatctggcggccaggcaggtcaccttctccaagcgccggaggggcctcttcaagaaggccgaggagctctccatcctctgcgacgccgaggtcggcctcgccgtcttctccgccaccggcaagctcttccagttcgccagctccagcatgaaccagatcattgatcggtataactctcattccaagatacttaagaaagtagacgagccatctcagctggatttgcatgaggacagtaattgtgcaagactaagggacgagcttgcagaagcaagcctctggctccagcagatgagaggggaggaactccagagcctgaacgtccagcagcttcaggctctagagaagagcctcgagtccgggctcagctccgttctgaaaaccaagagccagaagatcatggaccagatcagcgagctagaaaaaaagagggtgcaactgatagaggagaacgcaaggctaaaggagcaactgcaggcgtccaagatggagatgcaggtcgccgctgatccactggtggtggtgtacgatgaagggcagtcatctgagtctgtcaccaacacgtcgtatccacgccctcccctcgacaccgaggacagctccgacacatctctcaggctcggattatcactcttcaactcgaagtga

SEQ ID NO: 109336 - protein, 229 aa, Hordeum vulgare
MAGKRERIAIRRIENLAARQVTFSKRRRGLFKKAEELSILCDAEVGLAVFSATGKLFQFASSSMNQIIDRYNSHSKILKKVDEPSQLDLHEDSNCARLRDELAEASLWLQQMRGEELQSLNVQQLQALEKSLESGLSSVLKTKSQKIMDQISELEKKRVQLIEENARLKEQLQASKMEMQVAADPLVVVYDEGQSSESVTNTSYPRPPLDTEDSSDTSLRLGLSLFNSK

SEQ ID NO: 109337 - DNA, 729 bp, Betula verrucosa
  CDS (1)..(729)
atggagttccagaaccaatcgatgtcagtttctccccagagaaaattgggaaggggaaagattgaaatcaagaggatcgaaaacacaactaatcgccaagtcaccttctgcaagaggcgcaacggccttctcaaaaaggcctatgaattgtctgttctctgtgatgcggagattgccctcatcgtcttctctagccgcggccgcctttacgagtacgctaacaacagcagtgtcaaaacaacaattgagaggtacaagaaggcatgcgctgaatcctccaattctgggtctgtttctgaagctaatactcagttctaccagcaagaggctgctaaactgcgtggccaaattagaagtgtgcagaattcaaacaggcatttgttgggcgaggctttgagcgagttaaatttcaaagagctcaagaacttggagatcaaattagagaaaggaattaacaaaatcagatccaagaagaatgagctcctgttcgcagaaatagagtatatgcagaaaagggaagctgagttgcataacaataaccagattctccgagcaaagatagccgagaatgagagaaaccagcagaacttgaatgtgatgccaggagggggaaactatgagctcatgcagtctcagtcatatgattctcgaacctactttcaagtagatgcattacaaccgaatcatcactacccacgccaagaccagatccctcttcaattagtttaa

SEQ ID NO: 109338 - protein, 242 aa, Betula verrucosa
MEFQNQSMSVSPQRKLGRGKIEIKRIENTTNRQVTFCKRRNGLLKKAYELSVLCDAEIALIVFSSRGRLYEYANNSSVKTTIERYKKACAESSNSGSVSEANTQFYQQEAAKLRGQIRSVQNSNRHLLGEALSELNFKELKNLEIKLEKGINKIRSKKNELLFAEIEYMQKREAELHNNNQILRAKIAENERNQQNLNVMPGGGNYELMQSQSYDSRTYFQVDALQPNHHYPRQDQIPLQLV

SEQ ID NO: 109339 - DNA, 756 bp, Arabidopsis thaliana
  CDS (1)..(756)
atgggaagaggaagggttcagctacggcggatcgagaataagataaggagacaagtgacattttcaaagcgaaggaccggtttggtaaagaaagctcaagagatctcagtgttatgtgatgctgaagttgctttgattgttttctcccccaaaggcaaactctttgagtactctgctggttccagcatggagagaattcttgatcgatatgagaggtctgcctacgccggtcaagatattcctacaccaaatttggattcacagggagagtgctcaacagaatgttcaaagctcttgaggatgattgatgtcctgcaaagaagcctgaggcacttaagaggagaagaggtggatggtctaagtatcagagaccttcaaggtgtggagatgcaacttgatactgccctcaagaaaactcgctctagaaagaaccagctcatggtagagtccatagcacagcttcagaaaaaggagaaggaactaaaagaactgaagaaacagctaacaaagaaggtgaaagctggtgaaagggaagactttcaaacgcaaaacctcagccatgacttagcctccttggcaacaccgccatttgaatcaccccatgagcttcgccggacaatatctcctcctcctcctcctttatcttcgggggatacatcacaaagggatggagttggagaagtagctgccggaaccctaattcgaaggacgaatgcaacgttgcctcattggatgccccagctcaccggagaatag

SEQ ID NO: 109340 - protein, 251 aa, Arabidopsis thaliana
MGRGRVQLRRIENKIRRQVTFSKRRTGLVKKAQEISVLCDAEVALIVFSPKGKLFEYSAGSSMERILDRYERSAYAGQDIPTPNLDSQGECSTECSKLLRMIDVLQRSLRHLRGEEVDGLSIRDLQGVEMQLDTALKKTRSRKNQLMVESIAQLQKKEKELKELKKQLTKKVKAGEREDFQTQNLSHDLASLATPPFESPHELRRTISPPPPPLSSGDTSQRDGVGEVAAGTLIRRTNATLPHWMPQLTGE

SEQ ID NO: 109341 - DNA, 528 bp, Capsicum annuum
  CDS (1)..(528)
atgggtagagggaaagtagaattgaagagaattgataataaaataaatagacaagtgacttttgcaaagagaagaaatggactcctcaagaaagcttatgaactttctgttctttgtgatgctgaaattgctcttattattttctctagtcgtggcaagctttatgaattttgcagcagctcaagtatgtccaagacattggagagataccacaaacataattatggtgcacttgaaggaacccaaccatcagcagattcacagaacaactaccaagagtatttgaagcttaaaacaagagtggaagtgttacaacaatctcaaaggcatatgcttggagaggatttgggagaattgaacacaaaagacttggaacaacttgaacgtcaattggattcatcattgaggcaaataaggtcaactaagacacaacacatgtttgatcaacttgctgaacttcatcaaaaggaacaatctcttactgaaatgaacaaatctttgaagacaaaggtatcaatatcaccttga

SEQ ID NO: 109342 - protein, 175 aa, Capsicum annuum
MGRGKVELKRIDNKINRQVTFAKRRNGLLKKAYELSVLCDAEIALIIFSSRGKLYEFCSSSSMSKTLERYHKHNYGALEGTQPSADSQNNYQEYLKLKTRVEVLQQSQRHMLGEDLGELNTKDLEQLERQLDSSLRQIRSTKTQHMFDQLAELHQKEQSLTEMNKSLKTKVSISP

SEQ ID NO: 109343 - DNA, 738 bp, Nicotiana tabacum
  CDS (1)..(738)
atgggaagaggaagagttgaacttaagaggatagaaaataaaataaacaggcaagttacttttgcaaagagaagaaatggacttctcaaaaaagcttatgaactttcagttttatgtgatgctgaagttgctcttataatcttctctagccgtggcaaactctctgaattctgcagcacctcgagcatgatgcaaacacttgaaaagtatcaacagtgcagctacgcctctttggacccgatgcaatcagctagtgatcatactcagaacaactaccatgagtatctgaggctaaaagctagagttgagcttcttcaacgatctcagagaaatcttcttggggaggatttgggcacactaaattcgggggaacttgagcatcttgagcaccaattggattcgtccttgaagcaaatcaggtcaaggaagactcaaaacatgctggatcagctcgcagaccttcagcaaaaggagcaaatgctggctgaagcaaataaacaactcagaaggaagttggaagaaagtgcagctcgagttccacttcgattgtcatgggataatggaggacaaacaatgcaacataatcgtcaactccctccacaaactgagggattttttcaacctctgggattgaattcatctcctcaatttggatatagtcccatgggtggaaacgaggttaatgcagcagcaactgctaacaatatgaatggatttattccaggatggatgctgtaa

SEQ ID NO: 109344 - protein, 245 aa, Nicotiana tabacum
MGRGRVELKRIENKINRQVTFAKRRNGLLKKAYELSVLCDAEVALIIFSSRGKLSEFCSTSSMMQTLEKYQQCSYASLDPMQSASDHTQNNYHEYLRLKARVELLQRSQRNLLGEDLGTLNSGELEHLEHQLDSSLKQIRSRKTQNMLDQLADLQQKEQMLAEANKQLRRKLEESAARVPLRLSWDNGGQTMQHNRQLPPQTEGFFQPLGLNSSPQFGYSPMGGNEVNAAATANNMNGFIPGWML

SEQ ID NO: 109345 - DNA, 762 bp, Petunia hybrida
  CDS (1)..(762)
atggggagagggagagtggagctaaagagaatagagaacaagatcaacagacaagtgacattttctaagagaaggaatggtttgttgaagaaagcttatgaactttcagtgctttgtgatgctgaagttgctctcatcatcttctccagtcgtggaaagctttatgagtttggcaatgcaggtatcactaaaacccttgagaggtaccaacgttgttgccttaatcctcaagacaactgtggtgaaagagaaacacagagctggtaccaagaggtctcgaaattaaagggcaagtttgaagcccttcaacgaactcaaaggcacttgcttggtgaagatcttgggccactgagtgtgaaagaattgcaaaatcttgagaaacaacttgaaggtgcacttgcacaagctaggcaaagaaagacacaaataatgatggaacagatggaagagctgcgtagaaaggagcgccatcttggtgatgtgaacaagcaactgaaggttaaggtttcgctagaactatcatcgctagaggctgaaggacaagctggactgaatagagctcttccttttttatggacttctaatgcattagaagctgggaacagcaattttcctgttcaccattctcaatcaaatcccatggactgtggacctgatccagtacttcaatatagggatcatcactatatggcagcagatggaccctcaggttcaaggagcatggctgttgagactaacatcatgcagggatggggcctttga

SEQ ID NO: 109346 - protein, 253 aa, Petunia hybrida
MGRGRVELKRIENKINRQVTFSKRRNGLLKKAYELSVLCDAEVALIIFSSRGKLYEFGNAGITKTLERYQRCCLNPQDNCGERETQSWYQEVSKLKGKFEALQRTQRHLLGEDLGPLSVKELQNLEKQLEGALAQARQRKTQIMMEQMEELRRKERHLGDVNKQLKVKVSLELSSLEAEGQAGLNRALPFLWTSNALEAGNSNFPVHHSQSNPMDCGPDPVLQYRDHHYMAADGPSGSRSMAVETNIMQGWGL

SEQ ID NO: 109347 - DNA, 753 bp, Rosa rugosa
  CDS (1)..(753)
atggcctatgaaaacaaacccaacacggtcctggactctgatgcccaaagaagattgggaaggggaaagatcgagatcaagcggatcgaaaacaccaccaatcgtcaagtcaccttctgcaaaaggcgcaatggtttgctcaagaaggcctatgagctctctgtgctctgtgatgctgaggttgctctcatagtcttctctaaccgtggccgtctctatgagtattccaacaacagtgttagagaaacaattgaacgatacaagaaggcatgtgcagattcttcaaataatggatctgtctctgaagctactactcagtactatcagcaagaagctgccaaactgcgtgcccagataaccactttgcagaacagtaacaggggttatatggctgagggtttgagcaatatgtctatcaaggagctcaagggcgtggagaccaaacttgagaaagcaattagcagaattagatccaagaagaacgagctcttgtttgccgaaattgagtacatgcagaaaagggaacttgacttgcacaacaataaccagctcctccgagcaaagggacagatagctgagaatgagaggcaccagcaaagcataaatgcgattgcaggtgggcatggaagctacgacatcatgcagccgactcagccatttcatgaggctcgcaactattttcaagtgaatgctttgcaacccaatatccatcagtactcgcgccatgaccagatttcccttcaattagtttga

SEQ ID NO: 109348 - protein, 250 aa, Rosa rugosa
MAYENKPNTVLDSDAQRRLGRGKIEIKRIENTTNRQVTFCKRRNGLLKKAYELSVLCDAEVALIVFSNRGRLYEYSNNSVRETIERYKKACADSSNNGSVSEATTQYYQQEAAKLRAQITTLQNSNRGYMAEGLSNMSIKELKGVETKLEKAISRIRSKKNELLFAEIEYMQKRELDLHNNNQLLRAKGQIAENERHQQSINAIAGGHGSYDIMQPTQPFHEARNYFQVNALQPNIHQYSRHDQISLQLV

SEQ ID NO: 109349 - DNA, 750 bp, Rosa rugosa
  CDS (1)..(750)
atggagttcccaaaacaaattacaccagctgatgatcctgagagctcttcccaaaagaaattgggaagagggaaaatcgagatcaagaggatcgaaaacactaccaatcgacaagtcacattctgcaagcgccgcaacggtttgcttaagaaagcatatgaactatctgttctttgtgatgctgaagttgctcttattgttttctctacccgggggcgcctctatgaatatgctaacaacagtgttagagcaacaatcgaaaggtacaagaaagcatgtgattcttcaaacactggatctgtaactgagactaatgttcagttttatcagcaagaagcctccaaactaagaagacagataagagaaattcagaattcaaacaggcacatactaggtgaagctcttagcactttgaacgtcaaggaactcaagaacctagaaggaagattggagaaaggaatcagcagaataagatccaaaaagaatgaaatgctgtttgctgaaatcgaatatatgcaaaagagggagatcgagctgcaaaatcataacaattttctgagagcaaagattgctgaaaatgacagggcacaacagcagcaagcaaatatgatgccaggaacattatctgcgtatgatcaatcaatgcctcctcctcaatcatacgataggagctttctccctgtaatccttgagtccaatcaccactacaatcgccaagggcagaaccagacacctctccaacttgtttga

SEQ ID NO: 109350 - protein, 249 aa, Rosa rugosa
MEFPKQITPADDPESSSQKKLGRGKIEIKRIENTTNRQVTFCKRRNGLLKKAYELSVLCDAEVALIVFSTRGRLYEYANNSVRATIERYKKACDSSNTGSVTETNVQFYQQEASKLRRQIREIQNSNRHILGEALSTLNVKELKNLEGRLEKGISRIRSKKNEMLFAEIEYMQKREIELQNHNNFLRAKIAENDRAQQQQANMMPGTLSAYDQSMPPPQSYDRSFLPVILESNHHYNRQGQNQTPLQLV

SEQ ID NO: 109351 - DNA, 714 bp, Cucumis sativus
  CDS (1)..(714)
atgttccagaatcaagaagagaagatgtcagactcgcctcagaggaagatgggaagaggaaagattgagattaagaggattgaaaatacaacaaatcgtcaagtcactttctgtaagagaagaaatgggttgcttaaaaaagcttatgaactttctgttctttgtgatgctgaagttgctctcatcgttttctcaagccgtggccgcctctatgaatatgctaacaacagtgtgaaggcaacaattgatagatataagaaagcatcctcagattcctccaacactggatctacttctgaagctaacactcagttttatcaacaagaagctgccaaactccgagttcagattggtaacttacagaactcaaacaggaacatgctaggcgagtctctaagttctctgactgcaaaagatctgaaaggcctggagaccaaacttgagaaaggaattagtagaattaggtccaaaaagaatgaactcctgtttgctgagattgagtatatgcgaaaaagggaaattgatttgcacaacaacaatcagatgcttcgggcaaagatagctgagagtgaaagaaatgtgaacatgatgggaggagaatttgagctgatgcaatctcatccgtacgatccaagagacttcttccaagtgaacggcttacagcataatcatcaatatccacgccaagacaacatggctcttcaattagtataa

SEQ ID NO: 109352 - protein, 237 aa, Cucumis sativus
MFQNQEEKMSDSPQRKMGRGKIEIKRIENTTNRQVTFCKRRNGLLKKAYELSVLCDAEVALIVFSSRGRLYEYANNSVKATIDRYKKASSDSSNTGSTSEANTQFYQQEAAKLRVQIGNLQNSNRNMLGESLSSLTAKDLKGLETKLEKGISRIRSKKNELLFAEIEYMRKREIDLHNNNQMLRAKIAESERNVNMMGGEFELMQSHPYDPRDFFQVNGLQHNHQYPRQDNMALQLV

SEQ ID NO: 109353 - DNA, 765 bp, Cucumis sativus
  CDS (1)..(765)
  misc_feature (606)..(606): n is a, g, c or t
atgagttgttatgaggaagaagatgaagaatcaggagtagtaggattaagaagatcatcatcatcatcaagaacaggaagaggaaagattgaaataaagagaattgaaaatacaacaaatcgtcaagttactttctgtaaacgaagaaatggtttgcttaagaaagcttatgaactctctgtcctttgtgatgctgaggttgctcttatcgtcttctcctcccgtggtcgtctctatgaatacgctaacaacagtgttagggctacgatttcgaggtacaaaaaggcatattcggatccctccaccgccatgaccgtttcagaagccaatactcagttctaccagcaagaatctgccaaattacgagctcaaatcggaaatttgcaaaacctaaacaggcatttgttgggggaatccatcagttcgttatcagttaaagatttgaaaagcctagaggtgaaattggagaaaggaattagccgaattcgatccagaaagaatgagcttctgttttcggagattgaatacatgcaaaaaagggaaattgaactgcacactaacaaccagctgatacgtgcaaagatagcggagacagagagaagccancaaaacacaaatgcaagtaataacaatggaatagcaacaagaagaggagaggaaggatcaatgggtacaaatttagaggacaacaatcatcatcaatatgactcaacaaactactttgatccccatcataatcaccctatctctcttcaacttgtgtaa

SEQ ID NO: 109354 - protein, 254 aa, Cucumis sativus
  misc_feature (202)..(202): The Xaa at location 202 stands for Gln, or His.
MSCYEEEDEESGVVGLRRSSSSSRTGRGKIEIKRIENTTNRQVTFCKRRNGLLKKAYELSVLCDAEVALIVFSSRGRLYEYANNSVRATISRYKKAYSDPSTAMTVSEANTQFYQQESAKLRAQIGNLQNLNRHLLGESISSLSVKDLKSLEVKLEKGISRIRSRKNELLFSEIEYMQKREIELHTNNQLIRAKIAETERSXQNTNASNNNGIATRRGEEGSMGTNLEDNNHHQYDSTNYFDPHHNHPISLQLV

SEQ ID NO: 109355 - DNA, 765 bp, Brassica rapa subsp
  CDS (1)..(765)
atgggaaggggtagggttgaaatgaaaaggatagagaacaagatcaatagacaagtgacattttcgaaaagaagagctggtcttttgaagaaagcccatgagatctcgattctttgtgatgctgaggtttcccttattgtcttctcccataaggggaaactgttcgagtactcgtctgaatcttgcatggagaaggtactagaacgctacgagaggtactcttacgccgagaaacagctaaaagctccagactctcacgtcaatgcacaaacgaactggtcaatggaatatagcaggcttaaggctaagattgagcttttggagaggaaccaaaggcattatctgggagaagatttagaatcaatcagcataaaggagctacagaatctggagcagcagcttgacacttctcttaaacatattcgctccagaaaaaatcaactaatgcacgagtccctcaaccacctccaaagaaaggagaaagaaatacttgaggaaaacagcatgcttaccaaacagataaaggagagggagagtatcctaaggacacatcaaaaccaatcagagcagcaaaaccgcagccaccatgtagctcctcagccgcagccgcagttaaatccttacatgatctctcatcaggcatctcctttcctaagtatgggtggcatgtaccaaggagaagatccaacggcggtgaggaggaaccgtctcgatctgactcttgaacccatttacaactgcaaccttggttactttgccgcatga

SEQ ID NO: 109356 - protein, 254 aa, Brassica rapa subsp
MGRGRVEMKRIENKINRQVTFSKRRAGLLKKAHEISILCDAEVSLIVFSHKGKLFEYSSESCMEKVLERYERYSYAEKQLKAPDSHVNAQTNWSMEYSRLKAKIELLERNQRHYLGEDLESISIKELQNLEQQLDTSLKHIRSRKNQLMHESLNHLQRKEKEILEENSMLTKQIKERESILRTHQNQSEQQNRSHHVAPQPQPQLNPYMISHQASPFLSMGGMYQGEDPTAVRRNRLDLTLEPIYNCNLGYFAA

SEQ ID NO: 109357 - DNA, 741 bp, Petunia hybrida
  CDS (1)..(741)
atgggaagaggaagagtgcagatgaagagaattgagaataaaattaatagacaagttactttttcaaaacgtcgatctggattattgaagaaagctcatgaaatctctgtgctttgtgatgctgaagttggtttaattgttttttctactaaaggcaaactctttgagtatgctactgattcttgcatggagaggattcttgaaagatatgaaagatactcatatgctgagaggcagcttgtttctactgatcatagctccccgggaagctggaatctggaacatgcaaaacttaaggccagaattgaggttgtgcagagaaaccaaaggcattatatgggagaagatttggactcgttaagtatgaaagaccttcagaatttagaacaacagctggattcttctcttaaacacattcgatcaagaaagaaccaattgatgcatgagtccatttctgagcttcaaaaaaaggacaaatcattgcaagagcaaaacaaccttctttcaaagaaggtgaaggagagggagaaagagttggctcaacaaactcaatgggagcagcagaataatcatcatgagattaactcatcatcttcatttgttttgccacagccattggactctcctcacctaggggaagcataccagagcacagtagacaatggagaagtagaaggagcttcacagcagcaacctgctaatacaatgccaccatggatgcttcgccatcttaatggctaa

SEQ ID NO: 109358 - protein, 246 aa, Petunia hybrida
MGRGRVQMKRIENKINRQVTFSKRRSGLLKKAHEISVLCDAEVGLIVFSTKGKLFEYATDSCMERILERYERYSYAERQLVSTDHSSPGSWNLEHAKLKARIEVVQRNQRHYMGEDLDSLSMKDLQNLEQQLDSSLKHIRSRKNQLMHESISELQKKDKSLQEQNNLLSKKVKEREKELAQQTQWEQQNNHHEINSSSSFVLPQPLDSPHLGEAYQSTVDNGEVEGASQQQPANTMPPWMLRHLNG

SEQ ID NO: 109359 - DNA, 750 bp, Fragaria ananassa
  CDS (1)..(750)
atggcctatgaaaacaaaccaaacactgacctggacgctgatgcccaaagaagattgggaaggggaaagatcgaaatcaagcggatcgaaaacaccaccaatcgccaagttaccttctgcaaaaggcgcaatggtttgctcaagaaggcttatgagctctctgttctctgtgatgctgaggttgccctcatagtcttctctaaccgtggccgcctctatgagtattccaacaacagcagtgttagagaaacgattgaacgatacaagaaggcatgtgcagatacttcaactaatggatctgcctcagaagctactactcagtactatcagcaagaagctgccaagctgcataaccagataaatgctttgcagaacattaacaggggttatatggctgagggtttaagcaataagaatatcaaggagctcaagggcatggagagaaaacttgagagagcaattaccagaattagatccaagaagaatgaactcttgtttgccgaaattgagtacatgcagaaaagggaacttgacttgcataacaataaccagctcctccgagcaaagatagctgagaatgagaggcaacagcagagcataattgcaattacaggagggcatggaagctatgagatcgtgcagccgactcagccctttcacgaggctcgcaactattttcaagtgaatgctttgcaacccaatattcatcagtactcttgccatgaccaagtttcccttcagttagtgtaa

SEQ ID NO: 109360 - protein, 249 aa, Fragaria ananassa
MAYENKPNTDLDADAQRRLGRGKIEIKRIENTTNRQVTFCKRRNGLLKKAYELSVLCDAEVALIVFSNRGRLYEYSNNSSVRETIERYKKACADTSTNGSASEATTQYYQQEAAKLHNQINALQNINRGYMAEGLSNKNIKELKGMERKLERAITRIRSKKNELLFAEIEYMQKRELDLHNNNQLLRAKIAENERQQQSIIAITGGHGSYEIVQPTQPFHEARNYFQVNALQPNIHQYSCHDQVSLQLV

SEQ ID NO: 109361 - DNA, 645 bp, Elaeis guineensis var
  CDS (1)..(645)
atggtgagggggaagacggagatgaagctgatagagaacgcgacgagcaggcaggtgacgttctcgaagcggaggaatgggcttctgaagaaggcgttcgagctctcggtcctttgcgacgccgaggtcgccgtcatcgtcttctctccccgcggaaagctctacgagttctccagcaccagcatggaaaagacaatcgatcgctacagaaggcatgcaaaaagtggcatcaacaacaatgaagtaactcagcaatggaaatttgaagcagctagcatgtcaagaaagatcgaatcccttgaagtttccaaacggaagctcttaggtgaaaacctagaatcatgctctgctgaagaactgcatgaaatagagggtaagatagagcaaagcctctgccacgtcagaggaaagaagaatcagttacttgaagagcaaattgcaacgctcaaagaacaggagcagacacttatggaggagaatgcattactacgagagaagtgcaagctacaatctcaactacggccagccgctgctccagaggaaactgttccatgcagccaggacggtgagaatatggaggtagagacagagctgtacattggatggccaggaaggggaaggaccaattgcaggtcgcaaggttga

SEQ ID NO: 109362 - protein, 214 aa, Elaeis guineensis var
MVRGKTEMKLIENATSRQVTFSKRRNGLLKKAFELSVLCDAEVAVIVFSPRGKLYEFSSTSMEKTIDRYRRHAKSGINNNEVTQQWKFEAASMSRKIESLEVSKRKLLGENLESCSAEELHEIEGKIEQSLCHVRGKKNQLLEEQIATLKEQEQTLMEENALLREKCKLQSQLRPAAAPEETVPCSQDGENMEVETELYIGWPGRGRTNCRSQG

SEQ ID NO: 109363 - DNA, 741 bp, Cucumis sativus
  CDS (1)..(741)
atgggaagaggaagagtagagttgaagaggatagagaacaaaataaacagacaagtaacatttgcaaagagaagaaatgggcttttgaagaaagcttatgaactttctgttctttgtgatgctgaagttgctcttatcatcttctcaaatcgtggcaagctctatgaattctgtagtacttccaatatgcttaaaacgctggagaggtaccaaaaatgcagttatggagcggtggaggttacaaaaccggctaaagaactcgagagtagttatagagagtacttgaagctgaagtctaggtttgagtctctacaaagaactcagagaaaccttcttggggaggacttgggtccattgaactcaaaagagcttgagcagctggagcgtcagcttgtgtcttctttgaagcaagttaggtctaccaagactcagtacatgctggaccaactatctgatcttcagaacaaggaacaaatgctgattgaaactaacagagctctgcaaataaagctggaagaaataagttcaagaaataatataaggcttacatgggatggtggagatcaaagcatgtcatatggtccacaaaatgcccaaactcaaggcttctttcagccactggaatgcaaccccactttgcaaattgggtacacttctgcagtatcagaccaaattacaagcactactactccaactcatgcccaacaagtcaatggcttcctccctggttggatgctttga

SEQ ID NO: 109364 - protein, 246 aa, Cucumis sativus
MGRGRVELKRIENKINRQVTFAKRRNGLLKKAYELSVLCDAEVALIIFSNRGKLYEFCSTSNMLKTLERYQKCSYGAVEVTKPAKELESSYREYLKLKSRFESLQRTQRNLLGEDLGPLNSKELEQLERQLVSSLKQVRSTKTQYMLDQLSDLQNKEQMLIETNRALQIKLEEISSRNNIRLTWDGGDQSMSYGPQNAQTQGFFQPLECNPTLQIGYTSAVSDQITSTTTPTHAQQVNGFLPGWML

SEQ ID NO: 109365 - DNA, 744 bp, Capsicum annuum
  CDS (1)..(744)
atgggaagaggaagagttcaattgaggaggattgaaaataagataaataggcaagtgactttttcgaagaggcgatctggtttgttgaagaaagctcatgagatctctgtcctttgtgatgctgaagttggcttgattgttttttcttctaaagggaaactatttgagtattctactgactcttgcatggaaaggattcttgagaggtatgaaaggtactcatatgctgagaggcagcttaatgcaactgatgtcgaaaccccggggagttggactttggaacatgctaagcttaaggccaggcttgaggttttgcaaagaaaccaaaggcattatgcgggagaagacttggactcattgagtatgaaagagcttcagaatctggagcagcaactcgattctgctcttaagcacattcgatcaagaaagaaccaattgatgcatgaatccatttctgagctgcaaaagaaggacaaggcattgcaagaacaaaacaacaatctttcaaagcagatgaaggaaagggagaaacagctggcccagcagcatactccgtgggagcaacagaaccatgaccatctcaactcatcttcatttggtctgccacatccctttaacaacaatcacctaggggaagtatatccaactgcaggagacaatggagaagttgaaggatcatcgcggcagcaacaacaaaacgctgctgtgatgccgccatggatgcttcgccatctcaacggataa

SEQ ID NO: 109366 - protein, 247 aa, Capsicum annuum
MGRGRVQLRRIENKINRQVTFSKRRSGLLKKAHEISVLCDAEVGLIVFSSKGKLFEYSTDSCMERILERYERYSYAERQLNATDVETPGSWTLEHAKLKARLEVLQRNQRHYAGEDLDSLSMKELQNLEQQLDSALKHIRSRKNQLMHESISELQKKDKALQEQNNNLSKQMKEREKQLAQQHTPWEQQNHDHLNSSSFGLPHPFNNNHLGEVYPTAGDNGEVEGSSRQQQQNAAVMPPWMLRHLNG

SEQ ID NO: 109367 - DNA, 738 bp, Capsicum annuum
  CDS (1)..(738)
atgggaagaggaagagttgagttgaagagaatagaaaacaaaataaacagacaagtcacttttgctaagagaagaaatggacttcttaagaaagcttatgaactttctgttctttgtgatgctgaagttgctcttatcattttctcaaatcgtggtaaactctatgaattctgcagcacttcaagcatggtgaaaacaattgaaaagtatcagcgttgcagctatgctactttggaagctaaccaatcagctactgatactcagaataactaccacgagtatctgaggctaaaagcaagagttgagctcctccaacgatctcagagaaactttcttggggaagatttggggacattaagcacaaaggacctggagcagcttgagaatcaattagagtcctccttaaagcaaatcaggtcaaggaagacacaattcatgctggatcagcttgcagatcttcaacaaagggagcaaatgctggcagaatctaatagattactccgcagaaagctagaagaaagtacagctggatttccagttcgattgagttgggaagatggagctgatcaagccatgcatcaacataatcgtctcccccacactgagggtttcttgcagcctcttggattgcattcttctcctccacattttgggtacaatcctgttaatacggatgaggtgaatgcagcagcaactgctcacaatatgaatggatttattcatggatggatgctttaa

SEQ ID NO: 109368 - protein, 245 aa, Capsicum annuum
MGRGRVELKRIENKINRQVTFAKRRNGLLKKAYELSVLCDAEVALIIFSNRGKLYEFCSTSSMVKTIEKYQRCSYATLEANQSATDTQNNYHEYLRLKARVELLQRSQRNFLGEDLGTLSTKDLEQLENQLESSLKQIRSRKTQFMLDQLADLQQREQMLAESNRLLRRKLEESTAGFPVRLSWEDGADQAMHQHNRLPHTEGFLQPLGLHSSPPHFGYNPVNTDEVNAAATAHNMNGFIHGWML

SEQ ID NO: 109369 - DNA, 705 bp, Hyacinthus orientalis
  CDS (1)..(705)
atgggaaggggaaagattgagatcaagaggattgagaacacgacgaaccgtcaagtgactttctgcaagaggaggaatggcctcctgaagaaggcttacgagctctccgtactctgcgacgccgaggttgctctcatcgtattctccacccgcggccgcctctatgagtactccaataacagcataaaatcaacaattgagagggacaagaaggcatgcgctgatagctccagctcgagtgcagttatagaggtcaatacgcagcgatattatcagcaagaagcatcaaaattgcgccagcagatccagatcttacaaaatgccaacaggcacttaatgggtgaatctctcgatcctttaaatgtcaaagaactgaaacaacttgaaacccgtcttgaaaggggcattaccagggtcaggtcaaaaaagcatgaactcttgtttgcggaacttgaatacatgcagaaaagggaagttgaacttcaaacggacaatatgtacctcagagcaaagataggagagaacgagagagctcaccaagcaagtgttgtgcaagctgggaccgagttcgatgctcttccaacgtttgactccaggaactactaccaggtccatatgctgcaggctgcatcccactattcacatcaccaagaccagacagcccttcatcttggttatgaaaccaaagctgatccttcagcatga

SEQ ID NO: 109370 - protein, 234 aa, Hyacinthus orientalis
MGRGKIEIKRIENTTNRQVTFCKRRNGLLKKAYELSVLCDAEVALIVFSTRGRLYEYSNNSIKSTIERDKKACADSSSSSAVIEVNTQRYYQQEASKLRQQIQILQNANRHLMGESLDPLNVKELKQLETRLERGITRVRSKKHELLFAELEYMQKREVELQTDNMYLRAKIGENERAHQASVVQAGTEFDALPTFDSRNYYQVHMLQAASHYSHHQDQTALHLGYETKADPSA

SEQ ID NO: 109371 - DNA, 801 bp, Gnetum parvifolium
  CDS (1)..(801)
atgggacgaggaaagatcgagatgaagaaaatcgagtgcactagcagccgccaagttacgttctccaagcgtcgctcgggactgctgaagaaggcgcacgagctctcggttctgtgtgacgcggaggtcgccgtcatcatattttccaacactggcaagctttacgagtatgcgagttccagcatgagaaaaactattgagaggtatcaaaagtttgaagaaaatagtacaaactcaaccaaaagctttaaaacaaagtcggagcaagggagcagtgccgacgtaggaagtttactgctggagatgaaggccatggaaaataagcacaggaattcaatgggagaagagctgtcatctctatctgttcctgaattgaagcgtttagaacaagagcttgaagtagggatcaacagagtgagagccagacagaacgaactttttgaagcagaaatatgtggcctgaagcgtaaggagcatgacttaatagaggaaaacatgatgctacacaaattgctgtcagagactggaagcagctcagagatggcagcttcagcaccagcacactcttttggtgatgaaagtgccatgatggcttgccagtaccggcagcaggtttgcatgggagaatcatcatcttctagaaaccaaacgcgtcatcatatatatggtgtcagtgatgttgctaggcatttggcgttgcagatttcttgtccaaatcaatccagaaacgactataatttggtgttagatggctgggaatacatgccagagtatgctcctccgttggtatcaatggactag

SEQ ID NO: 109372 - protein, 266 aa, Gnetum parvifolium
MGRGKIEMKKIECTSSRQVTFSKRRSGLLKKAHELSVLCDAEVAVIIFSNTGKLYEYASSSMRKTIERYQKFEENSTNSTKSFKTKSEQGSSADVGSLLLEMKAMENKHRNSMGEELSSLSVPELKRLEQELEVGINRVRARQNELFEAEICGLKRKEHDLIEENMMLHKLLSETGSSSEMAASAPAHSFGDESAMMACQYRQQVCMGESSSSRNQTRHHIYGVSDVARHLALQISCPNQSRNDYNLVLDGWEYMPEYAPPLVSMD

SEQ ID NO: 109373 - DNA, 759 bp, Gnetum parvifolium
  CDS (1)..(759)
atgggacgtggtcgggtgcagctgaggcgaatcgagaacaagatcaatcggcaagtgacattttcgaagcgccgtaatggcctgctcaagaaggcgtacgagctctcggtgctatgcgacgccgaggtcgcgctcatcatcttctccaccagaggaaagctctacgagtttgccagttccagcatgagcaagactttagagagatatgaaaaatgttcatattcaatgcaagaaaatgcatcaacggacagggatgcgcagaactggcatcacgaagtgacaaagctcaaagctaaacttgaaagtcttcacaaagctcaaaggaatctcatgggagaagacttaggacctctcaacataaaggaactccagagcctggaacaacagctggaagttgcgctgggtcatgttaggaatagaaagacccaactcttgattcaaacaattgatgaacttcgtgacaaggaacgaacgctgcaagaggtgaataaatctctacagaagaagctgagcgaaacagaaggaagaaatgttataccagctctgccacatgctaccactggtagtggtgagtgggaatcttccacacttacaacaacctatgctcttcaaactcagcaaccttccggcattcaccatgttgactgcgaaccaacattgcatattgggccgtaccaccaagctgtgcatcatgaagccatccctggcccaccagcaactcacagtgagccacacaatcaatacatttggtgggtttga

SEQ ID NO: 109374 - protein, 252 aa, Gnetum parvifolium
MGRGRVQLRRIENKINRQVTFSKRRNGLLKKAYELSVLCDAEVALIIFSTRGKLYEFASSSMSKTLERYEKCSYSMQENASTDRDAQNWHHEVTKLKAKLESLHKAQRNLMGEDLGPLNIKELQSLEQQLEVALGHVRNRKTQLLIQTIDELRDKERTLQEVNKSLQKKLSETEGRNVIPALPHATTGSGEWESSTLTTTYALQTQQPSGIHHVDCEPTLHIGPYHQAVHHEAIPGPPATHSEPHNQYIWWV

SEQ ID NO: 109375 - DNA, 708 bp, Malus domestica
  CDS (1)..(708)
atgggaagagggaaggtggagttgaagaggatcgagaataagataaatcgacaggtaacatttgcaaaaagaaggaatgggctgctaaagaaggcgtacgaactctcagttctctgtgatgctgaggttgctctcatcgtcttctccaccagcggaaagctctatgagttctgcagcggccctagcatagcgaagacgcttgagaggcatcaaagatgcacttatggagaactgggagcaagtcaatctgctgaggacgaacagagcagataccaagaatacttgaagctaaaaacgaaagtagaggccctacaacgcacgcagagacatcttcttggggaagatttggttcatttaggcacgaaggagcttcagcagcttgagaatcaactagatgtgtcgatgaagaaaatcaggtcaacgaagacccaatttatgcatgttcagatttctgagcttcaaaggaaagaagaaatgctactggaagcaaacactggactgagaaggaagttggaagaaattactgctggccatcaacgatcatggaatggcaatcaccaggctgctcaattagaaggattccctgagcatttgcaatacaacaatgcattgcagatcggtactccagtagtaacaaatgatgaggcgaatgtagcaacgtcctcagcacaaaatggtacgggattcttccccggttggatgctctga

SEQ ID NO: 109376 - protein, 235 aa, Malus domestica
MGRGKVELKRIENKINRQVTFAKRRNGLLKKAYELSVLCDAEVALIVFSTSGKLYEFCSGPSIAKTLERHQRCTYGELGASQSAEDEQSRYQEYLKLKTKVEALQRTQRHLLGEDLVHLGTKELQQLENQLDVSMKKIRSTKTQFMHVQISELQRKEEMLLEANTGLRRKLEEITAGHQRSWNGNHQAAQLEGFPEHLQYNNALQIGTPVVTNDEANVATSSAQNGTGFFPGWML

SEQ ID NO: 109377 - DNA, 741 bp, Antirrhinum majus
  CDS (1)..(741)
atggcgtctctaagcgatcaatcgaccgaggtatcgcccgagaggaaaatcgggagaggaaagatcgagatcaaacggatcgaaaacaaaacaaatcaacaggttacgttctgcaaacgccgcaacggtttgctcaagaaagcttatgaattgtctgtgctttgtgatgctgaagttgccttagttgtgttctcaagcagaggtcgactttatgagtatgcaaataacagtgttaaagcaaccattgataggtacaagaaagcatcatcagactcctcactcaatggctctatttctgaagcaaacactcagtattaccagcaagaagcatctaaactgcgtgctcaaatcagtaatctgcagaatcagaacaggaacatgttgggagaatctttaggggctttgtcactgagggagctcaagaatctggagagcagggttgaaagaggaattagcagaatcaggtccaagaagaatgagttgctgtttgctgaaattgagtacatgcaaaagaggcaggagattgacttgcaccacaacaaccagtatctgcgagccaagatagctgaaagtgagagagtgcaggggcagcatatgaatttgatgcctggaggaagttctggctatgagcaacttgttgaaactcaaccatttgatgctagaaactatcttcaagtcaatggactacaaccaaacaatgactacccgaggcaagaccagctccctcttcaattagtctga

SEQ ID NO: 109378 - protein, 246 aa, Antirrhinum majus
MASLSDQSTEVSPERKIGRGKIEIKRIENKTNQQVTFCKRRNGLLKKAYELSVLCDAEVALVVFSSRGRLYEYANNSVKATIDRYKKASSDSSLNGSISEANTQYYQQEASKLRAQISNLQNQNRNMLGESLGALSLRELKNLESRVERGISRIRSKKNELLFAEIEYMQKRQEIDLHHNNQYLRAKIAESERVQGQHMNLMPGGSSGYEQLVETQPFDARNYLQVNGLQPNNDYPRQDQLPLQLV

SEQ ID NO: 109379 - DNA, 765 bp, Gnetum gnemon
  CDS (1)..(765)
atggggcgaggcagagtcgagctgaaacgcatcgagaataagatcaatcgtcaggttacgttttccaaacgccgcaacggcctgctgaagaaggcgtacgagctctccgtgctatgcgatgccgaagttgctctcatcattttctccagccgcggaaagctttacgagttcgggagcgccgggactttgaagacattggagcgttaccaaaaatgttcgtatgccttgcaagaatctaataactcagatcgtgatgcccagacttggcatcatgaagtaagtaagctaaaaacaaaggtggaaattttacaacgttctcaaaggcatcttttaggtgaagatcttggaccattaagcataagggaactacaaacccttgaaagacaaattgaggtagcactaacacaagttcgagcaagaaagacacaagtaatgatggacatgatggatgatctaaagaaaaaggagaggcttttgcaagaagttaataaatctctgcgcaaaaagcttgacgaaacagaaggtcaagtttacagtaatgcacagctacaagctgctcctcctcctgaatgggattctaatgcaatagcaaaccctgtatatgctcttcctccaaccccacaaaatgctgttgactgtgagcctacttgcaaattgggtattatgctcctgctgagccaagcattcccaggcatgatcatcctcagaacaactacatacaggggtgggtggtctaatctaatccctgatgcaaacaatcagtag

SEQ ID NO: 109380 - protein, 254 aa, Gnetum gnemon
MGRGRVELKRIENKINRQVTFSKRRNGLLKKAYELSVLCDAEVALIIFSSRGKLYEFGSAGTLKTLERYQKCSYALQESNNSDRDAQTWHHEVSKLKTKVEILQRSQRHLLGEDLGPLSIRELQTLERQIEVALTQVRARKTQVMMDMMDDLKKKERLLQEVNKSLRKKLDETEGQVYSNAQLQAAPPPEWDSNAIANPVYALPPTPQNAVDCEPTCKLGIMLLLSQAFPGMIILRTTTYRGGWSNLIPDANNQ

SEQ ID NO: 109381 - DNA, 651 bp, Gnetum gnemon
  CDS (1)..(651)
atggggcgcggaaagatcgagatcaagaagatagagaacagcgtgcatcgacaagtgacgttctgcaagcgccgtggcggtctcatgaagaaggcttacgagctttccgttctttgcgacgccgaagtggctctcataattttctccagccgcggcaaactctatgagctcgctacaagcaacaaaagtatgatgtctactcttgagagatatcaaagaagctctgcaactggaaaacaacttaatctttaccctggaagctcaaatgagaagctggatttagaagtaaaatttcttcgtaatcaagttgagcaattaaaagctaccaacaggtatttgatgggagaagaactggcaaccatgtctttagatgaactaaatgaattagaagcacaacttcagaaaggaattaatcaagtgagagctaagaagactgacttgatgttggaggaaattaaagcacttcagaataaggagcatattttaaggatgagcaatatcatgctgcaaggaaagcttgatgagtgtacaaattgtaaagattcaaggtttcatggatttataacaactagctctacttctcatgctccagcatatacatgtggattcaacctgaataatcaatcgcttagttcaactatagaaatgtaa

SEQ ID NO: 109382 - protein, 216 aa, Gnetum gnemon
MGRGKIEIKKIENSVHRQVTFCKRRGGLMKKAYELSVLCDAEVALIIFSSRGKLYELATSNKSMMSTLERYQRSSATGKQLNLYPGSSNEKLDLEVKFLRNQVEQLKATNRYLMGEELATMSLDELNELEAQLQKGINQVRAKKTDLMLEEIKALQNKEHILRMSNIMLQGKLDECTNCKDSRFHGFITTSSTSHAPAYTCGFNLNNQSLSSTIEM

SEQ ID NO: 109383 - DNA, 762 bp, Unknown
  Unidentified
  CDS (1)..(762)
atgggacgtggtcgagtgcagctgaggcgaatcgagaacaagatcaatcggcaagtgacattttcgaagcgccgtaatggcctgctcaagaaggcgtacgagctctcggtgctatgcgacgccgaggtcgcgctcatcatcttctccaccagaggaaagctctacgagtttgccagttccagcatgagcaagactttagagagatatgaaaaatgttcgtattcaatgcaagaaaacgcctcaacggacagggatgcgcagaactggcatcacgaagtgacaaagctcaaagctaaacttgaaagtcttcacaaagctcaaaggagtctcatgggagaagatctaggacctctcaacataaaggaactccagagcctggaacaacagctggaagttgcgctgggtcatgttaggaatagaaaaacccaactcttgattcaaacaattgatgaacttcgtgacaaggaacgaacgctgcaagaggtgaataaatccctacagaagaagctgagcgaaacagaaggaaggaatgttataccagctctgccacatgctcccaatggtagtggggagtgggaatcttccacacttacaactacaacctatgctcttcaaactcagcaaacttccaacattcaccatgttgactgcgaaccaacattgcatattgggccataccaccaagctgtgcatcatgaagccatcactgctccaccagcaactcacagtgaaccacacaatcaatacatttggtgggtttga

SEQ ID NO: 109384 - protein, 253 aa, Unknown
  Unidentified
MGRGRVQLRRIENKINRQVTFSKRRNGLLKKAYELSVLCDAEVALIIFSTRGKLYEFASSSMSKTLERYEKCSYSMQENASTDRDAQNWHHEVTKLKAKLESLHKAQRSLMGEDLGPLNIKELQSLEQQLEVALGHVRNRKTQLLIQTIDELRDKERTLQEVNKSLQKKLSETEGRNVIPALPHAPNGSGEWESSTLTTTTYALQTQQTSNIHHVDCEPTLHIGPYHQAVHHEAITAPPATHSEPHNQYIWWV

SEQ ID NO: 109385 - DNA, 744 bp, Gnetum gnemon
  CDS (1)..(744)
atgggacgcggcaagatcgagataaagaggatcgagaacacaaccaacagacaggtaactttctgcaagcgcaggaatggcctgctgaagaaggcctacgagttatcggttctctgcgatgctgaggtcgccctcatcgttttctccagccgaggccgtctctatgaattcgccaacaacagtgtcaagagaacgatcgagaggtatagaaagacttgtgcggacaacaatcagggaggagcaattgcagaatccaacgcacagtattggcagcaggaagctgtgaaactgaagcagcaaatagacgtcctcaacaaccagatccgacactacatgggagaatgccttcagtccatgacaatcaaagaactgaagcagctggagggtaaactcgagaaaggacttggtagagttcgatccaaaaggaatgagaaactgctggaggacatagacaccttgcagagaagggaagataacctgattcgagagaatgagtacattcggaacaagatagcagaatgccagagccatcagcatgcaaacatgttgactgcagctgctgtagagtatgatgccatacctgcagcatatgattccaggaacttcatgcatgcaaacctgatagaagcagcagctgctcatcatcattatgctcaacaagagcaaactgcgcttcatcttggatcagaacacaaatattcagttcattaccccgatcctcaggcccacaaatttcagacctaa

SEQ ID NO: 109386 - protein, 247 aa, Gnetum gnemon
MGRGKIEIKRIENTTNRQVTFCKRRNGLLKKAYELSVLCDAEVALIVFSSRGRLYEFANNSVKRTIERYRKTCADNNQGGAIAESNAQYWQQEAVKLKQQIDVLNNQIRHYMGECLQSMTIKELKQLEGKLEKGLGRVRSKRNEKLLEDIDTLQRREDNLIRENEYIRNKIAECQSHQHANMLTAAAVEYDAIPAAYDSRNFMHANLIEAAAAHHHYAQQEQTALHLGSEHKYSVHYPDPQAHKFQT

SEQ ID NO: 109387 - DNA, 729 bp, Nicotiana sylvestris
  CDS (1)..(729)
atggggagagggaaagtgcaattaaggcgtatagaaaataagattaacaggcaagtgacattttcaaagaggagaggaggtttagtgaagaaagcacttgaaatttcagtgctttgtgatgctgaagttgctttaattgttttttctcataagggaaagatctttgagtactcttctgattcttgtatggaacagattcttgaacgatatgagagatactcatacacagagagacgtttgcttgcaagtaattctgaatcttcggtgcaggaaaactggagcctggaatatgctaaactcaaggctaagattgatctccaacaaaggaaccacaagcattatatgggagaagatcttgactcattgagcctaaaggacctgcaaaacttggaacaacaacttgatacttctcttaagcttattcgatcaagaaagaaccaactcatgcatgagtcaatctctatgctacagaaaaaggaaaaggcaatccaggaggagaataacatgctatccaagaagattaaggagaaggataacacagtagggcagcaagttgaatggcatcagcaaaatcaagttcctacttcggcatctttcctcctacaaccacatccatgcctaaatattggaggtaattaccaagaggaacgagaagaacgaaggaggaatgagcttgacctaaatcttgattccttgtatccatgccatatgggatgctttgccacatga

SEQ ID NO: 109388 - protein, 242 aa, Nicotiana sylvestris
MGRGKVQLRRIENKINRQVTFSKRRGGLVKKALEISVLCDAEVALIVFSHKGKIFEYSSDSCMEQILERYERYSYTERRLLASNSESSVQENWSLEYAKLKAKIDLQQRNHKHYMGEDLDSLSLKDLQNLEQQLDTSLKLIRSRKNQLMHESISMLQKKEKAIQEENNMLSKKIKEKDNTVGQQVEWHQQNQVPTSASFLLQPHPCLNIGGNYQEEREERRRNELDLNLDSLYPCHMGCFAT

SEQ ID NO: 109389 - DNA, 687 bp, Hyacinthus orientalis
  CDS (1)..(687)
atggggagggggaagattgagattaagcggatcgagaacaccaccagccggcaggtcaccttctgcaagcgccgcaacggcctcctcaagaaggcctacgagctctccgtcctctgcgacgccgaggtcgccctcatcgtcttctccacccgcggccgcctctacgagtactccaactccaacagcgtgaaaacgacaattgaacggtacaagaaagcttgcactgatacaaccaacactgggactgtctctgaagctaattctcagtattatcagcaagaagcaaccaaattacggcagcaaataaccaacttacagaacactaacaggactttgatgggggagtctctgagcacaatgagccttagagaactgaaacagctggagggcagactggaaagaggcatcaacaaaataagaacaaaaaagaacgagctgttgtccgctgaaatcgaatacatgcagaaaagggaagcggagatgcataatgataacatgtacttgcgaaataagatagcagaaaatgagagagcccagcagcagatgaacatgttgccatcaacggcaacggagtatgagggcattccccaattcgattcacgtaacttcctgcaggtgagcttgatggagcccaacaaccaccactattcccgccagcagcagcagacagccctccagctaggatga

SEQ ID NO: 109390 - protein, 228 aa, Hyacinthus orientalis
MGRGKIEIKRIENTTSRQVTFCKRRNGLLKKAYELSVLCDAEVALIVFSTRGRLYEYSNSNSVKTTIERYKKACTDTTNTGTVSEANSQYYQQEATKLRQQITNLQNTNRTLMGESLSTMSLRELKQLEGRLERGINKIRTKKNELLSAEIEYMQKREAEMHNDNMYLRNKIAENERAQQQMNMLPSTATEYEGIPQFDSRNFLQVSLMEPNNHHYSRQQQQTALQLG

SEQ ID NO: 109391 - DNA, 618 bp, Eucalyptus globulus subsp
  CDS (1)..(618)
atggtgagggggaagacgcagatgaagaggatagagaacgacacgagcaggcaggtgacgttctcgaagcgcaggaacgggctgctgaagaaggccttcgagctctccgtcctctgcgacgccgaggttgcactcatcatcttctccccgagaggcaagctctacgagttctcgagctcgagcttgtgcaagacaatagaaaagtatcagacgagagccaaggacatggaagccaaaactgctgaaatttctatgcagccttccaagggaaacactcttgacatggaaaagaagatcgagcatttcgaaatatctagaagaagactcctgggagagggtctggattcctgttcggtcgaggagctccaacaaacagaaaaccagttggaaagaagtctaaccaagatcagggcaagaaagaaccatttaattagggagcatattgagcggctaaaagcagaggagcggaaactactggaagaaaagagaaagctacttcaagagattgaatgcggcaaaggattgaccccggtctccagcgaacggcctcgtgaagaaatccgcgcggagtctatggatgttgagaccgagttgtttatagggccaccgaaaagatga

SEQ ID NO: 109392 - protein, 205 aa, Eucalyptus globulus subsp
MVRGKTQMKRIENDTSRQVTFSKRRNGLLKKAFELSVLCDAEVALIIFSPRGKLYEFSSSSLCKTIEKYQTRAKDMEAKTAEISMQPSKGNTLDMEKKIEHFEISRRRLLGEGLDSCSVEELQQTENQLERSLTKIRARKNHLIREHIERLKAEERKLLEEKRKLLQEIECGKGLTPVSSERPREEIRAESMDVETELFIGPPKR

SEQ ID NO: 109393 - DNA, 768 bp, Malus domestica
  CDS (1)..(768)
atggggaggggaagggtgcagctgaagagaattgagaacaagatcaacaggcaggtgaccttctcaaagagaaggtcggggctgatgaagaaagctcatgagatttctgtgctttgtgatgctgaggttgctttgattatcttctccaccaagggcaagctctttgagtactccaatgattcctgcatggaaaggatcctggaaaggtacgaaagatactcatatacagagaggcagcttcttgcaaatgataatgaatccactggaagctggactctggaacatgcaaagctcaaggctagggtggaggttttacaaagaaatcaaagacactatatgggagaagatctccaatccttaagtctcaaagagcttcaaaatttagagcaacagcttgattctgcactgaagcacataaggtcaagaaagaaccaagttatgtacgaatcgatttctgagctccagaagaaggataaggcattgcaggagcaaaacaacttgctggcaaagaaggtgaaggagaaggagaacgcagtagctcaacaggcccaattggagcatgtgcaggagcagaggttgaactcctcttcctcccttcttccacgggcattgcagtccttgaatttcggcagcgggtccaattaccaggccattagatcaagtgaaggaataccaggagataatcagcagtatggagatgaaaccccaactccacatagacctaacatgctgctgcccgcttggatcgtccgccaccttaatgaatag

SEQ ID NO: 109394 - protein, 255 aa, Malus domestica
MGRGRVQLKRIENKINRQVTFSKRRSGLMKKAHEISVLCDAEVALIIFSTKGKLFEYSNDSCMERILERYERYSYTERQLLANDNESTGSWTLEHAKLKARVEVLQRNQRHYMGEDLQSLSLKELQNLEQQLDSALKHIRSRKNQVMYESISELQKKDKALQEQNNLLAKKVKEKENAVAQQAQLEHVQEQRLNSSSSLLPRALQSLNFGSGSNYQAIRSSEGIPGDNQQYGDETPTPHRPNMLLPAWIVRHLNE

SEQ ID NO: 109395 - DNA, 747 bp, Rosa hybrid cultivar
  CDS (1)..(747)
atggcctatgaaaacaaacccaacacggtcctggacgctgatgcccaaagaagattgggaaggggaaagatcgagatcaagcggatcgaaaacaccaccaatcgtcaagtcaccttctgcaaaaggcgcaatggtttgctcaagaaggcctatgagctctctgtgctctgtgatgctgaggttgctctcatagtcttctctaaccgtggccgcctctatgagtattcaaacaacagtgttagagaaacaattgaacgatacaagaaggcatgtgcagattcttcaaataatggatctgtctctgaagctactactcagtactatcagcaagaagctgccaaactgcgtgcccagataaccactttgcagaacagtaacaggggttatatggctgagggtttgagcaatatgtctatcaaggagctcaagggcgtggagaccaaacttgagaaagcaattagcagaattagatccaagaagaatgagctcttgtttgccgaaattgagtacatgcagaaaagggaacttgacttgcacaacaataaccagctcctccgagcaaagatagctgataatgagaggcaccagcaaagcataaatgccattgcaggtgggcatggaagctacgagatcatgcagccgactcagccatttcatgaggctcgcaactattttcaagtgaatgctttggaacccaatatccatcagtactcgcgccatgaccagatttcccttcaattagtttga

SEQ ID NO: 109396 - protein, 248 aa, Rosa hybrid cultivar
MAYENKPNTVLDADAQRRLGRGKIEIKRIENTTNRQVTFCKRRNGLLKKAYELSVLCDAEVALIVFSNRGRLYEYSNNSVRETIERYKKACADSSNNGSVSEATTQYYQQEAAKLRAQITTLQNSNRGYMAEGLSNMSIKELKGVETKLEKAISRIRSKKNELLFAEIEYMQKRELDLHNNNQLLRAKIADNERHQQSINAIAGGHGSYEIMQPTQPFHEARNYFQVNALEPNIHQYSRHDQISLQLV

SEQ ID NO: 109397 - DNA, 741 bp, Gerbera hybrid cv
  CDS (1)..(741)
atgtcgtttccaaatgattccggggagatgtctcctcagagaaagctcggaagagggaagatcgagatcaagcggatcgaaaacacgacgaatcgacaagtgactttttgcaaacgccgtaatgggctgcttaagaaggcgtatgagttgtctgttctttgtgatgccgaggttgcacttatcgttttctctagccgtggtcgtctttacgagtatgcaaacaacagtgttaaaggaaccatagataggtataaaaaggcatgcctagatccacctagtagtggctctgttgctgaagccaatgctcagttttaccaacaagaagcggcgaaactgcgtcaacaaatcgcgaaccttcaaaaccaaaacaggcaattttataggaacatcatgggcgaatcactaggaaacatgccagcgaaagacctcaaaaacctcgaaagcaagttagagaaaggtatcggcaagatccgatccaaaaagaatgaaatcctatttgctgaaatcgagtacatgcaaaagcgagaaaacgagttgcataacagtaaccagttccttcgatcaaagatcgccgaaaatgaaagagcacaacaacacatgagtttgatgcccggaagttctgattacgaactagtagcaccacaccaaccgttcgatggtcgaaactaccttcaagtcaatgatcttcaacccaataataattactcgtgccaagatcaaacacctctccaattagtgtaa

SEQ ID NO: 109398 - protein, 246 aa, Gerbera hybrid cv
MSFPNDSGEMSPQRKLGRGKIEIKRIENTTNRQVTFCKRRNGLLKKAYELSVLCDAEVALIVFSSRGRLYEYANNSVKGTIDRYKKACLDPPSSGSVAEANAQFYQQEAAKLRQQIANLQNQNRQFYRNIMGESLGNMPAKDLKNLESKLEKGIGKIRSKKNEILFAEIEYMQKRENELHNSNQFLRSKIAENERAQQHMSLMPGSSDYELVAPHQPFDGRNYLQVNDLQPNNNYSCQDQTPLQLV

SEQ ID NO: 109399 - DNA, 795 bp, Gerbera hybrid cv
  CDS (1)..(795)
atggaaaattctgatgtgcttgagcttgatttcagttgcgtcgatcgatccatgtcgtttccagatgacaccggggacatgtctccacagagaaagatggggaagggaaagatcgagatcaagaggatcgaaaacaccacgaatcgacaggtgactttttgtaagcgacgcaacggtttgctcaagaaggcctatgaattgtctgttctttgtgatgctgaggttgctcttatcgtcttctcgagccgtggccgcctttacgagtatgctaacaacagcgttaaaggaacgatcgataagtacaaaaaggcttgcctagacccacctactagtggcacggttgctgaagccaacactcagtattaccaacaagaagctgcgaaactgcgtcagcaaattgcgaaccttcaaaaccagaacaggcaattttataggaacatcatgggtgaatcattgggagacatgccagttaaggacctcaagaatctcgaaggcaagttagagaaagcaatcagtcgaatcagggccaaaaagaatgaactgttatttgctgaaatcgagtacatgcaaaagagagaacttgagttgcataacagtaatcagttccttcgcgcaaagatagttgaaaatgaaagagcccagcagcatcacatgagtttgatgcctggaagttctgattacgagctcgtaacacctcaccagcctttcgatggtcgaaactaccttcaaacaaatgatctgcaacccaataacgattattcttgtcaagatcaaacgccgctccagttagtgtaa

SEQ ID NO: 109400 - protein, 264 aa, Gerbera hybrid cv
MENSDVLELDFSCVDRSMSFPDDTGDMSPQRKMGKGKIEIKRIENTTNRQVTFCKRRNGLLKKAYELSVLCDAEVALIVFSSRGRLYEYANNSVKGTIDKYKKACLDPPTSGTVAEANTQYYQQEAAKLRQQIANLQNQNRQFYRNIMGESLGDMPVKDLKNLEGKLEKAISRIRAKKNELLFAEIEYMQKRELELHNSNQFLRAKIVENERAQQHHMSLMPGSSDYELVTPHQPFDGRNYLQTNDLQPNNDYSCQDQTPLQLV

SEQ ID NO: 109401 - DNA, 786 bp, Lolium temulentum
  CDS (1)..(786)
atgggtcgcggcaaggtgcagctgaagcggatagagaacaagataaaccgtcaggtgacattctccaagcgccgcaacgggctactcaagaaggcgcacgagatctccgtcctctgcgacgccgaggtcgccgtcgtcgtcttctccccgaaagggaagctctatgagtacgccactgactccagcatggacaaaattcttgaacgttatgaacgctactcttatgctgaaaaggctttgatttcagctgaatctgaaagtgagggaaattggtgccatgaatacaggaagctgaaggcgaagattgagactatacaaaaatgtcacaagcacctcatgggggaggatctggagtgtctaaacctgaaagagctccaacaactagagcagcagctggagagttcattgaagcacatcagatcgagaaagagccaccttatgatggagtccatttctgagctacagaagaaggagcggtcactccaggaggagaacaaggctctacagaaggaactggtggagaggcagaaggcggccaggcagcagcagcaagagcagtgggaccgtcagacccaaacacaacaagcccaaaaccaacctcaggcccagacgagctcatcatcttcctccttcatgatgagggatcagcaggcccatgctcaacaaaacatctgttacccgctggtgacaatgggtggagaggctgtggccgcggcgccagggcagcaggggcagcttcgcatcggaggcctgccaccatggatgctgagccacctcaacgcttga

SEQ ID NO: 109402 - protein, 261 aa, Lolium temulentum
MGRGKVQLKRIENKINRQVTFSKRRNGLLKKAHEISVLCDAEVAVVVFSPKGKLYEYATDSSMDKILERYERYSYAEKALISAESESEGNWCHEYRKLKAKIETIQKCHKHLMGEDLECLNLKELQQLEQQLESSLKHIRSRKSHLMMESISELQKKERSLQEENKALQKELVERQKAARQQQQEQWDRQTQTQQAQNQPQAQTSSSSSSFMMRDQQAHAQQNICYPLVTMGGEAVAAAPGQQGQLRIGGLPPWMLSHLNA

SEQ ID NO: 109403 - DNA, 738 bp, Lolium temulentum
  CDS (1)..(738)
atggggcgcggcaaggtgcagctcaagcggatcgagaacaagatcaaccgccaggtcaccttctccaagcgccgctcaggcctgctcaagaaggcgcacgagatctccgtgctctgcgacgcagaggtcgggctcatcatcttctccaccaagggaaagctctacgagttcgccaccgactcatgtatggacaaaattcttgagcggtatgagcgctactcctatgcagagaaagtgctcatttcaactgaatctgaaattcagggaaactggtgtcatgaatataggaaactgaaggcgaaggttgagacaatacagagatgtcaaaagcatctaatgggagaggatcttgaatcattgaatctcaaggagttgcagcaactagagcagcagctggaaagttcactgaaacatattagatccagaaagagccagcttatgcacgaatccatatctgagcttcaaaagaaggagaggtcactgcaagaggagaataaaattctccagaaggaactcatagagaagcagaaggcccacacgcagcaagcgcagttggagcaaactcagccccaaaccagctcttcctcctcctcctttatgatgggggaagctaccccagcaacaaatcgcagtaatcccccagcagcggccagcgacagagcagaggatgcgacggggcagcctccagctcgcacggtgcttccaccatggatggtgagtcacctcaacaatggctga

SEQ ID NO: 109404 - protein, 245 aa, Lolium temulentum
MGRGKVQLKRIENKINRQVTFSKRRSGLLKKAHEISVLCDAEVGLIIFSTKGKLYEFATDSCMDKILERYERYSYAEKVLISTESEIQGNWCHEYRKLKAKVETIQRCQKHLMGEDLESLNLKELQQLEQQLESSLKHIRSRKSQLMHESISELQKKERSLQEENKILQKELIEKQKAHTQQAQLEQTQPQTSSSSSSFMMGEATPATNRSNPPAAASDRAEDATGQPPARTVLPPWMVSHLNNG

SEQ ID NO: 109405 - DNA, 729 bp, Corylus avellana
  CDS (1)..(729)
atggagttccagaaccaatcgatgtcagtctctccccagagaaaattgggcaggggaaagattgaaatcaagcggatcgaaaacacaactaatcgacaagtcaccttctgtaagaggcgcaacggcctgctcaaaaaggcctatgaattgtctgttctctgtgatgctgagattgccctcatcgtcttctctagccgtggccgcctttatgagtatgctaacaacagcagtgtcaaaacaacaattgagaggtacaagaaggcatgcgctgattcctccaattctggatctgtttctgaagctaatactcagttctaccagcaagaggctgctaaactgcgtggccaaattagaagtgtgcaggattcaaacaggcatatgttgggcgaggctttgagcgagttaaatttcaaagagctcaagaacttggagaaaaatttagagaaaggaattaacagaatcagatccaaaaagaatgagctcctgttagcagaaattgagtatatgcataaaagggaagttgacttgcataacaataaccagtttctccgagcaaagatagcggagaatgagagaaaccagcagaacttgaatgtgatgccaggagggggaaactatgagctcatgcagtctcagtcatttgattctcgaaactattttcaagtagatgcactacaacccaatcatcactacccacgccaagaccagatggcacttcagttagtttaa

SEQ ID NO: 109406 - protein, 242 aa, Corylus avellana
MEFQNQSMSVSPQRKLGRGKIEIKRIENTTNRQVTFCKRRNGLLKKAYELSVLCDAEIALIVFSSRGRLYEYANNSSVKTTIERYKKACADSSNSGSVSEANTQFYQQEAAKLRGQIRSVQDSNRHMLGEALSELNFKELKNLEKNLEKGINRIRSKKNELLLAEIEYMHKREVDLHNNNQFLRAKIAENERNQQNLNVMPGGGNYELMQSQSFDSRNYFQVDALQPNHHYPRQDQMALQLV

SEQ ID NO: 109407 - DNA, 729 bp, Nicotiana tabacum
  CDS (1)..(729)
atggggagagggaaagtgcaattaaggcgtatagaaaataagattaacaggcaagtgacattttcaaagaggagaggaggtttagtgaagaaagcacatgaaatttcagtgctttgtgatgctgaagttgctttaattgttttttctcataagggaaagatctttgagtactcttctgattcttgtatggaacagattcttgaacgatatgagagatactcatacacagagagacgtttgcttgcaagtaattctgaatcttcggtgcaggaaaactggagcctggaatatgctaaactcaaggctaagattgatctcctacaaaggaaccacaagcattatatgggagaagatcttgactcattgaacctaaaggacctgcaaaacttggaacaacaacttgatacttctcttaagcttattcgatcaagaaagaaccaactcatgcatgagtcaatctctatgctacagaaaaaggaaaaggcaatccaggaggagaataacatgctatccaagaagattaaggagaaggataacacagtagggcagcaagttgaatggcatcagcaaaatcaagttcctacttcaacatctttcctcctacaaccacatccatgcctaaatattggaggtaattaccaagaggaagcagaagaagcaaggaggaatgagcttgacctaaatcttgattccttgtatccatgccatatgggatgctttgccacatga

SEQ ID NO: 109408 - protein, 242 aa, Nicotiana tabacum
MGRGKVQLRRIENKINRQVTFSKRRGGLVKKAHEISVLCDAEVALIVFSHKGKIFEYSSDSCMEQILERYERYSYTERRLLASNSESSVQENWSLEYAKLKAKIDLLQRNHKHYMGEDLDSLNLKDLQNLEQQLDTSLKLIRSRKNQLMHESISMLQKKEKAIQEENNMLSKKIKEKDNTVGQQVEWHQQNQVPTSTSFLLQPHPCLNIGGNYQEEAEEARRNELDLNLDSLYPCHMGCFAT

SEQ ID NO: 109409 - DNA, 738 bp, Nicotiana tabacum
  CDS (1)..(738)
atggggagaggaagagtgcaactgaagagaattgagaacaagatcaatcgacaagtcaccttctcaaaaagacgatctggtttgcttaagaaagctcatgaaatctctgtgctttgtgatgctgaggttggtttaattgttttttctactaaaggcaaactctttgagtattccactgattcttgcatggaaaggattcttgaaaggtatgaaaggtactcatatgctgagaggcagcttactgctactgatcatgaaaccccggggagctggactttggaacatgctaagcttaagggcagacttgaagttttgcaaagaaaccaggggcattatgcaggagaagatttggactcattatgtatgaaagagcttcagaatcttgagcaccagctcgattctgctcttaagcacattcgatcaagaaagaatcaattgatgcatgaatccatttctgagctgcaaaagaaggacgaggcattgcaagagcaaaacaacaatctctcaaagcaggtgaaagaaggggagaaagagctagctcagcagactcagtgggagcaacagagccatgatcatctcaactcatcttcattcgttttaacacagcccttgagctctcttcacctcggggaagcgtacccgactgcaggagacaacggagaattggaaggatcatcgcggcaacaacaacaaaacactgtgatgccgccatggatgcttcgccatcttaatggctga

SEQ ID NO: 109410 - protein, 245 aa, Nicotiana tabacum
MGRGRVQLKRIENKINRQVTFSKRRSGLLKKAHEISVLCDAEVGLIVFSTKGKLFEYSTDSCMERILERYERYSYAERQLTATDHETPGSWTLEHAKLKGRLEVLQRNQGHYAGEDLDSLCMKELQNLEHQLDSALKHIRSRKNQLMHESISELQKKDEALQEQNNNLSKQVKEGEKELAQQTQWEQQSHDHLNSSSFVLTQPLSSLHLGEAYPTAGDNGELEGSSRQQQQNTVMPPWMLRHLNG

SEQ ID NO: 109411 - DNA, 669 bp, Pinus resinosa
  CDS (1)..(669)
atgggtcgtgggaagattgagataaagaggattgaaaatactacgaaccgacaggtcactttctgcaagcgccgaaatggtttattgaagaaggcgtatgaattatcagttctttgtgatgcagaagtggccctcatcgtcttctccagcagagggagactttatgaatttgccaaccacagcgtgaagaggacgattgagaggtacaagaagacttgcgttgacaacaaccatgggggggcgatttcagagtccaattctcagtattggcaacaggaggctggtaaactcagacaacagattgaaattttgcaaaatgcaaataggcatttgatgggtgacgggcttacagctttgaacatcaaggaactcaagcaacttgaggttcgacttgaaaaaggaatcagccgagtacgatccaaaaagaacgagatgttgcttgaagagatcgacatcatgcagagaagggaacacatacttatccaggagaatgagattcttcgcagcaagatagccgagtgtcagaatagccacaacacgaacatgttatcagctcccgaatatgatgcattgccagcattcgactctcgaaattttctacatgcaaatctaatcgatgcggcccatcactatgcacatcaggaacaaacaacgcttcagcttggctga

SEQ ID NO: 109412 - protein, 222 aa, Pinus resinosa
MGRGKIEIKRIENTTNRQVTFCKRRNGLLKKAYELSVLCDAEVALIVFSSRGRLYEFANHSVKRTIERYKKTCVDNNHGGAISESNSQYWQQEAGKLRQQIEILQNANRHLMGDGLTALNIKELKQLEVRLEKGISRVRSKKNEMLLEEIDIMQRREHILIQENEILRSKIAECQNSHNTNMLSAPEYDALPAFDSRNFLHANLIDAAHHYAHQEQTTLQLG

SEQ ID NO: 109413 - DNA, 693 bp, Arabidopsis thaliana
  CDS (1)..(693)
atgggaagaggaaagatagaaataaagaggatagagaactcaacaaatcgacaagtgacgttttgcaaaagaagaaatggacttctgaagaaagcctatgagctttcggtcctttgcgatgcagaagttgcgctcattgttttctccactcgtggccgtctctatgaatacgccaataacaacataagatcaaccattgagaggtacaagaaagcttgttctgatagcaccaacactagcactgtccaagaaatcaatgccgcgtactatcaacaagaatctgctaagctgagacaacagatccaaacgattcaaaactccaacaggaatctgatgggagactctttgagttccttaagtgtcaaggaactaaaacaagttgagaatcgccttgagaaagctatctctaggatcaggtccaagaagcatgagttgcttctagttgaaatcgaaaacgcgcagaaaagggagattgagcttgacaatgagaacatctatctaagaactaaggtagcagaagtggagaggtatcaacaacaccatcatcaaatggttagtggttcagagattaacgcaattgaagctttagcctcacgcaattactttgctcatagcattatgactgctggttctggatctggtaatggaggttcttactctgatcccgacaagaaaattcttcatctcggataa

SEQ ID NO: 109414 - protein, 230 aa, Arabidopsis thaliana
MGRGKIEIKRIENSTNRQVTFCKRRNGLLKKAYELSVLCDAEVALIVFSTRGRLYEYANNNIRSTIERYKKACSDSTNTSTVQEINAAYYQQESAKLRQQIQTIQNSNRNLMGDSLSSLSVKELKQVENRLEKAISRIRSKKHELLLVEIENAQKREIELDNENIYLRTKVAEVERYQQHHHQMVSGSEINAIEALASRNYFAHSIMTAGSGSGNGGSYSDPDKKILHLG

SEQ ID NO: 109415 - DNA, 636 bp, Arabidopsis thaliana
  CDS (1)..(636)
atggctcgtggaaagattcagcttaagaggattgagaacccggttcacagacaagtgactttttgcaagaggagaactggtcttctcaagaaggctaaggagctctctgtgctctgtgatgccgagatcggtgttgtgatcttctctcctcagggcaagctctttgagctcgctactaaaggaacaatggagggaatgattgataagtacatgaagtgtactggtggtggtcgtggttcttcttctgctacttttactgctcaagaacaacttcaaccaccaaatcttgatccgaaagatgagatcaacgtgcttaagcaagagattgagatgcttcagaaagggataagctatatgtttggaggaggagatggggctatgaatcttgaagaacttcttttgcttgagaagcatcttgagtattggatttctcagattcgctctgctaagatggatgttatgcttcaagaaattcagtcattgaggaacaaggaaggagtcctcaaaaacaccaacaagtatctcctcgaaaagatagaggaaaacaacaatagcatattagatgctaacttcgcagtcatggagacaaactattcctatccgctaacaatgccaagtgaaatatttcagttctag

SEQ ID NO: 109416 - protein, 211 aa, Arabidopsis thaliana
MARGKIQLKRIENPVHRQVTFCKRRTGLLKKAKELSVLCDAEIGVVIFSPQGKLFELATKGTMEGMIDKYMKCTGGGRGSSSATFTAQEQLQPPNLDPKDEINVLKQEIEMLQKGISYMFGGGDGAMNLEELLLLEKHLEYWISQIRSAKMDVMLQEIQSLRNKEGVLKNTNKYLLEKIEENNNSILDANFAVMETNYSYPLTMPSEIFQF

SEQ ID NO: 109417 - DNA, 735 bp, Arabidopsis thaliana
  CDS (1)..(735)
atgggaagaggcaaagtggaagtgaagagaattgagaacaagatcactagacaagtaaccttctccaaaagaaaaagtggtttgctcaagaaagcctacgaactctctgttctttgtgatgcagaggtttctctcataatcttctccaccggtggcaagctctacgagttcagcaatgtcggagttggcagaaccattgagaggtactatcgctgtaaagacaatcttttggacaatgatacgcttgaagatactcagggcttgcgtcaagaggtgacaaagctcaaatgcaaatacgaatctcttcttcgcactcataggaatttggttggggaagatcttgaagggatgagtataaaggaattgcagacgctggagagacagcttgaaggagctctttccgcaacccgaaaacaaaagacgcaggttatgatggaacaaatggaagagcttcggagaaaggagagggagctcggagatataaacaataagctaaagcttgagacagaagatcatgattttaaaggctttcaagacctactgcttaacccggtgctcaccgccggttgttccactgatttttccttgcaatcaactcatcaaaattatatatcggattgcaaccttggatattttttacagattgggtttcaacaacactatgagcaaggtgaaggatcttcggtgacaaagagtaatgcaagaagtgatgctgagaccaactttgtccaatga

SEQ ID NO: 109418 - protein, 244 aa, Arabidopsis thaliana
MGRGKVEVKRIENKITRQVTFSKRKSGLLKKAYELSVLCDAEVSLIIFSTGGKLYEFSNVGVGRTIERYYRCKDNLLDNDTLEDTQGLRQEVTKLKCKYESLLRTHRNLVGEDLEGMSIKELQTLERQLEGALSATRKQKTQVMMEQMEELRRKERELGDINNKLKLETEDHDFKGFQDLLLNPVLTAGCSTDFSLQSTHQNYISDCNLGYFLQIGFQQHYEQGEGSSVTKSNARSDAETNFVQ

SEQ ID NO: 109419 - DNA, 666 bp, Arabidopsis thaliana
  CDS (1)..(666)
atggtgaggggaaagacagagatgaagaggatagagaacgcaacgagcaggcaagtgactttctcaaaaagaagaaatggacttttgaagaaagcttttgaattatcagtcctttgtgatgctgaagttgccctaatcatcttctctcctagaggcaaactctatgagttctctagctcctccagtatacctaaaacagtagaaagatatcaaaagcgaatacaagatctcgggtctaaccataagagaaatgataattcacagcaatcgaaggacgaaacctatggcttggcgagaaagatcgaacatttggagatttcgacacgaaaaatgatgggagaaggacttgacgcatcttctatagaagagttacaacaattggagaaccagttggacagaagcttaatgaaaataagagccaaaaagtaccagttattacgagaagaaactgagaaattaaaagaaaaggagaggaacctcattgcagaaaataaaatgctgatggagaagtgtgagatgcaaggaagaggaataataggaagaatatcatcatcatcatcaacatcagaactggatatagatgacaatgaaatggaagtggtgactgatttgttcattggacctcctgagactcgacacttcaaaaagtttcctccttcaaactaa

SEQ ID NO: 109420 - protein, 221 aa, Arabidopsis thaliana
MVRGKTEMKRIENATSRQVTFSKRRNGLLKKAFELSVLCDAEVALIIFSPRGKLYEFSSSSSIPKTVERYQKRIQDLGSNHKRNDNSQQSKDETYGLARKIEHLEISTRKMMGEGLDASSIEELQQLENQLDRSLMKIRAKKYQLLREETEKLKEKERNLIAENKMLMEKCEMQGRGIIGRISSSSSTSELDIDDNEMEVVTDLFIGPPETRHFKKFPPSN

SEQ ID NO: 109421 - DNA, 807 bp, Arabidopsis thaliana
  CDS (1)..(807)
atgggtcgtggaaaaatcgagataaagaggatcgagaatgcgaatagcagacaagtcactttttccaagaggcgttctgggttacttaagaaagctcgtgagctctctgttctttgtgatgctgaagttgctgtcatcgtcttctctaagtctggcaagctcttcgagtactccagtactggaatgaagcaaacactttccagatacggtaatcaccagagttcttcagcttctaaagcagaggaggattgtgcagaggtggatattttaaaggatcaactttcaaagcttcaagagaaacatttacaactgcagggcaagggcttgaatcctctgacctttaaagagctgcaaagccttgagcagcaactatatcatgcattgattactgtcagagagcgaaaggaacgattgctgactaaccaacttgaagaatcacgcctcaaggaacaacgagcagagttggaaaacgagaccttgcgtagacaggttcaagaactgaggagctttctcccgtcgttcacccactatgttccatcctacatcaaatgctttgctatagatccaaagaacgctctcataaaccacgacagtaaatgcagcctccagaacaccgattcagacacaactttgcaattagggttgccgggagaggcacatgatagaaggacgaatgaaggagaaagagagagcccgtcaagcgattcagtgacaacaaacacgagcagcgaaactgcagaaagaggggatcagtctagtttagcaaattctccacctgaagccaaaagacaaaggttctctgtttag

SEQ ID NO: 109422 - protein, 268 aa, Arabidopsis thaliana
MGRGKIEIKRIENANSRQVTFSKRRSGLLKKARELSVLCDAEVAVIVFSKSGKLFEYSSTGMKQTLSRYGNHQSSSASKAEEDCAEVDILKDQLSKLQEKHLQLQGKGLNPLTFKELQSLEQQLYHALITVRERKERLLTNQLEESRLKEQRAELENETLRRQVQELRSFLPSFTHYVPSYIKCFAIDPKNALINHDSKCSLQNTDSDTTLQLGLPGEAHDRRTNEGERESPSSDSVTTNTSSETAERGDQSSLANSPPEAKRQRFSV

SEQ ID NO: 109423 - DNA, 795 bp, Brassica napus
  CDS (1)..(795)
atgggtcgtggaaaaattgagataaagaggatcgagaatgcgaatagcaggcaagttaccttctccaagaggcgtgctggtttgctcaagaaagctcatgagctctctgttctttgtgacgctgaggttgccgtcattgtcttctccaagtctggcaagctcttcgagttctcaagtactagcatgaagaaaacacttttgagatacggaaattatcagatctcttcagatgttcctgggattaactgtaaaacagagaaccaggaggagtgtacagaggtggaccttttaaaggatgagatctcaatgcttcaagagaaacatttacacatgcagggtaagcccttgaaccttctgagcttgaaagagctgcaacaccttgagaagcaactaaatttctcattgatatctgtgagagagcgaaaggaactattgttgactaaacaacttgaagagtcacggcttaaggaacagagagcagagctggaaaacgagaccttacgtagacaggttcaagaactaaggagttttctcccgtcgatcaaccaacactatgctccatcctacatcagatgcttcgctatagatcctaagaactcactcttaagcaacacttgcttgggcgacattaactgcagcctccagaacaccaactcagacacaactttgcaactagggttgccgggagaagcacatgatacaaggaagaacgaaggagacagagagagcccatcaagtgattctgtgacaacgagcacaaccagagcaactgcacaaaggatcagtctagtttag

SEQ ID NO: 109424 - protein, 264 aa, Brassica napus
MGRGKIEIKRIENANSRQVTFSKRRAGLLKKAHELSVLCDAEVAVIVFSKSGKLFEFSSTSMKKTLLRYGNYQISSDVPGINCKTENQEECTEVDLLKDEISMLQEKHLHMQGKPLNLLSLKELQHLEKQLNFSLISVRERKELLLTKQLEESRLKEQRAELENETLRRQVQELRSFLPSINQHYAPSYIRCFAIDPKNSLLSNTCLGDINCSLQNTNSDTTLQLGLPGEAHDTRKNEGDRESPSSDSVTTSTTRATAQRISLV

SEQ ID NO: 109425 - DNA, 684 bp, Arabidopsis thaliana
  CDS (1)..(684)
atggggagagggaagattgtgatccagaagatcgatgattccacgagtagacaagtcactttctccaaaagaagaaagggtctcatcaagaaagctaaagaacttgctattctctgcgacgccgaggtctgtctcatcattttctccaacactgacaagctctatgactttgccagctccagtgtgaaatctactattgaacgattcaatacggctaagatggaggagcaagaactaatgaaccctgcatcagaagttaagttttggcagagagaggctgaaactctaaggcaagaattgcactcattgcaagaaaattatcggcaactaacgggagtggaattaaatggtttgagcgttaaggagttacaaaacatagagagtcaacttgaaatgagtttacgtggaattcgtatgaaaagggaacaaattttgaccaatgaaattaaagagctaaccagaaagaggaatcttgttcatcatgaaaacctcgaattgtcgagaaaagtacaaaggattcatcaagaaaatgtcgaactatacaagaaggcttatggaacgtcgaacacaaatggattgggacatcatgagctagtagatgcagtttatgaatcccatgcacaggttaggctgcagctaagccagcctgagcagtcccattataagacatcttcaaacagctaa

SEQ ID NO: 109426 - protein, 227 aa, Arabidopsis thaliana
MGRGKIVIQKIDDSTSRQVTFSKRRKGLIKKAKELAILCDAEVCLIIFSNTDKLYDFASSSVKSTIERFNTAKMEEQELMNPASEVKFWQREAETLRQELHSLQENYRQLTGVELNGLSVKELQNIESQLEMSLRGIRMKREQILTNEIKELTRKRNLVHHENLELSRKVQRIHQENVELYKKAYGTSNTNGLGHHELVDAVYESHAQVRLQLSQPEQSHYKTSSNS

SEQ ID NO: 109427 - DNA, 660 bp, Arabidopsis thaliana
  CDS (1)..(660)
atggtgaggggcaaaacggagatgaagaggatagagaacgcaacaagcaggcaagtgacgttttcgaagagaagaaatggactcttgaagaaagccttcgaattatcggtcctttgtgatgctgaagttgctttggttatcttctctccaagatccaaactctatgagttctctagctctagtatagcagcaacaattgaacgctatcagagacgaataaaagaaattgggaataatcataagagaaatgataattctcagcaagcgagagacgaaacatctggattgacaaaaaagattgaacagctagagatatctaaacgaaaattgcttggagaaggcattgatgcatgttccatcgaggagctgcaacagttagagaatcagttggaccgaagcttgagcaggataagagccaagaagtaccaattactccgtgaagaaattgagaagttgaaggcagaggagaggaatctcgttaaggaaaataaagatctgaaggagaagtggcttggaatgggaacagcaacaatagcatcatcacaatcaacgttatcatcatcagaagtgaacatagatgacaatatggaagtggagactggtttgttcattggacctcctgagacaagacaatccaaaaaattccctcctcaaaattaa

SEQ ID NO: 109428 - protein, 219 aa, Arabidopsis thaliana
MVRGKTEMKRIENATSRQVTFSKRRNGLLKKAFELSVLCDAEVALVIFSPRSKLYEFSSSSIAATIERYQRRIKEIGNNHKRNDNSQQARDETSGLTKKIEQLEISKRKLLGEGIDACSIEELQQLENQLDRSLSRIRAKKYQLLREEIEKLKAEERNLVKENKDLKEKWLGMGTATIASSQSTLSSSEVNIDDNMEVETGLFIGPPETRQSKKFPPQN

SEQ ID NO: 109429 - DNA, 687 bp, Arabidopsis thaliana
  CDS (1)..(687)
atgggaagagggaagattgtgatccaaaggatcgatgattcaacgagtagacaagtcactttctccaaacgaagaaagggccttatcaagaaagccaaagagctagctattctctgtgatgccgaggtcggtctcatcatcttctctagcaccggaaagctctatgactttgcaagctccagcatgaagtcggttattgatagatacaacaagagcaagatcgagcaacaacaactattgaaccccgcatcagaagtcaagttttggcagagagaagctgctgttctaagacaagaactgcatgctttgcaagaaaatcatcggcaaatgatgggagaacagctaaatggtttaagtgttaacgagctaaacagtcttgagaatcaaattgagataagtttgcgtggaattcgtatgagaaaggaacaactgttgactcaagaaatccaagaactaagccaaaagaggaatcttattcatcaggaaaacctcgatttatctaggaaagtacaacggattcatcaagaaaatgtggagctctacaagaaggcttatatggcaaacacaaacgggtttacacaccgtgaagtagctgttgcggatgatgaatcacacactcagattcggctgcaactaagccagcctgaacattccgattatgacactccaccaagagcaaacgaataa

SEQ ID NO: 109430 - protein, 228 aa, Arabidopsis thaliana
MGRGKIVIQRIDDSTSRQVTFSKRRKGLIKKAKELAILCDAEVGLIIFSSTGKLYDFASSSMKSVIDRYNKSKIEQQQLLNPASEVKFWQREAAVLRQELHALQENHRQMMGEQLNGLSVNELNSLENQIEISLRGIRMRKEQLLTQEIQELSQKRNLIHQENLDLSRKVQRIHQENVELYKKAYMANTNGFTHREVAVADDESHTQIRLQLSQPEHSDYDTPPRANE

SEQ ID NO: 109431 - DNA, 777 bp, Arabidopsis thaliana
  CDS (1)..(777)
atgggaagagggaaagttgagctgaagaggatagagaacaagatcaatagacaagttacttttgcaaagagaagaaatggtttgctcaagaaggcttatgagctttctgtcctttgtgatgctgagattgctcttctcattttctctaaccgtggcaagctctacgaattctgcagcagccctagtggtatggcgaggacggttgataagtatagaaaacatagttatgcaacaatggatccaaatcaatcagctaaagacttgcaggataagtatcaagactacttgaagcttaaatcaagagttgagatccttcaacattcacaaaggcatttgctaggtgaagagctatccgagatggatgtgaatgagcttgagcatctcgaacgccaagtagatgcatcactaagacaaataagatctaccaaggctcggtctatgcttgatcaactatctgacctcaaaactaaggaggaaatgttattggaaaccaatagagatcttaggagaaagttggaggacagtgatgcagcacttactcaatcgttttggggaagttctgctgcagaacaacaacaacaacatcaacaacagcaacaaggcatgagctcttatcaatcaaaccctccaattcaggaagcaggtttcttcaagcctctacaaggcaatgtagcattgcaaatgagcagtcattacaatcacaatcctgcaaatgcaaccaactctgcaacaacatcacagaatgttaatggattcttccctggatggatggtctga

SEQ ID NO: 109432 - protein, 258 aa, Arabidopsis thaliana
MGRGKVELKRIENKINRQVTFAKRRNGLLKKAYELSVLCDAEIALLIFSNRGKLYEFCSSPSGMARTVDKYRKHSYATMDPNQSAKDLQDKYQDYLKLKSRVEILQHSQRHLLGEELSEMDVNELEHLERQVDASLRQIRSTKARSMLDQLSDLKTKEEMLLETNRDLRRKLEDSDAALTQSFWGSSAAEQQQQHQQQQQGMSSYQSNPPIQEAGFFKPLQGNVALQMSSHYNHNPANATNSATTSQNVNGFFPGWMV

SEQ ID NO: 109433 - DNA, 759 bp, Arabidopsis thaliana
  CDS (1)..(759)
atgggaagagggagagtggagatgaagaggatagagaacaagattaatagacaagtgaccttctcaaaaagaagaaacggtttgctgaagaaagcttatgagctttctgttctttgcgatgccgaagttgctctcatcatcttctcaagccgtggcaagctctacgagtttggtagtgttggaattgaaagcacaatcgaacggtataatcgttgttacaactgctctctaagcaataataagcctgaagagactacacagagttggtgtcaggaggtgacaaagcttaaatccaaatacgaatctcttgttcgtactaacaggaatttgcttggagaagatcttggagaaatgggtgtgaaggaactgcaagcgctcgagaggcagctcgaagccgctcttaccgcgactcgacagcgcaagacacaagttatgatggaagaaatggaagaccttaggaaaaaggagaggcaactaggagacataaacaaacaactcaagattaagtttgaaacggaaggccatgctttcaaaacctttcaagacttatgggcaaactcggcggcatcggtggccggggatccaaacaattctgaatttccggtagagccttctcatcctaatgtattggattgcaacaccgaaccctttttacaaatagggtttcaacaacattactacgtgcaaggtgaagggtcttcggtatcaaagagtaacgtggcaggtgagactaatttcgtccaaggttgggttctttga

SEQ ID NO: 109434 - protein, 252 aa, Arabidopsis thaliana
MGRGRVEMKRIENKINRQVTFSKRRNGLLKKAYELSVLCDAEVALIIFSSRGKLYEFGSVGIESTIERYNRCYNCSLSNNKPEETTQSWCQEVTKLKSKYESLVRTNRNLLGEDLGEMGVKELQALERQLEAALTATRQRKTQVMMEEMEDLRKKERQLGDINKQLKIKFETEGHAFKTFQDLWANSAASVAGDPNNSEFPVEPSHPNVLDCNTEPFLQIGFQQHYYVQGEGSSVSKSNVAGETNFVQGWVL

SEQ ID NO: 109435 - DNA, 729 bp, Arabidopsis thaliana
  CDS (1)..(729)
atgggaagaggtagggttcagctgaagaggatagagaacaagatcaataggcaagttactttctcaaagagaaggtctggtttgctcaagaaagctcatgagatctctgttctctgcgatgctgaggttgctctcatcgtcttctcttccaaaggcaaactcttcgaatattccaccgactcttgcatggagaggatacttgaacgctatgatcgctatttatattcagacaaacaacttgttggccgagacgtttcacaaagtgaaaattgggttctagaacatgctaagctcaaggcaagagttgaggtacttgagaagaacaaaaggaattttatgggggaagatcttgattcgttgagcttgaaggagctccaaagcttggagcatcagctcgatgcagctatcaagagcattaggtcaagaaagaaccaagctatgttcgaatccatatctgcgctccagaagaaggataaagccttgcaagatcacaacaattcgcttctcaaaaagattaaggagagggagaagaaaacgggtcagcaagaaggacaattagtccaatgctccaactcttcttcagttcttctgcctcaatactgcgtaacctcctccagagatggctttgtggagagagttgggggagagaacggtggtgcatcgtcgttgacggaaccaaactctctgcttccggcttggatgttacgtcctaccactacgaacgagtag

SEQ ID NO: 109436 - protein, 242 aa, Arabidopsis thaliana
MGRGRVQLKRIENKINRQVTFSKRRSGLLKKAHEISVLCDAEVALIVFSSKGKLFEYSTDSCMERILERYDRYLYSDKQLVGRDVSQSENWVLEHAKLKARVEVLEKNKRNFMGEDLDSLSLKELQSLEHQLDAAIKSIRSRKNQAMFESISALQKKDKALQDHNNSLLKKIKEREKKTGQQEGQLVQCSNSSSVLLPQYCVTSSRDGFVERVGGENGGASSLTEPNSLLPAWMLRPTTTNE

SEQ ID NO: 109437 - DNA, 753 bp, Solanum commersonii
  CDS (1)..(753)
  misc_feature (693)..(693): n is a, g, c or t
atgggaagaggaagagtccagttgaagcgaatagagaacaaaattaaccgtcaagtgactttctcgaaacgtcgatctggtttgctgaagaaagctcatgagatctctgtgctttgtgatgctgaggttggtttgattgttttttccactaaaggaaaactctttgaatatgcaactgattcatgcatggagaggttacttgaaagatatgaaagatactcatttgctgagaagcagcttgttcctactgatcatacatccccgggaagctggactcttgaaaatgcaaaacttaaggccagacttgaggttctgcagaggaacgaaaagctttatgtgggagaagatttggagtcgttaaatatgaaagaacttcagaatcttgaacaccagcttgcttctgctcttaaacacattcgatcaagaaagaaccaattgatgcatgagtccatttctgtgcttcaaaaacaggacagagcattgcaggagcaaaacaaccagctttccaagaaggtgaaggagagggagaaagaggtggaacagcaaaatcagtgggatcagcagaaccatgaaatcaactcatctacatttgttttgccacaacaattggactctcctcaccttggggaagcatcccagaatactaatgtagtagataatggagaagtggaaggaggtaattcttcacagcancaaggtgcagctaataatactgtgatgccacaatggatggttcgccatcttaatggttaa

SEQ ID NO: 109438 - protein, 250 aa, Solanum commersonii
  misc_feature (231)..(231): The Xaa at location 231 stands for Gln, or His.
MGRGRVQLKRIENKINRQVTFSKRRSGLLKKAHEISVLCDAEVGLIVFSTKGKLFEYATDSCMERLLERYERYSFAEKQLVPTDHTSPGSWTLENAKLKARLEVLQRNEKLYVGEDLESLNMKELQNLEHQLASALKHIRSRKNQLMHESISVLQKQDRALQEQNNQLSKKVKEREKEVEQQNQWDQQNHEINSSTFVLPQQLDSPHLGEASQNTNVVDNGEVEGGNSSQXQGAANNTVMPQWMVRHLNG

SEQ ID NO: 109439 - DNA, 684 bp, Solanum lycopersicum
  CDS (1)..(684)
atgggaagaggaagagtccagttgaagcgaatagagaacaaaattaaccgtcaagttaccttctcgaaacgtcgatctggtttgctgaagaaagcccatgagatctctgtgctttgtgatgctgaggttggtttgattgttttttctactaaaggaaaactctttgaatatgccaacgattcctgcatggagaggatacttgaaagatatgaaagatactcatttgctgagaaacagcttgttcctactgatcatacctccccggtaagctggacccttgaacatcgaaaacttaaggccagacttgaggttctgcagaggaaccaaaagcattatgtgggagaagatttggagtctttaagtatgaaggaacttcagaatctggagcaccagcttgattcagctcttaaacacattcgatcaagaaagaatcaattgatgcatgagtccatttctgtgcttcaaaaaaaggacagagcattgcaggagcaaaacaaccagctttcgaagaaggtgaaggagagggagaagagtgcacagcaaatcagtggaatcaactcatcttcattgtttgcacacactgacttctacttgggaacataccagagtactaatgtaatagataatgggaagtggaaggaggtagttcttcacagcagcaaggtgcagctaataatactgtga

SEQ ID NO: 109440 - protein, 227 aa, Solanum lycopersicum
MGRGRVQLKRIENKINRQVTFSKRRSGLLKKAHEISVLCDAEVGLIVFSTKGKLFEYANDSCMERILERYERYSFAEKQLVPTDHTSPVSWTLEHRKLKARLEVLQRNQKHYVGEDLESLSMKELQNLEHQLDSALKHIRSRKNQLMHESISVLQKKDRALQEQNNQLSKKVKEREKSAQQISGINSSSLFAHTDFYLGTYQSTNVIDNGKWKEVVLHSSKVQLIIL

SEQ ID NO: 109441 - DNA, 753 bp, Solanum tuberosum
  CDS (1)..(753)
atgggaagaggaagagtccagttgaagcgaatagagaacaaaattaaccgtcaagtgactttctcgaaacgtcgatctggtttgctgaagaaagctcatgagatctctgtgctttgtgatgctgaggttggtttgattgttttttccactaaaggaaaactctttgaatatgccaatgattcatgcatggagaggctacttgaaagatatgaaagatactcatttgctgagaggcagcttgttcctactgatcatacatccccgggaagctggactctggaacatgcaaaacttaaggccagacttgaggttcttcagaggaaccaaaagcattatgtgggagaagatttggagtcgttaaatatgaaagaacttcagaatcttgaacaccagcttgattctgctcttaaacacattcgatcaagaaagaaccaattgatgcatgagtccatttctgtgcttcaaaaacaggacagagcattgcaggagcaaaacaaccagctttccaagaaggtgaaggagagggagaaagaggtggcacagcaaaatcagtgggatcagcagaaccatgaaatcaactcatctacatttgttttgccacaacaattggactctcctcaccttggggaagcataccagaatactaatgtagtagataatggagaagtggaaggaggtaattcttcacagcagcaaggtgcagctaataatactgtgatgccacaatggatgcttcgccatcttaatggttaa

SEQ ID NO: 109442 - protein, 250 aa, Solanum tuberosum
MGRGRVQLKRIENKINRQVTFSKRRSGLLKKAHEISVLCDAEVGLIVFSTKGKLFEYANDSCMERLLERYERYSFAERQLVPTDHTSPGSWTLEHAKLKARLEVLQRNQKHYVGEDLESLNMKELQNLEHQLDSALKHIRSRKNQLMHESISVLQKQDRALQEQNNQLSKKVKEREKEVAQQNQWDQQNHEINSSTFVLPQQLDSPHLGEAYQNTNVVDNGEVEGGNSSQQQGAANNTVMPQWMLRHLNG

SEQ ID NO: 109443 - DNA, 753 bp, Aranda deborah
  CDS (1)..(753)
atgggaagagggagagtggagctgaagatgattgagaacaagatcaatcgtcaagtaacctttgccaagcgccggaaacgccttctcaagaaggcctatgagctctccgtcctctgcgatgcggaggttgccctcatcattttctccaatcgtggaaagctctacgagttctgcagcagcacaagtatgttaaaaacgttagagaagtaccaaaaatgcaattttggaagcccagaatcaactatcatatcaagagagacccagagtagtcagcaggagtacttgaaacttaaaaaccgagtggaagccttacaaagatcgcagagaaatttgcttggcgaggatctcggtccacttggcagcaaggagctcgagcaattagagcggcaactggactcctctcttagacagattcgatcaacacggacgcagttcatgcttgatcagctagccgacctccagcgaagggagcaaatgctttgcgaggcgaataagaccctaaagagaaggtttgaggaaagcagccaggcgaatcagcagcaggtgtgggatcccagcaatacgcacgccgtaggatacgggaggcagcctgctcagcaccatggagaggctttctatcatcccttggagtgcgagccgacattgcagatcgggtatcattctgatataacgatggcaacggcgactgcttcaactgttaataattacatgccacctggttggcttggacaaatttcaggctcctacgaatag

SEQ ID NO: 109444 - protein, 250 aa, Aranda deborah
MGRGRVELKMIENKINRQVTFAKRRKRLLKKAYELSVLCDAEVALIIFSNRGKLYEFCSSTSMLKTLEKYQKCNFGSPESTIISRETQSSQQEYLKLKNRVEALQRSQRNLLGEDLGPLGSKELEQLERQLDSSLRQIRSTRTQFMLDQLADLQRREQMLCEANKTLKRRFEESSQANQQQVWDPSNTHAVGYGRQPAQHHGEAFYHPLECEPTLQIGYHSDITMATATASTVNNYMPPGWLGQISGSYE

SEQ ID NO: 109445 - DNA, 726 bp, Petunia hybrida
  CDS (1)..(726)
atgggaagaggtagagttgagcttaagagaatagagaacaaaatcaatagacaagttacctttgctaagagaagaaatggactattgaaaaaagcttatgaactttctgttctttgtgatgctgaagttgctcttattattttctctaataggggaaaattgtacgagttttgcagtagctctagcatgctcaagaccttagagaggtaccagaagtgtaactatggagcaccagagactaatatatccacacgagaagcactggaaataagcagccaacaagagtacttgaagcttaaagcacgttacgaagcattacagcgatcacagaggaatcttcttggtgaagatcttggccctttgaacagcaaagaacttgaatcacttgaaaggcagcttgatatgtcactgaaacaaatcagatcaactcggactcagctgatgttggatcaacttcaagatcttcagagaaaggaacatgcattaaacgaagcaaacagaaccttgaaacaaaggttgatggaaggaagcacactaaatctgcagtggcagcaaaatgcacaagatgtgggctacggcagacaagcaactcaaactcagggagatggcttctttcatcctttggaatgtgaacccactttacaaattgggtatcaaaatgatccaattacagtaggaggagcagggccaagtgtgaataactacatggctggctggttgccttga

SEQ ID NO: 109446 - protein, 241 aa, Petunia hybrida
MGRGRVELKRIENKINRQVTFAKRRNGLLKKAYELSVLCDAEVALIIFSNRGKLYEFCSSSSMLKTLERYQKCNYGAPETNISTREALEISSQQEYLKLKARYEALQRSQRNLLGEDLGPLNSKELESLERQLDMSLKQIRSTRTQLMLDQLQDLQRKEHALNEANRTLKQRLMEGSTLNLQWQQNAQDVGYGRQATQTQGDGFFHPLECEPTLQIGYQNDPITVGGAGPSVNNYMAGWLP

SEQ ID NO: 109447 - DNA, 675 bp, Solanum lycopersicum
  CDS (1)..(675)
atgggaaggggtagggttgagctaaagagaatagaaggcaagatcaacaggcaagtgacctttgctaagagaagaaatgggcttttgaagaaagcttatgagctttcagttctttgtgatgctgaggttgctctaatcatcttctctaataggggaaaactctatgagttctgcagtagttctagcatgctaaagacgttggagaggtaccagaagtgcaactatggagcacctgaaccgaatatatcaacacgagaagcactggaaattagtagccagcaggagtacttgaagcttaaaggacgttacgaagcattgcagcgatcacagaggaatcttcttggtgaagatcttggtcctttgaacagcaaagaacttgaatcacttgagagacaacttgatatgtcgctcaaacagatcagatcaactcggactcagttaatgttggatcaacttacagattatcagagaaaggaacatgcattgaacgaagccaacagaaccttgaaacaaaggttgatggaaggaagccaactaaatctgcagtgcagccaaatgcacaagctgtgggctatggccggcaaacaactcaaactcagggcgatggcttctttcatcctttggattgtgaacctactttgcaaattgggtatcagaatgatccaattacagtag

SEQ ID NO: 109448 - protein, 224 aa, Solanum lycopersicum
MGRGRVELKRIEGKINRQVTFAKRRNGLLKKAYELSVLCDAEVALIIFSNRGKLYEFCSSSSMLKTLERYQKCNYGAPEPNISTREALEISSQQEYLKLKGRYEALQRSQRNLLGEDLGPLNSKELESLERQLDMSLKQIRSTRTQLMLDQLTDYQRKEHALNEANRTLKQRLMEGSQLNLQCSQMHKLWAMAGKQLKLRAMASFILWIVNLLCKLGIRMIQLQ

SEQ ID NO: 109449 - DNA, 729 bp, Panax ginseng
  CDS (1)..(729)
atgtcattttatgatgatcaatccgggaatctgtcccctcagagaaaattgggaaggggaaagattgagatcaagcggatcgaaaacaccacgaatcgtcaggttactttctgtaagcgccgcaatgggttgctcaagaaggcctatgaattatctgttctttgtgatgctgaggttgcactaattgtcttctctacccgtggccgcctctatgagtatgctaacaacagtgttaaaggaactattgaaaggtacaagaaggcatgcacagattctcccaatacttcttcagtttccgaagccaatgctcagttttaccagcaagaagcctcaaaactgcgtcaggaaatttcaagcatccagaaaaacaacaggaacatgatgggtgaatctttaggctctttgactgttagagacctcaaaggcctggaaactaaactagagaaaggaattagcagaattcgctccaaaaagaatgagctgctatttgctgaaattgaatatatgcaaaagaaggaaatcgacttgcacaacaataatcagtacctacgagcaaagattgctgagaatgagagagcccagcagcacatgaacttgatgccagggagttctgactatgaacttgcaccacctcagtcattcgatggtcgaaactacatccaactgaatggcctgcaacctaataatcattattctcgccaagaccaaactgcgctccagttagtttaa

SEQ ID NO: 109450 - protein, 242 aa, Panax ginseng
MSFYDDQSGNLSPQRKLGRGKIEIKRIENTTNRQVTFCKRRNGLLKKAYELSVLCDAEVALIVFSTRGRLYEYANNSVKGTIERYKKACTDSPNTSSVSEANAQFYQQEASKLRQEISSIQKNNRNMMGESLGSLTVRDLKGLETKLEKGISRIRSKKNELLFAEIEYMQKKEIDLHNNNQYLRAKIAENERAQQHMNLMPGSSDYELAPPQSFDGRNYIQLNGLQPNNHYSRQDQTALQLV

SEQ ID NO: 109451 - DNA, 747 bp, Solanum lycopersicum
  CDS (1)..(747)
atggacttccaaagtgatctaaccagagagatctcaccacaaaggaaactaggaagggggaaaattgagatcaaaaggatcgaaaacacgacgaatcgacaagtaacattctgcaagaggcgcaatggtttgcttaaaaaggcttatgaattgtctgtgctctgtgatgctgaggttgctttggttgtcttctcaaacagaggcagactctatgagtatgccaacaacagtgtgaaagcaacaatcgagaggtacaagaaagcatgctcagattcctcaaacactggttcagtatccgaggccaatgctcagtattaccagcaagaagcctccaaactgcgcgcacaaattggaaatctgatgaaccaaaacaggaacatgatgggtgaagctcttgctggaatgaaactcaaagaactgaagaatctggagcaaagaattgaaaaagggattagcaaaatccgatccaaaaagaatgagctgttgtttgctgaaattgagtatatgcagaagagggaagttgatttacacaacaacaatcagtacctgagagcaaagattgctgaaactgagagagctcagcatcagcatcagcagatgaacttgatgccagggagttcatcaaactatcatgagcttgtgcctccacctcagcaattcgatactcgaaactatctacaagttaatggattgcaaaccaacaaccattaccctagacaagaccaaccccctattcaactagtctaa

SEQ ID NO: 109452 - protein, 248 aa, Solanum lycopersicum
MDFQSDLTREISPQRKLGRGKIEIKRIENTTNRQVTFCKRRNGLLKKAYELSVLCDAEVALVVFSNRGRLYEYANNSVKATIERYKKACSDSSNTGSVSEANAQYYQQEASKLRAQIGNLMNQNRNMMGEALAGMKLKELKNLEQRIEKGISKIRSKKNELLFAEIEYMQKREVDLHNNNQYLRAKIAETERAQHQHQQMNLMPGSSSNYHELVPPPQQFDTRNYLQVNGLQTNNHYPRQDQPPIQLV

SEQ ID NO: 109453 - DNA, 747 bp, Nicotiana tabacum
  CDS (1)..(747)
atggacttccaaagtgatctaacaagagagatctctccacaaaggaaactgggaagaggaaagattgagatcaaacggatcgaaaacacaacgaatcgtcaagtcactttctgcaagagacgcaatggtttactcaaaaaggcctatgaattatctgtgctctgtgatgctgaggttgctttgattgtcttctcaagcagaggcagactctatgagtatgccaacaacagtgtgaaagcaacaattgagaggtacaagaaagcttgttcagattcctcaaacactggttcaatttccgaggccaatgctcagtattatcagcaagaagcctccaaactgcgcgcacaaattggaaatctgcagaatcagaacaggaacatgttgggtgaatcactggctgcactgagcctcagagatctgaagaatctggaacaaaaaattgaaaaaggcattagcaaaatcagatccaaaaagaatgagctgctgtttgctgaaattgagtacatgcagaagagggaaattgatttacacaacaacaatcagtacctgagagcaaagattgctgaaactgagagagctcagcagcagcagcagcagcagcagatgaacttgatgccagggagttcaagctatgagcttgtgcctccacctcatcaatttgatactcgaaactatttacaagttaatggtttgcaaaccaacaaccattacactagacaagaccaaccatctcttcaactagtctaa

SEQ ID NO: 109454 - protein, 248 aa, Nicotiana tabacum
MDFQSDLTREISPQRKLGRGKIEIKRIENTTNRQVTFCKRRNGLLKKAYELSVLCDAEVALIVFSSRGRLYEYANNSVKATIERYKKACSDSSNTGSISEANAQYYQQEASKLRAQIGNLQNQNRNMLGESLAALSLRDLKNLEQKIEKGISKIRSKKNELLFAEIEYMQKREIDLHNNNQYLRAKIAETERAQQQQQQQQMNLMPGSSSYELVPPPHQFDTRNYLQVNGLQTNNHYTRQDQPSLQLV

SEQ ID NO: 109455 - DNA, 771 bp, Arabidopsis thaliana
  CDS (1)..(771)
atgggaaggggtagggttcaattgaagaggatagagaacaagatcaatagacaagtgacattctcgaaaagaagagctggtcttttgaagaaagctcatgagatctctgttctctgtgatgctgaagttgctcttgttgtcttctcccataagggaaaactcttcgaatactccactgattcttgtatggagaagatacttgaacgctatgagaggtactcttacgccgaaagacagcttattgcacctgagtccgacgtcaatacaaactggtcgatggagtataacaggcttaaggctaagattgagcttttggagagaaaccagaggcattatcttggggaagacttgcaagcaatgagccctaaagagcttcagaatctggagcagcagcttgacactgctcttaagcacatccgcactagaaaaaaccaacttatgtacgagtccatcaatgagctccaaaaaaaggagaaggccatacaggagcaaaacagcatgctttctaaacagatcaaggagagggaaaaaattcttagggctcaacaggagcagtgggatcagcagaaccaaggccacaatatgcctccccctctgccaccgcagcagcaccaaatccagcatccttacatgctctctcatcagccatctccttttctcaacatgggtggtctgtatcaagaagatgatcctatggcaatgaggaggaatgatctcgaactgactcttgaacccgtttacaactgcaaccttggctgcttcgccgcatga

SEQ ID NO: 109456 - protein, 256 aa, Arabidopsis thaliana
MGRGRVQLKRIENKINRQVTFSKRRAGLLKKAHEISVLCDAEVALVVFSHKGKLFEYSTDSCMEKILERYERYSYAERQLIAPESDVNTNWSMEYNRLKAKIELLERNQRHYLGEDLQAMSPKELQNLEQQLDTALKHIRTRKNQLMYESINELQKKEKAIQEQNSMLSKQIKEREKILRAQQEQWDQQNQGHNMPPPLPPQQHQIQHPYMLSHQPSPFLNMGGLYQEDDPMAMRRNDLELTLEPVYNCNLGCFAA

SEQ ID NO: 109457 - DNA, 702 bp, Dianthus caryophyllus
  CDS (1)..(702)
atggggagaggaagagtagagttgaagagaatagagaacaaaataaatagacaagtaacatttgcaaagagaagaaatgggttgttgaagaaggcttatgaattatcagttctttgtgatgctgaagttgctcttattgtattttctaaccgtggtaaactctatgagttttgtagcacttcctgcatgaacaaaacattggagagatatcagagatgcagctatggttcccttgaaacaagtcaaccttctaaagagaccgagagtagctaccaggaatatcttaagctcaaagccaaagttgatgtcctacaacgatcccataggaatttgctaggggaggacttgggagagttgagcacaaaagagttggaacagcttgagcatcaattggataagtctttgaggcaaatcaggtctattaagacccaacatatgctcgatcaacttgctgatcttcaaaagaaggaagagatgctatttgagtctaacagagctttaaaaacgaagttggaagaaagttgtgcatcatttcgtccgaattgggatgtccgccaaccgggtgacggttttttcgaaccattaccattaccatgcaacaacaatcttcaaatagggtacaatgaagcaacacaagatcaaatgaacgcaacaacttcagctcaaaatgtgcatggatttgcacaaggatggatgctttga

SEQ ID NO: 109458 - protein, 233 aa, Dianthus caryophyllus
MGRGRVELKRIENKINRQVTFAKRRNGLLKKAYELSVLCDAEVALIVFSNRGKLYEFCSTSCMNKTLERYQRCSYGSLETSQPSKETESSYQEYLKLKAKVDVLQRSHRNLLGEDLGELSTKELEQLEHQLDKSLRQIRSIKTQHMLDQLADLQKKEEMLFESNRALKTKLEESCASFRPNWDVRQPGDGFFEPLPLPCNNNLQIGYNEATQDQMNATTSAQNVHGFAQGWML

SEQ ID NO: 109459 - DNA, 714 bp, Gnetum gnemon
  CDS (1)..(714)
atgggtcgaggaaagattgagatcaaaaggatcgagaacacaacgaacaggcaggtgactttctcaaaaagaagaggcggtctgcttaaaaaggcgcatgagctctccgttctgtgtgacgcagaactcggcctcatcatcttctccagctctggcaagctctttgagtactcaagcgcctcatccagcatgaagaagatcatagaaaggtaccaaaaggtatccggagcaagaattacagagtatgataaccagcacctctactgtgagatgacaaggatgaagaacgagaatgaaaagcttcaaacgaacatcaggagaatgatgggtgaagatctgacctcccttaccatgactgaactgcatcatctaggacagcaattggaatctgcttccagccgggtcagaagtagaaaaaatcagttgatgctgcaacagctagagaatctccgtagaaaggaaagaatcctggaggatcagaacagtcacctttgtagattacttgcggagcagcaagcagcagtggaaggagttcaagagccactgctagaatttggagtattctgtcctcctccagataataaaacagcagcagcagcaaatgcaggccccttgcacttgggtcatcatcttcctgcattcaggctgcaacccactcaaccaaatctccaggaatcctccattgttccaaatagacctgttcttcagctctga

SEQ ID NO: 109460 - protein, 237 aa, Gnetum gnemon
MGRGKIEIKRIENTTNRQVTFSKRRGGLLKKAHELSVLCDAELGLIIFSSSGKLFEYSSASSSMKKIIERYQKVSGARITEYDNQHLYCEMTRMKNENEKLQTNIRRMMGEDLTSLTMTELHHLGQQLESASSRVRSRKNQLMLQQLENLRRKERILEDQNSHLCRLLAEQQAAVEGVQEPLLEFGVFCPPPDNKTAAAANAGPLHLGHHLPAFRLQPTQPNLQESSIVPNRPVLQL

SEQ ID NO: 109461 - DNA, 630 bp, Nicotiana tabacum
  CDS (1)..(630)
atgggaagaggaaagatagagatcaaaagaatagagaactcaagcaacaggcaggtcacttactcaaaaagaagaaatgggatcttgaaaaaagctaaggaaatcagtgttctttgtgatgctcgtgtttctgtcatcatttttgctagttctggcaagatgcatgagttctcctctacttcgttggttgatattttggatcaataccacaagcttactggaagaagattgtgggatgctaagcatgagaacttggacaatgaaatcaacaaagtcaagaaagacaatgacaacatgcaaattgaactcaggcacctaaagggtgaagacatcacatctttgaaccacagagagctcatgatgttggaagatgcccttgataatggactcactagtatccgtaacaagcagaatgaccttctgaggatgatgaggaaaaagactcaaagtatggaggaggagcaagaccaacttaattggcaattgcggcaactagagatagcaagcatgaataggaatatgggagaaataggggaagtgtttcaccaaagggagaatgaataccaaactcagatgccttttgccttccgagttcagccaatgcagcctaatttgcaggagagattctaa

SEQ ID NO: 109462 - protein, 209 aa, Nicotiana tabacum
MGRGKIEIKRIENSSNRQVTYSKRRNGILKKAKEISVLCDARVSVIIFASSGKMHEFSSTSLVDILDQYHKLTGRRLWDAKHENLDNEINKVKKDNDNMQIELRHLKGEDITSLNHRELMMLEDALDNGLTSIRNKQNDLLRMMRKKTQSMEEEQDQLNWQLRQLEIASMNRNMGEIGEVFHQRENEYQTQMPFAFRVQPMQPNLQERF

SEQ ID NO: 109463 - DNA, 798 bp, Solanum lycopersicum
  CDS (1)..(798)
atggctagagaaaaaattcagatcaagaaaatagataactccacagcaagacaagttacattttcaaagaggagaagaggtttattcaagaaagctgaagaactttctgttctctgtgatgctgatgttgctctcatcattttctcttctactggaaaattatttgactattctagctcaagcatgaaacaaattcttgagaggcgtgatttgcattccaaaaatctggaaaaattggatcaaccatcacttgaacttcagcttgtagaaaatagcaactactccagattaagcaaggaaatttccgaaaaaagtcatcgattaaggcaaatgaggggagaagaacttcaaggactaaatattgaagagttgcaacaattggagagatctcttgaaactggattgagccgcgtcatagagagaaagggtgataaaataatgagagagatcaaccaactccaacaaaagggtatgcatctaatggaagaaaatgaaaaattaaggcaacaggtgatggagatatctaataataataataataataataatggatatagagaggcaggagtagtaatatttgaaccagaaaatggatttaataataataataatgaagatggccaatcatctgaatcagtaacaaatccatgtaactcaattgatcctcctcctcaagatgatgatagttctgatacttctctcaaattggggttagctaccttactcaggctgaagagatcaaaagcaaggtgtggctatttttgtatgttattagaagaaggagaaaaaaaaaagtaa

SEQ ID NO: 109464 - protein, 265 aa, Solanum lycopersicum
MAREKIQIKKIDNSTARQVTFSKRRRGLFKKAEELSVLCDADVALIIFSSTGKLFDYSSSSMKQILERRDLHSKNLEKLDQPSLELQLVENSNYSRLSKEISEKSHRLRQMRGEELQGLNIEELQQLERSLETGLSRVIERKGDKIMREINQLQQKGMHLMEENEKLRQQVMEISNNNNNNNNGYREAGVVIFEPENGFNNNNNEDGQSSESVTNPCNSIDPPPQDDDSSDTSLKLGLATLLRLKRSKARCGYFCMLLEEGEKKK

SEQ ID NO: 109465 - DNA, 693 bp, Oryza sativa subsp
  CDS (1)..(693)
atggtgcgggggaagacgcagatgaagcggatagagaaccccacgagccgccaggtcaccttctccaagcgccgcaacggcctgctcaagaaggccttcgagctctccgtcctctgcgacgccgaggtcgcgctcatcgtcttctccccgcgcggcaagctctacgaattcgccagcgccagtacgcagaaaacaattgaacgctataggacgtatacaaaggaaaatatcggcaacaagacagtacagcaagatatagagcaagtaaaagctgacgctgatggtttggcaaagaaacttgaagctcttgaaacttacaaaagaaaactgctgggtgaaaagttggatgaatgttctattgaagaactgcatagcctggaggtcaagctggagagaagcctcattagcatcaggggaaggaagacaaagctgcttgaggagcaggttgccaaactgagagagaaggagatgaagctgcgcaaggacaatgaagagttacgcgaaaagtgtaagaatcagcctcccttgtctgctcctttgactgtccgggccgaagatgagaacccggaccgtaacatcaacaccaccaacgacaacatggatgtcgaaactgagctattcatagggctgcctggcagaagtcgctccagcggcggtgctgcagaagatagccaagcgatgccccattcttaa

SEQ ID NO: 109466 - protein, 230 aa, Oryza sativa subsp
MVRGKTQMKRIENPTSRQVTFSKRRNGLLKKAFELSVLCDAEVALIVFSPRGKLYEFASASTQKTIERYRTYTKENIGNKTVQQDIEQVKADADGLAKKLEALETYKRKLLGEKLDECSIEELHSLEVKLERSLISIRGRKTKLLEEQVAKLREKEMKLRKDNEELREKCKNQPPLSAPLTVRAEDENPDRNINTTNDNMDVETELFIGLPGRSRSSGGAAEDSQAMPHS

SEQ ID NO: 109467 - DNA, 702 bp, Oryza sativa subsp
  CDS (1)..(702)
atggtgcgggggaggacggagctgaagcggattgagaacccgacgagccggcaggtgaccttctccaagcgccggaatggcctcctcaagaaggcgttcgagctctccgtcctctgcgacgccgaggtcgccctcatcgtcttctccccccgcggccgcctctacgagttcgccagcgcccccagcctacagaaaaccatcgaccgctataaagcatacacaaaggatcatgtcaacaataagacaattcaacaagatatccagcaagtcaaagatgatactttaggtttggccaagaaacttgaagctcttgatgagtccagacggaaaatattgggagaaaatttagaaggatgctctattgaagaactgcgtggtctagaaatgaaacttgagaagagcctccacaacataagactaaagaagaccgagcttctggagcggcagatagccaagctgaaagagaaggagcggactttgcttaaagacaacgaaaatttacgcggaaagcatcgcaaccttgaggctgcggcgctggtggctaaccacatgacgacgacgacggcgccggcggcgtggccgcgggacgtgcctatgacgagcagcacagccggcgccgccgacgccatggacgtggagactgatctgtacattggattgcccggcactgagcgctcctccaaccggtcggagacaggttga

SEQ ID NO: 109468 - protein, 233 aa, Oryza sativa subsp
MVRGRTELKRIENPTSRQVTFSKRRNGLLKKAFELSVLCDAEVALIVFSPRGRLYEFASAPSLQKTIDRYKAYTKDHVNNKTIQQDIQQVKDDTLGLAKKLEALDESRRKILGENLEGCSIEELRGLEMKLEKSLHNIRLKKTELLERQIAKLKEKERTLLKDNENLRGKHRNLEAAALVANHMTTTTAPAAWPRDVPMTSSTAGAADAMDVETDLYIGLPGTERSSNRSETG

SEQ ID NO: 109469 - DNA, 711 bp, Oryza sativa subsp
  CDS (1)..(711)
atggggagggggaagatcgagataaagcggatcgagaacacgacgaaccggcaggtgaccttctgcaagcgccgcaatggcctcctgaagaaggcgtacgagctgtccgtcctctgcgacgccgaggttgccctcatcgtcttctccagccgcgggcgcctctacgagtacgccaacaacagtgtgaaatccaccgttgagaggtacaagaaggcaaacagtgacacctccaactctggcacagttgcagaagtcaatgcccagcactaccagcaggagtcctccaaactgcgccaacaaatcagtagcttacagaacgcaaacagtaggaccatagtgggggattctatcaacaccatgagcctcagggaccttaaacaggtagagaacaggctggagaaaggcatagctaagataagggctagaaagaatgagctgttatatgctgaagttgagtacatgcagaaaagggaagttgagctgcagaatgacaacatgtacctgaggagcaaggttgttgagaatgagaggggacagcagccactgaacatgatgggggcagcatcaacaagtgaatacgatcatatggttaataacccatatgattccaggaactttcttcaagtgaacatcatgcagcagcctcagcattacgcccatcagctgcagccaactacccttcaactcgggcagcagccggccttcaattag

SEQ ID NO: 109470 - protein, 236 aa, Oryza sativa subsp
MGRGKIEIKRIENTTNRQVTFCKRRNGLLKKAYELSVLCDAEVALIVFSSRGRLYEYANNSVKSTVERYKKANSDTSNSGTVAEVNAQHYQQESSKLRQQISSLQNANSRTIVGDSINTMSLRDLKQVENRLEKGIAKIRARKNELLYAEVEYMQKREVELQNDNMYLRSKVVENERGQQPLNMMGAASTSEYDHMVNNPYDSRNFLQVNIMQQPQHYAHQLQPTTLQLGQQPAFN

SEQ ID NO: 109471 - DNA, 861 bp, Saccharomyces cerevisiae
  CDS (1)..(861)
atgtcagacatcgaagaaggtacgcctactaataatgggcaacagaaggagagaagaaagatagaaattaagttcatcgagaataaaacaaggcgccatgtgacattttccaaaaggaagcacggtatcatgaaaaaggcgtttgagctttctgttctaacggggacccaggtcctgttgctagtcgtttcagaaacaggtttggtatatactttcagcacgccgaagtttgaacctatagtcacgcagcaggaaggtagaaacctgatccaggcctgtcttaacgcccctgatgatgaggaagaagacgaggaggaagacggtgatgatgatgatgatgatgacgatgatggtaatgatatgcaacgccagcaaccacaacaacagcaaccgcaacaacagcaacaagtattgaatgcacacgcaaatagcttaggccatctaaatcaagatcaggtaccggcaggcgcgctgaaacaagaggtgaagtcacaattgctaggcggtgccaatcctaatcaaaactcaatgattcaacagcagcaacatcacacgcagaattcacaaccacaacagcaacagcaacaacaaccacagcagcaaatgtcacagcaacaaatgtcacagcatcctcgaccacagcaaggaataccacatccgcaacaatcgcagccacagcaacagcaacaacaacaacaacaactgcaacagcagcaacagcagcaacaacaacaacccctcaccggcattcatcagcctcaccaacaggcttttgccaacgctgcctccccctatctgaatgctgaacagaatgctgcctaccaacaatactttcaagaaccgcaacaaggccaatactaa

SEQ ID NO: 109472 - protein, 286 aa, Saccharomyces cerevisiae
MSDIEEGTPTNNGQQKERRKIEIKFIENKTRRHVTFSKRKHGIMKKAFELSVLTGTQVLLLVVSETGLVYTFSTPKFEPIVTQQEGRNLIQACLNAPDDEEEDEEEDGDDDDDDDDDGNDMQRQQPQQQQPQQQQQVLNAHANSLGHLNQDQVPAGALKQEVKSQLLGGANPNQNSMIQQQQHHTQNSQPQQQQQQQPQQQMSQQQMSQHPRPQQGIPHPQQSQPQQQQQQQQQLQQQQQQQQQQPLTGIHQPHQQAFANAASPYLNAEQNAAYQQYFQEPQQGQY

SEQ ID NO: 109473 - DNA, 744 bp, Pisum sativum
  CDS (1)..(744)
atgggaagaggaagagtggaactcaagagagttgagaacaagatcaacagacaagttacctttgcgaaacgaagaaatggtcttttgaaaaaagcttatgagctttctgttctttgtgatgctgaggttgctcttattgtcttctccaatagaggaaaactctatgagttttgcagcacttcaagcatgctgaaaacgcttgagaggtatcagaagtgcaactatggagcacctgagggtaatgtgacatcaaaggaggctttggtattggaattaagcagtcaacaggaatacttgaagctgaaggcacgttatgagtctctacaacgctctcagaggaaccttatgggagaagatcttggccctctaagcagcaaagatcttgaaactcttgaaaggcagctagattcttccttgaagcaaatcagatccacaaggacccaattcatgctggatcagctcggagatcttcaacgtaaggaacacttgctatgtgaggcaaacagagctctcaggcaaaggatggaagggtatcaaataaattcactccaactgaatctgagtgctgaagatatgggatatggacgtcatcatcaaggtcatacacatggtgatgaactatttcaagttcaaccgattgagtgtgaaccaactttacaaattggatatcatcagggtgatccagggtcagtggtgacagcagggccaagcatgaataactatatgggtggatggttaccatga

SEQ ID NO: 109474 - protein, 247 aa, Pisum sativum
MGRGRVELKRVENKINRQVTFAKRRNGLLKKAYELSVLCDAEVALIVFSNRGKLYEFCSTSSMLKTLERYQKCNYGAPEGNVTSKEALVLELSSQQEYLKLKARYESLQRSQRNLMGEDLGPLSSKDLETLERQLDSSLKQIRSTRTQFMLDQLGDLQRKEHLLCEANRALRQRMEGYQINSLQLNLSAEDMGYGRHHQGHTHGDELFQVQPIECEPTLQIGYHQGDPGSVVTAGPSMNNYMGGWLP

SEQ ID NO: 109475 - DNA, 627 bp, Arabidopsis thaliana
  CDS (1)..(627)
atgggtagaggaaagatcgagataaagaggatagagaacgcaaacaacagagtggtgacgttctcaaagaggaggaatggattggtgaagaaggctaaagagatcacagttctttgtgatgcaaaagttgccctcataatctttgcaagtaatggtaagatgattgattactgttgtccttccatggatcttggtgctatgttggaccaataccagaagttatctggcaagaaactatgggatgctaagcatgagaaccttagcaatgagattgataggatcaagaaagagaatgatagcttacaactggagctcaggcatttgaagggagaagatatacagtctctcaacttgaaaaatctgatggctgtcgagcacgccattgaacatggcctcgacaaagtccgagaccaccagatggagatccttatatcaaagaggagaaatgagaagatgatggcggaggagcaacggcaactcactttccagctgcaacaacaggagatggctatagcaagcaacgcaagaggaatgatgatgagagatcatgatgggcagtttggatatagagtgcaaccgattcagccaaatcttcaggaaaagattatgtctttggtcatcgattga

SEQ ID NO: 109476 - protein, 208 aa, Arabidopsis thaliana
MGRGKIEIKRIENANNRVVTFSKRRNGLVKKAKEITVLCDAKVALIIFASNGKMIDYCCPSMDLGAMLDQYQKLSGKKLWDAKHENLSNEIDRIKKENDSLQLELRHLKGEDIQSLNLKNLMAVEHAIEHGLDKVRDHQMEILISKRRNEKMMAEEQRQLTFQLQQQEMAIASNARGMMMRDHDGQFGYRVQPIQPNLQEKIMSLVID

SEQ ID NO: 109477 - DNA, 756 bp, Arabidopsis thaliana
  CDS (1)..(756)
atgggaagaggaagagtagagctgaagaggatagagaacaaaatcaacagacaagtaacgtttgcaaagcgtaggaacggtttgttgaagaaagcttatgaattgtctgttctctgtgatgctgaagttgctctcatcatcttctccaaccgtggaaagctctatgagttttgcagctcctcaaacatgctcaagacacttgatcggtaccagaaatgcagctatggatccattgaagtcaacaacaaacctgccaaagaacttgagaacagctacagagaatatctgaagcttaagggtagatatgagaaccttcaacgtcaacagagaaatcttcttggggaggatttaggacctttgaattcaaaggagttagagcagcttgagcgtcaactggacggctctctcaagcaagttcggtccatcaagacacagtacatgcttgaccagctctcggatcttcaaaataaagagcaaatgttgcttgaaaccaatagagctttggcaatgaagctggatgatatgattggtgtgagaagtcatcatatgggaggaggaggaggatgggaaggtggtgaacagaatgttacctacgcgcatcatcaagctcagtctcagggactataccagcctcttgaatgcaatccaactctgcaaatggggtatgataatccggtatgctcagagcaaataactgcgacaacccaagctcaggcgcagcagggaaacggttacatcccggggtggatgctctga

SEQ ID NO: 109478 - protein, 251 aa, Arabidopsis thaliana
MGRGRVELKRIENKINRQVTFAKRRNGLLKKAYELSVLCDAEVALIIFSNRGKLYEFCSSSNMLKTLDRYQKCSYGSIEVNNKPAKELENSYREYLKLKGRYENLQRQQRNLLGEDLGPLNSKELEQLERQLDGSLKQVRSIKTQYMLDQLSDLQNKEQMLLETNRALAMKLDDMIGVRSHHMGGGGGWEGGEQNVTYAHHQAQSQGLYQPLECNPTLQMGYDNPVCSEQITATTQAQAQQGNGYIPGWML

SEQ ID NO: 109479 - DNA, 753 bp, Arabidopsis thaliana
  CDS (1)..(753)
atgggaagaggaagagtagagctcaagaggatagagaacaaaatcaacagacaagtgacgtttgctaaacgtagaaatggtttgctgaaaaaagcttatgagctttctgttctctgcgatgctgaagtctctctcatcgtcttctccaaccgtggcaagctctacgagttctgcagcacctccaacatgctcaagacactggaaaggtatcagaagtgtagctatggctccattgaagtcaacaacaaacctgctaaagagcttgagaacagctacagagagtacttgaagctgaaaggtagatatgaaaatctgcaacgtcagcagagaaatcttcttggagaggatcttggacctctgaattcaaaggagctagagcagcttgagcgtcaactagacggctctctgaagcaagttcgctgcatcaagacacagtatatgcttgaccagctctctgatcttcaaggtaaggagcatatcttgcttgatgccaacagagctttgtcaatgaagctggaagatatgatcggcgtgagacatcaccatataggaggaggatgggaaggtggtgatcaacagaatattgcctatggacatcctcaggctcattctcagggactataccaatctcttgaatgtgatcccactttgcaaattggatatagccatccagtgtgctcagagcaaatggctgtgacggtgcaaggtcagtcccaacaaggaaacggctacatccctggctggatgctgtga

SEQ ID NO: 109480 - protein, 250 aa, Arabidopsis thaliana
MGRGRVELKRIENKINRQVTFAKRRNGLLKKAYELSVLCDAEVSLIVFSNRGKLYEFCSTSNMLKTLERYQKCSYGSIEVNNKPAKELENSYREYLKLKGRYENLQRQQRNLLGEDLGPLNSKELEQLERQLDGSLKQVRCIKTQYMLDQLSDLQGKEHILLDANRALSMKLEDMIGVRHHHIGGGWEGGDQQNIAYGHPQAHSQGLYQSLECDPTLQIGYSHPVCSEQMAVTVQGQSQQGNGYIPGWML

SEQ ID NO: 109481 - DNA, 756 bp, Arabidopsis thaliana
  CDS (1)..(756)
atgggaagagggagagtagaattgaagaggatagagaacaagatcaataggcaagtgacgtttgcaaagagaaggaatggtcttttgaagaaagcatacgagctttcagttctatgtgatgcagaagttgctctcatcatcttctcaaatagaggaaagctgtacgagttttgcagtagttcgagcatgcttcggacactggagaggtaccaaaagtgtaactatggagcaccagaacccaatgtgccttcaagagaggccttagcagttgaacttagtagccagcaggagtatctcaagcttaaggagcgttatgacgccttacaaagaacccaaaggaatctgttgggagaagatcttggacctctaagtacaaaggagcttgagtcacttgagagacagcttgattcttccttgaagcagatcagagctctcaggacacagtttatgcttgaccagctcaacgatcttcagagtaaggaacgcatgctgactgagacaaataaaactctaagactaaggttagctgatgggtatcagatgccactccagctgaaccctaaccaagaagaggttgatcactacggtcgtcatcatcatcaacaacaacaacactcccaagctttcttccagcctttggaatgtgaacccattcttcagatcgggtatcaggggcagcaagatggaatgggagcaggaccaagtgtgaataattacatgttgggttggttaccttatgacaccaactctatttga

SEQ ID NO: 109482 - protein, 251 aa, Arabidopsis thaliana
MGRGRVELKRIENKINRQVTFAKRRNGLLKKAYELSVLCDAEVALIIFSNRGKLYEFCSSSSMLRTLERYQKCNYGAPEPNVPSREALAVELSSQQEYLKLKERYDALQRTQRNLLGEDLGPLSTKELESLERQLDSSLKQIRALRTQFMLDQLNDLQSKERMLTETNKTLRLRLADGYQMPLQLNPNQEEVDHYGRHHHQQQQHSQAFFQPLECEPILQIGYQGQQDGMGAGPSVNNYMLGWLPYDTNSI

SEQ ID NO: 109483 - DNA, 645 bp, Arabidopsis thaliana
  CDS (1)..(645)
atggtgaggggcaaaactcagatgaagagaatagagaatgcaacaagcagacaagtgactttctccaaaagaaggaatggtttgttgaagaaagcctttgagctctcagtgctttgtgatgctgaagtttctcttatcatcttctctcctaaaggcaaactttatgaattcgccagctccaatatgcaagataccatagatcgttatctgaggcatactaaggatcgagtcagcaccaaaccggtttctgaagaaaatatgcagcatttgaaatatgaagcagcaaacatgatgaagaaaattgaacaactcgaagcttctaaacgtaaactcttgggagaaggcataggaacatgctcaatcgaggagctgcaacagattgagcaacagcttgagaaaagtgtcaaatgtattcgagcaagaaagactcaagtgtttaaggaacaaattgagcagctcaagcaaaaggagaaagctctagctgcagaaaacgagaagctctctgaaaagtggggatctcatgaaagcgaagtttggtcaaataagaatcaagaaagtactggaagaggtgatgaagagagtagcccaagttctgaagtagagacgcaattgttcattgggttaccttgttcttcaagaaagtga

SEQ ID NO: 109484 - protein, 214 aa, Arabidopsis thaliana
MVRGKTQMKRIENATSRQVTFSKRRNGLLKKAFELSVLCDAEVSLIIFSPKGKLYEFASSNMQDTIDRYLRHTKDRVSTKPVSEENMQHLKYEAANMMKKIEQLEASKRKLLGEGIGTCSIEELQQIEQQLEKSVKCIRARKTQVFKEQIEQLKQKEKALAAENEKLSEKWGSHESEVWSNKNQESTGRGDEESSPSSEVETQLFIGLPCSSRK

SEQ ID NO: 109485 - DNA, 723 bp, Arabidopsis thaliana
  CDS (1)..(723)
atggcgagagaaaagattcagatcaggaagatcgacaacgcaacggcgagacaagtgacgttttcgaaacgaagaagagggcttttcaagaaagctgaagaactctccgttctctgcgacgccgatgtcgctctcatcatcttctcttccaccggaaaactgttcgagttctgtagctccagcatgaaggaagtcctagagaggcataacttgcagtcaaagaacttggagaagcttgatcagccatctcttgagttacagctggttgagaacagtgatcacgcccgaatgagtaaagaaattgcggacaagagccaccgactaaggcaaatgagaggagaggaacttcaaggacttgacattgaagagcttcagcagctagagaaggcccttgaaactggtttgacgcgtgtgattgaaacaaagagtgacaagattatgagtgagatcagcgaacttcagaaaaagggaatgcaattgatggatgagaacaagcggttgaggcagcaaggaacgcaactaacggaagagaacgagcgacttggcatgcaaatatgtaacaatgtgcatgcacacggtggtgctgaatcggagaacgctgctgtgtacgaggaaggacagtcgtcggagtctattactaacgccggaaactctaccggagcgcctgttgactccgagagctccgacacttcccttaggctcggcttaccgtatggtggttag

SEQ ID NO: 109486 - protein, 240 aa, Arabidopsis thaliana
MAREKIQIRKIDNATARQVTFSKRRRGLFKKAEELSVLCDADVALIIFSSTGKLFEFCSSSMKEVLERHNLQSKNLEKLDQPSLELQLVENSDHARMSKEIADKSHRLRQMRGEELQGLDIEELQQLEKALETGLTRVIETKSDKIMSEISELQKKGMQLMDENKRLRQQGTQLTEENERLGMQICNNVHAHGGAESENAAVYEEGQSSESITNAGNSTGAPVDSESSDTSLRLGLPYGG

SEQ ID NO: 109487 - DNA, 864 bp, Oryza sativa
  CDS (1)..(864)
atgatgaacatgatgaccgatctgagctgcgggccatcgtcgatgacggagctgaccgcggcagcggcgccggctgggtcaggatcgtcggcggcggtggcggcggggagcagcgagaagatggggagggggaagatcgagataaagcggatcgagaacacgacgaaccggcaggtgaccttctgcaagcgccgcaatggcctcctgaagaaggcgtacgagctgtccgtcctctgcgacgccgaggttgccctcatcgtcttctccagccgcggccgcctctacgagtacgccaacaacagtgtgaaatccaccgttgagaggtacaagaaggcaaacagtgacacctccaactctggcacagttgcagaagtcaatgcccagcactaccagcaggagtcctccaaactgcgccaacaaatcagtagcttacagaacgcaaacagtaggaccatagtgggggattctatcaacaccatgagcctcagggaccttaaacaggtagagaacaggctggagaaaggcatagctaagataagggctagaaagaatgagctgttatatgctgaagttgagtacatgcagaaaagggaagttgagctgcagaatgacaacatgtacctgaggagcaaggttgttgagaatgagaggggacagcagccactgaacatgatgggggcagcatcaacaagtgaatacgatcatatggttaataacccatatgattccaggaactttcttcaagtgaacatcatgcagcagcctcagcattacgcccatcagctgcagccaactacccttcaactcggcagccggccttcaattagttttggtgtagacaccgtacgtacacacgtacgttag

SEQ ID NO: 109488 - protein, 287 aa, Oryza sativa
MMNMMTDLSCGPSSMTELTAAAAPAGSGSSAAVAAGSSEKMGRGKIEIKRIENTTNRQVTFCKRRNGLLKKAYELSVLCDAEVALIVFSSRGRLYEYANNSVKSTVERYKKANSDTSNSGTVAEVNAQHYQQESSKLRQQISSLQNANSRTIVGDSINTMSLRDLKQVENRLEKGIAKIRARKNELLYAEVEYMQKREVELQNDNMYLRSKVVENERGQQPLNMMGAASTSEYDHMVNNPYDSRNFLQVNIMQQPQHYAHQLQPTTLQLGSRPSISFGVDTVRTHVR

SEQ ID NO: 109489 - DNA, 591 bp, Oryza sativa
  CDS (1)..(591)
atggggagggggcgcagcgagataaagaggatagagaaccccacgcagcggcagtccaccttctacaagcgcagggacggcctgttcaagaaggccagggagctcgccgtcctctgcgacgccgacctcctcctcctcctcttctccgcctccggcaagctctaccacttcctctcccccaccgtcccctccgtgagggagtttgtcgagaggtacgaggccaccacgcacaccaaggtttgggcagatatcaggcaggagaggcgcgccgagctggagaaggtgggcagcatgtgcgacctcctggagaaacagctgaggttcatgacggtggacgacggcgaggagtacacggtgccgtcgctggaggcgctggagcacaatctggaggccgccatgcgcaaggtgcgctccgagaaggaccgcaagatcggaggcgagatctgctacctccagaacattattagggggcgacaagaggagcggtacgggctgtgcgacaagattgctcatgcacagactctgaaggatgtggaatgtggatccacctcactaagcaatggcttggaccttaaactggggttcaactag

SEQ ID NO: 109490 - protein, 196 aa, Oryza sativa
MGRGRSEIKRIENPTQRQSTFYKRRDGLFKKARELAVLCDADLLLLLFSASGKLYHFLSPTVPSVREFVERYEATTHTKVWADIRQERRAELEKVGSMCDLLEKQLRFMTVDDGEEYTVPSLEALEHNLEAAMRKVRSEKDRKIGGEICYLQNIIRGRQEERYGLCDKIAHAQTLKDVECGSTSLSNGLDLKLGFN

SEQ ID NO: 109491 - DNA, 798 bp, Oryza sativa
  CDS (1)..(798)
atggggagggggaagattgagataaagagaatcgagaacaagacgagccgtcaggtgaccttctgcaagcgcaggaatgggctgctgaagaaggcctacgagctcgccatactctgcgacgctgagatcgcactcatcgtcttctccagccgaggacgcctctatgagttctccaatgtaaacagcacaaggtcaacaatcgagaggtacaagaaagcctctgccagcacttcaggatccgctccagtgatagacgtcaattctcatcaatactttcagcaagaagcagcaaaaatgcgccaccagatacagaccttgcagaatgcaaacaggcacctcatcggtgagtccattggcaatatgaccgcaaaggagctcaagagccttgaaaatcggcttgaaaagggcatcagccgaattcgatcaaagaagcatgagctgctgttctcggagatcgaatacatgcagaaaagggaagcagatcttcagaacgagaacatgttcctgagagccaaggtggcagaggccgagcgagctgaacatgatgatcagcaggcggcggaggacgacgagatggcgccggcgccggcggtcggcggcgggtcatcgtcggggacagagctggaggcgctgccggcgacgttcgacacaagggaatactaccagccggcgccgccggtgagcatgctggccgccgcggcggcggcggcggcggcgcagtactcgtcggaccaccaccagactgctctccacctcggctacttcaaggtcgactccggcaaaggcggcctcctctag

SEQ ID NO: 109492 - protein, 265 aa, Oryza sativa
MGRGKIEIKRIENKTSRQVTFCKRRNGLLKKAYELAILCDAEIALIVFSSRGRLYEFSNVNSTRSTIERYKKASASTSGSAPVIDVNSHQYFQQEAAKMRHQIQTLQNANRHLIGESIGNMTAKELKSLENRLEKGISRIRSKKHELLFSEIEYMQKREADLQNENMFLRAKVAEAERAEHDDQQAAEDDEMAPAPAVGGGSSSGTELEALPATFDTREYYQPAPPVSMLAAAAAAAAAQYSSDHHQTALHLGYFKVDSGKGGLL

SEQ ID NO: 109493 - DNA, 783 bp, Oryza sativa
  CDS (1)..(783)
atggggcgcggcaagatcgagatcaagaggatcgagaacgcgacgaacaggcaggtgacattctcgaagaggcggggagggctactgaagaaggcgaacgagctcgccgtgctctgcgacgcccgcgtcggcgtcgtcatcttctccagcaccggcaagatgttcgagtactgcagccctacctgcagtttgagggaactcatcgagcattaccagaccgtcaccaacactcatttcgaggagatcaaccacgatcagcaaatatttgtggagatgactcggatgaggaacgagatggagaagctggacggtggcatcaggaggttcaccggcgacgacctctccaacctcacgctcgccgacatcaacgatctcgagcagcagctcgaattctccgtcaccaaagtccgtgcgagaaagcatcagctcctgaaccagcagctggacaaccttcgtcgcaaggagcacatcctggaagaccagaacagcttcctgtgccgcatgatcaacgagaaccatcatcaggcggcggtgggcggcggcgacgtgaaggcgatggtggagatggcgccggtgctgtcgatgctgacggcggcgccggcgtactacggcgaggagtcgtcgagcaccgcgctgcagctcaccccgccgctgcacgccgtcgacgccgccgccgccgccgggttccggctgcagccgacgcagcccaacctgcaggaccccggctgcagcagcagcagcttccatgccgccgccgccggccacggcctgcagctgtggtaa

SEQ ID NO: 109494 - protein, 260 aa, Oryza sativa
MGRGKIEIKRIENATNRQVTFSKRRGGLLKKANELAVLCDARVGVVIFSSTGKMFEYCSPTCSLRELIEHYQTVTNTHFEEINHDQQIFVEMTRMRNEMEKLDGGIRRFTGDDLSNLTLADINDLEQQLEFSVTKVRARKHQLLNQQLDNLRRKEHILEDQNSFLCRMINENHHQAAVGGGDVKAMVEMAPVLSMLTAAPAYYGEESSSTALQLTPPLHAVDAAAAAGFRLQPTQPNLQDPGCSSSSFHAAAAGHGLQLW

SEQ ID NO: 109495 - DNA, 723 bp, Oryza sativa
  CDS (1)..(723)
atggggagggggaagattgtgatccgccggatcgacaactcgacgagccggcaggtgacgttctcgaagcggaggaacgggatcttcaagaaggccaaggagctggccatcctctgcgacgccgaggtcggcctcatgatcttctccagcaccggccgcctctacgagtactccagcaccagcatgaagtcagttatagatcggtatggcaagtccaaggatgagcagcaagccgtcgcaaatcccaactcggagcttaagttttggcaaagggaggcagcaagcttgagacaacaactgcacaacttgcaagaaaatcatcggcagttgatgggcgaagatctatctgggctgaatgttaaggaattgcaatctctagagaatcagctggaaataagtctacgtagtgtccgtacaaagaaggaccacgtcttgattgatgaaattcatgaactgaatcggaagggaagtctagttcaccaagaaaacatggaattatacaagaagatcagtttaattcgtcaagaaaatgctgagttatataagaagatctacgagactgaaggaccaagtgaagtcaatcgggattcaccaactccttacaattttgcagtaattgaaaaaacaaatgttcctgtgcaacttggactcagcacactaccacaacatagtgacgccgaacaatcaactgctcctaagctagggttacagttgaatccatga

SEQ ID NO: 109496 - protein, 240 aa, Oryza sativa
MGRGKIVIRRIDNSTSRQVTFSKRRNGIFKKAKELAILCDAEVGLMIFSSTGRLYEYSSTSMKSVIDRYGKSKDEQQAVANPNSELKFWQREAASLRQQLHNLQENHRQLMGEDLSGLNVKELQSLENQLEISLRSVRTKKDHVLIDEIHELNRKGSLVHQENMELYKKISLIRQENAELYKKIYETEGPSEVNRDSPTPYNFAVIEKTNVPVQLGLSTLPQHSDAEQSTAPKLGLQLNP

SEQ ID NO: 109497 - DNA, 753 bp, Oryza sativa
  CDS (1)..(753)
atggggaggggaagagttgagctgaagcgcatcgagaacaagatcaacaggcaggtcaccttctccaagcgccgcaacggcctcctcaagaaggcctacgagctgtccgttctctgcgacgccgaggtcgcgctcatcatcttctccagccgcggcaagctctacgagttcggcagcgccggcataacaaagactttagaaaggtaccaacattgttgctacaatgctcaagattccaacaatgcactttctgaaacccagagttggtaccatgaaatgtcaaagttgaaagcaaaatttgaagctttgcagcgcactcaaaggcacttgcttggggaggatcttggaccactcagcgtcaaagaattgcagcagctggagaaacagcttgaatgtgcactatcacaggcgagacagagaaagacgcaactgatgatggaacaagtggaggaacttcgcagaaaggagcgtcagctgggtgaaattaataggcaactcaagcacaagctcgaggttgaaggttccaccagcaactacagagccatgcagcaagcctcctgggctcagggcgccgtggtggagaatggcgccgcatacgtgcagccgccgccacactccgcggccatggactctgaacccaccttgcaaattgggtatcctcatcaatttgtgcctgctgaagcaaacactattcagaggagcactgcccctgcaggtgcagagaacaacttcatgctgggatgggttctttga

SEQ ID NO: 109498 - protein, 250 aa, Oryza sativa
MGRGRVELKRIENKINRQVTFSKRRNGLLKKAYELSVLCDAEVALIIFSSRGKLYEFGSAGITKTLERYQHCCYNAQDSNNALSETQSWYHEMSKLKAKFEALQRTQRHLLGEDLGPLSVKELQQLEKQLECALSQARQRKTQLMMEQVEELRRKERQLGEINRQLKHKLEVEGSTSNYRAMQQASWAQGAVVENGAAYVQPPPHSAAMDSEPTLQIGYPHQFVPAEANTIQRSTAPAGAENNFMLGWVL

SEQ ID NO: 109499 - DNA, 720 bp, Oryza sativa
  CDS (1)..(720)
atggggagggggaagatagtgataaggaggatagacaactcgacgagcaggcaggtgacgttctcgaagcgtcggaacgggcttctgaagaaggcgaaggagctatccatcctctgcgatgcggaggtcggccttgtcgtcttctccagcaccggcaggctctatgagttctccagcaccaacatgaaaactgtgatagaccggtataccaacgcaaaggaggagctacttggcgggaatgcaacttcagaaattaagatttggcagagggaggcagcaagcttgaggcagcaactgcacaacttgcaagaaagccacaagcaactgatgggtgaggagctttctggcctaggtgttagagacctacaaggtttagagaataggcttgaaataagtctacgtaatatcagaatgagaaaggacaatcttttgaaaagtgaaatcgaggagttacatgtgaagggaagcctaattcaccaggaaaacatcgaactttctagaagcctaaatgtcatgtcgcaacaaaaattggaactgtataacaaggcctgtgaacagagaggtgccacagatgcaaatgaaagttccagcactccatacagctttcgtatcatacaaaatgctaatatgcctcctagtcttgaattgagccaatcacagcaaagagaaggggagtgcagcaaaacagctgctccagaactgggacttcatctgccttaa

SEQ ID NO: 109500 - protein, 239 aa, Oryza sativa
MGRGKIVIRRIDNSTSRQVTFSKRRNGLLKKAKELSILCDAEVGLVVFSSTGRLYEFSSTNMKTVIDRYTNAKEELLGGNATSEIKIWQREAASLRQQLHNLQESHKQLMGEELSGLGVRDLQGLENRLEISLRNIRMRKDNLLKSEIEELHVKGSLIHQENIELSRSLNVMSQQKLELYNKACEQRGATDANESSSTPYSFRIIQNANMPPSLELSQSQQREGECSKTAAPELGLHLP

SEQ ID NO: 109501 - DNA, 687 bp, Oryza sativa
  CDS (1)..(687)
atggcgcgggagaggcgggagataaagaggatagagagcgcggcggcgcggcaggtcaccttctccaagcgccggcgcggcctgttcaagaaggccgaggagctctccgtgctctgcgacgccgacgtcgcgctcatcgtcttctcctccacggggaagctatcccacttcgcaagctccagtatgaatgaaatcatcgacaagtacaacacacattctaataatctggggaaagcagaacagccttcgctcgacttgaatttagaacatagcaagtatgcacatttgaatgagcaacttgcggaagctagtctccggcttagacaaatgagaggtgaggagcttgagggattgagcattgatgaactccagcagctagagaagaacctggaagctggtctgcacagggtgatgctgacaaaggatcaacaatttatggagcagatcagtgaactccagcggaagagttcacagctggcagaggagaacatgcaactcagaaaccaggtatcccagatatcaccagctgagaagcaagttgttgatactgaaaattttgttaccgaaggacagtcctctgaatctgtgatgactgcattgcattctggaagttcacagtcgcaggataatgatgatggctcggatgtatccctgaaattagggctgccttgtggtgcatggaagtaa

SEQ ID NO: 109502 - protein, 228 aa, Oryza sativa
MARERREIKRIESAAARQVTFSKRRRGLFKKAEELSVLCDADVALIVFSSTGKLSHFASSSMNEIIDKYNTHSNNLGKAEQPSLDLNLEHSKYAHLNEQLAEASLRLRQMRGEELEGLSIDELQQLEKNLEAGLHRVMLTKDQQFMEQISELQRKSSQLAEENMQLRNQVSQISPAEKQVVDTENFVTEGQSSESVMTALHSGSSQSQDNDDGSDVSLKLGLPCGAWK

SEQ ID NO: 109503 - DNA, 774 bp, Oryza sativa
  CDS (1)..(774)
atggggagggggaaggtggagctgaagcggatcgagaacaagatcagccggcaggtgacgttcgccaagcgcaggaacggcctgctcaagaaggcctacgagctctccctcctctgcgacgccgaggtcgccctcatcatcttctccggccgcggccgcctcttcgagttctccagctcatcatgcatgtacaaaaccttggagaggtaccgcagctgcaactacaactcacaggatgcagcagctccagaaaacgaaattaattaccaagaatacctgaagctgaaaacaagagttgaatttcttcaaaccacacagagaaatattcttggtgaggatttgggcccactaagcatgaaggagctggagcagcttgagaaccagatagaagtatccctcaaacaaatcaggtcaagaaagaaccaagcactgcttgatcagctgtttgatctgaagagcaaggagcaacagctgcaagatctcaacaaagacttgaggaaaaagttacaggaaaccagtgcagagaatgtgctccatatgtcctggcaagatggtggtgggcacagcggttctagcactgttcttgctgatcagcctcatcaccatcagggtcttctccaccctcacccagatcagggtgaccattccctgcagattgggtatcatcaccctcatgctcaccatcaccaggcctacatggaccatctgagcaatgaagcagcagacatggttgctcatcaccccaatgaacacatcccatccggctggatatga

SEQ ID NO: 109504 - protein, 257 aa, Oryza sativa
MGRGKVELKRIENKISRQVTFAKRRNGLLKKAYELSLLCDAEVALIIFSGRGRLFEFSSSSCMYKTLERYRSCNYNSQDAAAPENEINYQEYLKLKTRVEFLQTTQRNILGEDLGPLSMKELEQLENQIEVSLKQIRSRKNQALLDQLFDLKSKEQQLQDLNKDLRKKLQETSAENVLHMSWQDGGGHSGSSTVLADQPHHHQGLLHPHPDQGDHSLQIGYHHPHAHHHQAYMDHLSNEAADMVAHHPNEHIPSGWI

SEQ ID NO: 109505 - DNA, 762 bp, Oryza sativa
  CDS (1)..(762)
atggggcggggcaaggtgcagctgaagcggatcgagaacaagatcaaccggcaggtgaccttctccaagcgcaggtcggggctgctcaagaaggcgaatgagatctccgtgctctgcgacgccgaggtcgcgctcatcatcttctccaccaagggcaagctctacgagtacgccaccgactcatgtatggacaaaatccttgaacgttatgagcgctactcctatgcagaaaaggtccttatttcagctgaatctgacactcagggcaactggtgccacgaatataggaaactgaaggctaaggttgagacaatacagaaatgtcaaaagcacctcatgggagaggatcttgaatctttgaatctcaaagagctgcagcagctggagcagcagctggaaaattcgttgaaacatatcagatccagaaagagccaactaatgctcgagtccattaacgagcttcaacggaaggaaaagtcactgcaggaggagaataaggtcctacagaaagaaaacccttgctccttcctacagctggtggagaagcagaaagtccagaagcaacaagtgcaatgggaccagacacaacctcaaacaagttcctcatcatcctccttcatgatgagggaagcccttccaacaactaatatcagtaactaccctgcagcagctggcgaaaggatagaggatgtagcagcagggcagccacagcatgttcgcattgggctgccaccatggatgctgagccacatcaacggctaa

SEQ ID NO: 109506 - protein, 253 aa, Oryza sativa
MGRGKVQLKRIENKINRQVTFSKRRSGLLKKANEISVLCDAEVALIIFSTKGKLYEYATDSCMDKILERYERYSYAEKVLISAESDTQGNWCHEYRKLKAKVETIQKCQKHLMGEDLESLNLKELQQLEQQLENSLKHIRSRKSQLMLESINELQRKEKSLQEENKVLQKENPCSFLQLVEKQKVQKQQVQWDQTQPQTSSSSSSFMMREALPTTNISNYPAAAGERIEDVAAGQPQHVRIGLPPWMLSHING

SEQ ID NO: 109507 - DNA, 741 bp, Oryza sativa
  CDS (1)..(741)
atggggcggggcaaggtgcagctgaagcggatcgagaacaagatcaaccggcaggtgaccttctccaagcgcaggtcggggctgctcaagaaggcgaatgagatctccgtgctctgcgacgccgaggtcgcgctcatcatcttctccaccaagggcaagctctacgagtacgccaccgactcatgtatggacaaaatccttgaacgttatgagcgctactcctatgcagaaaaggtccttatttcagctgaatctgacactcagggcaactggtgccacgaatataggaaactgaaggctaaggttgagacaatacagaaatgtcaaaagcacctcatgggagaggatcttgaatctttgaatctcaaagagctgcagcagctggagcagcagctggaaaattcgttgaaacatatcagatccagaaagagccaactaatgctcgagtccattaacgagcttcaacggaaggaaaagtcactgcaggaggagaataaggtcctacagaaagaactggtggagaagcagaaagtccagaagcaacaagtgcaatgggaccagacacaacctcaaacaagttcctcatcatcctccttcatgatgagggaagcccttccaacaactaatatcagtaactaccctgcagcagctggcgaaaggatagaggatgtagcagcagggcagccacagcatgttcgcattgggctgccaccatggatgctgagccacatcaacggctaa

SEQ ID NO: 109508 - protein, 246 aa, Oryza sativa
MGRGKVQLKRIENKINRQVTFSKRRSGLLKKANEISVLCDAEVALIIFSTKGKLYEYATDSCMDKILERYERYSYAEKVLISAESDTQGNWCHEYRKLKAKVETIQKCQKHLMGEDLESLNLKELQQLEQQLENSLKHIRSRKSQLMLESINELQRKEKSLQEENKVLQKELVEKQKVQKQQVQWDQTQPQTSSSSSSFMMREALPTTNISNYPAAAGERIEDVAAGQPQHVRIGLPPWMLSHING

SEQ ID NO: 109509 - DNA, 720 bp, Oryza sativa
  CDS (1)..(720)
atggggcgaggcaaggtggtgcttcagcggatcgagaacaagatcagccggcaggtgacgttcgccaagcggcggaacggcctgctcaagaaggcctacgagctctccatcctctgcgacgccgaggtcgccctcgtcctcttctcccacgccggccgcctctaccagttctcctcctcatccaacatgcttaagacgcttgagagataccagaggtacatttatgcttcgcaagatgctgccgcaccaactagcgatgagatgcagaacaactatcaggaatatgtgaacttgaaggcacatgttgagattctgcaacaatcacaaaggaaccttctaggtgaggatttagctccactggctacaaatgaacttgagcagcttgagagtcaagtagtcagaaccttgaagcaaatcagatcaagaaagactcaggtactacttgatgaactctgcgacctaaagagaaaggaacaaatgctacaagatgcaaacagggtcctgaaaaggaagcttgacgagatcgacgtagaggcagctcccccacagcctccatggaacggaaactgcagcaatggccatggcggcggcggcggcgtgttttccagtgagcctccccaaccagagcacttcttccaggccctcgggcttcatgccgtggacgtgaaccagccgccggcgccgccaccgggcggttatcctcctgagtggatggcctag

SEQ ID NO: 109510 - protein, 239 aa, Oryza sativa
MGRGKVVLQRIENKISRQVTFAKRRNGLLKKAYELSILCDAEVALVLFSHAGRLYQFSSSSNMLKTLERYQRYIYASQDAAAPTSDEMQNNYQEYVNLKAHVEILQQSQRNLLGEDLAPLATNELEQLESQVVRTLKQIRSRKTQVLLDELCDLKRKEQMLQDANRVLKRKLDEIDVEAAPPQPPWNGNCSNGHGGGGGVFSSEPPQPEHFFQALGLHAVDVNQPPAPPPGGYPPEWMA

SEQ ID NO: 109511 - DNA, 765 bp, Oryza sativa
  CDS (1)..(765)
atggatcgatcagagatggggaggggaagggttgagctgaagcgcatcgagaacaagatcaaccggcaggtcaccttctccaagcgccgcaacggcctcctcaagaaggcgtacgagctctccgtgctctgcgacgcggaggtggcgctcatcatcttctccagccgtggcaagctgtacgaattcggtagcgccggaataaacaagacattggaaaagtacaatagttgctgttacaacgctcaaggttcaaatagtgctcttgctggtggtgaacatcagagctggtaccaagagatgtcaaggctcaagactaagcttgaatgtctccaacgctctcagaggcacatgcttggtgaagatcttggaccattgagcataaaggaactgcagcagctggagaagcaacttgagtactcactgtcacaggctcgacaacgaaagacacaaatcatgatggagcaggtcgacgatcttcgccggaaggaacgccagcttggagagctcaataagcaactgaaaaacaagctagaagctgaagccgatagcagcaactgcagatcagccatccaggattcctgggtccatggcaccgtcgtcagtggcggcagagtgctgaatgctcaaccaccaccagatattgactgtgagcctactctgcaaattgggtactatcaatttgtccgtcctgaggcggccaatccaagaagcaatggaggaggaggggatcagaacaacaactttgtgatgggatggcccctctga

SEQ ID NO: 109512 - protein, 254 aa, Oryza sativa
MDRSEMGRGRVELKRIENKINRQVTFSKRRNGLLKKAYELSVLCDAEVALIIFSSRGKLYEFGSAGINKTLEKYNSCCYNAQGSNSALAGGEHQSWYQEMSRLKTKLECLQRSQRHMLGEDLGPLSIKELQQLEKQLEYSLSQARQRKTQIMMEQVDDLRRKERQLGELNKQLKNKLEAEADSSNCRSAIQDSWVHGTVVSGGRVLNAQPPPDIDCEPTLQIGYYQFVRPEAANPRSNGGGGDQNNNFVMGWPL

SEQ ID NO: 109513 - DNA, 819 bp, Oryza sativa
  CDS (1)..(819)
atgcacatatacaaagagcaggaggctgaaccatccactggcctgatgatgccagagccagcacctgttgcttcccccggctccggtggctcaggtggctcaggctcggtgggagctgagaagattgggagcaggggaaagattgagatcaagcgcatcgagaacacgacgaaccgtcaagtgaccttctgcaagcgccgcagcgggctactcaagaaggcgtatgagctctccgtgctctgcgatgccgaggtcgccctcgtcgtcttctccagccgtggccgcctctacgagtactccaacaacagcgtgaaggaaactattgagaggtacaagaaagccaacagtgacacctccaacgccagtacagttgcagagatcaatgcccagcactaccagcaggaagctgctaagctgaagcaacagatcaccaacctgcagaactccaacaggaccctagtaggtgataatatcaccaccatgaaccacagagaacttaagcagctggaaggcagactggacaaaggcctaggaaagattagagcacggaagaacgaattgctgtgtgctgaaattgagtatatgcagagaagggaaacggagctgcagaatgacaacatgtacttaaagagcaaagttgctgagagtgaaagaggactgcaaacagtgaacatgatgggttcagcatctacgagcgagtacgtgcaaaatatgatccattatgatccaagaaacttcctgcaattcaacatcatgcatcagcctcagtattatcctgaacaggaggaccgaaaggcctttatgtcagatgaaagataa

SEQ ID NO: 109514 - protein, 272 aa, Oryza sativa
MHIYKEQEAEPSTGLMMPEPAPVASPGSGGSGGSGSVGAEKIGSRGKIEIKRIENTTNRQVTFCKRRSGLLKKAYELSVLCDAEVALVVFSSRGRLYEYSNNSVKETIERYKKANSDTSNASTVAEINAQHYQQEAAKLKQQITNLQNSNRTLVGDNITTMNHRELKQLEGRLDKGLGKIRARKNELLCAEIEYMQRRETELQNDNMYLKSKVAESERGLQTVNMMGSASTSEYVQNMIHYDPRNFLQFNIMHQPQYYPEQEDRKAFMSDER

SEQ ID NO: 109515 - DNA, 702 bp, Oryza sativa
  CDS (1)..(702)
atgcacatatacaaagagcaggaggctgaaccatccactggcctgatgatgccagagccagcacctgttgcttcccccggctccggtggctcaggtggctcaggctcggtgggagctgagaagattgggagcaggggaaagattgagatcaagcgcatcgagaacacgacgaaccgtcaagtgaccttctgcaagcgccgcagcgggctactcaagaaggcgtatgagctctccgtgctctgcgatgccgaggtcgccctcgtcgtcttctccagccgtggccgcctctacgagtactccaacaacagcgtgaaggaaactattgagaggtacaagaaagccaacagtgacacctccaacgccagtacagttgcagagatcaatgcccagcactaccagcaggaagctgctaagctgaagcaacagatcaccaacctgcagaactccaacaggaccctagtaggtgataatatcaccaccatgaaccacagagaacttaagcagctggaaggcagactggacaaaggcctaggaaagattagagcacggaagaacgaattgctgtgtgctgaaattgagtatatgcagagaagggaaacggagctgcagaatgacaacatgtacttaaagagcaaagttgctgagagtgaaagaggactgcaaacagtgaacatgatgggttcagcatctacgagcgaatga

SEQ ID NO: 109516 - protein, 233 aa, Oryza sativa
MHIYKEQEAEPSTGLMMPEPAPVASPGSGGSGGSGSVGAEKIGSRGKIEIKRIENTTNRQVTFCKRRSGLLKKAYELSVLCDAEVALVVFSSRGRLYEYSNNSVKETIERYKKANSDTSNASTVAEINAQHYQQEAAKLKQQITNLQNSNRTLVGDNITTMNHRELKQLEGRLDKGLGKIRARKNELLCAEIEYMQRRETELQNDNMYLKSKVAESERGLQTVNMMGSASTSE

SEQ ID NO: 109517 - DNA, 678 bp, Oryza sativa
  CDS (1)..(678)
atggggcgagggaaagtagagctgaagcggatcgagaacaagataagccggcaggtgacgttcgcgaagaggaggaacgggctgctgaagaaggcgtacgagctgtccgtgctctgcgacgccgaggtcgccctcatcatcttctccacccgcggccgcctcttcgagttctccacctcctcctgtatgtacaagacactggagcgataccgcagttgcaactacaaccttaactcatgtgaagcatctgctgcactggaaactgaactaagcaattaccaagagtacttaaagttaaagacaagagttgagttcctacaaacaactcagagaaatcttcttggcgaggacttggttccacttagcttgaaggagctcgagcaacttgagaaccagatcgagatatccctcatgaatatcaggtcatcaaagaatcaacagttgcttgatcaagtatttgagctcaaacgtaaggaacaacaacttcaagatgctaataaagacttaaaaaggaagatacaagaaactagtggagaaaatatgcttcatatatcttgccaagatgtagggcccagtggccatgctagtgaagctaaccaagagtttctccatcatgcaatttgtgacccttccctgcatatagggtatcaagcttacatggatcacctcaaccaatga

SEQ ID NO: 109518 - protein, 225 aa, Oryza sativa
MGRGKVELKRIENKISRQVTFAKRRNGLLKKAYELSVLCDAEVALIIFSTRGRLFEFSTSSCMYKTLERYRSCNYNLNSCEASAALETELSNYQEYLKLKTRVEFLQTTQRNLLGEDLVPLSLKELEQLENQIEISLMNIRSSKNQQLLDQVFELKRKEQQLQDANKDLKRKIQETSGENMLHISCQDVGPSGHASEANQEFLHHAICDPSLHIGYQAYMDHLNQ

SEQ ID NO: 109519 - DNA, 672 bp, Oryza sativa
  CDS (1)..(672)
atggcgagggagaggagggagatacggaggatagagagcgcggcggcgcggcaggtgacgttctcgaagcggcggcgggggctgttcaagaaggcggaggagctggcggtgctgtgcgacgccgacgtcgcgctcgtcgtcttctcctccaccggcaagctctcccagttcgccagctccaatatgaacgagatcattgacaagtatactacacattcaaagaacctggggaaaacagataagcagccttctattgatctgaatttagagcacagcaagtgtagcagtttgaatgaacaactggcagaagcaagtcttcaacttagacagatgagaggtgaggagcttgagggattgagtgtggaagagctgcagcagatggaaaagaacctcgaggcaggactgcagcgggtgctctgtacaaaggaccagcaattcatgcaagaaatcagtgagctccaacgaaagggcattcagctggcagaagagaatatgcgcctcagagaccaaatgcctcaggtgcctactgctggcttggcggttcctgatactgaaaatgttcttactgaagatggacaatcatctgaatctgtgatgactgcattaaattcgggaagctcgcaggataatgatgatggttctgatatatccctgaaactagggttgccttga

SEQ ID NO: 109520 - protein, 223 aa, Oryza sativa
MARERREIRRIESAAARQVTFSKRRRGLFKKAEELAVLCDADVALVVFSSTGKLSQFASSNMNEIIDKYTTHSKNLGKTDKQPSIDLNLEHSKCSSLNEQLAEASLQLRQMRGEELEGLSVEELQQMEKNLEAGLQRVLCTKDQQFMQEISELQRKGIQLAEENMRLRDQMPQVPTAGLAVPDTENVLTEDGQSSESVMTALNSGSSQDNDDGSDISLKLGLP

SEQ ID NO: 109521 - DNA, 804 bp, Oryza sativa
  CDS (1)..(804)
atggggcgggggaaggtgcagctgaagcggatagagaacaagatcaacaggcaggtgacgttctccaagaggaggaatggattgctgaagaaggcgcacgagatctccgtcctctgcgacgccgaggtcgccgccatcgtcttctcccccaagggcaagctctacgagtacgccactgactccaggatggacaaaatccttgaacgttatgagcgctattcatatgctgaaaaggctcttatttcagctgaatccgagagtgagggaaattggtgccatgaatacaggaaacttaaggcaaagattgagaccatacaaaaatgtcacaaacacctcatgggagaggatctagaatccctgaatctcaaagaactccaacagctagagcagcagctggagagttcattgaagcacataatatcaagaaagagccaccttatgcttgagtccatttccgagctgcagaaaaaggagaggtcactgcaggaggagaacaaggctctgcagaaggaactggtggagaggcagaagaatgtgaggggccagcagcaagtagggcagtgggaccaaacccaggtccaggcccaggcccaagcccaaccccaagcccagacaagctcctcctcctcctccatgctgagggatcagcaggcacttcttccaccacaaaatatctgctacccgccggtgatgatgggcgagagaaatgatgcggcggcggcggcggcggtggcggcgcagggccaggtgcaactccgcatcggaggtcttccgccatggatgctgagccacctcaatgcttaa

SEQ ID NO: 109522 - protein, 267 aa, Oryza sativa
MGRGKVQLKRIENKINRQVTFSKRRNGLLKKAHEISVLCDAEVAAIVFSPKGKLYEYATDSRMDKILERYERYSYAEKALISAESESEGNWCHEYRKLKAKIETIQKCHKHLMGEDLESLNLKELQQLEQQLESSLKHIISRKSHLMLESISELQKKERSLQEENKALQKELVERQKNVRGQQQVGQWDQTQVQAQAQAQPQAQTSSSSSSMLRDQQALLPPQNICYPPVMMGERNDAAAAAAVAAQGQVQLRIGGLPPWMLSHLNA

SEQ ID NO: 109523 - DNA, 723 bp, Oryza sativa
  CDS (1)..(723)
atggggcgggggaaggtgcagctgaagcggatagagaacaagatcaacaggcaggtgacgttctccaagaggaggaatggattgctgaagaaggcgcacgagatctccgtcctctgcgacgccgaggtcgccgccatcgtcttctcccccaagggcaagctctacgagtacgccactgactccaggatggacaaaatccttgaacgttatgagcgctattcatatgctgaaaaggctcttatttcagctgaatccgagagtgagggaaattggtgccatgaatacaggaaacttaaggcaaagattgagaccatacaaaaatgtcacaaacacctcatgggagaggatctagaatccctgaatctcaaagaactccaacagctagagcagcagctggagagttcattgaagcacataatatcaagaaagagccaccttatgcttgagtccatttccgagctgcagaaaaaggagaggtcactgcaggaggagaacaaggctctgcagaaggaatgtgcgcatgcagctggtggagaggcagaagaatgtgaggggccagcagcaagtagggcagtgggaccaaacccaggtccaggcccaggcccaagcccaaccccaagcccagacaagctcctcctcctcctccatgctgagggatcagcaggcacttcttccaccacaaaatatctgctacccgccggtgatgatgggcgagagaaatga

SEQ ID NO: 109524 - protein, 240 aa, Oryza sativa
MGRGKVQLKRIENKINRQVTFSKRRNGLLKKAHEISVLCDAEVAAIVFSPKGKLYEYATDSRMDKILERYERYSYAEKALISAESESEGNWCHEYRKLKAKIETIQKCHKHLMGEDLESLNLKELQQLEQQLESSLKHIISRKSHLMLESISELQKKERSLQEENKALQKECAHAAGGEAEECEGPAASRAVGPNPGPGPGPSPTPSPDKLLLLLHAEGSAGTSSTTKYLLPAGDDGREK

SEQ ID NO: 109525 - DNA, 750 bp, Oryza sativa
  CDS (1)..(750)
atggggagagggccggtgcagctgcggcggatcgagaacaagataaacaggcaggtgaccttctccaagcggaggaacgggctgctgaagaaggcgcacgagatctccgtgctctgtgacgccgacgtcgcgctcatcgtcttctccaccaagggcaagctctacgagttctccagccactccagtatggaagggatccttgaacgctaccagcgttactcgtttgatgaaagagccgtactggagccaaatactgaggaccaggaaaactggggtgatgaatatggaattttgaagtccaaactggatgcacttcagaagagccaaaggcaactcttaggtgaacaattggacacactaacaataaaagaactccagcaattggaacatcaactggaatattctctgaagcatataagatcaaaaaagaatcagcttctgtttgaatcaatttctgagcttcagaagaaggaaaagtcacttaaaaaccagaataatgttctgcaaaagctcatggagacagaaaaggagaaaaacaatgctataataaacactaaccgggaggagcaaaatggagcaacaccaagcacatcatcaccaacaccagtgacggctccagatcccatcccgacaacaaataacagtcaaagccaaccaagaggatcaggggagtcagaagctcaaccgtctccggcacaagcaggcaacagcaagcttccgccatggatgctccggacaagtcacacatga

SEQ ID NO: 109526 - protein, 249 aa, Oryza sativa
MGRGPVQLRRIENKINRQVTFSKRRNGLLKKAHEISVLCDADVALIVFSTKGKLYEFSSHSSMEGILERYQRYSFDERAVLEPNTEDQENWGDEYGILKSKLDALQKSQRQLLGEQLDTLTIKELQQLEHQLEYSLKHIRSKKNQLLFESISELQKKEKSLKNQNNVLQKLMETEKEKNNAIINTNREEQNGATPSTSSPTPVTAPDPIPTTNNSQSQPRGSGESEAQPSPAQAGNSKLPPWMLRTSHT

SEQ ID NO: 109527 - DNA, 669 bp, Oryza sativa
  CDS (1)..(669)
atggcgcgaggcaaggtgcagctccgtcgcatcgagaacccggttcaccgtcaggtcaccttctgcaagcgccgtgccggcctgctgaagaaggccagggagctctccatcctctgcgaggccgacatcggcatcatcatcttctccgcccacggcaagctctacgacctcgccaccaccggaaccatggaggagctgatcgagaggtacaagagtgctagtggcgaacaggccaacgcctgcggcgaccagagaatggacccaaaacaggaggcaatggtgctcaaacaagaaatcaatctactgcagaagggcctgaggtacatctatgggaacagggcaaatgaacacatgactgttgaagagctgaatgccctagagaggtacttagagatatggatgtacaacattcgctccgcaaagatgcagataatgatccaagagatccaagcactaaagagcaaggaaggcatgttgaaagctgctaacgaaattctccaagaaaagatagtagaacagaatggtctgatcgacgtaggcatgatggtagcagatcaacagaatgggcattttagtacagtcccactgttagaagagatcactaacccactgactatactgagtggctattctacttgtaggggctcggagatgggctattccttctaa

SEQ ID NO: 109528 - protein, 222 aa, Oryza sativa
MARGKVQLRRIENPVHRQVTFCKRRAGLLKKARELSILCEADIGIIIFSAHGKLYDLATTGTMEELIERYKSASGEQANACGDQRMDPKQEAMVLKQEINLLQKGLRYIYGNRANEHMTVEELNALERYLEIWMYNIRSAKMQIMIQEIQALKSKEGMLKAANEILQEKIVEQNGLIDVGMMVADQQNGHFSTVPLLEEITNPLTILSGYSTCRGSEMGYSF

SEQ ID NO: 109529 - DNA, 750 bp, Oryza sativa
  CDS (1)..(750)
atggggaggggtcgggtggagctgaagaggatcgagaacaagatcaaccggcaggtgacgttcgccaagcgcaggaatggcctgctcaagaaggcgtacgagctctccgtcctctgcgacgccgaggtcgccctcatcatcttctccaaccgcggcaagctctacgagttctgcagcacccagagcatgactaaaacgcttgagaagtatcagaaatgcagttacgcaggacccgaaacagctgtccaaaatagagaaagtgagcaattgaaagctagccgcaatgaatacctcaaactgaaggcaagggttgaaaatttacaacggactcaaagaaatttgctgggtgaagatcttgattcattaggcataaaagagctcgagagcctagagaagcagcttgattcatccctgaagcacgtcagaactacaaggacaaaacatctggttgaccaactgacggagcttcagagaaaggaacaaatggtttctgaagcaaatagatgccttaggagaaaactggaggaaagcaaccatgttcgcgggcagcaagtgtgggagcagggctgcaacttaattggctatgaacgtcagcctgaagtgcagcagcctcttcacggcggcaatgggttcttccatccacttgatgctgctggtgaacccacccttcagattgggtaccctgcagagcatcatgaggcgatgaacagtgcgtgcatgaacacctacatgcccccatggctaccatga

SEQ ID NO: 109530 - protein, 249 aa, Oryza sativa
MGRGRVELKRIENKINRQVTFAKRRNGLLKKAYELSVLCDAEVALIIFSNRGKLYEFCSTQSMTKTLEKYQKCSYAGPETAVQNRESEQLKASRNEYLKLKARVENLQRTQRNLLGEDLDSLGIKELESLEKQLDSSLKHVRTTRTKHLVDQLTELQRKEQMVSEANRCLRRKLEESNHVRGQQVWEQGCNLIGYERQPEVQQPLHGGNGFFHPLDAAGEPTLQIGYPAEHHEAMNSACMNTYMPPWLP

SEQ ID NO: 109531 - DNA, 747 bp, Oryza sativa
  CDS (1)..(747)
atggggagagggagggtggagctgaagaggatcgagaacaagatcaacaggcaggtgacgttcgcgaagcggaggaatgggctgctcaagaaggcgtacgagctctccgtgctctgcgacgccgaggtcgccctcatcatcttctccaaccgcggcaagctctacgagttctgcagcggccaaagcatgaccagaactttggaaagataccaaaaattcagttatggtgggccagatactgcaatacagaacaaggaaaatgagttagtgcaaagcagccgcaatgagtacctcaaactgaaggcacgggtggaaaatttacagaggacccaaaggaatcttcttggtgaagatcttgggacacttggcataaaagagctagagcagcttgagaaacaacttgattcatccttgaggcacattagatccacaaggacacagcatatgcttgatcagctcactgatctccagaggagggaacaaatgttgtgtgaagcaaataagtgcctcagaagaaaactggaggagagcaaccagttgcatggacaagtgtgggagcacggcgccaccctactcggctacgagcggcagtcgcctcatgccgtccagcaggtgccaccgcacggtggcaacggattcttccattccctggaagctgccgccgagcccaccttgcagatcgggtttactccagagcagatgaacaactcatgcgtgactgccttcatgccgacatggctaccctga

SEQ ID NO: 109532 - protein, 248 aa, Oryza sativa
MGRGRVELKRIENKINRQVTFAKRRNGLLKKAYELSVLCDAEVALIIFSNRGKLYEFCSGQSMTRTLERYQKFSYGGPDTAIQNKENELVQSSRNEYLKLKARVENLQRTQRNLLGEDLGTLGIKELEQLEKQLDSSLRHIRSTRTQHMLDQLTDLQRREQMLCEANKCLRRKLEESNQLHGQVWEHGATLLGYERQSPHAVQQVPPHGGNGFFHSLEAAAEPTLQIGFTPEQMNNSCVTAFMPTWLP

SEQ ID NO: 109533 - DNA, 702 bp, Oryza sativa
  CDS (1)..(702)
atggtgcgggggaggacggagctgaagcggattgagaacccgacgagccggcaggtgaccttctccaagcgccggaatggcctcctcaagaaggcgttcgagctctccgtcctctgcgacgccgaggtcgccctcatcgtcttctccccccgcggccgcctctacgagttcgccagcgcccccagcctacagaaaaccatcgaccgctataaagcatacacaaaggatcatgtcaacaataagacaattcaacaagatatccagcaagtcaaagatgatactttaggcttggccaagaaacttgaagctcttgatgagtccagacggaaaatattgggagaaaatttagaaggattctctattgaagaactgcgtggtctagaaatgaaacttgagaagagcctccacaagataagactaaagaagaccgagcttctggagcagcagatagccaagctgaaagagaaggagcggactttgcttaaagacaacgaaaatttacgcggaaagcatcgcaaccttgaggctgcggcgctggtggctaaccacatgacgacgacgacggcgccggcggcgtggccgcgggacgtgcctatgacgagcagcacagccggcgccgccgacgccatggacgtggagactgatctgtacattggattgcccggcactgagcgctcctccaaccggtcggagacaggttga

SEQ ID NO: 109534 - protein, 233 aa, Oryza sativa
MVRGRTELKRIENPTSRQVTFSKRRNGLLKKAFELSVLCDAEVALIVFSPRGRLYEFASAPSLQKTIDRYKAYTKDHVNNKTIQQDIQQVKDDTLGLAKKLEALDESRRKILGENLEGFSIEELRGLEMKLEKSLHKIRLKKTELLEQQIAKLKEKERTLLKDNENLRGKHRNLEAAALVANHMTTTTAPAAWPRDVPMTSSTAGAADAMDVETDLYIGLPGTERSSNRSETG

SEQ ID NO: 109535 - DNA, 609 bp, Oryza sativa
  CDS (1)..(609)
atggtcagaggaaaggtgcaaatgcgacgaatagagaaccctgtccacagacaggtaaccttctgtaagcgccgtggggggctcctcaagaaggccagggaactatcagtgctttgtgatgctgatgtaggtgttatcatattctcctctcagggaaaactccatgaattagctactaatggaaatatgcataacttggttgaaaggtaccagagcaatgtagcaggtggtcaaatggaaccaggagctctacaaagacagcaggtagcagaacaagggattttcttgttaagggaagaaatagatctactacagaggggtcttaggtctacatatggagggggagcaggggaaatgacactagataaattgcatgcactagagaaaggtcttgaactatggatttaccaaatacgcacaacaaagatgcagatgatgcaacaagagattcaatttcttagaaacaaggaaggcatactaaaagaagcaaatgaaatgcttcaagagaaggtgaaagaacagcaaaagctatacatgtctttgttggatctccatagtcaacaaccaacacaaccaatgacctacggaaatcgcttcttctcaatctag

SEQ ID NO: 109536 - protein, 202 aa, Oryza sativa
MVRGKVQMRRIENPVHRQVTFCKRRGGLLKKARELSVLCDADVGVIIFSSQGKLHELATNGNMHNLVERYQSNVAGGQMEPGALQRQQVAEQGIFLLREEIDLLQRGLRSTYGGGAGEMTLDKLHALEKGLELWIYQIRTTKMQMMQQEIQFLRNKEGILKEANEMLQEKVKEQQKLYMSLLDLHSQQPTQPMTYGNRFFSI

SEQ ID NO: 109537 - DNA, 813 bp, Oryza sativa
  CDS (1)..(813)
atggggaggggcaggattgagatcaagaggatcgagaacacgacaagccgccaggtgaccttctgcaagcgccgcaacggacttctcaagaaggcgtatgagctctccgtcctctgcgatgccgaggtggctctcatcgtcttctccagccgtggccgcctctacgagtactccaacaacaacaatgtgaaggctacaattgacaggtacaagaaggcgcatgcttgtggctcaacttctggtgcacctctcatagaggtcaatgctcagcaatactaccagcaggagtctgccaaactgcgccaccagattcagatgctgcaaaacaccaacaagcacctggttggcgataatgtgagcaacctgtcactgaaggagctgaagcaacttgaaagccgcctggagaaaggcatttcaaagatcagagccaggaagaatgaactgctggcttcagagatcaattacatggccaaaagggagattgagcttcagaacgacaacatggacctcagaaccaagattgctgaggaggagcagcagctgcagcaggtgacggtggcccggtcggccgccatggagctgcaggctgcggcggcggcgcagcagcagcagcagaatccgttcgcggtggcggcggcgcagctggacatgaagtgcttcttcccgttgaacctgttcgaggcggcggcgcaggtgcaggccgtggcggcgcagcgccagcagatcatccccaccgagctcaacctcggctaccaccaccaccttgccattcccggcgccgccgccgccgacgcgccgcctcctcacttctga

SEQ ID NO: 109538 - protein, 270 aa, Oryza sativa
MGRGRIEIKRIENTTSRQVTFCKRRNGLLKKAYELSVLCDAEVALIVFSSRGRLYEYSNNNNVKATIDRYKKAHACGSTSGAPLIEVNAQQYYQQESAKLRHQIQMLQNTNKHLVGDNVSNLSLKELKQLESRLEKGISKIRARKNELLASEINYMAKREIELQNDNMDLRTKIAEEEQQLQQVTVARSAAMELQAAAAAQQQQQNPFAVAAAQLDMKCFFPLNLFEAAAQVQAVAAQRQQIIPTELNLGYHHHLAIPGAAAADAPPPHF

SEQ ID NO: 109539 - DNA, 687 bp, Oryza sativa
  CDS (1)..(687)
atggttcgtgggaagaccgtcatcagcaggatcgagaacacgacgagccgccaggtgaccttctccaagaggaggagcgggctattcaagaaggccaaggagctggccatcctctgtgatgcccaggtcggcgtcctggtcttctcaagcactggccgtctctatgactactccaactccagcatgagatcagtaatcgaaagatatcagcagattaaagatggtcagcaacttatgagtgcgagcaccgaggcaaagttctggcaagcagaggcggaacgtttaaaacagcaactgcataacttagaaggaagtcaaaggcagttgttggcacatgatctctctggccttgaatggaatgacctgaagagtctagaaaatcaactggagacgagcttgcataacgttcgtctaaagaaggacaaaatcatggtcgaacaaattcaagaattgagaaagaaggagaacatcatgcaccgagaaaacatggaactccaccgtgagttcaacatgatccgtcaagatagtgtgaatttccagcgaaaggtttatggaaaacaagatgtaaatggaggacagggaagttctgttactcagaacaccaatactcaggatgatgcagacgaaattcgtcttgagctaagccaaccacaggttccggatgagaaaccagaagcagcagcataa

SEQ ID NO: 109540 - protein, 228 aa, Oryza sativa
MVRGKTVISRIENTTSRQVTFSKRRSGLFKKAKELAILCDAQVGVLVFSSTGRLYDYSNSSMRSVIERYQQIKDGQQLMSASTEAKFWQAEAERLKQQLHNLEGSQRQLLAHDLSGLEWNDLKSLENQLETSLHNVRLKKDKIMVEQIQELRKKENIMHRENMELHREFNMIRQDSVNFQRKVYGKQDVNGGQGSSVTQNTNTQDDADEIRLELSQPQVPDEKPEAAA

SEQ ID NO: 109541 - DNA, 726 bp, Brassica napus
  CDS (1)..(726)
atggcgagagagaagattcagatcaggaaaatcgacaacgcgacggcgagacaagtaacgttctcaaaacgaagaagaggtcttttcaaaaaagctgaagagctatccgttctctgcgacgctgatgttgctctcatcatcttctcttccactggaaagctctttgagttttgtagctccagcatgagggaagtgttagagaggcataacttgcagtcaaagaacttggagaagctagatcaaccatctctcgagttacagctggtcgagaacagcgatcacgccctgttgagcaaagagattgcgggaaagagccaccgattaaggcaaatgagaggagaggaacttcaaggacttagcattgaagaacttcaacagctggaaaaggcccttgaatccggtttgactcgcgtaattgaaaccaagagtgaaaagattatgaatgagatcagttatcttcaaagaaagggaatgcaactgatggacgtgaacaagcggctaaggcagcaagggacgcagttaacgggagagaacgagcgactaggtcagcagatattcaataatgtgcatgaaagatacggtggaggtgaatcagagaacactgccgtgtacgagcaaggacactcatcggagtccattactaacgccggaaactccacaggcgctcctgttgactccgagagctccgatatctcccttaggctcggcttaccgtatggtggttag

SEQ ID NO: 109542 - protein, 241 aa, Brassica napus
MAREKIQIRKIDNATARQVTFSKRRRGLFKKAEELSVLCDADVALIIFSSTGKLFEFCSSSMREVLERHNLQSKNLEKLDQPSLELQLVENSDHALLSKEIAGKSHRLRQMRGEELQGLSIEELQQLEKALESGLTRVIETKSEKIMNEISYLQRKGMQLMDVNKRLRQQGTQLTGENERLGQQIFNNVHERYGGGESENTAVYEQGHSSESITNAGNSTGAPVDSESSDISLRLGLPYGG

SEQ ID NO: 109543 - DNA, 726 bp, Brassica napus
  CDS (1)..(726)
atgggaaggggtagggttcagctgaagaggatagagaacaagatcaataggcaagttactttctcaaagagaaggtctggtttgctcaagaaagctcatgagatctctgttctctgcgatgctgaggttgctctcgttgtcttctcttccaaaggcaaactcttcgaatattccactgactctagcatggaaaggatacttgagcgatatgatcgctatttatattcagacaaacaacttgttggccgagacatttcacaaagtgaaaattgggttctagagcatgctaagctcaaggcaagagttgaggtacttgaaaagaataaaaggaattttatgggggaagatcttgattccttgagcataaaggagcttcaaagcttggagcatcagctcgacgctgctatcaagagcattaggtcaagaaagaaccaagctatgttcgaatccatatcagcgctccagaagaaggataaggccttgcaagatcacaataatacgcttctcaaaaagattaaggagaaggaaaaggagaagaacacgggtcagcaagaaggacaattaatccaatgctccaacaattcttcagttcttcagccccagtactgcgtaaccgcctccagagatggccttgtggagagagttgtgggagagaacggcggtgcatcgtcgttgattgaaccaaactctcttcttccagcttggatgctacgttcaaatgagtaa

SEQ ID NO: 109544 - protein, 241 aa, Brassica napus
MGRGRVQLKRIENKINRQVTFSKRRSGLLKKAHEISVLCDAEVALVVFSSKGKLFEYSTDSSMERILERYDRYLYSDKQLVGRDISQSENWVLEHAKLKARVEVLEKNKRNFMGEDLDSLSIKELQSLEHQLDAAIKSIRSRKNQAMFESISALQKKDKALQDHNNTLLKKIKEKEKEKNTGQQEGQLIQCSNNSSVLQPQYCVTASRDGLVERVVGENGGASSLIEPNSLLPAWMLRSNE

SEQ ID NO: 109545 - DNA, 723 bp, Brassica napus
  CDS (1)..(723)
atgggaaggggaaagatcgcgattaagaggatcgataactcgacgagtcgtcaggtgactttctccaagagaaggaacggcttgttgaagaaagccaaggagcttgcgattctttgcgatgctgaagttggtgttatcatcttctctagtactggcaggctctacgatttctccagctccagcatgaaatcggtaatagagagatacagagatgccaaatgtgacaccaattcggaaatgaacccagcttcagaactcaagttttggcaaaacgaggctgcgattctaaagcgtcagctacataacttgcaagaaaaccaccggcaaatgatgggtgaagagctctctggactaagtgtggaagatcttcagaaactggagaatcagcttgagatgagccttcgtgacgtacgaatgaaaaaggaacaaatgttagtcgaagaaataaaagaactgaaccgagagggtaatctcgtgcaccaagagaatttagagctccataagaaagtaaacctaatgcaccagcagcacatggagttacataagaaggtttcagaggttgagagtgtgaaaagcgcagacaaaatttctcttctcacaaatggtctagacatgggaggtaactcgagcgaacatgtccatcttcagctcagccaaccccagcagcatgacgaaacaagttccaaagctatccaactaagctatttttctttcattgcgtga

SEQ ID NO: 109546 - protein, 240 aa, Brassica napus
MGRGKIAIKRIDNSTSRQVTFSKRRNGLLKKAKELAILCDAEVGVIIFSSTGRLYDFSSSSMKSVIERYRDAKCDTNSEMNPASELKFWQNEAAILKRQLHNLQENHRQMMGEELSGLSVEDLQKLENQLEMSLRDVRMKKEQMLVEEIKELNREGNLVHQENLELHKKVNLMHQQHMELHKKVSEVESVKSADKISLLTNGLDMGGNSSEHVHLQLSQPQQHDETSSKAIQLSYFSFIA

SEQ ID NO: 109547 - DNA, 723 bp, Brassica napus
  CDS (1)..(723)
atgggaaggggtaagatcgcgatcaagaggattgataacgcgacgagtcgtcaggtgactttctccaagcgaaggaacggactcttgaagaaagccaaggagcttgcgattctctgcgacgctgaggttggtgtcatcatcttctccagcaccggcaggctctacgagttctccagctccagcatgaaatcgataatagatagatacagcgaggccaaatgtgaaactagttcggaaatcaacccagctttagaaatcaagttttggcaaaaggaggccgcgattctaaagcgacagttacacaacttgcaagaaaaccaccggcaaatgatgggggaagagctctctggactaagtgtggaagatttacagaaactggagaatcagcttgaactgagccttcatgatgtacgaatgaaaaaggatcaaatgttactagaagaaatacaagagcttaaccgcgaggggaatctcttacaccaagagaacttagacctccacgagaaattaaacctaatgcgacaacagaatatggagttacataagaaggtttcagaggttgagggtgtgaaaagctcagagaaaatttctcttctcacaaatggtctaggcatgagagataactcgagcgaacatgttcatcttcagctcagccaaccgctgcagcatgatgagactccttcaaaagctatccaactaagctatttctccttcatttcataa

SEQ ID NO: 109548 - protein, 240 aa, Brassica napus
MGRGKIAIKRIDNATSRQVTFSKRRNGLLKKAKELAILCDAEVGVIIFSSTGRLYEFSSSSMKSIIDRYSEAKCETSSEINPALEIKFWQKEAAILKRQLHNLQENHRQMMGEELSGLSVEDLQKLENQLELSLHDVRMKKDQMLLEEIQELNREGNLLHQENLDLHEKLNLMRQQNMELHKKVSEVEGVKSSEKISLLTNGLGMRDNSSEHVHLQLSQPLQHDETPSKAIQLSYFSFIS

SEQ ID NO: 109549 - DNA, 750 bp, Brassica napus; identical to SEQ ID NO: 102931
  CDS (1)..(750)

SEQ ID NO: 109550 - protein, 249 aa, Brassica napus; identical to SEQ ID NO: 102932

SEQ ID NO: 109551 - DNA, 687 bp, Brassica napus
  CDS (1)..(687)
atgggaagagggaagattgtgatccaaaggatcgatgattctaccagtagacaagtcactttctccaaacgaagaaagggtcttatcaagaaagccaaagagctagccattctctgtgacgccgaggtcggtctcatcatcttctccagcaccggaaagctctatgactttgccagctccagcatgaagtcagttattgatagatacaacaagagcaagatcgaacaacaacaactactgaaccccgcatcagaagtcaagttttggcagagagaagctgcggttctaaggcaagaattgcatgctttgcaagagaatcatagacaaattatgggggaacaactaaatggtttgagcgtcaacgagctaaacaatcttgagaatcaacttgagataagtttgcgtgatattcgtacgaaaaaggaacaaatgatgaatcatgagatccaagaactaagccaaaagaggaacctcatttatcaggagaacctcgagttatctcgaaaagtacaacggattcatcaagaaaatgtggagctctacaagaaggcttatacatcaagcacaaacgggtttatacaacgtgaactagctgtcgcggatgatgaatctaacactcagatccggctgcaactaagccaaccggatcatttcgattatgagaccccaccaagagcaagccaataa

SEQ ID NO: 109552 - protein, 228 aa, Brassica napus
MGRGKIVIQRIDDSTSRQVTFSKRRKGLIKKAKELAILCDAEVGLIIFSSTGKLYDFASSSMKSVIDRYNKSKIEQQQLLNPASEVKFWQREAAVLRQELHALQENHRQIMGEQLNGLSVNELNNLENQLEISLRDIRTKKEQMMNHEIQELSQKRNLIYQENLELSRKVQRIHQENVELYKKAYTSSTNGFIQRELAVADDESNTQIRLQLSQPDHFDYETPPRASQ

SEQ ID NO: 109553 - DNA, 723 bp, Brassica napus
  CDS (1)..(723)
atgggaaggggtaagatcgcgatcaagaggattgataactcgacgagccgtcaggtgacgttctccaagcgaaggaacggactcttgaagaaagccaaggagcttgcgattctctgcgatgctgaggttggtgtcatcatcttctccagcaccggcaggctctacgagttctccagctccagcatgaaatcgataatagatagatacagcgaggccaaatgtgaaactagttcggaaatcaacccagcttcagaaataaagttttggcaaaaggaggccgcgattctaaagcgacagctacacagcttgcaagaaaaccaccggcaaatgatgggggaagaactctctggactaagtgtggaagatttacagaaactggagaatcagcttgaactgagccttcatgatgtacgaatgaaaaaggatcaaatgttactagaagaaatacaagagcttaaccgcgaggggaatctcttacaccaagagaacttagacctccacaagaaattaaacctaatgcgacaacagaatatggagttacataagaaggtttcagaggttgagggtgtgaaaagctcagagaaaatttctcttctcacaaatggtctaggcatgagagataactcgagcgaacacgtccatcttcagctcagtcaaccgctgcagcatgatgagacgcactcaaaagctatccaactaagctatttctccttcatttcataa

SEQ ID NO: 109554 - protein, 240 aa, Brassica napus
MGRGKIAIKRIDNSTSRQVTFSKRRNGLLKKAKELAILCDAEVGVIIFSSTGRLYEFSSSSMKSIIDRYSEAKCETSSEINPASEIKFWQKEAAILKRQLHSLQENHRQMMGEELSGLSVEDLQKLENQLELSLHDVRMKKDQMLLEEIQELNREGNLLHQENLDLHKKLNLMRQQNMELHKKVSEVEGVKSSEKISLLTNGLGMRDNSSEHVHLQLSQPLQHDETHSKAIQLSYFSFIS

SEQ ID NO: 109555 - DNA, 750 bp, Brassica napus
  CDS (1)..(750)
atgggaaggggaagggttcagctacggcggatcgagaataagatacggagacaagtgacgttttcaaagcgaagaacaggtttggtgaagaaagctcaagagatctcagtgttatgtgatgctgatgttgctttgattgtcttttctccaaaaggcaagctctttgagtactctgctggctccagcatggagagaattctggatcgatatgagaggtgttcatacgccggtcaagacattcctacacccagtttggattcgcagggtgagtgttcaaccgaatgttcgaagctcttgaggatgattgatgctatgcaaataagcttaaggcacttaaaaggagaagaggtagatgctctaagtatcagagagcttcagagtctggagatgcaacttgatacttccctcaggagaactcgctctagaaagaaccagctcatggtagagtccttagcacagctccagaaaaaggagaaggaactcaaagaactgaagaaacagctaacaaagaaggttgatcaaggtgaagacattgagccgcaaaacatcagccaagggttagactcaacaccaccatgtgagacaccgcacctgttgccaggacctatttctccccaccctcccttgtctatcggtacttatagggacacatcgcaaatgaatgaaattggagaaaaagataccggaatcctagttcgctcggggaatacaacgttgccgcactggatgcctcggctcactggagagtag

SEQ ID NO: 109556 - protein, 249 aa, Brassica napus
MGRGRVQLRRIENKIRRQVTFSKRRTGLVKKAQEISVLCDADVALIVFSPKGKLFEYSAGSSMERILDRYERCSYAGQDIPTPSLDSQGECSTECSKLLRMIDAMQISLRHLKGEEVDALSIRELQSLEMQLDTSLRRTRSRKNQLMVESLAQLQKKEKELKELKKQLTKKVDQGEDIEPQNISQGLDSTPPCETPHLLPGPISPHPPLSIGTYRDTSQMNEIGEKDTGILVRSGNTTLPHWMPRLTGE

SEQ ID NO: 109557 - DNA, 750 bp, Brassica napus
  CDS (1)..(750)
atgggaaggggaagggttcagttacggcggatcgagaacaagataaggagacaagtgacattttcaaagcgaagaacgggtttggtgaagaaagttcaagagatctcagtgttatgtgatgctgatgttgctttgattgtcttctctccaaaaggcaagctcttcgagtactctgctggttccagcatggaaagcattcttgatcgatatgagagatgttcattcgccggtcaaaatattcctacaccaagtttggagtcacagggtgagtgctcaacagaatgttcgaagctcttgaggatgattgatgctatgaaaagaagcttaaggcacttgaaaggagaagaggttgatgctctaagtatcagagagctccagggtctggaagtgcaacttgatacttccctcaagagaattcgctcaagaaagaaccagctcatggtagagtccataacgcagctccagaaaaaggagaaggaactcaaagaactgaagaaacagctaacaaagaaggttgatcaaagagaagacattgagactcaaaacctcagccaagggttagcctcattggcaacgccaccatgtgagccaccgcacccgttgcccgaaccaatatctcccaatcctcctttaccacttgggaacatctcgcaaaggaatgaagttgaagaagtagatggtggaaccctaataattcgaccgacgaatacaacattgccgcactggatgccccgggtcactggagaatag

SEQ ID NO: 109558 - protein, 249 aa, Brassica napus
MGRGRVQLRRIENKIRRQVTFSKRRTGLVKKVQEISVLCDADVALIVFSPKGKLFEYSAGSSMESILDRYERCSFAGQNIPTPSLESQGECSTECSKLLRMIDAMKRSLRHLKGEEVDALSIRELQGLEVQLDTSLKRIRSRKNQLMVESITQLQKKEKELKELKKQLTKKVDQREDIETQNLSQGLASLATPPCEPPHPLPEPISPNPPLPLGNISQRNEVEEVDGGTLIIRPTNTTLPHWMPRVTGE

SEQ ID NO: 109559 - DNA, 771 bp, Brassica napus
  CDS (1)..(771)
atggggaggggtagggttcaattgaagaggatagagaacaagatcaatagacaagtgacgttctccaaaagaagagctggtcttttcaagaaagctcatgagatatctgttctctgtgatgctgaagttgcccttgttgtcttctcccataaggggaaactctttgagtactccactgattcttgcatggagaagatacttgaacgctatgagaggtactcttacgccgagagacagcttattgcacccgagtctgacgtcaatacgaactggtcgatggagtataacaggcttaaggctaagattgagcttttggagagaaaccagaggcactatcttggggaagacttgcaagcaatgagccctaaagagcttcagaatctggagcagcagcttgacactgctcttaagcacatccgatctagaaaaaaccaacttatgtacgactccgtcaatgaactccaaagaaaggagaaggcgatacaggaacaaaacagcatgctttccaaacagatcaaggagagggaaaaggttcttagggcacagcaagagcaatgggaccagcagaaccatggccaaaatatgcctccacctccgcccccgcaggagcatcaaatccagcatccatacatgctctctcatcagccatctccttttctcaacatgggtggcctgtatgaagaagaagatccaatggctatgaggagaaacgaccttgatttgtctcttgaacccgtgtacaactgcaaccttggctgctttgcctcatga

SEQ ID NO: 109560 - protein, 256 aa, Brassica napus
MGRGRVQLKRIENKINRQVTFSKRRAGLFKKAHEISVLCDAEVALVVFSHKGKLFEYSTDSCMEKILERYERYSYAERQLIAPESDVNTNWSMEYNRLKAKIELLERNQRHYLGEDLQAMSPKELQNLEQQLDTALKHIRSRKNQLMYDSVNELQRKEKAIQEQNSMLSKQIKEREKVLRAQQEQWDQQNHGQNMPPPPPPQEHQIQHPYMLSHQPSPFLNMGGLYEEEDPMAMRRNDLDLSLEPVYNCNLGCFAS

SEQ ID NO: 109561 - DNA, 750 bp, Brassica napus
  CDS (1)..(750)
atggagctaggaggagattcctctccacagaggaaaactgcagggagaggaaagatcgaaatcaaacggatcgaaaacacaacgaaccgtcaagtcactttctgcaaacgcagaaatggtttgcttaagaaagcttacgaactctctgttctttgtgatgctgaagtcgcactcatcgtcttctctagccgtggccgtctctatgagtactcaaacaacagtgtcaaagggacaattgagaggtacaagaaggcaatatcggataattccaacactggatcggtggcagaaattaatgcacagtattatcaacaagaatcggccaagttgcgtcaacagattatcagcatacaaaactcgaacaggcaattaatgggtgagacgatagggtcaatgtctcccaaggagcttagaaatttggaaggcagattagacagaagtatcaaccgaatacgatccaaaaagaatgaactcttattcgccgaaattgactacatgcagaagagagaagttgatttgcatagcgataaccagcttcttcgtgcaaagatagctgaaaatgagaggaacaatccaagtatgaatctcatgccaggaggatctaactacgagcagattataccaccgcctcaaacgaactctcagccgtttgattcacgaaactatttccaagtcgcggcattgcaacctaacaatcaacattactcatccgctggtcgccaagacctaacagctcttcagttagtgtaa

SEQ ID NO: 109562 - protein, 249 aa, Brassica napus
MELGGDSSPQRKTAGRGKIEIKRIENTTNRQVTFCKRRNGLLKKAYELSVLCDAEVALIVFSSRGRLYEYSNNSVKGTIERYKKAISDNSNTGSVAEINAQYYQQESAKLRQQIISIQNSNRQLMGETIGSMSPKELRNLEGRLDRSINRIRSKKNELLFAEIDYMQKREVDLHSDNQLLRAKIAENERNNPSMNLMPGGSNYEQIIPPPQTNSQPFDSRNYFQVAALQPNNQHYSSAGRQDLTALQLV

SEQ ID NO: 109563 - DNA, 726 bp, Brassica napus
  CDS (1)..(726)
atgggaaggggtagggttcagctgaagaggatagaaaacaagatcaataggcaagttactttctctaagagaaggtctggtttgctcaagaaagctcatgagatctctgttctctgcgatgctgaggttgccctcgtcatcttctcttccaaaggcaaactcttcgaatattccaccgactcttgcatggaaaggatacttgaacgctacgatcgctatttgtattcggacaaacaacttgtaggccgagagatttcacagagtgaaaattgggttcttgaacatgctaagctcaaggctagaattgaggtactcgagaagaacaaaaggaattttatgggggaagatcttgattcgttgagcttaaaggagctccaaagcttggaacatcagctccatgctgctatcaagagcattaggtcaagaaagaaccaagctatgttcgaatccatatcggcgctccaaaagaaggataaggccttgcaagatcacaacaatgcgcttctcaaaaagattaaggagagggagaagaacacggttcagcaaggaggacaactaatccaatgctccaacagttcttcaattcttcagccccaatactgcttaacctcctccagagatggcttcgtggggagggttggggaagagaacggcgtagcatcatcactggcggaaccaaactctcttcttccggcttggatgttacgccctaccacgaatgaatag

SEQ ID NO: 109564 - protein, 241 aa, Brassica napus
MGRGRVQLKRIENKINRQVTFSKRRSGLLKKAHEISVLCDAEVALVIFSSKGKLFEYSTDSCMERILERYDRYLYSDKQLVGREISQSENWVLEHAKLKARIEVLEKNKRNFMGEDLDSLSLKELQSLEHQLHAAIKSIRSRKNQAMFESISALQKKDKALQDHNNALLKKIKEREKNTVQQGGQLIQCSNSSSILQPQYCLTSSRDGFVGRVGEENGVASSLAEPNSLLPAWMLRPTTNE

SEQ ID NO: 109565 - DNA, 696 bp, Brassica napus
  CDS (1)..(696)
atgggaagaggaaaaatagagatcaagaggatcgagaactccacaaatcgacaagtaacattctgcaaaagaagaaatggacttctgaagaaagcttatgagcttgcagtcctctgcgatgcagaggttgccctcatagtcttctcaactcgtggccgtctctatgagtacgggaataacaacataagagcaaccattgagaggtacaagaaagcttcgtctgataacgccaacactcactctgtccaagaaatcaatgccgcgtactatcaacaagaatctgctaagctgagacaacagatccaaacgattcaaaattccaacaggaatctgatgggagactctttgagtgccttaaatgtcaaggaactaaaacaggttgagaatcgccttgagaaagccatctccaggatcaggtccaagaagcatgagttgcttctagctgaaattgagaacctgcataaaagggagattaagctcgataatgagagtatctatctccgaaccaagatagcagaagtggagaggtttcaacaacaccatcatcaaatggttagtggtacggagatgactgcgatcgaggccttagcctctcgcaattactttgctcataacattatgactattggttctggatctggagctggccatggatgttcttactttgatcccgacaagaaaactcatcttggataa

SEQ ID NO: 109566 - protein, 231 aa, Brassica napus
MGRGKIEIKRIENSTNRQVTFCKRRNGLLKKAYELAVLCDAEVALIVFSTRGRLYEYGNNNIRATIERYKKASSDNANTHSVQEINAAYYQQESAKLRQQIQTIQNSNRNLMGDSLSALNVKELKQVENRLEKAISRIRSKKHELLLAEIENLHKREIKLDNESIYLRTKIAEVERFQQHHHQMVSGTEMTAIEALASRNYFAHNIMTIGSGSGAGHGCSYFDPDKKTHLG

SEQ ID NO: 109567 - DNA, 726 bp, Brassica napus
  CDS (1)..(726)
atgggaaggggtagggttcagctgaagaggatagaaaacaagatcaataggcaagttactttctcaaagagaaggtctggtttgctcaagaaagctcatgagatctctgttctttgcgatgctgaggttgccctcgtcatcttctcttccaaaggcaaactcttcgaatattccaccgactcttgcatggaaaggatacttgaacgctacgatcgctatttgtattcagacaaacaacttgtaggccgagacatttcacagagtgaaaattgggttctagaacatgctaagctcaaggcaagagttgaggtactcgagaagaacaaaaggaactttatgggggaagatcttgattctttgagcttaaaggagctccaaagcttggagcatcagctccatgctgctatcaagagcattaggtcaagaaagaaccaagctatgttcgaatccatatcggcgctccagaagaaggataaggccttgcaagatcacaacaatgcgcttctcaaaaagattaaggagagggagaagaacacggttcagcaagaaggacaactaatccaatgctccaacaattcttcaattcttcagccccaatactgcttaacctcctccagagatggctttgtggggagagttgggggagacgacggcggtgcatcatcactggcggaaccaaactctcttcttccggcttggatgttacgccttgcaacgaatgagtag

SEQ ID NO: 109568 - protein, 241 aa, Brassica napus
MGRGRVQLKRIENKINRQVTFSKRRSGLLKKAHEISVLCDAEVALVIFSSKGKLFEYSTDSCMERILERYDRYLYSDKQLVGRDISQSENWVLEHAKLKARVEVLEKNKRNFMGEDLDSLSLKELQSLEHQLHAAIKSIRSRKNQAMFESISALQKKDKALQDHNNALLKKIKEREKNTVQQEGQLIQCSNNSSILQPQYCLTSSRDGFVGRVGGDDGGASSLAEPNSLLPAWMLRLATNE

SEQ ID NO: 109569 - DNA, 726 bp, Brassica napus
  CDS (1)..(726)
atggcgagagagaagattcagatcaggaaaatcgacaacgcgacggcgagacaagtaactttctctaaacgaagaagaggtcttttcaaaaaagctgaagagctctccgttctctgcgacgctgatgttgccctcatcgtcttctcttccaccggaaagctcttcgagttttgtagctccagcatgagggaagtattagagaggcataatttgcagtcaaagaacttggagaagcttgatcagccatctcttgagttacagctggttgagaacagtgaaaattcccggttgagcaaagaaattgcagacaagagccaccaactaaggcaaatgagaggagaggaacttcaaggacttaacatagaagagctgcaacagctggaaaaggcccttgaagctggtttgacgcgcgtgattgaaacaaagagtgagaagattatgagtgagatcagtgaccttcaaagaaagggaatgaaattgatggatgagaacaagcggctaaggcagcatggaacacaactaacagaagagaacgagcgactaggcaagcaaatatataataatatgcatgaaagatacggtggtgttgagtcggagaagaccgccgtgtacgaggaagggcactcgtcagagtccattactaacgccggaaactccaccggcgctcctgttgactccgagagctccgatacctctctaaggctcggcttaccgtatggcggttag

SEQ ID NO: 109570 - protein, 241 aa, Brassica napus
MAREKIQIRKIDNATARQVTFSKRRRGLFKKAEELSVLCDADVALIVFSSTGKLFEFCSSSMREVLERHNLQSKNLEKLDQPSLELQLVENSENSRLSKEIADKSHQLRQMRGEELQGLNIEELQQLEKALEAGLTRVIETKSEKIMSEISDLQRKGMKLMDENKRLRQHGTQLTEENERLGKQIYNNMHERYGGVESEKTAVYEEGHSSESITNAGNSTGAPVDSESSDTSLRLGLPYGG

SEQ ID NO: 109571 - DNA, 768 bp, Brassica napus
  CDS (1)..(768)
atggcttaccaaatggagctaggaggagaatcctctccacagaggaaagctgggagaggaaagatcgaaatcaaacggatcgagaacacaacgaaccgtcaagttactttctgcaaacgcagaaatggtttgctcaagaaagcttacgaactctctgttctttgtgatgctgaagtcgcactcattgtcttctctagccgtggccgtctctatgagtactcaaacaacagtgtaaaagggacaattgagaggtacaagaaagcaatatcggataattctaacaccggatccgtggcagaaattaatgcacagtattatcaacaagaatctgccaaattgcgtcaacaaattatcagcatacaaaactcgaacaggcaattgatgggtgagacgatagggtcaatgtctcccaaagagcttaggaacttggaaggaagattagacagaagtgttaatcgaatcagatccaagaagaatgaactcttattcgccgaaattgactacatgcagaagagatctgtgcaggaagttgatttgcataacgataaccagcttcttcgtgctaagatagctgaaaatgagaggaacaatccaagtatgagtctgatgccaggaggatctaactacgagcagatcatgccaccgcctcaaacgcaacctcaaccgtttgactcacggaactatttccaagtcgcggcattgcaacctaacaatcaccattactcatccgcaggtcgcgaagaccaaaccgctcttcagttagtgtaa

SEQ ID NO: 109572 - protein, 255 aa, Brassica napus
MAYQMELGGESSPQRKAGRGKIEIKRIENTTNRQVTFCKRRNGLLKKAYELSVLCDAEVALIVFSSRGRLYEYSNNSVKGTIERYKKAISDNSNTGSVAEINAQYYQQESAKLRQQIISIQNSNRQLMGETIGSMSPKELRNLEGRLDRSVNRIRSKKNELLFAEIDYMQKRSVQEVDLHNDNQLLRAKIAENERNNPSMSLMPGGSNYEQIMPPPQTQPQPFDSRNYFQVAALQPNNHHYSSAGREDQTALQLV

SEQ ID NO: 109573 - DNA, 810 bp, Brassica napus
  CDS (1)..(810)
atgggaagaggaaaagtggagttgaagaggatagagaacaagatcaacaggcaagtaacttttgcaaagagaaggaatggtctgcttaagaaagcttatgagctttctgtgctttgtgatgctgagattgctcttctcattttctctaaccgtggcaagctctacgagttttgcagcagtcctagtggtatgaccaagacggttgagaagtatagaaaacacagttatgcaactatggatccaaatcaatcagctaaagacttgcaggagaagtaccaagactacttgatgctcaaatcaaaagttgaaagccttcaacattcacaaaggcatttgctaggtgaggagatagctgggatgggagtgaatgagcttgagcagctagaacaccaagtagatgcatcactaaagcagataaggtcaagaaaggccggggcgatgcttgatcaactatcagacctcaaagcaaaggaggaaatgttattggagaccaacagagatcttaggagaaagttggaggaaagtgatgcagcccttactcaatcgatgtggggagctgcttctggtggagaacattcccaccaacaacaacagcaatatcaccaacagcaacaacaacaacaacatcaacaaggcatgagctcttatcaagcaaaccctccgagtcaagaaaatggtttcttcaggcctttacacggcaatttagcattgcagatgagtcattacaatcctggtgtgacaaatgcaagcaactcagcaacaacatcacagaatgttattaatggatttttccctggatggatgctctga

SEQ ID NO: 109574 - protein, 269 aa, Brassica napus
MGRGKVELKRIENKINRQVTFAKRRNGLLKKAYELSVLCDAEIALLIFSNRGKLYEFCSSPSGMTKTVEKYRKHSYATMDPNQSAKDLQEKYQDYLMLKSKVESLQHSQRHLLGEEIAGMGVNELEQLEHQVDASLKQIRSRKAGAMLDQLSDLKAKEEMLLETNRDLRRKLEESDAALTQSMWGAASGGEHSHQQQQQYHQQQQQQQHQQGMSSYQANPPSQENGFFRPLHGNLALQMSHYNPGVTNASNSATTSQNVINGFFPGWML

SEQ ID NO: 109575 - DNA, 765 bp, Brassica napus
  CDS (1)..(765)
atgtcaaacatggcctaccaaatggagctaggaggagattcctctccacagaggaaatctgcagggagaggaaagatcgaaatcaaacggatcgagaacacaacaaatcgccaagtcactttctgcaaacgcagaaatggtttgctcaagaaagcttacgaactctctgttctttgtgatgctgaagtcacactcatcgtcttctctagccgtggccgtctctatgaatactcaaacaacagtgtaaaagggacaatcgagaggtacaagaaggcaatatcggataatactaacaccggaaccgtggcagaaattaacggacagtattaccaacaagaatcggccaaattgcgtcaacaaattatcagcatacaaaactcgaacaggcaattgatgggtgagacaatagggtcaatgtctcccaaagagcttaggaatttggaaggcaggttagacagaagtattaatcgaatccgatccaagaagaatgaactcttattcgctgaaattgactacatgcagaagcgagaagttgatttgcatagtgagaaccagcttcttcgtgctaagatagctgaaaatgagaggaacaattcaagtatgaatcttatgccaggaggatacgaacagactatgcagccgcctcaaacgcaatctcaaccgtttgattcacggaactatttccaagtcgctgcattgcagcctaacaatcaccattactcatccgcaggtcgccaagaccaaaccgctcttcagttagtgtaa

SEQ ID NO: 109576 - protein, 254 aa, Brassica napus
MSNMAYQMELGGDSSPQRKSAGRGKIEIKRIENTTNRQVTFCKRRNGLLKKAYELSVLCDAEVTLIVFSSRGRLYEYSNNSVKGTIERYKKAISDNTNTGTVAEINGQYYQQESAKLRQQIISIQNSNRQLMGETIGSMSPKELRNLEGRLDRSINRIRSKKNELLFAEIDYMQKREVDLHSENQLLRAKIAENERNNSSMNLMPGGYEQTMQPPQTQSQPFDSRNYFQVAALQPNNHHYSSAGRQDQTALQLV

SEQ ID NO: 109577 - DNA, 684 bp, Glycine max
  CDS (1)..(684)
atggtgagggagaagattcagattaagaagatcgacaacgccacggcgaggcaggtcacgttctccaagcgtcgcagagggctcttcaagaaagctgaggagctttcggttatgtgtgatgctgatgttgccctcataatcttctcttccactgggaagctctttgagtactcaagctcaagcatgaaggaaatacttgaaaggcatcatttgcactcaaagaacctagcaaggatggaacaaccatctctcgagttgcagctagttgaaaacagcaattgctctagattgagcaaggaagtggctgaaaagagccatcaactaaggcagctgagaggagaggatcttcaaggcttaaacatagaagaattgcaacaattggagaggtctcttgaaactggattgggccgtgtaatagaaaagaagggtgagaagattatgagtgagatcactgatctccaaagaaaggggatgctattgatggaagagaacgagcgacttaaacgtcacgtggcgggcataattaatggccaaaggcatggtggtgccgaatctgagaactttgttatggatgaaggtcagtcttcagagtctgttacgtacgtttgcaattccactggacccccccaagactttgaaagctcagatacttccctcaaattggggctaccatactccggctga

SEQ ID NO: 109578 - protein, 227 aa, Glycine max
MVREKIQIKKIDNATARQVTFSKRRRGLFKKAEELSVMCDADVALIIFSSTGKLFEYSSSSMKEILERHHLHSKNLARMEQPSLELQLVENSNCSRLSKEVAEKSHQLRQLRGEDLQGLNIEELQQLERSLETGLGRVIEKKGEKIMSEITDLQRKGMLLMEENERLKRHVAGIINGQRHGGAESENFVMDEGQSSESVTYVCNSTGPPQDFESSDTSLKLGLPYSG

SEQ ID NO: 109579 - DNA, 636 bp, Glycine max
  CDS (1)..(636)
atggtgagaaggaagataccgatcaagaagatcgacaacgtaactgcgaggcaggtgacattctcaaagaggaagagtggtcttttcaagaaggcacgcgagctctctcttctctgtgattctgagatagcactcatagtcttttcacctggtggcaagctcttcgactatgctagttcaagtatgcagaaggtaattgaaaggcatattttatggtcagagctgaaccttgaaaaattagaccaatcatgtcctacggagcagcttagatgtaattatgctgatttaaacaaggaatttggagacaggactcgtgaaatgagacaactgaatggagaagaactgcaaggattggccctaagggagcttcagaaattagaagaacgactggtctcatccttgaaccgagtttataaagcgaaggttgaaaattttacaagagagatcgatattcttaagcaaaagggaaacaaactcatggaagataacaggctgatgaaacagaggataaaaccgaggaatgaaatatgttcggtccagagacacgagcatgaacaaggccggtcctttgacacctccctcacgttggggctatcttttcctgctggctcaaagtacagagtttctgagcaatga

SEQ ID NO: 109580 - protein, 211 aa, Glycine max
MVRRKIPIKKIDNVTARQVTFSKRKSGLFKKARELSLLCDSEIALIVFSPGGKLFDYASSSMQKVIERHILWSELNLEKLDQSCPTEQLRCNYADLNKEFGDRTREMRQLNGEELQGLALRELQKLEERLVSSLNRVYKAKVENFTREIDILKQKGNKLMEDNRLMKQRIKPRNEICSVQRHEHEQGRSFDTSLTLGLSFPAGSKYRVSEQ

SEQ ID NO: 109581 - DNA, 732 bp, Glycine max
  CDS (1)..(732)
atggcttttccaaacccatccatgtcagtttctccacagaagaagatgggaagggggaagattgagatcaagaggattgagaacaccaccaatcgccaagtcaccttctgcaagcgcagaaacggcttgctcaagaaagcatatgaattatctgtgctttgtgatgcagaggttgctctaattgtcttctctagccgtggacgcctctatgaatatgctaataacagtgtcaaagcaaccatcgagaggtacaaaaaagcatgttcagattcgtccggtgctggatctgcttctgaggctaatgcacagttttaccagcaagaagcggataaacttcgtgcacaaattagtagcctgcagaataacaacaggcaaatgatgggtgagtctttgggccctctgactgccaaggaactcaaaaacctggagactaaattagaaaaaggaattagtaggattcgttcaaaaaagaatgagctgctatttgctgaaattgagtacatgcagaaaagggagatagacttgcacaacaacaaccagcttcttcgagcaaagatagctgaaggtgagaggaaccaccataacttggccgtgttgcctggcggctcaaactatgattctttgcagacttctcagcagcaatttgattctcgtggctacttccaagtcactggattacaacccaataatcagtatgcacggcaagatcagatgtcgcttcaattagtatga

SEQ ID NO: 109582 - protein, 243 aa, Glycine max
MAFPNPSMSVSPQKKMGRGKIEIKRIENTTNRQVTFCKRRNGLLKKAYELSVLCDAEVALIVFSSRGRLYEYANNSVKATIERYKKACSDSSGAGSASEANAQFYQQEADKLRAQISSLQNNNRQMMGESLGPLTAKELKNLETKLEKGISRIRSKKNELLFAEIEYMQKREIDLHNNNQLLRAKIAEGERNHHNLAVLPGGSNYDSLQTSQQQFDSRGYFQVTGLQPNNQYARQDQMSLQLV

SEQ ID NO: 109583 - DNA, 669 bp, Glycine max
  CDS (1)..(669)
atgggaagggggaagattgtgattgaaaggatcgacaattccactagccggcaagtgactttctcaaagagaagaaagggattgatcaagaaagccaaagagctagcaatcctctgcgatgcacaagttggccttgtcatattctccagcacgggaaagctttatgaatatgccagcaccagcatgaaatcaatcatcgagagatataacacgtgcaaggaagaacatcaccgtcagatgaatccagaatctgaagtcaaattttggcagagggaggcagaaattctaaggcagcaactacagaatctacaagaaaaccatcggcaattgatgggagaacagctatatggtctgagtgtgagaaacctacaagatctagagaatcaactggaactgaatctccaaggtgtccgtatgaaaaaggaacaaattctaaaagatgaaatccaagagctgaaccgaaaggggaacctgatctttcaggaaaatgtggaactttacaagaaggtctttggtacaacagatatggccacaacaagcagaaatgcatttgttccactttcatatggtatgcatgctgcaggagggaatccacaagaattggtccaacttcagctatgccagcctgaacaagaagtttgtgagacatcggacacagccacaaaatga

SEQ ID NO: 109584 - protein, 222 aa, Glycine max
MGRGKIVIERIDNSTSRQVTFSKRRKGLIKKAKELAILCDAQVGLVIFSSTGKLYEYASTSMKSIIERYNTCKEEHHRQMNPESEVKFWQREAEILRQQLQNLQENHRQLMGEQLYGLSVRNLQDLENQLELNLQGVRMKKEQILKDEIQELNRKGNLIFQENVELYKKVFGTTDMATTSRNAFVPLSYGMHAAGGNPQELVQLQLCQPEQEVCETSDTATK

SEQ ID NO: 109585 - DNA, 684 bp, Glycine max
  CDS (1)..(684)
atggctcgaggaaagatccagatcaagaggatagagaacaccaccaaccgccaggtcacttattctaaacgacggaatggccttttcaagaaggccaacgagctcaccgttctatgcgatgccaaggtttctattattatgttctccagcactgggaaactccacgagtacatcagcccctccacctcaacaaagcagttcttcgatcagtaccagatgactctaggagtcgatctctggaactctcattacgagaatatgcaagagaacttgaagaaactcaaagatgtgaataggaatcttcgtaaggagattaggcagaggatgggagattgtctgaacgatctgggcatggaagatctcaagctccttgaggaagaaatggacaaggccgccaaggttgttcgtgaacgtaagtataaggtgataacaaatcagattgacacccaaaggaaaaagtttaataacgagaaagaagtgcacaacagactcctgcgtgacttggatgcaagagcagaagatccacgttttgcattgatagataatggaggggagtacgagtctgtgatcggattctcaaatttaggtccacgcatgttcgcattgagcctacagccaagccatcctagtgcccaaagcggagcagcaggctctgatcttaccacttaccctttacttttctag

SEQ ID NO: 109586 - protein, 227 aa, Glycine max
MARGKIQIKRIENTTNRQVTYSKRRNGLFKKANELTVLCDAKVSIIMFSSTGKLHEYISPSTSTKQFFDQYQMTLGVDLWNSHYENMQENLKKLKDVNRNLRKEIRQRMGDCLNDLGMEDLKLLEEEMDKAAKVVRERKYKVITNQIDTQRKKFNNEKEVHNRLLRDLDARAEDPRFALIDNGGEYESVIGFSNLGPRMFALSLQPSHPSAQSGAAGSDLTTYPLLF

SEQ ID NO: 109587 - DNA, 738 bp, Glycine max; identical to SEQ ID NO: 102933
  CDS (1)..(738)

SEQ ID NO: 109588 - protein, 245 aa, Glycine max; identical to SEQ ID NO: 102934

SEQ ID NO: 109589 - DNA, 738 bp, Glycine max
  CDS (1)..(738)
atgggtagagggagagttgagttgaagaggatagagaacaaaatcaaccgccaagtaactttctcaaaaagaaggaacggtttgctcaagaaagcttatgaactctcagttctctgtgatgctgaggttgccctcatcattttctcaagccgtggaaagctctatgaatttggaagtgttgggactaccaatactattgagcgataccaacgtagctcttttactcctcaagacgaacacgttgaatgtgaaactcagagctggtaccaagaagtttcaaagctaaaggcaaagtatgagtctcttcaaaggacccagaggcatttgcttggggaagatcttggaccattgaacataaaggagctgcagaatattgagaaacagcttgaaggggctttagcacaagcaagacaaaggaagacacaaatcatgattgaacaaatggaagagcttcgcagaagggagcgccatcttggagacatgaataagcaacttagactcaagcttgaagcagagggatttaatcttaaagctacggaaagcttgttgagctttacttcagctgctggaaacagtggctttcactttcagcagcctcctcaaaccaatcctattgattaccagcagccagaaccctttttgcaaatagggtaccatcaatatgttcaatctgaggcatctaatgttccaaagagcatggcttgtgagactaacttcatgcagggatggatcctttga

SEQ ID NO: 109590 - protein, 245 aa, Glycine max
MGRGRVELKRIENKINRQVTFSKRRNGLLKKAYELSVLCDAEVALIIFSSRGKLYEFGSVGTTNTIERYQRSSFTPQDEHVECETQSWYQEVSKLKAKYESLQRTQRHLLGEDLGPLNIKELQNIEKQLEGALAQARQRKTQIMIEQMEELRRRERHLGDMNKQLRLKLEAEGFNLKATESLLSFTSAAGNSGFHFQQPPQTNPIDYQQPEPFLQIGYHQYVQSEASNVPKSMACETNFMQGWIL

SEQ ID NO: 109591 - DNA, 759 bp, Brassica napus
  CDS (1)..(759)
atgggaaggggaagagtagagctgaagagaatagagaacaaaatcaacagacaagtaacgtttgctaaacgtaggaacggtctgttaaagaaagcttacgagttgtctgttctttgcgatgctgaggtggctctcatcatcttctccaaccgtggcaagctctatgagttttgcagctcctcaaacatgatcaagacactggaacggtaccagaaatgcagttatggttctattgaagtcaacaacaaacctgccaaagaacttgagaatagctacagagagtatctgaagcttaagggtaggtatgagagccttcagcgccagcaaaggaatcttcttggggaggatttaggacctctcaactcaaaggaactagagcagcttgagcgtcaactagatggatctctcaagcaagttcgctccatcaagacacagtacatgcttgaccagctctctgatcttcaaagcaaagagcaaatgttgcttgaaaccaatagagctttggcaataaagctggatgatatgattggtgtgagaagccatcatatgggaggaggaggaggatgggaaggcaatgaacagaatgttccgtacgagcatcatcaccaagctcagtctcaaggactattccagcctcttgaatgcaatcctactctgcagatagggtatgacaatccagtaggctcggagcagataactacaacaacacaagctcaggcgcagccaggaaacggttacatcacaggctggatgctctga

SEQ ID NO: 109592 - protein, 252 aa, Brassica napus
MGRGRVELKRIENKINRQVTFAKRRNGLLKKAYELSVLCDAEVALIIFSNRGKLYEFCSSSNMIKTLERYQKCSYGSIEVNNKPAKELENSYREYLKLKGRYESLQRQQRNLLGEDLGPLNSKELEQLERQLDGSLKQVRSIKTQYMLDQLSDLQSKEQMLLETNRALAIKLDDMIGVRSHHMGGGGGWEGNEQNVPYEHHHQAQSQGLFQPLECNPTLQIGYDNPVGSEQITTTTQAQAQPGNGYITGWML

SEQ ID NO: 109593 - DNA, 675 bp, Brassica napus
  CDS (1)..(675)
atggcgagagggaagatccagatcaagaggatagagaaccagaccaaccgacaagtgacgtattcaaagagaagaaatgttttgttcaagaaagctcacgagctcacggtcttgtgtgacgctagggtttcgattatcatgttctctagctccaacaagcttcatgagtttatcagccctaacaccacaacgaaggagatcttagatctgtaccaaacagtttctgatgttgatgtttggagcgctcactatgagagaatgcaagaaaccaagaggaaactgctggagacaaatagaaatcttcggactcagattaaacagaggctaggcgagtgtttggacgagtttgatattcaggagctgcgtagtcttgaggaagaaatggaaaacactttcaaactcgttcgcgagcgcaagtttaaatcgcttgggaatcaaatcgagaccaccaagaaaaagaacaagagccagcaagacatacaaaagaatctcatacatgagctggaactaagagcagaagatcctcattatggactagtagacaatggaggagactacgattccgttcttggatatcaacttcgtttccatcagaaccatcaccaccattatcccaaccatgcccttcatgaagcatctgcctctgacatcattaccttccaccttctcgaataa

SEQ ID NO: 109594 - protein, 224 aa, Brassica napus
MARGKIQIKRIENQTNRQVTYSKRRNVLFKKAHELTVLCDARVSIIMFSSSNKLHEFISPNTTTKEILDLYQTVSDVDVWSAHYERMQETKRKLLETNRNLRTQIKQRLGECLDEFDIQELRSLEEEMENTFKLVRERKFKSLGNQIETTKKKNKSQQDIQKNLIHELELRAEDPHYGLVDNGGDYDSVLGYQLRFHQNHHHHYPNHALHEASASDIITFHLLE

SEQ ID NO: 109595 - DNA, 669 bp, Glycine max
  CDS (1)..(669)
atgggaagggggaagatcgaaatcaaaagaatcgagaacacaacaaatcggcaagtgaccttctgcaagagaagaaatgggcttctgaagaaagcttatgagctgtcagtgctgtgtgatgctgaagtttccctcatcgtcttctccagccgtggccgtctctatgagtattccaacaacaacataagatcaaccatagagaggtacaaaaaagcctgttcggatcattcaagtgcgagcactaccacagaaatcaatgctcagtattatcaacaagaatctgctaagctgcgacagcaaatacagatgctgcaaaattctaacaggcacctgatgggtgatgccttgagcacactgactgtgaaggaacttaagcagttggagaatagacttgaaagaggaatcactagaatcagatctaagaaacatgagatgctattggctgaaattgaatactttcagaaaagggagattgagctggaaaatgaaaatctttgcctccggactaagataactgacgttgagaggattcagcaagtaaacatggtttctggaccagaactgaatgtcattcaggcattagcttcccgtaacttcttcaatccaaacatgttggacggtggaactgtttaccctcagacagataagaagattcttcatcttgggtga

SEQ ID NO: 109596 - protein, 222 aa, Glycine max
MGRGKIEIKRIENTTNRQVTFCKRRNGLLKKAYELSVLCDAEVSLIVFSSRGRLYEYSNNNIRSTIERYKKACSDHSSASTTTEINAQYYQQESAKLRQQIQMLQNSNRHLMGDALSTLTVKELKQLENRLERGITRIRSKKHEMLLAEIEYFQKREIELENENLCLRTKITDVERIQQVNMVSGPELNVIQALASRNFFNPNMLDGGTVYPQTDKKILHLG

SEQ ID NO: 109597 - DNA, 627 bp, Triticum aestivum
  CDS (1)..(627)
atggggcgcggcaagatcgagatcaagaggatcgagaactcgtccaaccgccaggtgaccttcgccaagcgccgggccgggctggtgaagaaggcccgcgagatcggcgtgctctgcgacgccgaggtcggcgtcgtcatcttctccagcgccggcaagctctacgacttctggacgcccaagaccacgctaccgaggatcttggagaagtaccagaccaactccggcaagatcctgtgggacgagaagcacaagagcatcagcgcagagatcgacagggtgaagaaggagaacgacaacatgcagatcgagctcaggcatatgaaaggcgaggatgtgaactccctgcagcccaaggaactgatcgccattgaggaagctctcacgaacggccagaccaacctcagggacaagatgatggaccactggaagatgcacaggaggaatgagaagatgctggaggaggagcacaagctgctggctctgaggatgcaccagcaggacgacctgagcagcggcatgagggagatggagctcgggtaccatcagggtagggatttcacttcccagatgccgttcaccttccggctgcagcccagccaccccaacttgcaggaagacaagtag

SEQ ID NO: 109598 - protein, 208 aa, Triticum aestivum
MGRGKIEIKRIENSSNRQVTFAKRRAGLVKKAREIGVLCDAEVGVVIFSSAGKLYDFWTPKTTLPRILEKYQTNSGKILWDEKHKSISAEIDRVKKENDNMQIELRHMKGEDVNSLQPKELIAIEEALTNGQTNLRDKMMDHWKMHRRNEKMLEEEHKLLALRMHQQDDLSSGMREMELGYHQGRDFTSQMPFTFRLQPSHPNLQEDK

SEQ ID NO: 109599 - DNA, 735 bp, Triticum aestivum
  CDS (1)..(735)
atggggcgggggaaggtgcagctgaagcggatcgagaacaagatcaaccggcaggtgaccttctccaagcgccgctcggggcttctcaagaaggcgcacgagatctccgtgctctgcgacgccgaggtcggcctcatcatcttctccaccaagggaaagctctacgagttctccaccgagtcatgtatggacaaaattcttgaacggtatgagcgctattcttatgcagaaaaggttctcgtttcaagtgaatctgaaattcagggaaactggtgtcacgaatataggaaactgaaggcgaaggttgagacaatacagaaatgtcaaaagcatctcatgggagaggattttgaatctttgaatctcaaggagttgcagcaactggagcagcagctggaaagctcactgaaacatatcagatccaggaagaaccaacttatgcacgaatccatttctgagcttcagaagaaggagaggtcactgcaggaggagaataaagttctccagaaggaactcgtggagaagcagaaggcccatgtggcgcagcaagatcaaactcagcctcaaaccagctcttcatcttcttccttcatgctgagggatgctccccctgccgcaaataccagcattcatccagcggcaacaggcgagagggcagaggatgcggcagtgcagccgcaggccccaccccggacggggcttccaccgtggatggtgagccacatcaacgggtga

SEQ ID NO: 109600 - protein, 244 aa, Triticum aestivum
MGRGKVQLKRIENKINRQVTFSKRRSGLLKKAHEISVLCDAEVGLIIFSTKGKLYEFSTESCMDKILERYERYSYAEKVLVSSESEIQGNWCHEYRKLKAKVETIQKCQKHLMGEDFESLNLKELQQLEQQLESSLKHIRSRKNQLMHESISELQKKERSLQEENKVLQKELVEKQKAHVAQQDQTQPQTSSSSSSFMLRDAPPAANTSIHPAATGERAEDAAVQPQAPPRTGLPPWMVSHING

SEQ ID NO: 109601 - DNA, 687 bp, Zea mays
  CDS (1)..(687)
atggcgagggagaggcgggagataaagaggatagagagcgcggcagcgaggcaggtcacgttctccaagcgccgccgcggcctcttcaagaaggcccaggagctctccgtgctgtgcgatgccgacgtcgcgctcatcgtcttctcctccacggggaagctctcccagttcgccagctccagtatgaatgagataattgacaagtacaacacgcattctaaaaacctggggaaaacagaacagccttcgctggacttgaacttagagcatagcaaatatgcaaatttgaatgagcaacttgcggaagcaagccttcgactcaggcagatgagaggtgaagaacttgagggattgaatgttgaagaactccagcagttggagaagaacctggaatctggtctgcatagggtgcttcaaacaaaggatcaacaattcttggaacagatcaatgacctcgaacgtaagagtacgcagctggcagaggagaacatgcaactgaggaatcaagtatcccagatacccccagctggcaagcaagcagttgctgatactgaaaatgttattgctgaagaagggcaatcctctgaatcagtgatgactgcgttgcactctgggagttcacaggataatgatgatggttcggatgtatctctaaagttagggctgccttgcgttgcatggaagtaa

SEQ ID NO: 109602 - protein, 228 aa, Zea mays
MARERREIKRIESAAARQVTFSKRRRGLFKKAQELSVLCDADVALIVFSSTGKLSQFASSSMNEIIDKYNTHSKNLGKTEQPSLDLNLEHSKYANLNEQLAEASLRLRQMRGEELEGLNVEELQQLEKNLESGLHRVLQTKDQQFLEQINDLERKSTQLAEENMQLRNQVSQIPPAGKQAVADTENVIAEEGQSSESVMTALHSGSSQDNDDGSDVSLKLGLPCVAWK

SEQ ID NO: 109603 - DNA, 702 bp, Zea mays
  CDS (1)..(702)
atggtcgggaccgggaagagggagcggatagcgatacggaggatcgacaacctggcggcaaggcaggtgaccttctccaagaggcggcggggcctgttcaagaaggccgaggagctctccatcctctgcgacgccgaggtcggccttgtcgtcttctccgccaccggcaaactcttccacttcgccagctccagcatgaagcaggtaatcgatcggtacgactctcattccaagactctccagaagtccgaaccgcagtcgtctcaactgcagtcacatatggatgacggcacttgtgcaaggctaaaggaggaacttgctgaaacaagccttaagctcaggcagatgagaggagaggagctccagaggctgagcgtccaacagctacaggagctcgagaagaccctcgaatccggcctcggctctgtactcaaaaccaagagccaaaaaatccttgacgagatcagcggtctggaaagaaagagaacgcagctgatcgaggagaactcaaggctgaaggagcaagtgacacggatgtcgaggatggagacgcagcttggcgccgacccagagttcgtgtacgaggaagggcagtcgtctgaatccgtgacgaacacgtcctatccgcgcccgtccaccgacaccgacgactgctccgacacatcgctcaggctcgggctaccattcttcagctccaagtga

SEQ ID NO: 109604 - protein, 233 aa, Zea mays
MVGTGKRERIAIRRIDNLAARQVTFSKRRRGLFKKAEELSILCDAEVGLVVFSATGKLFHFASSSMKQVIDRYDSHSKTLQKSEPQSSQLQSHMDDGTCARLKEELAETSLKLRQMRGEELQRLSVQQLQELEKTLESGLGSVLKTKSQKILDEISGLERKRTQLIEENSRLKEQVTRMSRMETQLGADPEFVYEEGQSSESVTNTSYPRPSTDTDDCSDTSLRLGLPFFSSK

SEQ ID NO: 109605 - DNA, 810 bp, Triticum aestivum
  CDS (1)..(810)
atgcagatactcaacgagcagctggctgcaccatccacaggcctaatggtgaaggagtctgcgtccccggggtcggggtcgggatcggcagggggggctgctgagaagatggggagagggaggatcgagatcaagcgcatcgagaacaccacgaaccggcaggtcaccttctgcaagcgccgcaacggcctcctgaagaaggcgtacgagctctcggtgctctgcgacgccgaggtggcgctcatcgtcttctccggccgcgggcgcctctacgagtactccaacaacagcgtgaaagcaaccattgagagatacaagaaggcaacaagtgacacctccagcgctggtacagtcgcagagatcaatgcccagcactaccagcaggaatctgcgaagctgaagcagcagataaccaccttgcagaactccaacaggactctaataggcgatacaatggccaccatgagccacagagacctgaagcagctggagggagggctggacaaaggcctaggaaagattagagcaagaaagaacgaattactatgcgctgaaattgagtacatgcagagaagggaaatggagctgcagaataacaacttcttcttgagggaaaaagtagctgagactgaaagggggcaacagcagacgttgaacatgatgggggcggcttcgacatcgaatgagtacgagcaaaatatgatccattgtgatccgagaaccttcctgcagttcaacttcatgcagcagcaccctcagtactgctcccagcaggaggaccgaaaaagtttcaactcagttggaaggtga

SEQ ID NO: 109606 - protein, 269 aa, Triticum aestivum
MQILNEQLAAPSTGLMVKESASPGSGSGSAGGAAEKMGRGRIEIKRIENTTNRQVTFCKRRNGLLKKAYELSVLCDAEVALIVFSGRGRLYEYSNNSVKATIERYKKATSDTSSAGTVAEINAQHYQQESAKLKQQITTLQNSNRTLIGDTMATMSHRDLKQLEGGLDKGLGKIRARKNELLCAEIEYMQRREMELQNNNFFLREKVAETERGQQQTLNMMGAASTSNEYEQNMIHCDPRTFLQFNFMQQHPQYCSQQEDRKSFNSVGR

SEQ ID NO: 109607 - DNA, 876 bp, Linum usitatissimum
  CDS (1)..(876)
atggggcggggcaaagttgagatgcgcccgatcgaggataaaagcactcgccaagtgacattctccaaacgcaagcgcggcctgctcaagaaagctcaggagctttctgtgctctgcggcgtcgaggtcgctgtcgtcatcttctccggcggcggaaagctgtacgagttctccggtggtgaaagtttggacaatgttatccagcgataccaggctcacaaagaagcggatgcagctgttaaagagaatacagacggaactgagaagcagattccagcgtgtaggactctggtcccaggtcctgatttgcttcaaatgcttcagaggcacctggaggagaagactgttgatcagctggattccacggagcttgtgcagctagaaaggaaactggaatccttgctccaaggggcccgaatccgaaaggaagtaccttccccaccagaaaatctgatgatggagaacgaggtaagaaatcttcctgtatataggaacaaatacgagctttcagccatcaccaatctcaagaaccagcagcagcagcagccgcaggaggaggaggatgtcggagaaattcgaaaccagcaacttcagcagcaacaacagcagcaacttctgctgatgggaatgcatctgaacaactacaacaatggtggattcatcccaatacaccaactgcaacttcatcagcatcagcaacagcaacatcaacttttcctcatgggtatgcacttgaacaacgcctcaaacaacaacaacagcatcagtagcagcaataataataatggtggatctgctgctgctgctgctgctacttctgcagtgcctctgttgcagagggatgccttccagaagggcattcttcacttcttctga

SEQ ID NO: 109608 - protein, 291 aa, Linum usitatissimum
MGRGKVEMRPIEDKSTRQVTFSKRKRGLLKKAQELSVLCGVEVAVVIFSGGGKLYEFSGGESLDNVIQRYQAHKEADAAVKENTDGTEKQIPACRTLVPGPDLLQMLQRHLEEKTVDQLDSTELVQLERKLESLLQGARIRKEVPSPPENLMMENEVRNLPVYRNKYELSAITNLKNQQQQQPQEEEDVGEIRNQQLQQQQQQQLLLMGMHLNNYNNGGFIPIHQLQLHQHQQQQHQLFLMGMHLNNASNNNNSISSSNNNNGGSAAAAAATSAVPLLQRDAFQKGILHFF

SEQ ID NO: 109609 - DNA, 723 bp, Zea mays
  CDS (1)..(723)
atggggcgcgggaaggtgcagctgaagcggatcgagaacaagatcaaccgccaggtgacattctccaagcgccgctcggggctactcaagaaggcgcacgagatctccgtgctctgcgacgccgaggtcgcgctcatcatcttctccaccaagggcaagctctacgagtactctaccgattcatgtatggacaaaattcttgaacggtatgagcgctactcctatgcagaaaaggttctcatttccgcagaatatgaaactcagggcaattggtgccatgaatatagaaaactaaaggcgaaggtcgagacaatacagaaatgtcaaaagcacctcatgggagaggatcttgaaactttgaatctcaaagagcttcagcaactagagcagcagctggagagttcactgaaacatatcagaacaaggaagagccagcttatggtcgagtcaatttcagcgctccaacggaaggaggagaacaaggttctgcagaaggagctcgcggagaagcagaaagaccagcggcagcaagtgcaacgggaccaaactcaacagcagaccagttcgtcttccacgtccttcatgttaagggaagctgccccaacaacaaatgtcagcatcttccctgtggcagcaggcgggagggtggtggaaggggcagcagcgcagccgcaggctcgcgttggactgccaccatggatgcttagccatctgagctgctga

SEQ ID NO: 109610 - protein, 240 aa, Zea mays
MGRGKVQLKRIENKINRQVTFSKRRSGLLKKAHEISVLCDAEVALIIFSTKGKLYEYSTDSCMDKILERYERYSYAEKVLISAEYETQGNWCHEYRKLKAKVETIQKCQKHLMGEDLETLNLKELQQLEQQLESSLKHIRTRKSQLMVESISALQRKEENKVLQKELAEKQKDQRQQVQRDQTQQQTSSSSTSFMLREAAPTTNVSIFPVAAGGRVVEGAAAQPQARVGLPPWMLSHLSC

SEQ ID NO: 109611 - DNA, 675 bp, Hordeum vulgare
  CDS (1)..(675)
atggcgagaggcaaggtccagctccgccgcatcgagaaccccgtccaccggcaggtcaccttctgcaagcgccgcgcgggcctcctcaagaaggctagggagctctcggtcctctgcgacgccgacatcggcatcatcatcttctccgcgcacggcaagctctacgacctcgccaccaccggaaccatggatgggctgatcgagaggtacaagagtgccagtggagaaggcatgaccgccgatggctgcggcgatcagagagtggacccaaagcaggaggcaatggtgctgaagcaagaaatagacctgctgcagaagggactgaggtacatttacgggaacagggcaaatgaacacatgaatgttgatgagctgaatgccctggagaggtacttggagatatggatgttcaacatccgctccgcaaagatgcagataatgattcaagagatccaggcactaaagagcaaggaaggcatgttgaaagctgccaacgaaattctccaggaaaagatagtagaacagcatggactgatcgacgtaggcatgactatagcagatcagcagaatgggcattttagtacagtcccactgatagaggagatcactaacccactgactatactgagtggctattctacttgtaggggctcagagatgggctattccttctga

SEQ ID NO: 109612 - protein, 224 aa, Hordeum vulgare
MARGKVQLRRIENPVHRQVTFCKRRAGLLKKARELSVLCDADIGIIIFSAHGKLYDLATTGTMDGLIERYKSASGEGMTADGCGDQRVDPKQEAMVLKQEIDLLQKGLRYIYGNRANEHMNVDELNALERYLEIWMFNIRSAKMQIMIQEIQALKSKEGMLKAANEILQEKIVEQHGLIDVGMTIADQQNGHFSTVPLIEEITNPLTILSGYSTCRGSEMGYSF

SEQ ID NO: 109613 - DNA, 687 bp, Helianthus annuus
  CDS (1)..(687)
atggggagaggaaaaattgagatcaagagaattgaaaacaatacgcatcggcaagtcaccttctgcaagaggagaaacgggctgctaaagaaggcttacgagctttcagttctttgtgacgctgaaattacgctaatcgtcttctctagccgtggaagactctatgagtacgccaataacaacataaaatcaaccatagagagatacaagaaggctacttcaagtacaccagacacatggtcaactcaagaggtcaatgctcaattctataagcaagagtcaaagaaacttcgccagcagattcaaatgcttcagaatactaacaggcatctcatgggtgacggattggagcacttaaatgtgaaggaactgaagcaattggagggcaggcttgaaaagggaatctcaaggattaggtccaaaaggcatgacctgatactagctgaaactgaaaatttggagaaaagggagatcgagctcgaacatcacaatgcattcctacgttcaaaggtgcaggttgctgagagcatgcagcagctaaacatgaatactggggaggactataatgcatggcaagcatacatggctaggaacatgcttcacctcaatataatggaacctatgactctggaggctagtccttcaaccttctccatttgtcccaagccttctcttcaccttgggtga

SEQ ID NO: 109614 - protein, 228 aa, Helianthus annuus
MGRGKIEIKRIENNTHRQVTFCKRRNGLLKKAYELSVLCDAEITLIVFSSRGRLYEYANNNIKSTIERYKKATSSTPDTWSTQEVNAQFYKQESKKLRQQIQMLQNTNRHLMGDGLEHLNVKELKQLEGRLEKGISRIRSKRHDLILAETENLEKREIELEHHNAFLRSKVQVAESMQQLNMNTGEDYNAWQAYMARNMLHLNIMEPMTLEASPSTFSICPKPSLHLG

SEQ ID NO: 109615 - DNA, 744 bp, Helianthus annuus
  CDS (1)..(744)
atgtcttgtcctaatgattcaggagagatttctccacagagaaaactggggaggggaaagatcgaaatcaaacggatcgaaaacacaacgaatcgacaagttaccttttgcaaacgccgcagcggtttgcttaagaaagcttatgagttgtctgttctttgtgatgctgaggttgctcttatcgtcttttctagtcgtggtcgcctttacgagtatgctaacaacagtgtcaaaggaaccatagataggtacaaaaaggcttgcctagatccaccaagcagtgggtctgtttctgaagccaatgctcagtattaccaacaagaagctgcgaaactgcgtcagcaaatctccaatcttcaaaaccaaaacaggcaattttatatgaacatcatgggcgaatcactcggaaacatgcaagcaaaagatctcaagaatcttgaaaccaagttagagaaaggcattagcaggattagagcaaaaaaggatgaactcctgtttgctgaaatcgagcatagccaaaaacgaggaaatgagttacataacagtaatcagttcctcagagcgaagattgctgaaaaccaaagtgcccaacagcaacacatgagcttgatgcctggaagttctgattacaatctgggacagcctcaccaaccattcgatagtcgaaactacctccaagtcaatgatcttcaacctgataatagttactctcgccaagatcaaacagctctccagttggtgtaa

SEQ ID NO: 109616 - protein, 247 aa, Helianthus annuus
MSCPNDSGEISPQRKLGRGKIEIKRIENTTNRQVTFCKRRSGLLKKAYELSVLCDAEVALIVFSSRGRLYEYANNSVKGTIDRYKKACLDPPSSGSVSEANAQYYQQEAAKLRQQISNLQNQNRQFYMNIMGESLGNMQAKDLKNLETKLEKGISRIRAKKDELLFAEIEHSQKRGNELHNSNQFLRAKIAENQSAQQQHMSLMPGSSDYNLGQPHQPFDSRNYLQVNDLQPDNSYSRQDQTALQLV

SEQ ID NO: 109617 - DNA, 693 bp, Brassica napus
  CDS (1)..(693)
atgggaagaggaaagatagagatcaagaggatagagaattcaacaaatcgacaagtgacgttctgcaaaagaagaaatggactcctgaagaaggcttacgagctttcagttctctgtgatgccgaggttgccctcatcgtcttctcaactcgtggccgtctctatgagtacgccaataacaacataagatcaaccattgagaggtacaagaaggcttctgataacaccagcactcactctgtccaagagattaatgcagcgtactatcaacaagaatctgcaaagctgaggcaacagatccaaacgattcaaaattccaacaggcatctgatgggagactctttgagtgccttaagtgtcaaggagctaaagcaggttgagaatcgccttgagaaagccatctctagaatcaggtccaagaagcatgagttgcttctagctgaaatcgagaacctacagaaaagggagattgagcttgataatgagagtatctatctccgaaccaagatagcagaagtggagaggtttcaacagcaccatcatcaaatggttagtggtacagagatgacagcgatcgaggtcttagcctctcgcaattactttgctcatagcattatgactacgggttctggctctggagctggccatggatgttcttactctgatcccgacaagaaaattcatcttggataa

SEQ ID NO: 109618 - protein, 230 aa, Brassica napus
MGRGKIEIKRIENSTNRQVTFCKRRNGLLKKAYELSVLCDAEVALIVFSTRGRLYEYANNNIRSTIERYKKASDNTSTHSVQEINAAYYQQESAKLRQQIQTIQNSNRHLMGDSLSALSVKELKQVENRLEKAISRIRSKKHELLLAEIENLQKREIELDNESIYLRTKIAEVERFQQHHHQMVSGTEMTAIEVLASRNYFAHSIMTTGSGSGAGHGCSYSDPDKKIHLG

SEQ ID NO: 109619 - DNA, 594 bp, Brassica napus
  CDS (1)..(594)
atggggagaaagaaacttgaaatcaagccgattgagaacaaaagtagccgacaagttaccttctccaaacgacgcaacggtctcatcgagaaagctcgtcagctttccgttctctgtgacgcatccgtcgctcttcttgtcgtctccgcctccagaaaactctacagcttctcctccggtgataacctggtcaagatccttgatcgatacggaaagcaacatggtgatgatcttaaagccttggatcgtcagtcaaaagctttggactctggttcacaccatgagctgctggaacttgtggaaagcaagcttgaggaatcaaatgtcgataatgtaagtgtgggttccctggttcagctggaggaacaccttgagaacgccctctccgtaacaagagctaggaagacagaactaatgttgaagcttgtcgagaaccttaaagaaaaggagaagttgctggaagaggagaaccatgttttggctagccagatggagaagagtaatcttgtgcgagccgaagctgataatatggaggtgtcaccaggacaaatctccgacatcaatcttccggtaacgctcccactgcttaattag

SEQ ID NO: 109620 - protein, 197 aa, Brassica napus
MGRKKLEIKPIENKSSRQVTFSKRRNGLIEKARQLSVLCDASVALLVVSASRKLYSFSSGDNLVKILDRYGKQHGDDLKALDRQSKALDSGSHHELLELVESKLEESNVDNVSVGSLVQLEEHLENALSVTRARKTELMLKLVENLKEKEKLLEEENHVLASQMEKSNLVRAEADNMEVSPGQISDINLPVTLPLLN

SEQ ID NO: 109621 - DNA, 735 bp, Brassica napus
  CDS (1)..(735)
atggagggtggtgcgagtgatgaggtagcagagagcagcaagaagatagggagagggaagatagagataaagaggatagagaacaccacgaatcgccaagtcactttctgcaaaagacgcaatggtctgcttaagaaagcttatgagctctctgtcttgtgtgacgctgaggttgctcttgtcatcttctccactcgaggtcgtctctacgagtacgccaacaacagtgtaagaggaacgattgaaaggtacaagaaagcttgctccgacgctgttaatcctccttccgtcaccgaagctaatactcagtactatcagcaagaatcgtctaagctacggagacagatccgggacattcagaatctgaacagacacattcttggtgaatctcttggttccttgaacctcaaggagctcaagaacctggaaggtaggcttgagaaaggcatcggtcgtgtccgctccaagaagcatgagatgctagttgcagagatagagtacatgcaaaaaagggagatcgagcttcaaaacgataacatgtatcttcgatccaagattagtgaaagagcaggaatgcagcagcaggaagcgagtgtgatacatcaacaagggacggtttacgagtcgtcttctcatcagtcggagcagtacaaccggaactatattccggttaaccttcttgaaccaaatcagaactcctccgaccaaaaccaaccacctctccaacttgtttaa

SEQ ID NO: 109622 - protein, 244 aa, Brassica napus
MEGGASDEVAESSKKIGRGKIEIKRIENTTNRQVTFCKRRNGLLKKAYELSVLCDAEVALVIFSTRGRLYEYANNSVRGTIERYKKACSDAVNPPSVTEANTQYYQQESSKLRRQIRDIQNLNRHILGESLGSLNLKELKNLEGRLEKGIGRVRSKKHEMLVAEIEYMQKREIELQNDNMYLRSKISERAGMQQQEASVIHQQGTVYESSSHQSEQYNRNYIPVNLLEPNQNSSDQNQPPLQLV

SEQ ID NO: 109623 - DNA, 642 bp, Brassica napus
  CDS (1)..(642)
atggtgagggggaaaactcagatgaagcgaatagagaatgcaacaagcagacaagtcactttctctaaacgaaggaatggtttgttgaagaaagcctttgagctctcagtgctttgtgatgctgaagtttctctgatcatcttctctcctaagggaaaactttatgaattcgccagctccaatatgcaagataccatagatcgttatctgaggcataccaaggatcgagtcagcagcaaaccggtttctgaagaaaatatgcagcatttcaaacatgaagcagcaaacatgatgaagaaaattgaacaacttgaagcgtccaaacgtaaactcttgggagaaggcataggatcatgctcgattgaggagctgcagcaaattgagcaacaactcgagaaaagtgtcaaatgtgttcgagcaagaaagactcaagtgtttaaggaacaaattgagcagctcaagcagaaggagaaagctctagctgcagaaaacgagaagctcgctgaaaagtggggatctcatgaaatcgaagtttggtcgaataagaaccaagaaagtggacgaggtgacgaggacagtagcccaagttctgaagtagagacacaattgttcattgggttaccttgttcttcaagaaagtga

SEQ ID NO: 109624 - protein, 213 aa, Brassica napus
MVRGKTQMKRIENATSRQVTFSKRRNGLLKKAFELSVLCDAEVSLIIFSPKGKLYEFASSNMQDTIDRYLRHTKDRVSSKPVSEENMQHFKHEAANMMKKIEQLEASKRKLLGEGIGSCSIEELQQIEQQLEKSVKCVRARKTQVFKEQIEQLKQKEKALAAENEKLAEKWGSHEIEVWSNKNQESGRGDEDSSPSSEVETQLFIGLPCSSRK

SEQ ID NO: 109625 - DNA, 750 bp, Brassica napus
  CDS (1)..(750)
atggaggaaggtgggagtagtcacgacgcagagagtaacaagaagctagtaagagggaagatagagataaagaggatagagaacacaacaagtcgtcaagtaactttctgtaaacgacgcaatggtcttcttaagaaagcttatgagctttctgtcttgtgtgatgctgaagttgccctcgtcatcttctccactcgtggccgtctctatgagtacgccaacaacagcgtgaagggtacaattgaaagatacaagaaagcttgttccgatgccgttaaccctccttctgtcaccgaagctaatactcagtactatcagcaagaagcctctaagcttcggaggcagattcgtgacattcagaattctaacaggcatatagttggggaatcacttggttccttgaacttcaaggaactcaaaaacctcgaaggacgtcttgaaaaaggaatcagccgtgtccgatccaagaagaatgagctgttaatggcagagatagagtatatgcagaagagggaaatggagttgcaacacgataacatgtacctgagagctaagatagcacaaggcgcgagattgaatccggaacagcaggaatcgagtgtaatacaaggaacagcggtttatgaatccggtctgtcttcttctcatgatcagtcgcagcattataaccggaactatattccggttaaccttcttgaaccgaatcaacaattctccggtcaagaccaacctcctcttcaacttgtttaa

SEQ ID NO: 109626 - protein, 249 aa, Brassica napus
MEEGGSSHDAESNKKLVRGKIEIKRIENTTSRQVTFCKRRNGLLKKAYELSVLCDAEVALVIFSTRGRLYEYANNSVKGTIERYKKACSDAVNPPSVTEANTQYYQQEASKLRRQIRDIQNSNRHIVGESLGSLNFKELKNLEGRLEKGISRVRSKKNELLMAEIEYMQKREMELQHDNMYLRAKIAQGARLNPEQQESSVIQGTAVYESGLSSSHDQSQHYNRNYIPVNLLEPNQQFSGQDQPPLQLV

SEQ ID NO: 109627 - DNA, 759 bp, Brassica napus
  CDS (1)..(759)
atgggaaggggaagagtagagctgaagagaatagagaacaaaatcaacagacaagtaacgtttgcaaaacgtaggaacggtctgttgaagaaagcttacgagttgtctgttctttgcgatgctgaggtggctctcatcatcttctccaaccgtggcaagctctatgagttttgcagctcctcaaacatgatcaagacactggaacggtaccagaaatgcagttatggttctattgaagtcaacaacaaacctgccaaagaacttgagaatagctacagagagtatctgaagcttaagggtaggtatgagagccttcagcgccagcaaaggaatcttcttggggaggatttaggacctctcaactcaaaggaactagagcagcttgagcgtcaactagatggatctctcaagcaagttcgctccatcaagacacagtacatgcttgaccagctctctgatcttcaaagcaaagagcaaatgttgcttgaaaccaatagagctttggcaataaagctggatgatatgattggtgtgagaagccatcatatgggaggaggaggaggatgggaaggcaatgaacagaatgttccgtacgagcatcatcaccaagctcagtctcaaggactattccagcctcttgaatgcaatcctactctgcagatagggtatgacaatccagtaggctcggagcagataactacaacaacacaagctcaggcgcagccaggaaacggttacatcccaggctggatgctctga

SEQ ID NO: 109628 - protein, 252 aa, Brassica napus
MGRGRVELKRIENKINRQVTFAKRRNGLLKKAYELSVLCDAEVALIIFSNRGKLYEFCSSSNMIKTLERYQKCSYGSIEVNNKPAKELENSYREYLKLKGRYESLQRQQRNLLGEDLGPLNSKELEQLERQLDGSLKQVRSIKTQYMLDQLSDLQSKEQMLLETNRALAIKLDDMIGVRSHHMGGGGGWEGNEQNVPYEHHHQAQSQGLFQPLECNPTLQIGYDNPVGSEQITTTTQAQAQPGNGYIPGWML

SEQ ID NO: 109629 - DNA, 594 bp, Brassica napus
  CDS (1)..(594)
atggggagaaagaaacttgaaatcaagccgattgagaacaaaagtagccgacaagttaccttctccaaacgacgcaacggtctcatcgagaaagctcgtcagctttccgttctctgtgacgcatccgtcgctcttcttgtcgtctccgcctccagaaaactctacagcttctcctccggtgataacctggtcaagatccttgatcgatacggaaagcaacatggtgatgatcttaaagccttggatcgtcagtcaaaagctttggactctggttcacaccatgagctgctggaacttgtggaaagcaagcttgaggaatcaaatgtcgataatgtaagtgtgggttccctggttcagctggaggaacaccttgagaacgccctctccgtaacaagagctaggaagacagaactaatgttgaagcttgtcgagaaccttaaagaaaaggagaagttgctggaagaggagaaccatgttttggctagccagatggagaagagtaatcttgtgcgagccgaagctgataatatggaggtgtcacctggacaaatctccgacatcaatcttctggtaacgctcccactgcttaattag

SEQ ID NO: 109630 - protein, 197 aa, Brassica napus
MGRKKLEIKPIENKSSRQVTFSKRRNGLIEKARQLSVLCDASVALLVVSASRKLYSFSSGDNLVKILDRYGKQHGDDLKALDRQSKALDSGSHHELLELVESKLEESNVDNVSVGSLVQLEEHLENALSVTRARKTELMLKLVENLKEKEKLLEEENHVLASQMEKSNLVRAEADNMEVSPGQISDINLLVTLPLLN

SEQ ID NO: 109631 - DNA, 642 bp, Brassica napus
  CDS (1)..(642)
atggtgaggggaaaaactcagatgaagcgaatagagaatgcaacaagcagacaagtcactttctctaaacgaaggaatggtttgttgaagaaagcttttgagctctcagtgctttgtgatgctgaagtttctctgatcatcttctctcctaagggaaaactttatgaattcgccagctccaatatgcaagataccatagatcgttatctgacgcataccagggatcgagtcagcagcaaaccggtttcggaagaaaatatgcagcatttcaaacatgaagcagcaaacatgatgaagaaaattgaacaacttgaagcgtccaaacgtaaactcttgggagaaggcattggatcatgctcgattgaggagctgcagcaaattgagcaacaactcgagaaaagtgtcaaatgtgttcgagcaagaaagactcaagtgtttaaggaacaaattgtgcagctcaagcagaaggagaaagctctagctgcagaaaacgagaagctcgctgaaaagtggggatctcatgaaatcgaagtttggtcgaataagaaccaagaaagtggacgaggtgacgaggacagtagcccaagttctgaagtagagacacaattgttcattgggttaccttgttcttcaagaaagtga

SEQ ID NO: 109632 - protein, 213 aa, Brassica napus
MVRGKTQMKRIENATSRQVTFSKRRNGLLKKAFELSVLCDAEVSLIIFSPKGKLYEFASSNMQDTIDRYLTHTRDRVSSKPVSEENMQHFKHEAANMMKKIEQLEASKRKLLGEGIGSCSIEELQQIEQQLEKSVKCVRARKTQVFKEQIVQLKQKEKALAAENEKLAEKWGSHEIEVWSNKNQESGRGDEDSSPSSEVETQLFIGLPCSSRK

SEQ ID NO: 109633 - DNA, 666 bp, Brassica napus
  CDS (1)..(666)
atggtgaggggaaagacggagatgaagagaatagagaacgcaactagcaggcaagtgaccttctccaagagaagaaatggacttttgaagaaagcttttgagttatcggtcctatgtgatgctgaagttgctttgatcatcttctcaccaacatccaaactctatgagttctctagctctagtatttcaaaaacaatagaacgataccagagacgagtcacagaaattggaattaaccataagagagatgcagattctcagcaagcgagaggcgaaacatatggcttgacaaaaaagattgagcaacttgagataactaaacgaaaaatgctcggagaaggtattgatgtatgttctattgaagagctgcaccagttagagaatcagttggagcgaggcttgaccaggataagagccaagaagtaccaattactccgtgaagaaattgataagctgaaggaagaggagaggaatctcattaaggaaaacaaagaactgaatgagaagttgagtggaatgggagcaatagtagtagcatcatcatcatcaaccttaacatcatcagaagtgaacacggatggcaatgacaatatggaagtggagactggtttgttcattgggcctcctgagccgagacaatccaagaaaatctatcctcaaagttaa

SEQ ID NO: 109634 - protein, 221 aa, Brassica napus
MVRGKTEMKRIENATSRQVTFSKRRNGLLKKAFELSVLCDAEVALIIFSPTSKLYEFSSSSISKTIERYQRRVTEIGINHKRDADSQQARGETYGLTKKIEQLEITKRKMLGEGIDVCSIEELHQLENQLERGLTRIRAKKYQLLREEIDKLKEEERNLIKENKELNEKLSGMGAIVVASSSSTLTSSEVNTDGNDNMEVETGLFIGPPEPRQSKKIYPQS

SEQ ID NO: 109635 - DNA, 735 bp, Brassica napus
  CDS (1)..(735)
atggagggtggtgcgagtgatgaagtagcagagagcagcaagaagatagggagagggaagatagagataaagaggatagagaacaccacgaatcgccaagtcactttctgcaaaagacgcaatggtctgctcaagaaagcttatgagctctctgtcttgtgtgacgctgaggttgctcttgtcatcttctccactcgcggtcgtctctacgagtacgccaacaacagtgtaagaggaacgatcgaaaggtacaagaaagcttgctccgacgctgttaatcctccttccgtcaccgaagctaatactcaatactatcagcaagagtcatctaagctacggagacagatccgggacattcagaatctgaacagacacattcttggtgaatctctcggttccttgaacctcaaggaactcaagaacctcgaaggtaggcttgaaaaaggcatcggtcgtgtccgctccaagaagcatgagatgctagttgcagagatagagtacatgcaaaaaagggagatcgagcttcaaaacgataacatgtatctccgatccaagattaatgaaagagcgggaatgcagcagcaggaagcgagtgtgatacatcaacaagggacggtttacgagtcatcttctcatcagtcggagcagtacaaccggaactatattccggttaaccttcttgaaccaaatcagaactcctccgaccaaaaccaaccacctctccaacttgtttaa

SEQ ID NO: 109636 - protein, 244 aa, Brassica napus
MEGGASDEVAESSKKIGRGKIEIKRIENTTNRQVTFCKRRNGLLKKAYELSVLCDAEVALVIFSTRGRLYEYANNSVRGTIERYKKACSDAVNPPSVTEANTQYYQQESSKLRRQIRDIQNLNRHILGESLGSLNLKELKNLEGRLEKGIGRVRSKKHEMLVAEIEYMQKREIELQNDNMYLRSKINERAGMQQQEASVIHQQGTVYESSSHQSEQYNRNYIPVNLLEPNQNSSDQNQPPLQLV

SEQ ID NO: 109637 - DNA, 753 bp, Brassica napus
  CDS (1)..(753)
atgggaaggggaagagtggagctaaagaggattgagaacaagattaacagacaagtcacgtttgctaagcgcaggaacggtttgctgaaaaaagcttatgagctttctgttctctgcgatgctgaggtttctctcatcgtcttctccaaccgtggcaagctctatgagttctgcagcacctccaacatgctcaagacactggaaagataccagaagtgtagctatggttcagttgaagtcaacaacaaacctgccaaagaactcgagaatagctacagagagtatttgaagctgaaaggtagatatgaaaatctgcaacgccagcagagaaatctacttggagaagaccttggacccctcaactcaaaggagctagagcagcttgagcgtcaactagacggctctcttaagcaagttcgctgcatcaagacgcagtatatgcttgaccagctcactgacctccaaggcaaagagcatatgttgcttgaagccaatagagctttgtcaattaagctggaagatatgatcggcgtgaggagtcaccaaataggaggggcatgggaaggtggtgatcagcaaaatgttgcctatggacatcatcaggctcaatctcagggactattccagtctcttgaatgtgatcccactttgcaaattgggtacagccatccagtgtgttcagagcaaatggctgtaacaactcaaggtcagaaccaaccaggaaacggctacatccctggctggatgctgtga

SEQ ID NO: 109638 - protein, 250 aa, Brassica napus
MGRGRVELKRIENKINRQVTFAKRRNGLLKKAYELSVLCDAEVSLIVFSNRGKLYEFCSTSNMLKTLERYQKCSYGSVEVNNKPAKELENSYREYLKLKGRYENLQRQQRNLLGEDLGPLNSKELEQLERQLDGSLKQVRCIKTQYMLDQLTDLQGKEHMLLEANRALSIKLEDMIGVRSHQIGGAWEGGDQQNVAYGHHQAQSQGLFQSLECDPTLQIGYSHPVCSEQMAVTTQGQNQPGNGYIPGWML

SEQ ID NO: 109639 - DNA, 861 bp, Zea mays
  CDS (1)..(861)
atgcacatccgagaagaggaggctacaccatccacagtaacaggcatcatgtcgaccctgacttcggcggggcagcagaagctgaaggagcccatgtcccctggtggcggctccgcgtcggtcgctgggtccgctgcggagaggaacaacggcggcaggggcaagggcaagactgagatcaagcgcatcgagaacacgaccaacaggcaggtcaccttctgcaagcgccgcaacggcctcctcaagaaggcgtacgagctctccgtgctctgcgacgccgaggtcgcgctcatcgtcttctccagccgcggccgcctctacgagtacgccaacaacagcgtgaagggcaccattgagaggtacaagaaggcaaccagtgacaactccagcgcagctggtacgattgcagaggtcaccattcagcattacaagcaggaatctgctaggctgaggcagcagatcgttaacttgcagaactccaacagggccctgataggtgattctatcacaaccatgagccacaaggaacttaagcacttggagactaggttagacaaagctctcggaaagattagagcaaaaaagaacgatgtgctgtgttctgaagtcgagtacatgcagagaagggaaatggagttgcagaatgacaacttgtacttaaggagccgggttgatgagaatgaaagggcacaacagacagcgaacatgatgggggcaccatcgacaagtgagtatcagcagcacggttttactccttatgatccaataaggagcttcctgcagttcaacatcgtgcagcagcctcagttctattctcagcaggaggaccggaaagacttcaacgaccaaggtggaagataa

SEQ ID NO: 109640 - protein, 286 aa, Zea mays
MHIREEEATPSTVTGIMSTLTSAGQQKLKEPMSPGGGSASVAGSAAERNNGGRGKGKTEIKRIENTTNRQVTFCKRRNGLLKKAYELSVLCDAEVALIVFSSRGRLYEYANNSVKGTIERYKKATSDNSSAAGTIAEVTIQHYKQESARLRQQIVNLQNSNRALIGDSITTMSHKELKHLETRLDKALGKIRAKKNDVLCSEVEYMQRREMELQNDNLYLRSRVDENERAQQTANMMGAPSTSEYQQHGFTPYDPIRSFLQFNIVQQPQFYSQQEDRKDFNDQGGR

SEQ ID NO: 109641 - DNA, 687 bp, Zea mays
  CDS (1)..(687)
atggcgagggagcgacgggagataaagaggatagagagcgcggcggcgcggcaggtcacgttctccaagcgccgccgcggcctcttcaagaaggctgaggagctctccgtgctgtgcgatgccgacgtcgcgctcatcgtcttctcctccacgggaaagctctcccagttcgccagctccagtatgaatgagatcattgacaagtacagcacacattctaaaaacctggggaaagcagaacagccttcacttgacttgaacttagaacatagcaaatatgcaaatttgaatgagcaacttgtggaagcaagccttcgactcaggcagatgagaggtgaagaacttgagggattgagtgttgaagaactccagcaattggagaagaatctggaatctggtctgcatagggtccttcaaacaaaggatcaacaattcttggaacagatcagcgacctcgaacaaaagagtacacaactggcagaggagaacaggcaactgaggaatcaagtatcccacatacccccagttggcaagcaatcagttgctgatgctgaaaatgttatcgctgaagatgggcaatcctctgaatcagtcatgactgcgttgcattctgggagttcacaggataatgatgatggttcggatgtctctctaaaattagggctgccttgtgttgcatggaagtga

SEQ ID NO: 109642 - protein, 228 aa, Zea mays
MARERREIKRIESAAARQVTFSKRRRGLFKKAEELSVLCDADVALIVFSSTGKLSQFASSSMNEIIDKYSTHSKNLGKAEQPSLDLNLEHSKYANLNEQLVEASLRLRQMRGEELEGLSVEELQQLEKNLESGLHRVLQTKDQQFLEQISDLEQKSTQLAEENRQLRNQVSHIPPVGKQSVADAENVIAEDGQSSESVMTALHSGSSQDNDDGSDVSLKLGLPCVAWK

SEQ ID NO: 109643 - DNA, 636 bp, Glycine max
  CDS (1)..(636)
atggtgagaaggaagataccgatcaagaagatcgacaacgtaactgcgaggcaggtgacattctcaaagaggaagagtggtcttttcaagaaggcacgcgagctctctcttctctgtgattctgagatagcactcatagtcttttcacctggtggcaagctcttcgactatgctagttcaagtatgcagaaggtaattgaaaggcatattttatggtcagagctgaaccttgaaaaattagaccaatcatgtcctacggagcagcttagatgtaattatgctgatttaaacaaggaatttggagacaggattcgtgaaatgagacaactgaatggagaagaactgcaaggattggccctaagggagcttcagaaattagaagaacgactggtctcatccttgaaccgagtttataaagcgaaggttgaaaattttacaagagagatcgatattcttaagcaaaagggaaacaaactcatggaagataacaggctgatgaagcagaggataaaaccgaggaatgaaatatgttcggtccagagacacgagcatgaacaaggccggtcctttgacacctccctcacgttggggctatcttttcctgctggctcaaagtacagagtttctgagcaatga

SEQ ID NO: 109644 - protein, 211 aa, Glycine max
MVRRKIPIKKIDNVTARQVTFSKRKSGLFKKARELSLLCDSEIALIVFSPGGKLFDYASSSMQKVIERHILWSELNLEKLDQSCPTEQLRCNYADLNKEFGDRIREMRQLNGEELQGLALRELQKLEERLVSSLNRVYKAKVENFTREIDILKQKGNKLMEDNRLMKQRIKPRNEICSVQRHEHEQGRSFDTSLTLGLSFPAGSKYRVSEQ

SEQ ID NO: 109645 - DNA, 732 bp, Glycine max; identical to SEQ ID NO: 102935
  CDS (1)..(732)

SEQ ID NO: 109646 - protein, 243 aa, Glycine max; identical to SEQ ID NO: 102936

SEQ ID NO: 109647 - DNA, 732 bp, Glycine max
  CDS (1)..(732)
atgggaagaggaagggttgttctggagagaatagagaacaagatcaaccgtcaagtaacattctcaaaacgcagaagtgggttgctgaagaaggcctttgagctttctgtgctatgtgacgctgaagttgcccttatcatcttttctagccgtggcaagctttttcagtacagcagcactgatattaacaaaatcattgagaggtatcgccaatgtcgttacagcaagtcgcagactgacgattcattggaacacgattcacagagttcataccatgaattcttgaaattaagagcgaaatatgaatcacttgagctgacacaaaggcattttcaaggagaagaacttgagccacttagctttaaagatttgcagagccttgagaaacaactagacataacgctcgcactaactcgacagcatcaaacgaagaaactcttggcacgagcagatgaattacgcgaaaaggttcacaagttggaggatcttaacaaacaattagagtccaaggttttctctttaaataaccatgaaaaagatgaattctcgagtctcatccttgacaataacaattacattcaaatgcatgctacacaagttgatcaatttgagtctgagacagcactaaacacatggtttcaacatcaagaagttgtttctaaggaaaaagcaattgataccaggacagagcatagtcaaagcagtcacaacaaaaacaatggatggctgtaa

SEQ ID NO: 109648 - protein, 243 aa, Glycine max
MGRGRVVLERIENKINRQVTFSKRRSGLLKKAFELSVLCDAEVALIIFSSRGKLFQYSSTDINKIIERYRQCRYSKSQTDDSLEHDSQSSYHEFLKLRAKYESLELTQRHFQGEELEPLSFKDLQSLEKQLDITLALTRQHQTKKLLARADELREKVHKLEDLNKQLESKVFSLNNHEKDEFSSLILDNNNYIQMHATQVDQFESETALNTWFQHQEVVSKEKAIDTRTEHSQSSHNKNNGWL

SEQ ID NO: 109649 - DNA, 732 bp, Glycine max
  CDS (1)..(732)
atgggtcgtggcaagattgagataaagttgattgagaaccccaccaacaggcaagtcacctactccaagcgaaggaatggtatcttcaagaaagctcatgaactcagtgttctctgtgatgccaaggtttcactcatcatgttctctaaaaacaacaagatgcatgaatacattagccctggcctcacgacaaaaaagatcattgatcagtatcagaagactttgggggatattgatctgtggcattctcactatgagaaaatgcttgaaaacttgaagaagctgaaagatattaacaataagctcaggagacagatcaggcataggataggtgagggcttggacatggacgacatgagcttccagcaactgcgcactcttgaagaagatatggtttcatccatagggaaaatacgcgaacgaaagtttcacgtgatcaaaactcggactgatacctgtaggaaaaaggttaaaagcctgaagcagatgaatggaaatctgctgcttgaacttaaggaaaagtgtgtgatccatccacaatttcttttgcacgatgaaggagacgaggaatcagcagcagcagcagcagcagcagcagttgcactggccaacggtgcctccaccctgtatgcattctgtcatcagcaccattctcatctgaaccttttctcccaccattctaatggagaagagcaaccctttaaaactgatcatgaccttcgccttgcttga

SEQ ID NO: 109650 - protein, 243 aa, Glycine max
MGRGKIEIKLIENPTNRQVTYSKRRNGIFKKAHELSVLCDAKVSLIMFSKNNKMHEYISPGLTTKKIIDQYQKTLGDIDLWHSHYEKMLENLKKLKDINNKLRRQIRHRIGEGLDMDDMSFQQLRTLEEDMVSSIGKIRERKFHVIKTRTDTCRKKVKSLKQMNGNLLLELKEKCVIHPQFLLHDEGDEESAAAAAAAAVALANGASTLYAFCHQHHSHLNLFSHHSNGEEQPFKTDHDLRLA

SEQ ID NO: 109651 - DNA, 756 bp, Glycine max
  CDS (1)..(756)
atgtttcctcacaaggttgcaagcatggcttttccaaacccatccatgtcagtttctccacagaagaagatgggaagggggaagattgagatcaagaggattgagaacaccaccaatcgccaagtcaccttctgcaagcgcagaaacggcttgctcaagaaagcatatgaattatctgtgctttgtgatgcagaggttgctctaattgtcttctctagccgtggacgcctctatgaatatgctaataacagtgtcaaagcaaccatcgagaggtacaaaaaagcatgttcagattcgtccggtgctggatctgcttctgaggctaatgcacagttttaccagcaagaagcggataaacttcgtgcacaaattagtagcctgcagaataacaacaggcaaatgatgggtgagtctttgggccctctgactgccaaggaactcaaaaacctggagactaaattagaaaaaggaattagtaggattcgttcaaaaaagaatgagctgctatttgctgaaattgagtacatgcagaaaagggagatagacttgcacaacaacaaccagcttcttcgagcaaagatagctgaaggtgaaaggaaccaccataacttggccgtgttgccgggcggctcaaactatgattctttgcagacttctcagcagcaatttgattctcggggctacttccaagtcactggattacaacccaataatcagtatgcacggcaagatcaaatgtcgcttcaattagaatga

SEQ ID NO: 109652 - protein, 251 aa, Glycine max
MFPHKVASMAFPNPSMSVSPQKKMGRGKIEIKRIENTTNRQVTFCKRRNGLLKKAYELSVLCDAEVALIVFSSRGRLYEYANNSVKATIERYKKACSDSSGAGSASEANAQFYQQEADKLRAQISSLQNNNRQMMGESLGPLTAKELKNLETKLEKGISRIRSKKNELLFAEIEYMQKREIDLHNNNQLLRAKIAEGERNHHNLAVLPGGSNYDSLQTSQQQFDSRGYFQVTGLQPNNQYARQDQMSLQLE

SEQ ID NO: 109653 - DNA, 735 bp, Glycine max
  CDS (1)..(735)
atggggagaggaagggtgcagttgaagaggatcgagaacaagatcaataggcaagtgacgttttcaaagagaaggtctggtttgctcaagaaagcacatgagatctctgtgctttgtgatgctgaagtggccctcatagtcttctccaccaaaggcaaactctttgagtactccagcgatccatgtatggaaagaattcttgaacggtatgagaggtattcatatgcagagaggcagcttgttgcaagtgatcaaccacaaactgaaaattggactctagaacatgcaaagctcaaagcaaggttggaagtcctacagaaaaatcaaaggaattttatgggacaagatttggagggcctaagtatcaaagagcttcaaaatttggaacatcaacttgatagtgctctaaaacacattagatcacggaagaaccaaatcatgcatgaatctatttcagagcttcataaaaaggataaggccctacaagaacaaaacaacactctcgcaaagaagataaaggagaaagagaaggcactagcccagcatgcacaaatggagcagcgtggtgatgaaatggatcttacttcctctgccctagtacctcatccattggagacatcaaacattagaaactcctcacaaataagaggtgaaggagataacgaaggaaccccaactccaacccgagcaaatgccattcttccatcttggatgcttcgtccttcaaatgaatag

SEQ ID NO: 109654 - protein, 244 aa, Glycine max
MGRGRVQLKRIENKINRQVTFSKRRSGLLKKAHEISVLCDAEVALIVFSTKGKLFEYSSDPCMERILERYERYSYAERQLVASDQPQTENWTLEHAKLKARLEVLQKNQRNFMGQDLEGLSIKELQNLEHQLDSALKHIRSRKNQIMHESISELHKKDKALQEQNNTLAKKIKEKEKALAQHAQMEQRGDEMDLTSSALVPHPLETSNIRNSSQIRGEGDNEGTPTPTRANAILPSWMLRPSNE

SEQ ID NO: 109655 - DNA, 735 bp, Glycine max
  CDS (1)..(735)
atggggagaggaagcttgcagctgaagaggatcgagaacaagatcaataggcaagtgacgttttcaaagagaaggtctggtttgctcaagaaagcacatgagatctctgtgctttgtgatgctgaagtggccctcatagtcttctccaccaaaggcaaactctttgagtactccagcgatccatgtatggaaagaattcttgaacggtatgagaggtattcatatgcagagaggcagcttgttgcaagtgatcaaccacaaactgaaaattggactctagaacatgcaaagctcaaagcaaggttggaagtcctacagaaaaatcaaaggaattttatgggacaagatttggagggcctaagtatcaaagagcttcaaaatttggaacatcaacttgatagtgctctaaaacacattagatcacggaagaaccaaatcatgcatgaatctatttcagagcttcataaaaaggataaggtcctacaggaacaaaataacactctcgcaaagaagataaaggagaaagagaaggcactagcccagcatgcacaaatggagcagcgtggtgatgaaatggatcttacttcctctgccctagtacctcatccattggagacatcaaacattagagagtcctcacaaataaggggtgaaggagataatgaaggaaccccaactccaacccgagcaaatgccattcttccatcttggatgcttcgtccttcaaatgaatag

SEQ ID NO: 109656 - protein, 244 aa, Glycine max
MGRGSLQLKRIENKINRQVTFSKRRSGLLKKAHEISVLCDAEVALIVFSTKGKLFEYSSDPCMERILERYERYSYAERQLVASDQPQTENWTLEHAKLKARLEVLQKNQRNFMGQDLEGLSIKELQNLEHQLDSALKHIRSRKNQIMHESISELHKKDKVLQEQNNTLAKKIKEKEKALAQHAQMEQRGDEMDLTSSALVPHPLETSNIRESSQIRGEGDNEGTPTPTRANAILPSWMLRPSNE

SEQ ID NO: 109657 - DNA, 711 bp, Glycine max
  CDS (1)..(711)
atgggaagaggaagggttgttctggagagaatagagaacaagatcaaccgtcaagtaacattctcaaaacgcagaagtgggttgctgaagaaggcctttgagctttctgtgctatgtgacgctgaagttgcccttatcatcttttctagccgtggcaagctttttcagtacagcagcactgatattaacaaaatcattgagaggtatcgccaatgtcgttacagcaagtcgcagactgacgattcattggaacacgattcacagagttcataccatgaattcttgaaattaagagcgaaatatgaatcacttgagctgacacaaaggcattttcagggagaagaacttgagccacttagctttaaagatttgcagagccttgagaaacaactagacataacgctcgcactaactcgacagcatcaaacgaagaaactcttggcacgagcagatgaattacgcgaaaaggttcacaagttggaggatcttaacaaacaattagagtccaaggaaaaagatgaattctcaagcctcatccttgacaataacaattacattcaagtgcatgctacacaaggtgatcaatttgagtctgggacaacactaaacacatgtaggtttcaacgccaagattcaaaggaaaaagcaattgataccaagacagacggtagtcaaagcagtcacaacaaaaacaaaggatggctattgtga

SEQ ID NO: 109658 - protein, 236 aa, Glycine max
MGRGRVVLERIENKINRQVTFSKRRSGLLKKAFELSVLCDAEVALIIFSSRGKLFQYSSTDINKIIERYRQCRYSKSQTDDSLEHDSQSSYHEFLKLRAKYESLELTQRHFQGEELEPLSFKDLQSLEKQLDITLALTRQHQTKKLLARADELREKVHKLEDLNKQLESKEKDEFSSLILDNNNYIQVHATQGDQFESGTTLNTCRFQRQDSKEKAIDTKTDGSQSSHNKNKGWLL

SEQ ID NO: 109659 - DNA, 735 bp, Glycine max
  CDS (1)..(735)
atggcttttccaaaccaatccatgtcatcagagtctccccagagaaagatgggaagagggaagattgagatcaagaggattgagaacaccaccagtcgacaagttaccttctgcaagcgcacaaatggcttgctcaagaaggcatatgagttatctgtgctttgtgatgcagaggttgctctaattgtcttttcaaaccgtggccgcctctatgaatatgctaataacagcgtcaaagcttcaattgagaggtacaagaaagcaagttcagattcatctagtggtggacgatctgcttctgaggctaatgctcagttttatcagcaagaagcagccaaactgcgtgtgcagatcagcaatctgcagaatcacaataggcaaatgatgcgagagggtttgagcaccatgaatggcaaggatctcaaaaacctagagactaaattagaaaaaggaatcagcagaattcgttccaagaagaatgagatgctatttgcagaaattgagcacatgaagaaaagggagatacacttgaacaatgacaaccagcttcttagagcaaagatagcagaaggtgagaggagtcaccataatgttaacgggttgtctggaaccacaagctatgaatcgatgcaatctcagtttgactcccgcggcttcttccaagtaactggattacaacctaataataataatcagtatgccggacaagacaacatgtcccttcaatttgtttga

SEQ ID NO: 109660 - protein, 244 aa, Glycine max
MAFPNQSMSSESPQRKMGRGKIEIKRIENTTSRQVTFCKRTNGLLKKAYELSVLCDAEVALIVFSNRGRLYEYANNSVKASIERYKKASSDSSSGGRSASEANAQFYQQEAAKLRVQISNLQNHNRQMMREGLSTMNGKDLKNLETKLEKGISRIRSKKNEMLFAEIEHMKKREIHLNNDNQLLRAKIAEGERSHHNVNGLSGTTSYESMQSQFDSRGFFQVTGLQPNNNNQYAGQDNMSLQFV

SEQ ID NO: 109661 - DNA, 669 bp, Glycine max
  CDS (1)..(669)
atgggaagggggaagatcgaaatcaaaaggattgagaacacaacaaatcggcaagtgaccttctgcaagagaagaaatgggcttctgaagaaagcttatgagctgtcagtgctgtgtgatgcagaagttgccctcatcgtcttctccagccgtggccgtctctatgagtattccaacaacaacataagatcaacaatagagaggtacaaaaaggcatgttctgatcactcaagcgcgagcactaccacagaaatcaatgctcagtattatcaacaagaatctgcaaagctgcgacagcaaatacagatgctgcaaaattctaacaggcacctgatgggtgatgccttaagcacactgactgtgaaggaacttaagcagttggagaatagacttgaaagaggaatcactagaatcagatctaagaaacatgagatgctactggctgaaattgaatacttccagaaaagggagattgaactggaaaatgaaaatctttgcctccgaactaagataactgacgtggagaggattcagcaagtaaacatggtttctgggccagaactgaatgccattcaggcattagcttcccgtaacttcttcaatccaaatatgttggaaggtggaactgtttaccctcactcagataagaagattcttcatcttgggtga

SEQ ID NO: 109662 - protein, 222 aa, Glycine max
MGRGKIEIKRIENTTNRQVTFCKRRNGLLKKAYELSVLCDAEVALIVFSSRGRLYEYSNNNIRSTIERYKKACSDHSSASTTTEINAQYYQQESAKLRQQIQMLQNSNRHLMGDALSTLTVKELKQLENRLERGITRIRSKKHEMLLAEIEYFQKREIELENENLCLRTKITDVERIQQVNMVSGPELNAIQALASRNFFNPNMLEGGTVYPHSDKKILHLG

SEQ ID NO: 109663 - DNA, 729 bp, Glycine max
  CDS (1)..(729)
atggaatatcgtaacgaagctataccagaagggtgttcacagaagaaaacgggaagggggaaaataggaatcaagcggatcgagaacacaacgaataggcaagttaccttctgcaaacgccgtaacgggttgctcaagaaggcttatgaattgtctgttctgtgtgatgctgaggttgctcttgttgtcttctcaagccgtggacgcctctatgagtatgccaacaacagtgttagaggaacgatcgataggtacaagaaagcatgtgctgcctccacaaatccagaatctgtctctgaagctaatacacagttttatcagcaggaagcgtccaaattaaaacgacaaatcagagacattcagaatctaaacaggcacatccttggtgaagctcttagctctctgagtctgaaggaattaaagaacctggagagtagactggagaaaggtttaagcagagttagatccagaaagcatgaaactttgtttgccgatatcgagttcatgcaaaagcgggaaatagagctgcaaaaccataataattttctgagagctaagatagctgaacacgagaaagcacaacaacggcaacaggatatgataccgggaaatgtgtgcgagtcaaccatacctccacaatcatatgaccgcaatttcttccctgttaatctcatagattccaataatcaatattcaaatcaagaccagactgctcttcaacttgtctga

SEQ ID NO: 109664 - protein, 242 aa, Glycine max
MEYRNEAIPEGCSQKKTGRGKIGIKRIENTTNRQVTFCKRRNGLLKKAYELSVLCDAEVALVVFSSRGRLYEYANNSVRGTIDRYKKACAASTNPESVSEANTQFYQQEASKLKRQIRDIQNLNRHILGEALSSLSLKELKNLESRLEKGLSRVRSRKHETLFADIEFMQKREIELQNHNNFLRAKIAEHEKAQQRQQDMIPGNVCESTIPPQSYDRNFFPVNLIDSNNQYSNQDQTALQLV

SEQ ID NO: 109665 - DNA, 732 bp, Glycine max
  CDS (1)..(732)
atgggaagaggaagggttgttctggaaagaatagagaacaagatcaaccgtcaagtaacattctcaaaacgcagaagtgggttgctgaagaaggcctttgagctttctgtgctatgtgatgctgaagttggccttatcatcttttctagccgtggcaagctttttcagtacagcagcactgatattaccaaaatcattgagaggtatcgccaatgtcgttacagcaagtcacacactggtgattcattggaacacgattcacagagcgcataccatgaattcttgaaattaagagcgaaatatgaatctcttgagcggacacaaaggcattttcaaggagaagaccttgagccacttagctttaaagatttgcagagcctggagaagcaactagacataacgctcgcactaactcgacagcaccaaacgaagaaactcatggcacgagcggatgaattacgcgaaaaggtgcataagttggaggatcttaacaaacaattggagtccaaggttttctctttaaataaccatgaaaaagatgaattctcgagtctcatccttgacaataacaattacattcaaatgcatgctacacaagttgatcaatttgagtctgagacagcactaaacacatggtttcaacatcaagaagttgtttctaaggaaaaagcaattgataccaggacagagcatagtcaaagcagtcacaacaaaaacaatggatggctgtaa

SEQ ID NO: 109666 - protein, 243 aa, Glycine max
MGRGRVVLERIENKINRQVTFSKRRSGLLKKAFELSVLCDAEVGLIIFSSRGKLFQYSSTDITKIIERYRQCRYSKSHTGDSLEHDSQSAYHEFLKLRAKYESLERTQRHFQGEDLEPLSFKDLQSLEKQLDITLALTRQHQTKKLMARADELREKVHKLEDLNKQLESKVFSLNNHEKDEFSSLILDNNNYIQMHATQVDQFESETALNTWFQHQEVVSKEKAIDTRTEHSQSSHNKNNGWL

SEQ ID NO: 109667 - DNA, 621 bp, Glycine max
  CDS (1)..(621)
atggtgagaaggaagataccgatcaagaagatcgacgacgtaactgcgaggcaggtgacattctcaaagaggaagagtggtcttttcaagaaggcacgtgagctctctcttctctgtgatgctgagatagcactcatagtcttttcacctggtggcaagctcttcgactatggtagttcaagtatgcagaaggtaattgaaaggcatattttacggtcagagcttaaccttgaaaaattagaccagtcgtgtcctacggagcaggtgagatgtaattatgctgatttgaacaaggaatttgcagacaggactcgtgaaatgagacaactgaatggagaagaactgcaaggattgaccctaagggaacttcagaaattagaagaacgacttgactcatccttgaaccgtgtttataaagcgaaggttgaaaattttataaaagagatcggtattcttaaggaaaagggaaaaaaactcatggaagataacatgctgataaaacagatgataaaattaccgaggaatgaaatatgttcggtccagagacatgagcatgaacaaggccagctctttgacacctccctcacgttggggctaccttttcctgctggctcaaagtag

SEQ ID NO: 109668 - protein, 206 aa, Glycine max
MVRRKIPIKKIDDVTARQVTFSKRKSGLFKKARELSLLCDAEIALIVFSPGGKLFDYGSSSMQKVIERHILRSELNLEKLDQSCPTEQVRCNYADLNKEFADRTREMRQLNGEELQGLTLRELQKLEERLDSSLNRVYKAKVENFIKEIGILKEKGKKLMEDNMLIKQMIKLPRNEICSVQRHEHEQGQLFDTSLTLGLPFPAGSK

SEQ ID NO: 109669 - DNA, 732 bp, Glycine max
  CDS (1)..(732)
atggaggatccaaatcaagctccagaagcgtcttctcagaagaaaatgggaagagggaagattgaaatcaaacggatcgagaacaccaccaataggcaagtcaccttctgcaagcgccgcaacggtttgctgaaaaaagcttatgaattatcagttctgtgtgatgctgaagttgcccttgttgtcttctcaacccgtggccgtttgtatgagtatgccaacaacagtgttagggccactattgagaggtacaagaaggcaaatgctgctgcttcaaacgcagaatccgtatctgaagctaacacacagttttaccagcaagagtcatccaaattgagaagacaaattcgagatattcagaatctaaacaggcacatccttggtgaagcacttggttctctgagtctcaaggaactaaagaacctcgagggtagattggagaaaggattaagcagagttagatctagaaagcatgaaacattgtttgctgatgtggagttcatgcaaaagcgggaaattgagctgcaaaaccacaacaattatctgcgagctaagatagctgaacatgagagagctcaacaacagcaatcaaatatgaatatgtcaggaacactgtgcgagtcccttccttcacaatcatacgacaggaattttttccctgtaaatctcatagcttctgatgatcaacaacaatactctcgtcaagaccacactgctctccaacttgtctga

SEQ ID NO: 109670 - protein, 243 aa, Glycine max
MEDPNQAPEASSQKKMGRGKIEIKRIENTTNRQVTFCKRRNGLLKKAYELSVLCDAEVALVVFSTRGRLYEYANNSVRATIERYKKANAAASNAESVSEANTQFYQQESSKLRRQIRDIQNLNRHILGEALGSLSLKELKNLEGRLEKGLSRVRSRKHETLFADVEFMQKREIELQNHNNYLRAKIAEHERAQQQQSNMNMSGTLCESLPSQSYDRNFFPVNLIASDDQQQYSRQDHTALQLV

SEQ ID NO: 109671 - DNA, 726 bp, Glycine max
  CDS (1)..(726)
atggggagaggtaagattgcgattcgaaggatcgacaactccactagccggcaagtgactttctcaaagagaagaaatggattgctgaagaaagctagagaattatcaattctttgtgatgctgaagttggattgatggtgttctccagcactgggaagctttatgactatgcaagcacaagcatgaaagcggtgattgaacgctacaacaagctaaaagaggaacaccatcacctcatgaatccggcttcagaagcgaagttttggcagacagaagcagcaagcttgaggcagcagcttcagtacttgcaggaatgccacaggcaattaatgggggaagaacttatgggtttgggtattaaagaactacaaagtctggaaaaccaactggagatgagtttaaagggtgtccgcatgataaatgaccagattgtaactaatgagatcgaagaactacgcctaaatggaaatatcattcatcaagaaaatgttgaactctatcaaaagatggagcagatccaaaaagaaaatgcagagctacaaaagaaggtttatgaagcaaggagtacaaatgaagaaaatgtggcatccaatccttcttacaacgtcagaaatggatatgattcacttgcatctatcagtctccagctaagtcagccacagtctcaatacaaatacagtgaaccatcaaccaaagcaatgaaactcggattgcagctgcattag

SEQ ID NO: 109672 - protein, 241 aa, Glycine max
MGRGKIAIRRIDNSTSRQVTFSKRRNGLLKKARELSILCDAEVGLMVFSSTGKLYDYASTSMKAVIERYNKLKEEHHHLMNPASEAKFWQTEAASLRQQLQYLQECHRQLMGEELMGLGIKELQSLENQLEMSLKGVRMINDQIVTNEIEELRLNGNIIHQENVELYQKMEQIQKENAELQKKVYEARSTNEENVASNPSYNVRNGYDSLASISLQLSQPQSQYKYSEPSTKAMKLGLQLH

SEQ ID NO: 109673 - DNA, 669 bp, Glycine max
  CDS (1)..(669)
atgggaagggggaagatcgaaatcaaaaggattgagaacacaacaaatcggcaagtgaccttctgcaagagaagaaatgggcttctgaagaaagcttatgagctgtcagtgctgtgtgatgcagaagttgccctcatcgtcttctccagccgtggccgtctctatgagtattccaacaacaacataagatcaacaatagagaggtacaaaaaggcatgttctgatcactcaagcgcgagcactaccacagaaatcaatgctcagtattatcaacaagaatctgcaaagctgcgacagcaaatacagatgctgcaaaattctaacaggcacctgatgggtgatgccttaagcacactgactgtgaaggaacttaagcagttggagaatagacttgaaagaggaatcactagaatcagatctaagaaacatgagatgctactggctgaaattgaatacttccagaaaagggagattgaactggaaaatgaaaatctttgcctccgaactaagataactgacgtggagaggattcagcaagtaaacatggtttctgggccagaactgaatgccattcaagcattagcttcccgtagcttcttcaatccaaatatgttggaaggtggaactgtttaccctcactcagataagaagattcttcatcttgggtga

SEQ ID NO: 109674 - protein, 222 aa, Glycine max
MGRGKIEIKRIENTTNRQVTFCKRRNGLLKKAYELSVLCDAEVALIVFSSRGRLYEYSNNNIRSTIERYKKACSDHSSASTTTEINAQYYQQESAKLRQQIQMLQNSNRHLMGDALSTLTVKELKQLENRLERGITRIRSKKHEMLLAEIEYFQKREIELENENLCLRTKITDVERIQQVNMVSGPELNAIQALASRSFFNPNMLEGGTVYPHSDKKILHLG

SEQ ID NO: 109675 - DNA, 756 bp, Glycine max
  CDS (1)..(756)
atgggtaggggaagagtggagttgaagaggatagagaacaagataaacaggcaagttacgtttgcaaagaggagaaatgggcttctcaagaaagcctatgagctatctgttctctgtgatgctgaggttgccctcatcatcttctccaaccgaggcaagctttatgagttctgtagcagctctagcatgctcaaaacacttgaaaggtaccagaaatgcagctatggtgctgtggaagttagcaaacctgccaaagagctcgagcagagcagctaccgtgaatacttgaagctgaaagcaagatttgaatcacttcaaaggacccaaagaaaccttttaggggaagacttgggcccactgaatatcaaagaacttgagcatcttgaacggcaattggattcatctctaaagcaagtgaggtccacaaagacacaattcatgctggaccagttatctgatcttcaaaccaaggagcagatgttagtagaagcaaacagatccttgacagtgaagctggaagaaatcaattcaagaaaccactacaggcaatcatgggaagctggtgatcaaagtatgccatacggtggtggtccacagaattctcactctcatcagggcttcttccagccattggaatgcaaccctacattgcagattggtcctgattacaggtacaatgatgtagcttcagatcagataactgccacaactcaacctcaacaagtgagtggctttattccagggtggatgctgtga

SEQ ID NO: 109676 - protein, 251 aa, Glycine max
MGRGRVELKRIENKINRQVTFAKRRNGLLKKAYELSVLCDAEVALIIFSNRGKLYEFCSSSSMLKTLERYQKCSYGAVEVSKPAKELEQSSYREYLKLKARFESLQRTQRNLLGEDLGPLNIKELEHLERQLDSSLKQVRSTKTQFMLDQLSDLQTKEQMLVEANRSLTVKLEEINSRNHYRQSWEAGDQSMPYGGGPQNSHSHQGFFQPLECNPTLQIGPDYRYNDVASDQITATTQPQQVSGFIPGWML

SEQ ID NO: 109677 - DNA, 645 bp, Glycine max
  CDS (1)..(645)
atgactagaaagaggatacagatcaagaaaatcgacaacatcagttcgaggcaagtgactttctccaagagaaggaaagggcttttcaagaaggctcaggagttgtcaaccctttgtgatgcagacatagctctcatagtcttttctgcaactagcaagctctttgagtatgccagttcaagcatgcatcaagtaattgaaaggcacgatcgctattcagcaatccatagattggatcgcccctctattgagctgcagattgagagtgactccaacaacattctgcgcaagaaagtagaagataagactcgtgaactgaggcagatgaatggggaagatctgcaaggattgacattacaagaactgcagaaactagaggaacatcttaaaagaagtttgaccaatgtttcaaaagtaaaggatgcaaaatttatgcaagagatcagcacctttaagagaaagtgtttgattatgttgcccatacagggagtggaactaatggaggaaaaccaaagactgaaacaggtgccgagccttatccatgcacatagctataggcaatcatcggaatccattcttagcaattcatctaaccttcctgaagatggtggtagcaacacatctctcaagttggggttaccttaa

SEQ ID NO: 109678 - protein, 214 aa, Glycine max
MTRKRIQIKKIDNISSRQVTFSKRRKGLFKKAQELSTLCDADIALIVFSATSKLFEYASSSMHQVIERHDRYSAIHRLDRPSIELQIESDSNNILRKKVEDKTRELRQMNGEDLQGLTLQELQKLEEHLKRSLTNVSKVKDAKFMQEISTFKRKCLIMLPIQGVELMEENQRLKQVPSLIHAHSYRQSSESILSNSSNLPEDGGSNTSLKLGLP

SEQ ID NO: 109679 - DNA, 756 bp, Glycine max
  CDS (1)..(756)
atgggtaggggaagagtggagttgaagaggatagagatcaagataaacaggcatgttacgtttgcaaagaggagaaatgggcttctcaagaaagcctatgagctatctgttctctgtgatgctgaggttgccctcatcatcttctccaaccgaggcaagctttatgagttctgtagcagctctagcatgctcaaaacacttgaaaggtaccagaaatgcagctatggtgctgtggaagttagcaaacctgccaaagagctcgagcagagcagctaccgtgaatacttgaagctgaaagcaagatttgaatcacttcaaaggacccaaagaaaccttttaggggaagacttgggcccactgaatatcaaagaacttgagcatcttgaacggcaattggattcatctctaaagcaagtgaggtccacaaagacacaattcatgctggaccagttatctgatcttcaaaccaaggagcagatgttagtagaagcaaacagatccttgacagtgaagctggaagaaatcaattcaagaaaccactacaggcaatcatgggaagctggtgatcaaagtatgccatatggtggtggtccacagaattctcactctcatcagggcttcttccagccattggaatgcaaccctacattgcagattggtcctgattacaggtacaatgatgtagcttcagatcagataactgccacaactcaacctcaacaagtgagtggctttattccagggtggatgctgtga

SEQ ID NO: 109680 - protein, 251 aa, Glycine max
MGRGRVELKRIEIKINRHVTFAKRRNGLLKKAYELSVLCDAEVALIIFSNRGKLYEFCSSSSMLKTLERYQKCSYGAVEVSKPAKELEQSSYREYLKLKARFESLQRTQRNLLGEDLGPLNIKELEHLERQLDSSLKQVRSTKTQFMLDQLSDLQTKEQMLVEANRSLTVKLEEINSRNHYRQSWEAGDQSMPYGGGPQNSHSHQGFFQPLECNPTLQIGPDYRYNDVASDQITATTQPQQVSGFIPGWML

SEQ ID NO: 109681 - DNA, 729 bp, Glycine max
  CDS (1)..(729)
atggaatttcccaacgaagcaataccagaagggtgttcacagaagaaaacgggaagggggaaaatagaaatcaagcggatcgagaacacaacgaataggcaagttaccttctgcaaacgccgtaacgggttgctcaagaaggcttatgaattgtctgttctgtgtgatgctgaggttgctcttgttgtcttctcaagccgtggacgcctctatgagtatgccaacaacagtgttagaggaacgatcgataggtacaagaaagcatgtgctgcctccacaaatccagaatctgtctctgaagctaatacacagttttatcagcaggaagcgtccaaattaaaacgacaaatcagagacattcagaatctaaacaggcacatccttggtgaagctcttagctctctgagtctgaaggaattaaagaacctggagagtagactggagaaaggtttaagcagagttagatccagaaagcatgaaactttgtttgccgatatcgagttcatgcaaaagcgggaaatagagctgcaaaaccataataattttctgagagctaagatagctgaacacgagaaagcacaacaacggcaacaggatatgataccgggaaatgtgtgcgagtcaaccatacctccacaatcatatgaccgcaatttcttccctgttaatctcatagattccaataatcaatattcaaatcaagaccagactgctcttcaacttgtctga

SEQ ID NO: 109682 - protein, 242 aa, Glycine max
MEFPNEAIPEGCSQKKTGRGKIEIKRIENTTNRQVTFCKRRNGLLKKAYELSVLCDAEVALVVFSSRGRLYEYANNSVRGTIDRYKKACAASTNPESVSEANTQFYQQEASKLKRQIRDIQNLNRHILGEALSSLSLKELKNLESRLEKGLSRVRSRKHETLFADIEFMQKREIELQNHNNFLRAKIAEHEKAQQRQQDMIPGNVCESTIPPQSYDRNFFPVNLIDSNNQYSNQDQTALQLV

SEQ ID NO: 109683 - DNA, 747 bp, Glycine max
  CDS (1)..(747)
atggggaggggaagagtggaactcaaaaggatagagaacaagataaacaggcaggtaacgtttgcaaagaggagaaatgggcttctcaagaaagcctatgagctttctgttctctgtgatgctgaggttgccctcatcatcttctctacccgcggcaagctttatgaattctgtagcaccaacagcatgctcaaaacacttgaaaggtaccaaaagtgcagctatggtgcagttgaagtcagcaaacctggcaaagagcttgagagcagctaccgtgagtacttgaagctgaaagcaagatttgaatctcttcaaaggacccaaaggaaccttcttggtgaagacttgggcccactaaataccaaagatcttgagcagcttgagcggcaactggattcatctctcaagcaagtgaggtccacaaagactcagttcatgctggaccagttagctgatcttcagaataaggagcatatgttggtggaagcaaacagatctttgaccatgaagctggaagaaatcaattcaagaaaccagtataggcaaacatgggaagctggtgagcaaagtatgccatatggaacccaaaatgctcactctcaaggcttcttccagcctttggagtgcaaccccacattgcagataggttctgactacaggtacatccctgaagcctcagagcagcagctagctgccacaactcaagctcaacaagtcaatggatttattcctggatggatgctttga

SEQ ID NO: 109684 - protein, 248 aa, Glycine max
MGRGRVELKRIENKINRQVTFAKRRNGLLKKAYELSVLCDAEVALIIFSTRGKLYEFCSTNSMLKTLERYQKCSYGAVEVSKPGKELESSYREYLKLKARFESLQRTQRNLLGEDLGPLNTKDLEQLERQLDSSLKQVRSTKTQFMLDQLADLQNKEHMLVEANRSLTMKLEEINSRNQYRQTWEAGEQSMPYGTQNAHSQGFFQPLECNPTLQIGSDYRYIPEASEQQLAATTQAQQVNGFIPGWML

SEQ ID NO: 109685 - DNA, 702 bp, Zea mays
  CDS (1)..(702)
atggtcgggaccgggaagagggagcggatagcgatacggaggatcgacaacctggcggccaggcaggtgaccttctccaagaggcggcggggcctgttcaagaaggccgaggagctctccatcctctgcgacgccgaggtcggccttgtcgtcttctccgccaccggcaaactcttccacttcgccagctccagcatgaagcaggtaatcgatcggtacgactctcattccaagactctccagaggtccgaaccgcagtcgtctcaactgcagtcacatatggatgacggcacttgtgcaaggctaaaggaggaacttgctgaaacaagccttaagctcaggcagatgagaggagaggagctccagaggctgagcgtcgaacagctgcaggagctcgagaagaccctcgaatccggcctcggctctgtactcaaaaccaagagccaaaaaatccttgacgagatcagcggtctggaaagaaagagaacgcagctgatcgaggagaactcaaggctgaaggagcaagtgacacggatgtcgaggatggagacgcagcttggcgccgatccagagttcgtgtacgaggaagggcagtcgtctgaatccgtgacgaacacgtcctatccgcgcccgtccaccgacaccgacgactgctccgacacatcgctcaggctcgggctaccactcttcagctccaagtga

SEQ ID NO: 109686 - protein, 233 aa, Zea mays
MVGTGKRERIAIRRIDNLAARQVTFSKRRRGLFKKAEELSILCDAEVGLVVFSATGKLFHFASSSMKQVIDRYDSHSKTLQRSEPQSSQLQSHMDDGTCARLKEELAETSLKLRQMRGEELQRLSVEQLQELEKTLESGLGSVLKTKSQKILDEISGLERKRTQLIEENSRLKEQVTRMSRMETQLGADPEFVYEEGQSSESVTNTSYPRPSTDTDDCSDTSLRLGLPLFSSK

SEQ ID NO: 109687 - DNA, 780 bp, Zea mays
  CDS (1)..(780)
atgctcaacatgatgactgatctgagctgcgggccgtcgtccaaggtcaaggagcaggtggcggcggcgccgacgggctccggcgacaggcaggggcaggggagaggcaagatcgagatcaagcgcatcgagaacacgacgagccggcaggtgaccttctgcaagcgccgcaacggcctgctcaagaaggcgtacgagctctcggtgctctgcgacgccgaggtcgcgctcgtcgtcttctccagccgcggccgcctctacgagtacgccaacaacagtgtgaagtccaccattgagaggtacaagaaggccaacagtgactcctccaactctggcacagttgcagaagtcaatgcccagtactaccagcaggagtcctccaagctgcgacagatgatccacagcttgcaaaacgcaaacactaggaacatagtgggagattccatccacaccatgggcctcagggatcttaaacaaatggagggcaagctggagaaagccataatcaagattagagctagaaagaatgagctgctatacgctgaagttgactatatgcaaaaaagggagatggatctgcagactgacaacatgtacctgaggagcaagatcgctgagagtaatgaaacggggcagccggcgatgcacatgacgatgggagcgccgccgacgagcgagtacgaccacatggcccctttcgactcgagaaactttctgcaagtgagcatgcctcagcactactcccatcagctgcaacctacaaccctccagctcggatga

SEQ ID NO: 109688 - protein, 259 aa, Zea mays
MLNMMTDLSCGPSSKVKEQVAAAPTGSGDRQGQGRGKIEIKRIENTTSRQVTFCKRRNGLLKKAYELSVLCDAEVALVVFSSRGRLYEYANNSVKSTIERYKKANSDSSNSGTVAEVNAQYYQQESSKLRQMIHSLQNANTRNIVGDSIHTMGLRDLKQMEGKLEKAIIKIRARKNELLYAEVDYMQKREMDLQTDNMYLRSKIAESNETGQPAMHMTMGAPPTSEYDHMAPFDSRNFLQVSMPQHYSHQLQPTTLQLG

SEQ ID NO: 109689 - DNA, 747 bp, Glycine max
  CDS (1)..(747)
atggggaggggaagagtggagctcaaaaggatagagaacaagataaacaggcaggtaacgtttgcaaagaggagaaatgggcttctcaagaaagcctatgagctttctgttctctgtgatgctgaggttgccctcatcatcttctctacccgcggcaagctttatgaattctgtagcaccaacagcatgctcaaaacacttgaaaggtaccaaaagtgcagctatggtgcagttgaagtcagcaaacctggcaaagagcttgagagcagctaccgtgagtacttgaagctgaaagcaagatttgaatctcttcaaaggacccaaaggaaccttcttggtgaagacttgggcccactaaataccaaagatcttgagcagcttgagcggcaactggattcatctctcaagcaagtgaggtccacaaagactcagttcatgctggaccagttagctgatcttcagaataaggagcatatgctggtagaagcaaacagatctttgaccatgaagctggaagaaatcaattcaagaaaccagtataggcaaacatgggaagctggtgagcaaagtatgtcatatggtacacaaaatgctcactcccaaggctttttccagcctttggagtgcaaccccacattgcagataggttctgactacaggtacaaccctgaagcctcagagcagcagctagctgccacaactcaagctcaacaagtcaatggatttattcctggatggatgctttga

SEQ ID NO: 109690 - protein, 248 aa, Glycine max
MGRGRVELKRIENKINRQVTFAKRRNGLLKKAYELSVLCDAEVALIIFSTRGKLYEFCSTNSMLKTLERYQKCSYGAVEVSKPGKELESSYREYLKLKARFESLQRTQRNLLGEDLGPLNTKDLEQLERQLDSSLKQVRSTKTQFMLDQLADLQNKEHMLVEANRSLTMKLEEINSRNQYRQTWEAGEQSMSYGTQNAHSQGFFQPLECNPTLQIGSDYRYNPEASEQQLAATTQAQQVNGFIPGWML

SEQ ID NO: 109691 - DNA, 735 bp, Zea mays
  CDS (1)..(735)
atggggaggggccgggtggagctgaagcggatcgagaacaagatcaaccgccaggtcaccttcgccaagcgccgcaacggcctgctcaagaaggcgtacgagctctccgtgctctgcgacgccgaagtcgcgctcatcgtcttctccaaccgcggcaagctatacgagttctgtagcggaccgagcatcacgagaacacttgagaggtacgaaaaaaacagttatgcaggcccagatactgctgtacagaacaaagagaacgagttagtccagaacagccgcaatgagtaccttaaactgaaagcaaaggtggataatttacagaggactcagaggaatttgcttggtgaagatctgggttcacttggtgtcaaagagcttgatcagcttgagaagcaaattgattcatccttaagtcacataagatccacaaggacacagcatatgcttgatcagctcactgatcttcagaggagggagcaaatgatgtgtgaagcaaataagtgccttagaagaaagctggaggagaccagcaaccaggtgcatggccaagtgtgggagcacggtgccaacttattactcggctacgagcggcactcctcgccacagcaagccccatcacatgttggcaatggattattctttcatcccctggaagctgcagcagagccaaccctgcagatcgggttcgctcccgagcatatgaataacttcatgccggcatggctaccctga

SEQ ID NO: 109692 - protein, 244 aa, Zea mays
MGRGRVELKRIENKINRQVTFAKRRNGLLKKAYELSVLCDAEVALIVFSNRGKLYEFCSGPSITRTLERYEKNSYAGPDTAVQNKENELVQNSRNEYLKLKAKVDNLQRTQRNLLGEDLGSLGVKELDQLEKQIDSSLSHIRSTRTQHMLDQLTDLQRREQMMCEANKCLRRKLEETSNQVHGQVWEHGANLLLGYERHSSPQQAPSHVGNGLFFHPLEAAAEPTLQIGFAPEHMNNFMPAWLP

SEQ ID NO: 109693 - DNA, 846 bp, Zea mays
  CDS (1)..(846)
atgctcaacatgatgaccgatctgagctgcgggccgtcgtccaaggcggcgaaaggagggcagccggcagcgacgacgggctccggcggcgacaggcaggggaggggcaagatcgagatcaagcgcatcgagaacacgacgaaccggcaggtcaccttctgcaagcgccgcaacggcctgctcaagaaggcgtacgagctctcggtgctctgcgacgccgaggtcgcgctcgtcgtcttctccagccgcggccgcctctacgagtacgccaacaacagtgtgaagtccaccattgagaggtacaagaaggccaacagtgacacctccaactctggcacagttgcagaagtcaatgctcagcactaccagcaggagtcctccaagctgcgccaggcgatcgatagcttgcaaaacgcaaacaggaccatagtgggagattcaatccacaccatgggcctcagggagcttaagcagatggagggcaagctggagaaggccataaacaagattagagctagaaagaatgagctcttgtatgctgaagttgaatatatgcaaaaaagggagatggatctgcagactgacaacatgtacctgaggagcaagatcgccgagaataataatgaaacggggcagccaccgatgaacatgattggagtgccgtcgacgagcgagtacgatcacatggccccgtttgttgactcgagaaactttcttcaggtgaacatgcagcagcagcagcctcagcactactcccatctatcagctgcaaccaacgaccctccaactcggatgatgaaattaagaatcttcggccaacaatccatgcacgcaagcacgcagtaa

SEQ ID NO: 109694 - protein, 281 aa, Zea mays
MLNMMTDLSCGPSSKAAKGGQPAATTGSGGDRQGRGKIEIKRIENTTNRQVTFCKRRNGLLKKAYELSVLCDAEVALVVFSSRGRLYEYANNSVKSTIERYKKANSDTSNSGTVAEVNAQHYQQESSKLRQAIDSLQNANRTIVGDSIHTMGLRELKQMEGKLEKAINKIRARKNELLYAEVEYMQKREMDLQTDNMYLRSKIAENNNETGQPPMNMIGVPSTSEYDHMAPFVDSRNFLQVNMQQQQPQHYSHLSAATNDPPTRMMKLRIFGQQSMHASTQ

SEQ ID NO: 109695 - DNA, 807 bp, Zea mays
  CDS (1)..(807)
atggggaggggaaagattgagatcaagaggatcgagaacaccaccagccgccaggtgaccttctgcaagcgcaggaatgggctgctgaagaaggcctacgagctctccatcctctgcgacgctgagatcgctttgatcgtcttctctacccgaggccgcctatatgaatattccagtaacagcgtaaggtcgacgatcgagaggtacaagaaagcctctgccagcacttctggaacagctccagtgacagatgtcaactctcttcaatactttcagcaagaagcggcaaaactgcgccagcagatacaaaccttgcagaattcaaacaggcacctgatgggtgaatctactggcaatatgactgcaaaggagctaaagggccttgaaagcaggcttgaaagaggcattgggaggatccggtccaaaaagcatgagctgctgctcgcggagatcgaatatatgcagaagagggaagcagatctgcacaatgaaaacatgttcctgcgggccaaggttgcggaggctgagcgagctctggagcaggaggcggcagaagaccagacgatgatggtgccggcggcggtccgcggggctacgacggagctgaaagcgctgccggcgtcgttcgacgcgagtggctactaccagtaccagcagcatcagcatgtggtggccgccgcctccgctgcctcctcgtcgcagtacgcggagcagccccagggccagcaggagtaccaccaccagactgccctccacctcggctaccacgtcaagatcgactccgccgccgacaaaggcttcctctag

SEQ ID NO: 109696 - protein, 268 aa, Zea mays
MGRGKIEIKRIENTTSRQVTFCKRRNGLLKKAYELSILCDAEIALIVFSTRGRLYEYSSNSVRSTIERYKKASASTSGTAPVTDVNSLQYFQQEAAKLRQQIQTLQNSNRHLMGESTGNMTAKELKGLESRLERGIGRIRSKKHELLLAEIEYMQKREADLHNENMFLRAKVAEAERALEQEAAEDQTMMVPAAVRGATTELKALPASFDASGYYQYQQHQHVVAAASAASSSQYAEQPQGQQEYHHQTALHLGYHVKIDSAADKGFL

SEQ ID NO: 109697 - DNA, 780 bp, Zea mays
  CDS (1)..(780)
atgctcaacatgatgactgatctgagctgcgggccgccgtccaaggtcaaggagcaggcggcggcggcgccgacgggctccggcgacaggcaggggcaggggagaggcaagatcgagatcaagcgcatcgagaacacgacgaaccggcaggtgaccttctgcaagcgccgcaacggcctgctcaagaaggcgtacgagctctcggtgctctgcgacgccgaggtcgcgctcgtcgtcttctccagccgcggccgcctctacgagtacgccaacaacagtgtgaagtccaccattgagaggtacaagaaggccaacagtgactcctccaactctggcacagttgcagaagtcaatgcccagtactaccagcaggagtcctccaagctgcgacagatgatccacagcttgcaaaacgcaaacactaggaacatagtgggagattcaatccacaccatgggcctcagggatcttaagcaaatggagggcaagctggagaaagccataagcaagattagagctagaaagaatgagctgctatatgctgaagttgactatatgcaaaaaagggagatggatctgcagactgacaacatgtacctgaggagcaagatcgctgagagtaatgaaacggggcagccggcgatgcacatgatgggagtgccgccgccgacgagcgagtacgaccacatggcccctttcgactcgagaaactttctgcaagtgagcatgcctcagcactactcccatcagctgcaacctacaaccctccagctcggatga

SEQ ID NO: 109698 - protein, 259 aa, Zea mays
MLNMMTDLSCGPPSKVKEQAAAAPTGSGDRQGQGRGKIEIKRIENTTNRQVTFCKRRNGLLKKAYELSVLCDAEVALVVFSSRGRLYEYANNSVKSTIERYKKANSDSSNSGTVAEVNAQYYQQESSKLRQMIHSLQNANTRNIVGDSIHTMGLRDLKQMEGKLEKAISKIRARKNELLYAEVDYMQKREMDLQTDNMYLRSKIAESNETGQPAMHMMGVPPPTSEYDHMAPFDSRNFLQVSMPQHYSHQLQPTTLQLG

SEQ ID NO: 109699 - DNA, 738 bp, Zea mays
  CDS (1)..(738)
atggggcgcggtaaggtgcagctgaagcggatcgagaacaagatcaaccgccaggtgaccttctccaagcgccgctcggggctgctcaagaaggcgcacgagatctccgtgctctgcgacgccgaggtcgcgctcatcatcttctccaccaaagggaagctctacgagtattccaccgattcatgtatggacaaaattcttgaccggtacgagcgctactcctatgcagaaaaggttcttatttcagtagaatctgaaactcagggcaattggtgccacgagtatagaaaactaaaggcgaaggtcgagacaatacaaaaatgtcaaaagcacctcatgggagaggatcttgaaacgttgaatctcaaagagcttcagcaactagagcagcagctggagagttcactgaaacatatcagaaccaggaagagccagcttatgctcgagtcaatttcggagctccaacggaaggagaagtcgctgcaggaggagaacaaggttctgcagaaggagctcgcggagaagcagaaagcccagcggaagcaagtgcaatggggccaaacccaacagcagaccagttcgtcttcctcgtgcttcgtgataagggaagctgccccaacaacaaatatcagcatttttcctgtggcagcaggcgggaggttggtggaaggtgcagcagcgcagccacaggctcgcgttggactaccaccatggatgcttagccacctgagcagctga

SEQ ID NO: 109700 - protein, 245 aa, Zea mays
MGRGKVQLKRIENKINRQVTFSKRRSGLLKKAHEISVLCDAEVALIIFSTKGKLYEYSTDSCMDKILDRYERYSYAEKVLISVESETQGNWCHEYRKLKAKVETIQKCQKHLMGEDLETLNLKELQQLEQQLESSLKHIRTRKSQLMLESISELQRKEKSLQEENKVLQKELAEKQKAQRKQVQWGQTQQQTSSSSSCFVIREAAPTTNISIFPVAAGGRLVEGAAAQPQARVGLPPWMLSHLSS

SEQ ID NO: 109701 - DNA, 798 bp, Zea mays
  CDS (1)..(798)
atggggaggggaaggattgagatcaagaggatcgagaacaacacgagccggcaggtcaccttctgcaaacgccgcaatgggctcctcaagaaggcctacgagctctccgtcctatgcgacgccgaggtggcgctcgtcgtcttctccagccgcggacgcctctacgagtacgccaacaacagtgtgaaggctacgatcgagaggtacaagaaggcacacgccgttggctcttcctctggccccccactcttagagcacaatgcccagcaattctaccagcaagaatccgcaaaactgcgcaaccagatccaaatgctgcaaaacactaacaggcacttggttggtgactctgtgggaaacttgtcactcaaagagctgaagcagctggagagccgccttgagaaaggcatctctaagatcagggccaggaagagtgagctgctggctgccgagatcaattacatggccaaaagggagactgagcttcagaatgaccacatgaacctcaggaccaagattgaggagggagagcaacagctgcagcaggtgactgtggcccagtctgtcgcagcagcagctgccaccgacgtggaactgaatccgttcttggagatggataccaaatgcttcttccctggcggccccttcgcgacactggacatgaagtgcttcttccccggcagcttgcagatgctggaggcacagcagcgccagatgcttgccaccgagctgaacctcggctaccaactggcgccgcctgacactgacgttgccaacaataaccctcagcagttctaa

SEQ ID NO: 109702 - protein, 265 aa, Zea mays
MGRGRIEIKRIENNTSRQVTFCKRRNGLLKKAYELSVLCDAEVALVVFSSRGRLYEYANNSVKATIERYKKAHAVGSSSGPPLLEHNAQQFYQQESAKLRNQIQMLQNTNRHLVGDSVGNLSLKELKQLESRLEKGISKIRARKSELLAAEINYMAKRETELQNDHMNLRTKIEEGEQQLQQVTVAQSVAAAAATDVELNPFLEMDTKCFFPGGPFATLDMKCFFPGSLQMLEAQQRQMLATELNLGYQLAPPDTDVANNNPQQF

SEQ ID NO: 109703 - DNA, 702 bp, Zea mays
  CDS (1)..(702)
atggtcgggaccgggaagagggagcggatagcgatacggaggatcgacaacctggcggcaaggcaggtgaccttctccaagaggcggcggggcctgttcaagaaggccgaggagctctccatcctctgcgacgccgaggtcggccttgtcgtcttctccgccaccggcaaactcttccacttcgccagctccagcatgaagcaggtaatcgatcggtacgactctcattccaagactctccagaagtccgaaccgcagtcgtctcaactgcagtcacatatggatgacggcacttgtgcaaggctaaaggaggaacttgctggaacaagccttaagctcaggcagatgagaggagaggagctccagaggctgagcgtccaacagctacaggagctcgagaagaccctcgaatccggcctcggctctgtactcaaaaccaagagccaaaaaatccttgacgagatcagcggtctggaaagaaagagaacgcagctgatcgaggagaactcaaggctgaaggagcaagtgacacggatgtcgaggatggagacgcagcttggcgccgacccagagttcgtgtacgaggaagggcagtcgtctgaatccgtgacgaacacgtcctatccgcgcccgtccaccgacaccgacgactgctccgacacatcgctcaggctcgggctaccattcttcagctccaagtga

SEQ ID NO: 109704 - protein, 233 aa, Zea mays
MVGTGKRERIAIRRIDNLAARQVTFSKRRRGLFKKAEELSILCDAEVGLVVFSATGKLFHFASSSMKQVIDRYDSHSKTLQKSEPQSSQLQSHMDDGTCARLKEELAGTSLKLRQMRGEELQRLSVQQLQELEKTLESGLGSVLKTKSQKILDEISGLERKRTQLIEENSRLKEQVTRMSRMETQLGADPEFVYEEGQSSESVTNTSYPRPSTDTDDCSDTSLRLGLPFFSSK

SEQ ID NO: 109705 - DNA, 807 bp, Zea mays
  CDS (1)..(807)
atggggaggggaaagattgagatcaagaggatcgagaacaccaccagccgccaggtgaccttctgcaagcgcaggaatgggctgctgaagaaggcctacgagctctccatcctctgcgacgctgagatcgctttgatcgtcttctctacccgaggccgcctatatgaatattccagtaacagcgtaaggtcgacgatcgagaggtacaagaaagcctctgccagcacttctggaacagctccagtgacagatgtcaactctcttcaatactttcagcaagaagcggcaaaactgcgccagcagatacaaaccttgcagaattcaaacaggcacctgatgggtgaatctactggcaatatgactgcaaaggagctaaagggccttgaaagcaggcttgaaagaggcattgggaggatccggtccaaaaagcatgagctgctgctcgcggagatcgaatatatgcagaagagggaagcagatctgcacaatgaaaacatgttcctgcgggccaaggttgcggaggctgagcgagctctggagcaggaggcggcagaagaccagacgatgatggtgccggcggcggtccgcggggctacgacggagctgaaagcgttgccggcgtcgttcgacgcgagtggctactaccagtaccagcagcatcagcatgtggtggccgccgcctccgctgcctcctcgtcgcagtacgcggagcagtcccagggtcagcaggagtaccaccaccagactgccctccacctcggctaccacgttaagatcgattccgccgccgacaaaggcttcctctag

SEQ ID NO: 109706 - protein, 268 aa, Zea mays
MGRGKIEIKRIENTTSRQVTFCKRRNGLLKKAYELSILCDAEIALIVFSTRGRLYEYSSNSVRSTIERYKKASASTSGTAPVTDVNSLQYFQQEAAKLRQQIQTLQNSNRHLMGESTGNMTAKELKGLESRLERGIGRIRSKKHELLLAEIEYMQKREADLHNENMFLRAKVAEAERALEQEAAEDQTMMVPAAVRGATTELKALPASFDASGYYQYQQHQHVVAAASAASSSQYAEQSQGQQEYHHQTALHLGYHVKIDSAADKGFL

SEQ ID NO: 109707 - DNA, 810 bp, Zea mays
  CDS (1)..(810)
atgggtaggggaaggattgagatcaagaggatcgagaacaacacgagccggcaggtcaccttctgcaagcgccgcaatgggctcctcaagaaggcgtatgagctctccgtcctctgcgacgctgaggtggccctcatcgtcttctctagccgtggtcgcctctacgagtatgccaacaacagtgtcaaggctactattgagaggtacaagaaggcacacaccgttggctcttcctctgggccaccgctcctagagcacaatgcccagcaattctaccagcaagaatcagcaaaactgcgcaaccagatccagatgctgcaaaacactaacaggcacttggttggtgattccgtgggaaacctgtcactcaaggagctgaagcagctggagagccgccttgagaaaggcatctctaagatcagggccaggaagagtgagctgctggctgcggagatcagttacatggccaaaagggagactgagcttcagaatgaccacatgaccctcaggaccaagattgaggagggagagcaacagctgcagcaggtgaccgtggcacggtcagttgcagcagcagcagcagctgccaccaacttggagctgaacccattcttagagatggataccaaatgcttcttcactggcggccccttcgcaacgctggacatgaagtgctttctccccggcagcttgcagcagatgctggaggcacagcagcgccagatgctcgccaccgagctgaacctcggctaccaactggcgccgcctggttctgacgctgccgacaataaccctcatcatcagttttaa

SEQ ID NO: 109708 - protein, 269 aa, Zea mays
MGRGRIEIKRIENNTSRQVTFCKRRNGLLKKAYELSVLCDAEVALIVFSSRGRLYEYANNSVKATIERYKKAHTVGSSSGPPLLEHNAQQFYQQESAKLRNQIQMLQNTNRHLVGDSVGNLSLKELKQLESRLEKGISKIRARKSELLAAEISYMAKRETELQNDHMTLRTKIEEGEQQLQQVTVARSVAAAAAAATNLELNPFLEMDTKCFFTGGPFATLDMKCFLPGSLQQMLEAQQRQMLATELNLGYQLAPPGSDAADNNPHHQF

SEQ ID NO: 109709 - DNA, 783 bp, Zea mays
  CDS (1)..(783)
atgggacgcgggaagatcgagatcaagcggatcgagaactcgacgaaccggcaggtcaccttctccaagcgccggggcgggctgctcaagaaggccaacgagctcgccgtgctgtgcgacgcgcgcgtcggcgtcgtcatcttctccagcaccggcaagatgttcgagtactgcagccctgcctgcagcttgagggagcttattgagcagtatcagcatgctaccaacagccacttcgaggagataaaccatgatcagcaaatactgctggagatgacaaggatgaagaacgagatggagaagctggagacgggcatcaggaggtacaccggcgacgacctctcctccctcaccctcgacgacgtcagcgacctcgagcagcaactcgagtactccgtctccaaagtccgtgcaaggaagcatcagctcctgaaccaacagcttgacaacctacgtcgcaaggaacaaatcttggaagaccagaacaccttcctgtaccgcatgatcaacgagaaccagcaggccgcgttgaccggcgaggtgaagctgggggagatggcgccgctggcgatgctgcagccaccgccggcgttcgcgcactccgccaccgcctactacggcggggagtcgtcgtcgtcgggcacggcgctgcagctgatgtcggcggcgccgcagctgcacgccgacgacctcgggttccggctacagccgacgcagcccaacctgcaggacccggcggcgccgtgcggcggcctccatggccacggcctgcagctgtggtaa

SEQ ID NO: 109710 - protein, 260 aa, Zea mays
MGRGKIEIKRIENSTNRQVTFSKRRGGLLKKANELAVLCDARVGVVIFSSTGKMFEYCSPACSLRELIEQYQHATNSHFEEINHDQQILLEMTRMKNEMEKLETGIRRYTGDDLSSLTLDDVSDLEQQLEYSVSKVRARKHQLLNQQLDNLRRKEQILEDQNTFLYRMINENQQAALTGEVKLGEMAPLAMLQPPPAFAHSATAYYGGESSSSGTALQLMSAAPQLHADDLGFRLQPTQPNLQDPAAPCGGLHGHGLQLW

SEQ ID NO: 109711 - DNA, 840 bp, Zea mays
  CDS (1)..(840)
atgctcaacatgatgaccgatctgagctgcgggccgtcgtccaaggcggcgaaaggagggcagccggcagcgacgacgggctccggcggcgacaggcaggggaggggcaagatcgagatcaagcgcatcgagaacacgacgaaccggcaggtcaccttctgcaagcgccgcaacggcctgctcaagaaggcgtacgagctctcggtgctctgcgacgccgaggtcgcgctcgtcgtcttctccagccgcggccgcctctacgagtacgccaacaacagtgtgaagtccaccattgagaggtacaagaaggccaacagtgacacctccaactctggcacagttgcagaagtcaatgctcagcactaccagcaggagtcctccaagctgcgccaggcgatcgatagcttgcaaaacgcaaacaggaccatagtgggagattcaatccacaccatgggcctcagggagcttaagcagatggagggcaagctggagaaggccataaacaagattagagctagaaagaatgagctcttgtatgctgaagttgaatatatgcaaaaaagggagatggatctgcagactgacaacatgtacctgaggagcaagatcgccgagaataatgaaacggggcagccaccgatgaacatgattggattgccgtcgacgagcgagtacgatcacatggccccgtttgttgactcgagaaactttcttcaggtgaacatgcagcagcagcctcagcactactcccatctatcagctgcaaccaacgaccctccaactcggatgatgaaattaagaatcttcggccaacaatccatgcacgcaagcacgcagtaa

SEQ ID NO: 109712 - protein, 279 aa, Zea mays
MLNMMTDLSCGPSSKAAKGGQPAATTGSGGDRQGRGKIEIKRIENTTNRQVTFCKRRNGLLKKAYELSVLCDAEVALVVFSSRGRLYEYANNSVKSTIERYKKANSDTSNSGTVAEVNAQHYQQESSKLRQAIDSLQNANRTIVGDSIHTMGLRELKQMEGKLEKAINKIRARKNELLYAEVEYMQKREMDLQTDNMYLRSKIAENNETGQPPMNMIGLPSTSEYDHMAPFVDSRNFLQVNMQQQPQHYSHLSAATNDPPTRMMKLRIFGQQSMHASTQ

SEQ ID NO: 109713 - DNA, 22 bp, Artificial sequence
  primer
atggagggtggtgcgagtaatg

SEQ ID NO: 109714 - DNA, 20 bp, Artificial sequence
  primer
tcaaacaagttgcagaggtg

SEQ ID NO: 109715 - protein, 217 aa, Artificial sequence
  consensus sequence
  Variant (5)..(8): Xaa in position 5 to 8 is any amino acid
  Variant (14)..(16): Xaa in position 14 to 16 is any amino acid
  Variant (22)..(22): Xaa in position 22 is any amino acid
  Variant (26)..(26): Xaa in position 26 is any amino acid
  Variant (33)..(33): Xaa in position 33 is any amino acid
  Variant (44)..(44): Xaa in position 44 is any amino acid
  Variant (47)..(47): Xaa in position 47 is any amino acid
  Variant (50)..(51): Xaa in position 50 to 51 is any amino acid
  Variant (53)..(53): Xaa in position 53 is any amino acid
  Variant (55)..(55): Xaa in position 55 is any amino acid
  Variant (57)..(67): Xaa in position 57 to 67 is any amino acid
  Variant (68)..(71): Xaa in position 68 to 71 is any or no amino acid
  Variant (73)..(73): Xaa in position 73 is any amino acid
  Variant (75)..(89): Xaa in position 75 to 89 is any amino acid
  Variant (90)..(104): Xaa in position 90 to 104 is any or no amino acid
  Variant (106)..(107): Xaa in position 106 to 107 is any amino acid
  Variant (108)..(108): Xaa in position 108 is any or no amino acid
  Variant (110)..(112): Xaa in position 110 to 112 is any amino acid
  Variant (113)..(120): Xaa in position 113 to 120 is any or no amino acid
  Variant (122)..(124): Xaa in position 122 to 124 is any amino acid
  Variant (125)..(128): Xaa in position 125 to 128 is any or no amino acid
  Variant (131)..(131): Xaa in position 131 is any amino acid
  Variant (132)..(133): Xaa in position 132 to 133 is any or no amino acid
  Variant (135)..(141): Xaa in position 135 to 141 is any amino acid
  Variant (142)..(143): Xaa in position 142 to 143 is any or no amino acid
  Variant (145)..(146): Xaa in position 145 to 146 is any amino acid
  Variant (149)..(150): Xaa in position 149 to 150 is any amino acid
  Variant (152)..(158): Xaa in position 152 to 158 is any amino acid
  Variant (160)..(161): Xaa in position 160 to 161 is any amino acid
  Variant (163)..(165): Xaa in position 163 to 165 is any amino acid
  Variant (166)..(209): Xaa in position 166 to 209 is any or no amino acid
  Variant (211)..(211): Xaa in position 211 is any amino acid
  Variant (212)..(213): Xaa in position 212 to 213 is any or no amino acid
  Variant (215)..(216): Xaa in position 215 to 216 is any amino acid
MGRGXXXXKRIENXXXRQVTFXKRRXGLLKKAXELSVLCDAEVXLIXFSXXGXLXEXXXXXXXXXXXXXXXRXYXXXXXXXXXXXXXXXXXXXXXXXXXXXXXXEXXXLXXXXXXXXXXXRXXXXXXXGEXXXLXXXXXXXXXLXXLEXXLXXXXXXXRXXKXXXXXXXXXXXXXXXXXXXXXXXXXXXXXXXXXXXXXXXXXXXXXXXLXXXNXXL

SEQ ID NO: 109716 - protein, 58 aa, Artificial sequence
  protein pattern
  Variant (2)..(9): Xaa in position 2 to 9 is any amino acid
  Variant (10)..(11): Xaa in position 10 to 11 is any or no amino acid
  Variant (13)..(15): Xaa in position 13 to 15 is any amino acid
  Variant (21)..(21): Xaa in position 21 is Ala, Cys or Ser
  Variant (25)..(25): Xaa in position 25 is Ala, Gly, Asn, Ser or Thr
  Variant (28)..(28): Xaa in position 28 is any amino acid
  Variant (32)..(32): Xaa in position 32 is any amino acid
  Variant (34)..(34): Xaa in position 34 is Ile or Leu
  Variant (35)..(35): Xaa in position 35 is Ala, Gly or Ser
  Variant (36)..(36): Xaa in position 36 is Ile, Leu or Val
  Variant (41)..(41): Xaa in position 41 is Asp, Glu, Gln or Arg
  Variant (42)..(42): Xaa in position 42 is Ile, Leu or Val
  Variant (43)..(43): Xaa in position 43 is Ala, Gly, Ser or Thr
  Variant (44)..(44): Xaa in position 44 is Ala, Ile, Leu or Val
  Variant (45)..(45): Xaa in position 45 is Phe, Ile, Leu, Met or Val
  Variant (46)..(46): Xaa in position 46 is Ala, Ile, Leu or Val
  Variant (49)..(50): Xaa in position 49 to 50 is any amino acid
  Variant (52)..(52): Xaa in position 52 is Lys or Arg
  Variant (53)..(54): Xaa in position 53 to 54 is any amino acid
  Variant (55)..(55): Xaa in position 55 is Asp, Glu or Gln
  Variant (56)..(57): Xaa in position 56 to 57 is any amino acid
  Variant (58)..(58): Xaa in position 58 is Ala, Asn, Ser or Thr
GXXXXXXXXXXNXXXRQVTFXKRRXGLXKKAXEXXXLCDAXXXXXXFSXXGXXXXXXX

SEQ ID NO: 109717 - DNA, 693 bp, Arabidopsis thaliana
  CDS (1)..(693)
atgggaagaggaaagatagaaataaagaggatagagaactcaacaaatcgacaagtgacgttttgcaaaagaagaaatggacttctgaagaaagcctatgagctttcggtcctttgcgatgcagaagttgcgctcattgttttctccactcgtggccgtctctatgaatacgccaataacaacataagatcaaccattgagaggtacaagaaagcttgttctgatagcaccaacactagcactgtccaagaaatcaatgccgcgtactatcaacaagaatctgctaagctgagacaacagatccaaacgattcaaaactccaacaggaatctgatgggagactctttgagttccttaagtgtcaaggaactaaaacaagttgagaatcgccttgagaaagctatctctaggatcaggtccaagaagcatgagttgcttttagttgaaatcgaaaacgcgcagaaaagggagattgagcttgacaatgagaacatctatctaagaactaaggtagcagaagtggagaggtatcaacaacaccatcatcaaatggttagtggttcagagattaatgcaattgaagctttagcctcacgcaattactttgctcatagcattatgactgctggttctggatctggtaatggaggttcttactctgatcccgacaagaaaattcttcatctcggataa

SEQ ID NO: 109718 - protein, 230 aa, Arabidopsis thaliana; identical to SEQ ID NO: 109414

SEQ ID NO: 109719 - DNA, 939 bp, Glycine max
  CDS (82)..(750)
gatagcgcagtttcatttctttggattagaaatttttcccaaagctgatcgagaagccagccaggccagagttgaagaagaatgggaagggggaagatcgaaatcaaaaggattgagaacacaacaaatcggcaagtgaccttctgcaagagaagaaatgggcttctgaagaaagcttatgagctgtcagtgctgtgtgatgcagaagttgccctcatcgtcttctccagccgtggccgtctctatgagtattccaacaacaacataagatcaacaatagagaggtacaaaaaggcatgttctgatcactcaagcgcgagcactaccacagaaatcaatgctcagtattatcaacaagaatctgcaaagctgcgacagcaaatacagatgctgcaaaattctaacaggcacctgatgggtgatgccttaagcacactgactgtgaaggaacttaagcagttggagaatagacttgaaagaggaatcactagaatcagatctaagaaacatgagatgctactggctgaaattgaatacttccagaaaagggagattgaactggaaaatgaaaatctttgcctccgaactaagataactgacgtggagaggattcagcaagtaaacatggtttctgggccagaactgaatgccattcaggcattagcttcccgtagcttcttcaatccaaatatgttggaaggtggaactgtttaccctcactcagataagaagattcttcatcttgggtgatcaataatatatgatcttggctagcctatggcatgtctatccaattagccggtggctaaatgcattattattactactcttttggttgctcattaactagaccatgtgatctatatactacttatggattatggatacttatgtatgatgattgtatgatatcataacaatcagttagaaataataatt

SEQ ID NO: 109720 - protein, 222 aa, Glycine max; identical to SEQ ID NO: 109674

SEQ ID NO: 109721 - DNA, 669 bp, Glycine max; identical to SEQ ID NO: 109661
  CDS (1)..(669)

SEQ ID NO: 109722 - protein, 222 aa, Glycine max; identical to SEQ ID NO: 109662

SEQ ID NO: 109723 - DNA, 1049 bp, Eucalyptus grandis
  CDS (152)..(820)
ctttggctttccttctccatctctctcgctctctctttgggattcgtgtgttctttcttcttttttgcaccacccgagattttccgaaagctgaagtggccggggagtgaagtttaagagagagagagccatcaccaaaagcccgaagatcatggggagaggaaagatcgagatcaagaggatcgagaacacgacgaaccgtcaggtcaccttctgcaagagaaggaacggactgttgaagaaggcctacgagctctccgtcctctgtgatgccgaagtggccctcatcgtcttctccagcagaggacgcctctacgagtactccaacaacagcataaggtcaactatagagaggtacaaaaaggctaattcagatagttcaaacacaagcactgtcacagagatcaatgcccagtattatcagcaagaatctgcaaagttgaggcagcagatccaaatgctgcaaaactccaacaggcacttgatgggtgattccttaagttcactctctgttaaggagctgaagcagctggaaaataggcttgaacgcggcatcacaaggatcaggtcaaagaagcatgagatgttattgactgagatcgagtacctgcagaaaaaagagattgagctcgaaaatgaaagtgtgttcctccgcacaaagatagccgaggtggacaggattcagcaaggaaacatggttgctggccctcaggttaatgtaatggaagcattagcttctcgcaatttcttcccttctaacatggtcgagggcggaactgtctactcacactccgacaaaaaagttctccatcttgggtaagtcattgggtggtttggattgaagatgtatgtgtgcatccaataactcggattgaacaatgactgatttacaaacttacagtaatgtatgtgtgcgtactcatttctattacgaccatactgaagcggtagtgtcgtgtcttttcgtctttggaactattacagtacctatgttgatgtgtgatcatgtcattacgttgatgaacgttatgcagatcaaaaaaaaaaaa

SEQ ID NO: 109724 - protein, 222 aa, Eucalyptus grandis
MGRGKIEIKRIENTTNRQVTFCKRRNGLLKKAYELSVLCDAEVALIVFSSRGRLYEYSNNSIRSTIERYKKANSDSSNTSTVTEINAQYYQQESAKLRQQIQMLQNSNRHLMGDSLSSLSVKELKQLENRLERGITRIRSKKHEMLLTEIEYLQKKEIELENESVFLRTKIAEVDRIQQGNMVAGPQVNVMEALASRNFFPSNMVEGGTVYSHSDKKVLHLG

SEQ ID NO: 109725 - DNA, 720 bp, Gossypium hirsutum
  CDS (26)..(697)
acccccgggcaagtgatcaaagagaatgggaagaggaaaaatagagataaagaggatcgaaaacacaacaaatcgtcaggttaccttttgcaaacgcaggaatggcctgctgaagaaagcttacgaactgtcagtcctctgtgatgctgaagttgctctcattgtcttctccagtcgaggccgtctgtatgagtactccaacaacaacataagatcaacaatagacaggtacaagaaggcttgctcagatacttctaacacaaacactgttactgaaatcaatgctcagtattatcaacaagaatcagccaagttgagacagcagattcaaatgttacagaattctaacaggcacctaatgggagattccttgagttccttaactgtgaaagagttaaagcaggtagaaaacaggcttgaaagaggaattactaggatcaggtccaagaagcacgaaatgctactagctgaaatagagtttttgcagaaaagggaaatcgaattggaaaatgaaagtgtttgtctccgaaccaagattgcagaaattgagaggcttcagcaggcaaacatggtgactggacctgagcttaatgctattcaagctttagcttctcgcaatttctttagccccaatgtcattgagcatccatctgcttactcccatctctctgacaagaagattctccatcttgggtagaggagttggagaaagagctcatg

SEQ ID NO: 109726 - protein, 223 aa, Gossypium hirsutum
MGRGKIEIKRIENTTNRQVTFCKRRNGLLKKAYELSVLCDAEVALIVFSSRGRLYEYSNNNIRSTIDRYKKACSDTSNTNTVTEINAQYYQQESAKLRQQIQMLQNSNRHLMGDSLSSLTVKELKQVENRLERGITRIRSKKHEMLLAEIEFLQKREIELENESVCLRTKIAEIERLQQANMVTGPELNAIQALASRNFFSPNVIEHPSAYSHLSDKKILHLG

SEQ ID NO: 109727 - DNA, 693 bp, Oryza sativa (japonica cultivar-group)
  CDS (1)..(693)
atggtgcgggggaggacggagctgaagcggattgagaacccgacgagccggcaggtgaccttctccaagcgccggaatggcctcctcaagaaggcgttcgagctctccgtcctctgcgacgccgaggtcgccctcatcgtcttctccccccgcggccgcctctacgagttcgccagcgcccccagcctacagaaaaccatcgaccgctataaagcatacacaaaggatcatgtcaacaataagacaattcaacaagatatccagcaagtcaaagatgatactttaggcttggccaagaaacttgaagctcttgatgagtccagacggaaaatattgggagaaaatttagaaggattctctattgaagaactgcgtggtctagaaatgaaacttgagaagagcctccacaagataagactaaagaagaccgagcttctggagcagcagatagccaagctgaaagagaaggagcggactttgcttaaagacaacgaaaatttacgcggaaagcatcgcaaccttgaggctgcggcgctggtggctaaccacatgacgacgacgacggcgccggcggcgtggccgcgggacgtgcctatgacgagcagcacagccggcgccatggacgtggagactgatctgtacattggattgcccggcactgagcgctcctccaaccggtcggagacaggttga

SEQ ID NO: 109728 - protein, 230 aa, Oryza sativa (japonica cultivar-group)
MVRGRTELKRIENPTSRQVTFSKRRNGLLKKAFELSVLCDAEVALIVFSPRGRLYEFASAPSLQKTIDRYKAYTKDHVNNKTIQQDIQQVKDDTLGLAKKLEALDESRRKILGENLEGFSIEELRGLEMKLEKSLHKIRLKKTELLEQQIAKLKEKERTLLKDNENLRGKHRNLEAAALVANHMTTTTAPAAWPRDVPMTSSTAGAMDVETDLYIGLPGTERSSNRSETG

SEQ ID NO: 109729 - DNA, 720 bp, Arabidopsis thaliana; identical to SEQ ID NO: 108733
  CDS (1)..(720)

SEQ ID NO: 109730 - protein, 239 aa, Arabidopsis thaliana; identical to SEQ ID NO: 108734

SEQ ID NO: 109731 - DNA, 726 bp, Arabidopsis thaliana
  CDS (1)..(726)
atggaggaaggtgggagtagtcacgacgcagagagtagcaagaaactagggagagggaaaatagagataaagaggatagagaacacaacaaatcgtcaagttactttctgcaaacgacgcaatggtcttctcaagaaagcttatgaactctctgtcttgtgtgatgccgaagttgccctcgtcatcttctccactcgtggccgtctctatgagtacgccaacaacaggtacaagaaagcttgttccgatgccgtcaaccctccttccgtcaccgaagctaatactcagtactatcagcaagaagcctctaagcttcggaggcagattcgagatattcagaattcaaataggcatattgttggggaatcacttggttccttgaacttcaaggaactcaaaaacctagaaggacgtcttgaaaaaggaatcagccgtgtccgctccaaaaagaatgagctgttagtggcagagatagagtatatgcagaagagggaaatggagttgcaacacaataacatgtacctgcgagcaaagatagccgaaggcgccagattgaatccggaccagcaggaatcgagtgtgatacaagggacgacagtttacgaatccggtgtatcttctcatgaccagtcgcagcattataatcggaactatattccggtgaaccttcttgaaccgaatcagcaattctccggccaagaccaacctcctcttcaacttgtgtaa

SEQ ID NO: 109732 - protein, 241 aa, Arabidopsis thaliana
MEEGGSSHDAESSKKLGRGKIEIKRIENTTNRQVTFCKRRNGLLKKAYELSVLCDAEVALVIFSTRGRLYEYANNRYKKACSDAVNPPSVTEANTQYYQQEASKLRRQIRDIQNSNRHIVGESLGSLNFKELKNLEGRLEKGISRVRSKKNELLVAEIEYMQKREMELQHNNMYLRAKIAEGARLNPDQQESSVIQGTTVYESGVSSHDQSQHYNRNYIPVNLLEPNQQFSGQDQPPLQLV

SEQ ID NO: 109733 - DNA, 771 bp, Arabidopsis thaliana
  CDS (1)..(771)
atgctctttccccatgaaagaaagaaagagaaagaaagatcacaagggttttatttggtcaccagattaagaattaggatgggaagaggaaagatagaaataaagaggatagagaactcaacaaatcgacaagtgacgttttgcaaaagaagaaatggacttctgaagaaagcctatgagctttcggtcctttgcgatgcagaagttgcgctcattgttttctccactcgtggccgtctctatgaatacgccaataacaacataagatcaaccattgagaggtacaagaaagcttgttctgatagcaccaacactagcactgtccaagaaatcaatgccgcgtactatcaacaagaatctgctaagctgagacaacagatccaaacgattcaaaactccaacaggaatctgatgggagactctttgagttccttaagtgtcaaggaactaaaacaagttgagaatcgccttgagaaagctatctctaggatcaggtccaagaagcatgagttgcttttagttgaaatcgaaaacgcgcagaaaagggagattgagcttgacaatgagaacatctatctaagaactaaggtagcagaagtggagaggtatcaacaacaccatcatcaaatggttagtggttcagagattaatgcaattgaagctttagcctcacgcaattactttgctcatagcattatgactgctggttctggatctggtaatggaggttcttactctgatcccgacaagaaaattcttcatctcggataa

SEQ ID NO: 109734 - protein, 256 aa, Arabidopsis thaliana
MLFPHERKKEKERSQGFYLVTRLRIRMGRGKIEIKRIENSTNRQVTFCKRRNGLLKKAYELSVLCDAEVALIVFSTRGRLYEYANNNIRSTIERYKKACSDSTNTSTVQEINAAYYQQESAKLRQQIQTIQNSNRNLMGDSLSSLSVKELKQVENRLEKAISRIRSKKHELLLVEIENAQKREIELDNENIYLRTKVAEVERYQQHHHQMVSGSEINAIEALASRNYFAHSIMTAGSGSGNGGSYSDPDKKILHLG

SEQ ID NO: 109735 - DNA, 609 bp, Arabidopsis thaliana; identical to SEQ ID NO: 108735
  CDS (1)..(609)

SEQ ID NO: 109736 - protein, 202 aa, Arabidopsis thaliana; identical to SEQ ID NO: 108736

SEQ ID NO: 109737 - DNA, 705 bp, Arabidopsis thaliana
  CDS (1)..(705)
atggggagagggaagatagttatacgaaggatcgataactctacaagtagacaagtgactttctccaagagaaggagtggtttgcttaagaaagctaaagagttatcgatcctttgtgatgcagaagttggtgttatcatattctctagcaccggaaagctctacgactacgcaagcaattcaagtatgaaaacaatcattgagcggtacaacagagtaaaagaggagcagcatcaacttctgaatcatgcctcagagataaagttttggcaaagagaggttgcaagtttgcagcagcagctccaatatctacaagaatgccacaggaaactagtgggagaggaactttctggaatgaatgctaacgacctacaaaaccttgaagaccagctagtaacaagtctaaaaggtgttcgtctcaaaaaggatcaacttatgacaaatgaaatcagagaacttaatcgtaagggacaaatcatccaaaaagagaatcacgagctacaaaatattgtagatataatgcgtaaggaaaatattaaattgcaaaagaaggttcatggaagaacaaatgcgattgaaggcaattcaagtgtagatccaataagcaatggaaccacaacatatgcaccaccgcaacttcaactcatacaactacaaccagctcctagagaaaaatcaatcagactagggctacaactttcctag

SEQ ID NO: 109738 - protein, 234 aa, Arabidopsis thaliana
MGRGKIVIRRIDNSTSRQVTFSKRRSGLLKKAKELSILCDAEVGVIIFSSTGKLYDYASNSSMKTIIERYNRVKEEQHQLLNHASEIKFWQREVASLQQQLQYLQECHRKLVGEELSGMNANDLQNLEDQLVTSLKGVRLKKDQLMTNEIRELNRKGQIIQKENHELQNIVDIMRKENIKLQKKVHGRTNAIEGNSSVDPISNGTTTYAPPQLQLIQLQPAPREKSIRLGLQLS

SEQ ID NO: 109739 - DNA, 723 bp, Arabidopsis thaliana
  CDS (1)..(723)
atgggaaggggcaagatcgcgattaagaggatcaataactctacgagccgtcaggttacgttctcgaagcgaaggaatggattgttgaagaaagctaaggagcttgcgattctctgcgatgctgaggttggtgtcatcatcttctccagcaccggtaggctctacgatttctccagctccagcatgaaatcggtcatagagagatacagcgatgccaaaggagaaaccagttcagaaaatgatcccgcttcagaaattcagttctggcaaaaggaggctgcgattctaaagcgtcagctacataacttgcaagaaaaccaccggcaaatgatgggggaggagctctctggactaagtgtagaagctttacagaatttggaaaatcagcttgaattgagccttcgtggcgttcgaatgaaaaaggatcaaatgttaatcgaagaaatacaagtacttaaccgagaggggaatctcgttcaccaagagaatttagacctccacaagaaagtaaacctaatgcaccaacagaacatggaactacatgaaaaggtttcagaggtcgagggtgtgaaaatcgcaaacaagaattctcttctcacaaatggtctagacatgagagatacctcgaacgaacatgtccatcttcagctcagccaaccgcagcatgatcatgagacgcattcaaaagctatccaactcaactatttttccttcattgcataa

SEQ ID NO: 109740 - protein, 240 aa, Arabidopsis thaliana
MGRGKIAIKRINNSTSRQVTFSKRRNGLLKKAKELAILCDAEVGVIIFSSTGRLYDFSSSSMKSVIERYSDAKGETSSENDPASEIQFWQKEAAILKRQLHNLQENHRQMMGEELSGLSVEALQNLENQLELSLRGVRMKKDQMLIEEIQVLNREGNLVHQENLDLHKKVNLMHQQNMELHEKVSEVEGVKIANKNSLLTNGLDMRDTSNEHVHLQLSQPQHDHETHSKAIQLNYFSFIA

SEQ ID NO: 109741 - DNA, 651 bp, Arabidopsis thaliana; identical to SEQ ID NO: 108745
  CDS (1)..(651)

SEQ ID NO: 109742 - protein, 216 aa, Arabidopsis thaliana; identical to SEQ ID NO: 108746

SEQ ID NO: 109743 - DNA, 747 bp, Arabidopsis thaliana
  CDS (1)..(747)
atggagggtggtgcgagtaatgaagtagcagagagcagcaagaagatagggagagggaagatagagataaagaggatagagaacactacgaatcgtcaagtcactttctgcaaacgacgcaatggtttactcaagaaagcttatgagctctctgtcttgtgtgacgctgaggttgctcttgtcatcttctccactcgaggccgtctctacgagtacgccaacaacagtgtgagaggaacaatagaaaggtacaagaaagcttgctccgacgccgttaaccctccgaccatcaccgaagctaatactcagtactatcagcaagaggcgtctaaactccggagacagattcgggacattcagaatttgaacagacacattcttggtgaatctcttggttccttgaactttaaggaactcaagaaccttgaaagtaggcttgagaaaggaatcagtcgtgtccgatccaagaagcacgagatgttagttgcagagattgaatacatgcaaaaaagggtaaaagaaatcgagctgcaaaacgataacatgtatctccgctccaagattactgaaagaacaggtctacagcaacaagaatcgagtgtgatacatcaagggacagtttacgagtcgggtgttacttcttctcaccagtcggggcagtataaccggaattatattgcggttaaccttcttgaaccgaatcagaattcctccaaccaagaccaaccacctctgcaacttgtttga

SEQ ID NO: 109744 - protein, 248 aa, Arabidopsis thaliana
MEGGASNEVAESSKKIGRGKIEIKRIENTTNRQVTFCKRRNGLLKKAYELSVLCDAEVALVIFSTRGRLYEYANNSVRGTIERYKKACSDAVNPPTITEANTQYYQQEASKLRRQIRDIQNLNRHILGESLGSLNFKELKNLESRLEKGISRVRSKKHEMLVAEIEYMQKRVKEIELQNDNMYLRSKITERTGLQQQESSVIHQGTVYESGVTSSHQSGQYNRNYIAVNLLEPNQNSSNQDQPPLQLV

SEQ ID NO: 109745 - DNA, 753 bp, Arabidopsis thaliana
  CDS (1)..(753)
atgggaagagggagagtagaattgaagaggatagagaacaagatcaataggcaagtgacgtttgcaaagagaaggaatggtcttttgaagaaagcatacgagctttcagttctatgtgatgcagaagttgctctcatcatcttctcaaatagaggaaagctgtacgagttttgcagtagttcgagcatgcttcggacactggagaggtaccaaaagtgtaactatggagcaccagaacccaatgtgccttcaagagaggccttagcagaacttagtagccagcaggagtatctcaagcttaaggagcgttatgacgccttacagagaacccaaaggaatctgttgggagaagatcttggacctctaagtacaaaggagcttgagtcacttgagagacagcttgattcttccttgaagcagatcagagctctcaggacacagtttatgcttgaccagctcaacgatcttcagagtaaggaacgcatgctgactgagacaaataaaactctaagactaaggttagctgatgggtatcagatgccactccagctgaaccctaaccaagaagaggttgatcactacggtcgtcatcatcatcaacaacaacaacactcccaagctttcttccagcctttggaatgtgaacccattcttcagatcgggtatcaggggcaacaagatggaatgggagcaggaccaagtgtgaataattacatgttgggttggttaccttatgacaccaactctatttga

SEQ ID NO: 109746 - protein, 250 aa, Arabidopsis thaliana
MGRGRVELKRIENKINRQVTFAKRRNGLLKKAYELSVLCDAEVALIIFSNRGKLYEFCSSSSMLRTLERYQKCNYGAPEPNVPSREALAELSSQQEYLKLKERYDALQRTQRNLLGEDLGPLSTKELESLERQLDSSLKQIRALRTQFMLDQLNDLQSKERMLTETNKTLRLRLADGYQMPLQLNPNQEEVDHYGRHHHQQQQHSQAFFQPLECEPILQIGYQGQQDGMGAGPSVNNYMLGWLPYDTNSI

SEQ ID NO: 109747 - DNA, 663 bp, Ipomoea batatas; identical to SEQ ID NO: 108753
  CDS (1)..(663)

SEQ ID NO: 109748 - protein, 220 aa, Ipomoea batatas; identical to SEQ ID NO: 108754

SEQ ID NO: 109749 - DNA, 732 bp, Capsicum annuum; identical to SEQ ID NO: 108755
  CDS (1)..(732)

SEQ ID NO: 109750 - protein, 243 aa, Capsicum annuum; identical to SEQ ID NO: 108756

SEQ ID NO: 109751 - DNA, 729 bp, Elaeis guineensis var; identical to SEQ ID NO: 108757
  CDS (1)..(729)

SEQ ID NO: 109752 - protein, 242 aa, Elaeis guineensis var; identical to SEQ ID NO: 108758

SEQ ID NO: 109753 - DNA, 726 bp, Crocus sativus
  CDS (1)..(726)
atgggtagaggaagagttgagttgaagaggatcgagaacaagatcaacagacaagtgaccttctccaagaggaggaatgggcttctcaagaaggcctacgagctctccgttctctgtgatgctgaggtggcactcattatcttctccagccgaggcaaactctacgagttcggtagcgctggtacacctaaaacacttgagcgataccaacgctgttgttacacatcccaggattccaccattgctgatcgagaaacacagagctggtaccaggaagtgtctaagttgaaggcaaaatttgagtctctccagcgctcccaaaggcatttgcttggagaagacctcggaccattaagcgtgaaagaattgcaacaactagaacgccaacttgaatctgctctgtcacaagccaggcagagaaagacacagattatgctggaccaaatggaagaacttcgcaagaaggagcgtcatcttggagaaattaataagcagcttaaaaataagcttgagacagaaggcagcacatttagagcctttcaaggatcctgggaatctgatggtgttgttggtagtaatgcatttcctatccatccttctcaatccagcgccatggactgtgagcccactctccagattggatatcatcaccttgttcaacctgaaactgcacttccaaggaattcagctggggagaacaatttcatgctgggttgggtgctttga

SEQ ID NO: 109754 - protein, 241 aa, Crocus sativus
MGRGRVELKRIENKINRQVTFSKRRNGLLKKAYELSVLCDAEVALIIFSSRGKLYEFGSAGTPKTLERYQRCCYTSQDSTIADRETQSWYQEVSKLKAKFESLQRSQRHLLGEDLGPLSVKELQQLERQLESALSQARQRKTQIMLDQMEELRKKERHLGEINKQLKNKLETEGSTFRAFQGSWESDGVVGSNAFPIHPSQSSAMDCEPTLQIGYHHLVQPETALPRNSAGENNFMLGWVL

SEQ ID NO: 109755 - DNA, 726 bp, Crocus sativus; identical to SEQ ID NO: 108759
  CDS (1)..(726)

SEQ ID NO: 109756 - protein, 241 aa, Crocus sativus; identical to SEQ ID NO: 108760

SEQ ID NO: 109757 - DNA, 657 bp, Vitis vinifera
  CDS (1)..(657)
atggtgagaggaaagactcaaatgaggcgtatagaaaacgccacaagtcggcaagtcaccttttctaagcggaggaatggcctcttcaagaaggccttcgagctctccgtgctctgtgatgctgaggttgcgctcatcattttctctccaagagggaagctctatgaattttccagttccagtatgcaggagacaatagaacgatatcaacggcacacaaaagatgttcataccaacaactacaagactaccgaacataacatgcagcatttgaagcatgaagcagcaaatatggcaaagaagatagagcttcttgaaatttccaaacggaaactcttaggagaaggtttggggtcatgctccattgaagaactacaacagatagaacaacagttggagcgcagcgtaagcagcatccgagcaagaaagaatcaggttttcaaggaacaaatcgagcaactgaaagaaaaggagaaagccctagcagctgaaaatgcaatgctgtgtgaaaagtgtggggtgcaaccgtatcaagctccgaatcaagagaatgaaactttgcctagtgcagagagaagccaaaattcagatgtctccactgacttgttcattggactgcctgaggggagagccaagcgcctcctattgggaaactga

SEQ ID NO: 109758 - protein, 218 aa, Vitis vinifera
MVRGKTQMRRIENATSRQVTFSKRRNGLFKKAFELSVLCDAEVALIIFSPRGKLYEFSSSSMQETIERYQRHTKDVHTNNYKTTEHNMQHLKHEAANMAKKIELLEISKRKLLGEGLGSCSIEELQQIEQQLERSVSSIRARKNQVFKEQIEQLKEKEKALAAENAMLCEKCGVQPYQAPNQENETLPSAERSQNSDVSTDLFIGLPEGRAKRLLLGN

SEQ ID NO: 109759 - DNA, 750 bp, Beta vulgaris; identical to SEQ ID NO: 108763
  CDS (1)..(750)

SEQ ID NO: 109760 - protein, 249 aa, Beta vulgaris; identical to SEQ ID NO: 108764

SEQ ID NO: 109761 - DNA, 720 bp, Pyrus x bretschneideri
  CDS (1)..(720)
atgggaagagggagggtggaattgaagaggatagagaacaagatcaacagacaggtgacctttgcaaagagaaggaacggactattgaagaaagcctacgagctttccgttctttgcgatgccgaggttgctctcatcatcttctccaatagaggaaagctgtacgagttttgcagtagttcaagcatgctcaaaactcttgagaggtaccagaagtgcaactatggagcaccggagacaaatgtatcaacaagggaggccttggagttgagtagccagcaggagtatttgaagctcaaggcacgtttcgaagccctacaacgaaaccaaaggaatctccttggagaagatcttggccctctaagcagcaaagatcttgaatcacttgaaaggcagctggatatgtcgctaaagcagatcagatccacacggacccaatgtatgctggatcagctcacagatcttcagcgaaaggagcacatgctaaacgaagcaaataagaccctgaaagaaaggttgttcgagggataccatgcactccaactgaatgcaaatgccgatgagtacggccgccaacaagctcaggcggcccagggtgatgtcttcttccatcccttagactgcgagcccactttacaaattggatatcagaatgatccaatatcggtggtgacagcaggtccaagcttgagtaattacatggggggatggttgccatga

SEQ ID NO: 109762 - protein, 239 aa, Pyrus x bretschneideri
MGRGRVELKRIENKINRQVTFAKRRNGLLKKAYELSVLCDAEVALIIFSNRGKLYEFCSSSSMLKTLERYQKCNYGAPETNVSTREALELSSQQEYLKLKARFEALQRNQRNLLGEDLGPLSSKDLESLERQLDMSLKQIRSTRTQCMLDQLTDLQRKEHMLNEANKTLKERLFEGYHALQLNANADEYGRQQAQAAQGDVFFHPLDCEPTLQIGYQNDPISVVTAGPSLSNYMGGWLP

SEQ ID NO: 109763 - DNA, 720 bp, Asparagus virgatus; identical to SEQ ID NO: 108765
  CDS (1)..(720)

SEQ ID NO: 109764 - protein, 239 aa, Asparagus virgatus; identical to SEQ ID NO: 108766

SEQ ID NO: 109765 - DNA, 732 bp, Asparagus virgatus; identical to SEQ ID NO: 108767
  CDS (1)..(732)

SEQ ID NO: 109766 - protein, 243 aa, Asparagus virgatus; identical to SEQ ID NO: 108768

SEQ ID NO: 109767 - DNA, 732 bp, Asparagus officinalis; identical to SEQ ID NO: 108769
  CDS (1)..(732)

SEQ ID NO: 109768 - protein, 243 aa, Asparagus officinalis; identical to SEQ ID NO: 108770

SEQ ID NO: 109769 - DNA, 696 bp, Asparagus officinalis; identical to SEQ ID NO: 108771
  CDS (1)..(696)

SEQ ID NO: 109770 - protein, 231 aa, Asparagus officinalis; identical to SEQ ID NO: 108772

SEQ ID NO: 109771 - DNA, 630 bp, Glycine max; identical to SEQ ID NO: 108773
  CDS (1)..(630)

SEQ ID NO: 109772 - protein, 209 aa, Glycine max; identical to SEQ ID NO: 108774

SEQ ID NO: 109773 - DNA, 717 bp, Euptelea pleiosperma
  CDS (1)..(717)
atggggagaggtagggttcagttgaagcggatcgagaacaaaatcaatcgccaagtgacgttctcgaagcggaggtccggtttgctgaagaaagctcatgagatctcagttctctgcgacgctgaggtagctttgatcgtcttctccactaaaggaaagctcttcgagtactccaccgattccggcatggatatgatccttgatcgatacgagagatactcttctgcagaacgagagcttgttgcacatgatcctgaatcacagggaagttggtctctggaatatgccaaacttaaggctaagcttgaggttttacagagaaaccaaaggcattttatgggagaaaacgtggattctttgagctccaaagagctccaaaatttagagcaacagcttgattctgctttgaaacatataagaacaagaaagaaccacctcatgtatgaatccattgctgagcttcagagaaaggagaagacattgcaggagcagaataaccagctagagaagaagctgaaggagaaggagctaacccagcaggcccattgggagcaccaaagctcaacatccttcctactatcacagacacttcccaccctcaacattggtggcacataccaggtgagaggctccggaagcgaagaggaagttgctcaacctcacgctcgaaccaacactctcatgccaccttggatgcttcgccacgtgaacgaatag

SEQ ID NO: 109774 - protein, 238 aa, Euptelea pleiosperma
MGRGRVQLKRIENKINRQVTFSKRRSGLLKKAHEISVLCDAEVALIVFSTKGKLFEYSTDSGMDMILDRYERYSSAERELVAHDPESQGSWSLEYAKLKAKLEVLQRNQRHFMGENVDSLSSKELQNLEQQLDSALKHIRTRKNHLMYESIAELQRKEKTLQEQNNQLEKKLKEKELTQQAHWEHQSSTSFLLSQTLPTLNIGGTYQVRGSGSEEEVAQPHARTNTLMPPWMLRHVNE

SEQ ID NO: 109775 - DNA, 741 bp, Gossypium hirsutum; identical to SEQ ID NO: 108779
  CDS (1)..(741)

SEQ ID NO: 109776 - protein, 246 aa, Gossypium hirsutum; identical to SEQ ID NO: 108780

SEQ ID NO: 109777 - DNA, 675 bp, Gossypium hirsutum; identical to SEQ ID NO: 108781
  CDS (1)..(675)

SEQ ID NO: 109778 - protein, 224 aa, Gossypium hirsutum; identical to SEQ ID NO: 108782

SEQ ID NO: 109779 - DNA, 705 bp, Gossypium hirsutum; identical to SEQ ID NO: 108783
  CDS (1)..(705)

SEQ ID NO: 109780 - protein, 234 aa, Gossypium hirsutum; identical to SEQ ID NO: 108784

SEQ ID NO: 109781 - DNA, 681 bp, Vitis labrusca x Vitis vinifera
  CDS (1)..(681)
atgggaagggggaagatcgagatcaagcggatcgaaaacaccactaaccggcaggttactttctgcaagcgccgcaacggcttactcaagaaggcctatgaattatctgtcctatgtgatgcagaggtagccctcatcgtcttctccagccgcggccgcctctacgaatatgccaacaacagtgttaaatcaacaattgagaggtataagaaggcaagcgcagattcctccaacaccgggtccgtttctgaagccaatgctcagttctaccagcaagaatcctccaaactgcatcagcagattcgtaatttgcagaattcgaacaggcacatgctgggtgagtctctgggctccttgaatttcaaggacctcaagagcctggagattcggttagagaaaggcataagtagaatcagatccaaaaagaatgagctgttgtttgctgagatcgagtatatgcaaaagagggaaatagacttgcataatgataaccagtatctccgagcaaggatagccgagaatgagagaaacgaacagcagatgagcttgatgccaggaggagctaactatgaactcatgccatctcagcagttcgactctagaaactatttccaactaaatggactgcaaccaaatcaatcatactctcgccaagaccaaccagctcttcaattagtttaa

SEQ ID NO: 109782 - protein, 226 aa, Vitis labrusca x Vitis vinifera
MGRGKIEIKRIENTTNRQVTFCKRRNGLLKKAYELSVLCDAEVALIVFSSRGRLYEYANNSVKSTIERYKKASADSSNTGSVSEANAQFYQQESSKLHQQIRNLQNSNRHMLGESLGSLNFKDLKSLEIRLEKGISRIRSKKNELLFAEIEYMQKREIDLHNDNQYLRARIAENERNEQQMSLMPGGANYELMPSQQFDSRNYFQLNGLQPNQSYSRQDQPALQLV

SEQ ID NO: 109783 - DNA, 672 bp, Persea americana; identical to SEQ ID NO: 108787
  CDS (1)..(672)

SEQ ID NO: 109784 - protein, 223 aa, Persea americana; identical to SEQ ID NO: 108788

SEQ ID NO: 109785 - DNA, 669 bp, Papaver somniferum
  CDS (1)..(669)
atgggtagaggaaagattgagattaagagaattgagaatgcaaccaacagacaagttacttactcaaaaagaagatctgggattctgaaaaaagctaaagaacttactgttctttgtgatgctgaagtttctcttatcatgttttctagtactggaaaaatgactgaatacttaagcccttctcttaatggaaatacaaagagggtgtatgataggtatcaacaaatttcaggcagtagtctctggaattctcactatgagagtctgcaaaatgccttgaacaagcagaaggaaattaataaaaggcttaggcgagaaataaggcagaggatgggagaagatctagatgaactgaccattgatgaattgcgcaatcttgaggcaaatttggaagcttcagttaaagtagtccgtgataggaagtaccatgtgatcattactcagacggaaactaccaggaagaagctaaggaaccacactgagcaacaccatggtctcctacgtgaatttgaaccaatagatgaggatccccgatttatattagccgtagaggaggaagattatgaatccgcaattgaattggcgaatggtcagaacatatttacgttccgcctgcaaccaagccagcccaatcctcacaatggagggggatatcttcgccttgcttga

SEQ ID NO: 109786 - protein, 222 aa, Papaver somniferum
MGRGKIEIKRIENATNRQVTYSKRRSGILKKAKELTVLCDAEVSLIMFSSTGKMTEYLSPSLNGNTKRVYDRYQQISGSSLWNSHYESLQNALNKQKEINKRLRREIRQRMGEDLDELTIDELRNLEANLEASVKVVRDRKYHVIITQTETTRKKLRNHTEQHHGLLREFEPIDEDPRFILAVEEEDYESAIELANGQNIFTFRLQPSQPNPHNGGGYLRLA

SEQ ID NO: 109787 - DNA, 723 bp, Prunus persica
  CDS (1)..(723)
atggggagggggagagtggagctgaagaggattgagaacaagatcaacaggcaggtgacctttgcgaagcgaaggaacgggcttttgaagaaagcctacgagctttccgttctttgcgaggctgaggttgctctcatcatcttctccaatagaggaaagctgtacgagttttgcagtagctcaagcatgctcaaaactcttgagaggtaccagaagtgcaactatggagcaccagagacaaatgtatctgcaagggaggccttggaattgagtagccagcaggagtatttgaagctcaaggcacgttatgaagccctacaacgaaaccaaaggaatcttcttggagaagatcttggccctttaagcagcaaagagcttgaatcacttgaaaggcagctggatatgtctctgaagcagatcagatcgacacggacccaatgcatgctggatcagctcacagatcttcagcgaaaggagcacatgctaaatgaagcaaataagaccctgaaacaaaggttgtttgagggataccatgtaaattcactccaaatgaatccaaatgctgacgagtacggccggcaacaaactcaagctcatggcgatggcttcttccatcccttagactgcgagccgacgttacagattggataccagaacgatccaatatcagtggtcacagcaggtccaagcgtgagtaattacatggcaggatggttgccatga

SEQ ID NO: 109788 - protein, 240 aa, Prunus persica
MGRGRVELKRIENKINRQVTFAKRRNGLLKKAYELSVLCEAEVALIIFSNRGKLYEFCSSSSMLKTLERYQKCNYGAPETNVSAREALELSSQQEYLKLKARYEALQRNQRNLLGEDLGPLSSKELESLERQLDMSLKQIRSTRTQCMLDQLTDLQRKEHMLNEANKTLKQRLFEGYHVNSLQMNPNADEYGRQQTQAHGDGFFHPLDCEPTLQIGYQNDPISVVTAGPSVSNYMAGWLP

SEQ ID NO: 109789 - DNA, 738 bp, Prunus persica; identical to SEQ ID NO: 108793
  CDS (1)..(738)

SEQ ID NO: 109790 - protein, 245 aa, Prunus persica; identical to SEQ ID NO: 108794

SEQ ID NO: 109791 - DNA, 669 bp, Triticum aestivum; identical to SEQ ID NO: 108795
  CDS (1)..(669)

SEQ ID NO: 109792 - protein, 222 aa, Triticum aestivum; identical to SEQ ID NO: 108796

SEQ ID NO: 109793 - DNA, 642 bp, Brassica rapa subsp
  CDS (1)..(642)
atggtgaggggcaaaactcagatgaagcgaatagagaatgcaacaagcagacaagtcactttctctaaacgaaggaatggtttgttgaagaaagcttttgagctctcagtgctttgtgatgctgaagtttctctgatcatcttctctcctaagggaaaactttatgagttcgccagctccaatatgcaagataccgtagatcgttatctgaggcacaccaaggatcgagtcagcagcaaaccggtttcggaagaaaatatgcagcatttcaaacatgaagcagcaaacatgatgaagaaaattgaacaacttgaagcgtccaaacgtaaactcttgggagaaggcattggatcatgctcgattgaggagctgcagcaaattgagcaacaactcgagaaaagtgtcaaatgtgttcgagcaagaaagactcaagtgtttaaggaacaaattgtgcagctcaagcagaaggagaaagctctagctgcagaaaacgagaagctcgctgaaaagtggggatctcatgaaatcgaagtttggtcgaataagaaccaagaaagtggacgaggtgacgaggacagtagcccaagttctgaagtagagacacaattgttcattgggttaccttgttcttcaagaaagtga

SEQ ID NO: 109794 - protein, 213 aa, Brassica rapa subsp
MVRGKTQMKRIENATSRQVTFSKRRNGLLKKAFELSVLCDAEVSLIIFSPKGKLYEFASSNMQDTVDRYLRHTKDRVSSKPVSEENMQHFKHEAANMMKKIEQLEASKRKLLGEGIGSCSIEELQQIEQQLEKSVKCVRARKTQVFKEQIVQLKQKEKALAAENEKLAEKWGSHEIEVWSNKNQESGRGDEDSSPSSEVETQLFIGLPCSSRK

SEQ ID NO: 109795 - DNA, 756 bp, Vitis vinifera; identical to SEQ ID NO: 108797
  CDS (1)..(756)
  misc_feature (228)..(228): y is t or c
  misc_feature (297)..(297): w is a or t
  misc_feature (607)..(607): s is g or c
  misc_feature (632)..(632): r is g or a

SEQ ID NO: 109796 - protein, 251 aa, Vitis vinifera; identical to SEQ ID NO: 108798
  misc_feature (211)..(211): The Xaa at location 211 stands for Glu, or Gly.

SEQ ID NO: 109797 - DNA, 732 bp, Vitis vinifera; identical to SEQ ID NO: 108799
  CDS (1)..(732)

SEQ ID NO: 109798 - protein, 243 aa, Vitis vinifera; identical to SEQ ID NO: 108800

SEQ ID NO: 109799 - DNA, 705 bp, Dendrobium nobile; identical to SEQ ID NO: 108801
  CDS (1)..(705)

SEQ ID NO: 109800 - protein, 234 aa, Dendrobium nobile; identical to SEQ ID NO: 108802

SEQ ID NO: 109801 - DNA, 678 bp, Triticum aestivum; identical to SEQ ID NO: 108807
  CDS (1)..(678)

SEQ ID NO: 109802 - protein, 225 aa, Triticum aestivum; identical to SEQ ID NO: 108808

SEQ ID NO: 109803 - DNA, 735 bp, Trochodendron aralioides
  CDS (1)..(735)
atggggagaggtagggttgagttgaagaggatcgaaaacaagatcaacaggcaagtgaccttcgctaaacgaagaaatggccttttgaagaaagcttatgagctttctgttctttgcgatgctgaggttgctttgatcgtcttctccactagaggaaaactgtacgagttttgcagcagttctagcatgttcaaaacacttgagaggtatcagaaatgcaactatacagcaccagagacagatatatcggcaagggagaccctggagcagagtagctaccaggagtatttgaagcttaaagcacgctacgaggcgctacaaagatcacaaaggaaccttcttggggaggatcttgggccgctaagcggcaaggagcttgagtcacttgaaaggcagcttgatgtgtcattgaagcagatcagatctatacggacccagtgcatgctcgatcagctcactgatcttcaaagaacggaacaaatgctcagcgaatctaacaagaacctggcaagaaggttggaggaaggaagccaagcaaatgcgcaccagtgggatccaaatgcacacggtatgaggtatggtcaacagccggctcatgctcatccacagggcgatgggttctttcatcccttagagtgtgagcccacattacaaatcgggtaccagcccgaccaaatagctgttatggcacctgggccgagtgtgaataattacatgccaggatggttagcatga

SEQ ID NO: 109804 - protein, 244 aa, Trochodendron aralioides
MGRGRVELKRIENKINRQVTFAKRRNGLLKKAYELSVLCDAEVALIVFSTRGKLYEFCSSSSMFKTLERYQKCNYTAPETDISARETLEQSSYQEYLKLKARYEALQRSQRNLLGEDLGPLSGKELESLERQLDVSLKQIRSIRTQCMLDQLTDLQRTEQMLSESNKNLARRLEEGSQANAHQWDPNAHGMRYGQQPAHAHPQGDGFFHPLECEPTLQIGYQPDQIAVMAPGPSVNNYMPGWLA

SEQ ID NO: 109805 - DNA, 669 bp, Prunus persica; identical to SEQ ID NO: 108811
  CDS (1)..(669)

SEQ ID NO: 109806 - protein, 222 aa, Prunus persica; identical to SEQ ID NO: 108812

SEQ ID NO: 109807 - DNA, 696 bp, Sorghum bicolor; identical to SEQ ID NO: 108813
  CDS (1)..(696)

SEQ ID NO: 109808 - protein, 231 aa, Sorghum bicolor; identical to SEQ ID NO: 108814

SEQ ID NO: 109809 - DNA, 786 bp, Pinus radiata; identical to SEQ ID NO: 108815
  CDS (1)..(786)

SEQ ID NO: 109810 - protein, 261 aa, Pinus radiata; identical to SEQ ID NO: 108816

SEQ ID NO: 109811 - DNA, 780 bp, Zea mays
  CDS (1)..(780)
atgctcaacatgatgactgatctgagctgcgggccgtcgtccaaggtcaaggagcaggtggcggcggcgccgacgggctccggcgacaggcaggggcaggggagaggcaagatcgagatcaagcgcatcgagaacacgacgaaccggcaggtgaccttctgcaagcgccgcaacggcctgctcaagaaggcgtacgagctctcggtgctctgcgacgccgaggtcgcgctcgtcgtcttctccagccgcggccgcctctacgagtacgccaacaacagtgtgaagtccaccattgagaggtacaagaaggccaacagtgactcctccaactctggcacagttgcagaagtcaatgcccagtactaccagcaggagtcctccaagctgcgacagatgatccacagcttgcaaaacgcaaacactaggaacatagtgggagattccatccacaccatgggcctcagggatcttaaacaaatggagggcaagctggagaaagccataatcaagattagagctagaaagaatgagctgctatacgctgaagttgactatatgcaaaaaagggagatggatctgcagactgacaacatgtacctgaggagcaagatcgctgagagtaatgaaacggggcagccggcgatgcacatgacgatgggagcgccgccgacgagcgagtacgaccacatggcccctttcgactcgagaaactttctgcaagtgagcatgcctcagcactactcccatcagctgcaacctacaaccctccagctcggatga

SEQ ID NO: 109812 - protein, 259 aa, Zea mays
MLNMMTDLSCGPSSKVKEQVAAAPTGSGDRQGQGRGKIEIKRIENTTNRQVTFCKRRNGLLKKAYELSVLCDAEVALVVFSSRGRLYEYANNSVKSTIERYKKANSDSSNSGTVAEVNAQYYQQESSKLRQMIHSLQNANTRNIVGDSIHTMGLRDLKQMEGKLEKAIIKIRARKNELLYAEVDYMQKREMDLQTDNMYLRSKIAESNETGQPAMHMTMGAPPTSEYDHMAPFDSRNFLQVSMPQHYSHQLQPTTLQLG

SEQ ID NO: 109813 - DNA, 666 bp, Pinus radiata; identical to SEQ ID NO: 108817
  CDS (1)..(666)

SEQ ID NO: 109814 - protein, 221 aa, Pinus radiata; identical to SEQ ID NO: 108818

SEQ ID NO: 109815 - DNA, 672 bp, Pinus radiata; identical to SEQ ID NO: 108821
  CDS (1)..(672)

SEQ ID NO: 109816 - protein, 223 aa, Pinus radiata; identical to SEQ ID NO: 108822

SEQ ID NO: 109817 - DNA, 705 bp, Arabidopsis thaliana
  CDS (1)..(705)
atggggagagggaagatagttatacgaaggatcgataactctacaagtagacaagtgactttctccaagagaaggagtggtttgcttaagaaggctaaagagttatcgatcctttgtgatgcagaagttggtgttatcatattctctagcaccggaaagctctacgactacgcaagcaattcaagtatgaaaacaatcattgagcggtacaacagagtaaaagaggagcagcatcaacttctgaatcatgcctcagagataaagttttggcaaagagaggttgcaagtttgcagcagcagctccaacatctacaagaatgccacaggaaactagtgggagaggaactttctggaatgaatgctaacgacctacaaaatcttgaagaccagctagtaacaagtctaaaaggtgttcgtctcaaaaaggatcaacttatgacaaatgaaatcagagaacttaatcgtaagggacaaatcatccaaaaagagaatcacgagctacaaaatattgtagatataatgcgtaaggaaaatattaaattgcaaaagaaggttcatggaagaacaaatgtgattgaaggcaattcaagtgtagatccaataagcaatggaaccacaacatatgcaccaccgcaacttcaactcatacaactacaaccagctcctagagaaaaatcaatcagactagggctacaactttcctag

SEQ ID NO: 109818 - protein, 234 aa, Arabidopsis thaliana
MGRGKIVIRRIDNSTSRQVTFSKRRSGLLKKAKELSILCDAEVGVIIFSSTGKLYDYASNSSMKTIIERYNRVKEEQHQLLNHASEIKFWQREVASLQQQLQHLQECHRKLVGEELSGMNANDLQNLEDQLVTSLKGVRLKKDQLMTNEIRELNRKGQIIQKENHELQNIVDIMRKENIKLQKKVHGRTNVIEGNSSVDPISNGTTTYAPPQLQLIQLQPAPREKSIRLGLQLS

SEQ ID NO: 109819 - DNA, 789 bp, Cucumis sativus
  CDS (1)..(789)
atgtccaagcattatcagtcaccactcacaagaatgattaaggaagaaggaaagggtaagttgcaaataaaggggatgttccagaatcaagaagagaagatgtcagactcgcctcagaggaagatgggaagaggaaagattgagattaagaggattgaaaatacaacaaatcgtcaagtcactttctgtaagagaagaaatgggttgcttaaaaaagcttatgaactttctgttctttgtgatgctgaagttgctctcatcgttttctcaagccgtggccgcctctatgaatatgctaacaacagtgtgaaggcaacaattgatagatataagaaagcatcctcagattcctccaacactggatctacttctgaagctaacactcagttttatcaacaagaagctgccaaactccgagttcagattggtaacttacagaactcaaacaggaacatgctaggcgagtctctaagttctctgactgcaaaagatctgaaaggcctggagaccaaacttgagaaaggaattagtagaattaggtccaaaaagaatgaactcctgtttgctgagattgagtatatgcgaaaaagggaaattgatttgcacaacaacaatcagatgcttcgggcaaagatagctgagagtgaaagaaatgtgaacatgatgggaggagaatttgagctgatgcaatctcatccgtacgatccaagagacttcttccaagtgaacggcttacagcataatcatcaatatccacgccaagacaacatggctcttcaattagtataa

SEQ ID NO: 109820 - protein, 262 aa, Cucumis sativus
MSKHYQSPLTRMIKEEGKGKLQIKGMFQNQEEKMSDSPQRKMGRGKIEIKRIENTTNRQVTFCKRRNGLLKKAYELSVLCDAEVALIVFSSRGRLYEYANNSVKATIDRYKKASSDSSNTGSTSEANTQFYQQEAAKLRVQIGNLQNSNRNMLGESLSSLTAKDLKGLETKLEKGISRIRSKKNELLFAEIEYMRKREIDLHNNNQMLRAKIAESERNVNMMGGEFELMQSHPYDPRDFFQVNGLQHNHQYPRQDNMALQLV

SEQ ID NO: 109821 - DNA, 690 bp, Cucumis sativus; identical to SEQ ID NO: 108829
  CDS (1)..(690)

SEQ ID NO: 109822 - protein, 229 aa, Cucumis sativus; identical to SEQ ID NO: 108830

SEQ ID NO: 109823 - DNA, 726 bp, Populus trichocarpa; identical to SEQ ID NO: 108831
  CDS (1)..(726)

SEQ ID NO: 109824 - protein, 241 aa, Populus trichocarpa; identical to SEQ ID NO: 108832

SEQ ID NO: 109825 - DNA, 717 bp, Populus trichocarpa; identical to SEQ ID NO: 108833
  CDS (1)..(717)

SEQ ID NO: 109826 - protein, 238 aa, Populus trichocarpa; identical to SEQ ID NO: 108834

SEQ ID NO: 109827 - DNA, 687 bp, Papaver nudicaule; identical to SEQ ID NO: 108837
  CDS (1)..(687)

SEQ ID NO: 109828 - protein, 228 aa, Papaver nudicaule; identical to SEQ ID NO: 108838

SEQ ID NO: 109829 - DNA, 654 bp, Pimpinella brachycarpa
  CDS (1)..(654)
atggtgaggggaaagacccagatgaggcgtatagaaaacgccacaagcaggcaagtgactttctccaagagaagaaatgggttgttaaagaaagcctttgaactttccgtgctttgtgatgctgaggttgctttgattatcttctcccctagaggcaagctccatgaatttgccagctcaagcatgcatgagacaatcgaacgataccggaagcacactaaggatgttcaaagtaacaacacgcctgtggtgcagaatatgcagcatctaaaacatgaaacagcaagtttggcaaagaagatagagcttcttgaagtttcaaagaggaaactattgggagaaggtttaggaacgtgttctattaatgaattacaacagatagaacagcagctggagaagagtgtatgcactgttcgagcaagaaagatgcaggtcttcaaagagcagatcgaacaattaaaggaaaaggagaagactcttgcagcagataatgcaatcctacttgccaagtatgatgttcaaccgcgacaagaatcaccagaagatggaggaaacttaacatccaccacagaaaacagcgagaattcagatgtcgagactgaactgttcattggacctccagaaaagagattcaagcgcattatggagaaatga

SEQ ID NO: 109830 - protein, 217 aa, Pimpinella brachycarpa
MVRGKTQMRRIENATSRQVTFSKRRNGLLKKAFELSVLCDAEVALIIFSPRGKLHEFASSSMHETIERYRKHTKDVQSNNTPVVQNMQHLKHETASLAKKIELLEVSKRKLLGEGLGTCSINELQQIEQQLEKSVCTVRARKMQVFKEQIEQLKEKEKTLAADNAILLAKYDVQPRQESPEDGGNLTSTTENSENSDVETELFIGPPEKRFKRIMEK

SEQ ID NO: 109831 - DNA, 741 bp, Malus domestica; identical to SEQ ID NO: 108841
  CDS (1)..(741)

SEQ ID NO: 109832 - protein, 246 aa, Malus domestica; identical to SEQ ID NO: 108842

SEQ ID NO: 109833 - DNA, 747 bp, Malus domestica; identical to SEQ ID NO: 108845
  CDS (1)..(747)

SEQ ID NO: 109834 - protein, 248 aa, Malus domestica; identical to SEQ ID NO: 108846

SEQ ID NO: 109835 - DNA, 624 bp, Malus domestica; identical to SEQ ID NO: 108847
  CDS (1)..(624)

SEQ ID NO: 109836 - protein, 207 aa, Malus domestica; identical to SEQ ID NO: 108848

SEQ ID NO: 109837 - DNA, 732 bp, Malus domestica; identical to SEQ ID NO: 108849
  CDS (1)..(732)

SEQ ID NO: 109838 - protein, 243 aa, Malus domestica; identical to SEQ ID NO: 108850

SEQ ID NO: 109839 - DNA, 729 bp, Pinus resinosa; identical to SEQ ID NO: 108851
  CDS (1)..(729)

SEQ ID NO: 109840 - protein, 242 aa, Pinus resinosa; identical to SEQ ID NO: 108852

SEQ ID NO: 109841 - DNA, 684 bp, Oryza sativa; identical to SEQ ID NO: 108855
  CDS (1)..(684)

SEQ ID NO: 109842 - protein, 227 aa, Oryza sativa; identical to SEQ ID NO: 108856

SEQ ID NO: 109843 - DNA, 774 bp, Citrus unshiu; identical to SEQ ID NO: 108859
  CDS (1)..(774)

SEQ ID NO: 109844 - protein, 257 aa, Citrus unshiu; identical to SEQ ID NO: 108860

SEQ ID NO: 109845 - DNA, 738 bp, Citrus unshiu; identical to SEQ ID NO: 108863
  CDS (1)..(738)

SEQ ID NO: 109846 - protein, 245 aa, Citrus unshiu; identical to SEQ ID NO: 108864

SEQ ID NO: 109847 - DNA, 726 bp, Brassica rapa subsp
  CDS (1)..(726)
atggcgagagaaaagattcagatcaggaaaatcgacaacgcgacggcgagacaagtaacgttctcaaaacgaagaagaggtcttttcaaaaaagctgaagagctctccgttctctgcgacgctgatgttgctctcatcatcttctcttccactggaaagctctttgagttttgtagctccagcatgagggaagtgttagagaggcataacttgcagtcaaagaacttggagaagcttgatcaaccatctcttgagttacagctagtcgagaacagcgatcacgccctgttgagcaaagagattgcggaaaagagccaccgattaaggcaaatgagaggagaggaacttcaaggacttaacattgaagaacttcaacagctggaaaaggcccttgaatccggtttgactcgcgtaattgaaacaaagagtgaaaagattatgaatgagatcagttaccttcaaagaaagggaatgcaactgatggatgagaacaagcggctaaggcagcaagggacacagttaacagaagagaacgagcgactaggtcagcagatatacaataatgtgcatgaaagatacggtggtggtgaatcagagaacattgccgtttacgaggaaggacactcgtcggagtccattactaacgctggaaattccaccggcgctcctgttgactccgagagctccgatatctcccttaggctcggcttaccgtatggtggttag

SEQ ID NO: 109848 - protein, 241 aa, Brassica rapa subsp
MAREKIQIRKIDNATARQVTFSKRRRGLFKKAEELSVLCDADVALIIFSSTGKLFEFCSSSMREVLERHNLQSKNLEKLDQPSLELQLVENSDHALLSKEIAEKSHRLRQMRGEELQGLNIEELQQLEKALESGLTRVIETKSEKIMNEISYLQRKGMQLMDENKRLRQQGTQLTEENERLGQQIYNNVHERYGGGESENIAVYEEGHSSESITNAGNSTGAPVDSESSDISLRLGLPYGG

SEQ ID NO: 109849 - DNA, 744 bp, Petunia hybrida
  CDS (1)..(744)
atggtgtttcctaatcaagaatttgagtcatcatcatctcagaggaaatcaggaagaggaaaaattgaaatcaagaggattgaaaatactacgaatcgacaagttactttttgcaaacgtagaaatggtcttttgaaaaaggcttatgaactatctgtgctctgtgatgctgaagttgcccttattgttttctctagccgtggccgtctctatgaatatgccaacaacagtgttagggcgactattgataggtacaagaaacaccatgccgattccacaagtacaggatctgtttctgaagctaatacgcagtattaccagcaagaagcagcaaaactgcgacgacaaatacgagatatacagacttataacaggcaaattgttggagaggcattgagcagtttaagcccaaggggcctcaagaatctggaaggcaagcttgagaaggccatcggtagagttcgttccaaaaagaatgaattgcttttctcagaaatagagctcatgcaaaagagggagattgagatgcagaatgccaacatgtaccttcgagcaaagattgctgaggtagagagagcaacacagcaaatgaacttgatgcatggaggaggatctgaataccagcaacagcccatgagtagtacttctcagccttatgatgctcgcaacttcctgcctgtaaatctgctcgaacctaatcctcattactctcgtcaggaccaaactgctctacagcttgtctga

SEQ ID NO: 109850 - protein, 247 aa, Petunia hybrida
MVFPNQEFESSSSQRKSGRGKIEIKRIENTTNRQVTFCKRRNGLLKKAYELSVLCDAEVALIVFSSRGRLYEYANNSVRATIDRYKKHHADSTSTGSVSEANTQYYQQEAAKLRRQIRDIQTYNRQIVGEALSSLSPRGLKNLEGKLEKAIGRVRSKKNELLFSEIELMQKREIEMQNANMYLRAKIAEVERATQQMNLMHGGGSEYQQQPMSSTSQPYDARNFLPVNLLEPNPHYSRQDQTALQLV

SEQ ID NO: 109851 - DNA, 732 bp, Arachis hypogaea; identical to SEQ ID NO: 108865
  CDS (1)..(732)

SEQ ID NO: 109852 - protein, 243 aa, Arachis hypogaea; identical to SEQ ID NO: 108866

SEQ ID NO: 109853 - DNA, 693 bp, Malus domestica; identical to SEQ ID NO: 108867
  CDS (1)..(693)

SEQ ID NO: 109854 - protein, 230 aa, Malus domestica; identical to SEQ ID NO: 108868

SEQ ID NO: 109855 - DNA, 735 bp, Prunus persica; identical to SEQ ID NO: 108869
  CDS (1)..(735)

SEQ ID NO: 109856 - protein, 244 aa, Prunus persica; identical to SEQ ID NO: 108870

SEQ ID NO: 109857 - DNA, 744 bp, Misopates orontium
  CDS (1)..(744)
atgggaagagggagagttgagctgaagagaatagagaacaaaataaataggcaggtgacatttgcaaagaggagaaatggtctgctgaaaaaagcttatgagctatctgtgctgtgtgatgctgaggtggcgcttattatcttctctaaccgtggcaagctctatgagttttgcagctcctccaacatgctcaaaacaattgaaaggtatcaaaagagcagttatggttcactagaagtcaatcatcaagcaaaggatattgaggcaagcagttataaggaatatctaaaattaaaatccaagtatgagtctctccagggttatcaaaggcatcttcttggggatgatttgggacccctaaatatgaatgatcttgagcaccttgaacatcaactggagacatcattgaagcatatcaggtctactaggacacaagttatgcttgatcaactctctgatcttcaaacaaaggagaagatgatggttgatgcaaacaaggctctggaaagaaaattggaagaaatatatgctgcaaatcacattcagcaatcatggggaggaggaggagatcatagcaatgcatataatgatcaccaacatgctcaatctcagggcttctttcaacccctcgagtgcaattctactcttcagatcgggtttaatgatcccgtggcttcgagccagatgactgcaccaacagatgctcaaaatatgcacggattggtccctggttggatgctctga

SEQ ID NO: 109858 - protein, 247 aa, Misopates orontium
MGRGRVELKRIENKINRQVTFAKRRNGLLKKAYELSVLCDAEVALIIFSNRGKLYEFCSSSNMLKTIERYQKSSYGSLEVNHQAKDIEASSYKEYLKLKSKYESLQGYQRHLLGDDLGPLNMNDLEHLEHQLETSLKHIRSTRTQVMLDQLSDLQTKEKMMVDANKALERKLEEIYAANHIQQSWGGGGDHSNAYNDHQHAQSQGFFQPLECNSTLQIGFNDPVASSQMTAPTDAQNMHGLVPGWML

SEQ ID NO: 109859 - DNA, 687 bp, Misopates orontium; identical to SEQ ID NO: 108873
  CDS (1)..(687)

SEQ ID NO: 109860 - protein, 228 aa, Misopates orontium; identical to SEQ ID NO: 108874

SEQ ID NO: 109861 - DNA, 735 bp, Nicotiana tabacum; identical to SEQ ID NO: 108877
  CDS (1)..(735)

SEQ ID NO: 109862 - protein, 244 aa, Nicotiana tabacum; identical to SEQ ID NO: 108878

SEQ ID NO: 109863 - DNA, 735 bp, Impatiens hawkeri
  CDS (1)..(735)
  misc_feature (593)..(593): n is a, g, c or t
atgggaaggggcagagttgagctaaagaggatagagaacaagatcaacagacaagtaacctttgcaaaacgaagaaacggtctgttgaagaaagcttatgagctttctgtcctttgtgatgccgaggtagctctcatcatcttctccaaccgaggcaagctctatgagttttgcagcagtcccagcatgctaaaaacactagagcgataccaaaagtgtaactatggcgcacccgaggcaaacatttcgtctaggggagccctggaattgagtggtcaacaagaatatttgaagctcaaacaacgttacgagaccttacaaagaactcaaaggaatcttttgggagaggatctcggtcctttagatggcaaagaactcgatacaattgaaagacaactcgacacgtccctcaaacatatcagatcaacacgtacacaacatatggttgaccaacttgaggacttgcaaaggaaggagcaaatccttaatgaagcaaacagggccttgaaacaaaggctattggaaagttctttcaattggatgcaaaatgggcaacatgtggattacagtgggccggctgttcagcccaatgnagatgaactctttcatccattggaatgtgagcccactttacaaatggcaatgggttatcaaacacatcatgatccaacaagtgtggaagctgctggtgctggcccaagtatgaacaactactttccaggatggctttcatga

SEQ ID NO: 109864 - protein, 244 aa, Impatiens hawkeri
  misc_feature (198)..(198): The Xaa at location 198 stands for Ala, Glu, Gly, or Val.
MGRGRVELKRIENKINRQVTFAKRRNGLLKKAYELSVLCDAEVALIIFSNRGKLYEFCSSPSMLKTLERYQKCNYGAPEANISSRGALELSGQQEYLKLKQRYETLQRTQRNLLGEDLGPLDGKELDTIERQLDTSLKHIRSTRTQHMVDQLEDLQRKEQILNEANRALKQRLLESSFNWMQNGQHVDYSGPAVQPNXDELFHPLECEPTLQMAMGYQTHHDPTSVEAAGAGPSMNNYFPGWLS

SEQ ID NO: 109865 - DNA, 759 bp, Triticum aestivum; identical to SEQ ID NO: 108881
  CDS (1)..(759)

SEQ ID NO: 109866 - protein, 252 aa, Triticum aestivum; identical to SEQ ID NO: 108882

SEQ ID NO: 109867 - DNA, 693 bp, Triticum aestivum; identical to SEQ ID NO: 108883
  CDS (1)..(693)

SEQ ID NO: 109868 - protein, 230 aa, Triticum aestivum; identical to SEQ ID NO: 108884

SEQ ID NO: 109869 - DNA, 684 bp, Triticum aestivum
  CDS (1)..(684)
atggggcgcggcaaggtggagctgaagcggatcgacaacaagatcagccggcaggtgacgttcgccaagcgccgcaacgggctgctcaagaaggcgtacgagctgtcggtgctctgcgacgccgaggtcgcgctcatcatcttctccacccgcggccgcctcttcgagttctccacatcctcatgcatgtacaagacactagagcggtaccgcagctgcgacttcaactccgaggcaactgcaactccggagactgaacaaagcaattaccaggagtacttgaagctgaagacaagagttgagttcctacagacaactcagagaaatcttcttggcgaggacttgggcccacttaacatgaaggaacttgagcagcttgagaaccaaattgagatatctctcaaacatatcagggcgacaaagagccaacagtcacttgatcagctccttgagctcaagcgcaaggaacaacaactgcaagatgttaataaagacttacggaagaagatacaagaaactagtgtggaaaatgtgctgcaaatgtcttgccaggatgttggacctagtgggtctagtggccatgctaatcaagctaatcaacaggagtattttcatcatgattgtgacccttccctgtatatagggtatcaacgaaatttcctggatcagttgaacaaagaatga

SEQ ID NO: 109870 - protein, 227 aa, Triticum aestivum
MGRGKVELKRIDNKISRQVTFAKRRNGLLKKAYELSVLCDAEVALIIFSTRGRLFEFSTSSCMYKTLERYRSCDFNSEATATPETEQSNYQEYLKLKTRVEFLQTTQRNLLGEDLGPLNMKELEQLENQIEISLKHIRATKSQQSLDQLLELKRKEQQLQDVNKDLRKKIQETSVENVLQMSCQDVGPSGSSGHANQANQQEYFHHDCDPSLYIGYQRNFLDQLNKE

SEQ ID NO: 109871 - DNA, 684 bp, Triticum aestivum; identical to SEQ ID NO: 108885
  CDS (1)..(684)

SEQ ID NO: 109872 - protein, 227 aa, Triticum aestivum; identical to SEQ ID NO: 108886

SEQ ID NO: 109873 - DNA, 678 bp, Triticum aestivum
  CDS (1)..(678)
atgggtcgggggaaggtggagatgaggcggatcgagaacaagataagccggcaggtgacgttcgccaagcgccggaatgggctgctcaagaaggcctacgagctctcgctgctctgcgacgccgaggtcgccctcatcatcttctccggccgcggccgcctcttcgagttctcaagctcctcatgcatgtacagaacactcgagagataccgtacctgcaactccaactcacaggaagcaacacctccgctagaaaatgaaattaattaccaggaatatttgaagctcaagaccagagttgaatttcttcaaagttcacaaagaaatattctcggtgaggatctgggcccacttagcatgaaggagcttgaccagatagagaaccaaatagatgcatccctcaagcatatcaggtcaaaaaagaatcaagtattactcgatcagctatttgaactgaaaagtaaggagcaagaattgcaggatgaaaacaatgacttgaggaagaagttgcaagataccaccagttgctgcggagacaatgcggtccatatgtcctggcaagacggagggcagtgtagctccagagtactacacccggagcatgatacctccatgcaaattgggtatcctcaggcctacatggaccagctgaacaaacagagatcacgtggcttctga

SEQ ID NO: 109874 - protein, 225 aa, Triticum aestivum
MGRGKVEMRRIENKISRQVTFAKRRNGLLKKAYELSLLCDAEVALIIFSGRGRLFEFSSSSCMYRTLERYRTCNSNSQEATPPLENEINYQEYLKLKTRVEFLQSSQRNILGEDLGPLSMKELDQIENQIDASLKHIRSKKNQVLLDQLFELKSKEQELQDENNDLRKKLQDTTSCCGDNAVHMSWQDGGQCSSRVLHPEHDTSMQIGYPQAYMDQLNKQRSRGF

SEQ ID NO: 109875 - DNA, 822 bp, Triticum aestivum; identical to SEQ ID NO: 108887
  CDS (1)..(822)

SEQ ID NO: 109876 - protein, 273 aa, Triticum aestivum; identical to SEQ ID NO: 108888

SEQ ID NO: 109877 - DNA, 666 bp, Triticum aestivum; identical to SEQ ID NO: 108891
  CDS (1)..(666)

SEQ ID NO: 109878 - protein, 221 aa, Triticum aestivum; identical to SEQ ID NO: 108892

SEQ ID NO: 109879 - DNA, 741 bp, Triticum aestivum
  CDS (1)..(741)
atggggagggggagggtggagctgaagcggatcgagaacaagatcaaccgccaggtcaccttcgccaagcgcaggaacggcctgctcaagaaggcctacgagctctccgtgctgtgcgacgccgaggtcgcgctcatcgtcttctccaaccgcggcaagctctacgagttctgcagcacccagagcatgacgaagacactcgacaagtatcaaaaatgcagttatgcaggacctgaaactactgtgcagaaccgagaaaatgagcaactgaaaaacagccgcaatgagtacctgaaactaaaggcacgggttgataatttacagcgaacacaaaggaatttgcttggtgaagatcttgattcattaggcataaaagagctcgagagccttgagaagcaactcgattcatccttgaagcacattcgaacaacaaggacacaacatatggttgaccaattgacagaactccagagaagggaacaaatgttttcagaggcgaataaatgtcttcgaatagaattggaggagagcaaccaggttcatgggcagcagctctgggagcacaacaacaatgtactgggctatgaacgtcagccggaagtgcagccgccgatgcacggcggcaatggatttttccacccccttaatgctgctggtgaacccacacttcacatagggtaccctcctgagtccatgagtaactcatgcatgacaactttcatgcccccgtggttgccttga

SEQ ID NO: 109880 - protein, 246 aa, Triticum aestivum
MGRGRVELKRIENKINRQVTFAKRRNGLLKKAYELSVLCDAEVALIVFSNRGKLYEFCSTQSMTKTLDKYQKCSYAGPETTVQNRENEQLKNSRNEYLKLKARVDNLQRTQRNLLGEDLDSLGIKELESLEKQLDSSLKHIRTTRTQHMVDQLTELQRREQMFSEANKCLRIELEESNQVHGQQLWEHNNNVLGYERQPEVQPPMHGGNGFFHPLNAAGEPTLHIGYPPESMSNSCMTTFMPPWLP

SEQ ID NO: 109881 - DNA, 684 bp, Triticum aestivum; identical to SEQ ID NO: 108893
  CDS (1)..(684)

SEQ ID NO: 109882 - protein, 227 aa, Triticum aestivum; identical to SEQ ID NO: 108894

SEQ ID NO: 109883 - DNA, 744 bp, Triticum aestivum; identical to SEQ ID NO: 108895
  CDS (1)..(744)

SEQ ID NO: 109884 - protein, 247 aa, Triticum aestivum; identical to SEQ ID NO: 108896

SEQ ID NO: 109885 - DNA, 711 bp, Triticum aestivum; identical to SEQ ID NO: 108897
  CDS (1)..(711)

SEQ ID NO: 109886 - protein, 236 aa, Triticum aestivum; identical to SEQ ID NO: 108898

SEQ ID NO: 109887 - DNA, 735 bp, Triticum aestivum; identical to SEQ ID NO: 108899
  CDS (1)..(735)

SEQ ID NO: 109888 - protein, 244 aa, Triticum aestivum; identical to SEQ ID NO: 108900

SEQ ID NO: 109889 - DNA, 765 bp, Triticum aestivum
  CDS (1)..(765)
atggggaggggaaggattgagatcaagaggatcgagaacacgactagccggcaggtgacctcctgcaagcgccggaacgggctcctcaaaaaggcctacgagctctccgtcctgtgcgacgctgaggtggcgctcatcgtcttctccagccgcggccgcctctatgagtactccaacaacagtgtcaaggctacaattgacaggtacaagaaggcacatgcttgtggctcaacctctggggtacctctcatagaagtcaatgctcagcaatactaccagcaagaagctgcaaggctgcgccaccagatccagatgctgcaaagcactaacaagcacttggttggtgattctgttgggaacctgtcactcaaggagctgaagcaactcgaaagccggcttgagaaaggcattgcgaagatcagggccaggaagaatgagctcctatcttctgagatcaactacatggtcaaaagggagatagagcttcagagtgacaacattgatctcagaaccaagattgcggaggaggagcagcggatgcagcaggtgactatcgccaggccctcggcggcgccggagctgaaccctttcaccgcactggacatgaagtgcttcttccctgccaacctcttcgaggcggcggtgcaagcgcacgcgcaggcacaggctcaggctcaggctcatgctcaggcctcgcttcagctgaacctaggctaccagcagcttgctccaccgggcgcgggcgatgtggctcatcagttctag

SEQ ID NO: 109890 - protein, 254 aa, Triticum aestivum
MGRGRIEIKRIENTTSRQVTSCKRRNGLLKKAYELSVLCDAEVALIVFSSRGRLYEYSNNSVKATIDRYKKAHACGSTSGVPLIEVNAQQYYQQEAARLRHQIQMLQSTNKHLVGDSVGNLSLKELKQLESRLEKGIAKIRARKNELLSSEINYMVKREIELQSDNIDLRTKIAEEEQRMQQVTIARPSAAPELNPFTALDMKCFFPANLFEAAVQAHAQAQAQAQAHAQASLQLNLGYQQLAPPGAGDVAHQF

SEQ ID NO: 109891 - DNA, 741 bp, Triticum aestivum
  CDS (1)..(741)
atggggagggggagggtggagctgaagcggatcgagaacaagatcaaccgccaggtcaccttcgccaagcgcaggaacggcctgctcaagaaggcctacgagctctccgtgctgtgcgacgccgaggtcgcgctcatcgtcttctccaaccgcggcaagctctacgagttctgcagcacccagagcatgacgaagacactcgacaagtatcaaaaatgcagttatgcaggacctgaaactactgtgcagaacagagaaaatgagcaactgaaaaacagccgcaatgagtacctgaaactaaaggcacgggttgataatttacagcgaacacaaaggaatttgcttggtgaagatcttgattccttaggcataaaagagctcgagagccttgagaagcaactcgattcgtccttgaagcacattcgaacaacaaggacacaacatatggttgaccaattgacagaactccagagaagggaacaaatgttttcagaggcgaataaatgtcttcgaataaaattggaggagagcaaccaggttcatgggcagcagctctgggagcacaacaacaatgtactgagctatgaacgtcagccggaagtgcagccgccgatgcacggcggcaatggattcttccacccccttgatgcagctggtgaacccacacttcacatagggtaccctcctgagcccctgaatagctcatgcatgactactttcatgcccccatggttgccttga

SEQ ID NO: 109892 - protein, 246 aa, Triticum aestivum
MGRGRVELKRIENKINRQVTFAKRRNGLLKKAYELSVLCDAEVALIVFSNRGKLYEFCSTQSMTKTLDKYQKCSYAGPETTVQNRENEQLKNSRNEYLKLKARVDNLQRTQRNLLGEDLDSLGIKELESLEKQLDSSLKHIRTTRTQHMVDQLTELQRREQMFSEANKCLRIKLEESNQVHGQQLWEHNNNVLSYERQPEVQPPMHGGNGFFHPLDAAGEPTLHIGYPPEPLNSSCMTTFMPPWLP

SEQ ID NO: 109893 - DNA, 660 bp, Triticum aestivum
  CDS (1)..(660)
atgcggcggatcgaggacgccaccagccggcaggtcaccttctccaagcgccggagcgggctgctcaagaaggccttcgagctgggcgtcctctgcgacgccgaggtcgccctcatcgtcttctccccccgcggccgcctctacgagtacgcctccgcgccagatttgcagaaaacgattgatcgctacctgaatcacacaaaagggacatctgccaatgagaaaactgttgagcaaccagctgctggcgtccaaatgtgtagatctgaagctaccgccttgaagcacaagatagacgcaattgaggcctaccagaggaagctatctggagaaggattggggtcctgttcggcccatgagctgcaagagctggagctgcagctggagaagagcctaagctgcatccggcaaaagaagcaacagaaaatggtggctaaaatctcggagctgaaggagaaggagagaaagctgttgacggagaactcggtgctccgtgaggagtacaaggcgctgcctctgctagagctggccactgctgctgctgctgaaagatcgcctgacggcgctggagttgaagaagccgaggaggacgagtggcggcggcattacatggaagtggagaccgagctggtcattggaaggcccgggtcctctagctag

SEQ ID NO: 109894 - protein, 219 aa, Triticum aestivum
MRRIEDATSRQVTFSKRRSGLLKKAFELGVLCDAEVALIVFSPRGRLYEYASAPDLQKTIDRYLNHTKGTSANEKTVEQPAAGVQMCRSEATALKHKIDAIEAYQRKLSGEGLGSCSAHELQELELQLEKSLSCIRQKKQQKMVAKISELKEKERKLLTENSVLREEYKALPLLELATAAAAERSPDGAGVEEAEEDEWRRHYMEVETELVIGRPGSSS

SEQ ID NO: 109895 - DNA, 744 bp, Momordica charantia; identical to SEQ ID NO: 108911
  CDS (1)..(744)

SEQ ID NO: 109896 - protein, 247 aa, Momordica charantia; identical to SEQ ID NO: 108912

SEQ ID NO: 109897 - DNA, 747 bp, Cleome spinosa; identical to SEQ ID NO: 108915
  CDS (1)..(747)

SEQ ID NO: 109898 - protein, 248 aa, Cleome spinosa; identical to SEQ ID NO: 108916

SEQ ID NO: 109899 - DNA, 750 bp, Medicago truncatula
  CDS (1)..(750)
atgggaagaggaagagttgagttgaagaggatagagaacaagataaacagacaagttacatttgctaagagaagaaatggtcttcttaagaaagcttatgaactttctgttctttgtgatgctgaggttgctcttatcatcttctccactcgtggaaagctttatgaattttgtagcacatctaacatgctcaaaacccttgataggtaccagaagtgcagttatggtgctgtagaagttagcaaacctgctaaagaacttgagagcagttaccgtgaatacttgaagctgaaacaaagatttgaaaatcttcaaagagcacagagaaatcttttaggtgaagatttgggtccactaagttctaaggatcttgagcagcttgaaaggcaattggattcatctctcaagcaagtgagatcaacaaagacacaattcatgctggaccaattagctgatcttcaaaataaggaacatatgttggttgaagcaaacagatccttgtcaatcaagttggaggaaatcaattctagaaatcactacaggcaatcatgggaagccagtgatcaaagcatgcaatatgaggctcagcagaatgctcactctcagagtttcttccagcagctggaatgcaatcctacattgcagattggttctgattataggtacaacaatgtagcttcagatcagatagcttcaacaagtcaagctcaacaacaagtgaatggatttgttcctggatggatgctataa

SEQ ID NO: 109900 - protein, 249 aa, Medicago truncatula
MGRGRVELKRIENKINRQVTFAKRRNGLLKKAYELSVLCDAEVALIIFSTRGKLYEFCSTSNMLKTLDRYQKCSYGAVEVSKPAKELESSYREYLKLKQRFENLQRAQRNLLGEDLGPLSSKDLEQLERQLDSSLKQVRSTKTQFMLDQLADLQNKEHMLVEANRSLSIKLEEINSRNHYRQSWEASDQSMQYEAQQNAHSQSFFQQLECNPTLQIGSDYRYNNVASDQIASTSQAQQQVNGFVPGWML

SEQ ID NO: 109901 - DNA, 726 bp, Medicago truncatula; identical to SEQ ID NO: 108917
  CDS (1)..(726)

SEQ ID NO: 109902 - protein, 241 aa, Medicago truncatula; identical to SEQ ID NO: 108918

SEQ ID NO: 109903 - DNA, 735 bp, Medicago truncatula
  CDS (1)..(735)
atgagttttccaaacgaatccatgccagattctccacagagagcaaagattggaagagggaagattgagatcaagaggattgagaacacaacgaatcgtcaagttacgttctgcaagcgtagaaatggcttgcttaagaaggcatatgaattatctgtgctttgtgatgctgaagttgctcttatagtcttctcgactcgcggccgcctctatgaatatgcaaataacagtgtcaaagcatcaattgagaggtacaagaaagcatgttcagattcttctggtgctaaatcagcttctgagtctaatgttcagtattaccagcaagaagctgccaaactgcgtgtgcaaatcagtaacttgcagaatcataacaggcaaatgatgggtgaatctttgagcaatatgaatggtaaggatctcagaaaccttgagagtaaattagaaaaaggaattagcagaattcgttccaagaagaatgaaatgctgtttgcagaacttgagtacatgcagaagagggaggtagagttgcataatagtaaccaagttcttagagcaaagatatcagaaagtgagcagaggagcaaccataatgttaatgtgttgcctgggggcacaagctttgaatgcatgcaacctcagcagcagttcgactctcgtggctacttccaagtgaacgaattacaacccaatgatcagtatgccaggcaagatcagatgtctcttcaatttgtgtaa

SEQ ID NO: 109904 - protein, 244 aa, Medicago truncatula
MSFPNESMPDSPQRAKIGRGKIEIKRIENTTNRQVTFCKRRNGLLKKAYELSVLCDAEVALIVFSTRGRLYEYANNSVKASIERYKKACSDSSGAKSASESNVQYYQQEAAKLRVQISNLQNHNRQMMGESLSNMNGKDLRNLESKLEKGISRIRSKKNEMLFAELEYMQKREVELHNSNQVLRAKISESEQRSNHNVNVLPGGTSFECMQPQQQFDSRGYFQVNELQPNDQYARQDQMSLQFV

SEQ ID NO: 109905 - DNA, 696 bp, Momordica charantia; identical to SEQ ID NO: 108919
  CDS (1)..(696)

SEQ ID NO: 109906 - protein, 231 aa, Momordica charantia; identical to SEQ ID NO: 108920

SEQ ID NO: 109907 - DNA, 750 bp, Diospyros kaki; identical to SEQ ID NO: 108921
  CDS (1)..(750)

SEQ ID NO: 109908 - protein, 249 aa, Diospyros kaki; identical to SEQ ID NO: 108922

SEQ ID NO: 109909 - DNA, 726 bp, Theobroma cacao; identical to SEQ ID NO: 108925
  CDS (1)..(726)

SEQ ID NO: 109910 - protein, 241 aa, Theobroma cacao; identical to SEQ ID NO: 108926

SEQ ID NO: 109911 - DNA, 768 bp, Malus domestica
  CDS (1)..(768)
atggggaggggaagggtgcagctgaagagaattgagaacaagatcaacaggcaggtgaccttctcaaagagaaggtcggggctgatgaagaaagctcatgagatttctgtgctttgtgatgctgaggttgctttgattatcttctccaccaagggcaagctctttgagtactccaatgattcctgcatggaaaggatcctggaaaggtacgaaagatactcatatacagagaggcagcttcttgcaaatgataatgaatccactggaagctggactctggaacatgcaaagctcaaggctagggtggaggttttacaaagaaatcaaagacactatatgggagaagatctccaatccttaagtctcaaagagcttcaaaatttagagcaacagcttgattctgcactgaagcacataaggtcaagaaagaaccaagttatgtacgaatcgatttctgagctccagaagaaggataaggcattgcaggagcaaaacaacttgctggcaaagaaggtgaaggagaaggagaacgcagtagctcaacaggcccaattggagcatgtgcaggagcagaggttgaactcctcttcctcccttcttccacgggcattgcagtccttgaatttcggcagcgggtccaattaccaggccattagatcaagtgaaggaataccaggagataatcagcagtatggagatgaaaccccaactccacatagacctaacatgctgctgcccgcttggatgctccgccaccttaatgaatag

SEQ ID NO: 109912 - protein, 255 aa, Malus domestica
MGRGRVQLKRIENKINRQVTFSKRRSGLMKKAHEISVLCDAEVALIIFSTKGKLFEYSNDSCMERILERYERYSYTERQLLANDNESTGSWTLEHAKLKARVEVLQRNQRHYMGEDLQSLSLKELQNLEQQLDSALKHIRSRKNQVMYESISELQKKDKALQEQNNLLAKKVKEKENAVAQQAQLEHVQEQRLNSSSSLLPRALQSLNFGSGSNYQAIRSSEGIPGDNQQYGDETPTPHRPNMLLPAWMLRHLNE

SEQ ID NO: 109913 - DNA, 750 bp, Taihangia rupestris
  CDS (1)..(750)
atgggaagagggagggttgagctgaagagaatcgagaacaagatcaacaggcaagtgacctttgcaaaacgaaggaacgggctattgaagaaagcttatgagctttccgttctttgcgatgcagaggttgctctcatcatcttctcgagtagaggaaagctgtacgagttttgcagtagttcaagcagcatgctcaaaactcttgagaggtaccagaagtgcaactatagcacacctgagacacatgtatctacaagggaagctctggaattgagtagccaacaggagtatttgaggcttaaggcacgttatgaagccctacaaagaaaccaaaggaatcttcttggagaagatcttggtcctttgaacagcaaagagctcgaatcacttgaaaggcagctggatatgtcattgaagcagattagatcaacacggacacagtgcatgctggatcagctcacagatcttcagcgaaaggaacagatgcttaatgaagcaaacaggtccctaaaacaaaggttgtttgagggatacaatgtgaatcaactccatcaattccagctgaatgcaaatgctgaggatgtaggatatggtagacaccaacaagctcatcaacctcacagtgatgtcttctatcaccccttagagttggagccaacattacaaattgggtatcaccagagcgatccaatacaagttgtggcagcagggccaagcgtgagcaatttcatgggaggatggttgccatga

SEQ ID NO: 109914 - protein, 249 aa, Taihangia rupestris
MGRGRVELKRIENKINRQVTFAKRRNGLLKKAYELSVLCDAEVALIIFSSRGKLYEFCSSSSSMLKTLERYQKCNYSTPETHVSTREALELSSQQEYLRLKARYEALQRNQRNLLGEDLGPLNSKELESLERQLDMSLKQIRSTRTQCMLDQLTDLQRKEQMLNEANRSLKQRLFEGYNVNQLHQFQLNANAEDVGYGRHQQAHQPHSDVFYHPLELEPTLQIGYHQSDPIQVVAAGPSVSNFMGGWLP

SEQ ID NO: 109915 - DNA, 705 bp, Dendrobium thyrsiflorum
  CDS (1)..(705)
atggggaggggcaaaattgagatcaagaggatcgagaataccacgaaccgccaggttaccttctgcaagcgtaggaatggtcttttaaagaaagcctacgaactttccgtcctatgtgatgcagaaatagccctaattgtcttctccactcgaggtcgcctctacgagtactccaatcacagcataaaagcaaccattgaaaaatataagaaggcttgtgctgatagttcaaacccaggatcccttgtggaggttaactcacaacaatactatcaacaagaatcagcaaaactgcgccaccaaattcagcttttacaaaattcaaacaggcatttaatgggggaaggtttgagttctcttactctaaaggagctcaagcaacttgaaaaccgacttgaaagaggcattacaagggtcagatcaaagaagcatgagctgctctttgcagaaattgagtatatgcagaaacgagaagtggagcttcaaaatgacaatatgtaccttagggccaagataaacgataatgaaagagcggagcaggcaaatattgttcaagcaggggctgattttgacacccttccaaacttcgactccaggaattactatcaggtaaacatattggaaacagcagctcattactcacaccatcaagatcaaacagcccttcatcttgggtacgaaacaaaagctgatcattctgcatag

SEQ ID NO: 109916 - protein, 234 aa, Dendrobium thyrsiflorum
MGRGKIEIKRIENTTNRQVTFCKRRNGLLKKAYELSVLCDAEIALIVFSTRGRLYEYSNHSIKATIEKYKKACADSSNPGSLVEVNSQQYYQQESAKLRHQIQLLQNSNRHLMGEGLSSLTLKELKQLENRLERGITRVRSKKHELLFAEIEYMQKREVELQNDNMYLRAKINDNERAEQANIVQAGADFDTLPNFDSRNYYQVNILETAAHYSHHQDQTALHLGYETKADHSA

SEQ ID NO: 109917 - DNA, 702 bp, Dendrobium thyrsiflorum
  CDS (1)..(702)
  misc_feature (339)..(339): n is a, g, c or t
atggagcccaaggagaaaatggggagaggaaagatagagattaagagaatagagaacacaacaaataggcaagtcaccttttgcaagcgtcgtaatggcctccttaagaaggcttatgagctctctgttctctgtgatgctgaggtcgcccttatcatcttctcaagccgtggtcgcctctatgaatatgcaaacaacagcgtgaagggaaccattgatcgatacaagaaggcaaactctgataattccaactctggatcaatatctgaagcaaattctcagtactaccaacaagaggccacaaaactgcgtcagcaaatcaccaacttacaaaattcnaacaggaatttgctgggtgatgctctcaccaccatgagcttgagggacctgaaacaactggaaacaagattggagaaaggcatcaacaaaataagatctaaaaagaatgaactgttgcatgctgagattgactacatgcagaaaagagaaatggacctgcaaactgacaacatgtacctgcgtaataagatagctgataatgaaagagcacagcagcatcagcatatgaatatattgccatcaacaagtgcagaatatgaagttatgcctccatttgattccagaagctttctgcaagttaatctattggatcccaatgatcattatgctcaccagcaacaaacagctctgcaacttgggtaa

SEQ ID NO: 109918 - protein, 233 aa, Dendrobium thyrsiflorum
MEPKEKMGRGKIEIKRIENTTNRQVTFCKRRNGLLKKAYELSVLCDAEVALIIFSSRGRLYEYANNSVKGTIDRYKKANSDNSNSGSISEANSQYYQQEATKLRQQITNLQNSNRNLLGDALTTMSLRDLKQLETRLEKGINKIRSKKNELLHAEIDYMQKREMDLQTDNMYLRNKIADNERAQQHQHMNILPSTSAEYEVMPPFDSRSFLQVNLLDPNDHYAHQQQTALQLG

SEQ ID NO: 109919 - DNA, 732 bp, Dendrobium crumenatum; identical to SEQ ID NO: 108933
  CDS (1)..(732)

SEQ ID NO: 109920 - protein, 243 aa, Dendrobium crumenatum; identical to SEQ ID NO: 108934

SEQ ID NO: 109921 - DNA, 672 bp, Dendrobium crumenatum; identical to SEQ ID NO: 108935
  CDS (1)..(672)

SEQ ID NO: 109922 - protein, 223 aa, Dendrobium crumenatum; identical to SEQ ID NO: 108936

SEQ ID NO: 109923 - DNA, 705 bp, Dendrobium crumenatum; identical to SEQ ID NO: 108937
  CDS (1)..(705)

SEQ ID NO: 109924 - protein, 234 aa, Dendrobium crumenatum; identical to SEQ ID NO: 108938

SEQ ID NO: 109925 - DNA, 678 bp, Elaeis guineensis var; identical to SEQ ID NO: 108939
  CDS (1)..(678)

SEQ ID NO: 109926 - protein, 225 aa, Elaeis guineensis var; identical to SEQ ID NO: 108940

SEQ ID NO: 109927 - DNA, 726 bp, Elaeis guineensis var; identical to SEQ ID NO: 108943
  CDS (1)..(726)

SEQ ID NO: 109928 - protein, 241 aa, Elaeis guineensis var; identical to SEQ ID NO: 108944

SEQ ID NO: 109929 - DNA, 675 bp, Elaeis guineensis var
  CDS (1)..(675)
atgggtcggggaaagatcgaaatcaagaggatagagaacacaaccaaccggcaggtgaccttctgcaagcgccgcaatggcctgctcaaaaaggcctatgaattgtccgtgctctgcgacgctgaggttgctctcatcatcttctcgagccgtggccgcctctacgagtatgccaacaatagtgtgaaagctactatcgagaggtacaaaaaagcatgtactgatacctctaactctggatctgtctctgaagctgattcccagtattatcaacaagaatcattgaaactgcgccagcaaataaccagcctacagaattcaaacagaaatttgatgggagattctcttggctccatgagccttagggacctgaagcaactggagggaaggttggaaaagggcataaacaaaataagaactaagaagaatgagttgctatttgctgaaattgaatacatgcagaaaagggagacggagctgcaaaatgccaacatgtacctaaggaacaagatagccgagaatgagggagcacaacaacagatgaatatgttacccgctacgactgaatatgaggtcatgccgccatatgattcaaggaacttcctgcaagtgaatctaatgcaaagcaatcagcattactctcaccagcagcagacagctctccaactaggatga

SEQ ID NO: 109930 - protein, 224 aa, Elaeis guineensis var
MGRGKIEIKRIENTTNRQVTFCKRRNGLLKKAYELSVLCDAEVALIIFSSRGRLYEYANNSVKATIERYKKACTDTSNSGSVSEADSQYYQQESLKLRQQITSLQNSNRNLMGDSLGSMSLRDLKQLEGRLEKGINKIRTKKNELLFAEIEYMQKRETELQNANMYLRNKIAENEGAQQQMNMLPATTEYEVMPPYDSRNFLQVNLMQSNQHYSHQQQTALQLG

SEQ ID NO: 109931 - DNA, 675 bp, Elaeis guineensis var; identical to SEQ ID NO: 108947
  CDS (1)..(675)

SEQ ID NO: 109932 - protein, 224 aa, Elaeis guineensis var; identical to SEQ ID NO: 108948

SEQ ID NO: 109933 - DNA, 726 bp, Amborella trichopoda; identical to SEQ ID NO: 108949
  CDS (1)..(726)

SEQ ID NO: 109934 - protein, 241 aa, Amborella trichopoda; identical to SEQ ID NO: 108950

SEQ ID NO: 109935 - DNA, 672 bp, Amborella trichopoda; identical to SEQ ID NO: 108951
  CDS (1)..(672)

SEQ ID NO: 109936 - protein, 223 aa, Amborella trichopoda; identical to SEQ ID NO: 108952

SEQ ID NO: 109937 - DNA, 681 bp, Nuphar advena; identical to SEQ ID NO: 108953
  CDS (1)..(681)

SEQ ID NO: 109938 - protein, 226 aa, Nuphar advena; identical to SEQ ID NO: 108954

SEQ ID NO: 109939 - DNA, 732 bp, Glycine max; identical to SEQ ID NO: 108955
  CDS (1)..(732)

SEQ ID NO: 109940 - protein, 243 aa, Glycine max; identical to SEQ ID NO: 108956

SEQ ID NO: 109941 - DNA, 717 bp, Misopates orontium
  CDS (1)..(717)
atggaatttcctaatcaagattctgagaggaaaaatgggagagggaaaattgagatcaagaggatcgagaacaccacgaatcgacaggtcacgttctgcaagcgtagaaacggactgctgaagaaggcttacgagttatcggtgttatgtgatgccgaagttgccctcgtcgtcttctcgagccgtggaaggctctatgaatatgctaacaacagtgttagggcaactattgatagatacaagaaagcaagtgctgattcctcaaattctgtgtccacatctgaagctaacactcaattttaccagcaagaggccaacaagctgcgccggcaaataagagagatacagacttcaaacaggcaaatgcttggtgagggtgttggcaatatggctttgaaagatctgaagagcacagaagccaaagttgaaaaagccatcagcagaatccgttccaagaagaatgagttactgtttgcagagatagagctcatgcagaagagggagcttgagctgcacaatgctaacatgtttctacgtgcaaagatagctgagggtgagagggcacaacagcagcagatgaacttgatgcctggttccgactaccagccgatgacttcacagtcgtacgatgttcggaacttccttccaatgaacctcatggaacctaatcagcagcaatactctcgccacgatcaaacggctctccagcttgtttga

SEQ ID NO: 109942 - protein, 238 aa, Misopates orontium
MEFPNQDSERKNGRGKIEIKRIENTTNRQVTFCKRRNGLLKKAYELSVLCDAEVALVVFSSRGRLYEYANNSVRATIDRYKKASADSSNSVSTSEANTQFYQQEANKLRRQIREIQTSNRQMLGEGVGNMALKDLKSTEAKVEKAISRIRSKKNELLFAEIELMQKRELELHNANMFLRAKIAEGERAQQQQMNLMPGSDYQPMTSQSYDVRNFLPMNLMEPNQQQYSRHDQTALQLV

SEQ ID NO: 109943 - DNA, 744 bp, Misopates orontium
  CDS (1)..(744)
atggcgtctctaagcgatcaatcgaccgaggtatcgcccgagaggaaaatcgggagagggaagatcgagatcaaacggatcgagaacacgactaatcgacaggttacgttctgcaagcgccgcaacggtctgctcaagaaagcttatgaattgtctgtgctttgcgatgctgaaattgccttagttgtgttctccagcagaggtcgcctttatgagtatgcaaataacagtgttaaagaaacaattgataggtacaagaaagcatcatcagactcctcactcaatggctctatttctgaagcaaacactcagtattaccagcaagaagcatcgaaactgcgtgctcaaatcagtaatctgcagaatcagaataggaacatgttgggagaatctttgggggctttgtcgctaagggagctcaagaatctggagagcagggttgaacgaggaattagcagaatcaggtccaagaagaatgagctgctgtttgctgaaattgagtacatgcaaaagaggcaggagattgacttacaccacaacaaccagtatctgcgagcaaagatagctgaaagtgagagagtgcagggacagcatatgaatttgatgcctggaggaagttctggctttgagcaacttgttgaaactcaaccatttgatgctagaaactatcttcaagtcaatggactacaacaaccaaacaatgattaccctaggcaagaccagctccctcttcaattagtctga

SEQ ID NO: 109944 - protein, 247 aa, Misopates orontium
MASLSDQSTEVSPERKIGRGKIEIKRIENTTNRQVTFCKRRNGLLKKAYELSVLCDAEIALVVFSSRGRLYEYANNSVKETIDRYKKASSDSSLNGSISEANTQYYQQEASKLRAQISNLQNQNRNMLGESLGALSLRELKNLESRVERGISRIRSKKNELLFAEIEYMQKRQEIDLHHNNQYLRAKIAESERVQGQHMNLMPGGSSGFEQLVETQPFDARNYLQVNGLQQPNNDYPRQDQLPLQLV

SEQ ID NO: 109945 - DNA, 771 bp, Impatiens balsamina; identical to SEQ ID NO: 108957
  CDS (1)..(771)

SEQ ID NO: 109946 - protein, 256 aa, Impatiens balsamina; identical to SEQ ID NO: 108958

SEQ ID NO: 109947 - DNA, 729 bp, Solanum lycopersicum; identical to SEQ ID NO: 108959
  CDS (1)..(729)

SEQ ID NO: 109948 - protein, 242 aa, Solanum lycopersicum; identical to SEQ ID NO: 108960

SEQ ID NO: 109949 - DNA, 687 bp, Taihangia rupestris
  CDS (1)..(687)
atgggtaggaaaattgagatcaagaggatcgaaaacactactaactggcaagtcaccttctgcaagcgccgcaacggtttgctgaagaaagcttatgaactatctgttctttgtgatgctgaagttgctcttattgtcttctctacccgtggacgcctctatgaatatgctaacaacagtgtgagacaaacaatccaaaggtacaaaaagacatgcgattcttcaaacagtggatctgttactgaagccaatgttcagttttatcagcaagaagcatccaaattaagaagacagatccgcgaaattcagaattcaaacaggcatatactaggtgaagctctcagcactttgaatgtcaaggaactcaagaacctagaaggaagattggagaaaggaattgggagaataagatccaaaaagaatgaaatgctgtttgctgaaatcgaatatatgcaaaagaaggagattgagctgcaaaaccagaacaactttctgagagcaaagatagctgaaactgacaaggcacgtcagcagcaaacaaacatgatgccaggaacgtcgtctgcgtatgatcaatcaatgcctcctcctcaaacatatgataggagcttcctccctgtaatcctcgagtccaatcacaactacaatcgccaaggccagaaccagacacctctccaactcgtttga

SEQ ID NO: 109950 - protein, 228 aa, Taihangia rupestris
MGRKIEIKRIENTTNWQVTFCKRRNGLLKKAYELSVLCDAEVALIVFSTRGRLYEYANNSVRQTIQRYKKTCDSSNSGSVTEANVQFYQQEASKLRRQIREIQNSNRHILGEALSTLNVKELKNLEGRLEKGIGRIRSKKNEMLFAEIEYMQKKEIELQNQNNFLRAKIAETDKARQQQTNMMPGTSSAYDQSMPPPQTYDRSFLPVILESNHNYNRQGQNQTPLQLV

SEQ ID NO: 109951 - DNA, 699 bp, Taihangia rupestris; identical to SEQ ID NO: 108961
  CDS (1)..(699)

SEQ ID NO: 109952 - protein, 232 aa, Taihangia rupestris; identical to SEQ ID NO: 108962

SEQ ID NO: 109953 - DNA, 729 bp, Antirrhinum majus; identical to SEQ ID NO: 108963
  CDS (1)..(729)

SEQ ID NO: 109954 - protein, 242 aa, Antirrhinum majus; identical to SEQ ID NO: 108964

SEQ ID NO: 109955 - DNA, 744 bp, Antirrhinum majus
  CDS (1)..(744)
atggggagagggagagtggagctgaagagaatagagaacaaaataaataggcaggtgacatttgcaaagaggagaaatggtttgctgaaaaaagcttatgagctatctgtgctgtgtgatgctgaggtggcgcttattatcttctctaaccgtggaaagctctatgagttttgcagctcatccaacatgctcaaaacaattgaaaggtatcaaaagagcagctatggttcacttgaagtcaatcatcaagcaaaggatattgaggcaagcagttataaggaatatttaaagttaaaatccaaatatgagtctctccagggttatcaaaggcatcttcttggggatgacttgggacccctaaatatgaatgatcttgagcaccttgagcatcaactggagacatcattgaagcatattaggtctactaggacacaggttatgcttgatcaactttctgatcttcaaacaaaggagaagatgatggttgatgctaacaaagctttggaaagaaaactggaagaaatatatgctgcaaatcaccttcagcaatcatggggaggaggaggagaccatagcaatgcatataatgatcaccaacatgctcaatctcaaggcttctttcaacccctcgaatgcaattctactctccagattgggtttaatgatcctgtggcttcgagccagatgactgcaccaacagatgctcaaaatatgcatggattggtccccggttggatgctctga

SEQ ID NO: 109956 - protein, 247 aa, Antirrhinum majus
MGRGRVELKRIENKINRQVTFAKRRNGLLKKAYELSVLCDAEVALIIFSNRGKLYEFCSSSNMLKTIERYQKSSYGSLEVNHQAKDIEASSYKEYLKLKSKYESLQGYQRHLLGDDLGPLNMNDLEHLEHQLETSLKHIRSTRTQVMLDQLSDLQTKEKMMVDANKALERKLEEIYAANHLQQSWGGGGDHSNAYNDHQHAQSQGFFQPLECNSTLQIGFNDPVASSQMTAPTDAQNMHGLVPGWML

SEQ ID NO: 109957 - DNA, 732 bp, Antirrhinum majus; identical to SEQ ID NO: 108965
  CDS (1)..(732)

SEQ ID NO: 109958 - protein, 243 aa, Antirrhinum majus; identical to SEQ ID NO: 108966

SEQ ID NO: 109959 - DNA, 768 bp, Prunus dulcis
  CDS (1)..(768)
atggggaggggaagggtgcagctgaagaggattgaaaacaagatcaacaggcaggtgaccttctcaaagagaaggtctgggttgctgaagaaagcccaagagatttctgtgctttgtgatgctgaggttgctttgattgtcttctccaccaaaggcaagctctttgagtactccactgactcctgcatggaaaggatcctggaaaggtacgaaagatactcatattcagagaagcagcttcttgcaaatgatcatgaatcaactggaagctggactctggaacatgcgaagctcaaggctagggtggaggttttacaaagaaattgcagtcattttatgggggaagatctccaatctttaagtctgaaagagcttcagaatttggagcaacagcttgattctgcaccgaagcacataaggtcaaggaagaaccaggttatgtacgaatcgatttcagagctgcaaaagaaggataaggcattgcaggagcaaaacaacttgctggcaaagaaggtaaaggagaaggagaaagcactagctccacaggcagagtcatgggagcagcaagtgcagaaccagggcttggactgctcgtccacccttctaccagaggcattgcagtccttgaatttcggcagcggttcaaattaccagggaattagaaatgatggagccggtggagatcatgaggatgaaaatgagaccccgacagcaagtcgacctaatactctccttcccccatggatgctccgccaccttaatgaatag

SEQ ID NO: 109960 - protein, 255 aa, Prunus dulcis
MGRGRVQLKRIENKINRQVTFSKRRSGLLKKAQEISVLCDAEVALIVFSTKGKLFEYSTDSCMERILERYERYSYSEKQLLANDHESTGSWTLEHAKLKARVEVLQRNCSHFMGEDLQSLSLKELQNLEQQLDSAPKHIRSRKNQVMYESISELQKKDKALQEQNNLLAKKVKEKEKALAPQAESWEQQVQNQGLDCSSTLLPEALQSLNFGSGSNYQGIRNDGAGGDHEDENETPTASRPNTLLPPWMLRHLNE

SEQ ID NO: 109961 - DNA, 666 bp, Prunus dulcis
  CDS (1)..(666)
atggggagaggaaagattgagatcaagaggatcgagaacaccacaaaccgtcaagtgaccttctgcaaacgaagaaatggactgctgaagaaagcttatgagctatccattctctgtgatgctgaagttgccctcattgtcttctccagtcgaggccgcctctacgagtactccaacaacaacataagaaacactatagaggggtacaagaaggcttgctcagatagctcaggttcaacctccattaccgaaattaatgctcaatattatcaacaggaatcggcaaagctgaggcaacagattcaaatgctgcagaattccaacaggcacttaatgggagatgccttgagtactttgagtgtgaaagagctaaagcagctggagaataggcttgaacgaggcattaatagaatcaggtccaagaagcatgaaatgctgcttgcagaaattgagtacttgcagaaaaaggagatcgagctggaaaacgaaaatgtgtgtcttcgaactaagatttcagaagttgagaggcttcaacaagcaaacatggttgggccagagctgaatgcaatccaggcattagcttctcgcaatttctttagccaaaatatgatggagggtggagcaacctacccacagcaagacaagaagattctccatcttgggtaa

SEQ ID NO: 109962 - protein, 221 aa, Prunus dulcis
MGRGKIEIKRIENTTNRQVTFCKRRNGLLKKAYELSILCDAEVALIVFSSRGRLYEYSNNNIRNTIEGYKKACSDSSGSTSITEINAQYYQQESAKLRQQIQMLQNSNRHLMGDALSTLSVKELKQLENRLERGINRIRSKKHEMLLAEIEYLQKKEIELENENVCLRTKISEVERLQQANMVGPELNAIQALASRNFFSQNMMEGGATYPQQDKKILHLG

SEQ ID NO: 109963 - DNA, 735 bp, Hordeum spontaneum
  CDS (1)..(735)
atggggcgcgggaaggtgcagctgaagcggatcgagaacaagatcaaccgccaggtcaccttctccaagcgccgctcggggctgctcaagaaggcgcacgagatctccgtgctctgcgacgccgaggtcggcctcatcatcttctccaccaagggaaagctctacgagttctccaccgagtcatgtatggacaaaattcttgaacggtatgagcgctactcttatgcagaaaaggttctcgtttcaagtgaatctgaaattcagggaaactggtgtcacgaatataggaaactgaaggcgaaggttgagacaatacagaaatgtcaaaagcatctcatgggagaggatcttgaatctttgaatctcaaggagttgcagcaactggagcagcagctggaaagctcactgaaacatatcagagccaggaagaaccaacttatgcacgaatccatttctgagcttcagaagaaggagaggtcactgcaggaggagaataaagttctccagaaggaacttgtggagaagcagaaggcccaggcggcgcagcaagatcaaactcagcctcaaaccagctcttcttcttcttccttcatgatgagggatgctccccctgtcgcagataccagcaatcacccagcggcggcaggcgagagggcagaggatgtggcagtgcagcctcaggtcccactccggacggcgcttccactgtggatggtgagccacatcaacggctga

SEQ ID NO: 109964 - protein, 244 aa, Hordeum spontaneum
MGRGKVQLKRIENKINRQVTFSKRRSGLLKKAHEISVLCDAEVGLIIFSTKGKLYEFSTESCMDKILERYERYSYAEKVLVSSESEIQGNWCHEYRKLKAKVETIQKCQKHLMGEDLESLNLKELQQLEQQLESSLKHIRARKNQLMHESISELQKKERSLQEENKVLQKELVEKQKAQAAQQDQTQPQTSSSSSSFMMRDAPPVADTSNHPAAAGERAEDVAVQPQVPLRTALPLWMVSHING

SEQ ID NO: 109965 - DNA, 747 bp, Glycine max
  CDS (1)..(747)
atggggaggggaagagtggaactgaaaaggatagagaacaagataaacaggcaggtaacgtttgcaaagaggagaaatgggcttctcaagaaagcctatgagctttctgttctctgtgatgctgaggttgccctcatcatcttctctacccgcggcaagctttatgaattctgtagcaccaatagcatgctcaaaacacttgaaaggtaccaaaagtgcagctatggtgcagttgaagtcagcaaacctggcaaagagcttgagagcagctaccgtgagtacttgaagctgaaagcaagatttgaatctcttcaaaggacccaaaggaaccttcttggtgaagacttgggcccactaaataccaaagatcttgagcagcttgagcggcaactggattcatctctcaagcaagtgaggtcaacgaagactcagttcatgctggaccagttagctgatcttcagaataaggagcatatgttggtggaagcaaacagatctttgaccatgaagctggaagaaatcaattcaagaaaccagtataggcaaacatgggaagctggtgagcaaagtatgccatatggaacccaaaatgctcactctcaaggcttcttccagcctttggagtgcaaccccacattgcagataggttctgactacaggtacaaccctgaagcctcagagcagcagctagctgccacaactcaagctcaacaagtcaatggatttattcctggatggatgctttga

SEQ ID NO: 109966 - protein, 248 aa, Glycine max
MGRGRVELKRIENKINRQVTFAKRRNGLLKKAYELSVLCDAEVALIIFSTRGKLYEFCSTNSMLKTLERYQKCSYGAVEVSKPGKELESSYREYLKLKARFESLQRTQRNLLGEDLGPLNTKDLEQLERQLDSSLKQVRSTKTQFMLDQLADLQNKEHMLVEANRSLTMKLEEINSRNQYRQTWEAGEQSMPYGTQNAHSQGFFQPLECNPTLQIGSDYRYNPEASEQQLAATTQAQQVNGFIPGWML

SEQ ID NO: 109967 - DNA, 729 bp, Castanea mollissima; identical to SEQ ID NO: 108971
  CDS (1)..(729)

SEQ ID NO: 109968 - protein, 242 aa, Castanea mollissima; identical to SEQ ID NO: 108972

SEQ ID NO: 109969 - DNA, 768 bp, Prunus persica
  CDS (1)..(768)
atggggaggggaagggtgcagctgaagaggattgaaaacaagatcaacaggcaggtgaccttctcaaagagaaggtctgggttgctgaagaaagcccaagagatttctgtgctttgtgatgctgaggttgctttgattgtcttctccaccaaaggcaagctctttgagtactccactgactcctgcatggaaaggatcctggaaaggtacgaaagatactcatattcagagaagcagcttcttgcaaatgatcatgaatcaactggaagctggactctggaacatgcgaagctcaaggctagggtggaggttttacaaagaaattgcagtcattttatgggggaagatctccaatctttaagtctgaaagagcttcagaatttggagcaacagcttgattctgcactgaagcacataaggtcaagaaagaaccaggttatgtacgaatcgatttcagagctgcaaaagaaggataaggcattgcaggagcaaaacaacttgctggcaaagaaggtaaaggagaaggagaaagcactagctccacaggcagagtcatgggagcagcaagtgcagaaccagggcttggactgctcctccacccttctaccagaggcattgcagtccttgaatttcggcagcggttcaaattaccagggaattagaaatgatggatccggtggagatcatgaggatgaaaatgagaccccgacagcaaatcgacctaatactctccttcccccatggatgctccgccaccttaatgaataa

SEQ ID NO: 109970 - protein, 255 aa, Prunus persica
MGRGRVQLKRIENKINRQVTFSKRRSGLLKKAQEISVLCDAEVALIVFSTKGKLFEYSTDSCMERILERYERYSYSEKQLLANDHESTGSWTLEHAKLKARVEVLQRNCSHFMGEDLQSLSLKELQNLEQQLDSALKHIRSRKNQVMYESISELQKKDKALQEQNNLLAKKVKEKEKALAPQAESWEQQVQNQGLDCSSTLLPEALQSLNFGSGSNYQGIRNDGSGGDHEDENETPTANRPNTLLPPWMLRHLNE

SEQ ID NO: 109971 - DNA, 675 bp, Elaeis guineensis var; identical to SEQ ID NO: 108973
  CDS (1)..(675)
  misc_feature (185)..(185): y is t or c
  misc_feature (376)..(376): y is t or c
  misc_feature (595)..(595): r is g or a

SEQ ID NO: 109972 - protein, 224 aa, Elaeis guineensis var; identical to SEQ ID NO: 108974
  misc_feature (62)..(62): The Xaa at location 62 stands for Ala, or Val.
  misc_feature (126)..(126): The Xaa at location 126 stands for Stop, or Gln.
  misc_feature (199)..(199): The Xaa at location 199 stands for Arg, or Gly.

SEQ ID NO: 109973 - DNA, 624 bp, Elaeis guineensis var; identical to SEQ ID NO: 108977
  CDS (1)..(624)

SEQ ID NO: 109974 - protein, 207 aa, Elaeis guineensis var; identical to SEQ ID NO: 108978

SEQ ID NO: 109975 - DNA, 660 bp, Nicotiana tabacum; identical to SEQ ID NO: 108981
  CDS (1)..(660)

SEQ ID NO: 109976 - protein, 219 aa, Nicotiana tabacum; identical to SEQ ID NO: 108982

SEQ ID NO: 109977 - DNA, 786 bp, Picea abies; identical to SEQ ID NO: 108983
  CDS (1)..(786)

SEQ ID NO: 109978 - protein, 261 aa, Picea abies; identical to SEQ ID NO: 108984

SEQ ID NO: 109979 - DNA, 669 bp, Picea abies
  CDS (1)..(669)
atgggccgtgggaagattgagataaagaggattgagaatactacgaaccgacaggtcactttctgtaagcgccgaaatggtttattgaagaaggcgtatgaattatcagttctttgtgatgcagaagtggccctcatcgtcttctccagcagagggagactttatgagtttgccaaccacagcgtgaagagaacgattgagaggtacaagaagacttgcgttgacaacaaccacggaggggtgatttcggagtccaattctcagtattggcaacaggaggctggtaaactcagacaacagattgaaattttgcaaaatgcaaataggcacttgatgggtgacgggcttacagctttaaacatcaaggaactcaagcagcttgaggttcgacttgaaaaaggaatcggccgagtacgatccaagaagaacgagatgttgcttgaggagatcgacatcatgcagagaagggaacacattcttatccaggagaatgagattcttcgcagcaagatagccgagtgccagaatagccacaacacgaacatgctatcagctcccgaatatgatgcattgccagcattcgattctcgaaatttcctacatgcaaatctaatcgatgcggcccatcactatgcacatcaggagcaaacaacgcttcagcttggctga

SEQ ID NO: 109980 - protein, 222 aa, Picea abies
MGRGKIEIKRIENTTNRQVTFCKRRNGLLKKAYELSVLCDAEVALIVFSSRGRLYEFANHSVKRTIERYKKTCVDNNHGGVISESNSQYWQQEAGKLRQQIEILQNANRHLMGDGLTALNIKELKQLEVRLEKGIGRVRSKKNEMLLEEIDIMQRREHILIQENEILRSKIAECQNSHNTNMLSAPEYDALPAFDSRNFLHANLIDAAHHYAHQEQTTLQLG

SEQ ID NO: 109981 - DNA, 687 bp, Petunia hybrida
  CDS (1)..(687)
atggggagaggaaagatagagataaagaggatcgagaacaacacaaataggcaggtgactttctgcaagaggagaaatggactcctcaaaaaagcttacgaactttcagttctttgtgatgctgagattgctctcattgtcttctccacccgtggccgcgtctatgaatacgctaacaacaacataaagggaaccatagaacggtacaagaaggcaactgcagaaacttctaatgcctgcactactcaggagctgaatgcacagttttaccaacaagaatcaaagaagctgcgccaacagatacaattactgcagaacacaaataggcatctggtgggtgaaggcttgagcgctttgaatgtaagggaactgaagcagttagagaacaggcttgaacgaggaattacaagaattaggtcaaagaagcatgaaatgatactagctgagactgagaatttgcagaagagggaaattcaactggaacaggaaaatacattccttagatcaaagatagcagaaaatgaaaggctgcaggaactaagcatgatgccagctactgggcaagagtacaatgcatttcagcaatattttgcaagaaacatgcttcaactcaatatgatggaaggaggtgtgccttcttatgatccattgcctgctcatgacaagaagtctctccagcttgagtga

SEQ ID NO: 109982 - protein, 228 aa, Petunia hybrida
MGRGKIEIKRIENNTNRQVTFCKRRNGLLKKAYELSVLCDAEIALIVFSTRGRVYEYANNNIKGTIERYKKATAETSNACTTQELNAQFYQQESKKLRQQIQLLQNTNRHLVGEGLSALNVRELKQLENRLERGITRIRSKKHEMILAETENLQKREIQLEQENTFLRSKIAENERLQELSMMPATGQEYNAFQQYFARNMLQLNMMEGGVPSYDPLPAHDKKSLQLE

SEQ ID NO: 109983 - DNA, 744 bp, Petunia integrifolia; identical to SEQ ID NO: 108985
  CDS (1)..(744)

SEQ ID NO: 109984 - protein, 247 aa, Petunia integrifolia; identical to SEQ ID NO: 108986

SEQ ID NO: 109985 - DNA, 738 bp, Pinus radiata; identical to SEQ ID NO: 108987
  CDS (1)..(738)

SEQ ID NO: 109986 - protein, 245 aa, Pinus radiata; identical to SEQ ID NO: 108988

SEQ ID NO: 109987 - DNA, 729 bp, Pinus radiata
  CDS (1)..(729)
atggggcgagggcgcgtcgagctgaagcggatcgagaataagattaaccgccaggtcacgttttcgaaacgccggaatggtctgctgaaaaaggcgtatgaactttcagtgttatgtgatgcagaggtagcactgataatattctcaagcagaggaaaactctatgagttcggaagcgccgggatgctcaagactctggagcgatatcaaaaatgttcatacgtattgcaagacgcgactgtatcggaccgggaggcgcagaattggcatcaagaggttggcaaattaaaagccagagttgaacttttacaacgatcacaaaggcacttattaggtgaagacctgggccccttgagtattaaggagctgcaacaactggaacgtcaacttgaggttgcactgacacatgttaggtcaagaaagactcaagtcatgttggaaatgatggatgaactacgcagaaaggagcgaattttacaagaagtaaacaaatctctgcgcaagaagttgcaggaggccgagggacaggcattcaatgccatgcaacctccccctcatgcatgggattcgcatgcagtagcaaataatgcatatgctatgcaacatccatcaaatgctgtggattgtgagcccacattgcagattggataccaatatgcccctcctgagtcaagcatgcctaggcatgaacaagcacaaaacaattacatgcaaggctggatggtataa

SEQ ID NO: 109988 - protein, 242 aa, Pinus radiata
MGRGRVELKRIENKINRQVTFSKRRNGLLKKAYELSVLCDAEVALIIFSSRGKLYEFGSAGMLKTLERYQKCSYVLQDATVSDREAQNWHQEVGKLKARVELLQRSQRHLLGEDLGPLSIKELQQLERQLEVALTHVRSRKTQVMLEMMDELRRKERILQEVNKSLRKKLQEAEGQAFNAMQPPPHAWDSHAVANNAYAMQHPSNAVDCEPTLQIGYQYAPPESSMPRHEQAQNNYMQGWMV

SEQ ID NO: 109989 - DNA, 720 bp, Antirrhinum majus; identical to SEQ ID NO: 108989
  CDS (1)..(720)

SEQ ID NO: 109990 - protein, 239 aa, Antirrhinum majus; identical to SEQ ID NO: 108990

SEQ ID NO: 109991 - DNA, 747 bp, Silene latifolia; identical to SEQ ID NO: 108991
  CDS (1)..(747)

SEQ ID NO: 109992 - protein, 248 aa, Silene latifolia; identical to SEQ ID NO: 108992

SEQ ID NO: 109993 - DNA, 768 bp, Zea mays; identical to SEQ ID NO: 108995
  CDS (1)..(768)

SEQ ID NO: 109994 - protein, 255 aa, Zea mays; identical to SEQ ID NO: 108996

SEQ ID NO: 109995 - DNA, 768 bp, Zea mays; identical to SEQ ID NO: 108997
  CDS (1)..(768)

SEQ ID NO: 109996 - protein, 255 aa, Zea mays; identical to SEQ ID NO: 108998

SEQ ID NO: 109997 - DNA, 861 bp, Zea mays
  CDS (1)..(861)
atgcacatccgagaagaggaggctacaccatccacagtaacaggcatcatgtcgaccctgacttcggcggggcagcagaagctgaaggagcccatatcccctggtggcggctccgcgtcggtcgctgggtccgctgcggagaggaacaacggcggcaggggcaagggcaagactgagatcaagcgcatcgagaacacgaccaacaggcaggtcaccttctgcaagcgccgcaacggcctcctcaagaaggcgtacgagctctccgtgctctgcgacgccgaggtcgcgctcatcgtcttctccagccgcggccgcctctacgagtacgccaacaacagcgtgaagggcaccattgagaggtacaagaaggcaaccagtgacaactccagcgcagctggtacgattgcagaggtcaccattcagcattacaagcaggaatctgctaggctgaggcagcagatcgttaacttgcagaactccaacagggccctgataggtgattctatcacaaccatgagccacaaggaacttaagcacttggagactaggttagacaaagctctcggaaagattagagcaaaaaagaacgatgtgctgtgttctgaagtcgagtacatgcagagaagggaaatggagttgcagaatgacaacttgtacttaaggagccgggttgatgagaatgaaagggcacaacagacagcgaacatgatgggggcaccatcgacaagtgagtatcagcagcacggttttactccttatgatccaataaggagcttcctgcagttcaacatcgtgcagcagcctcagttctattctcagcaggaggaccggaaagacttcaacgaccaaggtggaagataa

SEQ ID NO: 109998 - protein, 286 aa, Zea mays
MHIREEEATPSTVTGIMSTLTSAGQQKLKEPISPGGGSASVAGSAAERNNGGRGKGKTEIKRIENTTNRQVTFCKRRNGLLKKAYELSVLCDAEVALIVFSSRGRLYEYANNSVKGTIERYKKATSDNSSAAGTIAEVTIQHYKQESARLRQQIVNLQNSNRALIGDSITTMSHKELKHLETRLDKALGKIRAKKNDVLCSEVEYMQRREMELQNDNLYLRSRVDENERAQQTANMMGAPSTSEYQQHGFTPYDPIRSFLQFNIVQQPQFYSQQEDRKDFNDQGGR

SEQ ID NO: 109999 - DNA, 798 bp, Zea mays
  CDS (1)..(798)
atggggaggggaaggattgagatcaagaggatcgagaacaacacgagccggcaggtcaccttctgcaagcgccgcaatgggctcctcaagaaggcgtacgagctctccgtcctctgcgacgccgaggtggcgctcgtcgtcttctccagccgcggacgcctctacgagtacgccaacaacagtgtgaaggctacgatcgagaggtacaagaaggcacacgccgttggctcttcctctggccccccactcttagagcacaatgcccagcaattctaccagcaagaatccgtaaaactgcgcaaccagatccagatgctgcaaaacactaacaggcacttggttggtgactctgtgggaaacttgtcactcaaagagctgaagcagctggagagccgccttgagaaaggcatctctaagatcagggccaggaagagtgagctgctggctgccgagatcaattacatggccaaaagggagactgagcttcagaatgaccacatgaacctcaggaccaagattgaggagggagagcaacagctgcagcaggtgactgtggcccagtctgtcgcagcagcagctgccaccgacgtggagctgaatccgttcttggagatggataccaaatgcttcttccctggcggccccttcgcgacactggacatgaagtgcttcttccccggcagcttgcagatgctggaggcacagcagcgccagatgcttgccaccgagctgaacctcggctaccaactggcgccgcctgacactgacgttgccaacaataaccctcagcagttctaa

SEQ ID NO: 110000 - protein, 265 aa, Zea mays
MGRGRIEIKRIENNTSRQVTFCKRRNGLLKKAYELSVLCDAEVALVVFSSRGRLYEYANNSVKATIERYKKAHAVGSSSGPPLLEHNAQQFYQQESVKLRNQIQMLQNTNRHLVGDSVGNLSLKELKQLESRLEKGISKIRARKSELLAAEINYMAKRETELQNDHMNLRTKIEEGEQQLQQVTVAQSVAAAAATDVELNPFLEMDTKCFFPGGPFATLDMKCFFPGSLQMLEAQQRQMLATELNLGYQLAPPDTDVANNNPQQF

SEQ ID NO: 110001 - DNA, 762 bp, Rumex acetosa; identical to SEQ ID NO: 108999
  CDS (1)..(762)

SEQ ID NO: 110002 - protein, 253 aa, Rumex acetosa; identical to SEQ ID NO: 109000

SEQ ID NO: 110003 - DNA, 807 bp, Zea mays
  CDS (1)..(807)
atgggtagaggaaggattgagatcaagaggatcgagaacaacacgagccggcaggtcaccttctgcaagcgccgcaatgggctcctcaagaaggcgtacgagctctccgtcctctgcgacgctgaggtggccctcatcgtcttctctagccgtggtcgcctctacgagtatgccaacaacagtgtcaaggctactgttgagaggtacaagaaggcacacaccgttggctcttcctctgggcccccgctcctagagcacaatgcccagcaattctaccagcaagaatcagcaaaactgcgcaaccagatccagatgctgcaaaacactaacaggcacttggttggtgactccgtgggaaacctgtcactcaaggagctgaagcagctggagagccgccttgagaaaggcatctctaagatcagggccaggaagagtgagctgctggctgcggagatcagttacatggccaaaagggagactgagcttcagaatgaccacatgaccctcaggaccaagattgaggagggagagcaacagctgcagcaggtgaccgtggcacggtcagttgcagcagcagcagctgccaccaacttggagctgaacccattcttggagatggataccaaatgcttcttcactggcggccccttcgcgacgctggacatgaagtgctttctccccggcagcttgcagcagatgctggaggcacagcagcgccagatgctcgccaccgagctgaacctcggctaccaactggcgccgcctggttctgacgctgccaacaataaccctcatcatcagttctaa

SEQ ID NO: 110004 - protein, 268 aa, Zea mays
MGRGRIEIKRIENNTSRQVTFCKRRNGLLKKAYELSVLCDAEVALIVFSSRGRLYEYANNSVKATVERYKKAHTVGSSSGPPLLEHNAQQFYQQESAKLRNQIQMLQNTNRHLVGDSVGNLSLKELKQLESRLEKGISKIRARKSELLAAEISYMAKRETELQNDHMTLRTKIEEGEQQLQQVTVARSVAAAAAATNLELNPFLEMDTKCFFTGGPFATLDMKCFLPGSLQQMLEAQQRQMLATELNLGYQLAPPGSDAANNNPHHQF

SEQ ID NO: 110005 - DNA, 765 bp, Cucumis sativus
  CDS (1)..(765)
atgagttgttatgaggaagaagatgaagaatcaggagtagtaggattaagaagatcatcatcatcatcaagaacaggaagaggaaagattgaaataaagagaattgaaaatacaacaaatcgtcaagttactttctgtaaacgaagaaatggtttgcttaagaaagcttatgaactctctgtcctttgtgatgctgaggttgctcttatcgtcttctcctcccgtggtcgtctctatgaatacgctaacaacagtgttagggctacgatttcgaggtacaaaaaggcatattcggatccctccaccgccatgaccgtttcagaagccaatactcagttctaccagcaagaatctgccaaattacgagctcaaatcggaaatttgcaaaacctaaacaggcatttgttgggggaatccatcagttcgttatcagttaaagatttgaaaagcctagaggtgaaattggagaaaggaattagccgaattcgatccagaaagaatgagcttctgttttcggagattgaatacatgcaaaaaagggaaattgaactgcacactaacaaccagctgatacgtgcaaagatagccgagacagagagaagccaacaaaacacaaatgcaagtaataacaatggaatagcaacaagaagaggagaggaaggatcaatgggtacaaatttagaggacaacaatcatcatcaatatgactcaacaaactactttgatccccatcataatcaccctatctctcttcaacttgtgtaa

SEQ ID NO: 110006 - protein, 254 aa, Cucumis sativus
MSCYEEEDEESGVVGLRRSSSSSRTGRGKIEIKRIENTTNRQVTFCKRRNGLLKKAYELSVLCDAEVALIVFSSRGRLYEYANNSVRATISRYKKAYSDPSTAMTVSEANTQFYQQESAKLRAQIGNLQNLNRHLLGESISSLSVKDLKSLEVKLEKGISRIRSRKNELLFSEIEYMQKREIELHTNNQLIRAKIAETERSQQNTNASNNNGIATRRGEEGSMGTNLEDNNHHQYDSTNYFDPHHNHPISLQLV

SEQ ID NO: 110007 - DNA, 678 bp, Petunia hybrida; identical to SEQ ID NO: 109001
  CDS (1)..(678)

SEQ ID NO: 110008 - protein, 225 aa, Petunia hybrida; identical to SEQ ID NO: 109002

SEQ ID NO: 110009 - DNA, 756 bp, Prunus persica; identical to SEQ ID NO: 109003
  CDS (1)..(756)

SEQ ID NO: 110010 - protein, 251 aa, Prunus persica; identical to SEQ ID NO: 109004

SEQ ID NO: 110011 - DNA, 693 bp, Beta vulgaris
  CDS (1)..(693)
  misc_feature (159)..(159): r is g or a
  misc_feature (294)..(294): m is a or c
  misc_feature (596)..(596): y is t or c
  misc_feature (634)..(634): s is g or c
atgggaaggggtaaaattgagatcaagaggatagaaaacacaacgaaccgacaagttaccttctgcaagagaaggaatggattgctgaagaaagcctatgaattatcagtcttgtgtgatgctgaagttgctcttattgtcttttcaagccgaggccgrctctatgagtatgctaatcatagtgtcaagggcacaattgataggtacaagaaagcatgctctaaccaatccggtgctggctcagttgctgaagccaatgctcagtattatcagcaagaggctgcaaagctgcgmaaccaaattcgcactgcaacagagaacaacaggttgctttccaggcacatgatgggcgaagggctgagcagtttaagtatgaaggagctgaagaaccttgagactaaactggagcgcggtattagcagaattaggtccaaaaagaatgagcttctatttgctgagatcgagttcatgcagaaaagggagattgaattgcataacaacaatcagtttcttcgtgcaaggatttctgaaaatgagagagctcagcaaagcatgagcttgatgccgggaggcagtgattatgatcttgtcccgtytcagtcatttgattcgcggaattactttcaagtaaacscgctccaacctagtagtcagtatgcccgccaagaccaaaccccgctccagttagtgtaa

SEQ ID NO: 110012 - protein, 230 aa, Beta vulgaris
  misc_feature (199)..(199): The Xaa at location 199 stands for Phe, or Ser.
  misc_feature (212)..(212): The Xaa at location 212 stands for Ala, or Pro.
MGRGKIEIKRIENTTNRQVTFCKRRNGLLKKAYELSVLCDAEVALIVFSSRGRLYEYANHSVKGTIDRYKKACSNQSGAGSVAEANAQYYQQEAAKLRNQIRTATENNRLLSRHMMGEGLSSLSMKELKNLETKLERGISRIRSKKNELLFAEIEFMQKREIELHNNNQFLRARISENERAQQSMSLMPGGSDYDLVPXQSFDSRNYFQVNXLQPSSQYARQDQTPLQLV

SEQ ID NO: 110013 - DNA, 759 bp, Brassica juncea
  CDS (1)..(759)
atggcttaccaaacggagctaggaggagaatcctcttcacaaaggaaagctgggagaggaaagatcgaaataaaacggatcgagaacacaacgaaccgtcaagttactttctgcaaacgcagaaatggtttgctcaagaaagcttacgaactctctgttctttgttatgctgaagtcgcactcattgtcttctctagccgtggccgtctctatgagtactcaaacaacagtgtaaaagggacaattgagaggtacaagaaagcaatatcggataattctaacaccggatccgtggcagaaattaatgcacagtattatcaacaagaatctgccaaattgcgtcaacaaattatcagcatacaaaactcgaacaggcaattgatgggtgagacgattgggtcaatgtctcccaaagagctcaggaacttggaaggcagattagacagaagtgttaatcgaatccgatccaagaagaacgaactcttattcgccgaaattgactacatgcagaagagagaagttgatttgcataacgataaccagcttcttcgtgctaagatagctgaaaatgagaggaacaatccaagtatgagtctgatgccaggaggatctaactacgagcagatcatgccaccgccacaaacgcaacctcaaccgtttgactcacggaactatttccaagtcgcggcattgcaacctaacaatcaccattactcatccgcaggtcgcgaagaccaaaccgctctccagttagtgtaa

SEQ ID NO: 110014 - protein, 252 aa, Brassica juncea
MAYQTELGGESSSQRKAGRGKIEIKRIENTTNRQVTFCKRRNGLLKKAYELSVLCYAEVALIVFSSRGRLYEYSNNSVKGTIERYKKAISDNSNTGSVAEINAQYYQQESAKLRQQIISIQNSNRQLMGETIGSMSPKELRNLEGRLDRSVNRIRSKKNELLFAEIDYMQKREVDLHNDNQLLRAKIAENERNNPSMSLMPGGSNYEQIMPPPQTQPQPFDSRNYFQVAALQPNNHHYSSAGREDQTALQLV

SEQ ID NO: 110015 - DNA, 708 bp, Musa acuminata; identical to SEQ ID NO: 109005
  CDS (1)..(708)

SEQ ID NO: 110016 - protein, 235 aa, Musa acuminata; identical to SEQ ID NO: 109006

SEQ ID NO: 110017 - DNA, 729 bp, Hyacinthus orientalis; identical to SEQ ID NO: 109009
  CDS (1)..(729)

SEQ ID NO: 110018 - protein, 242 aa, Hyacinthus orientalis; identical to SEQ ID NO: 109010

SEQ ID NO: 110019 - DNA, 651 bp, Pisum sativum; identical to SEQ ID NO: 109011
  CDS (1)..(651)

SEQ ID NO: 110020 - protein, 216 aa, Pisum sativum; identical to SEQ ID NO: 109012

SEQ ID NO: 110021 - DNA, 672 bp, Lotus japonicus; identical to SEQ ID NO: 109013
  CDS (1)..(672)

SEQ ID NO: 110022 - protein, 223 aa, Lotus japonicus; identical to SEQ ID NO: 109014

SEQ ID NO: 110023 - DNA, 732 bp, Lotus japonicus; identical to SEQ ID NO: 109015
  CDS (1)..(732)

SEQ ID NO: 110024 - protein, 243 aa, Lotus japonicus; identical to SEQ ID NO: 109016

SEQ ID NO: 110025 - DNA, 669 bp, Solanum macrocarpon; identical to SEQ ID NO: 109019
  CDS (1)..(669)

SEQ ID NO: 110026 - protein, 222 aa, Solanum macrocarpon; identical to SEQ ID NO: 109020

SEQ ID NO: 110027 - DNA, 726 bp, Pisum sativum; identical to SEQ ID NO: 109021
  CDS (1)..(726)

SEQ ID NO: 110028 - protein, 241 aa, Pisum sativum; identical to SEQ ID NO: 109022

SEQ ID NO: 110029 - DNA, 732 bp, Pisum sativum; identical to SEQ ID NO: 109023
  CDS (1)..(732)

SEQ ID NO: 110030 - protein, 243 aa, Pisum sativum; identical to SEQ ID NO: 109024

SEQ ID NO: 110031 - DNA, 750 bp, Pisum sativum; identical to SEQ ID NO: 109025
  CDS (1)..(750)

SEQ ID NO: 110032 - protein, 249 aa, Pisum sativum; identical to SEQ ID NO: 109026

SEQ ID NO: 110033 - DNA, 711 bp, Pisum sativum; identical to SEQ ID NO: 109029
  CDS (1)..(711)

SEQ ID NO: 110034 - protein, 236 aa, Pisum sativum; identical to SEQ ID NO: 109030

SEQ ID NO: 110035 - DNA, 732 bp, Ginkgo biloba; identical to SEQ ID NO: 109033
  CDS (1)..(732)

SEQ ID NO: 110036 - protein, 243 aa, Ginkgo biloba; identical to SEQ ID NO: 109034

SEQ ID NO: 110037 - DNA, 657 bp, Ginkgo biloba
  CDS (1)..(657)
atggtgagaggtaaaactcagatgaagaggaacgaaaacgcgaccagcaggcaggtgacattctccaagcgtcggaatgggctgctcaagaaagcttacgagttctctgttctctgtgacgcggaagtgggtcttatcattttctctcccagaggaaaactttacgagtttgccagtgccagtatgcagaagatgttggaaaggtaccagaagtattcagacgatatgaatgcaaataagaaaaccaatgagcaagacgctcagcattggaaggaagaaattgaaaatatggggcaaaggattgagatccttgaagctacacaaaggcaaatgttgggggaatgcctagcatcatgttcaatgaaagaattgaatcaccttgagaaccaagtagaacgtggtttgaaccatatacgagcaaggaagactgaaatattaatggagcagatcgaacagctaaaaaggaaggagcgattcttaactgaggagaacgcaatacttcggcaaaagtgtattcaaccacattatgcggatgcttcaatttcgacaaccccaacaattgggtatggaagtattcaacatcctgaagtcgagactcaattgcttatgaggccaccggaagtacaagaccacattcaacttaagggttctaattaa

SEQ ID NO: 110038 - protein, 218 aa, Ginkgo biloba
MVRGKTQMKRNENATSRQVTFSKRRNGLLKKAYEFSVLCDAEVGLIIFSPRGKLYEFASASMQKMLERYQKYSDDMNANKKTNEQDAQHWKEEIENMGQRIEILEATQRQMLGECLASCSMKELNHLENQVERGLNHIRARKTEILMEQIEQLKRKERFLTEENAILRQKCIQPHYADASISTTPTIGYGSIQHPEVETQLLMRPPEVQDHIQLKGSN

SEQ ID NO: 110039 - DNA, 666 bp, Ginkgo biloba
  CDS (1)..(666)
atgggccgtgggaagattgagatgaagaggattgagaacactacaaaccgacaggtcactttctgcaagcgtcgaaatggtctgttgaagaaagcgtatgaattatccgtgctttgtgatgcggaagtggctctcatcgtcttctccagtcgcgggagactctatgagtttgctaataacagtgtgaagagaacaatcgacagatacaagaagacttgcgctgacaactctcacggtggagccatttcagagtgtaattctcagtactggcaacaggaggcaggaaaactgagacagcaaattgatattctgcaaaatgcaaatagacacttgatgggggacgcgcttacatctttaagtgtaaaggagcttaagcagctagaaattcgacttgagaggggcattagcagggttcgatcaaagaagaatgaaatgttgcttgaggagatagagattatgcaaagaagggaacacatattactggcggagaaccagtttcttcgcactaagatagctgaatgtgaaagcagccaaaatgcaaatatgctgccgggtcccgaattcgatgcattgcctggatttgattctcgacatttcctacatgcaagtataatggatgctcaccattatgcacaacaggatcaaacggcccttcaacttggatga

SEQ ID NO: 110040 - protein, 221 aa, Ginkgo biloba
MGRGKIEMKRIENTTNRQVTFCKRRNGLLKKAYELSVLCDAEVALIVFSSRGRLYEFANNSVKRTIDRYKKTCADNSHGGAISECNSQYWQQEAGKLRQQIDILQNANRHLMGDALTSLSVKELKQLEIRLERGISRVRSKKNEMLLEEIEIMQRREHILLAENQFLRTKIAECESSQNANMLPGPEFDALPGFDSRHFLHASIMDAHHYAQQDQTALQLG

SEQ ID NO: 110041 - DNA, 759 bp, Ginkgo biloba; identical to SEQ ID NO: 109035
  CDS (1)..(759)

SEQ ID NO: 110042 - protein, 252 aa, Ginkgo biloba; identical to SEQ ID NO: 109036

SEQ ID NO: 110043 - DNA, 729 bp, Persea americana; identical to SEQ ID NO: 109037
  CDS (1)..(729)

SEQ ID NO: 110044 - protein, 242 aa, Persea americana; identical to SEQ ID NO: 109038

SEQ ID NO: 110045 - DNA, 714 bp, Persea americana; identical to SEQ ID NO: 109039
  CDS (1)..(714)

SEQ ID NO: 110046 - protein, 237 aa, Persea americana; identical to SEQ ID NO: 109040

SEQ ID NO: 110047 - DNA, 714 bp, Acorus americanus; identical to SEQ ID NO: 109041
  CDS (1)..(714)

SEQ ID NO: 110048 - protein, 237 aa, Acorus americanus; identical to SEQ ID NO: 109042

SEQ ID NO: 110049 - DNA, 729 bp, Liriodendron tulipifera; identical to SEQ ID NO: 109043
  CDS (1)..(729)

SEQ ID NO: 110050 - protein, 242 aa, Liriodendron tulipifera; identical to SEQ ID NO: 109044

SEQ ID NO: 110051 - DNA, 726 bp, Eschscholzia californica; identical to SEQ ID NO: 109045
  CDS (1)..(726)

SEQ ID NO: 110052 - protein, 241 aa, Eschscholzia californica; identical to SEQ ID NO: 109046

SEQ ID NO: 110053 - DNA, 732 bp, Amborella trichopoda; identical to SEQ ID NO: 109047
  CDS (1)..(732)

SEQ ID NO: 110054 - protein, 243 aa, Amborella trichopoda; identical to SEQ ID NO: 109048

SEQ ID NO: 110055 - DNA, 735 bp, Aegilops tauschii; identical to SEQ ID NO: 109049
  CDS (1)..(735)

SEQ ID NO: 110056 - protein, 244 aa, Aegilops tauschii; identical to SEQ ID NO: 109050

SEQ ID NO: 110057 - DNA, 735 bp, Triticum turgidum; identical to SEQ ID NO: 109051
  CDS (1)..(735)

SEQ ID NO: 110058 - protein, 244 aa, Triticum turgidum; identical to SEQ ID NO: 109052

SEQ ID NO: 110059 - DNA, 735 bp, Triticum aestivum
  CDS (1)..(735)
atggggcgggggaaggtgcagctgaagcggatcgagaacaagatcaaccggcaggtgaccttctccaagcgccgctcggggcttctcaagaaggcgcacgagatctccgtgctctgcgacgccgaggtcggcctcatcatcttctccaccaagggaaagctctacgagttctccaccgagtcatgtatggacaaaattcttgaacggtatgagcgctattcttatgcagaaaaggttctcgtttcaagtgaatctgaaattcagggaaactggtgtcacgaatataggaaactgaaggcgaaggttgagacaatacagaaatgtcaaaagcatctcatgggagaggatcttgaatctttgaatctcaaggagttgcagcaactggagcagcagctggaaagctcactgaaacatatcagatccaggaagaaccaacttatgcacgaatccatttctgagcttcagaagaaggagaggtcactgcaggaggagaataaagttctccagaaggaactcgtggagaagcagaaggcccatgtggcgcagcaagatcaaactcagcctcaaaccagctcttcatcttcttccttcatgctgagggatgctccccctgccgcaaataccagcattcatccagcggcaacaggcgagagggcagaggatgcggcagtgcagccgcaggccccaccccggacggggcttccaccgtggatggtgagccacatcaacgggtga

SEQ ID NO: 110060 - protein, 244 aa, Triticum aestivum
MGRGKVQLKRIENKINRQVTFSKRRSGLLKKAHEISVLCDAEVGLIIFSTKGKLYEFSTESCMDKILERYERYSYAEKVLVSSESEIQGNWCHEYRKLKAKVETIQKCQKHLMGEDLESLNLKELQQLEQQLESSLKHIRSRKNQLMHESISELQKKERSLQEENKVLQKELVEKQKAHVAQQDQTQPQTSSSSSSFMLRDAPPAANTSIHPAATGERAEDAAVQPQAPPRTGLPPWMVSHING

SEQ ID NO: 110061 - DNA, 735 bp, Triticum turgidum
  CDS (1)..(735)
atggggcgggggaaggtgcagctgaagcggatcgagaacaagatcaaccggcaggtgaccttctccaagcgccgctcggggcttctcaagaaggcgcacgagatctccgtgctctgcgacgccgaggtcggcctcatcatcttctccaccaagggaaagctctacgagttctccaccgagtcatgtatggacaaaattcttgaacggtatgagcgctattcttatgcagaaaaggttctcgtttcaagtgaatctgaaattcagggaaactggtgtcacgaatataggaaactgaaggcgaaggttgagacaatacagaaatgtcaaaagcatctcatgggagaggatcttgaatctttgaatctcaaggagttgcagcaactggagcagcagctggaaagctcactgaaacatatcagatccaggaagaaccaacttatgcacgaatccatttctgagcttcagaagaaggagaggtcactgcaggaggagaataaagttctccagaaggaactcgtggagaagcagaaggcccatgcggcgcagcaagatcaaactcagcctcaaaccagctcttcatcttcttccttcatgctgagggatgctccccctgccgcaaataccagcattcatccagcggcaacaggcgagagggcagaggatgcggcagtgcagccgcaggccccaccccggacggggcttccaccgtggatggtgagccacatcaacgggtga

SEQ ID NO: 110062 - protein, 244 aa, Triticum turgidum
MGRGKVQLKRIENKINRQVTFSKRRSGLLKKAHEISVLCDAEVGLIIFSTKGKLYEFSTESCMDKILERYERYSYAEKVLVSSESEIQGNWCHEYRKLKAKVETIQKCQKHLMGEDLESLNLKELQQLEQQLESSLKHIRSRKNQLMHESISELQKKERSLQEENKVLQKELVEKQKAHAAQQDQTQPQTSSSSSSFMLRDAPPAANTSIHPAATGERAEDAAVQPQAPPRTGLPPWMVSHING

SEQ ID NO: 110063 - DNA, 681 bp, Thalictrum dioicum
  CDS (1)..(681)
atgggaaggggaaaaattgaaattaagaggatcgaaaacacgacaaatcgtcaagttaccttctgtaagcgtagaaatggattactcaaaaaagcttatgaattatctgtgttatgtgaagctgaagtagcccttatcgtcttctctagccgcggtcgcctttatgagtactccaacaacagtgtcaaaaaaactattgagaggtacaagaaggctagcacagactctcccaactctggatctgtttctgaagctaatgtgcagttttaccagcaagaagcgtcaaaactgcataatcagatagccagtttacaaaatcataacaggaacttgttgggagagtctcttagcaatctaaatatcaaggagctcaggcaaatcgagaaaaagatagagggtggaattagcaaaatccgagccaaaaagaatgaactgctgtttgctgaggttgagtatatgcagaagagggaaatagatttgcagactgataacaagtatctcagggcaatgatcgctgcaaacgagagagcccccccagaacatatgaatctgatgcctgcaaatgaatatcacatcatgtcgtctgcaccctttgattctcggaacttcttgcctgcaaacctattggaccacaataacaattactctcgctcagatcaaacgacacttcaacttgggtga

SEQ ID NO: 110064 - protein, 226 aa, Thalictrum dioicum
MGRGKIEIKRIENTTNRQVTFCKRRNGLLKKAYELSVLCEAEVALIVFSSRGRLYEYSNNSVKKTIERYKKASTDSPNSGSVSEANVQFYQQEASKLHNQIASLQNHNRNLLGESLSNLNIKELRQIEKKIEGGISKIRAKKNELLFAEVEYMQKREIDLQTDNKYLRAMIAANERAPPEHMNLMPANEYHIMSSAPFDSRNFLPANLLDHNNNYSRSDQTTLQLG

SEQ ID NO: 110065 - DNA, 732 bp, Glycine max; identical to SEQ ID NO: 109053
  CDS (1)..(732)

SEQ ID NO: 110066 - protein, 243 aa, Glycine max; identical to SEQ ID NO: 109054

SEQ ID NO: 110067 - DNA, 705 bp, Elaeis guineensis var; identical to SEQ ID NO: 109055
  CDS (1)..(705)

SEQ ID NO: 110068 - protein, 234 aa, Elaeis guineensis var; identical to SEQ ID NO: 109056

SEQ ID NO: 110069 - DNA, 753 bp, Elaeis guineensis var; identical to SEQ ID NO: 109057
  CDS (1)..(753)

SEQ ID NO: 110070 - protein, 250 aa, Elaeis guineensis var; identical to SEQ ID NO: 109058

SEQ ID NO: 110071 - DNA, 729 bp, Elaeis guineensis var; identical to SEQ ID NO: 109059
  CDS (1)..(729)

SEQ ID NO: 110072 - protein, 242 aa, Elaeis guineensis var; identical to SEQ ID NO: 109060

SEQ ID NO: 110073 - DNA, 729 bp, Elaeis guineensis var
  CDS (1)..(729)
atggggaggggaagggtggagctgaagagaatcgagaacaagatcaatcgccaggtgactttcgcgaagcggcggaatgggctcctcaagaaggcctacgagctctccgtcctctgcgacgccgaggtcgctctcatcatcttctccaaccgcgggaagctttacgagttctgcagcagctccagtatgatgaagacactcgaaaggtaccaaaaatgtaactatggtgctccggagactaatattatatcaagagagactcagagtagtcagcaagagtacttgaaattaaaagcacgtgttgaagccttacagagatcgcaaagaaatctcctcggtgaggacttgggtccactcagcagcaaggagcttgagcagctcgagcggcaacttgatgcatcgttaaagcaaatcagatcaacacggacccaatacatgcttgatcagcttgcagatcttcaacgaagggaacaaatgctatgtgaggccaacaaaagtctaaggcgaaggttggaagaaagtaaccaggctggtcagcagcaagtttgggatcccactgctcatgcagtaggctatggccggcagccacctcaaccacagagcgatggattctaccaacagatagatggtgaacctactctccaaatcaggtatcctccagaacaaataacaatcgcagcagcacccgggtcaagtgtgagtacttatatgccaggatggcttgcataa

SEQ ID NO: 110074 - protein, 242 aa, Elaeis guineensis var
MGRGRVELKRIENKINRQVTFAKRRNGLLKKAYELSVLCDAEVALIIFSNRGKLYEFCSSSSMMKTLERYQKCNYGAPETNIISRETQSSQQEYLKLKARVEALQRSQRNLLGEDLGPLSSKELEQLERQLDASLKQIRSTRTQYMLDQLADLQRREQMLCEANKSLRRRLEESNQAGQQQVWDPTAHAVGYGRQPPQPQSDGFYQQIDGEPTLQIRYPPEQITIAAAPGSSVSTYMPGWLA

SEQ ID NO: 110075 - DNA, 729 bp, Elaeis guineensis var
  CDS (1)..(729)
atggggaggggaagggtggagctgaagagaatcgagaacaagatcaatcgccaggtgaccttcgcgaagcggcggaatgggctcctcaagaaggcctacgagctctccgtgctctgcgacgccgaggttgctctcatcatcttctccaaccgcgggaagctttacgagttctgcagcagctccagtatgatgaagacacttgaaaggtatcaaaaatgcaactatggtgctccggagactaatattatatcaagagagactcagagtagtcagcaggagtacttgaaactaaaagcacgtgctgaagccttacagagatcgcaaagaaatctcctcggtgaggacttgggcccactcagcagcaaggagcttgagcagcttgagcggcaacttgatgcatcgttaaagcaaatcagatcaacacggacccaatacatgcttgatcagcttgcagatcttcaacgaaaggaacaaatgctatgtgaggccaataaaagtctaaggcgaaggttggaggaaagtaaccaggctggtcagcagcaagtttgggatcccactgctcatgcagtaggctatggccggcagccacctcaaccacagagcgatggattctaccaacagatagatagtgaacctactctccaaatcgggtatcctccagaacaaataacaatcgcagcagcacccgggccaagtgtgaatacttatatgccaggatggcttgcataa

SEQ ID NO: 110076 - protein, 242 aa, Elaeis guineensis var
MGRGRVELKRIENKINRQVTFAKRRNGLLKKAYELSVLCDAEVALIIFSNRGKLYEFCSSSSMMKTLERYQKCNYGAPETNIISRETQSSQQEYLKLKARAEALQRSQRNLLGEDLGPLSSKELEQLERQLDASLKQIRSTRTQYMLDQLADLQRKEQMLCEANKSLRRRLEESNQAGQQQVWDPTAHAVGYGRQPPQPQSDGFYQQIDSEPTLQIGYPPEQITIAAAPGPSVNTYMPGWLA

SEQ ID NO: 110077 - DNA, 702 bp, Elaeis guineensis var; identical to SEQ ID NO: 109061
  CDS (1)..(702)

SEQ ID NO: 110078 - protein, 233 aa, Elaeis guineensis var; identical to SEQ ID NO: 109062

SEQ ID NO: 110079 - DNA, 753 bp, Elaeis guineensis var; identical to SEQ ID NO: 109063
  CDS (1)..(753)

SEQ ID NO: 110080 - protein, 250 aa, Elaeis guineensis var; identical to SEQ ID NO: 109064

SEQ ID NO: 110081 - DNA, 705 bp, Asparagus virgatus
  CDS (1)..(705)
atgggaagaggaaagattgagatcaagaggattgagaacacaacgaatcgccaagtgactttctgcaagaggaggaatggcctcttgaagaaagcttatgaactctcggtattgtgtgatgcagaggttgcgcttatcgtcttctccagccgcggacgcctctatgaatacgcaaacaacagcataaaatcaaccattgagaggtacaagaaagcatgtgctgatagttccaattcaaatgcagttatagaggtcaattctcagcagtattatcagcaagaagcagcaaagttacgccatcagatacagattttacaaaatgctaacaggcacttaatgggtgattctctgagttctttgactgtgaaagagctcaaacagctcgagaaccgacttgaaaggggcattaccaggatcaggtcaaagaagcatgagctcttgtttgcggaaattgaatacatgcagaaaagggaagcggaacttcagaatgacaacatgtacctcagagctaagatatcagagaatgagcgagcacatcaagtaagtgttgtacagcctgggcctgagtttgacactcttccaacattcgactcaaggaactactacaatgttcatatgcttgaggctgcacctcactattctcatcatcaagatcaaacagctcttcatcttgggtatgaaaacaaagctgatcctgctgcataa

SEQ ID NO: 110082 - protein, 234 aa, Asparagus virgatus
MGRGKIEIKRIENTTNRQVTFCKRRNGLLKKAYELSVLCDAEVALIVFSSRGRLYEYANNSIKSTIERYKKACADSSNSNAVIEVNSQQYYQQEAAKLRHQIQILQNANRHLMGDSLSSLTVKELKQLENRLERGITRIRSKKHELLFAEIEYMQKREAELQNDNMYLRAKISENERAHQVSVVQPGPEFDTLPTFDSRNYYNVHMLEAAPHYSHHQDQTALHLGYENKADPAA

SEQ ID NO: 110083 - DNA, 741 bp, Arabidopsis thaliana
  CDS (1)..(741)
atggagggtggtgcgagtaatgaagtagcagagagcagcaagaagatagggagagggaagatagagataaagaggatagagaacactacgaatcgtcaagtcactttctgcaaacgacgcaatggtttactcaagaaagcttatgagctctctgtcttgtgtgacgctgaggttgctcttgtcatcttctccactcgaggccgtctctacgagtacgccaacaacagtgtgagaggaacaatagaaaggtacaagaaagcttgctccgacgccgttaaccctccgaccatcaccgaagctaatactcagtactatcagcaagaggcgtctaaactccggagacagattcgggacattcagaatttgaacagacacattcttggtgaatctcttggttccttgaactttaaggaactcaagaaccttgaaagtaggcttgagaaaggaatcagtcgtgtccgatccaagaagcacgagatgttagttgcagagattgaatacatgcaaaaaagggaaatcgagctgcaaaacgataacatgtatctccgctccaagattactgaaagaacaggtctacagcaacaagaatcgagtgtgatacatcaagggacagcttacgagtcgggtgttacttcttctcaccagtcggggcagtataaccggaattatattgcggttaaccttcttgaaccgaatcagaattcctccaaccaagaccaaccacctctgcaacttgtttga

SEQ ID NO: 110084 - protein, 246 aa, Arabidopsis thaliana
MEGGASNEVAESSKKIGRGKIEIKRIENTTNRQVTFCKRRNGLLKKAYELSVLCDAEVALVIFSTRGRLYEYANNSVRGTIERYKKACSDAVNPPTITEANTQYYQQEASKLRRQIRDIQNLNRHILGESLGSLNFKELKNLESRLEKGISRVRSKKHEMLVAEIEYMQKREIELQNDNMYLRSKITERTGLQQQESSVIHQGTAYESGVTSSHQSGQYNRNYIAVNLLEPNQNSSNQDQPPLQLV

SEQ ID NO: 110085 - DNA, 741 bp, Arabidopsis thaliana
  CDS (1)..(741)
atggaggatggtgcgagtaatgaagtagcagagagcagcaagaagatagggagagggaagatagagataaagaggatagagaacactacgaatcgtcaagtcactttctgcaaacgacgcaatggtttactcaagaaagcttatgagctctctgtcttgtgtgacgctgaggttgctcttgtcatcttctccactcgaggccgtctctacgagtacgccaacaacagtgtgagaggaacaatagaaaggtacaagaaagcttgctccgacgccgttaaccctccgaccatcaccgaagctaatactcagtactatcagcaagaggcgtctaaactccggagacagattcgggacattcagaatttgaacagacacattcttggtgaatctcttggttccttgaactttaaggaactcaagaaccttgaaagtaggcttgagaaaggaatcagtcgtgtccgatccaagaagcacgagatgttagttgcagagattgaatacatgcaaaaaagggaaatcgagctgcaaaacgataacatgtatctccgctccaagattactgaaagaacaggtctacagcaacaagaatcgagtgtgatacatcaagggacagtttacgagtcgggtgttacttcttctcaccagtcggggcagtataaccggaattatattgcggttaaccttcttgaaccgaatcagaattcctccaaccaagaccaaccacctctgcaacttgtttga

SEQ ID NO: 110086 - protein, 246 aa, Arabidopsis thaliana
MEDGASNEVAESSKKIGRGKIEIKRIENTTNRQVTFCKRRNGLLKKAYELSVLCDAEVALVIFSTRGRLYEYANNSVRGTIERYKKACSDAVNPPTITEANTQYYQQEASKLRRQIRDIQNLNRHILGESLGSLNFKELKNLESRLEKGISRVRSKKHEMLVAEIEYMQKREIELQNDNMYLRSKITERTGLQQQESSVIHQGTVYESGVTSSHQSGQYNRNYIAVNLLEPNQNSSNQDQPPLQLV

SEQ ID NO: 110087 - DNA, 753 bp, Arabidopsis thaliana
  CDS (1)..(753)
atgggaagaggaagagtagagctcaagaggatagagaacaaaatcaacagacaagtgacgtttgctaaacgtagaaatggtttgctgaaaaaagcttatgagctttctgttctctgcgatgctgaagtctctctcatcgtcttctccaaccgtggcaagctctacgagttctgcagcacctccaacatgctcaagacactggaaaggtatcagaagtgtagctatggctccattgaagtcaacaacaaacctgctaaagagcttgagaacagctacagagagtacttgaagctgaaaggtagatatgaaaatctgcaacgtcagcagagaaatcttcttggagaggatcttggacctctgaattcaaaggagctagagcagcttgagcgtcaactagacggctctctgaagcaagttcgctgcatcaagacacagtatatgcttgaccagctctctgatcttcaaggtaaggagcatatcttgcttgatgccaacagagctttgtcaatgaagctggaagatatgatcggcgtgagacatcaccatataggaggagcatgggaaggtggtgatcaacagaatattgcctatggacatcctcaggctcattctcagggactataccaatctcttgaatgtgatcccactttgcaaattggatatagccatccagtgtgctcagagcaaatggctgtgacggtgcaaggtcagtcccaacaaggaaacggctacatccctggctggatgctgtga

SEQ ID NO: 110088 - protein, 250 aa, Arabidopsis thaliana
MGRGRVELKRIENKINRQVTFAKRRNGLLKKAYELSVLCDAEVSLIVFSNRGKLYEFCSTSNMLKTLERYQKCSYGSIEVNNKPAKELENSYREYLKLKGRYENLQRQQRNLLGEDLGPLNSKELEQLERQLDGSLKQVRCIKTQYMLDQLSDLQGKEHILLDANRALSMKLEDMIGVRHHHIGGAWEGGDQQNIAYGHPQAHSQGLYQSLECDPTLQIGYSHPVCSEQMAVTVQGQSQQGNGYIPGWML

SEQ ID NO: 110089 - DNA, 747 bp, Arabidopsis thaliana; identical to SEQ ID NO: 109069
  CDS (1)..(747)

SEQ ID NO: 110090 - protein, 248 aa, Arabidopsis thaliana; identical to SEQ ID NO: 109070

SEQ ID NO: 110091 - DNA, 768 bp, Prunus persica
  CDS (1)..(768)
atggggaggggaagcgtgcagctgaagaggattgaaaacaagatcaacaggcaggtgaccttctcaaagagaaggtctgggttgctgaagaaagcccaagagatttctgtgctttgtgatgctgaggttgctttgattgtcttctccaccaaaggcaagctctttgagtactccactgactcctgcatggaaaggatcctggaaaggtacgaaagatactcatattcagagaagcagcttcttgcaaatgatcatgaatcaactggaagctggactctggaacatgcgaagctcaaggctagggtggaggttttacaaagaaattgcagtcattttatgggggaagatctccaatctttaagtctgaaagagcttcagaatttggagcaacagcttgattctgcactgaagcacataaggtcaagaaagaaccaggttatgtacgaatcgatttcagagctgcaaaagaaggataaggcattgcaggagcaaaacaacttgctggcaaagaaggtaaaggagaaggagaaagcactagctccacaggcagagtcatgggagcagcaagtgcagaaccagggcttggactgctcctccacccttctaccagaggcattgcagtccttgaatttcggcagcggttcaaattaccagggaattagaaatgatggatccggtggagatcatgaggatgaaaatgagaccccgacagcaaatcgacctaatactctccttcccccatggatgctccgccaccttaatgaatag

SEQ ID NO: 110092 - protein, 255 aa, Prunus persica
MGRGSVQLKRIENKINRQVTFSKRRSGLLKKAQEISVLCDAEVALIVFSTKGKLFEYSTDSCMERILERYERYSYSEKQLLANDHESTGSWTLEHAKLKARVEVLQRNCSHFMGEDLQSLSLKELQNLEQQLDSALKHIRSRKNQVMYESISELQKKDKALQEQNNLLAKKVKEKEKALAPQAESWEQQVQNQGLDCSSTLLPEALQSLNFGSGSNYQGIRNDGSGGDHEDENETPTANRPNTLLPPWMLRHLNE

SEQ ID NO: 110093 - DNA, 732 bp, Prunus persica; identical to SEQ ID NO: 109073
  CDS (1)..(732)

SEQ ID NO: 110094 - protein, 243 aa, Prunus persica; identical to SEQ ID NO: 109074

SEQ ID NO: 110095 - DNA, 735 bp, Gentiana triflora; identical to SEQ ID NO: 109077
  CDS (1)..(735)

SEQ ID NO: 110096 - protein, 244 aa, Gentiana triflora; identical to SEQ ID NO: 109078

SEQ ID NO: 110097 - DNA, 750 bp, Gentiana triflora; identical to SEQ ID NO: 109079
  CDS (1)..(750)

SEQ ID NO: 110098 - protein, 249 aa, Gentiana triflora; identical to SEQ ID NO: 109080

SEQ ID NO: 110099 - DNA, 759 bp, Gentiana triflora; identical to SEQ ID NO: 109081
  CDS (1)..(759)

SEQ ID NO: 110100 - protein, 252 aa, Gentiana triflora; identical to SEQ ID NO: 109082

SEQ ID NO: 110101 - DNA, 804 bp, Alpinia hainanensis; identical to SEQ ID NO: 109083
  CDS (1)..(804)

SEQ ID NO: 110102 - protein, 267 aa, Alpinia hainanensis; identical to SEQ ID NO: 109084

SEQ ID NO: 110103 - DNA, 726 bp, Vitis vinifera; identical to SEQ ID NO: 109085
  CDS (1)..(726)

SEQ ID NO: 110104 - protein, 241 aa, Vitis vinifera; identical to SEQ ID NO: 109086

SEQ ID NO: 110105 - DNA, 738 bp, Akebia trifoliata; identical to SEQ ID NO: 109089
  CDS (1)..(738)

SEQ ID NO: 110106 - protein, 245 aa, Akebia trifoliata; identical to SEQ ID NO: 109090

SEQ ID NO: 110107 - DNA, 690 bp, Akebia trifoliata; identical to SEQ ID NO: 109091
  CDS (1)..(690)

SEQ ID NO: 110108 - protein, 229 aa, Akebia trifoliata; identical to SEQ ID NO: 109092

SEQ ID NO: 110109 - DNA, 735 bp, Dendrocalamus latiflorus
  CDS (1)..(735)
atggggagggggaaggtggacctgaagcggatcgagaacaagataagccggcaggtgacgttcgccaagaggaggaacgggctgctcaagaaggcgtacgagctctcgctgctgtgcgacgccgaggtcgcgctcatcatcttctccggccgcggccggctcttcgagttctcaagctcgtcatgcatgtacaaaacgctcgagagataccgcacctgcaacaacaactcactggaagcaaatgctccggtggaaaatgaaattaattaccaggaatatttgaagctgaagaccagagttgagtttcttcataccacacaaagaaatcttcttggggaggatctgggcccacttagcatgaaggagcttgagcagcttggtaaccaaatagagacatccctcaaacaaatccggtcaagaaagaatcaagtattacttgatcagctatttgatctgaaaagtaaggagcaagaattgcaggatcttaacaaggatttgaggaagaagctgcaagaaaccagtggagagaatgcactacatatttcctggcaagatgtagggcatagtagctccagtgggcatgctattgaaccttatcaggaattcgttcaacacccagaaaatgaatattccatgcaaattgggtatcaacagacctacatggaccagctgaacaacgaaggcatggctgttcaagaccctaatggacacactggatatgcaggttggatgtga

SEQ ID NO: 110110 - protein, 244 aa, Dendrocalamus latiflorus
MGRGKVDLKRIENKISRQVTFAKRRNGLLKKAYELSLLCDAEVALIIFSGRGRLFEFSSSSCMYKTLERYRTCNNNSLEANAPVENEINYQEYLKLKTRVEFLHTTQRNLLGEDLGPLSMKELEQLGNQIETSLKQIRSRKNQVLLDQLFDLKSKEQELQDLNKDLRKKLQETSGENALHISWQDVGHSSSSGHAIEPYQEFVQHPENEYSMQIGYQQTYMDQLNNEGMAVQDPNGHTGYAGWM

SEQ ID NO: 110111 - DNA, 741 bp, Dendrocalamus latiflorus; identical to SEQ ID NO: 109095
  CDS (1)..(741)

SEQ ID NO: 110112 - protein, 246 aa, Dendrocalamus latiflorus; identical to SEQ ID NO: 109096

SEQ ID NO: 110113 - DNA, 735 bp, Dendrocalamus latiflorus
  CDS (1)..(735)
atgggcagggggaaggtcgagctgaagcggatcgagaacaagataagccggcaggtgacgttcgccaagaggaggaacgggctgctcaagaaggcgtacgagctctcgctgctgtgcgacgccgaggtcgcgctcatcatcttctccggccgcggccggctcttcgagttctcaagctcgtcatgcatgtacaaaacactcgagagataccgcacctgcaacaacaactcactggaagcaaatgctccggtggaaaatgaaattaattaccaggaatatttgaagctgaagaccagagttgagtttcttcaaaccacacaaagagatcttcttggggaggatctgggcccacttagcatgaaggagcttgagcagcttggtaaccaaatagagacatccctcaaacaaatccggtcaagaaagaatcaagtattacttgatcagctatttgatctgaaaagtaaggagcaagaattgcaggatcttaacaaagatttgaggaagaagctgcaagaaaccagtggagagaatgcactacatatttcctggcaagatgtagggcatagtagctccagtgggcatgctattgaaccttatcaggaattcgttcaacacccagaaaatgaatattccatgcaaattgggtatcaacagacctacatggaccagctgaacaacgaaggcatggctgttcaagaccctaatggacacactggatatgcaggttggatgtga

SEQ ID NO: 110114 - protein, 244 aa, Dendrocalamus latiflorus
MGRGKVELKRIENKISRQVTFAKRRNGLLKKAYELSLLCDAEVALIIFSGRGRLFEFSSSSCMYKTLERYRTCNNNSLEANAPVENEINYQEYLKLKTRVEFLQTTQRDLLGEDLGPLSMKELEQLGNQIETSLKQIRSRKNQVLLDQLFDLKSKEQELQDLNKDLRKKLQETSGENALHISWQDVGHSSSSGHAIEPYQEFVQHPENEYSMQIGYQQTYMDQLNNEGMAVQDPNGHTGYAGWM

SEQ ID NO: 110115 - DNA, 735 bp, Dendrocalamus latiflorus; identical to SEQ ID NO: 109097
  CDS (1)..(735)

SEQ ID NO: 110116 - protein, 244 aa, Dendrocalamus latiflorus; identical to SEQ ID NO: 109098

SEQ ID NO: 110117 - DNA, 741 bp, Dendrocalamus latiflorus; identical to SEQ ID NO: 109101
  CDS (1)..(741)

SEQ ID NO: 110118 - protein, 246 aa, Dendrocalamus latiflorus; identical to SEQ ID NO: 109102

SEQ ID NO: 110119 - DNA, 741 bp, Dendrocalamus latiflorus; identical to SEQ ID NO: 109103
  CDS (1)..(741)

SEQ ID NO: 110120 - protein, 246 aa, Dendrocalamus latiflorus; identical to SEQ ID NO: 109104

SEQ ID NO: 110121 - DNA, 741 bp, Dendrocalamus latiflorus; identical to SEQ ID NO: 109105
  CDS (1)..(741)

SEQ ID NO: 110122 - protein, 246 aa, Dendrocalamus latiflorus; identical to SEQ ID NO: 109106

SEQ ID NO: 110123 - DNA, 750 bp, Dendrocalamus latiflorus
  CDS (1)..(750)
atgggtagggggaacgtggagctgaagcgcatcgagaacaagatcaaccggcaggtcaccttctccaagcgccgcaacggcctcctcaagaaggcctacgagctgtcggtgctctgcgacgccgaggtcgcgctcatcatcttctccagccgcggcaagctctacgagttcggcagcgccggcataagtaagacattagaaagatatcaacactgctgctacaatgctcaggacaacaatgcactgtctgaaactcagatctggtaccaggaaatgccgaagctaagggcaaaattcgaagctttgcagcgcactcagaggcatttactcggggaggatcttggaccgctcagcgtaaaagaactgcagcagctggagaaacagctagaatgtgctctgtcacaggcaagacagcgaaagacacaacttatgatggagcaagtggaggaacttcgcaagaaggagcgtcagttgggagaaattaacaggcaactcaagcacaagctcgaggctgaaggtagcagcaactatagagccatgcatcaggcctcctgggctcctggcaccgtcgtggatgaaggcgccgcatatcatgtgcagcagcctcctcactccgctgctctggactgtgaaccacccactctgcaaattgggtatccgcaccaatttatgcctcctgaggcggccaacattccaggaagcgccccagccggaggggagaacaacttcatgctggggtgggttctttga

SEQ ID NO: 110124 - protein, 249 aa, Dendrocalamus latiflorus
MGRGNVELKRIENKINRQVTFSKRRNGLLKKAYELSVLCDAEVALIIFSSRGKLYEFGSAGISKTLERYQHCCYNAQDNNALSETQIWYQEMPKLRAKFEALQRTQRHLLGEDLGPLSVKELQQLEKQLECALSQARQRKTQLMMEQVEELRKKERQLGEINRQLKHKLEAEGSSNYRAMHQASWAPGTVVDEGAAYHVQQPPHSAALDCEPPTLQIGYPHQFMPPEAANIPGSAPAGGENNFMLGWVL

SEQ ID NO: 110125 - DNA, 750 bp, Dendrocalamus latiflorus; identical to SEQ ID NO: 109109
  CDS (1)..(750)

SEQ ID NO: 110126 - protein, 249 aa, Dendrocalamus latiflorus; identical to SEQ ID NO: 109110

SEQ ID NO: 110127 - DNA, 687 bp, Dendrocalamus latiflorus; identical to SEQ ID NO: 109111
  CDS (1)..(687)

SEQ ID NO: 110128 - protein, 228 aa, Dendrocalamus latiflorus; identical to SEQ ID NO: 109112

SEQ ID NO: 110129 - DNA, 687 bp, Crocus sativus
  CDS (1)..(687)
atggggagggggaagatcgagatcaagcggatagagaacacgaccaatcggcaggtgaccttctgtaagcgccgcaatggtcttctcaagaaagcctatgaattgtcggtgctctgtgacgctgaggtggccctcatcgtcttctccacccgaggccgactctatgagtatgccaacaacagtgtgaaagggaccatcgatcggtacaagaaagcatgcaccgatacatccaacagtggaaccgtctctgaagcaaattctcagtactaccagcaagaagcttccaaacttctacaacaaattgcacaattgcagaactcaaacaggaatttgatgggtgaatcactcagtaccatgagtcctagagaactgagacagctagagggaaagctggaaaaaggcatcaacaaaataagagctaaaaagaatgagttgttatatgctgaaattgaatacatgcaaaaaagggaaatggagctgcagaatgataatatgtatctcaggaataagatatctgaaaatgagagggcgcagcaacacatgaacatgttgccatcagcgacggcaactgagtatgaggccatgcctccattcgactcccgaagcttccttcaagcgaacttggtggaccccaatcaccattactctcatcagcagcagactgccctccaactaggttttgtgtag

SEQ ID NO: 110130 - protein, 228 aa, Crocus sativus
MGRGKIEIKRIENTTNRQVTFCKRRNGLLKKAYELSVLCDAEVALIVFSTRGRLYEYANNSVKGTIDRYKKACTDTSNSGTVSEANSQYYQQEASKLLQQIAQLQNSNRNLMGESLSTMSPRELRQLEGKLEKGINKIRAKKNELLYAEIEYMQKREMELQNDNMYLRNKISENERAQQHMNMLPSATATEYEAMPPFDSRSFLQANLVDPNHHYSHQQQTALQLGFV

SEQ ID NO: 110131 - DNA, 681 bp, Crocus sativus; identical to SEQ ID NO: 109115
  CDS (1)..(681)

SEQ ID NO: 110132 - protein, 226 aa, Crocus sativus; identical to SEQ ID NO: 109116

SEQ ID NO: 110133 - DNA, 699 bp, Lilium longiflorum; identical to SEQ ID NO: 109119
  CDS (1)..(699)

SEQ ID NO: 110134 - protein, 232 aa, Lilium longiflorum; identical to SEQ ID NO: 109120

SEQ ID NO: 110135 - DNA, 657 bp, Eustoma grandiflorum; identical to SEQ ID NO: 109121
  CDS (1)..(657)

SEQ ID NO: 110136 - protein, 218 aa, Eustoma grandiflorum; identical to SEQ ID NO: 109122

SEQ ID NO: 110137 - DNA, 738 bp, Lilium longiflorum; identical to SEQ ID NO: 109123
  CDS (1)..(738)
  misc_feature (465)..(465): r is g or a

SEQ ID NO: 110138 - protein, 245 aa, Lilium longiflorum; identical to SEQ ID NO: 109124

SEQ ID NO: 110139 - DNA, 675 bp, Nymphaea sp; identical to SEQ ID NO: 109125
  CDS (1)..(675)

SEQ ID NO: 110140 - protein, 224 aa, Nymphaea sp; identical to SEQ ID NO: 109126

SEQ ID NO: 110141 - DNA, 681 bp, Saruma henryi; identical to SEQ ID NO: 109127
  CDS (1)..(681)

SEQ ID NO: 110142 - protein, 226 aa, Saruma henryi; identical to SEQ ID NO: 109128

SEQ ID NO: 110143 - DNA, 678 bp, Meliosma dilleniifolia; identical to SEQ ID NO: 109129
  CDS (1)..(678)

SEQ ID NO: 110144 - protein, 225 aa, Meliosma dilleniifolia; identical to SEQ ID NO: 109130

SEQ ID NO: 110145 - DNA, 681 bp, Thalictrum dioicum; identical to SEQ ID NO: 109131
  CDS (1)..(681)

SEQ ID NO: 110146 - protein, 226 aa, Thalictrum dioicum; identical to SEQ ID NO: 109132

SEQ ID NO: 110147 - DNA, 735 bp, Dendrocalamus latiflorus
  CDS (1)..(735)
atggggcgcgggaaggtgcagctgaagcggatcgagaacaagatcaaccggcaagtgactttctccaagcgccggtcggggctgctcaagaaggcgcatgagatctccgtcctctgcgacgccgaggtcggccttatcatcttctccaccaagggcaagctctacgagtacgccaccgactcatgtatggacaaaattcttgaacggtacgagcgttactcctatgcagaaaaggttcttatttcagccgaatctgaaactcagggcaactggtgtcacgaatataggaaactgaaggcgaaggttgagacgatacagaaatgtcaaaagcacctcatgggagaggatcctgaatctttgaatctcaaggagctgcagcaactcgagcagcagctggaaagttcagtgaaacatatcagatccagaaagagccagcttatgctcgagtccatttccgagcttcaaaagaaggagaagtcactgcaggaggagaacaaggttctgcagaaggaactcgtggagaagcagcaggtccataaacggttagtgcaatgggaccaaactcagccgcaaactagttcctcttcctcgtccttcatgatgagggaagctctcccaacaacaaatatcagtatttacgctgcggcagccggcgagagggcagaggacgcagcagggcagcctcagattcacattgggctgccgccatggatggtgagccacatcaacggctaa

SEQ ID NO: 110148 - protein, 244 aa, Dendrocalamus latiflorus
MGRGKVQLKRIENKINRQVTFSKRRSGLLKKAHEISVLCDAEVGLIIFSTKGKLYEYATDSCMDKILERYERYSYAEKVLISAESETQGNWCHEYRKLKAKVETIQKCQKHLMGEDPESLNLKELQQLEQQLESSVKHIRSRKSQLMLESISELQKKEKSLQEENKVLQKELVEKQQVHKRLVQWDQTQPQTSSSSSSFMMREALPTTNISIYAAAAGERAEDAAGQPQIHIGLPPWMVSHING

SEQ ID NO: 110149 - DNA, 735 bp, Dendrocalamus latiflorus; identical to SEQ ID NO: 109133
  CDS (1)..(735)

SEQ ID NO: 110150 - protein, 244 aa, Dendrocalamus latiflorus; identical to SEQ ID NO: 109134

SEQ ID NO: 110151 - DNA, 675 bp, Asparagus officinalis
  CDS (1)..(675)
atggggagggggagagtcgagctgaagaggatcgagaacaagatcaacaggcaagtgaccttcgccaagaggaggaacgggctcctcaagaaagcctacgagctctccgttctctgcgacgccgaggtcgccctcgtcgtcttctccactcgaggcaagctctacgagttctgcagcagccccagcatgctgaaaacactcgacagataccaaaaatgtagttatggagcaccagataccagtgtacaaatacgggagaatcagatgctacaaagtagccatcaagagtacttgaaacttaaagcacgagttgaggctttacagagatctcaaaggaatcttcttggtgaagatcttgggccattgagcagcaaggagctcgagcaacttgaaaaacaacttgattcttcactgaagcaaattaggtctacacggacacaatacatgctcgatcagcttggtgatctgcaaagaaaggaacaaatgttatgtgaggctaataggagtctgagaaaacggtatgcgcagttggaagaagcaagccaggctaatcagcaacaagtctgggaggccaatgctaatgcaatgggatacagccggcagccgagccaaccacaaggggaagagttcttccatcctcttgaatgccagccaagtctgggaggccaatgctaa

SEQ ID NO: 110152 - protein, 224 aa, Asparagus officinalis
MGRGRVELKRIENKINRQVTFAKRRNGLLKKAYELSVLCDAEVALVVFSTRGKLYEFCSSPSMLKTLDRYQKCSYGAPDTSVQIRENQMLQSSHQEYLKLKARVEALQRSQRNLLGEDLGPLSSKELEQLEKQLDSSLKQIRSTRTQYMLDQLGDLQRKEQMLCEANRSLRKRYAQLEEASQANQQQVWEANANAMGYSRQPSQPQGEEFFHPLECQPSLGGQC

SEQ ID NO: 110153 - DNA, 726 bp, Asparagus officinalis; identical to SEQ ID NO: 109135
  CDS (1)..(726)

SEQ ID NO: 110154 - protein, 241 aa, Asparagus officinalis; identical to SEQ ID NO: 109136

SEQ ID NO: 110155 - DNA, 720 bp, Asparagus officinalis
  CDS (1)..(720)
atggggagagggagagttgagctgaagaggatcgagaacaagatcaacaggcaagtgaccttcgcgaagagaaggaacggactcctcaagaaggcctacgagctctccgtgctctgcgatgccgaggttgccctcatcatcttctccaaccgtggaaagctctatgagttctgcagcagctctagcatgctgaaaacacttgagagataccaaaagtgcagttatggagcgccagataccagtgtacaaataagggagagccagatgctgcagagtagtcatcaagagtacttgagactcaaagcgcgtgttgaagctttacaacgctcacaaaggaaccttcttggtgaagatcttggtccattgagcagcaaggagcttgagcaacttgaaagacagcttgattcgtcactgaagcaaattagatcgacacggacacaatacatgctcgaccagcttgctgatcttcaaagaagggaacaaatgctttgtgaggctaataggagtctgagaaaacggttggaagaaagcagccaggctaatcaacaacaagtatgggaggatgccaatgcaatgggatacaatagacagccaaatcaaccacacggagatcaattcttccatccccttgagtgccaacccactttacaaattgggtttcagcctgatcaaatgcccggccccagcgtgagcaattacatgcctggatggctggcatga

SEQ ID NO: 110156 - protein, 239 aa, Asparagus officinalis
MGRGRVELKRIENKINRQVTFAKRRNGLLKKAYELSVLCDAEVALIIFSNRGKLYEFCSSSSMLKTLERYQKCSYGAPDTSVQIRESQMLQSSHQEYLRLKARVEALQRSQRNLLGEDLGPLSSKELEQLERQLDSSLKQIRSTRTQYMLDQLADLQRREQMLCEANRSLRKRLEESSQANQQQVWEDANAMGYNRQPNQPHGDQFFHPLECQPTLQIGFQPDQMPGPSVSNYMPGWLA

SEQ ID NO: 110157 - DNA, 717 bp, Petunia hybrida; identical to SEQ ID NO: 109137
  CDS (1)..(717)

SEQ ID NO: 110158 - protein, 238 aa, Petunia hybrida; identical to SEQ ID NO: 109138

SEQ ID NO: 110159 - DNA, 642 bp, Brassica campestris
  CDS (1)..(642)
atggtgaggggcaaaactcagatgaagcgaatagagaatgcaacaagcagacaagtgactttctctaagcgaaggaatggtttgctgaaaaaagcctttgagctctcagttctttgtgatgctgaagtttctctgatcatcttctctcctaaggcaaaactttatgaatttgccagctccaatatgcaagataccatagatcgttatctgaggcataccaaggatcgtgtcagcaccaaacctgtttctgaagaaaatttgcagcatttgaaacatgaagcagcaaacatgatgaagaaaattgaacaacttgaagcttccaaacgtaaactcttgggagaaggcataggatcatgttcgatagaggagctgcagcaaattgagcaacaacttgagaaaagtgtcaaatgtatccgagcaagaaagactcaagtgtttaaggtacaaattgagcagctcaagcaaaaggagaaagctctagctgcagaaaacaagaagctcactgaaaagtggggatctcatgaaatcgaagtctggtcgaataagaaccaagaaagtggaagaggtgacgaagagagtagcccaagttctgaagtagagacagagttgttcattgggttaccttgttcttcaagaaagtga

SEQ ID NO: 110160 - protein, 213 aa, Brassica campestris
MVRGKTQMKRIENATSRQVTFSKRRNGLLKKAFELSVLCDAEVSLIIFSPKAKLYEFASSNMQDTIDRYLRHTKDRVSTKPVSEENLQHLKHEAANMMKKIEQLEASKRKLLGEGIGSCSIEELQQIEQQLEKSVKCIRARKTQVFKVQIEQLKQKEKALAAENKKLTEKWGSHEIEVWSNKNQESGRGDEESSPSSEVETELFIGLPCSSRK

SEQ ID NO: 110161 - DNA, 714 bp, Saururus chinensis
  CDS (1)..(714)
atggggagggggagggtgcagctgaagaggatagagaacaagataaacaggcaggtgaccttctccaagaggaggacgggcctgctcaagaaggctcacgagatatcggtgctgtgcgatgccgaggtggcgctcatcgtcttctccaccaagggaaagctctacgactactccaccaacgccggtatggcaaggattcttgagcgatatgagagatactgctatgcggagagagaagttgctgtcaccagtcctgactcagagggaagctggtggcttgaatatggcaaacttaaagccaggatcgaggctcaacaaagaattcaaaggcagttgatgggtgaagaccttgatgctttaacccccaaagaactccaacagttggaaaaccagcttgagtctgctctgaagcatgtaaaatcaagaaaaaatcaggtgatttatgattcaatggtggagcttcggagaaaggagaagttgcttcgagacgaaaacaccatgatggaaaaaaagatccaggagaagaagaaggagagggttcaacaggcccagtgggaacaacaaatccaatcccaaaattcaccttccttccttccaactcttaacattggctatcatcagggtactgccactgaaactggagagaaagaagaagcccaccccgggcacaatactgtcatgctagcttggctgctccgaagcagtaacaattag

SEQ ID NO: 110162 - protein, 237 aa, Saururus chinensis
MGRGRVQLKRIENKINRQVTFSKRRTGLLKKAHEISVLCDAEVALIVFSTKGKLYDYSTNAGMARILERYERYCYAEREVAVTSPDSEGSWWLEYGKLKARIEAQQRIQRQLMGEDLDALTPKELQQLENQLESALKHVKSRKNQVIYDSMVELRRKEKLLRDENTMMEKKIQEKKKERVQQAQWEQQIQSQNSPSFLPTLNIGYHQGTATETGEKEEAHPGHNTVMLAWLLRSSNN

SEQ ID NO: 110163 - DNA, 759 bp, Triticum aestivum; identical to SEQ ID NO: 109143
  CDS (1)..(759)

SEQ ID NO: 110164 - protein, 252 aa, Triticum aestivum; identical to SEQ ID NO: 109144

SEQ ID NO: 110165 - DNA, 735 bp, Silene latifolia
  CDS (1)..(735)
atgggaagaggaagagtagagttgaagaggatagaaaacaagataaacaggcaagtaaccttcgcaaagagaagaaatggtcttttgaagaaagcttatgaactttctgtcctttgtgatgctgaagttgctcttatcatcttctccaatcgtggcaaactctatgagttttgcagtagccctagcatgctgaagacacttgagaggtatcagaagagcaactatggacctccggacaacactgctgtttcttcaagagaagccctggaaataagtagccatcaagagtatataaggctgaaagcacgctatgaagcccttcaaaggacacacagaaatttaatgggagaggatctagggccactaagcagcaaggaacttgaatcacttgagaggcagcttgatatgtctttgaagcatatcagatcaactaggactcaatacatgcttgatcaactagctgatctccaaaggaaggaacatgttctcaatgaagcaaacattactcttaaacaaaggttaattgaagcggatcaggtaagttcagctcaatgttatggacacgagttagattatggaaggcagaacccccaagctcaggctgatcatgttttctttcaccctttagaatgtgaaccaacacttcaaatcggttatcaaccggagcagatgaacgttacagcagccggaccaagcatcaacaatttcatgaccggttggttgccccaaaactaa

SEQ ID NO: 110166 - protein, 244 aa, Silene latifolia
MGRGRVELKRIENKINRQVTFAKRRNGLLKKAYELSVLCDAEVALIIFSNRGKLYEFCSSPSMLKTLERYQKSNYGPPDNTAVSSREALEISSHQEYIRLKARYEALQRTHRNLMGEDLGPLSSKELESLERQLDMSLKHIRSTRTQYMLDQLADLQRKEHVLNEANITLKQRLIEADQVSSAQCYGHELDYGRQNPQAQADHVFFHPLECEPTLQIGYQPEQMNVTAAGPSINNFMTGWLPQN

SEQ ID NO: 110167 - DNA, 771 bp, Silene latifolia; identical to SEQ ID NO: 109147
  CDS (1)..(771)

SEQ ID NO: 110168 - protein, 256 aa, Silene latifolia; identical to SEQ ID NO: 109148

SEQ ID NO: 110169 - DNA, 681 bp, Asparagus virgatus; identical to SEQ ID NO: 109149
  CDS (1)..(681)

SEQ ID NO: 110170 - protein, 226 aa, Asparagus virgatus; identical to SEQ ID NO: 109150

SEQ ID NO: 110171 - DNA, 735 bp, Ipomoea nil; identical to SEQ ID NO: 109155
  CDS (1)..(735)

SEQ ID NO: 110172 - protein, 244 aa, Ipomoea nil; identical to SEQ ID NO: 109156

SEQ ID NO: 110173 - DNA, 744 bp, Ipomoea nil; identical to SEQ ID NO: 109157
  CDS (1)..(744)

SEQ ID NO: 110174 - protein, 247 aa, Ipomoea nil; identical to SEQ ID NO: 109158

SEQ ID NO: 110175 - DNA, 729 bp, Malus domestica; identical to SEQ ID NO: 109159
  CDS (1)..(729)

SEQ ID NO: 110176 - protein, 242 aa, Malus domestica; identical to SEQ ID NO: 109160

SEQ ID NO: 110177 - DNA, 744 bp, Houttuynia cordata; identical to SEQ ID NO: 109165
  CDS (1)..(744)

SEQ ID NO: 110178 - protein, 247 aa, Houttuynia cordata; identical to SEQ ID NO: 109166

SEQ ID NO: 110179 - DNA, 741 bp, Houttuynia cordata; identical to SEQ ID NO: 109167
  CDS (1)..(741)

SEQ ID NO: 110180 - protein, 246 aa, Houttuynia cordata; identical to SEQ ID NO: 109168

SEQ ID NO: 110181 - DNA, 732 bp, Houttuynia cordata; identical to SEQ ID NO: 109169
  CDS (1)..(732)

SEQ ID NO: 110182 - protein, 243 aa, Houttuynia cordata; identical to SEQ ID NO: 109170

SEQ ID NO: 110183 - DNA, 735 bp, Crocus sativus
  CDS (1)..(735)
atgggtaggggacgagtggagctgaagcggatcgagaacacgatcaaccgccaggtcaccttctcgaagcgccgcggcggcctcctcaagaaagccaacgagatatccgtactgtgcgacgccgatgtcgctatcatcatcttctccaccaagggcaagctctccgaatactctactgacgccagaatggaaagcattcttgaacgctacgatcgatattcctgtgctgagagagacatcgtggcacctgaccctgactcacaagaaagctggagagatgaatatggtaggctcaaagctaagcttgaagctttacaaactagccagaggcatctcatgggagcgcaacttgacatgctgagtgccaaagagctgcaacaactggagcagcaacttgagaatgctttgaaaaatataagatcaaggaagaaccaattactgtttgattccatatccgagcttctgaaaaaggaaaagactctgacaacccaaaataaggacatggagatgaagctcattgaaaagaagaaagtaaagagcatggcacggcaaggccaacaatacacagagtcatcctcacctccttccttgctaatacaagatccttttccctccttaactattggaattaacccagcaagtggcagctctgaagaggacaacgaagcgcgccttctaccaccagtcaaccgaaacaggctgccaccatggatggtccgctccgctaatgagtag

SEQ ID NO: 110184 - protein, 244 aa, Crocus sativus
MGRGRVELKRIENTINRQVTFSKRRGGLLKKANEISVLCDADVAIIIFSTKGKLSEYSTDARMESILERYDRYSCAERDIVAPDPDSQESWRDEYGRLKAKLEALQTSQRHLMGAQLDMLSAKELQQLEQQLENALKNIRSRKNQLLFDSISELLKKEKTLTTQNKDMEMKLIEKKKVKSMARQGQQYTESSSPPSLLIQDPFPSLTIGINPASGSSEEDNEARLLPPVNRNRLPPWMVRSANE

SEQ ID NO: 110185 - DNA, 708 bp, Oryza sativa subsp; identical to SEQ ID NO: 109171
  CDS (1)..(708)

SEQ ID NO: 110186 - protein, 235 aa, Oryza sativa subsp; identical to SEQ ID NO: 109172

SEQ ID NO: 110187 - DNA, 726 bp, Solanum lycopersicum; identical to SEQ ID NO: 109173
  CDS (1)..(726)

SEQ ID NO: 110188 - protein, 241 aa, Solanum lycopersicum; identical to SEQ ID NO: 109174

SEQ ID NO: 110189 - DNA, 741 bp, Solanum lycopersicum
  CDS (1)..(741)
atgggaagaggaagagttgagcttaagagaatagaaaataaaataaataggcaagtcacttttgctaagagaagaaatggacttcttaaaaaagcttatgaactttctgttctttgtgatgctgaagttgcccttataatcttctctaataggggtaaactctatgaattttgcagcacttcaagcatggtgaaaacaattgaaaagtaccaacgttgcagctatgctactttggaagccaaccaatcagttactgatactcagaataactaccacgaatatctgaggctaaaagctagagttgagctcctccaacgatctcagagaaactttcttggtgaagatttgggcacgttaagctcgaaggaccttgagcagcttgagaatcaattagagtcttccttaaagcaaatcaggtcaaggaagacacaattcatgctggatcagcttgcagatcttcaacaaaaggagcaaatgcttgcagaatctaatagattactccgtagaaagttagaagaaagtgtagctggatttccacttcgattgtgttgggaagatggaggtgatcatcaacttatgcatcaacaaaatcgtctccctaacacagagggtttctttcagcctcttggattgcattcttcttctccacattttgggtacaatcctgttaatacagatgaggtgaatgcagcggcaactgcacacaatatgaatggatttattcatggatggatgctttaa

SEQ ID NO: 110190 - protein, 246 aa, Solanum lycopersicum
MGRGRVELKRIENKINRQVTFAKRRNGLLKKAYELSVLCDAEVALIIFSNRGKLYEFCSTSSMVKTIEKYQRCSYATLEANQSVTDTQNNYHEYLRLKARVELLQRSQRNFLGEDLGTLSSKDLEQLENQLESSLKQIRSRKTQFMLDQLADLQQKEQMLAESNRLLRRKLEESVAGFPLRLCWEDGGDHQLMHQQNRLPNTEGFFQPLGLHSSSPHFGYNPVNTDEVNAAATAHNMNGFIHGWML

SEQ ID NO: 110191 - DNA, 717 bp, Triticum monococcum; identical to SEQ ID NO: 109175
  CDS (1)..(717)

SEQ ID NO: 110192 - protein, 238 aa, Triticum monococcum; identical to SEQ ID NO: 109176

SEQ ID NO: 110193 - DNA, 735 bp, Triticum monococcum; identical to SEQ ID NO: 109177
  CDS (1)..(735)

SEQ ID NO: 110194 - protein, 244 aa, Triticum monococcum; identical to SEQ ID NO: 109178

SEQ ID NO: 110195 - DNA, 723 bp, Zea mays
  CDS (1)..(723)
atggggaggggaaagatcgtgatccgcaggatcgataactccacgagccggcaggtgaccttctccaagcgccggaacgggatcttcaagaaggccaaggagctcgccatcctctgcgatgcggaggtcggcctcgtcatcttctccagcaccggccgcctctacgagtactctagcaccagcatgaaatcagttatagatcggtacggcaaggccaaggaagagcagcaagacgtcgcaaatcccaactcggagcttaagttttggcaaagggaggcagcaagcttgagacaacaactgcacaacttgcaagaaaattatcggcagttgacgggagatgatctttctgggctgaatgtcaaagaactgcagtccctggagaatcaattggaaacaagcctgcgtggtgtccgcgcaaagaaggaccatctcttgatagatgagattcacgatttgaatcgaaaggcaagtttatttcaccaagaaaatacagacttgtacaataagatcaacctgattcgccaagaaaatgatgagttacataaaaagatctatgagactgaaggaccaagtggagttaatcgggagtcaccgactccattcaactttgcagtagtagaaaccagagatgttccagtgcaacttgaactcagcacactgccacaacaaaataacattgagccatctactgctcctaagctaggattgcaattaattccatga

SEQ ID NO: 110196 - protein, 240 aa, Zea mays
MGRGKIVIRRIDNSTSRQVTFSKRRNGIFKKAKELAILCDAEVGLVIFSSTGRLYEYSSTSMKSVIDRYGKAKEEQQDVANPNSELKFWQREAASLRQQLHNLQENYRQLTGDDLSGLNVKELQSLENQLETSLRGVRAKKDHLLIDEIHDLNRKASLFHQENTDLYNKINLIRQENDELHKKIYETEGPSGVNRESPTPFNFAVVETRDVPVQLELSTLPQQNNIEPSTAPKLGLQLIP

SEQ ID NO: 110197 - DNA, 732 bp, Agapanthus praecox; identical to SEQ ID NO: 109179
  CDS (1)..(732)

SEQ ID NO: 110198 - protein, 243 aa, Agapanthus praecox; identical to SEQ ID NO: 109180

SEQ ID NO: 110199 - DNA, 708 bp, Agapanthus praecox; identical to SEQ ID NO: 109181
  CDS (1)..(708)

SEQ ID NO: 110200 - protein, 235 aa, Agapanthus praecox; identical to SEQ ID NO: 109182

SEQ ID NO: 110201 - DNA, 744 bp, Helianthus annuus
  CDS (1)..(744)
atgtcttttcccaatgagtcaggtgagatgtctccacagagaaaattgggtaggggaaagatcgaaatcaaacggatcgaaaacacgacaaatcgacaagtgacattttgcaaacgccgcaacggtttgctgaagaaggcttatgagttgtctgtactttgtgatgctgaggttgcgcttatcgtcttctcgagccgcggtcgcctctatgagtatgccaacaatagtgtgaaaggaaccatagataggtacaaaaaggcatgcctggatccaccaagcagtggctctgttgcagaagcaaatgctcagttttaccaacaagaagctgcaaaactccgtcagcaaatcgccaaccttcagaaccaaaacaggcaattttataggaacatcatgggtgaatcactaggaaacatgccagcaaaagatctcaagaatcttgaaggcaagttagagaaaggcattagcaggatcagatcaaaaaagaatgaacttctgtttgctgaaatcgagtatatgccaaagcgagaaaatgagttgcataacaataatcagttcctccgagcaaagattgctgaaaatgaaagatcccagcagcaacacatgagcttgatgcctggaagttctgattatgatcttgtaccacctcatcaaccatttgatggtcgaaactaccttcaagtcaacgatcttcaaccgaataacagttactcttgccaagatcaaacccctctccagttggtgtaa

SEQ ID NO: 110202 - protein, 247 aa, Helianthus annuus
MSFPNESGEMSPQRKLGRGKIEIKRIENTTNRQVTFCKRRNGLLKKAYELSVLCDAEVALIVFSSRGRLYEYANNSVKGTIDRYKKACLDPPSSGSVAEANAQFYQQEAAKLRQQIANLQNQNRQFYRNIMGESLGNMPAKDLKNLEGKLEKGISRIRSKKNELLFAEIEYMPKRENELHNNNQFLRAKIAENERSQQQHMSLMPGSSDYDLVPPHQPFDGRNYLQVNDLQPNNSYSCQDQTPLQLV

SEQ ID NO: 110203 - DNA, 804 bp, Helianthus annuus
  CDS (1)..(804)
atggaaaattctgaggctattgagcatgagcatgatttcagctgcatcgatcgatccatgtcgtttcaaaacgaggactcgggggacatatctccacagagaaggattgggaagggaaagatcgagatcaagcggatcgagaacactacgaaccgacaagtgactttctgcaagcgtcgtaatgggttgctcaagaaggcctatgagttgtctgttctttgtgacgccgaggttgctcttatcgtcttttcgagccgtggccgtctttatgagtatgctaacaacagtgttagagggacaatcgataggtacaaaaaatcatgcttagatccacctagcacgggttccgttgctgaagccaatgctcagttttaccaacaagaagctaccaaactgcgtcagcaaattgcaaaccttcagaatcaaaacaggcaattttacaggaacatcatgggtgaatctttggcagatatgccggggaaggagcttaagaaccttgaaagtaagttagagaaagcaattaacagaattcgtgcgaaaaagaatgaactattatttgctgaaattgagtacatgcagaaaagggaacttgagctgcataacagcaatcaattccttagagcaaggatatctgaaaatgaaagagctcagcagcagcacatgagcttgatgcctggaagttctggttataatgaccttggaccacaccagtccttcgatggtctaaacgatcttcaaacgaatgagttgcaactcaataacaactactcttgccaggaccaaacccctctccagttggtgtga

SEQ ID NO: 110204 - protein, 267 aa, Helianthus annuus
MENSEAIEHEHDFSCIDRSMSFQNEDSGDISPQRRIGKGKIEIKRIENTTNRQVTFCKRRNGLLKKAYELSVLCDAEVALIVFSSRGRLYEYANNSVRGTIDRYKKSCLDPPSTGSVAEANAQFYQQEATKLRQQIANLQNQNRQFYRNIMGESLADMPGKELKNLESKLEKAINRIRAKKNELLFAEIEYMQKRELELHNSNQFLRARISENERAQQQHMSLMPGSSGYNDLGPHQSFDGLNDLQTNELQLNNNYSCQDQTPLQLV

SEQ ID NO: 110205 - DNA, 798 bp, Chrysanthemum x morifolium; identical to SEQ ID NO: 109189
  CDS (1)..(798)

SEQ ID NO: 110206 - protein, 265 aa, Chrysanthemum x morifolium; identical to SEQ ID NO: 109190

SEQ ID NO: 110207 - DNA, 666 bp, Ginkgo biloba; identical to SEQ ID NO: 109193
  CDS (1)..(666)

SEQ ID NO: 110208 - protein, 221 aa, Ginkgo biloba; identical to SEQ ID NO: 109194

SEQ ID NO: 110209 - DNA, 642 bp, Brassica rapa subsp; identical to SEQ ID NO: 109197
  CDS (1)..(642)

SEQ ID NO: 110210 - protein, 213 aa, Brassica rapa subsp; identical to SEQ ID NO: 109198

SEQ ID NO: 110211 - DNA, 750 bp, Fragaria ananassa; identical to SEQ ID NO: 109199
  CDS (1)..(750)

SEQ ID NO: 110212 - protein, 249 aa, Fragaria ananassa; identical to SEQ ID NO: 109200

SEQ ID NO: 110213 - DNA, 738 bp, Lolium perenne; identical to SEQ ID NO: 109201
  CDS (1)..(738)

SEQ ID NO: 110214 - protein, 245 aa, Lolium perenne; identical to SEQ ID NO: 109202

SEQ ID NO: 110215 - DNA, 687 bp, Lolium perenne; identical to SEQ ID NO: 109203
  CDS (1)..(687)

SEQ ID NO: 110216 - protein, 228 aa, Lolium perenne; identical to SEQ ID NO: 109204

SEQ ID NO: 110217 - DNA, 741 bp, Lolium perenne; identical to SEQ ID NO: 109205
  CDS (1)..(741)

SEQ ID NO: 110218 - protein, 246 aa, Lolium perenne; identical to SEQ ID NO: 109206

SEQ ID NO: 110219 - DNA, 756 bp, Zea mays; identical to SEQ ID NO: 109209
  CDS (1)..(756)

SEQ ID NO: 110220 - protein, 251 aa, Zea mays; identical to SEQ ID NO: 109210

SEQ ID NO: 110221 - DNA, 732 bp, Zea mays; identical to SEQ ID NO: 109211
  CDS (1)..(732)

SEQ ID NO: 110222 - protein, 243 aa, Zea mays; identical to SEQ ID NO: 109212

SEQ ID NO: 110223 - DNA, 723 bp, Zea mays; identical to SEQ ID NO: 109213
  CDS (1)..(723)

SEQ ID NO: 110224 - protein, 240 aa, Zea mays; identical to SEQ ID NO: 109214

SEQ ID NO: 110225 - DNA, 738 bp, Zea mays
  CDS (1)..(738)
atggggcgcgggaaggtgcagctgaagcggatcgagaacaagatcaaccgccaggtgacattctccaagcgccgctcggggctactcaagaaggcgcacgagatctccgtgctctgcgacgccgaggtcgcgctcatcatcttctccaccaagggcaagctctacgagtactctaccgattcatgtatggacaaaattcttgaacggtatgagcgctactcctatgcagaaaaggttctcatttccgcagaatatgaaactcagggcaattggtgccatgaatatagaaaactaaaggcgaaggtcgagacaatacagaaatgtcaaaagcacctcatgggagaggatcttgaaactttgaatctcaaagagcttcagcaactagagcagcagctggagagttcactgaaacatatcagaacaaggaagagccagcttatggtcgagtcaatttcagcgctccaacggaaggagaagtcactgcaggaggagaacaaggttctgcagaaggagctcgcggagaagcagaaagaccagcggcagcaagtgcaacgggaccaaactcaacagcagaccagttcgtcttccacgtccttcatgttaagggaagctgccccaacaacaaatgtcagcatcttccctgtggcagcaggcgggagggtggtggaaggggcagcagcgcagccgcaggctcgcgttggactgccaccatggatgcttagccatctgagctgctga

SEQ ID NO: 110226 - protein, 245 aa, Zea mays
MGRGKVQLKRIENKINRQVTFSKRRSGLLKKAHEISVLCDAEVALIIFSTKGKLYEYSTDSCMDKILERYERYSYAEKVLISAEYETQGNWCHEYRKLKAKVETIQKCQKHLMGEDLETLNLKELQQLEQQLESSLKHIRTRKSQLMVESISALQRKEKSLQEENKVLQKELAEKQKDQRQQVQRDQTQQQTSSSSTSFMLREAAPTTNVSIFPVAAGGRVVEGAAAQPQARVGLPPWMLSHLSC

SEQ ID NO: 110227 - DNA, 726 bp, Zea mays; identical to SEQ ID NO: 109215
  CDS (1)..(726)

SEQ ID NO: 110228 - protein, 241 aa, Zea mays; identical to SEQ ID NO: 109216

SEQ ID NO: 110229 - DNA, 723 bp, Zea mays; identical to SEQ ID NO: 109217
  CDS (1)..(723)

SEQ ID NO: 110230 - protein, 240 aa, Zea mays; identical to SEQ ID NO: 109218

SEQ ID NO: 110231 - DNA, 738 bp, Zea mays
  CDS (1)..(738)
atggggcgcgggaaggtgcagctgaagcggatcgagaacaagatcaaccgccaggtgaccttctccaagcgccgctcggggctgctcaagaaggcgcacgagatctccgtgctctgcgacgccgaggtcgcgctcatcatcttctccaccaaagggaagctctacgagtattccaccgattcatgtatggacaaaattcttgaccggtacgagcgctactcctatgcagaaaaggttcttatttcagcagaatctgaaactcagggcaattggtgccacgagtatagaaaactaaaggcgaaggtcgagacaatacaaaaatgtcaaaagcacctcatgggagaggatcttgaaacgttgaatctcaaagagcttcagcaactagagcagcagctggagagttcactgaaacatatcagaaccaggaagaaccaacttatgctcgagtcaatttcggagctccaacggaaggagaagtcgctgcaggaggagaacaaggttctgcagaaggagctcgcggagaagcagaaagcccagcggaagcaagtgcaatggggccaaacccaacagcagaccagttcgtcttcctcgtgcttcgtgataagggaagctgccccaacaacaaatatcagcatttttcctgtggcagcaggcgggaggttggtggaaggtgcagcagcgcagccacaggctcgcgttggactaccaccatggatgcttagccacctgagcagctga

SEQ ID NO: 110232 - protein, 245 aa, Zea mays
MGRGKVQLKRIENKINRQVTFSKRRSGLLKKAHEISVLCDAEVALIIFSTKGKLYEYSTDSCMDKILDRYERYSYAEKVLISAESETQGNWCHEYRKLKAKVETIQKCQKHLMGEDLETLNLKELQQLEQQLESSLKHIRTRKNQLMLESISELQRKEKSLQEENKVLQKELAEKQKAQRKQVQWGQTQQQTSSSSSCFVIREAAPTTNISIFPVAAGGRLVEGAAAQPQARVGLPPWMLSHLSS

SEQ ID NO: 110233 - DNA, 753 bp, Arabidopsis thaliana
  CDS (1)..(753)
atgggaagaggaagagtagagctcaagaggatagagaacaaaatcaacagacaagtgacgtttgctaaacgtagaaatggtttgctgaaaaaagcttatgagctttctgttctctgcgatgctgaagtctctctcatcgtcttctccaaccgtggcaagctctacgagttctgcagcacctccaacatgctcaagacactggaaaggtatcagaagtgtagctatggctccattgaagtcaacaacaaacctgctaaagagcttgagaacagctacagagagtacttgaagctgaaaggtagatatgaaaatctgcaacgtcagcagagaaatcttcttggagaggatcttggacctctgaattcaaaggagctagagcagcttgagcgtcaactagacggctctctgaagcaagttcgctgcatcaagacacagtatatgcttgaccagctctctgatcttcaaggtaaggagcatatcttgcttgatgccaacagagctttgtcaatgaagctggaagatatgatcggcgtgagacatcaccatgtaggaggaggatgggaaggtggtgatcaacagaatattgcctatggacatcctcaggctcattctcagggactataccaatctcttgaatgtgatcccactttgcaaattggatatagccatccagtgtgctcagagcaaatggctgtgacggtgcaaggtcagtcccaacaaggaaacggctacatccctggctggatgctgtga

SEQ ID NO: 110234 - protein, 250 aa, Arabidopsis thaliana
MGRGRVELKRIENKINRQVTFAKRRNGLLKKAYELSVLCDAEVSLIVFSNRGKLYEFCSTSNMLKTLERYQKCSYGSIEVNNKPAKELENSYREYLKLKGRYENLQRQQRNLLGEDLGPLNSKELEQLERQLDGSLKQVRCIKTQYMLDQLSDLQGKEHILLDANRALSMKLEDMIGVRHHHVGGGWEGGDQQNIAYGHPQAHSQGLYQSLECDPTLQIGYSHPVCSEQMAVTVQGQSQQGNGYIPGWML

SEQ ID NO: 110235 - DNA, 684 bp, Momordica charantia
  CDS (1)..(684)
atggggagagggaagatcgagattaagcggatcgagaacacgacaaatcggcaggtgacgttctgcaagaggaggaatggactgctgaagaaagcttatgaactgtctgttctttgtgatgctgaagttgccctcatcgtcttctccagccgtggtcgcctctatgaatactccaataacagcatcaaaactaccattgggaggtacaagaaggcttgttctgatagctcagctactagctctgtcactgaactcaatactcaatattatcagcaagaatctgcaaagctgcgccaacaaatacaaatgctacagaattccaacagcaatcttgttaggcacttgatgggggactccttgagtgctcttacagtgaaggaattgaagcagcttgagaataggcttgaaagaggcatcactaggatcagatcaaagaagcatgaaatgttgctagcagaaattgagtacctgcagaaaagagagatcgagctggagaatgaaaatgtgtgtattagaaccaagatagcagaagtggagaggcttcagcaagccaacatggtttctgggcaagaactgaatgcaattcaggcattggcttctcgaaatttcttcactcctaatatgatggaaggtggagctgtcactttctcacaccaagacaagaagatgcttcatcttgggtga

SEQ ID NO: 110236 - protein, 227 aa, Momordica charantia
MGRGKIEIKRIENTTNRQVTFCKRRNGLLKKAYELSVLCDAEVALIVFSSRGRLYEYSNNSIKTTIGRYKKACSDSSATSSVTELNTQYYQQESAKLRQQIQMLQNSNSNLVRHLMGDSLSALTVKELKQLENRLERGITRIRSKKHEMLLAEIEYLQKREIELENENVCIRTKIAEVERLQQANMVSGQELNAIQALASRNFFTPNMMEGGAVTFSHQDKKMLHLG

SEQ ID NO: 110237 - DNA, 738 bp, Nicotiana tabacum; identical to SEQ ID NO: 109219
  CDS (1)..(738)

SEQ ID NO: 110238 - protein, 245 aa, Nicotiana tabacum; identical to SEQ ID NO: 109220

SEQ ID NO: 110239 - DNA, 753 bp, Brassica oleracea var; identical to SEQ ID NO: 109225
  CDS (1)..(753)

SEQ ID NO: 110240 - protein, 250 aa, Brassica oleracea var; identical to SEQ ID NO: 109226

SEQ ID NO: 110241 - DNA, 729 bp, Brassica oleracea var
  CDS (1)..(729)
atgggaaggggtagggttcagctgaagaggatagagaacaagatcaataggcaagttactttctcaaagagaaggtctggtttgctcaagaaagctcatgagatctctgttctctgcgatgctgaggttgctctcgttgtcttctcttccaaaggcaaactcttcgaatattccactgactctagcatggaaaggatacttgagcgatatgatcgctatttatattcagacaaacaacttgttggccgagacatttcacaaagtgaaaattgggttctagagcatgctaagctcaaggcaagagttgaggtacttgaaaagaataaaaggaattttatgggggaagatcttgattccttgagcctaaaggagcttcaaagcttggagcatcagctcgacgctgctatcaagagcattaggtcaagaaagaaccaagctatgttcgaatccatatcagcgctccagaagaaggataaggccttgcaagatcacaataatacgcttctcaaaaagattaaggagaaggaaaaggagaagaacacgggtcagcaagaaggacaattaatccaatgctccaacaattcttcagttcttcagccccagtactgcgtaacctcctccagagatggccttgtggagagagttgggggagagaacggcggtacatcgtcgttgattgaaccaaactctcttcttccagcttggatgctacgtcctactacaaaatga

SEQ ID NO: 110242 - protein, 242 aa, Brassica oleracea var
MGRGRVQLKRIENKINRQVTFSKRRSGLLKKAHEISVLCDAEVALVVFSSKGKLFEYSTDSSMERILERYDRYLYSDKQLVGRDISQSENWVLEHAKLKARVEVLEKNKRNFMGEDLDSLSLKELQSLEHQLDAAIKSIRSRKNQAMFESISALQKKDKALQDHNNTLLKKIKEKEKEKNTGQQEGQLIQCSNNSSVLQPQYCVTSSRDGLVERVGGENGGTSSLIEPNSLLPAWMLRPTTK

SEQ ID NO: 110243 - DNA, 732 bp, Brassica oleracea var
  CDS (1)..(732)
atgggaaggggtagggttcagctgaagaggatagagaacaagatcaataggcaagttactttctcaaagagaaggtctggtttgctcaagaaagctcatgagatctctgttctctgcgatgctgaggttgctctcgttgtcttctcttccaaagacaaactcttcgaatattccactgactctagcatggaaaggatacttgagcgatatgatcgctatttatattcagacaaacaacttgttggccgagacatttcacaaagtgaaaattgggttctagagcatgctaagctcaaggcaagagttgaggtacttgaaaagaataaaaggaattttatgggggaagatcttgattccttgagcctaaaggagcttcaaagcttggagcatcagctcgacgctgctatcaagagcattaggtcaagaaagaaccaagctatgttcgaatccatatcagcgctccagaagaaggataaggccttgcaagatcacaataatacgcttctcaaaaagattaaggagaaggaaaaggagaagaacacgggtcagcaagaaggacaattaatccaatgctccaacaattcttcagttcttcagccccagtactgcgtaacctcctccagagatggccttgtggagagagttgggggagagaacggaggtgcatcgtcgttgattggaccaaactctcttcttccagcttggatgctacgtcctgctaccaatgagtaa

SEQ ID NO: 110244 - protein, 243 aa, Brassica oleracea var
MGRGRVQLKRIENKINRQVTFSKRRSGLLKKAHEISVLCDAEVALVVFSSKDKLFEYSTDSSMERILERYDRYLYSDKQLVGRDISQSENWVLEHAKLKARVEVLEKNKRNFMGEDLDSLSLKELQSLEHQLDAAIKSIRSRKNQAMFESISALQKKDKALQDHNNTLLKKIKEKEKEKNTGQQEGQLIQCSNNSSVLQPQYCVTSSRDGLVERVGGENGGASSLIGPNSLLPAWMLRPATNE

SEQ ID NO: 110245 - DNA, 765 bp, Triticum aestivum
  CDS (1)..(765)
atggtgaaggagtctgcgtccccgggctcgggctcaggatcgccagggggggctgccgagaagatggggagagggaggatcgagatcaagcgcatcgagaacaccacgaaccggcaggtcaccttctgcaagcgccgcaacggcctcctgaagaaggcgtacgagctctcggtgctctgcgacgccgaggtggcgctcatcgtcttctccggccgcgggcgcctctacgagtactccaacaacagcgtgaaagcaaccattgagagatacaagaaggcaacaagtgacacctccagcgctggtacagtcgcagagatcaatgcccagcactaccagcaggaatctgcgaagctgaagcagcaaataaccaccttgcagaactccaacaggactctaataggcgatacaatggccaccatgagccacagagacctgaagcagctggagggaaggctggacaaaggcctaggaaagattagagcaagaaagaacgaattactatgcgctgaaattgagtacatgcagagaagggaaatggagctgcagaataacaacttcttcttgagggaaaaagtagctgagactgaaagggggcaacagcagacgttgaacatgatgggggcggcttcgacatcgaatgagtacgagcaaaatatgatccattgtgatccgagaaccttcctgcagttcaacttcatgcagcagcagcctcagtactactcccagcaggaggaccgcaaaagtttgaactcagttggaaggtga

SEQ ID NO: 110246 - protein, 254 aa, Triticum aestivum
MVKESASPGSGSGSPGGAAEKMGRGRIEIKRIENTTNRQVTFCKRRNGLLKKAYELSVLCDAEVALIVFSGRGRLYEYSNNSVKATIERYKKATSDTSSAGTVAEINAQHYQQESAKLKQQITTLQNSNRTLIGDTMATMSHRDLKQLEGRLDKGLGKIRARKNELLCAEIEYMQRREMELQNNNFFLREKVAETERGQQQTLNMMGAASTSNEYEQNMIHCDPRTFLQFNFMQQQPQYYSQQEDRKSLNSVGR

SEQ ID NO: 110247 - DNA, 747 bp, Helianthus annuus; identical to SEQ ID NO: 109229
  CDS (1)..(747)

SEQ ID NO: 110248 - protein, 248 aa, Helianthus annuus; identical to SEQ ID NO: 109230

SEQ ID NO: 110249 - DNA, 672 bp, Solanum lycopersicum; identical to SEQ ID NO: 109233
  CDS (1)..(672)

SEQ ID NO: 110250 - protein, 223 aa, Solanum lycopersicum; identical to SEQ ID NO: 109234

SEQ ID NO: 110251 - DNA, 810 bp, Solanum lycopersicum; identical to SEQ ID NO: 109235
  CDS (1)..(810)

SEQ ID NO: 110252 - protein, 269 aa, Solanum lycopersicum; identical to SEQ ID NO: 109236

SEQ ID NO: 110253 - DNA, 738 bp, Solanum lycopersicum
  CDS (1)..(738)
atgggaagaggaagagtccacttgaagcgaatagagaacaaaattaaccgtcaagttaccttctcgaaacgtcgatctggtttgctgaagaaagcccatgagatctctgtgctttgtgatgctgaggttggtttgattgttttttctactaaaggaaaactctttgaatatgccaacgattcctgcatggagaggatacttgaaagatatgaaagatactcatttgctgagaaacagcttgttcctactgatcatacctccccggtaagctggacccttgaacatgcaaaacttaaggccagacttgaggttctgcagaggaaccaaaagcattatgtgggagaagatttggagtccttaagtatgaaggaacttcagaatctggagcaccagcttgattcagctcttaaacacattcgatcaagaaagaatcaattgatgcatgagtccatttctgtgcttcaaaaaaaggacagagcattgcaggagcaaaacaaccagctttcgaagaaggtgaaggagagggagaaagaggtggcacagcaaaatcagtgggaaatcaactcatcttcatttgttttgccacaacaactggactctcctcaccttggggaagcataccagagtactaatgtaatagataatggggaagtggaaggaggtagttcttcacagcagcaaggtgcagctaataatactgtgatgccacaatggatgcttcgtcatcttaataattaa

SEQ ID NO: 110254 - protein, 245 aa, Solanum lycopersicum
MGRGRVHLKRIENKINRQVTFSKRRSGLLKKAHEISVLCDAEVGLIVFSTKGKLFEYANDSCMERILERYERYSFAEKQLVPTDHTSPVSWTLEHAKLKARLEVLQRNQKHYVGEDLESLSMKELQNLEHQLDSALKHIRSRKNQLMHESISVLQKKDRALQEQNNQLSKKVKEREKEVAQQNQWEINSSSFVLPQQLDSPHLGEAYQSTNVIDNGEVEGGSSSQQQGAANNTVMPQWMLRHLNN

SEQ ID NO: 110255 - DNA, 672 bp, Gossypium hirsutum; identical to SEQ ID NO: 109237
  CDS (1)..(672)

SEQ ID NO: 110256 - protein, 223 aa, Gossypium hirsutum; identical to SEQ ID NO: 109238

SEQ ID NO: 110257 - DNA, 711 bp, Gossypium hirsutum; identical to SEQ ID NO: 109239
  CDS (1)..(711)

SEQ ID NO: 110258 - protein, 236 aa, Gossypium hirsutum; identical to SEQ ID NO: 109240

SEQ ID NO: 110259 - DNA, 741 bp, Daucus carota subsp; identical to SEQ ID NO: 109241
  CDS (1)..(741)

SEQ ID NO: 110260 - protein, 246 aa, Daucus carota subsp; identical to SEQ ID NO: 109242

SEQ ID NO: 110261 - DNA, 768 bp, Daucus carota subsp; identical to SEQ ID NO: 109243
  CDS (1)..(768)

SEQ ID NO: 110262 - protein, 255 aa, Daucus carota subsp; identical to SEQ ID NO: 109244

SEQ ID NO: 110263 - DNA, 729 bp, Daucus carota subsp; identical to SEQ ID NO: 109249
  CDS (1)..(729)

SEQ ID NO: 110264 - protein, 242 aa, Daucus carota subsp; identical to SEQ ID NO: 109250

SEQ ID NO: 110265 - DNA, 675 bp, Cycas edentata; identical to SEQ ID NO: 109251
  CDS (1)..(675)

SEQ ID NO: 110266 - protein, 224 aa, Cycas edentata; identical to SEQ ID NO: 109252

SEQ ID NO: 110267 - DNA, 705 bp, Lycopodium annotinum; identical to SEQ ID NO: 109253
  CDS (1)..(705)

SEQ ID NO: 110268 - protein, 234 aa, Lycopodium annotinum; identical to SEQ ID NO: 109254

SEQ ID NO: 110269 - DNA, 714 bp, Lycopodium annotinum; identical to SEQ ID NO: 109255
  CDS (1)..(714)

SEQ ID NO: 110270 - protein, 237 aa, Lycopodium annotinum; identical to SEQ ID NO: 109256

SEQ ID NO: 110271 - DNA, 696 bp, Lycopodium annotinum; identical to SEQ ID NO: 109257
  CDS (1)..(696)

SEQ ID NO: 110272 - protein, 231 aa, Lycopodium annotinum; identical to SEQ ID NO: 109258

SEQ ID NO: 110273 - DNA, 672 bp, Vitis vinifera; identical to SEQ ID NO: 109259
  CDS (1)..(672)

SEQ ID NO: 110274 - protein, 223 aa, Vitis vinifera; identical to SEQ ID NO: 109260

SEQ ID NO: 110275 - DNA, 729 bp, Vitis vinifera; identical to SEQ ID NO: 109261
  CDS (1)..(729)

SEQ ID NO: 110276 - protein, 242 aa, Vitis vinifera; identical to SEQ ID NO: 109262

SEQ ID NO: 110277 - DNA, 735 bp, Vitis vinifera; identical to SEQ ID NO: 109263
  CDS (1)..(735)

SEQ ID NO: 110278 - protein, 244 aa, Vitis vinifera; identical to SEQ ID NO: 109264

SEQ ID NO: 110279 - DNA, 735 bp, Vitis vinifera; identical to SEQ ID NO: 109265
  CDS (1)..(735)

SEQ ID NO: 110280 - protein, 244 aa, Vitis vinifera; identical to SEQ ID NO: 109266

SEQ ID NO: 110281 - DNA, 699 bp, Hordeum vulgare var; identical to SEQ ID NO: 109269
  CDS (1)..(699)

SEQ ID NO: 110282 - protein, 232 aa, Hordeum vulgare var; identical to SEQ ID NO: 109270

SEQ ID NO: 110283 - DNA, 705 bp, Hordeum vulgare var
  CDS (1)..(705)
atggggaggggccggatcgagatcaagcgcatcgagaacaccaccaaccggcaggtcaccttctgcaagcgccgcaacggcctcctcaagaaggcgtacgagctctcggtgctctgtgacgccgaggtcgccctcgtcgtcttctccagccgcgggcgcctctacgaatactcaaacaacagtgtgaaagccaccattgagaggtacaaaaaggccaacagtgacacatccaactctggcacggttgcagaagtcaatgcccagtactaccagcaggagtcctccaagctgcgccagcagatcagtagcttgcaaaactcaaacagtaggtcactggtgagagattctgtcagcaccatgaccctgagggatcttaagcagcttgaaggcaggctggagaaaggcatagccaagataagagctagaaagaatgagctgatgtatgctgaagttgagtatatgcagaagagggaaatggagctacataacgataacatttacctgaggagcaaggtgtctgagaatgagaggggtcagcagccgatgaacatgatggcgtcggggtcgacgagcagcgaatacgatcacatggtcgcgccgtatgattccagaaacttcctgcaggttaacatgcagcagcagcagcattactcccaacagctgcagccaactgcccttcagctcggccagcagtacttcaactag

SEQ ID NO: 110284 - protein, 234 aa, Hordeum vulgare var
MGRGRIEIKRIENTTNRQVTFCKRRNGLLKKAYELSVLCDAEVALVVFSSRGRLYEYSNNSVKATIERYKKANSDTSNSGTVAEVNAQYYQQESSKLRQQISSLQNSNSRSLVRDSVSTMTLRDLKQLEGRLEKGIAKIRARKNELMYAEVEYMQKREMELHNDNIYLRSKVSENERGQQPMNMMASGSTSSEYDHMVAPYDSRNFLQVNMQQQQHYSQQLQPTALQLGQQYFN

SEQ ID NO: 110285 - DNA, 735 bp, Gossypium hirsutum; identical to SEQ ID NO: 109271
  CDS (1)..(735)

SEQ ID NO: 110286 - protein, 244 aa, Gossypium hirsutum; identical to SEQ ID NO: 109272

SEQ ID NO: 110287 - DNA, 720 bp, Phalaenopsis equestris; identical to SEQ ID NO: 109275
  CDS (1)..(720)

SEQ ID NO: 110288 - protein, 239 aa, Phalaenopsis equestris; identical to SEQ ID NO: 109276

SEQ ID NO: 110289 - DNA, 729 bp, Solanum lycopersicum; identical to SEQ ID NO: 109277
  CDS (1)..(729)

SEQ ID NO: 110290 - protein, 242 aa, Solanum lycopersicum; identical to SEQ ID NO: 109278

SEQ ID NO: 110291 - DNA, 738 bp, Malus domestica; identical to SEQ ID NO: 109281
  CDS (1)..(738)

SEQ ID NO: 110292 - protein, 245 aa, Malus domestica; identical to SEQ ID NO: 109282

SEQ ID NO: 110293 - DNA, 729 bp, Malus domestica
  CDS (1)..(729)
atggagttcgcaaatcaagcacctgagagctctacccaaaaaaaattgggaagaggcaaaattgagattaagcggatcgaaaacactaccaatcgacaagtcaccttctgcaaacgccgcaacggattgcttaagaaagcctatgaattgtctgttctttgtgatgctgaagttgctcttatcgtcttctccacccgtggccgcctctatgagtatgctaacaacagcgttagagcaacaatcgacaggtacaaaaaagcatgcgctgattctacggacggtggatctgtatcagaagctaacactcagttttatcagcaggaagcatcaaaactgcgaagacagatccgagaaattcagaattcaaacaggcatatactgggggaatcccttagcaccttgaaagtcaaggaactgaaaaacctagaaggaagattggagaaaggaatcagcagaataagatccaaaaagaatgaaatcctgttttctgaaatcgaattcatgcaaaagagggagactgagctgcaacaccacaacaattttctgagagcaaagatagctgaaagcgagagggaacagcagcagcagcaaacacatatgattccgggaacttcctacgatccgtcgatgccttcgaattcgtatgacaggaacttcttccctgtgatcttggagtccaataataaccattaccctcgccaaggccagacagctctccaacttgtttga

SEQ ID NO: 110294 - protein, 242 aa, Malus domestica
MEFANQAPESSTQKKLGRGKIEIKRIENTTNRQVTFCKRRNGLLKKAYELSVLCDAEVALIVFSTRGRLYEYANNSVRATIDRYKKACADSTDGGSVSEANTQFYQQEASKLRRQIREIQNSNRHILGESLSTLKVKELKNLEGRLEKGISRIRSKKNEILFSEIEFMQKRETELQHHNNFLRAKIAESEREQQQQQTHMIPGTSYDPSMPSNSYDRNFFPVILESNNNHYPRQGQTALQLV

SEQ ID NO: 110295 - DNA, 738 bp, Populus tremuloides; identical to SEQ ID NO: 109285
  CDS (1)..(738)

SEQ ID NO: 110296 - protein, 245 aa, Populus tremuloides; identical to SEQ ID NO: 109286

SEQ ID NO: 110297 - DNA, 678 bp, Vitis vinifera; identical to SEQ ID NO: 109287
  CDS (1)..(678)

SEQ ID NO: 110298 - protein, 225 aa, Vitis vinifera; identical to SEQ ID NO: 109288

SEQ ID NO: 110299 - DNA, 657 bp, Ipomoea batatas
  CDS (1)..(657)
atggggaggggcaaggttgaaattaggaggatcgaaaagtcgaccaacaggcgagtcaccttctggaagaggagaaatgggttgttgaagaaggctatggagatggggattctgtgcgatgctgaagtgggattgatgatcttctccagcacagggaagctccatgaattcgcaacaactagcatcagatccgtaattgaacgctacaacaagacacaaggtgacagccttcaatcccctctggacccaacattagaactcaagttttggcaaatagaagtagcaattctgaggcaacaattacacaacatgcaagaagatcatcggaaagtaatgggagaagtctatgggctgagtgttaaagacctgcagaatcttgaaaaccaactggaaatgagtttgagcggcatcagaatgaagaaggaacaaatactaattgaacagattcaagaactaacccacaagcaggggagtttcgtgcaccaggaaaactttgaactctttaataagtttcaggcatatggcacaagtgacccaaatgcagtgaatggggacaccatttctccatatgacttcaccattagtgaagaatcccaaggccacatacatttccagcttcctcaaaacttcagcgatctagccagagcattatattag

SEQ ID NO: 110300 - protein, 218 aa, Ipomoea batatas
MGRGKVEIRRIEKSTNRRVTFWKRRNGLLKKAMEMGILCDAEVGLMIFSSTGKLHEFATTSIRSVIERYNKTQGDSLQSPLDPTLELKFWQIEVAILRQQLHNMQEDHRKVMGEVYGLSVKDLQNLENQLEMSLSGIRMKKEQILIEQIQELTHKQGSFVHQENFELFNKFQAYGTSDPNAVNGDTISPYDFTISEESQGHIHFQLPQNFSDLARALY

SEQ ID NO: 110301 - DNA, 711 bp, Cucumis sativus; identical to SEQ ID NO: 109295
  CDS (1)..(711)

SEQ ID NO: 110302 - protein, 236 aa, Cucumis sativus; identical to SEQ ID NO: 109296

SEQ ID NO: 110303 - DNA, 648 bp, Petunia hybrida; identical to SEQ ID NO: 109297
  CDS (1)..(648)

SEQ ID NO: 110304 - protein, 215 aa, Petunia hybrida; identical to SEQ ID NO: 109298

SEQ ID NO: 110305 - DNA, 738 bp, Petunia hybrida; identical to SEQ ID NO: 109299
  CDS (1)..(738)

SEQ ID NO: 110306 - protein, 245 aa, Petunia hybrida; identical to SEQ ID NO: 109300

SEQ ID NO: 110307 - DNA, 657 bp, Petunia hybrida
  CDS (1)..(657)
atgcaggaaatggtgagaggaaaggtacaaatgaagagaattgagaatgcaacaagcaggcaagtaaccttttcaaaacgaagaaatgggcttatgaagaaagcttatgagttatctgttctttgtgatgctgaagttgctgtagtaattttctcacaaagaggaagactttatgaattttcaagctccagcatgcaaaagaccatcgacagatatcgtgaatgtgcaagagaaacgctgacaaacaacagcattcaagcgcaacaacagatacagtacttgaaggaagaaaccgaaaacatggcaaagaagattgaggtccttgaagtttctagacggaagcttactgggcaaagtttaggttcatgttcaatgaatgaacttcaacagatcgatagccagctggagagaagcctaaagaacattagggcaagaaagtctcaattattcgaggacgagatagaacgattaaaagccaagaaaaatctattgcttgaagaaaatgcaaggttatcggaaaagtgtgggcaaatgtcaagagaaccagcattagcaccacctgatcccctaatccaacagcaagaaaagggaaactgtagccttagtatcaagaactcagaggtggagactgatttgtttattggccttcgatcctga

SEQ ID NO: 110308 - protein, 218 aa, Petunia hybrida
MQEMVRGKVQMKRIENATSRQVTFSKRRNGLMKKAYELSVLCDAEVAVVIFSQRGRLYEFSSSSMQKTIDRYRECARETLTNNSIQAQQQIQYLKEETENMAKKIEVLEVSRRKLTGQSLGSCSMNELQQIDSQLERSLKNIRARKSQLFEDEIERLKAKKNLLLEENARLSEKCGQMSREPALAPPDPLIQQQEKGNCSLSIKNSEVETDLFIGLRS

SEQ ID NO: 110309 - DNA, 738 bp, Petunia hybrida; identical to SEQ ID NO: 109303
  CDS (1)..(738)

SEQ ID NO: 110310 - protein, 245 aa, Petunia hybrida; identical to SEQ ID NO: 109304

SEQ ID NO: 110311 - DNA, 750 bp, Brassica napus
  CDS (1)..(750)
atggatgaaggtgggagtagtcacgatgcagagagtagcaagaagataggtagagggaagatagagataaagaggatagagaacacaacaaatcgtcaagtaaccttctgcaaacgacgcaatggtcttctcaagaaagcttatgagctctctgtcttgtgtgatgctgaagttgccctcgttatcttctccactcgtggccttctttatgagtacgccagcaacagtgtgaagggtacaattgaaaggtacaagaaagcttgttccgatgccgttaaccctcctactgtcactgaagctaataccaagcactatcagcaagaagcctctaagcttcggaggcagattcgggacattcagaattcgaacaggcatattgttggagaatcacttggttcattgaacttcaaggaactcaaaaacctagaaggacggcttgaaaaaggaatcagccgcgtccgatccaagaagagtgaacttttagtggcagagatagagtatatgcagaagagggaaatggagttgcagcacgttaacatgtacctaagagctaagatagaacaaggcgcgagattgaatccggaacaacatggatccggtgtaatacaagggacggcggtttatgagtccggtctgtcttcttctcatgatcagtcgcagcattataaccggaattatattccggttaaccttcttgaaccgaatcaacaattctccggtcaagaccaacctcctcttcaacttgtttaa

SEQ ID NO: 110312 - protein, 249 aa, Brassica napus
MDEGGSSHDAESSKKIGRGKIEIKRIENTTNRQVTFCKRRNGLLKKAYELSVLCDAEVALVIFSTRGLLYEYASNSVKGTIERYKKACSDAVNPPTVTEANTKHYQQEASKLRRQIRDIQNSNRHIVGESLGSLNFKELKNLEGRLEKGISRVRSKKSELLVAEIEYMQKREMELQHVNMYLRAKIEQGARLNPEQHGSGVIQGTAVYESGLSSSHDQSQHYNRNYIPVNLLEPNQQFSGQDQPPLQLV

SEQ ID NO: 110313 - DNA, 699 bp, Zea mays; identical to SEQ ID NO: 109315
  CDS (1)..(699)

SEQ ID NO: 110314 - protein, 232 aa, Zea mays; identical to SEQ ID NO: 109316

SEQ ID NO: 110315 - DNA, 738 bp, Eucalyptus globulus; identical to SEQ ID NO: 109317
  CDS (1)..(738)

SEQ ID NO: 110316 - protein, 245 aa, Eucalyptus globulus; identical to SEQ ID NO: 109318

SEQ ID NO: 110317 - DNA, 618 bp, Eucalyptus globulus; identical to SEQ ID NO: 109319
  CDS (1)..(618)

SEQ ID NO: 110318 - protein, 205 aa, Eucalyptus globulus; identical to SEQ ID NO: 109320

SEQ ID NO: 110319 - DNA, 723 bp, Zea mays
  CDS (1)..(723)
atggggaggggaaagatcgtgatccgcaggatcgataactccacgagccggcaggtgaccttctccaagcgccggaacgggatcttcaagaaggccaaggagctcgccatcctctgcgatgcggaggtcggcctcgtcatcttctccagcaccggccgcctctacgagtactctagcaccagcatgaaatcagttatagatcggtacggcaaggccaaggaagagcagcaagtcgtcgcaaatcccaactcggagcttaagttttggcaaagggaggcagcaagcttgagacaacaactgcacaacttgcaagaaaattatcggcagttgacgggagatgatctttctgggctgaatgtcaaagaactgcagtccctggagaatcaattggaaacaagcctgcgtggtgtccgcgcaaagaaggaccatctcttgatagatgagattcacgatttgaatcgaaaggcaagtttatttcaccaagaaaatacagacttgtacaataagatcaacctgattcgccaagaaaatgatgagttacataaaaagatctatgagactgaaggaccaagtggagttaatcgggagtcaccgactccattcaactttgcagtagtagaaaccagagatgttccagtgcaacttgaactcagcacactgccacaacaaaataacattgagccatctactgctcctaagctaggattgcaattaattccatga

SEQ ID NO: 110320 - protein, 240 aa, Zea mays
MGRGKIVIRRIDNSTSRQVTFSKRRNGIFKKAKELAILCDAEVGLVIFSSTGRLYEYSSTSMKSVIDRYGKAKEEQQVVANPNSELKFWQREAASLRQQLHNLQENYRQLTGDDLSGLNVKELQSLENQLETSLRGVRAKKDHLLIDEIHDLNRKASLFHQENTDLYNKINLIRQENDELHKKIYETEGPSGVNRESPTPFNFAVVETRDVPVQLELSTLPQQNNIEPSTAPKLGLQLIP

SEQ ID NO: 110321 - DNA, 741 bp, Hordeum vulgare; identical to SEQ ID NO: 109323
  CDS (1)..(741)

SEQ ID NO: 110322 - protein, 246 aa, Hordeum vulgare; identical to SEQ ID NO: 109324

SEQ ID NO: 110323 - DNA, 753 bp, Hordeum vulgare; identical to SEQ ID NO: 109327
  CDS (1)..(753)

SEQ ID NO: 110324 - protein, 250 aa, Hordeum vulgare; identical to SEQ ID NO: 109328

SEQ ID NO: 110325 - DNA, 729 bp, Betula verrucosa; identical to SEQ ID NO: 109337
  CDS (1)..(729)

SEQ ID NO: 110326 - protein, 242 aa, Betula verrucosa; identical to SEQ ID NO: 109338

SEQ ID NO: 110327 - DNA, 666 bp, Cucumis sativus
  CDS (1)..(666)
atggggagaggaaagatagagataaagagaatagagaacacaacaaatagacaagttacattctgtaagagaagaaatggacttttgaaaaaagcttatgaactctctgttctttgtgatgctgaagttgttctcattgtcttctccagccgtggccgcctctatgaatatgctaacaacagtgtgaaggcaacaattgatagatataagaaagcatcctcagattcctccaacactggatctacttctgaagataacactcagttttatcaacaagaagctgccaaactccgagttcagattggtaacttacagaactcaaacaggaacatgctaggcgagtctctaagttctctgactgcaaaagatctgaaaggcctggagaccaaacttgagaaaggaattagtagaattaggtccaaaaagaatgaactcctgtttgctgagattgagtatatgcgaaaaagggaaattgatttgcacaacaacaatcagatgcttcgggcaaagatagctgtgagtgaaagaaatgtgagcatgatgggaggagaatttgagctgatgcaatctcatccgtacgatccaagagacttcttccaagtgaacggcttacagcataatcatcaatatccacgccaagacaacatggctcttcaattagtataa

SEQ ID NO: 110328 - protein, 221 aa, Cucumis sativus
MGRGKIEIKRIENTTNRQVTFCKRRNGLLKKAYELSVLCDAEVVLIVFSSRGRLYEYANNSVKATIDRYKKASSDSSNTGSTSEDNTQFYQQEAAKLRVQIGNLQNSNRNMLGESLSSLTAKDLKGLETKLEKGISRIRSKKNELLFAEIEYMRKREIDLHNNNQMLRAKIAVSERNVSMMGGEFELMQSHPYDPRDFFQVNGLQHNHQYPRQDNMALQLV

SEQ ID NO: 110329 - DNA, 738 bp, Nicotiana tabacum; identical to SEQ ID NO: 109343
  CDS (1)..(738)

SEQ ID NO: 110330 - protein, 245 aa, Nicotiana tabacum; identical to SEQ ID NO: 109344

SEQ ID NO: 110331 - DNA, 753 bp, Rosa rugosa; identical to SEQ ID NO: 109347
  CDS (1)..(753)

SEQ ID NO: 110332 - protein, 250 aa, Rosa rugosa; identical to SEQ ID NO: 109348

SEQ ID NO: 110333 - DNA, 750 bp, Rosa rugosa
  CDS (1)..(750)
atggcctatgaaaacaaacccaacacggtcctggactctgatgcccaaagaagattgggaaggggaaagatcgagatcaagcggatcgaaaacaccaccaatcgtcaagtcaccttctgcaaaaggcgcaatggtttgctcaagaaggcctatgagctctctgtgctctgtgatgctgaggttgctctcatagtcttctctaaccgtggccgtctctatgagtattccaacaacagcagtgttagagaaacaattgaacgatacaagaaggcatgtgcagattcttcaaataatggatctgtctctgaagctactactcagtactatcagcaagaagctgccaaactgcgtgcccagataaccactttgcagaacagtaacaggggttatatggctgagggtttgagcaatatgtctatcaaggagctcaagggcgtggagaccaaacttgagaaagcaattagcagaattagatccaagaagaacgagctcttgtttgccgaaattgagtacatgcagaaaagggaacttgacttgcacaacaataaccagctcctccgagcaaagatagctgagaatgagaggcaccagcaaagcataaatgcgattgcaggtgggcatggaagctacgacatcatgcagccgactcagccatttcatgaggctcgcaactattttcaagtgaatgctttgcaacccaatatccatcagtactcgcgccatgaccagatttcccttcaattagtttga

SEQ ID NO: 110334 - protein, 249 aa, Rosa rugosa
MAYENKPNTVLDSDAQRRLGRGKIEIKRIENTTNRQVTFCKRRNGLLKKAYELSVLCDAEVALIVFSNRGRLYEYSNNSSVRETIERYKKACADSSNNGSVSEATTQYYQQEAAKLRAQITTLQNSNRGYMAEGLSNMSIKELKGVETKLEKAISRIRSKKNELLFAEIEYMQKRELDLHNNNQLLRAKIAENERHQQSINAIAGGHGSYDIMQPTQPFHEARNYFQVNALQPNIHQYSRHDQISLQLV

SEQ ID NO: 110335 - DNA, 747 bp, Rosa rugosa
  CDS (1)..(747)
atggcctatgaaaacaaacccaacacggtcctggactctgatgcccaaagaagattgggaaggggaaagatcgagatcaagcggatcgaaaacaccaccaatcgtcaagtcaccttctgcaaaaggcgcaatggtttgctcaagaaggcctatgagctctctgtgctctgtgatgctgaggttgctctcatagtcttctctaaccgtggccgtctctatgagtattccaacaacagtgttagagaaacaattgaacgatacaagaaggcatgtgcagattcttcaaataatggatctgtctctgaagctactactcagtactatcagcaagaagctgccaaactgcgtgcccagataaccactttgcagaacagtaacaggggttatatggctgagggtttgagcaatatgtctatcaaggagctcaagggcgtggagaccaaacttgagaaagcaattagcagaattagatccaagaagaacgagctcttgtttgccgaaattgagtacatgcagaaaagggaacttgacttgcacaacaataaccagctcctccgagcaaagatagctgagaatgagaggcaccagcaaagcataaatgcgattgcaggtgggcatggaagctacgacatcatgcagccgactcagccatttcatgaggctcgcaactattttcaagtgaatgctttgcaacccaatatccatcagtactcgcgccatgaccagatttcccttcaattagtttga

SEQ ID NO: 110336 - protein, 248 aa, Rosa rugosa
MAYENKPNTVLDSDAQRRLGRGKIEIKRIENTTNRQVTFCKRRNGLLKKAYELSVLCDAEVALIVFSNRGRLYEYSNNSVRETIERYKKACADSSNNGSVSEATTQYYQQEAAKLRAQITTLQNSNRGYMAEGLSNMSIKELKGVETKLEKAISRIRSKKNELLFAEIEYMQKRELDLHNNNQLLRAKIAENERHQQSINAIAGGHGSYDIMQPTQPFHEARNYFQVNALQPNIHQYSRHDQISLQLV

SEQ ID NO: 110337 - DNA, 750 bp, Rosa rugosa; identical to SEQ ID NO: 109349
  CDS (1)..(750)

SEQ ID NO: 110338 - protein, 249 aa, Rosa rugosa; identical to SEQ ID NO: 109350

SEQ ID NO: 110339 - DNA, 669 bp, Picea mariana
  CDS (1)..(669)
atgggccgtgggaagattgagataaagaggattgagaatactacgaaccgacaggtcactttctgtaagcgccgaaatggtttattgaagaaggcgtatgaattatcagttctttgtgatgcagaagtggccctcatcgtcttctccagcagagggagactttatgagtttgccaaccacagcgtgaagagaacgattgagaggtacaagaagacttgcgttgacaacaaccacggaggggcgatttcagagtccaattctcagtattggcaacaggaggctggtaaactcagacaacagattgaaattttgcaaaatgcaaataggcacttgatgggtgacgggcttacagctttaaacatcaaggaactcaagcagcttgaggttcgacttgaaaaaggaatcggccgagtacgatccaagaagaacgagatgttgcttgaggagatcgacatcatgcagagaagggaacacattcttatccaggagaatgagattcttcgcagcaagatagccgagtgccagaatagccacaacacgagcatgctatcagctcccgaatatgatgcattgccagcattcgattctcgaaatttcctacatgcaaatctaatcgatgcggcccatcactatgcacatcaggagcaaacaacgcttcagcttggctga

SEQ ID NO: 110340 - protein, 222 aa, Picea mariana
MGRGKIEIKRIENTTNRQVTFCKRRNGLLKKAYELSVLCDAEVALIVFSSRGRLYEFANHSVKRTIERYKKTCVDNNHGGAISESNSQYWQQEAGKLRQQIEILQNANRHLMGDGLTALNIKELKQLEVRLEKGIGRVRSKKNEMLLEEIDIMQRREHILIQENEILRSKIAECQNSHNTSMLSAPEYDALPAFDSRNFLHANLIDAAHHYAHQEQTTLQLG

SEQ ID NO: 110341 - DNA, 741 bp, Malus domestica
  CDS (1)..(741)
atggggagaggaagagtggagctgaagaggatagagaacaagataaacaggcaagtcacatttgcaaagagaagaaatgggcttctgaagaaagcttatgagctctccgttctctgtgatgctgaggttgctctcatcatcttctccaaccgtggcaagctctatgagttttgcagcagctctagcattctcaaaacactagacaggtaccaaaaatgcagttatggtgcagtggatcaagttaatagacctgcaaaggaacttgagagcagctatcgtgagtacatgaaactcaaaggtagatatgagtccctacaacgaactcagagaaaccttcttggtgaggacttgggtccattaaacacaaaggaacttgagcagcttgagcgtcaacttgagggctccttgaagcaagttaggtccactaagacccagtatatgctggaccaactttctgaccttcagaacaaggaacaactgttaatagaagccaacagggatttgacaatgaagttggatgaaattagttcaagaaatcaacttagacaatcatgggaaggtggtgaccagggtatggcatatgcaacccagcatcaccatgctcaatcccaaggattcttccagcctttagattgcaatcccactttgcaaatggggtactctgcagtggggtcagagcagatgagtgctacaactaatgcccagcaagtgaactgtttcatccctggatggatgctttga

SEQ ID NO: 110342 - protein, 246 aa, Malus domestica
MGRGRVELKRIENKINRQVTFAKRRNGLLKKAYELSVLCDAEVALIIFSNRGKLYEFCSSSSILKTLDRYQKCSYGAVDQVNRPAKELESSYREYMKLKGRYESLQRTQRNLLGEDLGPLNTKELEQLERQLEGSLKQVRSTKTQYMLDQLSDLQNKEQLLIEANRDLTMKLDEISSRNQLRQSWEGGDQGMAYATQHHHAQSQGFFQPLDCNPTLQMGYSAVGSEQMSATTNAQQVNCFIPGWML

SEQ ID NO: 110343 - DNA, 714 bp, Cucumis sativus; identical to SEQ ID NO: 109351
  CDS (1)..(714)

SEQ ID NO: 110344 - protein, 237 aa, Cucumis sativus; identical to SEQ ID NO: 109352

SEQ ID NO: 110345 - DNA, 765 bp, Cucumis sativus; identical to SEQ ID NO: 109353
  CDS (1)..(765)
  misc_feature (606)..(606): n is a, g, c or t

SEQ ID NO: 110346 - protein, 254 aa, Cucumis sativus; identical to SEQ ID NO: 109354
  misc_feature (202)..(202): The Xaa at location 202 stands for Gln, or His.

SEQ ID NO: 110347 - DNA, 678 bp, Cucumis sativus
  CDS (1)..(678)
atggggagaggaaagatagagataaagagaatagagaacacaacaaatagacaagttacattctgtaagagaagaaatggacttttgaaaaaagcttatgaactctctgttctttgtgatgctgaagttgctctcattgtcttctccagccgtggccgtctctatgaatactccaataacagcatcaaaacaactattgagaggtacaagaaggcttgttctgatagctcagctactagctctgtcactgaactaaatactcaatattatcagcaagaatcggctaaactgcgtcaacagatacaaatgcttcagaattccaacaggcacttgatgggggactccttgagtgctcttactgtcaaagaactcaagcagcttgaaaataggcttgaaagaggcatcactagaatcagatcaaagaagcacgaaatgttgctagcagaaattgagtaccttcagaaaagggagattgagctggagaacgaaaatgtgtgtattagaaccaagatagcagaagtagagagggttcaacaagcaaacatggtatctggacaagaactgaatgcaatacaagcattggctaactctcgcaatttcttctctcccaatatcatggaacctgctggacctgtttcttactctcatcaagacaagaaaatgcttcatcttgggtga

SEQ ID NO: 110348 - protein, 225 aa, Cucumis sativus
MGRGKIEIKRIENTTNRQVTFCKRRNGLLKKAYELSVLCDAEVALIVFSSRGRLYEYSNNSIKTTIERYKKACSDSSATSSVTELNTQYYQQESAKLRQQIQMLQNSNRHLMGDSLSALTVKELKQLENRLERGITRIRSKKHEMLLAEIEYLQKREIELENENVCIRTKIAEVERVQQANMVSGQELNAIQALANSRNFFSPNIMEPAGPVSYSHQDKKMLHLG

SEQ ID NO: 110349 - DNA, 741 bp, Petunia hybrida; identical to SEQ ID NO: 109357
  CDS (1)..(741)

SEQ ID NO: 110350 - protein, 246 aa, Petunia hybrida; identical to SEQ ID NO: 109358

SEQ ID NO: 110351 - DNA, 750 bp, Fragaria ananassa; identical to SEQ ID NO: 109359
  CDS (1)..(750)

SEQ ID NO: 110352 - protein, 249 aa, Fragaria ananassa; identical to SEQ ID NO: 109360

SEQ ID NO: 110353 - DNA, 645 bp, Elaeis guineensis var; identical to SEQ ID NO: 109361
  CDS (1)..(645)

SEQ ID NO: 110354 - protein, 214 aa, Elaeis guineensis var; identical to SEQ ID NO: 109362

SEQ ID NO: 110355 - DNA, 738 bp, Capsicum annuum; identical to SEQ ID NO: 109367
  CDS (1)..(738)

SEQ ID NO: 110356 - protein, 245 aa, Capsicum annuum; identical to SEQ ID NO: 109368

SEQ ID NO: 110357 - DNA, 663 bp, Dendrobium grex Madame Thong
  CDS (1)..(663)
atgggtagggggagggtggagttgaagaggattgagaacaagataaacaggcaggtgacttttgcgaagaggaggaacggtttgttgaagaaggcttatgagctatcggtgctctgcgatgctgaggttgcgctcatcgtcttctccaaccgcggccgactctttgagttctgcagcagtactagcatgacaaaaacccttgagaggtatcaaaagtgcagctataatgcatctgaatctgcggttccatccaaggatgcacagaacagttatcacgagtatttgacgttgaaagcaaaagtggaatatctacaacggtctcaagggaatcttctgggagaggatctaattgagctaagcagcaaggaactagaccaacttgagctccaattagaaatgtctctgaaacagatcaggtcaactaagactcaattgatgctcgatcagctctgtgatattaagagaaaggagcaaatgttgcatgaagctaacagagctttaagcatgaagttgaaagaagatgggccagaaattcccctggaactatcctggcctggtggagaaaccaatgggtcatctgaacgtcagcagcctcaatcagacaaattcttccagcccttgccttgtagcaacccttccttgcaaattgggtatagtccatag

SEQ ID NO: 110358 - protein, 220 aa, Dendrobium grex Madame Thong
MGRGRVELKRIENKINRQVTFAKRRNGLLKKAYELSVLCDAEVALIVFSNRGRLFEFCSSTSMTKTLERYQKCSYNASESAVPSKDAQNSYHEYLTLKAKVEYLQRSQGNLLGEDLIELSSKELDQLELQLEMSLKQIRSTKTQLMLDQLCDIKRKEQMLHEANRALSMKLKEDGPEIPLELSWPGGETNGSSERQQPQSDKFFQPLPCSNPSLQIGYSP

SEQ ID NO: 110359 - DNA, 705 bp, Hyacinthus orientalis; identical to SEQ ID NO: 109369
  CDS (1)..(705)

SEQ ID NO: 110360 - protein, 234 aa, Hyacinthus orientalis; identical to SEQ ID NO: 109370

SEQ ID NO: 110361 - DNA, 801 bp, Gnetum parvifolium; identical to SEQ ID NO: 109371
  CDS (1)..(801)

SEQ ID NO: 110362 - protein, 266 aa, Gnetum parvifolium; identical to SEQ ID NO: 109372

SEQ ID NO: 110363 - DNA, 759 bp, Gnetum parvifolium; identical to SEQ ID NO: 109373
  CDS (1)..(759)

SEQ ID NO: 110364 - protein, 252 aa, Gnetum parvifolium; identical to SEQ ID NO: 109374

SEQ ID NO: 110365 - DNA, 708 bp, Malus domestica; identical to SEQ ID NO: 109375
  CDS (1)..(708)

SEQ ID NO: 110366 - protein, 235 aa, Malus domestica; identical to SEQ ID NO: 109376

SEQ ID NO: 110367 - DNA, 747 bp, Malus domestica
  CDS (1)..(747)
atgggcagaggcagagttgagctgaagaggatagagaataaaattaacaggcaagtgacttttgccaaaagaagaaatgggctgctcaagaaagcttatgagctctcagttctctgcgatgctgaggttgccctcattattttctctagccgtggcaagctctatgaattctgtagcagtttcagcatgatgaaaacgcttgaaaagtaccaaagttgcagttatggttccctggaagccaacctaccagccaacgagacccagaacagctatcaggactatttgatgttgaaggcaagagttgaggtcctccaacaatctcaaagaaaccttcttggggaagatttgtcccacctgaacacaaaggagcttgagcatcttgagcatcaattggagacctctttgaagcaaattaggtcaagaaagactcagtttattctcgatcagctttctgatcttcaaaacagggaacagatgctagttgaagctaacaaagccttgaagaggaagctggaagaaacaagtgtgcaagctccagaaggaatggcatgggaagctgctggccatggccccaacaacattcagcaaactcggcttccttcccactcagaagccttcttccatcccttggaaggaaacaactccagttcccaaattggatacacccatatgggttcagataatgaaatgaatgttggaaatccgggccagtatgttaatggatatattcctgggtggatgctttga

SEQ ID NO: 110368 - protein, 248 aa, Malus domestica
MGRGRVELKRIENKINRQVTFAKRRNGLLKKAYELSVLCDAEVALIIFSSRGKLYEFCSSFSMMKTLEKYQSCSYGSLEANLPANETQNSYQDYLMLKARVEVLQQSQRNLLGEDLSHLNTKELEHLEHQLETSLKQIRSRKTQFILDQLSDLQNREQMLVEANKALKRKLEETSVQAPEGMAWEAAGHGPNNIQQTRLPSHSEAFFHPLEGNNSSSQIGYTHMGSDNEMNVGNPGQYVNGYIPGWML

SEQ ID NO: 110369 - DNA, 741 bp, Antirrhinum majus; identical to SEQ ID NO: 109377
  CDS (1)..(741)

SEQ ID NO: 110370 - protein, 246 aa, Antirrhinum majus; identical to SEQ ID NO: 109378

SEQ ID NO: 110371 - DNA, 744 bp, Gnetum gnemon; identical to SEQ ID NO: 109385
  CDS (1)..(744)

SEQ ID NO: 110372 - protein, 247 aa, Gnetum gnemon; identical to SEQ ID NO: 109386

SEQ ID NO: 110373 - DNA, 735 bp, Gnetum gnemon
  CDS (1)..(735)
  misc_feature (582)..(582): n is a, g, c or t
  misc_feature (583)..(583): n is a, g, c or t
  misc_feature (584)..(584): n is a, g, c or t
atggtgcgcggaaagacgcagatgaagagaatcgagaatgcgacgagccggcaggtgaccttctcaaagcgccgaaacggactgctgaaaaaggcatacgagctctccattctctgcgatgccgaggtcggccttatcattttctcgccgcgtggcaagctgtacgagttcgccaatcccagcatgcaaaagatgttggatcgttatcaaaagtgttgtcaggagtcaactgcaaatacaagcaaaaacttagttgaagacactcagcatttgaaaagagaggtggcaatcatggaggagaagattaaaatgcttgaatacgcgcaaaagaagttgttaggagaaaatttggagtcactttcgatgaaagagttgacacaactagaaaatcaagctgaaagaggattagtgaacatacgagcaagaaagacagagatattgatggatcagatcaatcagctgaaaagaaagtctcagttattaggcgaggagaatgcagttctaaggaaaaagtgtaatggtccctacatgggtggtggtctgctgtcaattttacacgcaggcgcaagtggggccggaccnnncaacaacaacaacaacaatggtggttctggtgtgacccaccacgacgataacaacaacaacaaccgaagcaacaacgtcaacgtggaagacgtggagacgcaattaaatattggcccaccagatgttcactgcagtatcaatcaatgttga

SEQ ID NO: 110374 - protein, 244 aa, Gnetum gnemon
  misc_feature (195)..(195): The Xaa at location 195 stands for Ala, Arg, Asn, Asp, Cys, Gly, His, Ile, Leu, Phe, Pro, Ser, Thr, Tyr, or Val.
MVRGKTQMKRIENATSRQVTFSKRRNGLLKKAYELSILCDAEVGLIIFSPRGKLYEFANPSMQKMLDRYQKCCQESTANTSKNLVEDTQHLKREVAIMEEKIKMLEYAQKKLLGENLESLSMKELTQLENQAERGLVNIRARKTEILMDQINQLKRKSQLLGEENAVLRKKCNGPYMGGGLLSILHAGASGAGPXNNNNNNGGSGVTHHDDNNNNNRSNNVNVEDVETQLNIGPPDVHCSINQC

SEQ ID NO: 110375 - DNA, 729 bp, Nicotiana sylvestris; identical to SEQ ID NO: 109387
  CDS (1)..(729)

SEQ ID NO: 110376 - protein, 242 aa, Nicotiana sylvestris; identical to SEQ ID NO: 109388

SEQ ID NO: 110377 - DNA, 738 bp, Nicotiana sylvestris
  CDS (1)..(738)
atggggagaggaagagtgcaactgaagagaattgagaacaagatcaatcgacaagtcaccttctcaaaaagagcatctggtttgcttaagaaagctcatgaaatctctgtgctttgtgatgctgaggttggtttaattgttttttctactaaagggaaactctttgagtattccactgattcttgcatggaaaggattcttgaaaggtatgaaaggtactcatatgctgagaggcagcttactgctactgatgatgaaaccccggggagctggactttggaacatgctaagcttaaggccagacttgaggttttgcaaagaaaccaaaggcattatgcaggagaagatttggactcattaagtatgaaagagcttcagaatcttgagcaccagctcgattctgctcttaagcacattcgatcaagaaagaatcaattgatgcatgaatccatttctgagctgcaaaagaaggacaaggcattgcaagagcaaaacaacaatctctcaaagcaggtgaaagaaagggagaaagagctagctcagcagactcaatgggagcaacagagccatgatcatctcaactcatcttcattcgttttaacacagcccttgagctctcttcacctcggggaagcgtacccgactgcaggagacaacggagaagtggaaggatcatcgcggcaacaacaacaaaacactgtgatgccgccatggatgcttcgccatcttaatggctga

SEQ ID NO: 110378 - protein, 245 aa, Nicotiana sylvestris
MGRGRVQLKRIENKINRQVTFSKRASGLLKKAHEISVLCDAEVGLIVFSTKGKLFEYSTDSCMERILERYERYSYAERQLTATDDETPGSWTLEHAKLKARLEVLQRNQRHYAGEDLDSLSMKELQNLEHQLDSALKHIRSRKNQLMHESISELQKKDKALQEQNNNLSKQVKEREKELAQQTQWEQQSHDHLNSSSFVLTQPLSSLHLGEAYPTAGDNGEVEGSSRQQQQNTVMPPWMLRHLNG

SEQ ID NO: 110379 - DNA, 729 bp, Nicotiana tabacum
  CDS (1)..(729)
atggggagagggaaagtacaattaaggcgtatagaaaataagattaacaggcaagtaacgttttcaaagaggaggggaggtttagcgaagaaagcacatgaaatctcagtgctttgtgacgctgaagttgctttgattgttttttcacataagggaaaaatctttgagtactcttctgattcttgtatggaacagattcttgaacgatatgagagatactcatacgcagagagacgcttgctttcaagtaattctgaatcttcggtgcaggaaaattggagtctggaatatgctaaactcaaggctaagattgatctcctacaaaggaaccacaagcattatatgggagaagatcttgactcattgaacctaaaggacctgcaaaacttggaacaacaacttgatacttctcttaagcttattcgatcaagaaagaaccaactcatgcatgagtcaatctctatgctacagaaaaaggaaaaggcaatccaggaggagaataacatgctatccaagaagattaaggagaaggataagacagtagggaagcaagctgaatggcatcagcaaaatcaagttccaaattcagcatctttcctcctacaaccacatccttgcctaaatattggaggtaattaccaagaggaagcagaagaagcaaggaggaatgagcttgacctaaatcttgattccttgtacccatgccatatgggatgctttgccacatga

SEQ ID NO: 110380 - protein, 242 aa, Nicotiana tabacum
MGRGKVQLRRIENKINRQVTFSKRRGGLAKKAHEISVLCDAEVALIVFSHKGKIFEYSSDSCMEQILERYERYSYAERRLLSSNSESSVQENWSLEYAKLKAKIDLLQRNHKHYMGEDLDSLNLKDLQNLEQQLDTSLKLIRSRKNQLMHESISMLQKKEKAIQEENNMLSKKIKEKDKTVGKQAEWHQQNQVPNSASFLLQPHPCLNIGGNYQEEAEEARRNELDLNLDSLYPCHMGCFAT

SEQ ID NO: 110381 - DNA, 726 bp, Nicotiana sylvestris
  CDS (1)..(726)
atgggaaggggtagggttgagcttaagagaatagagaacaagatcaacaggcaagtgaccttcgctaagagaagaaatggacttttgaaaaaagcttatgagctttctgttctttgtgatgctgaggttgctctcatcatcttctccaataggggaaaactgtacgagttctgcagtagctctagcatgctcaagacattagagaggtaccagaagtgcaactacggagcaccagagaccaatatatccacacgagaagcactggaaataagtagccaacaagaatacttgaagcttaaagcacgttacgaagcattacagcgatcacagagaaatcttcttggtgaagatcttggccctttgaatagcaaggaacttgaatcacttgagaggcagcttgatatgtcactgaaacagattcgatcaactcggactcagttaatgttggatcaacttacagatcttcagagaaaggaacatgcattaaacgaagcaaacagaaccttgaaacaaaggttgatggaaggaagccaactaaatctgcagtggcaacaaaatgcacaagatatgggctacggccggcaaacaactcaaactcagggcgatggcttttttcatcctttggaatgtgaacccactttgcaaattgggtatcagaatgatccaataacagtaggaggagcagggcccagtgtgaataactacatggctggctggttgccttga

SEQ ID NO: 110382 - protein, 241 aa, Nicotiana sylvestris
MGRGRVELKRIENKINRQVTFAKRRNGLLKKAYELSVLCDAEVALIIFSNRGKLYEFCSSSSMLKTLERYQKCNYGAPETNISTREALEISSQQEYLKLKARYEALQRSQRNLLGEDLGPLNSKELESLERQLDMSLKQIRSTRTQLMLDQLTDLQRKEHALNEANRTLKQRLMEGSQLNLQWQQNAQDMGYGRQTTQTQGDGFFHPLECEPTLQIGYQNDPITVGGAGPSVNNYMAGWLP

SEQ ID NO: 110383 - DNA, 687 bp, Hyacinthus orientalis; identical to SEQ ID NO: 109389
  CDS (1)..(687)

SEQ ID NO: 110384 - protein, 228 aa, Hyacinthus orientalis; identical to SEQ ID NO: 109390

SEQ ID NO: 110385 - DNA, 618 bp, Eucalyptus globulus subsp; identical to SEQ ID NO: 109391
  CDS (1)..(618)

SEQ ID NO: 110386 - protein, 205 aa, Eucalyptus globulus subsp; identical to SEQ ID NO: 109392

SEQ ID NO: 110387 - DNA, 768 bp, Malus domestica; identical to SEQ ID NO: 109393
  CDS (1)..(768)

SEQ ID NO: 110388 - protein, 255 aa, Malus domestica; identical to SEQ ID NO: 109394

SEQ ID NO: 110389 - DNA, 669 bp, Picea mariana
  CDS (1)..(669)
atgggccgtgggaagattgagataaagaggattgagaatactacgaaccgacaggtcactttctgtaagcgccgaaatggtttattgaagaaggcgtatgaattatcagttctttgtgatgcagaagtggccctcatcgtcttctccagcagagggagactttatgagtttgccaaccacagcgtgaagagaacgattgagaggtacaagaagacttgcgttgacaacaaccacggaggggcgatttcagagtccaattctcagtattggcaacaggaggctggtaaactcagacagcagattgaaattttacaaaatgcaaataggcacttgatgggtgatgggcttacagctttaaacatcaaggaactcaagcagcttgaggttcgacttgaaaaaggaatcggccgagtacgatccaagaagaacgagatgttgcttgaggagatcgacatcatgcagagaagggaacacattcttatccaggagaatgagattcttcgcagcaagatagccgagtgccagaatagccacaacacgaacatgctatcagctcccgaatatgatgcattgccagcattcgattctcgaaatttcctacatgcaaatctaatcgatgcggcccatcactatgcacatcaggagcaaacaacgcttcagcttggctga

SEQ ID NO: 110390 - protein, 222 aa, Picea mariana
MGRGKIEIKRIENTTNRQVTFCKRRNGLLKKAYELSVLCDAEVALIVFSSRGRLYEFANHSVKRTIERYKKTCVDNNHGGAISESNSQYWQQEAGKLRQQIEILQNANRHLMGDGLTALNIKELKQLEVRLEKGIGRVRSKKNEMLLEEIDIMQRREHILIQENEILRSKIAECQNSHNTNMLSAPEYDALPAFDSRNFLHANLIDAAHHYAHQEQTTLQLG

SEQ ID NO: 110391 - DNA, 747 bp, Rosa hybrid cultivar; identical to SEQ ID NO: 109395
  CDS (1)..(747)

SEQ ID NO: 110392 - protein, 248 aa, Rosa hybrid cultivar; identical to SEQ ID NO: 109396

SEQ ID NO: 110393 - DNA, 741 bp, Gerbera hybrid cv; identical to SEQ ID NO: 109397
  CDS (1)..(741)

SEQ ID NO: 110394 - protein, 246 aa, Gerbera hybrid cv; identical to SEQ ID NO: 109398

SEQ ID NO: 110395 - DNA, 795 bp, Gerbera hybrid cv; identical to SEQ ID NO: 109399
  CDS (1)..(795)

SEQ ID NO: 110396 - protein, 264 aa, Gerbera hybrid cv; identical to SEQ ID NO: 109400

SEQ ID NO: 110397 - DNA, 738 bp, Lolium temulentum; identical to SEQ ID NO: 109403
  CDS (1)..(738)

SEQ ID NO: 110398 - protein, 245 aa, Lolium temulentum; identical to SEQ ID NO: 109404

SEQ ID NO: 110399 - DNA, 729 bp, Corylus avellana; identical to SEQ ID NO: 109405
  CDS (1)..(729)

SEQ ID NO: 110400 - protein, 242 aa, Corylus avellana; identical to SEQ ID NO: 109406

SEQ ID NO: 110401 - DNA, 669 bp, Pinus radiata
  CDS (1)..(669)
atgggtcgtgggaagattgagataaagaggattgaaaatactacgaaccgacaggtcactttctgcaagcgccgaaatggtttattaaagaaggcgtatgaattatcagttctttgtgatgcagaagtggccctcatcgtcttctccagcagagggagactttatgaatttgccaaccacagcgtgaagaggacgattgagaggtacaagaagacttgcgttgacaacaaccacggaggggcgatatcagagtccaattctcagtattggcaacaggaggctggtaaactcagacaacagattgacattttgcaaaatgcaaataggcatttgatgggtgacgggcttacagctttgaacattaaggaactcaagcaacttgaggttcgacttgaaaaaggaatcagccgagtgcgatccaaaaagaacgagatgttgcttgaagagatcgacatcatgcagagaagggaacacatacttatccaggagaatgagattcttcgcagcaagatagccgagtgtcagaatagccacaacacgaacatgttatcagctccggaatatgatgcactgcccgcattcgactctcgaaatttcctacatgcaaatctaatcgatgcggcccatcactatgcacatcaggaacaaacaacgcttcagcttggctga

SEQ ID NO: 110402 - protein, 222 aa, Pinus radiata
MGRGKIEIKRIENTTNRQVTFCKRRNGLLKKAYELSVLCDAEVALIVFSSRGRLYEFANHSVKRTIERYKKTCVDNNHGGAISESNSQYWQQEAGKLRQQIDILQNANRHLMGDGLTALNIKELKQLEVRLEKGISRVRSKKNEMLLEEIDIMQRREHILIQENEILRSKIAECQNSHNTNMLSAPEYDALPAFDSRNFLHANLIDAAHHYAHQEQTTLQLG

SEQ ID NO: 110403 - DNA, 738 bp, Nicotiana tabacum; identical to SEQ ID NO: 109409
  CDS (1)..(738)

SEQ ID NO: 110404 - protein, 245 aa, Nicotiana tabacum; identical to SEQ ID NO: 109410

SEQ ID NO: 110405 - DNA, 669 bp, Pinus resinosa; identical to SEQ ID NO: 109411
  CDS (1)..(669)

SEQ ID NO: 110406 - protein, 222 aa, Pinus resinosa; identical to SEQ ID NO: 109412

SEQ ID NO: 110407 - DNA, 666 bp, Arabidopsis thaliana; identical to SEQ ID NO: 109419
  CDS (1)..(666)

SEQ ID NO: 110408 - protein, 221 aa, Arabidopsis thaliana; identical to SEQ ID NO: 109420

SEQ ID NO: 110409 - DNA, 684 bp, Arabidopsis thaliana; identical to SEQ ID NO: 109425
  CDS (1)..(684)

SEQ ID NO: 110410 - protein, 227 aa, Arabidopsis thaliana; identical to SEQ ID NO: 109426

SEQ ID NO: 110411 - DNA, 660 bp, Arabidopsis thaliana; identical to SEQ ID NO: 109427
  CDS (1)..(660)

SEQ ID NO: 110412 - protein, 219 aa, Arabidopsis thaliana; identical to SEQ ID NO: 109428

SEQ ID NO: 110413 - DNA, 747 bp, Arabidopsis thaliana
  CDS (1)..(747)
atggaggaaggtgggagtagtcacgacgcagagagtagcaagaaactagggagagggaaaatagagataaagaggatagagaacacaacaaatcgtcaagttactttctgcaaacgacgcaatggtcttctcaagaaagcttatgaactctctgtcttgtgtgatgccgaagttgccctcgtcatcttctccactcgtggccgtctctatgagtacgccaacaacagtgtgaggggtacaattgaaaggtacaagaaagcttgttccgatgccgtcaaccctccttccgtcaccgaagctaatactcagtactatcagcaagaagcctctaagcttcggaggcagattcgagatattcagaattcaaataggcatattgttggggaatcacttggttccttgaacttcaaggaactcaaaaacctagaaggacgtcttgaaaaaggaatcagccgtgtccgctccaaaaagaatgagctgttagtggcagagatagagtatatgcagaagagggaaatggagttgcaacacaataacatgtacctgcgagcaaagatagccgaaggcgccagattgaatccggaccagcaggaatcgagtgtgatacaagggacgacagtttacgaatccggtgtatcttctcatgaccagtcgcagcattataatcggaactatattccggtgaaccttcttgaaccgaatcagcaattctccggccaagaccaacctcctcttcaacttgtgtaa

SEQ ID NO: 110414 - protein, 248 aa, Arabidopsis thaliana
MEEGGSSHDAESSKKLGRGKIEIKRIENTTNRQVTFCKRRNGLLKKAYELSVLCDAEVALVIFSTRGRLYEYANNSVRGTIERYKKACSDAVNPPSVTEANTQYYQQEASKLRRQIRDIQNSNRHIVGESLGSLNFKELKNLEGRLEKGISRVRSKKNELLVAEIEYMQKREMELQHNNMYLRAKIAEGARLNPDQQESSVIQGTTVYESGVSSHDQSQHYNRNYIPVNLLEPNQQFSGQDQPPLQLV

SEQ ID NO: 110415 - DNA, 687 bp, Arabidopsis thaliana; identical to SEQ ID NO: 109429
  CDS (1)..(687)

SEQ ID NO: 110416 - protein, 228 aa, Arabidopsis thaliana; identical to SEQ ID NO: 109430

SEQ ID NO: 110417 - DNA, 741 bp, Arabidopsis thaliana; identical to SEQ ID NO: 108727
  CDS (1)..(741)

SEQ ID NO: 110418 - protein, 246 aa, Arabidopsis thaliana; identical to SEQ ID NO: 108728

SEQ ID NO: 110419 - DNA, 759 bp, Arabidopsis thaliana; identical to SEQ ID NO: 109433
  CDS (1)..(759)

SEQ ID NO: 110420 - protein, 252 aa, Arabidopsis thaliana; identical to SEQ ID NO: 109434

SEQ ID NO: 110421 - DNA, 729 bp, Arabidopsis thaliana; identical to SEQ ID NO: 109435
  CDS (1)..(729)

SEQ ID NO: 110422 - protein, 242 aa, Arabidopsis thaliana; identical to SEQ ID NO: 109436

SEQ ID NO: 110423 - DNA, 753 bp, Solanum commersonii; identical to SEQ ID NO: 109437
  CDS (1)..(753)
  misc_feature (693)..(693): n is a, g, c or t

SEQ ID NO: 110424 - protein, 250 aa, Solanum commersonii; identical to SEQ ID NO: 109438
  misc_feature (231)..(231): The Xaa at location 231 stands for Gln, or His.

SEQ ID NO: 110425 - DNA, 684 bp, Solanum lycopersicum; identical to SEQ ID NO: 109439
  CDS (1)..(684)

SEQ ID NO: 110426 - protein, 227 aa, Solanum lycopersicum; identical to SEQ ID NO: 109440

SEQ ID NO: 110427 - DNA, 753 bp, Solanum tuberosum; identical to SEQ ID NO: 109441
  CDS (1)..(753)

SEQ ID NO: 110428 - protein, 250 aa, Solanum tuberosum; identical to SEQ ID NO: 109442

SEQ ID NO: 110429 - DNA, 726 bp, Petunia hybrida; identical to SEQ ID NO: 109445
  CDS (1)..(726)

SEQ ID NO: 110430 - protein, 241 aa, Petunia hybrida; identical to SEQ ID NO: 109446

SEQ ID NO: 110431 - DNA, 675 bp, Solanum lycopersicum; identical to SEQ ID NO: 109447
  CDS (1)..(675)

SEQ ID NO: 110432 - protein, 224 aa, Solanum lycopersicum; identical to SEQ ID NO: 109448

SEQ ID NO: 110433 - DNA, 759 bp, Brassica napus
  CDS (1)..(759)
atggcttaccaaatggagctaggaggagaatcctctccacaaaggaaagctgggagaggaaagatcgaaataaaacggatcgagaacacaacgaaccgtcaagttactttctgcaaacgcagaaatggtttgctcaagaaagcttacgaactctctgttctttgtgatgctgaagtcgcactcattgtcttctctagccgtggccgtctctatgagtactcaaacaacagtgtaaaagggacaattgagaggtacaagaaagcaatatcggataattctaacaccggatccgtggcagaaattaatgcacagtattatcaacaagaatctgccaaattgcgtcaacaaattatcagcatacagaactcgaacaggcaattgatgggtgagacgattgggtcaatgtctcccaaagagctcaggaacttggaaggcagattagacagaagtgttaatcgaatccgatccaagaagaacgaactcttattcgccgaaattgactacatgcagaagagagaagttgatttgcataacgataaccagcttcttcgtgctaagatagctgaaaatgagaggaacaatccaagtatgagtctgatgccaggaggatctaactacgagcagatcatgccaccgcctcaaacgcaacctcaaccgtttgactcacggaactatttccaagtcgcggcattgcaacctaacaatcaccattactcatccgcaggtcgcgaagaccaaaccgctcttcagttagtgtaa

SEQ ID NO: 110434 - protein, 252 aa, Brassica napus
MAYQMELGGESSPQRKAGRGKIEIKRIENTTNRQVTFCKRRNGLLKKAYELSVLCDAEVALIVFSSRGRLYEYSNNSVKGTIERYKKAISDNSNTGSVAEINAQYYQQESAKLRQQIISIQNSNRQLMGETIGSMSPKELRNLEGRLDRSVNRIRSKKNELLFAEIDYMQKREVDLHNDNQLLRAKIAENERNNPSMSLMPGGSNYEQIMPPPQTQPQPFDSRNYFQVAALQPNNHHYSSAGREDQTALQLV

SEQ ID NO: 110435 - DNA, 729 bp, Panax ginseng; identical to SEQ ID NO: 109449
  CDS (1)..(729)

SEQ ID NO: 110436 - protein, 242 aa, Panax ginseng; identical to SEQ ID NO: 109450

SEQ ID NO: 110437 - DNA, 729 bp, Petunia hybrida
  CDS (1)..(729)
atggagttccaaagtgatctaacaagagagatctctccacaaaggaaactaggaagaggaaagattgagatcaagaggatcgaaaacacgacaaatcggcaagtcactttttgcaagagacgcaatggtttgctcaaaaaagcctatgaattatctgtgctctgtgatgctgaagttgctttgattgtcttctctagccgaggcaggctctatgagtatgccaacaacagtgtgaaagcaacaattgagaggtacaagaaagcttgttcagattcctcaaacactggttcaattgccgaagctaatgctcagtattaccagcaagaagcctccaaactccgtgcacaaattggaaatctgcagaaccagaacaggaactttcttggtgaatctcttgctgcactgaatctcagagatctgaggaacctggaacaaaaaattgaaaaaggcattagcaaaatccgagccaaaaagaatgagctgttgtttgctgaaattgagtatatgcaaaagagggaaattgatttacacaacaacaatcagtatttaagagcaaagattgctgaaactgagagatcccagcagatgaacttgatgcctgggagttctagctatgaccttgtgcctccccagcagtcattcgatgcgcggaactatctacaagtgaatggcttgcagaccaacaaccattaccctagacaagaccaaccacctcttcaactagtctaa

SEQ ID NO: 110438 - protein, 242 aa, Petunia hybrida
MEFQSDLTREISPQRKLGRGKIEIKRIENTTNRQVTFCKRRNGLLKKAYELSVLCDAEVALIVFSSRGRLYEYANNSVKATIERYKKACSDSSNTGSIAEANAQYYQQEASKLRAQIGNLQNQNRNFLGESLAALNLRDLRNLEQKIEKGISKIRAKKNELLFAEIEYMQKREIDLHNNNQYLRAKIAETERSQQMNLMPGSSSYDLVPPQQSFDARNYLQVNGLQTNNHYPRQDQPPLQLV

SEQ ID NO: 110439 - DNA, 747 bp, Solanum lycopersicum; identical to SEQ ID NO: 109451
  CDS (1)..(747)

SEQ ID NO: 110440 - protein, 248 aa, Solanum lycopersicum; identical to SEQ ID NO: 109452

SEQ ID NO: 110441 - DNA, 747 bp, Nicotiana tabacum; identical to SEQ ID NO: 109453
  CDS (1)..(747)

SEQ ID NO: 110442 - protein, 248 aa, Nicotiana tabacum; identical to SEQ ID NO: 109454

SEQ ID NO: 110443 - DNA, 702 bp, Dianthus caryophyllus; identical to SEQ ID NO: 109457
  CDS (1)..(702)

SEQ ID NO: 110444 - protein, 233 aa, Dianthus caryophyllus; identical to SEQ ID NO: 109458

SEQ ID NO: 110445 - DNA, 714 bp, Gnetum gnemon; identical to SEQ ID NO: 109459
  CDS (1)..(714)

SEQ ID NO: 110446 - protein, 237 aa, Gnetum gnemon; identical to SEQ ID NO: 109460

SEQ ID NO: 110447 - DNA, 741 bp, Oryza sativa subsp
  CDS (1)..(741)
atggggcggggcaaggtgcagctgaagcggatcgagaacacgatcaaccggcaggtgaccttctccaagcgcaggtcggggctgctcaagaaggcgaatgagatctccgtgctctgcgacgccgaggtcgcgctcatcatcttctccaccaagggcaagctctacaagtacgccaccgactcatgtatggacaaaatccttgaacgttatgagcgctactcctatgcagaaaaggtccttatttcagctgaatctgacactcagggcaactggtgccacgaatataggaaactgaaggctaaggttgagacaatacagaaatgtcaaaagcacctcatgggagaggatcttgaatctttgaatctcaaagagctgcagcagctggagcagcagctggaaaattcgttgaaacatatcagatccagaaagagccaactaatgctcgagtccattaacgagcttcaacggaaggaaaagtcactgcaggaggagaataaggtcctacagaaagaactggtggagaagcagaaagtccagaagcaacaagtgcaatgggaccagacacaacctcaaacaagttcctcatcatcctccttcatgatgagggaagcccttccaacaactaatatcagtaactaccctgcagcagctggcgaaaggatagaggatgtagcagcagggcagccacagcatgttcgcattgggctgccaccatggatgctgagccacatcaacggctaa

SEQ ID NO: 110448 - protein, 246 aa, Oryza sativa subsp
MGRGKVQLKRIENTINRQVTFSKRRSGLLKKANEISVLCDAEVALIIFSTKGKLYKYATDSCMDKILERYERYSYAEKVLISAESDTQGNWCHEYRKLKAKVETIQKCQKHLMGEDLESLNLKELQQLEQQLENSLKHIRSRKSQLMLESINELQRKEKSLQEENKVLQKELVEKQKVQKQQVQWDQTQPQTSSSSSSFMMREALPTTNISNYPAAAGERIEDVAAGQPQHVRIGLPPWMLSHING

SEQ ID NO: 110449 - DNA, 750 bp, Oryza sativa subsp
  CDS (1)..(750)
atggggaggggaagggttgagctgaagcgcatcgagaacaagatcaaccggcaggtcaccttctccaagcgccgcaacggcctcctcaagaaggcgtacgagctctccgtgctctgcgacgcggaggtggcgctcatcatcttctccagccgcggcaagctgtacgaattcggtagcgccggaataaacaagacattggaaaagtacaatagttgctgttacaacgctcaaggttcaaatagtgctcttgctggtggtgaacatcagagctggtaccaagagatgtcaaggctcaagactaagcttgaatgtctccaacgctctcagaggcacatgcttggtgaagatcttggaccattgagcataaaggaactgcagcagctggagaagcaacttgagtactcactgtcacaggctcgacaacgaaagacacaaatcatgatggagcaggtcgacgatcttcgccggaaggaacgccagcttggagagctcaataagcaactgaaaaacaagctagaagctgaagccgatagcagcaactgcagatcagccatccaggattcctgggtccatggcaccgtcgtcagtggcggcagagtgctgaatgctcaaccaccaccagatattgactgtgagcctactctgcaaattgggtactatcaatttgtccgtcctgaggcggccaatccaagaagcaatggaggaggaggggatcagaacaacaactttgtgatgggatggcccctctga

SEQ ID NO: 110450 - protein, 249 aa, Oryza sativa subsp
MGRGRVELKRIENKINRQVTFSKRRNGLLKKAYELSVLCDAEVALIIFSSRGKLYEFGSAGINKTLEKYNSCCYNAQGSNSALAGGEHQSWYQEMSRLKTKLECLQRSQRHMLGEDLGPLSIKELQQLEKQLEYSLSQARQRKTQIMMEQVDDLRRKERQLGELNKQLKNKLEAEADSSNCRSAIQDSWVHGTVVSGGRVLNAQPPPDIDCEPTLQIGYYQFVRPEAANPRSNGGGGDQNNNFVMGWPL

SEQ ID NO: 110451 - DNA, 693 bp, Oryza sativa subsp; identical to SEQ ID NO: 109465
  CDS (1)..(693)

SEQ ID NO: 110452 - protein, 230 aa, Oryza sativa subsp; identical to SEQ ID NO: 109466

SEQ ID NO: 110453 - DNA, 702 bp, Oryza sativa subsp; identical to SEQ ID NO: 109467
  CDS (1)..(702)

SEQ ID NO: 110454 - protein, 233 aa, Oryza sativa subsp; identical to SEQ ID NO: 109468

SEQ ID NO: 110455 - DNA, 726 bp, Oryza sativa subsp
  CDS (1)..(726)
atggggagggggaagatagtgataaggaggatagacaactcgacgagcaggcaggtgacgttctcgaagcgtcggaacgggcttctgaagaaggcgaaggagctatccatcctctgcgatgcggaggtcggccttgtcgtcttctccagcaccggcaggctctatgagttctccagcaccaacatgaaaactgtgatagaccggtataccaacgcaaaggaggagctacttggcgggaatgcaacttcagaaattaagatttggcagagggaggcagcaagcttgaggcagcaactgcacaacttgcaagaaagccacaagcaactgatgggtgaggagctttctggcctaggtgttagagacctacaaggtttagagaataggcttgaaataagtctacgtaatatcagaatgagaaaggacaatcttttgaaaagtgaaatcgaggagttacatgtgaagggaagcctaattcaccaggaaaacatcgaactttctagaagcctaaatgtcatgtcgcaacaaaaattggaactgtataacaagcttcaggcctgtgaacagagaggtgccacagatgcaaatgaaagttccagcactccatacagctttcgtatcatacaaaatgctaatatgcctcctagtcttgaattgagccaatcacagcaaagagaaggggagtgcagcaaaacagctgctccagaactgggacttcatctgccttaa

SEQ ID NO: 110456 - protein, 241 aa, Oryza sativa subsp
MGRGKIVIRRIDNSTSRQVTFSKRRNGLLKKAKELSILCDAEVGLVVFSSTGRLYEFSSTNMKTVIDRYTNAKEELLGGNATSEIKIWQREAASLRQQLHNLQESHKQLMGEELSGLGVRDLQGLENRLEISLRNIRMRKDNLLKSEIEELHVKGSLIHQENIELSRSLNVMSQQKLELYNKLQACEQRGATDANESSSTPYSFRIIQNANMPPSLELSQSQQREGECSKTAAPELGLHLP

SEQ ID NO: 110457 - DNA, 711 bp, Oryza sativa subsp; identical to SEQ ID NO: 109469
  CDS (1)..(711)

SEQ ID NO: 110458 - protein, 236 aa, Oryza sativa subsp; identical to SEQ ID NO: 109470

SEQ ID NO: 110459 - DNA, 744 bp, Pisum sativum; identical to SEQ ID NO: 109473
  CDS (1)..(744)

SEQ ID NO: 110460 - protein, 247 aa, Pisum sativum; identical to SEQ ID NO: 109474

SEQ ID NO: 110461 - DNA, 756 bp, Arabidopsis thaliana; identical to SEQ ID NO: 109477
  CDS (1)..(756)

SEQ ID NO: 110462 - protein, 251 aa, Arabidopsis thaliana; identical to SEQ ID NO: 109478

SEQ ID NO: 110463 - DNA, 753 bp, Arabidopsis thaliana; identical to SEQ ID NO: 109479
  CDS (1)..(753)

SEQ ID NO: 110464 - protein, 250 aa, Arabidopsis thaliana; identical to SEQ ID NO: 109480

SEQ ID NO: 110465 - DNA, 756 bp, Arabidopsis thaliana; identical to SEQ ID NO: 109481
  CDS (1)..(756)

SEQ ID NO: 110466 - protein, 251 aa, Arabidopsis thaliana; identical to SEQ ID NO: 109482

SEQ ID NO: 110467 - DNA, 645 bp, Arabidopsis thaliana; identical to SEQ ID NO: 109483
  CDS (1)..(645)

SEQ ID NO: 110468 - protein, 214 aa, Arabidopsis thaliana; identical to SEQ ID NO: 109484

SEQ ID NO: 110469 - DNA, 864 bp, Oryza sativa; identical to SEQ ID NO: 109487
  CDS (1)..(864)

SEQ ID NO: 110470 - protein, 287 aa, Oryza sativa; identical to SEQ ID NO: 109488

SEQ ID NO: 110471 - DNA, 798 bp, Oryza sativa; identical to SEQ ID NO: 109491
  CDS (1)..(798)

SEQ ID NO: 110472 - protein, 265 aa, Oryza sativa; identical to SEQ ID NO: 109492

SEQ ID NO: 110473 - DNA, 723 bp, Oryza sativa; identical to SEQ ID NO: 109495
  CDS (1)..(723)

SEQ ID NO: 110474 - protein, 240 aa, Oryza sativa; identical to SEQ ID NO: 109496

SEQ ID NO: 110475 - DNA, 753 bp, Oryza sativa; identical to SEQ ID NO: 109497
  CDS (1)..(753)

SEQ ID NO: 110476 - protein, 250 aa, Oryza sativa; identical to SEQ ID NO: 109498

SEQ ID NO: 110477 - DNA, 720 bp, Oryza sativa; identical to SEQ ID NO: 109499
  CDS (1)..(720)

SEQ ID NO: 110478 - protein, 239 aa, Oryza sativa; identical to SEQ ID NO: 109500

SEQ ID NO: 110479 - DNA, 774 bp, Oryza sativa; identical to SEQ ID NO: 109503
  CDS (1)..(774)

SEQ ID NO: 110480 - protein, 257 aa, Oryza sativa; identical to SEQ ID NO: 109504

SEQ ID NO: 110481 - DNA, 741 bp, Oryza sativa; identical to SEQ ID NO: 109507
  CDS (1)..(741)

SEQ ID NO: 110482 - protein, 246 aa, Oryza sativa; identical to SEQ ID NO: 109508

SEQ ID NO: 110483 - DNA, 684 bp, Oryza sativa
  CDS (1)..(684)
atggggagagggaagattgccatcaagaggatcgacaacacgatgaaccggcaggtgaccttctcgaagcggcgcggcgggctgatgaagaaggcccgggagctggccatcctctgcgacgccgacgtcggcctcattgtcttctcctgcaccggccgcctctacgacttctccagctcaagcatgaaatcaataatagagcggtaccaggaggcaggagaggagcattgtcggttgctgaacccaatgtcagaggctaagttttggcagcgggaggttacaactttgaggcagcaagtgcaaaacttacaccacaacaacaggcaacttttgggagaggaaatctccaacttcacagttagagatctgcagcttctccagaaccaagttgagatgagcctacattccataagaaataaaaaggatcaacttttggcagaggagattctaaaactcaatgaaaaggggtctcttgttcaaaaggagaacagtgaacttcgcaagaagttcaacattgctcatcaacgcaacatagaattacacaagaagcttaactctggagaaagcacgtcaagtgagcaagttaccagaagctcaaaggatcccggagaatcgagtacaccccgtgattcacgtgtgtgtattgaccttgaattgagtcaaaaagaagttgaagatgaataa

SEQ ID NO: 110484 - protein, 227 aa, Oryza sativa
MGRGKIAIKRIDNTMNRQVTFSKRRGGLMKKARELAILCDADVGLIVFSCTGRLYDFSSSSMKSIIERYQEAGEEHCRLLNPMSEAKFWQREVTTLRQQVQNLHHNNRQLLGEEISNFTVRDLQLLQNQVEMSLHSIRNKKDQLLAEEILKLNEKGSLVQKENSELRKKFNIAHQRNIELHKKLNSGESTSSEQVTRSSKDPGESSTPRDSRVCIDLELSQKEVEDE

SEQ ID NO: 110485 - DNA, 765 bp, Oryza sativa; identical to SEQ ID NO: 109511
  CDS (1)..(765)

SEQ ID NO: 110486 - protein, 254 aa, Oryza sativa; identical to SEQ ID NO: 109512

SEQ ID NO: 110487 - DNA, 867 bp, Oryza sativa
  CDS (1)..(867)
atgcacatatacaaagagcaggaggctgaaccatccactggcctgatgatgccagagccagcacctgttgcttcccccggctccggtggctcaggtggctcaggctcggtgggagctgagaagattgggagcaggggaaagattgagatcaagcgcatcgagaacacgacgaaccgtcaagtgaccttctgcaagcgccgcagcgggctactcaagaaggcgtatgagctctccgtgctctgcgatgccgaggtcgccctcgtcgtcttctccagccgtggccgcctctacgagtactccaacaacagcgtgaaggaaactattgagaggtacaagaaagccaacagtgacacctccaacgccagtacagttgcagagatcaatgcccagcactaccagcaggaagctgctaagctgaagcaacagatcaccaacctgcagaactccaacaggaccctagtaggtgataatatcaccaccatgaaccacagagaacttaagcagctggaaggcagactggacaaaggcctaggaaagattagagcacggaagaacgaattgctgtgtgctgaaattgagtatatgcagagaagggaaacggagctgcagaatgacaacatgtacttaaagagcaaagttgctgagagtgaaagaggactgcaaacagtgaacatgatgggttcagcatctacgagcgagtacgtgcaaaatatgatccattatgatccaagaaacttcctgcaattcaacatcatgcatcagcctcagtattatcctgaacaggaggaccgaaaggcctttatgtcaggtaaaaaatattctcagtgtaacatagtcagagttcatagttcaacaaatgaaatttga

SEQ ID NO: 110488 - protein, 288 aa, Oryza sativa
MHIYKEQEAEPSTGLMMPEPAPVASPGSGGSGGSGSVGAEKIGSRGKIEIKRIENTTNRQVTFCKRRSGLLKKAYELSVLCDAEVALVVFSSRGRLYEYSNNSVKETIERYKKANSDTSNASTVAEINAQHYQQEAAKLKQQITNLQNSNRTLVGDNITTMNHRELKQLEGRLDKGLGKIRARKNELLCAEIEYMQRRETELQNDNMYLKSKVAESERGLQTVNMMGSASTSEYVQNMIHYDPRNFLQFNIMHQPQYYPEQEDRKAFMSGKKYSQCNIVRVHSSTNEI

SEQ ID NO: 110489 - DNA, 819 bp, Oryza sativa; identical to SEQ ID NO: 109513
  CDS (1)..(819)

SEQ ID NO: 110490 - protein, 272 aa, Oryza sativa; identical to SEQ ID NO: 109514

SEQ ID NO: 110491 - DNA, 702 bp, Oryza sativa; identical to SEQ ID NO: 109515
  CDS (1)..(702)

SEQ ID NO: 110492 - protein, 233 aa, Oryza sativa; identical to SEQ ID NO: 109516

SEQ ID NO: 110493 - DNA, 678 bp, Oryza sativa; identical to SEQ ID NO: 109517
  CDS (1)..(678)

SEQ ID NO: 110494 - protein, 225 aa, Oryza sativa; identical to SEQ ID NO: 109518

SEQ ID NO: 110495 - DNA, 723 bp, Oryza sativa; identical to SEQ ID NO: 109523
  CDS (1)..(723)

SEQ ID NO: 110496 - protein, 240 aa, Oryza sativa; identical to SEQ ID NO: 109524

SEQ ID NO: 110497 - DNA, 750 bp, Oryza sativa; identical to SEQ ID NO: 109525
  CDS (1)..(750)

SEQ ID NO: 110498 - protein, 249 aa, Oryza sativa; identical to SEQ ID NO: 109526

SEQ ID NO: 110499 - DNA, 750 bp, Oryza sativa; identical to SEQ ID NO: 109529
  CDS (1)..(750)

SEQ ID NO: 110500 - protein, 249 aa, Oryza sativa; identical to SEQ ID NO: 109530

SEQ ID NO: 110501 - DNA, 747 bp, Oryza sativa; identical to SEQ ID NO: 109531
  CDS (1)..(747)

SEQ ID NO: 110502 - protein, 248 aa, Oryza sativa; identical to SEQ ID NO: 109532

SEQ ID NO: 110503 - DNA, 702 bp, Oryza sativa; identical to SEQ ID NO: 109533
  CDS (1)..(702)

SEQ ID NO: 110504 - protein, 233 aa, Oryza sativa; identical to SEQ ID NO: 109534

SEQ ID NO: 110505 - DNA, 813 bp, Oryza sativa; identical to SEQ ID NO: 109537
  CDS (1)..(813)

SEQ ID NO: 110506 - protein, 270 aa, Oryza sativa; identical to SEQ ID NO: 109538

SEQ ID NO: 110507 - DNA, 687 bp, Oryza sativa; identical to SEQ ID NO: 109539
  CDS (1)..(687)

SEQ ID NO: 110508 - protein, 228 aa, Oryza sativa; identical to SEQ ID NO: 109540

SEQ ID NO: 110509 - DNA, 726 bp, Brassica napus; identical to SEQ ID NO: 109543
  CDS (1)..(726)

SEQ ID NO: 110510 - protein, 241 aa, Brassica napus; identical to SEQ ID NO: 109544

SEQ ID NO: 110511 - DNA, 723 bp, Brassica napus; identical to SEQ ID NO: 109545
  CDS (1)..(723)

SEQ ID NO: 110512 - protein, 240 aa, Brassica napus; identical to SEQ ID NO: 109546

SEQ ID NO: 110513 - DNA, 723 bp, Brassica napus; identical to SEQ ID NO: 109547
  CDS (1)..(723)

SEQ ID NO: 110514 - protein, 240 aa, Brassica napus; identical to SEQ ID NO: 109548

SEQ ID NO: 110515 - DNA, 750 bp, Brassica napus; identical to SEQ ID NO: 102931
  CDS (1)..(750)

SEQ ID NO: 110516 - protein, 249 aa, Brassica napus; identical to SEQ ID NO: 102932

SEQ ID NO: 110517 - DNA, 687 bp, Brassica napus; identical to SEQ ID NO: 109551
  CDS (1)..(687)

SEQ ID NO: 110518 - protein, 228 aa, Brassica napus; identical to SEQ ID NO: 109552

SEQ ID NO: 110519 - DNA, 666 bp, Brassica napus
  CDS (1)..(666)
atggtgaggggaaagactgagatgaagaggatagagaacgcaacgagcaggcaagtgaccttctccaagagaagaaatggacttttgaagaaagccttcgagttatcagtcctttgtgatgctgaagttgctttgatcatcttctctccaagttccaaactctatgagttctctagctctggcatcgcaaaaacaatagaacgataccagagacgagtcaaagaaactggagttaaccacaagagagatgataattctcagcaagcaagaggcgagacatatggtttaacaaaaaagattgagcagctagagatatctaaacgcaaattgcttggagaaggtattgatgcatgttctattgaggagctgcaacagttagagaatcaattggagcgaggcttgaccaggataagagccaagaagtaccaactactccgtgaagaaattgagaagttgaaggaagaggagaggaatctcatcaaggaaaataaagagctgaaggagaagttgcatgggatgggagcaatagtagtagcatcatcatcatcaaccttatcatcagcagaagtgaacatggatgacaatggcaacatggaagtggagaccggtttgttcattggacctcctgagacaagacaatcgaagaaaatccctcctcaaaactaa

SEQ ID NO: 110520 - protein, 221 aa, Brassica napus
MVRGKTEMKRIENATSRQVTFSKRRNGLLKKAFELSVLCDAEVALIIFSPSSKLYEFSSSGIAKTIERYQRRVKETGVNHKRDDNSQQARGETYGLTKKIEQLEISKRKLLGEGIDACSIEELQQLENQLERGLTRIRAKKYQLLREEIEKLKEEERNLIKENKELKEKLHGMGAIVVASSSSTLSSAEVNMDDNGNMEVETGLFIGPPETRQSKKIPPQN

SEQ ID NO: 110521 - DNA, 723 bp, Brassica napus; identical to SEQ ID NO: 109553
  CDS (1)..(723)

SEQ ID NO: 110522 - protein, 240 aa, Brassica napus; identical to SEQ ID NO: 109554

SEQ ID NO: 110523 - DNA, 750 bp, Brassica napus; identical to SEQ ID NO: 109561
  CDS (1)..(750)

SEQ ID NO: 110524 - protein, 249 aa, Brassica napus; identical to SEQ ID NO: 109562

SEQ ID NO: 110525 - DNA, 726 bp, Brassica napus; identical to SEQ ID NO: 109563
  CDS (1)..(726)

SEQ ID NO: 110526 - protein, 241 aa, Brassica napus; identical to SEQ ID NO: 109564

SEQ ID NO: 110527 - DNA, 696 bp, Brassica napus; identical to SEQ ID NO: 109565
  CDS (1)..(696)

SEQ ID NO: 110528 - protein, 231 aa, Brassica napus; identical to SEQ ID NO: 109566

SEQ ID NO: 110529 - DNA, 726 bp, Brassica napus; identical to SEQ ID NO: 109567
  CDS (1)..(726)

SEQ ID NO: 110530 - protein, 241 aa, Brassica napus; identical to SEQ ID NO: 109568

SEQ ID NO: 110531 - DNA, 726 bp, Brassica napus; identical to SEQ ID NO: 109569
  CDS (1)..(726)

SEQ ID NO: 110532 - protein, 241 aa, Brassica napus; identical to SEQ ID NO: 109570

SEQ ID NO: 110533 - DNA, 663 bp, Brassica napus
  CDS (1)..(663)
atggtgaggggaaagacggagatgaagaggatagagaacgcgacgagcaggcaagtgactttctccaagagaagaaatggacttttgaagaaagcctttgaattatcagtcctttgtgatgccgaagttgccctagttatcttctctcctagaggaaaactctatgagttttctagctcctccagtataacaaaaacagtagaacgatatcaaaaacgagtacatgatcttggctctaaccataagagagaggataattcacagcaagcaaaaggcgaaacctatggcttagcgagaaagatcgaacaacttgagatttcaaaacgaaaatttctgggagaaggacttgacgcatcttctattgaggagttacaacaattggaaaaccagttggagcgaagcttaaccaaaataagagccaaaaagtaccaattactgcgtgaagaactggacaagttgaaagaaaaggagaggaaccttactgcagaaaacaaaatgctgacggagaagtatgagatgggaagaggaggaataataccaagaacatcatcaacaacaacatcagaagacttggacacagaggagagtgaaatggaagtggtgactgatttgttgattggacctcctccgatccgacactccaaaaagtttcctccaaattaa

SEQ ID NO: 110534 - protein, 220 aa, Brassica napus
MVRGKTEMKRIENATSRQVTFSKRRNGLLKKAFELSVLCDAEVALVIFSPRGKLYEFSSSSSITKTVERYQKRVHDLGSNHKREDNSQQAKGETYGLARKIEQLEISKRKFLGEGLDASSIEELQQLENQLERSLTKIRAKKYQLLREELDKLKEKERNLTAENKMLTEKYEMGRGGIIPRTSSTTTSEDLDTEESEMEVVTDLLIGPPPIRHSKKFPPN

SEQ ID NO: 110535 - DNA, 768 bp, Brassica napus; identical to SEQ ID NO: 109571
  CDS (1)..(768)

SEQ ID NO: 110536 - protein, 255 aa, Brassica napus; identical to SEQ ID NO: 109572

SEQ ID NO: 110537 - DNA, 765 bp, Brassica napus; identical to SEQ ID NO: 109575
  CDS (1)..(765)

SEQ ID NO: 110538 - protein, 254 aa, Brassica napus; identical to SEQ ID NO: 109576

SEQ ID NO: 110539 - DNA, 684 bp, Glycine max
  CDS (1)..(684)
atggtgagggggaaaactcagatgaagcgcatagaaaatgagacgagtaggcaagtaacgttctccaagagaaggaacgggttgctcaagaaggcctttgagctttcggtgctgtgtgatgctgaagtcgcactcatcatcttctctaccagagggaggctttatgagttctccagttcaagatgctccagtataaacaaaacagttgaacgctatcaaaggaagatcgaggacctgggtgtcagcaacaaaggaatccatgaaaatacacagcatctgaaggaagttgatatgagcatggcaaagaagatcgagcatctagaagattcaagaagaaagcttttgggagatgaattggataaatgcagtattgacgagttacaacagctagagaaccagctcgaacgcagcctggacaaaattagggcaacaaagaatcaattgttcaggaagcgaatcgagaagctaaaagaagaggaaaagtgcttactcgaagtaaataaacgcttacgtgagcagtaccggattgaacgacaacgttgtttgagtgatcaggatgtcgaattcgccacaaaaaaggagggagaagaggtggagacggagttattcataggaagacctgagagaagaatgccgttaaagttgaaacctacaacatatagtgctcatgcatacatagcgtaa

SEQ ID NO: 110540 - protein, 227 aa, Glycine max
MVRGKTQMKRIENETSRQVTFSKRRNGLLKKAFELSVLCDAEVALIIFSTRGRLYEFSSSRCSSINKTVERYQRKIEDLGVSNKGIHENTQHLKEVDMSMAKKIEHLEDSRRKLLGDELDKCSIDELQQLENQLERSLDKIRATKNQLFRKRIEKLKEEEKCLLEVNKRLREQYRIERQRCLSDQDVEFATKKEGEEVETELFIGRPERRMPLKLKPTTYSAHAYIA

SEQ ID NO: 110541 - DNA, 732 bp, Glycine max; identical to SEQ ID NO: 109581
  CDS (1)..(732)

SEQ ID NO: 110542 - protein, 243 aa, Glycine max; identical to SEQ ID NO: 109582

SEQ ID NO: 110543 - DNA, 669 bp, Glycine max; identical to SEQ ID NO: 109583
  CDS (1)..(669)

SEQ ID NO: 110544 - protein, 222 aa, Glycine max; identical to SEQ ID NO: 109584

SEQ ID NO: 110545 - DNA, 738 bp, Glycine max; identical to SEQ ID NO: 102933
  CDS (1)..(738)

SEQ ID NO: 110546 - protein, 245 aa, Glycine max; identical to SEQ ID NO: 102934

SEQ ID NO: 110547 - DNA, 738 bp, Glycine max; identical to SEQ ID NO: 109589
  CDS (1)..(738)

SEQ ID NO: 110548 - protein, 245 aa, Glycine max; identical to SEQ ID NO: 109590

SEQ ID NO: 110549 - DNA, 759 bp, Brassica napus; identical to SEQ ID NO: 109591
  CDS (1)..(759)

SEQ ID NO: 110550 - protein, 252 aa, Brassica napus; identical to SEQ ID NO: 109592

SEQ ID NO: 110551 - DNA, 669 bp, Glycine max; identical to SEQ ID NO: 109595
  CDS (1)..(669)

SEQ ID NO: 110552 - protein, 222 aa, Glycine max; identical to SEQ ID NO: 109596

SEQ ID NO: 110553 - DNA, 735 bp, Triticum aestivum; identical to SEQ ID NO: 109599
  CDS (1)..(735)

SEQ ID NO: 110554 - protein, 244 aa, Triticum aestivum; identical to SEQ ID NO: 109600

SEQ ID NO: 110555 - DNA, 810 bp, Triticum aestivum; identical to SEQ ID NO: 109605
  CDS (1)..(810)

SEQ ID NO: 110556 - protein, 269 aa, Triticum aestivum; identical to SEQ ID NO: 109606

SEQ ID NO: 110557 - DNA, 696 bp, Linum usitatissimum
  CDS (1)..(696)
atggggagagggagagtggagctgaagaggatagagaacaagatcaacaggcaagtcacatttgcaaagaggaggaatggtctactcaaaaaggcttatgagctctctgtgctttgtgatgctgaggttgctctcatcctcttctccagccgtggcaagctctacgagttctgcagctcctccagtatggtgaagaccatagagaagtatcaaaggtacacctatggacaactagaaccaagccaaacttctagggagacccagaataattaccaggattatttgaagctaaaagagaaggtggaggaccttaaacgctctcaaaggcatcttcttggagaggagttggggaatttgggggctaaagagttggaccaaatggagaatcagcttgatgggtctctcaagcaaataagacttgtcaagactcaggtgattgtagatcaactctcaaaccttaaacaaaagggagatttgcttgaggaaacaaacaaggccttactaatcaagctggaggagacaaatgcaggcatgagacattccacatgggaagttggggaaaactcagctgatcagcagccacatcagcagataatagcaacagagaaaccttcttcttcttcagctgttgcagaaactgtgatgatcaatggcggatcgggagctctcatcagcaggcctccatggatgctttag

SEQ ID NO: 110558 - protein, 231 aa, Linum usitatissimum
MGRGRVELKRIENKINRQVTFAKRRNGLLKKAYELSVLCDAEVALILFSSRGKLYEFCSSSSMVKTIEKYQRYTYGQLEPSQTSRETQNNYQDYLKLKEKVEDLKRSQRHLLGEELGNLGAKELDQMENQLDGSLKQIRLVKTQVIVDQLSNLKQKGDLLEETNKALLIKLEETNAGMRHSTWEVGENSADQQPHQQIIATEKPSSSSAVAETVMINGGSGALISRPPWML

SEQ ID NO: 110559 - DNA, 753 bp, Linum usitatissimum
  CDS (1)..(753)
atgggtagaggtagggttgagctaaagaggatcgagaacaaaatcaaccggcaagtaacgtttgcaaagagaaggaacggtctattgaagaaagcctacgagctttcagtcctttgcgatgctgaggttgctctcatcatcttctccaaccgtggcaagctgtatgagttctgcagcagctcaagcatgctgaagacgctggagaggtaccagaaatgcaactatggagcaccagagtccaatgtctcagctagagaagccctggagataagcagtcagcaggagtatctgaagcttaaagctcgctacgaggcgctacaaaggtcccaaaggaacttgctgggagaagaccttggccctctaagcacaaaggagctcgagtcactcgaaaggcagctcgacatgtcactgaagcaaatcagatcgactcggacccaatacatgctggatcaactcaatgatctacaacacaaggaacatttgctgaatgaagctaataagacactgaaacaaaggttgatggaagggtaccaaataaacaacacactccagttgaacccttgtcctgaagaagtagcttacggccgacaccaccaccaacctcagccacaggatgacggcggcttcttccaccccttggactgccaacccactttacaaatcggataccagcaagatccaacgttgacggatttgacagtggcgactgccggaccaagtgtgaataattatatgcccggatggttaccgtag

SEQ ID NO: 110560 - protein, 250 aa, Linum usitatissimum
MGRGRVELKRIENKINRQVTFAKRRNGLLKKAYELSVLCDAEVALIIFSNRGKLYEFCSSSSMLKTLERYQKCNYGAPESNVSAREALEISSQQEYLKLKARYEALQRSQRNLLGEDLGPLSTKELESLERQLDMSLKQIRSTRTQYMLDQLNDLQHKEHLLNEANKTLKQRLMEGYQINNTLQLNPCPEEVAYGRHHHQPQPQDDGGFFHPLDCQPTLQIGYQQDPTLTDLTVATAGPSVNNYMPGWLP

SEQ ID NO: 110561 - DNA, 723 bp, Zea mays; identical to SEQ ID NO: 109609
  CDS (1)..(723)

SEQ ID NO: 110562 - protein, 240 aa, Zea mays; identical to SEQ ID NO: 109610

SEQ ID NO: 110563 - DNA, 687 bp, Helianthus annuus; identical to SEQ ID NO: 109613
  CDS (1)..(687)

SEQ ID NO: 110564 - protein, 228 aa, Helianthus annuus; identical to SEQ ID NO: 109614

SEQ ID NO: 110565 - DNA, 744 bp, Helianthus annuus; identical to SEQ ID NO: 109615
  CDS (1)..(744)

SEQ ID NO: 110566 - protein, 247 aa, Helianthus annuus; identical to SEQ ID NO: 109616

SEQ ID NO: 110567 - DNA, 711 bp, Helianthus annuus
  CDS (1)..(711)
atggggagaggtaaggtgacgttgaagagaatcgaaaacaaaatcaatcgacaggtaaccttctcgaaacggaggtctggattgttgaagaaagctcacgagatctccgtactgtgtgacgttgatgtcgctctcatcgtcttctccaccaaaggaaagctttctgaatacgctactaatgcttcaatggtaaggatccttgaaaggtatgaacaacattcatacacagaaaaggagcttaatgggaccaataatcaatctaaaggaagctggactctggaacatgcaaaattgaaggctaaatttgagctcttgcagaaaaaccaaaggaattttatgggagaagaccttgattccttgagtatcaaagagcttctgaatttggaacagcagcttgaagcggctcttagacgtcttagactgaaaaagaaccagatgatgcttgaatcaatttcggagctccaaaagaaggacaagtctttgcagtatcaaaatagcttgctcttgaagaagattaaaggaaaggaaaaagaattagccgaaccgcctcttgtggaccagcaaactcaagagaatatggtctcattccagttaaaccttggtgaggcataccaagctgcaggatgtgatggagaattggaagatacacagagagaaagtcaaccgttgaccgtcattccttattggatgcttaatctcatgagccagtag

SEQ ID NO: 110568 - protein, 236 aa, Helianthus annuus
MGRGKVTLKRIENKINRQVTFSKRRSGLLKKAHEISVLCDVDVALIVFSTKGKLSEYATNASMVRILERYEQHSYTEKELNGTNNQSKGSWTLEHAKLKAKFELLQKNQRNFMGEDLDSLSIKELLNLEQQLEAALRRLRLKKNQMMLESISELQKKDKSLQYQNSLLLKKIKGKEKELAEPPLVDQQTQENMVSFQLNLGEAYQAAGCDGELEDTQRESQPLTVIPYWMLNLMSQ

SEQ ID NO: 110569 - DNA, 771 bp, Zea mays
  CDS (1)..(771)
atggggaggggacgcgtcgagctgaagcggatcgagaacaagatcaaccgccaggtcactttctccaagcgccgcaacggcctgctcaagaaggcctacgagctctccgtgctctgcgacgccgaggtcgcgctcatcatcttctccggccgcggcaagctctacgagttcggcagcgccggcgtaactaaaactttagaaaggtatcaacatttctgctacaatgctcaagattccaacaatggtgcactctctgaatctcagagctggtaccaggaaatatcaaaactgagggcaaaattcgaggccttgcagcgcactcagagacacttgcttggggaggaccttggcccactgagtactgtgaaggaattgcagcagctagagaaacagctagaatgtgctttgtcacaggcaagacagagaaagacgcaacttatgatggagcaagtggaagagcttcgccgaacggagcgtcacctgggagaaatgaacaggcaactcaaacacaagctcgaagctgaaggctgtagcaactacacaaccttgcagcatgccgcctgctggccagctcccggcggcaccatcgtggagcatgacggcgccacctatcaagtgcatccgcctgcccactcagttgctatggactgtgaacccactctgcaaatcgggtaccctcatcaccagtttccgccccctgaggcagccaataatatcccaaggagcgccgccacaggcgagaacaacttcatgctgggatgggttctttga

SEQ ID NO: 110570 - protein, 256 aa, Zea mays
MGRGRVELKRIENKINRQVTFSKRRNGLLKKAYELSVLCDAEVALIIFSGRGKLYEFGSAGVTKTLERYQHFCYNAQDSNNGALSESQSWYQEISKLRAKFEALQRTQRHLLGEDLGPLSTVKELQQLEKQLECALSQARQRKTQLMMEQVEELRRTERHLGEMNRQLKHKLEAEGCSNYTTLQHAACWPAPGGTIVEHDGATYQVHPPAHSVAMDCEPTLQIGYPHHQFPPPEAANNIPRSAATGENNFMLGWVL

SEQ ID NO: 110571 - DNA, 642 bp, Brassica napus
  CDS (1)..(642)
atggtgaggggaaaaactcagatgaagcgaatagagaatgcaacaagcagacaagtgactttctctaaacgaaggaatggtttgttgaagaaagcctttgagctctcagtgctttgtgatgctgaagtttctctgatcatcttctctcctaagggaaaactttatgaattcgccagctccaatatgcaagataccatagatcgttatctgacgcataccagggatcgaatcagcaacaaaccggtttctgaagaaaatatgcagcatttgaaacatgaagcagcaaacatgatgaagaaaattgaacaacttgaagcttccaaacgtaaactcttgggagaaggcataggatcatgctcgattgaggagctgcagcaaattgagcaacaacttgagaaaagtgtcaaatgtattcgagcaagaaagactcaagtgtttaaggaacaaattgagcagctcaagcaaaaggagaaagctctagctgcagaaaacaagaagctcgctgaaaagtggggatctcatgaaatcgaagtttggtcgaataagaaccaagaaagtggaagaggtgacgaagacagtagcccaagttctgaagtagagacacaattgttcattgggttaccttgttcttcaagaaagtga

SEQ ID NO: 110572 - protein, 213 aa, Brassica napus
MVRGKTQMKRIENATSRQVTFSKRRNGLLKKAFELSVLCDAEVSLIIFSPKGKLYEFASSNMQDTIDRYLTHTRDRISNKPVSEENMQHLKHEAANMMKKIEQLEASKRKLLGEGIGSCSIEELQQIEQQLEKSVKCIRARKTQVFKEQIEQLKQKEKALAAENKKLAEKWGSHEIEVWSNKNQESGRGDEDSSPSSEVETQLFIGLPCSSRK

SEQ ID NO: 110573 - DNA, 693 bp, Brassica napus; identical to SEQ ID NO: 109617
  CDS (1)..(693)

SEQ ID NO: 110574 - protein, 230 aa, Brassica napus; identical to SEQ ID NO: 109618

SEQ ID NO: 110575 - DNA, 735 bp, Brassica napus; identical to SEQ ID NO: 109621
  CDS (1)..(735)

SEQ ID NO: 110576 - protein, 244 aa, Brassica napus; identical to SEQ ID NO: 109622

SEQ ID NO: 110577 - DNA, 642 bp, Brassica napus; identical to SEQ ID NO: 109623
  CDS (1)..(642)

SEQ ID NO: 110578 - protein, 213 aa, Brassica napus; identical to SEQ ID NO: 109624

SEQ ID NO: 110579 - DNA, 750 bp, Brassica napus; identical to SEQ ID NO: 109625
  CDS (1)..(750)

SEQ ID NO: 110580 - protein, 249 aa, Brassica napus; identical to SEQ ID NO: 109626

SEQ ID NO: 110581 - DNA, 759 bp, Brassica napus; identical to SEQ ID NO: 109627
  CDS (1)..(759)

SEQ ID NO: 110582 - protein, 252 aa, Brassica napus; identical to SEQ ID NO: 109628

SEQ ID NO: 110583 - DNA, 642 bp, Brassica napus; identical to SEQ ID NO: 109631
  CDS (1)..(642)

SEQ ID NO: 110584 - protein, 213 aa, Brassica napus; identical to SEQ ID NO: 109632

SEQ ID NO: 110585 - DNA, 666 bp, Brassica napus; identical to SEQ ID NO: 109633
  CDS (1)..(666)

SEQ ID NO: 110586 - protein, 221 aa, Brassica napus; identical to SEQ ID NO: 109634

SEQ ID NO: 110587 - DNA, 735 bp, Brassica napus; identical to SEQ ID NO: 109635
  CDS (1)..(735)

SEQ ID NO: 110588 - protein, 244 aa, Brassica napus; identical to SEQ ID NO: 109636

SEQ ID NO: 110589 - DNA, 861 bp, Zea mays; identical to SEQ ID NO: 109639
  CDS (1)..(861)

SEQ ID NO: 110590 - protein, 286 aa, Zea mays; identical to SEQ ID NO: 109640

SEQ ID NO: 110591 - DNA, 732 bp, Glycine max; identical to SEQ ID NO: 102935
  CDS (1)..(732)

SEQ ID NO: 110592 - protein, 243 aa, Glycine max; identical to SEQ ID NO: 102936

SEQ ID NO: 110593 - DNA, 729 bp, Glycine max
  CDS (1)..(729)
atggaggatccaaatcaagctcaagaagggtcttctcagaagaaaatgggaagagggaagattgaaatcaaacggatcgagaacaccaccaataggcaagtcaccttctgcaagcgccgcaacggtttgctgaagaaagcttatgaattatcagttctgtgtgatgcggaagttgcccttgttgtcttctcaacccgtggccgtttgtatgagtatgccaacaacagtgttagggccaccattgaaaggtacaagaaggcaaatgctgctgcttcaaacgcagaatccgtatctgaagctaacacacagttttaccagcaagagtcatccaaattgagaagacaaattcgagatattcagaatctaaacaggcacatccttggtgaagcacttggttctctgagtctcaaggaactaaagaacctcgagggtagattggagaaaggattaagcagagttagatctagaaagcatgaaacattgtttgctgatgtcgagttcatgcaaaagcgggaaattgagctgcaaaaccacaataattatctgcgagctaagatagctgaacatgagagagctcaacaacagcaatcaaatatgatgtcaggaacactgtgcgagtcccttccttcacaatcatacgacaggaattttttccctgtaaatctcatagcttctgatgatcaacaacaatattctagtcaagaccacactgctctccaacttgtctga

SEQ ID NO: 110594 - protein, 242 aa, Glycine max
MEDPNQAQEGSSQKKMGRGKIEIKRIENTTNRQVTFCKRRNGLLKKAYELSVLCDAEVALVVFSTRGRLYEYANNSVRATIERYKKANAAASNAESVSEANTQFYQQESSKLRRQIRDIQNLNRHILGEALGSLSLKELKNLEGRLEKGLSRVRSRKHETLFADVEFMQKREIELQNHNNYLRAKIAEHERAQQQQSNMMSGTLCESLPSQSYDRNFFPVNLIASDDQQQYSSQDHTALQLV

SEQ ID NO: 110595 - DNA, 756 bp, Glycine max; identical to SEQ ID NO: 109651
  CDS (1)..(756)

SEQ ID NO: 110596 - protein, 251 aa, Glycine max; identical to SEQ ID NO: 109652

SEQ ID NO: 110597 - DNA, 735 bp, Glycine max; identical to SEQ ID NO: 109653
  CDS (1)..(735)

SEQ ID NO: 110598 - protein, 244 aa, Glycine max; identical to SEQ ID NO: 109654

SEQ ID NO: 110599 - DNA, 735 bp, Glycine max; identical to SEQ ID NO: 109655
  CDS (1)..(735)

SEQ ID NO: 110600 - protein, 244 aa, Glycine max; identical to SEQ ID NO: 109656

SEQ ID NO: 110601 - DNA, 741 bp, Glycine max
  CDS (1)..(741)
atgggtaggggaaaggtggagctgaagaggattgagaacaagataaaccgtcaagtgacatttgcaaagaggaggaatggtttgctcaagaaggcttatgaactctctgtcctctgtgatgctgaggttgccctcattatcttctccaaccgtggcaagctctatgagttctgcagtggccatagcacggccaagacacttgaacggtatcacagatgcagttatggagccttggaagtccagcaccaacctgaaatagagacacagaggcgctaccaagagtacctaaagctaaaatccagagttgaggcactacagcaaacacaaagaaacctccttggggaagaattggagcacttagacgttaacgaccttgagcagcttgaacgtcagctggactcttccttgaagcaaatcaggtctaacaagacacagcagatgcttgatcaactctctgatttgcatagaaaggaagagatgctactggaaactaacaatatcctgagaaacaagttggaggaaatcaatgtagccctacaaccaacatgggaagctagggagcaaaatgctccctacaattgccaccctccccaaacagagggatattatgagacagcaacagcacattgcagcagtacattgagaattggctatgattcttcaggattaaatgaagcaggaggagctgcaggagcctcagcccaaaatgctagtgaattcatgcatggatggatgaactaa

SEQ ID NO: 110602 - protein, 246 aa, Glycine max
MGRGKVELKRIENKINRQVTFAKRRNGLLKKAYELSVLCDAEVALIIFSNRGKLYEFCSGHSTAKTLERYHRCSYGALEVQHQPEIETQRRYQEYLKLKSRVEALQQTQRNLLGEELEHLDVNDLEQLERQLDSSLKQIRSNKTQQMLDQLSDLHRKEEMLLETNNILRNKLEEINVALQPTWEAREQNAPYNCHPPQTEGYYETATAHCSSTLRIGYDSSGLNEAGGAAGASAQNASEFMHGWMN

SEQ ID NO: 110603 - DNA, 735 bp, Glycine max
  CDS (1)..(735)
atgggtaggggaaaggtggagctgaagaggattgagaacaagataaaccgtcaagtgacatttgcaaagaggaggaatggtttgctcaaaaaggcttatgaactctctgtcctctgtgatgctgaggttgcccttattatcttctccaaccgtggcaagctgtatgagttctgcagcggccatagcatggccaagacacttgaacggtatcacagatgcagttatggagccttggaagtccagcaccaacctgaaatagagacacagaggcgctaccaagagtacctgaagctaaaatccagagttgaggcactacagcaaacacaaagaaacctccttggggaagaattggagcacttagacgttaaggaccttgagcagcttgaacgtcagctggactcttccctgaagcaaatcaggtcaaacaagacacaacaaatgctcgatcaactcgctgatttgcatagaaaggaagagatgctactggagactaacaatatcctgaggaacaagttggaggaaatcaatgtagcccttcaaccaacatgggaaactagggagcaaaatgctccatacaattaccacccttcccaatcagagggatattatgagacagcacattgcaacagtacattgcgaattggctatgattcttcagggttaaatgaagcaggaggagctgcaggaacctcagcccaaaatgctagtgaattcatgaatggatggatgaactaa

SEQ ID NO: 110604 - protein, 244 aa, Glycine max
MGRGKVELKRIENKINRQVTFAKRRNGLLKKAYELSVLCDAEVALIIFSNRGKLYEFCSGHSMAKTLERYHRCSYGALEVQHQPEIETQRRYQEYLKLKSRVEALQQTQRNLLGEELEHLDVKDLEQLERQLDSSLKQIRSNKTQQMLDQLADLHRKEEMLLETNNILRNKLEEINVALQPTWETREQNAPYNYHPSQSEGYYETAHCNSTLRIGYDSSGLNEAGGAAGTSAQNASEFMNGWMN

SEQ ID NO: 110605 - DNA, 735 bp, Glycine max; identical to SEQ ID NO: 109659
  CDS (1)..(735)

SEQ ID NO: 110606 - protein, 244 aa, Glycine max; identical to SEQ ID NO: 109660

SEQ ID NO: 110607 - DNA, 729 bp, Glycine max; identical to SEQ ID NO: 109663
  CDS (1)..(729)

SEQ ID NO: 110608 - protein, 242 aa, Glycine max; identical to SEQ ID NO: 109664

SEQ ID NO: 110609 - DNA, 729 bp, Glycine max
  CDS (1)..(729)
atgggaaggggaagagtggagttgaagagaattgagaacaagatcaacaggcaagtgacctttgcaaaacgaaggaacgggcttttgaagaaagcttacgagctttccgttctttgtgatgccgaggttgctctcatcatcttctccaatagaggaaaactgtacgagttctgcagcagttcaagcatgctcaaaacgctagagaggtaccagaaatgtaactatggtgcgcctgaggctaatgtgtctacacgggaagccttggagttaagcagtcaacaggagtacttgaagctgaaggcacgttatgaggccctacaacggtcccagaggaaccttatgggagaagatcttggtcctttaagcagcaaagagctcgagtctcttgaaaggcagctagattcgtccttgaagcaaataagatcaaccaggacccagttcatgttggatcagctctctgatcttcaacgtaaggaacacttgctaagtgaggctaacaggtctctcagacaaaggcagttggaagggtatcaaataaatccactccaactgaatcccggagttgaagagatgggatatggcaggcatccagctcaaactcatggtgaagccctctttcaacaaatggagtgtgagccaacgttacaaattgggtatcagcctgatccagtatcagtggtgacagcaggcccaagcatgagcaattacatggcaggatggttaccatag

SEQ ID NO: 110610 - protein, 242 aa, Glycine max
MGRGRVELKRIENKINRQVTFAKRRNGLLKKAYELSVLCDAEVALIIFSNRGKLYEFCSSSSMLKTLERYQKCNYGAPEANVSTREALELSSQQEYLKLKARYEALQRSQRNLMGEDLGPLSSKELESLERQLDSSLKQIRSTRTQFMLDQLSDLQRKEHLLSEANRSLRQRQLEGYQINPLQLNPGVEEMGYGRHPAQTHGEALFQQMECEPTLQIGYQPDPVSVVTAGPSMSNYMAGWLP

SEQ ID NO: 110611 - DNA, 732 bp, Glycine max; identical to SEQ ID NO: 109669
  CDS (1)..(732)

SEQ ID NO: 110612 - protein, 243 aa, Glycine max; identical to SEQ ID NO: 109670

SEQ ID NO: 110613 - DNA, 726 bp, Glycine max; identical to SEQ ID NO: 109671
  CDS (1)..(726)

SEQ ID NO: 110614 - protein, 241 aa, Glycine max; identical to SEQ ID NO: 109672

SEQ ID NO: 110615 - DNA, 729 bp, Glycine max; identical to SEQ ID NO: 109681
  CDS (1)..(729)

SEQ ID NO: 110616 - protein, 242 aa, Glycine max; identical to SEQ ID NO: 109682

SEQ ID NO: 110617 - DNA, 663 bp, Glycine max
  CDS (1)..(663)
atggtgggggggaaaactcatatgaagcgcatcgaaaatgagacgagtaggcagggagcgttctccaagagaaggaacgggttgctcaagaaggcctttgagctttcggtgctgtgtgaggctgaagtcgcactcatcatcttctctaccagagggaggctttatgagttctccagttcaagtgtaaataaaacagttgaacggtatcaaaggaagatcaaggacctgggtgtcagcaacaaaggaatccatgaaaatacacagcatctgaaggaaggtgatatgagcatggcaaagaagatcgagcatcttgaagattcaagaagaaagcttttgggagatgaattggataaatgcagtattgacgagttacaacagctagagaaccagctcgaacgcagcctggacaaaattagggcaacaaagaatcaattgttcagggagcgaatcgagaacctaaaacaagaggaaaagtgcttactcgaagtaaataaacgcttacgagagcagtatcggattgaccgacaacgttgtttgaccgacaacgttacagaaaaagaggcagaagaggtggagacggagttattcataggaagacctgagagaagaatgccgttgaagttgaaatctgcaacacatagtgctcataaatacatagcgtaa

SEQ ID NO: 110618 - protein, 220 aa, Glycine max
MVGGKTHMKRIENETSRQGAFSKRRNGLLKKAFELSVLCEAEVALIIFSTRGRLYEFSSSSVNKTVERYQRKIKDLGVSNKGIHENTQHLKEGDMSMAKKIEHLEDSRRKLLGDELDKCSIDELQQLENQLERSLDKIRATKNQLFRERIENLKQEEKCLLEVNKRLREQYRIDRQRCLTDNVTEKEAEEVETELFIGRPERRMPLKLKSATHSAHKYIA

SEQ ID NO: 110619 - DNA, 747 bp, Glycine max; identical to SEQ ID NO: 109683
  CDS (1)..(747)

SEQ ID NO: 110620 - protein, 248 aa, Glycine max; identical to SEQ ID NO: 109684

SEQ ID NO: 110621 - DNA, 780 bp, Zea mays; identical to SEQ ID NO: 109687
  CDS (1)..(780)

SEQ ID NO: 110622 - protein, 259 aa, Zea mays; identical to SEQ ID NO: 109688

SEQ ID NO: 110623 - DNA, 747 bp, Glycine max; identical to SEQ ID NO: 109689
  CDS (1)..(747)

SEQ ID NO: 110624 - protein, 248 aa, Glycine max; identical to SEQ ID NO: 109690

SEQ ID NO: 110625 - DNA, 741 bp, Glycine max
  CDS (1)..(741)
atgggtaggggaaaggtggagctgaagaggattgagaacaagataaaccgtcaagtgacatttgcaaagaggaggaatggtttgctcaaaaaggcttatgaactctctgtcctctgtgatgctgaggttgccctcattatcttctccaaccgtggcaagctgtatgagttctgcagtggccatagcatggccaagacacttgaacggtatcacagatgcagttatggagccttggaagtccagcaccaacctgaaatagagacacagaggcgctaccaagagtacctgaagctaaaatccagagttgaggcactacagcaaacacaaagaaacctccttggggaagaattggagcacttagacgttaacgaccttgagcagcttgaacgtcagctggactcttccttgaagcaaatcaggtctaacaagacacagcagatgcttgatcaactctctgatttgcatagaaaggaagagatgctactggaaactaacaatatcctgagaaacaagttggaggaaatcaatgtagccctacaaccaacatgggaagctagggagcaaaatgctccctacaattgccaccctccccaaacagagggatattatgagacagcaacagcacattgcagcagtacattgagaattggctatgattcttcaggattaaatgaagcaggaggagctgcaggagcctcagcccaaaatgctagtgaattcatgcatggatggatgaactaa

SEQ ID NO: 110626 - protein, 246 aa, Glycine max
MGRGKVELKRIENKINRQVTFAKRRNGLLKKAYELSVLCDAEVALIIFSNRGKLYEFCSGHSMAKTLERYHRCSYGALEVQHQPEIETQRRYQEYLKLKSRVEALQQTQRNLLGEELEHLDVNDLEQLERQLDSSLKQIRSNKTQQMLDQLSDLHRKEEMLLETNNILRNKLEEINVALQPTWEAREQNAPYNCHPPQTEGYYETATAHCSSTLRIGYDSSGLNEAGGAAGASAQNASEFMHGWMN

SEQ ID NO: 110627 - DNA, 732 bp, Glycine max
  CDS (1)..(732)
atggaggatccaaatcaagctccagaagggtcttctcagaagaaaatgggaagagggaagattgaaatcaaacggatcgagaacaccaccaataggcaagtcaccttctgcaagcgccgcaacggtttgctgaaaaaagcttatgaattatcagttctgtgtgatgctgaagttgcccttgttgtcttctcaacccgtggccgtttgtatgagtatgccaacaacagtgttagggccactattgagaggtacaagaaggcaaatgctgctgcttcaaacgcagaatccgtatctgaagctaacacacagttttaccagcaagagtcatccaaattgagaagacaaattcgagatattcagaatctaaacaggcacatccttggtgaagcacttggttctctgagtctcaaggaactaaagaacctcgagggtagattggagaaaggattaagcagagttagatctagaaagcatgaaacattgtttgctgatgtggagttcatgcaaaagcgggaaattgagctgcaaaaccacaacaattatctgcgagctaagatagctgaacatgagagagctcaacaacagcaatcaaatatgaatatgtcaggaacactgtgcgagtcccttccttcacaatcatacgacaggaattttttccctgtaaatctcatagcttctgatgatcaacaacaatactctcgtcaagaccacactgctctccaacttgtctga

SEQ ID NO: 110628 - protein, 243 aa, Glycine max
MEDPNQAPEGSSQKKMGRGKIEIKRIENTTNRQVTFCKRRNGLLKKAYELSVLCDAEVALVVFSTRGRLYEYANNSVRATIERYKKANAAASNAESVSEANTQFYQQESSKLRRQIRDIQNLNRHILGEALGSLSLKELKNLEGRLEKGLSRVRSRKHETLFADVEFMQKREIELQNHNNYLRAKIAEHERAQQQQSNMNMSGTLCESLPSQSYDRNFFPVNLIASDDQQQYSRQDHTALQLV

SEQ ID NO: 110629 - DNA, 735 bp, Zea mays; identical to SEQ ID NO: 109691
  CDS (1)..(735)

SEQ ID NO: 110630 - protein, 244 aa, Zea mays; identical to SEQ ID NO: 109692

SEQ ID NO: 110631 - DNA, 846 bp, Zea mays; identical to SEQ ID NO: 109693
  CDS (1)..(846)

SEQ ID NO: 110632 - protein, 281 aa, Zea mays; identical to SEQ ID NO: 109694

SEQ ID NO: 110633 - DNA, 807 bp, Zea mays; identical to SEQ ID NO: 109695
  CDS (1)..(807)

SEQ ID NO: 110634 - protein, 268 aa, Zea mays; identical to SEQ ID NO: 109696

SEQ ID NO: 110635 - DNA, 780 bp, Zea mays; identical to SEQ ID NO: 109697
  CDS (1)..(780)

SEQ ID NO: 110636 - protein, 259 aa, Zea mays; identical to SEQ ID NO: 109698

SEQ ID NO: 110637 - DNA, 738 bp, Zea mays; identical to SEQ ID NO: 109699
  CDS (1)..(738)

SEQ ID NO: 110638 - protein, 245 aa, Zea mays; identical to SEQ ID NO: 109700

SEQ ID NO: 110639 - DNA, 798 bp, Zea mays; identical to SEQ ID NO: 109701
  CDS (1)..(798)

SEQ ID NO: 110640 - protein, 265 aa, Zea mays; identical to SEQ ID NO: 109702

SEQ ID NO: 110641 - DNA, 807 bp, Zea mays; identical to SEQ ID NO: 109705
  CDS (1)..(807)

SEQ ID NO: 110642 - protein, 268 aa, Zea mays; identical to SEQ ID NO: 109706

SEQ ID NO: 110643 - DNA, 810 bp, Zea mays; identical to SEQ ID NO: 109707
  CDS (1)..(810)

SEQ ID NO: 110644 - protein, 269 aa, Zea mays; identical to SEQ ID NO: 109708

SEQ ID NO: 110645 - DNA, 840 bp, Zea mays; identical to SEQ ID NO: 109711
  CDS (1)..(840)

SEQ ID NO: 110646 - protein, 279 aa, Zea mays; identical to SEQ ID NO: 109712

SEQ ID NO: 110647 - DNA, 27 bp, Artificial sequence
  primer
atgggaagaggaaagatagaaataaag

SEQ ID NO: 110648 - DNA, 22 bp, Artificial sequence
  primer
ttatccgagatgaagaattttc

SEQ ID NO: 110649 - protein, 181 aa, Artificial sequence
  consensus sequence
  Variant (5)..(5): Xaa in position 5 is any amino acid
  Variant (6)..(8): Xaa in position 6 to 8 is any or no amino acid
  Variant (14)..(16): Xaa in position 14 to 16 is any amino acid
  Variant (22)..(22): Xaa in position 22 is any amino acid
  Variant (33)..(33): Xaa in position 33 is any amino acid
  Variant (47)..(47): Xaa in position 47 is any amino acid
  Variant (50)..(51): Xaa in position 50 to 51 is any amino acid
  Variant (53)..(53): Xaa in position 53 is any amino acid
  Variant (57)..(60): Xaa in position 57 to 60 is any amino acid
  Variant (61)..(70): Xaa in position 61 to 70 is any or no amino acid
  Variant (73)..(91): Xaa in position 73 to 91 is any amino acid
  Variant (92)..(98): Xaa in position 92 to 98 is any or no amino acid
  Variant (100)..(102): Xaa in position 100 to 102 is any amino acid
  Variant (104)..(109): Xaa in position 104 to 109 is any amino acid
  Variant (112)..(118): Xaa in position 112 to 118 is any amino acid
  Variant (119)..(122): Xaa in position 119 to 122 is any or no amino acid
  Variant (125)..(125): Xaa in position 125 is any amino acid
  Variant (127)..(133): Xaa in position 127 to 133 is any amino acid
  Variant (134)..(134): Xaa in position 134 is any or no amino acid
  Variant (136)..(137): Xaa in position 136 to 137 is any amino acid
  Variant (140)..(141): Xaa in position 140 to 141 is any amino acid
  Variant (143)..(153): Xaa in position 143 to 153 is any amino acid
  Variant (154)..(170): Xaa in position 154 to 170 is any or no amino acid
  Variant (172)..(173): Xaa in position 172 to 173 is any amino acid
  Variant (175)..(175): Xaa in position 175 is any amino acid
  Variant (176)..(177): Xaa in position 176 to 177 is any or no amino acid
  Variant (179)..(180): Xaa in position 179 to 180 is any amino acid
MGRGXXXXKRIENXXXRQVTFXKRRNGLLKKAXELSVLCDAEVALIXFSXXGXLYEXXXXXXXXXXXXXXRYXXXXXXXXXXXXXXXXXXXXXXXXXXEXXXLXXXXXXLQXXXXXXXXXXXGEXLXXXXXXXXLXXLEXXLXXXXXXXXXXXXXXXXXXXXXXXXXXXXEXXLXXXNXXL

SEQ ID NO: 110650 - protein, 41 aa, Artificial sequence
  protein pattern
  Variant (2)..(2): Xaa in position 2 is any or no amino acid
  Variant (6)..(7): Xaa in position 6 to 7 is any amino acid
  Variant (8)..(8): Xaa in position 8 is Asn or Ser
  Variant (14)..(14): Xaa in position 14 is Ala, Cys or Ser
  Variant (18)..(18): Xaa in position 18 is Cys, Gly, Asn, Ser or Thr
  Variant (25)..(25): Xaa in position 25 is any amino acid
  Variant (27)..(27): Xaa in position 27 is Ile or Leu
  Variant (32)..(32): Xaa in position 32 is Asp or Glu
  Variant (34)..(34): Xaa in position 34 is Asp, Glu or Gln
  Variant (35)..(35): Xaa in position 35 is Ile, Leu or Val
  Variant (36)..(36): Xaa in position 36 is Ala, Gly, Ser, Thr or Val
  Variant (37)..(37): Xaa in position 37 is Ala, Ile, Leu or Val
  Variant (38)..(38): Xaa in position 38 is Ile or Val
  Variant (39)..(39): Xaa in position 39 is Ala, Ile, Leu or Val
RXIENXXXRQVTFXKRRXGLLKKAXEXSVLCXAXXXXXXFS

SEQ ID NO: 110651 - DNA, 1104 bp, Azotobacter vinelandii
  CDS (1)..(1104): transl_table=11
atgacacgctaccaacgcctgctccacgacctgccgcaaacgcccgccacctggctgatcaccggggtggccgggttcatcggctcaaacctgctggaaaccctgctcggactcgaccagtgggtggtgggcctggacaacttctccactggccacccgcacaatctggaagaggtccgccaaaggacttccgcgccgcgctgggccaggttccagctcatccgcggcgatatccgcgagttgcacgactgccgccaggcgatgaccttcgcggcggtcgtgccgggctgccggccccggccggtcgagcacgtcctccaccaggcggccctcggctcggtgccgcgctcgctggaagaccccatcgccaccaacgccagcaatgtcgacggcttcctcaacatcctggtggccgcccgcgatgccggggtcaagagcttcacctacgccgccagcagcgccgcctacggcgaccaccccggtctgccgaagatcgaggacatcgtcggtcggccgctctccccctatgcggtgagcaagtacgtcaacgaactgtacgccgacgctttcgcccgcaactacgggctgcacagcatcggtctgcgttacttcaacgtcttcggcaagcaccaggacccggagggcgcctatgccgcggtgatcccgaaatggatcgcggcaatgctgcgcgacgaggaggtgttcatcgacggcgatggcagcaccagccgcgacttctgccacgtcgacaacgccgtgcaggccaacctgctcgccgcctgcgccgaagcccgcgcgcgcaatcaggtctacaacatcgccgtcggcgaacgcagcacgctccagcagttgttccaggcgttgcgccagagcctggcgaaaaacggcgtgcgctacggccgggcgccgctccatcgagatttccgtccgggagacgtacgccattccctggcggacatcggcaaggcgcggcgcctgctgggctacctcccgcaatacgacctgcggaccggcatcgcccaggcgatgccctggtacatcgcccggaacccgacgtcggtgtcttcgtcgtccgcgccggcgcaattcgctgcgcaacggtga

SEQ ID NO: 110652 - protein, 367 aa, Azotobacter vinelandii
MTRYQRLLHDLPQTPATWLITGVAGFIGSNLLETLLGLDQWVVGLDNFSTGHPHNLEEVRQRTSAPRWARFQLIRGDIRELHDCRQAMTFAAVVPGCRPRPVEHVLHQAALGSVPRSLEDPIATNASNVDGFLNILVAARDAGVKSFTYAASSAAYGDHPGLPKIEDIVGRPLSPYAVSKYVNELYADAFARNYGLHSIGLRYFNVFGKHQDPEGAYAAVIPKWIAAMLRDEEVFIDGDGSTSRDFCHVDNAVQANLLAACAEARARNQVYNIAVGERSTLQQLFQALRQSLAKNGVRYGRAPLHRDFRPGDVRHSLADIGKARRLLGYLPQYDLRTGIAQAMPWYIARNPTSVSSSSAPAQFAAQR

SEQ ID NO: 110653 - DNA, 1089 bp, Ralstonia eutropha JMP134
  CDS (1)..(1089): transl_table=11
atggaatccatcacctacgcgaatctgaggaccagtctggttgccaatccgtgcacgtggctggtcacaggagtggccggattcatcggcagcaatttgctggaggccttgctgcgcctgaaccagcgcgtggtcggcctggacaacttcttgaccggccaccgccgcaacctgcatgaagtgcaggcgctggtatctcccgcgcagtgggagaactttcaattcatcgaaggcgacatccgggaccttgaacagtgccggagcgccatgcgcttttgctccggggagcgcgaaggaacgcacggcgcgagcagccatccggtcgatttcgtgctgcaccaggccgcgctgggctccgtgccacgcagcctggaggaccccatcgcgacccacagcgtcaacatcagtggcttcctgaatatgctggtcgctgcgcgcgacgccgaggtacgcgctttcgtttacgcggcgagcagcagcacctacggcgatcaccccggcctgcccaagaccgaagacaggatcggcaagccattgagcccctacgcggtcacgaaatacgcgaacgagttgtatgccgacgtcttcaggcgctgctacagtttgcgtgccatcggactacgctacttcaatgtattcggtccacgccaggatccgaacggggcatacgcagccgtgattccgcggtggatttccgcgttgctgcggcgcgagaccgtctacatcaatggcgacggcgaaacgagccgcgacttctgttacgtggcgaatgctgtgcaggccaacctgcttgccgctctcagctgcagcggagacgcggaaagccagatctacaacgtcgccgtcggtgaccgcaccacgctgagtaccctgttccagcttctgcgcgacgggcttcgtccttatggcatccccgcggacacgcagccgacctatcgggccttccgtgcgggcgacgtgcgccacagccaggctgatatcggcaaggcacaacggttgctcggatatcagcccacccaccgcatcggtgacgggctggccgaggcaatgcactggtatgtgcagttgcaccggacgcaggacgcctga

SEQ ID NO: 110654 - protein, 362 aa, Ralstonia eutropha JMP134
MESITYANLRTSLVANPCTWLVTGVAGFIGSNLLEALLRLNQRVVGLDNFLTGHRRNLHEVQALVSPAQWENFQFIEGDIRDLEQCRSAMRFCSGEREGTHGASSHPVDFVLHQAALGSVPRSLEDPIATHSVNISGFLNMLVAARDAEVRAFVYAASSSTYGDHPGLPKTEDRIGKPLSPYAVTKYANELYADVFRRCYSLRAIGLRYFNVFGPRQDPNGAYAAVIPRWISALLRRETVYINGDGETSRDFCYVANAVQANLLAALSCSGDAESQIYNVAVGDRTTLSTLFQLLRDGLRPYGIPADTQPTYRAFRAGDVRHSQADIGKAQRLLGYQPTHRIGDGLAEAMHWYVQLHRTQDA

SEQ ID NO: 110655 - DNA, 1110 bp, Polaromonas sp. JS666
  CDS (1)..(1110): transl_table=11
atgaccgcatacgaacaactccagattcgcctgaagagcgagccccgtgcctggctcgtcactggggttgccggctttattggcagcaatctgctggaagctctgctcaagctgggccagcgcgtggtcggactggacaactttgccaccggctaccagcgcaacctggacgaagtgcaaacgctggtctctcctgagcagtgggccaatttccacttcattgagggcgacatccgtaacctgcccgattgccagcgtgccatgtcttggccccctctccccacggaagacggtaggggtgagggctctcccgtcgactacgtccttcaccaggcagccctgggcagcgtgccccggtcactggccgatcccatcaccaccaacgccgccaacatcacgggtttcctgaacatgctggtggccgcacgcgacgccggggtcaaaagctttacctacgccgccagcagcagcacctacggggatcacccggctctgcccaaggtagagcacaccatcggcaaaccgctcagcccctatgcggtgaccaaatatgtgaacgagctgtatgccgaggtatttgcccgctgctacggctttaacaccataggtttgcgctacttcaatgtgtttggtgcacggcaaaatcccagtggggcctatgccgctgtgatcccgaaatggaccgcagcgatgatgaaaggggaagacgtgttcatcaacggcgatggtgaaaccagccgggacttctgctacgtggccaacgcggtgcaagccaacctgttggcggcgaccgtgagtgatctccctctccccctggaagagggcgggggtgagggctctcctaccaaccaggtgtacaacgtggccgtgggtgatcgcactacgctgaacaccctgtttggcctgatacgtgacaacttgattgcacgtggcgtgcctgtcagtaccgagcccaagtatcgggatttccgtgcgggcgacgtgcgtaacagcctggccgacatcggcaaggcccatcggatgctgggttacgcccctacccatcgcatagaccagggattgcagttggcgattccttggtatgtccagaactgcaaggtttcatcatga

SEQ ID NO: 110656 - protein, 369 aa, Polaromonas sp. JS666
MTAYEQLQIRLKSEPRAWLVTGVAGFIGSNLLEALLKLGQRVVGLDNFATGYQRNLDEVQTLVSPEQWANFHFIEGDIRNLPDCQRAMSWPPLPTEDGRGEGSPVDYVLHQAALGSVPRSLADPITTNAANITGFLNMLVAARDAGVKSFTYAASSSTYGDHPALPKVEHTIGKPLSPYAVTKYVNELYAEVFARCYGFNTIGLRYFNVFGARQNPSGAYAAVIPKWTAAMMKGEDVFINGDGETSRDFCYVANAVQANLLAATVSDLPLPLEEGGGEGSPTNQVYNVAVGDRTTLNTLFGLIRDNLIARGVPVSTEPKYRDFRAGDVRNSLADIGKAHRMLGYAPTHRIDQGLQLAIPWYVQNCKVSS

SEQ ID NO: 110657 - DNA, 1056 bp, Aedes aegypti
  CDS (1)..(1056)
atgtctttgagcatcctagtaaccggcggggctggattcgttggctcgcatactgttctggagctgttgaatgctggacatcaggtcatctgcgtggacaatttgtgcaatgcctttggcgcggcggactccaagctgccggaatcactgaaacgggtacaggaactgacggggaagaacgtaacgttctatgatgtggacattcgtgacaagaacgggttgagggaggttttcaaaaagcacaaaatcgactgtgtggcacattttgccgcgctgaaagctgttggtgaatcatgtcggataccgttgcaatactaccagaacaacataaccggcaccagtgtgctgctcgaagtaatggctgggagcaacgtattaaaatttgtttatagttcgagtgccactgtatatggcgaaccgcagaagcttccactggacgagaaacatccgacgggcaattgcaccaacccttacggcaaaagcaaatatttcaccgaggaaatactgaaggatctctgtgagtcggatcccagatggtcggtgatatcgttgcgttacttcaatccggtcggggcacataagtccggccgaatcggcgaggatcccaacggggaacccaacaacctgatgccatacatttcgcaagtggccgttggacgaaggccttgtctgaaggttttcgggaataactacgatactccggatgggaccggagtacgtgactacatccacatagtggatctggctgagggacatgtctgtgccctcgataagctagcacgtggtgatctgaatgggttcgtggtgtataacctaggaacaggatgcgggtactcggtgctggacgttgtggaggcgttctccaaagcgtcgggtaaggaagtgaaatacgaaatcgtggacagacgacctggcgacgtagctacaagctacgcggatgttactctagcagctaaagaactgggttggaaggccaagcgtggtctgaaggaaatgtgtgaggatacctggaattggcagaggctcaatccgaatggattttccggggcaaattag

SEQ ID NO: 110658 - protein, 351 aa, Aedes aegypti
MSLSILVTGGAGFVGSHTVLELLNAGHQVICVDNLCNAFGAADSKLPESLKRVQELTGKNVTFYDVDIRDKNGLREVFKKHKIDCVAHFAALKAVGESCRIPLQYYQNNITGTSVLLEVMAGSNVLKFVYSSSATVYGEPQKLPLDEKHPTGNCTNPYGKSKYFTEEILKDLCESDPRWSVISLRYFNPVGAHKSGRIGEDPNGEPNNLMPYISQVAVGRRPCLKVFGNNYDTPDGTGVRDYIHIVDLAEGHVCALDKLARGDLNGFVVYNLGTGCGYSVLDVVEAFSKASGKEVKYEIVDRRPGDVATSYADVTLAAKELGWKAKRGLKEMCEDTWNWQRLNPNGFSGAN

SEQ ID NO: 110659 - DNA, 1257 bp, Arabidopsis thaliana
  CDS (1)..(1257)
atgtttagttttggccgagcaagaagccaagggaggcaaaacagatctatgtctcttggaggactggattatgcagaccccaagaagaaaaacaattacttgggaaagattcttttgacagcttctcttacagccttgtgcattttcatgctcaagcaatctccaacattcaatactcctagcttttctcgacatgagccaggggttacacatgttttggtcactggtggtgctgggtatattggttcacatgcagctctaaggcttctaaaggaatcatatcgagtaaccattgtggacaatctatcacggggcaatctcgctgcagtcaggattttgcaagaactatttccggaacctggaaggcttcaatttatttatgctgatcttggagatgccaaagctgtcaacaagatattcacagagaatgcctttgacgctgtgatgcatttcgctgctgttgcatatgttggggaaagcacacaattccctcttaagtattatcacaatattacatcgaacactttggtagtattagagacaatggctgctcatggagtaaagactttgatatattcaagcacttgtgcaacgtatggggagcctgatattatgccaattacagaggaaactcctcaggtgccaatcaacccatatggtaaggccaagaagatggcagaagatatcattttggatttctcgaaaaactcagatatggcagttatgatcctaagatatttcaatgtgattgggtccgatccagagggcagattgggtgaagccccaagacctgagctgcgagagcatggacgcatctccggtgcttgttttgatgcagcacgtggcatcatgcctggcctacagatcaaaggaacagactacaaaaccgctgatggaacttgcgtacgggattacattgatgtcactgatttggttgatgctcatgttaaagctcttcaaaaggcaaaaccacgcaaagttggaatctacaatgttggcaccgggaaaggtagctcggtgaaagagtttgttgaggcgtgcaagaaagcaactggtgttgagatcaagatcgactatttgcctagacgtgcaggtgattacgctgaggtttacagtgatccaagcaagattaggaaggaacttaactggacagctaagcacactaatctcaaagagagtcttgagactgcatggagatggcagaagctgcaccgtaatggctatggcttaacaacctcatcggtctcggtttactga

SEQ ID NO: 110660 - protein, 418 aa, Arabidopsis thaliana
MFSFGRARSQGRQNRSMSLGGLDYADPKKKNNYLGKILLTASLTALCIFMLKQSPTFNTPSFSRHEPGVTHVLVTGGAGYIGSHAALRLLKESYRVTIVDNLSRGNLAAVRILQELFPEPGRLQFIYADLGDAKAVNKIFTENAFDAVMHFAAVAYVGESTQFPLKYYHNITSNTLVVLETMAAHGVKTLIYSSTCATYGEPDIMPITEETPQVPINPYGKAKKMAEDIILDFSKNSDMAVMILRYFNVIGSDPEGRLGEAPRPELREHGRISGACFDAARGIMPGLQIKGTDYKTADGTCVRDYIDVTDLVDAHVKALQKAKPRKVGIYNVGTGKGSSVKEFVEACKKATGVEIKIDYLPRRAGDYAEVYSDPSKIRKELNWTAKHTNLKESLETAWRWQKLHRNGYGLTTSSVSVY

SEQ ID NO: 110661 - DNA, 1140 bp, Arabidopsis thaliana
  CDS (1)..(1140)
atgggcaagattatcttggttgtttctcttactgctttatgcatttttatgctcaagcacgcaccgagtttcacatcaccaaccgcgttctctcgtagcgaggaaggtgtgactcatgtgttagtcactggtggtgctggatatatcggatcacatgctgcgttgaggctcttaaaagattcataccgtgtaaccattgtggacaatctttctcggggaaatcttggtgccgtcaaggttttacaaggattgttcccagaacccgggaggcttcaatttatttatgctgacttaggagatgccaaagctgttgataaaatcttctcagagaacgcgtttgatgctgttatgcattttgctgcagtagcatatgttggagagagcactctagatcctctaaagtattaccacaacattacatcaaacacattagtagttcttgaagctgtggctagacataaagtgaagaagttgatatattcaagcacatgtgccacttatggagaacctgacaagatgcctattgttgaagttactccacaggtccccattaacccttatggaaaagctaagaagatggctgaagatatgatcctggatttctctaaaaactctgacatggcagtcatgatcctaagatactttaacgtgataggttcagatccagaaggtagactaggagaagctccaaagcccgagctacgtgaacacggacggatttcgggtgcctgtttcgatgcagctcgtggcgtgattccaggccttcaggtcaaaggaacagactacaaaacaggagatggaacttgtgttcgtgactacatagatgttactgaccttgtagatgctcacgtaaaagctctcgagaaagctaagcctagaaatgtgggaatatacaatgtaggtacaggaaaaggaagatcggtgaaagagtttgtggaagcatgtaagaaagcgacaggagtagatatcaaagtagattttttgcctcgaagacctggagattacgcagaggtttacagtgatccagcaaagattctgagagatcttaattggtctgctcgttacactaatcttcaagaaagtcttgaggttgcttggaagtggcaaaagactcatccccatggatatgcttcttcttaa

SEQ ID NO: 110662 - protein, 379 aa, Arabidopsis thaliana
MGKIILVVSLTALCIFMLKHAPSFTSPTAFSRSEEGVTHVLVTGGAGYIGSHAALRLLKDSYRVTIVDNLSRGNLGAVKVLQGLFPEPGRLQFIYADLGDAKAVDKIFSENAFDAVMHFAAVAYVGESTLDPLKYYHNITSNTLVVLEAVARHKVKKLIYSSTCATYGEPDKMPIVEVTPQVPINPYGKAKKMAEDMILDFSKNSDMAVMILRYFNVIGSDPEGRLGEAPKPELREHGRISGACFDAARGVIPGLQVKGTDYKTGDGTCVRDYIDVTDLVDAHVKALEKAKPRNVGIYNVGTGKGRSVKEFVEACKKATGVDIKVDFLPRRPGDYAEVYSDPAKILRDLNWSARYTNLQESLEVAWKWQKTHPHGYASS

SEQ ID NO: 110663 - DNA, 930 bp, Halobacterium sp. NRC-1
  CDS (1)..(930): transl_table=11
atgccgactgcactcgtgaccggtgtcgcgggattcattgggtcacatctcgcggccgcgcttctggaccgcggctacgacgttcggggcgtcgacaactttgccacggggcacgaccagaacctcgaaccactccgtggtaccggagatttctcgttctacgaggcggacattcgcgacgctgatctcgtcgctgatgtcacaaatggtgtcgactacgtcttccaccaggccgcagattcctccgtcccgcgcagcgtcgaggaccccgtcactacgactgacgtcaactgcacggggacagccactgtcatcgacgccgcccgcgaggctgacgttgataccgttgtcgtcgcctcctccgctgcaatttacggctccactgaaacattcccgaaggtcgagtcgatgaccgagcaacccgaatcgccgtatgcgctctcgaagcactacacggagaagctagcacttcaggccagcgagctctacgacatcgacacggccgcgctccgctacttcaacatctatgggccacgccaggatccgaatggtgactacgctgcggtcatcccgaagttcatctcgctgatgctggacggcgagcgcccggtcatctatggggacggcgagcagtcccgtgatttcacgttcatcgacaacgccatccaggcgaacatccgcgccgccgaaggtgatgtcaccggcgaggcgttcaacgtcggctgtggtggccgcgtcaccgtcaacgagctcgtcgacgtgctcaacgacctcctcgacacggacatcgaccccatctatgacgacccacggccgggcgacgtgcggcactctcacgctgacatctcgaaggcccgcgagcttctgagctacgagcccgaggtggggttctctgagggactcgagcagacgattccgtactatcggtag

SEQ ID NO: 110664 - protein, 309 aa, Halobacterium sp. NRC-1
MPTALVTGVAGFIGSHLAAALLDRGYDVRGVDNFATGHDQNLEPLRGTGDFSFYEADIRDADLVADVTNGVDYVFHQAADSSVPRSVEDPVTTTDVNCTGTATVIDAAREADVDTVVVASSAAIYGSTETFPKVESMTEQPESPYALSKHYTEKLALQASELYDIDTAALRYFNIYGPRQDPNGDYAAVIPKFISLMLDGERPVIYGDGEQSRDFTFIDNAIQANIRAAEGDVTGEAFNVGCGGRVTVNELVDVLNDLLDTDIDPIYDDPRPGDVRHSHADISKARELLSYEPEVGFSEGLEQTIPYYR

SEQ ID NO: 110665 - DNA, 1068 bp, Escherichia coli O157:H7 EDL933
  CDS (1)..(1068): transl_table=11
  misc_feature (269)..(269): y is t or c
  misc_feature (409)..(409): s is g or c
atgagaaagattctgataacaggcggtgccgggtttattggctcggcgctggtgcgttatatcatcaacgaaacgagcgacgcggtggtagtggtcgataagctgacctacgccggaaacctgatgtcgctggcaccggtcgcgcaaagcgagcgctttgcctttgagaaagttgatatctgcgatcgggcagaactggcgcgcgtattcactgagcatcagccagactgtgtcatgcatctggcagccgaaagccatgttgaccgttytattgacggcccggcagcgtttattgaaaccaacattgtcgggacttatacattgcttgaagcggcgcgggcttactggaatgcgctgacggaagataaaaaatcagcgttccgttttcatcatatctccactgacgaastatatggtgacctgcactcgacggatgatttcttcaccgaaaccacgccgtatgcgccgagcagcccttattccgcgtcaaaagccagcagcgaccatctggtgcgcgcctggctgcgaacctatggtctgccaacgcttatcaccaactgctcgaataactacggtccttaccactttccggaaaaactgatcccgctgatgatcctcaacgcgctggcgggtaaaccgctaccggtatatggcaacgggcagcaaatccgtgactggctgtatgttgaagatcacgcccgcgcgctgtattgcgtggcgaccaccgggaaagtcggtgaaacctataatattggtggtcacaacgagcgtaagaatctcgatgttgtggaaaccatttgcgagctgctggaagaactggctccgaacaagccgcaaggcgtggtgcattatcgtgacttgatcacctttgtcgctgaccgtccggggcatgatctgcgctatgccattgatgcttcgaaaattgcccgtgaacttggctggctgccgcaggaaacctttgaaagtggaatgcgtaaaacggtgcagtggtatctggctaatgaaagctggaggaagcaggtgcaggacggcagctatcagggcgagcgtttaggtctgaaaggctaa

SEQ ID NO: 110666 - protein, 355 aa, Escherichia coli O157:H7 EDL933
  misc_feature (90)..(90): The Xaa at location 90 stands for Phe, or Ser.
  misc_feature (137)..(137): The Xaa at location 137 stands for Leu, or Val.
MRKILITGGAGFIGSALVRYIINETSDAVVVVDKLTYAGNLMSLAPVAQSERFAFEKVDICDRAELARVFTEHQPDCVMHLAAESHVDRXIDGPAAFIETNIVGTYTLLEAARAYWNALTEDKKSAFRFHHISTDEXYGDLHSTDDFFTETTPYAPSSPYSASKASSDHLVRAWLRTYGLPTLITNCSNNYGPYHFPEKLIPLMILNALAGKPLPVYGNGQQIRDWLYVEDHARALYCVATTGKVGETYNIGGHNERKNLDVVETICELLEELAPNKPQGVVHYRDLITFVADRPGHDLRYAIDASKIARELGWLPQETFESGMRKTVQWYLANESWRKQVQDGSYQGERLGLKG

SEQ ID NO: 110667 - DNA, 1059 bp, Agrobacterium tumefaciens str. C58
  CDS (1)..(1059): transl_table=11
atgatgcgcgttctagttaccggcggcgccggatttatcggctcagccctcgtacgttaccttgtaagcgaggtcggtgcggatgtcctcactgtagacaagctgacttatgcggggaacctagcctccctcaagcccattgaaaacgcgccgaaccatcgttttctccaggccgacatatgtgaccgagccgcaatgaatgacgccttcgcgacatttcagccggattatgtgatgcacctggccgccgaaagccatgtcgatcgctccataaccggcgccgctgatttcattcagaccaatataaacggcactttcacaatgctggaagcagcgcggcaatattggagcagccttgcggatgacgccaaggcgaatttccgcatgcttcacgtctccaccgacgaggtttacggctcgctcggagacgacggccttttcgaggaaacaacgccttacgacccttcctcgccctattccgcctcgaaagccgcaagcgatcatctcgccacggcctggcagcgcacgtatggccttccagtcgtgatctccaactgctccaacaattatgggccattccacttcccggaaaagctcattcctctgatcattctcaacgccttggaaggcaagccgctgccggtctatggaaacggcgccaacatacgcgactggctttacgtggaagaccacgcacgcgcgctttggcttatcgtgcaaaaaggccttgccggagaaaaatacaatgtaggcggcagaaatgaacagaagaatatcgatgtggtaaactgcatctgctccattctcgatgagttgcgcccgcaatcaaaaccctatgcgaatctcatccaatatgtgacggatcgtcccggccacgatgcccgctacgccatcgacgcgacaaaactggaaaccgaactcggctggaaagcgcaagaaaacttcgccaccggcattcgcaagactgtggaatggtaccttgacaatgcatggtggtggcagccgctgcgtgaaggtgtgtactccggagagcgccttggcgttctgacaaagggctaa

SEQ ID NO: 110668 - protein, 352 aa, Agrobacterium tumefaciens str. C58
MMRVLVTGGAGFIGSALVRYLVSEVGADVLTVDKLTYAGNLASLKPIENAPNHRFLQADICDRAAMNDAFATFQPDYVMHLAAESHVDRSITGAADFIQTNINGTFTMLEAARQYWSSLADDAKANFRMLHVSTDEVYGSLGDDGLFEETTPYDPSSPYSASKAASDHLATAWQRTYGLPVVISNCSNNYGPFHFPEKLIPLIILNALEGKPLPVYGNGANIRDWLYVEDHARALWLIVQKGLAGEKYNVGGRNEQKNIDVVNCICSILDELRPQSKPYANLIQYVTDRPGHDARYAIDATKLETELGWKAQENFATGIRKTVEWYLDNAWWWQPLREGVYSGERLGVLTKG

SEQ ID NO: 110669 - DNA, 1077 bp, Agrobacterium tumefaciens str. C58
  CDS (1)..(1077): transl_table=11
atgcgtgattgtattctagtaactggaggtgcggggtttattggctcagctctcagcaagctaatttgtgcctctgatctgccggtggtcactgtcgatagctttcttgagcaggtacatccgagtggagaacggtccgagtttatggacgaccgcgtcattctactgaagcgggacgtgcgagacgcgaatacttgggctgacctgctagcagaatatcgaccggtgaagattgtacatttggccgcggaaacgggaacagcgcagtcgcttaccgaagcaacacgtcatgcgtcggtaaatgtagtagggacaacggaaatgctcgatgcgttcgcacgcgcgaatgttcgacccaaccgcatcgtcttggcgtcaagccgtgctatttatggtgagggcatgtggcgggacacttcgactggagtagatttctatccaaaacctcggacccatgaaatgctggccaaagggcaatgggtaccgagcggccccagcggagcggccgctatacctctcccgcacaacgcttcgattgtcgtaccacggccgaccagtgtatatggggcgaccaagctagcgcaggagcacgttctcgcttcgtggtgtggagcattcggagtacccctgagtatactgcgacttcaaaacgtgtatggcgaagggcagtcgccttataactcgtataccggcattatcaatgtatttcatcggcttgctcgagaaggtcaggcgataccggtgtacgaggacgggcttataggtcgcgacttcgttcacattgatgatgtagttgaagttatcgcacgtgtgttggcagacaatagtggtgttgatcacaaatttgacgtgggcaccgggacggaaacaactatcttggaagccgccgaagttattgctgaactgcatggggcagctaagcctgtaatttgcggcaagtttcgggacggagatgtcagggcagctattgccgacgtaggtgcaatgcgtgcagcaacaggtgtttcgtcgaaggtatcgtttgtcgaagggtcaaagcgcgtcggcgattggttgattcgtcgtggacacatttaa

SEQ ID NO: 110670 - protein, 358 aa, Agrobacterium tumefaciens str. C58
MRDCILVTGGAGFIGSALSKLICASDLPVVTVDSFLEQVHPSGERSEFMDDRVILLKRDVRDANTWADLLAEYRPVKIVHLAAETGTAQSLTEATRHASVNVVGTTEMLDAFARANVRPNRIVLASSRAIYGEGMWRDTSTGVDFYPKPRTHEMLAKGQWVPSGPSGAAAIPLPHNASIVVPRPTSVYGATKLAQEHVLASWCGAFGVPLSILRLQNVYGEGQSPYNSYTGIINVFHRLAREGQAIPVYEDGLIGRDFVHIDDVVEVIARVLADNSGVDHKFDVGTGTETTILEAAEVIAELHGAAKPVICGKFRDGDVRAAIADVGAMRAATGVSSKVSFVEGSKRVGDWLIRRGHI

SEQ ID NO: 110671 - DNA, 1020 bp, Agrobacterium tumefaciens str. C58
  CDS (1)..(1020): transl_table=11
atgcgttatctggttaccggcacggcaggcttcatcggtttttacgttgcgaaacggctgctggatgccggacacttcgtcaccggcttcgatggcatgacgaaatattacgatgtcagcctgaaggaaaaacgccacgccatccttgcccgctccaacggcttccgggccgagatcggcatgctcgaagataccgatgcgctgaagcgggcggcagaagccgccgaaccggaaatcatcatccacctcgccgcacaggccggtgttcgttacagccttgaaaatccgcgcgcctatatcgattccaatctcatcggctcgttcaacatgctggagcttgccagaagccttaaggtcaagcacctgatgctggcatcgacctcctccatctacggcgccaatgaaaaaatcccctttgcggaaagcgacaaggccgacgagccgatgacgctctacgcagccaccaaaaaatccatggaattgatggcgcacagctatgcgcatctgcacaagctgcccaccaccgccttccgtttcttcacggtctatggcccgtggggacggccggacatggcgccgatcaaatttgtggacgcggtttccaacggccagccgatcgatatttacgggcaaggcaatatgagccgtgatttcacctatatcgatgatttggtcgaaggcatcgtccggctgagcgccgtgatcccatcagaggaaaaccgcgtgacacaggaaggcgtgaccgacacgctttcgcaccatgcacctttccgtgtcgtcaatatcggcggcggccagccggtagagctgatgcactttgtcgaaacgatcgaaaaggcagtcggcaagccggcgatccgcaacatgctgccgatgcagcagggcgacgtgccgcgcaccttcgcctcgccggatcttctgagggcattgaccggttatgtgccgcagaccccggtcgaagagggcatcaaggccctcgtcgcctggtatcgcgggataaacggaaacctcacggaatag

SEQ ID NO: 110672 - protein, 339 aa, Agrobacterium tumefaciens str. C58
MRYLVTGTAGFIGFYVAKRLLDAGHFVTGFDGMTKYYDVSLKEKRHAILARSNGFRAEIGMLEDTDALKRAAEAAEPEIIIHLAAQAGVRYSLENPRAYIDSNLIGSFNMLELARSLKVKHLMLASTSSIYGANEKIPFAESDKADEPMTLYAATKKSMELMAHSYAHLHKLPTTAFRFFTVYGPWGRPDMAPIKFVDAVSNGQPIDIYGQGNMSRDFTYIDDLVEGIVRLSAVIPSEENRVTQEGVTDTLSHHAPFRVVNIGGGQPVELMHFVETIEKAVGKPAIRNMLPMQQGDVPRTFASPDLLRALTGYVPQTPVEEGIKALVAWYRGINGNLTE

SEQ ID NO: 110673 - DNA, 1071 bp, Agrobacterium tumefaciens str. C58
  CDS (1)..(1071): transl_table=11
gtgtaccgctcgaaattggcctggaaaaaaccatcgtctatttcgatgcactgctcgccggcaggaaagtggcggaggccgtatgagatggcccgcacaatcctcgtcacgggcggggccggatttataggcagccacatctgcaaggcgctggcacaatccggcttcaagcccattgcttacgataatctctcgaccggtcacgcggattccgttcgctgggggcccttgatcgaaggtgacattctcgatggcgtcctgctgaaagccacacttcgggaattctctccggccttcgtcatccattgtgcggccaacgcctatgtcggcgaatccgtcgaggatccgcgcaaatattatcgcaacaatgtcggcggcagcctgtcgctgctggatgcctgtctcgaccagaatattggcgggctggtgttttcttccagctgcgccacctatggcgtgccgcagcaattgccgatccgtgaggaaacggcacagatgccggtcaatccttacgggcgcaccaagctgatcttcgaaatggcgctggaggattatgccgccgcctatggtctgcgtttcgtggcactgcgttatttcaatgcggccggtgccgacccggacggcgagctttacgaacgccatgaaccggagacccatctgatcccccgggcgctgatggccgccgctgcaaggctgccgcaactcgatgtcttcggcgcggattatgacaccagcgacggcacctgcattcgcgactatatccatgtcagtgatctcgccgatgcccatctggccgccgtcaactacctttcggatggcggcgagacgctgcgtgtcaatctcggctcgggtcacggtacgtcagtcggcgatatcatccgggcgatccaccgggtgaccggacaggaagtgccagtgcatttcggcgcaagacgtgccggcgatccgcccgcgctctttgctgacatcaggcgcgcggaagagacgctgggcttcaccccgaagcgttcggatatcgacaccatcatccgcacggccggtcccggcttcggactggaggcgcggtcatga

SEQ ID NO: 110674 - protein, 356 aa, Agrobacterium tumefaciens str. C58
MYRSKLAWKKPSSISMHCSPAGKWRRPYEMARTILVTGGAGFIGSHICKALAQSGFKPIAYDNLSTGHADSVRWGPLIEGDILDGVLLKATLREFSPAFVIHCAANAYVGESVEDPRKYYRNNVGGSLSLLDACLDQNIGGLVFSSSCATYGVPQQLPIREETAQMPVNPYGRTKLIFEMALEDYAAAYGLRFVALRYFNAAGADPDGELYERHEPETHLIPRALMAAAARLPQLDVFGADYDTSDGTCIRDYIHVSDLADAHLAAVNYLSDGGETLRVNLGSGHGTSVGDIIRAIHRVTGQEVPVHFGARRAGDPPALFADIRRAEETLGFTPKRSDIDTIIRTAGPGFGLEARS

SEQ ID NO: 110675 - DNA, 1068 bp, Salmonella typhimurium LT2
  CDS (1)..(1068): transl_table=11
atgaaacgcattctggtgaccggcggcgcaggctttatcggatctgcggtggtgcggcatatcatccatgaaacggcagacgcggtggtggtggtggataaactcacctatgcgggcaacctgatgtctctggcgtcggtggcgcaaagcgaccgtttcgcctttgagaaggtggatatctgcgatcgggcatcactggagcgagttttccagcagtatcagcccgatagcgtgatgcacctggcggcggaaagccatgtagaccgttccatcgacggcccggcggcgtttattgaaacgaatatcgttggtacttacaccttgctggaagccgctcgcgcttactggtccgcgcttgacgcggacgctaaagcggcgttccgcttccaccatatctccaccgatgaagtgtatggcgatctgcatactgcagacgatttcttcaccgaaaccacgccatatgcgccaagcagcccttattccgcctccaaagccagcagcgaccatctggtacgcgcctggttacgtacctacggtctgcctacgcttgtcaccaactgctctaataactacgggccctaccatttcccggaaaaactgatcccgctgatgattctgaacgcgctggcgggtaaaccattgccggtctatggcaacggtcagcaaattcgcgactggctgtatgtggaggatcatgcccgtgcgttgtatcacgtggtgacgaacggcgcggtgggtgaaacgtataatatcggcggtcataacgaacgtaaaaatctggatgtggtcaggacgatctgcgctctactggaggaactggccccgcaaaaaccgcagggtgtggtgaattatcacgatctgattaccttcgtcgacgatcgccccggccatgacttacgttatgccatcgacgcgtcgaaaatcgcccgcgagctgggctggacgccgcaggaaaccttcgaaagcgggatgcgaaaaaccgttcagtggtatctcgccaatgaggcctggtggaaacccgtgcaggatggcagttatcagggcgaacgcttaggactgaaacgctaa

SEQ ID NO: 110676 - protein, 355 aa, Salmonella typhimurium LT2
MKRILVTGGAGFIGSAVVRHIIHETADAVVVVDKLTYAGNLMSLASVAQSDRFAFEKVDICDRASLERVFQQYQPDSVMHLAAESHVDRSIDGPAAFIETNIVGTYTLLEAARAYWSALDADAKAAFRFHHISTDEVYGDLHTADDFFTETTPYAPSSPYSASKASSDHLVRAWLRTYGLPTLVTNCSNNYGPYHFPEKLIPLMILNALAGKPLPVYGNGQQIRDWLYVEDHARALYHVVTNGAVGETYNIGGHNERKNLDVVRTICALLEELAPQKPQGVVNYHDLITFVDDRPGHDLRYAIDASKIARELGWTPQETFESGMRKTVQWYLANEAWWKPVQDGSYQGERLGLKR

SEQ ID NO: 110677 - DNA, 1032 bp, Agrobacterium tumefaciens str. C58
  CDS (1)..(1032): transl_table=11
atggctgttctggtcacgggtggggccggttatataggaagccacatggtgtgggctttgctcgatgccggggaagaggtcgttgtcgtcgaccggctttccacggggtcgcgctgggcagtcgcgccagcggcgcgtttttatcttggagatgcggccgaccgcgccttgctcgatcaggtttttgaagaaaaccacatcgagaccatcttccacttcgccgggtccgtcagcgttcccgagtcgatcagccagccgctggaatattacgaaaacaataccggcacgacccgcgcgcttgttgccgcggcggttcgcagcggcatccgcaatttcatcttctcctcgacagccgccgtctatggaaaccagccctttgatggtcccgttcctgaaacggcgatcctgagcccggaaaatccctacggcctgtcgaaactcgcgtccgaaatcatgctgcgcgatgtcgtgcaggcgcatgatttcaactatgtggcgctgcgttatttcaacgttgccggagccgacccgcagggccgcgccgggccttcgccgacgggcgttgcaaaccttatcaaggttgcatgcgaagccgcgaccggccgccgcgaccgggtggaggtttacgggacggattacccgaccgccgatggaaccggcgttcgcgactatattcatgtcagcgatctgattgatgcgcatatgctggccatggcgcatctgcgcgccggcggcggtacacgaaccctgaactgcggttatggtgtcggttattcggttctggacgtcctccaggccgtacagcgcgaatccgcatgtgaattcgcggtcatccattgtccccgccgtccgggtgacattgcggccatggtggcggattcgtcgcgtatccagtcggaattaggctggcgtcctcgcttcaacgatctggcgaccatcgttcgcactgcgcttcaatgggaagccaagcgtcaggcccagcaaagcggcagaataccgccgatgcggcgcaagctggcagcgataggctga

SEQ ID NO: 110678 - protein, 343 aa, Agrobacterium tumefaciens str. C58
MAVLVTGGAGYIGSHMVWALLDAGEEVVVVDRLSTGSRWAVAPAARFYLGDAADRALLDQVFEENHIETIFHFAGSVSVPESISQPLEYYENNTGTTRALVAAAVRSGIRNFIFSSTAAVYGNQPFDGPVPETAILSPENPYGLSKLASEIMLRDVVQAHDFNYVALRYFNVAGADPQGRAGPSPTGVANLIKVACEAATGRRDRVEVYGTDYPTADGTGVRDYIHVSDLIDAHMLAMAHLRAGGGTRTLNCGYGVGYSVLDVLQAVQRESACEFAVIHCPRRPGDIAAMVADSSRIQSELGWRPRFNDLATIVRTALQWEAKRQAQQSGRIPPMRRKLAAIG

SEQ ID NO: 110679 - DNA, 984 bp, Agrobacterium tumefaciens str. C58
  CDS (1)..(984): transl_table=11
atggcccgcacaatcctcgtcacgggcggggccggatttataggcagccacatctgcaaggcgctggcacaatccggcttcaagcccattgcttacgataatctctcgaccggtcacgcggattccgttcgctgggggcccttgatcgaaggtgacattctcgatggcgtcctgctgaaagccacacttcgggaattctctccggccttcgtcatccattgtgcggccaacgcctatgtcggcgaatccgtcgaggatccgcgcaaatattatcgcaacaatgtcggcggcagcctgtcgctgctggatgcctgtctcgaccagaatattggcgggctggtgttttcttccagctgcgccacctatggcgtgccgcagcaattgccgatccgtgaggaaacggcacagatgccggtcaatccttacgggcgcaccaagctgatcttcgaaatggcgctggaggattatgccgccgcctatggtctgcgtttcgtggcactgcgttatttcaatgcggccggtgccgacccggacggcgagctttacgaacgccatgaaccggagacccatctgatcccccgggcgctgatggccgccgctgcaaggctgccgcaactcgatgtcttcggcgcggattatgacaccagcgacggcacctgcattcgcgactatatccatgtcagtgatctcgccgatgcccatctggccgccgtcaactacctttcggatggcggcgagacgctgcgtgtcaatctcggctcgggtcacggtacgtcagtcggcgatatcatccgggcgatccaccgggtgaccggacaggaagtgccagtgcatttcggcgcaagacgtgccggcgatccgcccgcgctctttgctgacatcaggcgcgcggaagagacgctgggcttcaccccgaagcgttcggatatcgacaccatcatccgcacggccggtcccggcttcggactggaggcgcggtcatga

SEQ ID NO: 110680 - protein, 327 aa, Agrobacterium tumefaciens str. C58
MARTILVTGGAGFIGSHICKALAQSGFKPIAYDNLSTGHADSVRWGPLIEGDILDGVLLKATLREFSPAFVIHCAANAYVGESVEDPRKYYRNNVGGSLSLLDACLDQNIGGLVFSSSCATYGVPQQLPIREETAQMPVNPYGRTKLIFEMALEDYAAAYGLRFVALRYFNAAGADPDGELYERHEPETHLIPRALMAAAARLPQLDVFGADYDTSDGTCIRDYIHVSDLADAHLAAVNYLSDGGETLRVNLGSGHGTSVGDIIRAIHRVTGQEVPVHFGARRAGDPPALFADIRRAEETLGFTPKRSDIDTIIRTAGPGFGLEARS

SEQ ID NO: 110681 - DNA, 987 bp, Agrobacterium tumefaciens str. C58
  CDS (1)..(987): transl_table=11
ttgatgaagaagaaagtccttgtcgtcggcggtgccggctatatcggttctcacacctgccttctcctgtctgagcgaggatatgaaccggttgttttcgacaatctctccaacgggcatgaggaatttgtccgctgggggcctttcgaacagggcgatattcgcgaccgggcgcggctggacgaggtcttcgccaagcaccgaccggaagccgtccttcacttcgccgcgcttatcgaagtcggcgaatctgtcaagcaaccggtcgctttttacgacaataacgtcatcggctcgctcaacctgctttccgccgccatcgatgccggtgtcacgtcgttcgttttctcctccacttgcgcgacctacggattgccggaacaggtgccgatcgacgagacacaccggcaggcgccgatcaatccctatggccgcaccaaatgggtggtggagcaggcgctgaaggattacagcacctatgaggggctgcgctcggtgatgctgcgttatttcaacgctgcgggcgcagatttcgaaggccgcatcggcgaatggcacaagccggaaacccacgcgatcccgcttgccatcgaagctgcactcggacggcgccagggcttcaaggtgttcggcacggattacgacacacgcgacggcacctgcgtgcgcgactatatccacattctcgatcttgccgatgcgcatgtgcgggcagtggactacctgctggatggcggcgagactgtcgaactcaacctcggcaccggcaccggcaccacggtaaaggagctgctagcggcaatttcggaagtctccggccgccccttccccgtggaatataccggacggcgcgatggcgactccaccaccctcgttgccaataacgacaaggccagagaggttctcggctgggaaccgcgttattctctatcggatatcataaaatctgcctgggcgtggcattcctcccgtaatgccggggactga

SEQ ID NO: 110682 - protein, 328 aa, Agrobacterium tumefaciens str. C58
MMKKKVLVVGGAGYIGSHTCLLLSERGYEPVVFDNLSNGHEEFVRWGPFEQGDIRDRARLDEVFAKHRPEAVLHFAALIEVGESVKQPVAFYDNNVIGSLNLLSAAIDAGVTSFVFSSTCATYGLPEQVPIDETHRQAPINPYGRTKWVVEQALKDYSTYEGLRSVMLRYFNAAGADFEGRIGEWHKPETHAIPLAIEAALGRRQGFKVFGTDYDTRDGTCVRDYIHILDLADAHVRAVDYLLDGGETVELNLGTGTGTTVKELLAAISEVSGRPFPVEYTGRRDGDSTTLVANNDKAREVLGWEPRYSLSDIIKSAWAWHSSRNAGD

SEQ ID NO: 110683 - DNA, 936 bp, Corynebacterium glutamicum ATCC 13032
  CDS (1)..(936): transl_table=11
atgcgcacagtagttaccggcggtgccggcttcatcggatcccatctcgttgaccttttgatcaaggaaggccacgaggtcgttgtgatcgataacctctcccgcggacgcctggagaatctctccgatgcggaagccaccggaaaactcacctttgtggaagccgatcttctcgacgttgatttcaacgagtttctaggaacccacaagcctgaggttattttccacctggcagcgcaaatcgatgtgcgccactctgttgtagatcctcttcacgacgccgaaaccaacattttgtccaccatccgcatcgctgacgctgcccgccagcacggtgttcgcaaggttgtctttacctcctcaggcggttccatttacggtgagccttcggaattcccagttgatgaaaccgtgccagtggatccacattccccttatgcggcatccaaggtgtccggtgaaatttacctgaacaccttccgccacctgtacggcttagactgttctcacatcgcaccggcaaatgtttacggcccacgccaagatccacacggtgaagcaggagttgtggccattttcgcgctgcgacttctgggaggcctggacaccaaggtattcggcgacggcggaaacacccgcgactacgtctacgtcggtgacgtagttcgtgctttctacctggcttctggggaaatcggtgggggagagcgcttcaacattggcacctctgtggaaacctctgaccgccagctgcacaccctcgtggccactgcggcaggttccaaagatgatcctgaatatgcacctgcacgtctcggcgatgtgccacgcagtgcactcagcttcggcaaggccaaagaggtgcttggttgggagcctgaggtgaacatcgaacaaggtgtggccaagactgtggagtacttccgcactcactag

SEQ ID NO: 110684 - protein, 311 aa, Corynebacterium glutamicum ATCC 13032
MRTVVTGGAGFIGSHLVDLLIKEGHEVVVIDNLSRGRLENLSDAEATGKLTFVEADLLDVDFNEFLGTHKPEVIFHLAAQIDVRHSVVDPLHDAETNILSTIRIADAARQHGVRKVVFTSSGGSIYGEPSEFPVDETVPVDPHSPYAASKVSGEIYLNTFRHLYGLDCSHIAPANVYGPRQDPHGEAGVVAIFALRLLGGLDTKVFGDGGNTRDYVYVGDVVRAFYLASGEIGGGERFNIGTSVETSDRQLHTLVATAAGSKDDPEYAPARLGDVPRSALSFGKAKEVLGWEPEVNIEQGVAKTVEYFRTH

SEQ ID NO: 110685 - DNA, 975 bp, Streptomyces coelicolor A3(2)
  CDS (1)..(975): transl_table=11
atgaacatcctggtcaccggcgccgccggattcatcggctcccggtacgtccgcgggctgctcgcctccgacgcgcccggcgccccgcgggtcaccgtgctggacgccctcacctacgccggatccaccgccaatctcgaactcggccacccccggctggagttcgtgcacggcgacatccgcgacgcggcgctcgtggacaggctgacggccggggccgaccaggtggtgcacttcgccgccgagtcccatgtggaccgctccatccacgccgcctccgacttcgtcctcaccaacgtcgtcggcacccagaacctgctggacgccgccctgcgccatggcgtcgggcccttcgtgcacgtctccaccgacgaggtctacggctcggtcgacgccggttcggcgaccgaggagcaccccctgcggccgagctccccctactccgcctcgaaggcgtcgggcgacctgctggccctctcctaccaccgcacccacggcctcgacgtacgggtgacccggtgctccaacaactacggcccgcaccagttccccgagaaactcgtgccgctgttcgtcacccgtctcctggacggccaccgggtcccgctgtacggggacggccgcaacgtccgcgactggctgcacgtcgacgaccactgccggggcgtcgacctggtccgcacccgtggcagggccggcgaggtctacaacatcggcggcggcaccgagttgagcaaccgcgacctcaccggcctgctcctggacgcctgcggcgcggggccggaccgcatcgtgcacgtcgaggaccgcaagggccacgacctgcgctactcggtcgactggagcaaggcccgcgaggagctgggctaccgcccccaccgcgacctcgcgaccgggctggccgagaccgtcgcctggtaccgggacaaccgggcctggtgggagccgctcgagcggcgcgccgacgcgggctga

SEQ ID NO: 110686 - protein, 324 aa, Streptomyces coelicolor A3(2)
MNILVTGAAGFIGSRYVRGLLASDAPGAPRVTVLDALTYAGSTANLELGHPRLEFVHGDIRDAALVDRLTAGADQVVHFAAESHVDRSIHAASDFVLTNVVGTQNLLDAALRHGVGPFVHVSTDEVYGSVDAGSATEEHPLRPSSPYSASKASGDLLALSYHRTHGLDVRVTRCSNNYGPHQFPEKLVPLFVTRLLDGHRVPLYGDGRNVRDWLHVDDHCRGVDLVRTRGRAGEVYNIGGGTELSNRDLTGLLLDACGAGPDRIVHVEDRKGHDLRYSVDWSKAREELGYRPHRDLATGLAETVAWYRDNRAWWEPLERRADAG

SEQ ID NO: 110687 - DNA, 981 bp, Streptomyces coelicolor A3(2)
  CDS (1)..(981): transl_table=11
atgacctggctgatcaccggcggcgccggatacatcggggcgcacgtcgtacgggcgatgaccgaagcgggcgagaaggccgtggtctacgacgacctgtccacggggatcgccgagcgcgtgcccgacggtgtgcccctggtggtgggctcggtcctggacggcgagcgggtcgcccgcgccctggccgaccactccgtcaccggcgtggtgcacctggccgccaagaagcaggtcggcgagtcggtggacctgccgctgcactactaccggcagaacgtggagggcctgcgggtcctgctggacgcggtcaccgcggccggggtcccgtccttcgtcttctcctcctccgccgcggtgtacggcatgcccgacgtcgacctcgtgaccgaggagacgccctgcgtgccgatgtcgccgtacggcgagaccaagctggcgggcgagtggctggtccgggccacgggcagggcgacgggcctcgccacggcctccctgcggtacttcaacgtggcgggcgcggcgagcccggacctggtcgacaccggcgtctacaacctcgtcccgatggtcttcgagaagctcacggagtccgcggccccccggatcttcggcgacgactacgcgacgccggacggcacctgcgtgcgcgactacatccacgtcgtggacctggccgaggcgcacgtggccgcggcccgcgcactccagtcctcgcccggcaccgccctcacgctgaacatcggccgcggcgagggcgtctccgtccgcgagatgatcgaccggatcaacgccgtcaccggctgcgaccagccgccgacggtcaccccgcgccgccccggcgacccggcgcgcgtcgtcgcctcggccgaccgggccgccgtcgaactgggctggaaggccaagtacgacgtcgaggacatgatcacgtcggcgtgggcgggctgggtacggctccacccggaggcggcgcgggactga

SEQ ID NO: 110688 - protein, 326 aa, Streptomyces coelicolor A3(2)
MTWLITGGAGYIGAHVVRAMTEAGEKAVVYDDLSTGIAERVPDGVPLVVGSVLDGERVARALADHSVTGVVHLAAKKQVGESVDLPLHYYRQNVEGLRVLLDAVTAAGVPSFVFSSSAAVYGMPDVDLVTEETPCVPMSPYGETKLAGEWLVRATGRATGLATASLRYFNVAGAASPDLVDTGVYNLVPMVFEKLTESAAPRIFGDDYATPDGTCVRDYIHVVDLAEAHVAAARALQSSPGTALTLNIGRGEGVSVREMIDRINAVTGCDQPPTVTPRRPGDPARVVASADRAAVELGWKAKYDVEDMITSAWAGWVRLHPEAARD

SEQ ID NO: 110689 - DNA, 966 bp, Streptomyces coelicolor A3(2)
  CDS (1)..(966): transl_table=11
atgagcgggaagtacctggtgacaggtggtgccggatacgtcggcagcgtcgtcgcccagcacttggtggaggcggggcacgaggtcgtcgtgctcgacaatctgtcgaccggcttccgtgagggtgtgccggcgggtgcctcgttcgtcgagggcgacatccgggacgccgccaagtggctggacggctcgttcgacggcgtgctgcacttcgccgccttctcccaggtcggcgagtcggtcgtgaagcccgagaagtactgggacaacaacgtcggtggcaccatggcgctgctggaggccatgcggggcgcgggtgtgcggcggctcgtcttctcctccacggccgccacgtacggcgagcccgagcaggttcccatcgtcgagtccgcgccgacgaggcccaccaatccgtacggcgcctcgaagctcgccgtcgaccacatgatcaccggcgaggcggcggcccacgggctgggcgcggtctcgctgcgctacttcaacgtcgcgggcgcgtacggggagtacggcgagcgccacgaccccgagtcgcatctgattccgctggtccttcaagtggcgcagggcaggcgggaggccatctccgtctacggcgacgactacccgacgccggacggcacctgtgtgcgcgactacatccacgtcgccgacctggccgaggcccacctgctggccgtggcggccgccgccccgggcgagcacctcatctgcaacctgggcaacggcaacggcttctccgtccgcgaggtcgtcgagaccgtgcggcgggtgacgggccatccgatccccgagatcatggccccgcgccggggcggcgacccggcggtcctggtcgcgtcggccggcaccgcccgcgagaagctgggctggaacccgtcccgcgcggacctcgcgggcatcgtgtcggacgcgtgggagttcgcgcagcggcgcgcgggccagtag

SEQ ID NO: 110690 - protein, 321 aa, Streptomyces coelicolor A3(2)
MSGKYLVTGGAGYVGSVVAQHLVEAGHEVVVLDNLSTGFREGVPAGASFVEGDIRDAAKWLDGSFDGVLHFAAFSQVGESVVKPEKYWDNNVGGTMALLEAMRGAGVRRLVFSSTAATYGEPEQVPIVESAPTRPTNPYGASKLAVDHMITGEAAAHGLGAVSLRYFNVAGAYGEYGERHDPESHLIPLVLQVAQGRREAISVYGDDYPTPDGTCVRDYIHVADLAEAHLLAVAAAAPGEHLICNLGNGNGFSVREVVETVRRVTGHPIPEIMAPRRGGDPAVLVASAGTAREKLGWNPSRADLAGIVSDAWEFAQRRAGQ

SEQ ID NO: 110691 - DNA, 1005 bp, Streptomyces coelicolor A3(2)
  CDS (1)..(1005): transl_table=11
atgcgcgtactggtcaccggcagcgccggtttcatcgggtcccatgtcgtcgaggccctgcgggagcacgggcacgagcccgtgggctacgacgtccgcgaggaccccggcgccgacgtgcgcgatccggcggccctggcgcgagcactcgccggggtggacgccgtgtgccaccaggcggcgatggtcggcctcggcaacgggttcgccgacgcggcggagtacgtctcccgcaacgatctcggcaccgccgtcctgctcgccgcgacggccggggcgggcgtgcggcggctggtgctcgccgggtcgatggtcgtctacggggagggccgttacacgtgcgcgcggcacggcgtggtgcggccgggaccgcgcgccgtcgccgacctggacgcgggccggttcgagcccacctgcccccggtgcggcgcggacctggccccgggcctggtcggcgaggacgccccggccgacccgcgcaacgtgtacgccacgaccaagctggcccaggagcacctggccgccgcctgggcccggacgaccggcgcgacggcggtgtcactgcgctaccacaacgtgtacggcccccggatgccccgcgacaccccgtacgccggcgtcgcctccttcttccgctccgcgctggcccgcggcgaggcgccgcgcgtcttcgaggacggccgccagcgccgggacttcgtgcacgtgcgggacgtggccgccgcgaacgtcgccgcgctggagtccgcccggccgccggagggcgccctcagcgcctacaacaccggcagcggtgagccgcacaccgtgggtgagatggccgtcgccctgtccgccgcgcacggcggccccgagcccgtcgtcaccggcgagtaccgcctcggcgacgtccggcacatcaccgcggactccgcgcgcctgcggaccgacctggactggcggccccgggtcggattcgcggagggcatgcgggagttcgcccgggacgggctgcgcggggactga

SEQ ID NO: 110692 - protein, 334 aa, Streptomyces coelicolor A3(2)
MRVLVTGSAGFIGSHVVEALREHGHEPVGYDVREDPGADVRDPAALARALAGVDAVCHQAAMVGLGNGFADAAEYVSRNDLGTAVLLAATAGAGVRRLVLAGSMVVYGEGRYTCARHGVVRPGPRAVADLDAGRFEPTCPRCGADLAPGLVGEDAPADPRNVYATTKLAQEHLAAAWARTTGATAVSLRYHNVYGPRMPRDTPYAGVASFFRSALARGEAPRVFEDGRQRRDFVHVRDVAAANVAALESARPPEGALSAYNTGSGEPHTVGEMAVALSAAHGGPEPVVTGEYRLGDVRHITADSARLRTDLDWRPRVGFAEGMREFARDGLRGD

SEQ ID NO: 110693 - DNA, 993 bp, Streptomyces coelicolor A3(2)
  CDS (1)..(993): transl_table=11
gtgaccgagagtcccggggccaccggcccccgaagcggacgcacgtggcgccgggccctggtgaccggcggagccggattcgtgggatcccacctgtgcggccggctgctcgacgccggtaccgaggtcgtctgcctcgacaacctggccaccggctcccgcgccaacgtggccgacctggagcgccggcgcggcttccggttcgtccggggcgatgccaccgacccggcggccctgcgcggcctgcccggccggttcgacctggtcctgcacttcgcctgccccgcctcgcccgccgactacctccggctgcccctggagaccctcgacgtcggcagcaccggcacccgcaacgccctggaacgggcccacgccgacggcgcccgcttcctgctcgcctccacctccgaggtctacggcgacccgctggagcacccgcagcgcgagacgtactggggcaacgtcaacccgatcggcccgcgcagcgtctacgacgagtccaagcgcttcgccgaggcactggtcaccgcccaccgccaggtgcacggcaccgacaccgccatcgtccggatcttcaacacctacggcccccgcatgcgcaccggcgacggccgggccgtcccgaccttcatcgcacaggcgctggacggcatgccgctcaccgtcgccggcgacggcggccagacccgctccctgtgctacgtcgacgacaccgtggcgggcgtcctggccctggccgcgtccggggagagcggcccgatgaacatcgggggcgacgacgagatcaccatgctggaactggcccgccgggtcgtcggcctcaccggctccggctcccgcatccgcttcgtcgaacgccccgtcgacgacccctgccgacgcaggcccgacaccaccctggcccgggaacggctgggctggcggccgggcgtgagctggaacgaggggctggagcggaccatcggctggttcgcgcacgccgtcgccgcctga

SEQ ID NO: 110694 - protein, 330 aa, Streptomyces coelicolor A3(2)
MTESPGATGPRSGRTWRRALVTGGAGFVGSHLCGRLLDAGTEVVCLDNLATGSRANVADLERRRGFRFVRGDATDPAALRGLPGRFDLVLHFACPASPADYLRLPLETLDVGSTGTRNALERAHADGARFLLASTSEVYGDPLEHPQRETYWGNVNPIGPRSVYDESKRFAEALVTAHRQVHGTDTAIVRIFNTYGPRMRTGDGRAVPTFIAQALDGMPLTVAGDGGQTRSLCYVDDTVAGVLALAASGESGPMNIGGDDEITMLELARRVVGLTGSGSRIRFVERPVDDPCRRRPDTTLARERLGWRPGVSWNEGLERTIGWFAHAVAA

SEQ ID NO: 110695 - DNA, 1005 bp, Methanosarcina mazei Go1
  CDS (1)..(1005): transl_table=11
atgtctaaaatagtgatcacaggcggtgcgggttttataggctcccatattgcagaaaacctcgcaaaagatggtcatgagattgttattgtcgataatcttgatccttactattctgttgacctgaaaaagaaaaatctgaatattgcccttaacagcggggatgccacttttattaatgctgatgtcaccgacctttcaggaataaaagatgtcattgacagcacagtagattacgtttaccacgaagctgcccaggcaggcgtcaggatttcggtagaggacccttttaagccaaacgatgtaaacgtgcatggcactctgaacgtgctcaaagcctctcttgacgcgggcgtaaaaaaggtcatcaatgcttcctcatcttccgtctacggcaaagtaaaatacctgcccttcgacgaacagcacccaacagagccagtatccccatacggcgtcagtaaattggctgcagagcactactgcagggtattttacgaagtatacggcctcccgaccacctcattacgctacttcacagtatacggtccaagaatgaggccagaccttgcaatctcaatcttcacccggaaaatgcttgcaaacgaacccatcaccgtctttggtgacggggaacagacacgggacttcacatacatcgaagacgtcgtggaagctaacaaaagactcctttacaacagggcaaccgacggtaaagtcctgaacatcggaggcggaaaccggatcagtgtaaacaacctgatagaaaacttaaggtttatcaccggctcaacctctgaaatcataaacgccgacaagcaaaaaggagacacagaagacacacttgcaaatgttgaccttggaaataatatgataggatacacaccattattcaacatcaataaaggcctgaacaaattcgtagactggtttaaaaccgaaaatcaatgccgtgatccggaacaatcccttttaagtcagtccgctccgcaacttctaaagtaa

SEQ ID NO: 110696 - protein, 334 aa, Methanosarcina mazei Go1
MSKIVITGGAGFIGSHIAENLAKDGHEIVIVDNLDPYYSVDLKKKNLNIALNSGDATFINADVTDLSGIKDVIDSTVDYVYHEAAQAGVRISVEDPFKPNDVNVHGTLNVLKASLDAGVKKVINASSSSVYGKVKYLPFDEQHPTEPVSPYGVSKLAAEHYCRVFYEVYGLPTTSLRYFTVYGPRMRPDLAISIFTRKMLANEPITVFGDGEQTRDFTYIEDVVEANKRLLYNRATDGKVLNIGGGNRISVNNLIENLRFITGSTSEIINADKQKGDTEDTLANVDLGNNMIGYTPLFNINKGLNKFVDWFKTENQCRDPEQSLLSQSAPQLLK

SEQ ID NO: 110697 - DNA, 1017 bp, Thermosynechococcus elongatus BP-1
  CDS (1)..(1017): transl_table=11
atggatgttttagtaacgggcgtagctggattcattggtcatggggcggctctggcactcctacggcggggcgatcgcgtgattggcttggataatttgaatgactactatgatgttaaccttaagaaatctcgcctagaacacctgaacatttctagccaaccgggtcagtttatttttcgaaaaattgatttagttgatcgcctgggggtgaaccaactctttgcagacttttctccgcaaaaggtaattcacctggcagcccaagcaggcgtgcgttattccctagaaaatccttttgcctacattgatagtaatatcgttggttttctccacattttagaggcctgtcgccaccaccgcgtagagcatttggtctacgccagtagttccagtgtttatggcgcgaataaaaagctgcctttttccgttcacgataacgttgatcatccactgagcctgtatgcggcaaccaagaaggccaacgaactcatggcacacacctacagccacctctataatattccgacaacgggactgcgcttttttaccgtctatggcccttggggtcgccctgacatggcactgtttaagtttactagggcaattctgaataatgaacccctacccgtctttaactatgggaaacatcgccgtgactttacctacattgatgacattgtcgaaggtattctgcgcgtcttagatcggccggcagctcccaaccctgcttggtgtggcgaaacaccagatcccgccaccagtttagcaccctggcgagtgtacaacattggcgctcatcgtcccattgagcttctccgctacattgagcttttggaggagtaccttggcaaaaaggctctcatcacttttttacccttgcagccgggagatgtgcctgatacctatgccgatgtaaccgccctcaaagaagatacaggttatgaacccatcacccctgttgagattggtgtacaacggtttgtggaatggtatcgtgactactatcgtgtttaa

SEQ ID NO: 110698 - protein, 338 aa, Thermosynechococcus elongatus BP-1
MDVLVTGVAGFIGHGAALALLRRGDRVIGLDNLNDYYDVNLKKSRLEHLNISSQPGQFIFRKIDLVDRLGVNQLFADFSPQKVIHLAAQAGVRYSLENPFAYIDSNIVGFLHILEACRHHRVEHLVYASSSSVYGANKKLPFSVHDNVDHPLSLYAATKKANELMAHTYSHLYNIPTTGLRFFTVYGPWGRPDMALFKFTRAILNNEPLPVFNYGKHRRDFTYIDDIVEGILRVLDRPAAPNPAWCGETPDPATSLAPWRVYNIGAHRPIELLRYIELLEEYLGKKALITFLPLQPGDVPDTYADVTALKEDTGYEPITPVEIGVQRFVEWYRDYYRV

SEQ ID NO: 110699 - DNA, 930 bp, Oceanobacillus iheyensis HTE831
  CDS (1)..(930): transl_table=11
ttgacaaaatatttagttactggcggcgcaggattcgtaggatcaaatatcgtaaggaagcttatttcaaacggggaatcggttagattgctagataatttcagtacaggaaacaagaacaatatagcagatattaacgatcaagtagagataattagcggagactttacaaataaagcagtagttaaagaagctatgaaaggtgtagatattatcttacatcaaggggctattccttctgttcctaaatcaatcgacaatccaatattatctaattatgcaaatgtgaacggtacacttactcttttaaacgctgccgttgaggaaggtgtcagtcgatttgtatacgcagcttcttcttccgcttatggcaataataaaaggttaccgaaacaagaagatatgattgctaatcctatgtcaccttatgcagttagtaaatatacgggtgaactatattgtaaagttttttatgaaatatacggattagaaacgatttccttacgttattttaatgtattcggcccaagacaaaatccacattcaaaatatgctgcggtcattccagcatttatagaatcaatcattcaaaatcaatcacctattatatacggtgatggtacacaatcaagagatttcacttatatcgataatgttgtatctgctaatctacttgccgctaccgcgaaaaatttaaaaggggaagtagttaatatcggtactggaacccaaatacagctaaatgatttggtggatcgtattaacaatattttaggaaaaaacatttctgctatccatacgaaggatcgtgcaggtgacgttaaacattccttagctgacatacagcgcgctaaagatataataaactatgaaccaataactacatttgatgatggtttaataaaaacagtagaatggtttgacaaataa

SEQ ID NO: 110700 - protein, 309 aa, Oceanobacillus iheyensis HTE831
MTKYLVTGGAGFVGSNIVRKLISNGESVRLLDNFSTGNKNNIADINDQVEIISGDFTNKAVVKEAMKGVDIILHQGAIPSVPKSIDNPILSNYANVNGTLTLLNAAVEEGVSRFVYAASSSAYGNNKRLPKQEDMIANPMSPYAVSKYTGELYCKVFYEIYGLETISLRYFNVFGPRQNPHSKYAAVIPAFIESIIQNQSPIIYGDGTQSRDFTYIDNVVSANLLAATAKNLKGEVVNIGTGTQIQLNDLVDRINNILGKNISAIHTKDRAGDVKHSLADIQRAKDIINYEPITTFDDGLIKTVEWFDK

SEQ ID NO: 110701 - DNA, 1023 bp, Shewanella oneidensis MR-1
  CDS (1)..(1023): transl_table=11
atgacacgttacgaacaaattaaacaagaactgctaaattctcccaaaacttggctaataacaggtgttgcaggttttatcggttcaaatttattagaacaattgcttaaattaaatcaaactgttattggattggataattttgcaactggccgtcaacataatctcgacgaagtgcaatcacttgtcacatcagaacaatggatgcgttttagcttcataaatggagatattcgcgattatgctatttgtgaagctgtagtaaatggcgttgattatgtgcttcatcaagctgctctgggatctgtaccacgctcaatcgctgatccaattaccactaatgctgcaaatatcactggctttcttaacatgcttcaagctgcaaaagaggctgaagtaaaaagctttacttatgctgcttccagttcaacttatggtgatcatcctgctttgcccaaagttgaacagaatattggtaatccgctttctccttatgctgtaacgaaatatgtgaatgagctctatgctagtgtatatgctcgtacttatggatttgaaacgatagggttaagatattttaatgtgtttggtcggcgtcaagatcctaatggtgcctatgcagccgtaattcctaagtggacatcttctatgataaaaggggaagacgtttttattaatggggatggcgaaacgagtcgagatttttgttatatcgataacgtagtacaaatgaacatattagctgcaacagcagcgtcagaagctaaaaatgaagtttataatgtcgcagttggtgatagaacaaccttgaatgatctttactttgctataaaggattcattaaatgcgaatggcattaatgttaatcaaaacccaaactatcgtgattttagagctggggatgtgagacattcacaagctgatgtaagtaaagccgttactagactaggttatcaatatacacataagatacttgaaggtatctcagaagcgatgccttggtacaaggagtttttggcataa

SEQ ID NO: 110702 - protein, 340 aa, Shewanella oneidensis MR-1
MTRYEQIKQELLNSPKTWLITGVAGFIGSNLLEQLLKLNQTVIGLDNFATGRQHNLDEVQSLVTSEQWMRFSFINGDIRDYAICEAVVNGVDYVLHQAALGSVPRSIADPITTNAANITGFLNMLQAAKEAEVKSFTYAASSSTYGDHPALPKVEQNIGNPLSPYAVTKYVNELYASVYARTYGFETIGLRYFNVFGRRQDPNGAYAAVIPKWTSSMIKGEDVFINGDGETSRDFCYIDNVVQMNILAATAASEAKNEVYNVAVGDRTTLNDLYFAIKDSLNANGINVNQNPNYRDFRAGDVRHSQADVSKAVTRLGYQYTHKILEGISEAMPWYKEFLA

SEQ ID NO: 110703 - DNA, 933 bp, Pseudomonas putida KT2440
  CDS (1)..(933): transl_table=11
atggctgacgcccccatcctgatcaccggcggtgccggcttcattggctcccacctgtgcgatgcgttgttggacaaaggctacgccgtacgcattctcgacgacttctccaccggccggcgaagcaatctgcaggtcgatcacccacggctggaactgatcgaaggtgatgttgccgatgcagggctggtcactcaggctgcggctggctgccgtgctgtggtgcatctggcggcggtagcgtcggttcaggcatcggtcgaagacccggtgcgtacccaccagagtaacttcatcggtaccctcaacgtttgcgaagccatgcgcgtgcatggcgtgcgccgggtgctcttcgcctccagcgcagcggtgtacggcaacaatggtgaaggggaatcgatttccgaagacacgccaaaggcgccgttgaccccttatgccgtggacaagctggccagtgagcagtacctggacttctaccgtcgccagcatggtctggagccggtggtgtttcgcttcttcaacatcttcgggccacggcaggacccttcctcaccgtattccggggtgatcagcatcttctgcgagcgtgctgtgcagggcttgccgattacagtgttcggtgacggcgaacagacccgggacttcctttatgtgggcgacctggtgcaggtgatggtgcaggcactggagcagccgcaggtcgaggagggggcggtgaacatcgggctgaaccaggcgacctcactgaaccagttgctggccgcgctggagaaggttgtggggagcttgccagcgatcagctatgcggcggcgcgatcgggtgatatccgccattcgcgagcagataaccagcggctgttggcgcggttcgagtttgcgcaggtgacgccgatggttgaaggcctgacaaagcttctcggtaaaggctga

SEQ ID NO: 110704 - protein, 310 aa, Pseudomonas putida KT2440
MADAPILITGGAGFIGSHLCDALLDKGYAVRILDDFSTGRRSNLQVDHPRLELIEGDVADAGLVTQAAAGCRAVVHLAAVASVQASVEDPVRTHQSNFIGTLNVCEAMRVHGVRRVLFASSAAVYGNNGEGESISEDTPKAPLTPYAVDKLASEQYLDFYRRQHGLEPVVFRFFNIFGPRQDPSSPYSGVISIFCERAVQGLPITVFGDGEQTRDFLYVGDLVQVMVQALEQPQVEEGAVNIGLNQATSLNQLLAALEKVVGSLPAISYAAARSGDIRHSRADNQRLLARFEFAQVTPMVEGLTKLLGKG

SEQ ID NO: 110705 - DNA, 1101 bp, Pseudomonas putida KT2440
  CDS (1)..(1101): transl_table=11
atgattctagtaacaggcggagccggcttcatcggctcaaatttcgtactgcaatggtgtgcgcacaatgaggaacccgtcctcaacctcgacgccctgacctacgcaggcaacctggccaacctgcagccgctggaaggcaaccctcagcatcgctttgtgcaaggcaatatttgcgatgctgcgcttctgaccaagctgttcgcagagcaccgcccgcgcgccgtggttcacttcgcggcggaatcccatgtagaccgctcaatcaccggccccgaagcgtttgtcgaaaccaacgtgatgggcacgtttcgcttgcttgaagccgcccgggcgcattggaatagtttggaaggtgcagagaaggaggccttccgtttcctccatgtctctaccgacgaagtctacggcacactagggccaaacgacccggcgttcaccgaaaccacgccgtacgcgccgaacagcccatactccgccagcaaggcagccagcgaccatctggtacgctcgtatttccatacctacggcatgccggtactcactaccaactgctccaacaattacgggccgctccacttcccggaaaaactgatcccgctgatgatcgtcaacgcactcgccggtaaggcgctgcctgtctatggcgacggccagcaaatccgcgactggctgtatgtcgaagatcactgctcgggcatccgtcgcgtactggaagccggtgcgttcggcgagacgtacaatattggcggctggaatgaaaaagccaacattgacattgtgcgtacactctgcagccttctcgacgagatggcacctgcggcatcgcgccaggtaatcaatcagaagaccggcgagcctgtcgaacagtatgcagaactcatcgcctacgtaaccgaccgcccaggccatgaccgccgttatgccatcgatgcacgcaagatcgagcgggagctcggctggaaacctgccgaaaccttcgagacgggcattcgaaagacagtcgcttggtacttggccaaccagaaatgggtaaaaggtgtcatggacggcagctaccgtgactgggtggcacaacaatacggggcaaataaagcgtga

SEQ ID NO: 110706 - protein, 366 aa, Pseudomonas putida KT2440
MILVTGGAGFIGSNFVLQWCAHNEEPVLNLDALTYAGNLANLQPLEGNPQHRFVQGNICDAALLTKLFAEHRPRAVVHFAAESHVDRSITGPEAFVETNVMGTFRLLEAARAHWNSLEGAEKEAFRFLHVSTDEVYGTLGPNDPAFTETTPYAPNSPYSASKAASDHLVRSYFHTYGMPVLTTNCSNNYGPLHFPEKLIPLMIVNALAGKALPVYGDGQQIRDWLYVEDHCSGIRRVLEAGAFGETYNIGGWNEKANIDIVRTLCSLLDEMAPAASRQVINQKTGEPVEQYAELIAYVTDRPGHDRRYAIDARKIERELGWKPAETFETGIRKTVAWYLANQKWVKGVMDGSYRDWVAQQYGANKA

SEQ ID NO: 110707 - DNA, 966 bp, Pseudomonas putida KT2440
  CDS (1)..(966): transl_table=11
atgaaatatctggttgtgggtggtgcgggctacattggctcgcacatggtcaagcacctgctcgccgccggccatgaagtgctggtggcggacctggtctcacctggccccggtatccagtgggccaagctcgacatcgccgacgaagccgcactggatgtgctgtttggcgtgtgtcgcttcgatgcggtgttccacttcgcctcgttcattcaagtgggcgagtcggtcagtgcccccggcaagtactaccagaacaacgtcgcagccaccctttccctgctgcaggccatggtcaatgccggcatcaggcacctggtgttttcttcgagtgccgccgtatacggcaacccgcagtacgtgccgatcgatgaagcacacaccaaggggccgatcaacccgtatgggttgagcaaatggatggtcgagcagattcttgaggacttcgaccgggcctatggtttgaagtcggtaagcctgcgctatttcaatgcagcgggcgctgacccggaaggccagctaggcgagcgtcacgagccggaaacccatctgatcccgttgatcctgcaggctgcatctggccggcgcgaggcggtgacagtgtttggtcgcgactacgacacgccggatggcacctgcatacgcgactacgtgcatgtggcagacctggcggctgcccatgcactggcagtggattatctactggacggtggcgagcgtgccgcgttcaacctgggcaatggcctgggcttttcggtgcagcaggtgatcgatacggcccgggccgtgaccgggcgacagatcactgcccttgacgcacagcgccgcgccggcgacccgccacggctggtggcggatgcgagcaaggccatgcaggtgctgggctggcgccctgcattcgcctcactggagcagattgtgcggcatgcgtggcagtgggagttgcagtatccctggaggcgctga

SEQ ID NO: 110708 - protein, 321 aa, Pseudomonas putida KT2440
MKYLVVGGAGYIGSHMVKHLLAAGHEVLVADLVSPGPGIQWAKLDIADEAALDVLFGVCRFDAVFHFASFIQVGESVSAPGKYYQNNVAATLSLLQAMVNAGIRHLVFSSSAAVYGNPQYVPIDEAHTKGPINPYGLSKWMVEQILEDFDRAYGLKSVSLRYFNAAGADPEGQLGERHEPETHLIPLILQAASGRREAVTVFGRDYDTPDGTCIRDYVHVADLAAAHALAVDYLLDGGERAAFNLGNGLGFSVQQVIDTARAVTGRQITALDAQRRAGDPPRLVADASKAMQVLGWRPAFASLEQIVRHAWQWELQYPWRR

SEQ ID NO: 110709 - DNA, 987 bp, Streptomyces rochei
  CDS (1)..(987): transl_table=11
gtgcgtttgctcgtcaccggcgccgccggattcatcgggtcgacctatgtgcgcaacgtgctcgccggagcctacggcgaggccggcgaagtgcggatcacggcactggacaagctcacctacgcgggcaatcccgccaacctcgccgaggtgcggggccacccggacctgaccttcgtgcagggcgacatctgcgacacggagctgctcgccgacctcgtgccggggcacgacgcggtggtcaacttcgccgcggagagccatgtggaccgctcgatcgcaggtgcggacgacttcgtgcgcaccaacgtcctcggcacccaggccctgctgtccgcggcgcgtgccgcgcgggtgccccggttcgtgcacatctccaccgacgaggtgtacggatcgatcgagtcgggctcctggaccgaggactgcgccctgctggcgaactcgccctacgccgcctccaaggccggggccgacatcctggcgcgcgcctacgcccgtacgtacgggatggacgtgagcgtgacccggtgcagcaacaactacggcccccgccagtaccccgagaagctcatcccgctgttcgtgaccaacctgctggagggcgagcgggtgccgctgtacggggacggcctgaacgtccgggactggctgcacgtggacgaccactgccggggtgtgcagctggtgctggagaagggcagggcgggtcaggcgtacaacatcggcggcggcgaggagctgaccaacctcgaactgacccgcctgctgctggcggagtgcggggccgatccggagcggatcgtccacgtgcccgaccggccgggccacgaccgccgctactgcgtcgacgacagcaggatccgggagctggggtacgccccgcgcgtccccttccgggacggcctggcccacacggtcgagtggtaccgcgacaacccgcagtggtggaagccgctgcgccgtacgccggcggtcgcggtctga

SEQ ID NO: 110710 - protein, 328 aa, Streptomyces rochei
MRLLVTGAAGFIGSTYVRNVLAGAYGEAGEVRITALDKLTYAGNPANLAEVRGHPDLTFVQGDICDTELLADLVPGHDAVVNFAAESHVDRSIAGADDFVRTNVLGTQALLSAARAARVPRFVHISTDEVYGSIESGSWTEDCALLANSPYAASKAGADILARAYARTYGMDVSVTRCSNNYGPRQYPEKLIPLFVTNLLEGERVPLYGDGLNVRDWLHVDDHCRGVQLVLEKGRAGQAYNIGGGEELTNLELTRLLLAECGADPERIVHVPDRPGHDRRYCVDDSRIRELGYAPRVPFRDGLAHTVEWYRDNPQWWKPLRRTPAVAV

SEQ ID NO: 110711 - DNA, 1026 bp, Bordetella parapertussis 12822
  CDS (1)..(1026): transl_table=11
atgacgaatcgctttgagaccacgtgcgcgcagttgcgggcccaaccccagaaatggctggtgaccggctgcgccggcttcatcggctcgaacctgctcgagacgctgctcgggctggaccaggcggtggtggggctggacaacttcgccacggggcaccagcacaacctggacgaggtgcgcgcggcggtgacgcccgagcaatgggcgcgcttcaccttcatcgaaggcgacatccgcgacctggcggcctgccagcgcgccgtgcagggcgtggaccgggtgctgcaccaggccgcgctgggttcggtgccgcgttcgctgaaagacccgatcacgaccaacgaggtcaacatcggcggtttcctgaacatgctggtggccgcgcgcgacgcgcaggtccaggcgttcgtctatgcggcctcgagctcgacctacggcgaccatcccgacctgcccaaggtcgaggagcgcatcggcaatccgctctcgccgtacgcggtgaccaagtacgtcaacgagctgtacgccgacgtgttcgcgcgctcgtacgggttttccagcgtggggctgcgctacttcaacgtgttcggcaagcgccaggacccggacggcgcgtacgcggcggtgattccgaagtggacggcggcgatgatcaagggcgaggacgtcgtgatcaacggcgacggccagaccagccgcgacttctgcttcgtggagaacgcggtgcaggccaacctgctggcggcgatggccgcaccggaaggcgcgaaccaggtctacaacgtggcgtacaacgcgcgcacgacgctgaccgagctgttcgagcacctgcggcgcgcgctggccgggcagggcgtgtcgtacgagaaggcgccggtgtacgcggaattccgcgccggcgacgtgcgccactcgcaggccgacatcggcaaggccggcaagctgctgggctacgagccggcctacgacatcctgcgcgggctggaagccgccatgccctggtacaagcagttcctgcgatga

SEQ ID NO: 110712 - protein, 341 aa, Bordetella parapertussis 12822
MTNRFETTCAQLRAQPQKWLVTGCAGFIGSNLLETLLGLDQAVVGLDNFATGHQHNLDEVRAAVTPEQWARFTFIEGDIRDLAACQRAVQGVDRVLHQAALGSVPRSLKDPITTNEVNIGGFLNMLVAARDAQVQAFVYAASSSTYGDHPDLPKVEERIGNPLSPYAVTKYVNELYADVFARSYGFSSVGLRYFNVFGKRQDPDGAYAAVIPKWTAAMIKGEDVVINGDGQTSRDFCFVENAVQANLLAAMAAPEGANQVYNVAYNARTTLTELFEHLRRALAGQGVSYEKAPVYAEFRAGDVRHSQADIGKAGKLLGYEPAYDILRGLEAAMPWYKQFLR

SEQ ID NO: 110713 - DNA, 1026 bp, Bordetella bronchiseptica RB50
  CDS (1)..(1026): transl_table=11
atgacgacacgatacgaggatttgcgcgcgaccctgccgcgtgcgccggaaaaatggctggtgaccggctgcgccggcttcatcggctcgaacctgctcgagacgctgctcgggctggaccaggcggtggtggggctggacaacttcgccacggggcaccagcacaacctggacgaggtgcgcgcggcggtgacgcccgagcaatgggcgcgcttcaccttcatcgaaggcgacatccgcgacctggcggcctgccagcgcgccgtgcagggcgtggaccgggtgctgcaccaggccgcgctgggttcggtgccgcgttcgctgaaagacccgatcacgaccaacgaggtcaacatcggcggtttcctgaacatgctggtggccgcgcgcgacgcgcaggtccaggcgttcgtctatgcggcctcgagctcgacctacggcgaccatcccgacctgcccaaggtcgaggaccgcatcggcaatccgctctcgccgtacgcggtgaccaagtacgtcaacgagctgtacgccgacgtgttcgcgcgctcgtacgggttttccagcgtggggctgcgctacttcaacgtgttcggcaagcgccaggacccggacggcgcgtacgcggcggtgattccgaagtggacggcggcgatgatcaagggcgaggacgtcgtgatcaacggcgacggccagaccagccgcgacttctgcttcgtggagaacgcggtgcaggccaacctgctggcggcgatggccgcaccggaaggcgcgaaccaggtctacaacgtggcgtacaacgcgcgcacgacgctgaccgagctgttcgagcacctgcggcgcgcgctggccgggcagggcgtgtcgtacgagaaggcgccggtgtacgcggaattccgcgccggcgacgtgcgccactcgcaggccgacatcggcaaggccggcaagctgctgggctacgagccggcctacgacatcctgcgcgggctggaagccgccatgccctggtacaagcagttcctgcgatga

SEQ ID NO: 110714 - protein, 341 aa, Bordetella bronchiseptica RB50
MTTRYEDLRATLPRAPEKWLVTGCAGFIGSNLLETLLGLDQAVVGLDNFATGHQHNLDEVRAAVTPEQWARFTFIEGDIRDLAACQRAVQGVDRVLHQAALGSVPRSLKDPITTNEVNIGGFLNMLVAARDAQVQAFVYAASSSTYGDHPDLPKVEDRIGNPLSPYAVTKYVNELYADVFARSYGFSSVGLRYFNVFGKRQDPDGAYAAVIPKWTAAMIKGEDVVINGDGQTSRDFCFVENAVQANLLAAMAAPEGANQVYNVAYNARTTLTELFEHLRRALAGQGVSYEKAPVYAEFRAGDVRHSQADIGKAGKLLGYEPAYDILRGLEAAMPWYKQFLR

SEQ ID NO: 110715 - DNA, 1023 bp, Synechococcus sp. WH 8102
  CDS (1)..(1023): transl_table=11
atgtcacgtacggtcctggtcaccggtgccgccggatttatcggcgctgcgctctctcagcgactgctggcccgcggcgagcgcgtggtcggtctcgacaacctcaacagctactacgacccggccctcaaacaggcgcgtctgcgtcaggtcgaggccacggcctcgaaaggagcctggcggttcgagccgatctcgcttgaggacggcgatgcgttgacggctctgtttgccgaggagcgtccggatgtggtggtgaatctggctgcccaggcaggggtgcgttactcactggagaacccggcggcctacatccagagcaatctggtggggtttggccacatcctggaaggctgccgtcaccacgacgttggtcacctggtgtatgcctccagcagttctgtgtatggcggcaaccgcaacctgccctttcacgagcgccaaccggtcaaccacccggtaagcctgtatgccgccagcaagaaagccaatgagctgatggcacacacctacagccacctttacggggtgccggccaccggactgcgcttcttcacggtctatgggccatggggacggccggacatggccccgatgctgttcgcccgggcgatccttgcgggtgaaccgatcaaggtgttcaaccatggccggatgcagcgtgatttcacttatatcgatgacatcgtggaaggagtgctgcgctgctgcgataaaccagctacagcaaaccccgatttcgatcccctgcagcctgatcctgcaacggcggcggcgccgcaccgggtgttcaacatcggcaacagccagcccacggagctgttgagtttcatcgaggtgatggagcaggcccttggtcgcgatgcgatcaaagatttccagccgatgcagccaggtgatgtcgtggccacggccgccgacaccaaggcattggaggattgggtgggattcaggccctcaacagcgattgaagctggtgtggcgcagttcgcagagtggtaccggtacttttacggggtctga

SEQ ID NO: 110716 - protein, 340 aa, Synechococcus sp. WH 8102
MSRTVLVTGAAGFIGAALSQRLLARGERVVGLDNLNSYYDPALKQARLRQVEATASKGAWRFEPISLEDGDALTALFAEERPDVVVNLAAQAGVRYSLENPAAYIQSNLVGFGHILEGCRHHDVGHLVYASSSSVYGGNRNLPFHERQPVNHPVSLYAASKKANELMAHTYSHLYGVPATGLRFFTVYGPWGRPDMAPMLFARAILAGEPIKVFNHGRMQRDFTYIDDIVEGVLRCCDKPATANPDFDPLQPDPATAAAPHRVFNIGNSQPTELLSFIEVMEQALGRDAIKDFQPMQPGDVVATAADTKALEDWVGFRPSTAIEAGVAQFAEWYRYFYGV

SEQ ID NO: 110717 - DNA, 1032 bp, Arabidopsis thaliana
  CDS (1)..(1032)
atggcgtctaattcttctaacgggacgacgacgacaaagccaccacctatgccgtctcctctgcgtaattccaagttttttcagtcgaatatgaggatcttggtgaccggaggagctggattcattggttcacatctcgttgataaattgatgcaaaacgaaaagaatgaagtaatcgttgcggataattacttcacaggatcaaaagacaatctcaagaaatggattggtcatccaagatttgagctaattcgtcatgatgtgactgaacctcttttcgtcgaggttgatcaaatctaccatttagcatgtcccgcttctccaattttctacaaatacaaccccgttaagacgataaaaacaaatgtgattggcacacttaacatgttaggactagctaagcgagttggagcaagaattttacttacttccacatctgaagtgtatggtgatcctttggttcaccctcaaaccgagagctattggggaaatgtaaacccgatcggtgttagaagctgttatgatgaaggaaaacgtgttgccgagactcttatgtttgattaccataggcaacatgggattgagatacgcatagcgaggatattcaacacatatggtcctcgtatgaacattgatgatggtcgcgttgtgagcaacttcattgctcaggctctcaggggagaagctctgactgttcagaaaccgggaacacaaacccgcagtttctgttatgtttcggacatggtggaaggtctaatgcgtttgatggaaggagaccaaaccggaccgataaacataggcaatccaggcgaattcacgatggttgagctcgctgagacggttaaagagcttattaaaccggacgtggagataaagatggtagagaacacacctgatgatccaaggcagaggaaaccagacataagcaaagctaaagaagttcttggttgggaaccaaaggtgaagctacgtgaggggcttcctcttatggaagaagattttcgtctaaggcttggtgttccgaagaagtaa

SEQ ID NO: 110718 - protein, 343 aa, Arabidopsis thaliana
MASNSSNGTTTTKPPPMPSPLRNSKFFQSNMRILVTGGAGFIGSHLVDKLMQNEKNEVIVADNYFTGSKDNLKKWIGHPRFELIRHDVTEPLFVEVDQIYHLACPASPIFYKYNPVKTIKTNVIGTLNMLGLAKRVGARILLTSTSEVYGDPLVHPQTESYWGNVNPIGVRSCYDEGKRVAETLMFDYHRQHGIEIRIARIFNTYGPRMNIDDGRVVSNFIAQALRGEALTVQKPGTQTRSFCYVSDMVEGLMRLMEGDQTGPINIGNPGEFTMVELAETVKELIKPDVEIKMVENTPDDPRQRKPDISKAKEVLGWEPKVKLREGLPLMEEDFRLRLGVPKK

SEQ ID NO: 110719 - DNA, 1059 bp, Nasonia vitripennis
  CDS (1)..(1059)
atggcagatgaaacacgaaatatactggtgacgggaggtgctggttatattggttcacatacggttttggaacttcttaacgctgactttcaggtggtggttattgataaccttagcaatgcctttcaaggaaaaggaagtgagaagccagaatgtatcttacgagtggaaaaattgactaataaacaagtgatatttattaactgtgacataacaaataagcaggctatatctgatatttttaaaaagtacaaattcttttgtgtcatacattttgctgctttgaaagctgttggtgaatcatgcacaataccactagagtattacaaagtaaatgttggtggtacattgaatctcttagaagtcatgagagaaaacaatgtcaaacgattcatatattcaagcagcgctactgtatatggtgtacctgaaaaattacctttaactgaagatatgaaaactggtgactgcacaaacccttatggaaaaactaaatttatgatggaagaaattttaaaagatctctgtaattctgataagacttggtctgtcatatcactaagatatttcaatccagtgggtggtcatccctctggtgaaattggagaagatccaaatggaattcctaataatttaatgccatttattgctcaagtatctgtaggaaaaagagaatttctttctgtatatggcaatgactatgatacaccagatgggactggcgttagagactatattcatataatggatttagcatcaggtcacatgaaagcattgatttatcaaaaaacgaaaaatcctactggtttccaggcaatcaatttaggaagtggcaatggttattcggtgcttgaagtgataaatgcctttgaaaaagcatctggcaaaaagattccatataaaatagtagaacgaaggccaggagatatagcatcaagttatgctgatgccaaattagccaaacaactattagactgggttgcagttaaaaatatcgacgatatgtgtgcagacacatggagatggcaacaaaaaaatccaaacggctttagcaattga

SEQ ID NO: 110720 - protein, 352 aa, Nasonia vitripennis
MADETRNILVTGGAGYIGSHTVLELLNADFQVVVIDNLSNAFQGKGSEKPECILRVEKLTNKQVIFINCDITNKQAISDIFKKYKFFCVIHFAALKAVGESCTIPLEYYKVNVGGTLNLLEVMRENNVKRFIYSSSATVYGVPEKLPLTEDMKTGDCTNPYGKTKFMMEEILKDLCNSDKTWSVISLRYFNPVGGHPSGEIGEDPNGIPNNLMPFIAQVSVGKREFLSVYGNDYDTPDGTGVRDYIHIMDLASGHMKALIYQKTKNPTGFQAINLGSGNGYSVLEVINAFEKASGKKIPYKIVERRPGDIASSYADAKLAKQLLDWVAVKNIDDMCADTWRWQQKNPNGFSN

SEQ ID NO: 110721 - DNA, 1110 bp, Magnaporthe grisea 70-15
  CDS (1)..(1110)
atggtccgcggaacagttctgattacgggtggcacgggctacattggctcgttcacctcgctcgcgctactcgagaatgactacgatgtcgtaatcgtcgataacctctataactcctctgccgttgccatcgaccgcatcgagcttatctgcggcaagcgacccgccttccacaatgtcgacataaccgacgaggccgcgctcgacaaggtcttcgatgcgcatcccgagattgacagcgtcatccactttgccgccctcaaggccgtcggcgagtcgggcgagatcccgctcgagtactaccgcgtcaatgttggtggcagcatttcgctcctgcgctccatgcaaaagcacaacgtatgcaacattgtcttctcgtcttcggccaccgtctacggtgacgcgacccgcgtgccgaacatgatcccgatcccggagcactgcccaatcggcccgaccaacacatacggccggacaaagtcgacgatcgaggatgtcatctcggaccatgtcaacgcccagcgcaacaacctgaagaaggcagataagccattcgacatgtggaacggcgctttgctgcgctacttcaacccatgcggtgcacaccccagcggtctgatgggtgaggaccctcagggggtgcctttcaatctcctgccgctgctcggtcaggttgcgactggccagagggagaagcttctcgttttcggtgatgactactcatcccgcgacggcaccgccatccgagactacatccacgtcctcgaccttgccaaaggccacctcgcagctctcaactacctccgagacaacaagcctggtgtcaaggcatggaacctgggttccggtcgcggcagcaccgtctttgagatgatcaaggcctttagctctgtcgtgggtcgtgacctgccgtatgaggtcgtgcctcgccgccagggtgacgtgctggacctcacggccaacccggcgcttgccaacaaggagctcggttggaagacggagctccgtatggaggatgcgtgccaggacctgtggaaatgggtcaagaacaacccccagggctacaggcaggatcctccccaggagtttgttgcagcgctcaagaagtga

SEQ ID NO: 110722 - protein, 369 aa, Magnaporthe grisea 70-15
MVRGTVLITGGTGYIGSFTSLALLENDYDVVIVDNLYNSSAVAIDRIELICGKRPAFHNVDITDEAALDKVFDAHPEIDSVIHFAALKAVGESGEIPLEYYRVNVGGSISLLRSMQKHNVCNIVFSSSATVYGDATRVPNMIPIPEHCPIGPTNTYGRTKSTIEDVISDHVNAQRNNLKKADKPFDMWNGALLRYFNPCGAHPSGLMGEDPQGVPFNLLPLLGQVATGQREKLLVFGDDYSSRDGTAIRDYIHVLDLAKGHLAALNYLRDNKPGVKAWNLGSGRGSTVFEMIKAFSSVVGRDLPYEVVPRRQGDVLDLTANPALANKELGWKTELRMEDACQDLWKWVKNNPQGYRQDPPQEFVAALKK

SEQ ID NO: 110723 - DNA, 999 bp, Gibberella zeae PH-1
  CDS (1)..(999)
atgactatcgttacgacaatccgcagctccatacccagacgatccatcttggttacaggtggtgcaggcttcatcggctcccaccttgtcgaagcgctgctcgccgacggttactggaaggttgtcgttatcgacaacttcgatgagttctactctccagagatcaagcgggccaacctcgcaggccttctacagcaccccaaccttacagtctacgaggccgatattcgcgatataccagccttaacggccatcttcgctgataacgacttttctgttgtcgttcatctcgctgctcgcgcaggagttctcccctctcttcaagttccagacctttactttgacgtcaatgtcactggtacgatgaacctgctgcaatgctgcaaagactttggtgtcaagcaatttgtctttggatcatcctccagtgtctatggcttgggagcaaaggcccccttctccgaatctcagaaaactacacagcccatctccccatatgccgcatcaaaatcagcaggcgaactactgtgccacacctggtctcatctctaccagatacgctgtgtctgtctgagattcttcaccgtctacggtccccgtcaacgcccagatcttgccatccacaagttcaccagactcatccaccagggcaagccaatcccacttttcggtgatgggtcatccatcagagactacacctatatcgacgatatcatcgatggtatcttcggtgctatcgactatgaaggctcaatgtttgaggccatcaacctcggagagtcacagactatcacgctgatcgacctcatcagtgcaatcgagggaacattgggacgtaaggcgcttattgattggcgaggggaacaacctggagacatgccgcttacctatgcggacatttccaaggcgggctcaatcatcgggtacaaacccaagactcaggtgcagcagggcattgtcaagtttgttgcgtggtatctaaaccacaacgaggtttag

SEQ ID NO: 110724 - protein, 332 aa, Gibberella zeae PH-1
MTIVTTIRSSIPRRSILVTGGAGFIGSHLVEALLADGYWKVVVIDNFDEFYSPEIKRANLAGLLQHPNLTVYEADIRDIPALTAIFADNDFSVVVHLAARAGVLPSLQVPDLYFDVNVTGTMNLLQCCKDFGVKQFVFGSSSSVYGLGAKAPFSESQKTTQPISPYAASKSAGELLCHTWSHLYQIRCVCLRFFTVYGPRQRPDLAIHKFTRLIHQGKPIPLFGDGSSIRDYTYIDDIIDGIFGAIDYEGSMFEAINLGESQTITLIDLISAIEGTLGRKALIDWRGEQPGDMPLTYADISKAGSIIGYKPKTQVQQGIVKFVAWYLNHNEV

SEQ ID NO: 110725 - DNA, 1062 bp, Apis mellifera
  CDS (1)..(1062)
atgacaaataaatcctggaatgtattggtgacgggaggtgctgggtacattggttcacatacagtattggaattattagaagcagattttgaggtggtggtaatagacaaccttagtaatgcttataaaggaaatgatgatataaaaccagaatgtttattacgagtagaaaaattaacaaatagaaaaattatatttgttcaatgtgatgtaacaaatttggatgaattacaaaaagtatttgaaaagtacaagtttcattctgttatacattttgctgctttaaaagctgtaggtgaatcttgtgaaaaacccttagaatattataaaacaaatgtttgtggaacgttgaatttattaaaagttatgagagaattcaatgtgaaatgttttatttattcaagtagtgccacagtttatggcattccagaaaaactaccattagttgaagatatgaaaactggtgattgtactaatccttatggaaaaacaaaatatatggttgaagaaattttgaaagatctttgcatttcagataagacctggtctgttatatctttgagatattttaatccagttggagctcattcttctggattaattggagaagatcctaatggaataccaaataatttaatgccatatattgctcaagtatctgtaggaaaaagagaaattttatatgtttatgggaatgattatgatactcctgatggaacaggcatacgagattatattcacattacggatttagctatgggccatgtaaaagcaatgatttatcaaaaaattcgtaattttacaggatttaaagtgtttaatttaggtactggaaaaggatattcagtattagaagttatacaagcatttgaaaaagcatcaggacaaaatataccatataagataatcgaacgtagaccaggtgatatctctgtaagttatgcagatgctagtttagctaataaagaactaggttggcaagctactaaaaatatagacaatatgtgtttagatacatggagatggcaacaaaataatccaaatggatataaatcttcataa

SEQ ID NO: 110726 - protein, 353 aa, Apis mellifera
MTNKSWNVLVTGGAGYIGSHTVLELLEADFEVVVIDNLSNAYKGNDDIKPECLLRVEKLTNRKIIFVQCDVTNLDELQKVFEKYKFHSVIHFAALKAVGESCEKPLEYYKTNVCGTLNLLKVMREFNVKCFIYSSSATVYGIPEKLPLVEDMKTGDCTNPYGKTKYMVEEILKDLCISDKTWSVISLRYFNPVGAHSSGLIGEDPNGIPNNLMPYIAQVSVGKREILYVYGNDYDTPDGTGIRDYIHITDLAMGHVKAMIYQKIRNFTGFKVFNLGTGKGYSVLEVIQAFEKASGQNIPYKIIERRPGDISVSYADASLANKELGWQATKNIDNMCLDTWRWQQNNPNGYKSS

SEQ ID NO: 110727 - DNA, 1131 bp, Aspergillus nidulans FGSC A4
  CDS (1)..(1131)
atgccttctggatctgtccttgtcaccggtggaaccggctacattggctccttcactaccctcgccctgctcgaggccgggtacaaggttgtggtcgccgataacctgtacaattcctccgccgaggcccttaaccgcatcgagttgatctcgggcaagaaggccgagttcgcacagctcgatgtcactgacgaagcagccttcgacaaggtgttcgaagctcaccctgacatcgacagtgttatccactttgcggcgttgaagttgtaccctctcaaggccgtcggtgaatccggcgagaagcccctcgactactaccacgtcaatgtttacggcacaatctgcctcttgcgctcaatggtccgccacaacgtcacgaacattgtcttctcctcctccgccaccgtttacggcgatgccactcgctttcccgacatgatccccatccccgagcactgcccgctcggcccgacaaacccctacggaaacaccaagttcgccattgagctggccatcacggacgttatcaacgcccagcgcaacaacgcgaagaaggccggtaacgaaactgaggctgctaagtggaacggcgcgctgctgcgctacttcaaccccgctggtgcccaccccagcggtatcatgggcgaggacccgcagggtgtgccgtacaacctgctgccgctgcttgcgcaggttgccacgggcaagcgcgagaagcttcttgttttcggagacgactacgcctctcacgacggtaccgccattcgcgactacatccacattcttgatctcgccgatggtcacctcaaggcgctgaactacctccgcgccaataaccccggcgtgcgcgcctggaaccttggcactggccgaggcagcactgtctacgagatgatccgcgccttctcaaaggctgttggccgcgacttgccctacgaggtcgcgccccgccgtgccggtgacgtccttaacctaacttctaacccgacccgcgccaacaccgagctgggctggaaggcacagcgcaccctcgagcaggcatgtgaggatctgtggctgtggaccaagaacaacccccagggatacaggcaacagccccctgctgagctgctggaacagctcaagaaataa

SEQ ID NO: 110728 - protein, 376 aa, Aspergillus nidulans FGSC A4
MPSGSVLVTGGTGYIGSFTTLALLEAGYKVVVADNLYNSSAEALNRIELISGKKAEFAQLDVTDEAAFDKVFEAHPDIDSVIHFAALKLYPLKAVGESGEKPLDYYHVNVYGTICLLRSMVRHNVTNIVFSSSATVYGDATRFPDMIPIPEHCPLGPTNPYGNTKFAIELAITDVINAQRNNAKKAGNETEAAKWNGALLRYFNPAGAHPSGIMGEDPQGVPYNLLPLLAQVATGKREKLLVFGDDYASHDGTAIRDYIHILDLADGHLKALNYLRANNPGVRAWNLGTGRGSTVYEMIRAFSKAVGRDLPYEVAPRRAGDVLNLTSNPTRANTELGWKAQRTLEQACEDLWLWTKNNPQGYRQQPPAELLEQLKK

SEQ ID NO: 110729 - DNA, 1200 bp, Ustilago maydis 521
  CDS (1)..(1200)
atgccatcgcaaaagcccaggattcttatccccggtggtgccggttacatcggatcgcacgttgcgctcgtcacccttctcactcgcaagtaccgagtcactgaaagcatgctcgaccgtatcgcgatggtggatagatggctgatgaaatcacgttgtgcttccactcgatcagttctcgacaactaccacaatgctttcccaaccgccgtgaagcgtctcgaacagatcgccatcgacgagcttcccgaaggtgcttctcagcaggacaaggatgactgcaaggtcgatgtcttcaaaggcgacctccgcagtaagcaagacattgctaaagtgttcggaagctatagcggcgatgacaagatctggggtgtcattctctgcgccgccctcaaagctgtcggcgaatcttctgaaatccctatcgactactacgatgtcaatgtcggtggactcgtcaacctgcttaaagtgatgcacgacaacggttgcaaccgcctcgtctactcctcctcggcgaccgtctacggcacccctcccaaggtgcccatccccgaatccacgcgtctggcccccgagtctgtttacggccgtacaaaatggatgagcgagatcatcatccgcgacgtttgcgatgcctacccagagttccgtgcgattggcttgcgatactttaaccctgccggtgcacacaagtccggaaagatcggcgaagacccccgaggcaagcctggcaacctcctgcccctactcgcacaaatggctgtgggcaagtaccgcgaaggcggtctcaaggtgttcggtaacgactaccccactccggacggcacctgcgttcgcgactacattcacatcgaagaccttgccggtggccacgtcaatgccgtcgaggcgcttgaccgcgacgagatctttgccgaggacaagatagagactaagggcaagtaccgcgctttcaacttgggcaaaggtgtaggcatgtctgtgctcaacatggttgatgctatgaagaaggtttctggctacgagttcccctactcgatcgtcgaaaggcgaacgggtgacgtgcccgatctgaccgccgacccgtcgctagctgaaaaggagctgggcttcaaggcaaccaagaacctcgatgatatggcgcaagatctgtggcgatggcagagcggaaaccctcagggctatggcgagcagtag

SEQ ID NO: 110730 - protein, 399 aa, Ustilago maydis 521
MPSQKPRILIPGGAGYIGSHVALVTLLTRKYRVTESMLDRIAMVDRWLMKSRCASTRSVLDNYHNAFPTAVKRLEQIAIDELPEGASQQDKDDCKVDVFKGDLRSKQDIAKVFGSYSGDDKIWGVILCAALKAVGESSEIPIDYYDVNVGGLVNLLKVMHDNGCNRLVYSSSATVYGTPPKVPIPESTRLAPESVYGRTKWMSEIIIRDVCDAYPEFRAIGLRYFNPAGAHKSGKIGEDPRGKPGNLLPLLAQMAVGKYREGGLKVFGNDYPTPDGTCVRDYIHIEDLAGGHVNAVEALDRDEIFAEDKIETKGKYRAFNLGKGVGMSVLNMVDAMKKVSGYEFPYSIVERRTGDVPDLTADPSLAEKELGFKATKNLDDMAQDLWRWQSGNPQGYGEQ

SEQ ID NO: 110731 - DNA, 1122 bp, Cryptococcus neoformans var. neoformans B-3501A
  CDS (1)..(1122)
atgactcagctcaagcgcgtcctcgtcaccggtggcctgggttatattggctcccacgtcgtcgtctctctcctcctgacaggcaaataccagcccattgttattgacaactgccacaactcgtatccagaagctctcaatcgatgcgcggagattgcgcgtgacgagctgggtgctgatgcccctcaaccgatattacacgatctcgatctgagagatgctcccgcgatcgaacaagtgtttgagcagtacgcagcggatggtggcatctgggctgtcatccacttggctgccctcaaggcggtgggcgaatctgcagactttcctctgagttactatagggtgaatgttgccgggtcaatttcgttgttcgagacaatggccaaatactcttgcaacaatctcgtcttctcttcgtccgctacagtctacggcactcctgccactatccctatcccggaaacttccccactgattcccgaatcatgctacggtcgcacaaaagcaatggttgaggaaatcatccacgacttgaccaaagtcggtgccgaagagggcaagcctagtttgagggcagtcagtgtccgatatttcaaccctgcaggagcacacccttctggaaaacttggtgaagaacctcgaggtaaaccaggaaaccttctcccactccttgcgcagatggcagttggccgagaaaaatctcaactcaaggtctttggcacggatttccccacacccgatggtacatgcgtcagagactatctccacatcatggatctcgcccatggccacgttcttgcgcttgacgctcttaccgttccttcatcccaacacaatatcttttctgaaattgatcccaaggatggttactttcgtgcattcaatctcggcagaggacagggtatgagcgtcttgaacatgattgaagcgatgaggaaggcaacagggtttgattatcaatacgagattgtgggaaggaggaaaggagacgtcccagatcttaccgccgacccttctctcgcccgaaaagaactcggttttgtcgcaaaagaagatcttgaatcgatgtgcagagatctctggaacttccaaacaagacatcccaacggctactcctcttag

SEQ ID NO: 110732 - protein, 373 aa, Cryptococcus neoformans var. neoformans B-3501A
MTQLKRVLVTGGLGYIGSHVVVSLLLTGKYQPIVIDNCHNSYPEALNRCAEIARDELGADAPQPILHDLDLRDAPAIEQVFEQYAADGGIWAVIHLAALKAVGESADFPLSYYRVNVAGSISLFETMAKYSCNNLVFSSSATVYGTPATIPIPETSPLIPESCYGRTKAMVEEIIHDLTKVGAEEGKPSLRAVSVRYFNPAGAHPSGKLGEEPRGKPGNLLPLLAQMAVGREKSQLKVFGTDFPTPDGTCVRDYLHIMDLAHGHVLALDALTVPSSQHNIFSEIDPKDGYFRAFNLGRGQGMSVLNMIEAMRKATGFDYQYEIVGRRKGDVPDLTADPSLARKELGFVAKEDLESMCRDLWNFQTRHPNGYSS

SEQ ID NO: 110733 - DNA, 1080 bp, Tribolium castaneum
  CDS (1)..(1080)
atgtcagacgtatcgaccgtttttgtgacagggggcgccggttacatcggcagccactgcattgtcgagcttttaaacgcgggctacgaagtcatcgttgtcgacaatttcgtcaacagtgtcaacgatcctgacggcggatcggtcgctttaaaacgcgtcgaaacaatcactggcaaaaaaatcaccttttacgaatgcgacttgctggacaaaaatgcccttgggaacatcttcgcaaagcacaaaatcgactgcgttatccacttcgctgccatcaaatccgtgggcgaatccatggaatatccgctcctctactacaagaacaacctcatcgggatgctcaacctgctcgagatcatggaacaattcgacatctaccagctagtcttttccagttcatgcacggtttacggcgaacccacttatctccccatcaccgaacagcactcagttggccacaatatcacgaatgtttacggaaaaaccaaatatttcatcgaggaaatgctccaagacattacacatgccaacagcaaatggaacatcatagcactgcgatatttcaatcctttgggggcgcattcgtccggcttgatcggggaagaccccataaaaccgttcgccaacatcatgcccttgatatcgcaagtggccatgaaacggttaccggttttaaccattttcggcggcgattataacacggacgatgggacaggaattagggattacatccatgtcatggacttggcaagtggacacgtggcagcccttaatttattgaaacgttcacaccaaaattataaggtctacaatttgggtacaggccagggcgtttcagtcctacaacttgtccaaacgttcgaaaaagtcaccggcaccgtagtaccttacaaaatcgtcgaaagacgcgaaggtgacatttcagtaatgtacgcaaacgccgaactggccgaaaaggaactgggttggaagtcaaaacacactctagacgagatgtgtgccgatttctggcggtggcaaacgatgaacccgaccggataccgcacccagtcaaaaataacaaacggacatcattaa

SEQ ID NO: 110734 - protein, 359 aa, Tribolium castaneum
MSDVSTVFVTGGAGYIGSHCIVELLNAGYEVIVVDNFVNSVNDPDGGSVALKRVETITGKKITFYECDLLDKNALGNIFAKHKIDCVIHFAAIKSVGESMEYPLLYYKNNLIGMLNLLEIMEQFDIYQLVFSSSCTVYGEPTYLPITEQHSVGHNITNVYGKTKYFIEEMLQDITHANSKWNIIALRYFNPLGAHSSGLIGEDPIKPFANIMPLISQVAMKRLPVLTIFGGDYNTDDGTGIRDYIHVMDLASGHVAALNLLKRSHQNYKVYNLGTGQGVSVLQLVQTFEKVTGTVVPYKIVERREGDISVMYANAELAEKELGWKSKHTLDEMCADFWRWQTMNPTGYRTQSKITNGHH

SEQ ID NO: 110735 - DNA, 1026 bp, Desulfovibrio vulgaris subsp. vulgaris str. Hildenborough
  CDS (1)..(1026): transl_table=11
atgagcacgttcgactccgtcctgcaggacatcaacgccagcccgcgcacatggcttgtcacgggcgtagccgggttcatcggctccaacctgctggagaccctgctcaggcagggacagcgcgtggtgggcctcgacaatttcctcaccggctaccagcgcaacctcgacatggtgcgcgacctcgtgggcgaagagcgttgggcgtcgttccgcttcatcgagggcgacatccgcgacctcgccacctgccacgaagcctgcaagggcgtcgaccatgtgctgcatcaggcggccctcgggtcggtaccgcgctccatcgacgaccccatcctctccaacgagtgcaacatcaccggtttcgtcaacatgctggtggccgcccgtgatgccggcgccaagagcttcgtctacgcggcgtccagttccacctacggtgacgaaccgacgctgcccaaggtcgaggacatcatcggcaagccgctttcgccctacgccgtcaccaagtacgtcaacgaactctacgccgacgtgttcgcgcgctgctacggcttcaccgccatcgggctgcgctacttcaacgtcttcgggcagcgccaggaccccttcggtgcctacgcagccgtcatcccccagtggttcgccagcctgctgcgcggcgagaccgtgttcgtgaacggcgacggcgagaccagccgcgacttctgctacatcgacaacgtggtgcaggccaacatcctcgcttcgctggcccctgccgaagcacgcgacaaggtgtacaacgtggccttcggccagcgcaccacactgaacgaactcttcgacctcattcgcgaagaggtggtgcgtcacaagcccgaagccgccggggccacctgcgtgcatcgcgacttccgcgcgggagacgtgcgtcactcgctggccgacatcacccgcgcacagacgcttctgggctacgccccggtgtacgacgtgcgcgaggggctgcgactggctggcgactggtacgccgccaacctgaagtag

SEQ ID NO: 110736 - protein, 341 aa, Desulfovibrio vulgaris subsp. vulgaris str. Hildenborough
MSTFDSVLQDINASPRTWLVTGVAGFIGSNLLETLLRQGQRVVGLDNFLTGYQRNLDMVRDLVGEERWASFRFIEGDIRDLATCHEACKGVDHVLHQAALGSVPRSIDDPILSNECNITGFVNMLVAARDAGAKSFVYAASSSTYGDEPTLPKVEDIIGKPLSPYAVTKYVNELYADVFARCYGFTAIGLRYFNVFGQRQDPFGAYAAVIPQWFASLLRGETVFVNGDGETSRDFCYIDNVVQANILASLAPAEARDKVYNVAFGQRTTLNELFDLIREEVVRHKPEAAGATCVHRDFRAGDVRHSLADITRAQTLLGYAPVYDVREGLRLAGDWYAANLK

SEQ ID NO: 110737 - DNA, 1032 bp, Acinetobacter sp. ADP1
  CDS (1)..(1032): transl_table=11
atgacagcttatcaaaaacaatgtatcacattgcaggccgcacccaagacttggttgattacaggcgttgcagggtttattggctcaaatttgcttgagacactgcttaagcttgatcaacgcgtgattgggctagataactttgccacagggcaccagcacaatctggatgaagttcaaggtttggtgagtcgcgagcagtggaataattttaagtttattcgcggtgatatctgtcagttgcaggactgtcaggctgcatgtgaaggcgtggattatgtactgcatcaggctgcactgggttctgtgccacgctcattagtcgacccgattacgaccaatagcgtgaacattggcggcttcttaaatatgctggtggctgcgcgtgatgcacaagtcaaaagttttacctatgctgccagtagctccacttatggtgaccatcctgccttgccaaaactggaagatcatattggcaaaccgctttcaccgtatgcggtcaccaaatatgttaatgagctgtatgccgatgtatttgcacgcagttatggcttttactgtattggactgcgttactttaatgtatttgggcagcgtcaggacccaaatggtgcctatgcagcggtcatcccaaaatggaccgcagccatgattcagggcgaggatgtttttatcaatggtgatggtgaaaccagtcgcgatttctgttttatcgaaaatacggttcaggccaatcttttggcagccacaacgcaagatgcagccgctaaaaatcaggtgtataacgtggcggtgggggatcgaaccacacttaaccagttatttgccacactacaaagtgctctggctgaaaatgggattcattacaacaagcctgcggtatatcgtgagtttcgtgcaggtgatgtgcgccattcacaggctgatattggcaagattagtcagttactggggtatcaaccagaatacagatttgcgcaaggggttcataaagccatgcattggtatgtgcaggacctgacctcagcctga

SEQ ID NO: 110738 - protein, 343 aa, Acinetobacter sp. ADP1
MTAYQKQCITLQAAPKTWLITGVAGFIGSNLLETLLKLDQRVIGLDNFATGHQHNLDEVQGLVSREQWNNFKFIRGDICQLQDCQAACEGVDYVLHQAALGSVPRSLVDPITTNSVNIGGFLNMLVAARDAQVKSFTYAASSSTYGDHPALPKLEDHIGKPLSPYAVTKYVNELYADVFARSYGFYCIGLRYFNVFGQRQDPNGAYAAVIPKWTAAMIQGEDVFINGDGETSRDFCFIENTVQANLLAATTQDAAAKNQVYNVAVGDRTTLNQLFATLQSALAENGIHYNKPAVYREFRAGDVRHSQADIGKISQLLGYQPEYRFAQGVHKAMHWYVQDLTSA

SEQ ID NO: 110739 - DNA, 1038 bp, Desulfotalea psychrophila LSv54
  CDS (1)..(1038): transl_table=11
atgacaagataccaagaggtacaacaggaattaaaagatagccccaagacctggcttatcacaggtgttgcaggatttattggctctaaccttttagagactcttcttggcctggggcaaaaagttgtgggtctcgataattttgttacaggataccagcataaccttgatgaagttgaaggggcggtgacagatgctcaatggcaaaactttcgttttattgaaggggatatttgtagtcttgatgcctgccaagaagcctgtcagggcgttgactatgtgctccagcaggcagctcttggttctgtgcctcgttccattgttgacccgattaccaccaacaataccaatatcagtgggtttttgaatatgcttgtggcggctcgtgatgctgaggtgaaaagctttacctatgccgcctccagctctacctatggtgaccacccagccctgcctaaggtagaggagaatataggtaatcccctctctccctatgctgtaaccaaatatgtcaatgagctctacgcctctgtctttgccagaacctatagttttaagaccataggtcttcgctactttaatattctgggtaaacgtcaggatcccaatggtgcctatgcggctgtcattcccctctggactgcggccatgattaatgatgaaactgtttttatcaatggtgatggagagaccagccgtgatttttgctttatagagaatgcagtacaggcaaatatccttgctgcaacagcgacagaagaggctagggacaatgtctacaatgttgccgttggcgataggacaacactcaatgaactgttcaacctcataaagcataatcttgcagatcatggcatagtctataacctagatccgagctatcgtgactttcgtgcaggtgatgtgcggcattctcaggcagataccactaagataaaaaggcttttgggatatagtccacagtataaaattggtgcgggaatagagaaggctatgggctggtatgtgcagagtctttccgtctccgggcataaataa

SEQ ID NO: 110740 - protein, 345 aa, Desulfotalea psychrophila LSv54
MTRYQEVQQELKDSPKTWLITGVAGFIGSNLLETLLGLGQKVVGLDNFVTGYQHNLDEVEGAVTDAQWQNFRFIEGDICSLDACQEACQGVDYVLQQAALGSVPRSIVDPITTNNTNISGFLNMLVAARDAEVKSFTYAASSSTYGDHPALPKVEENIGNPLSPYAVTKYVNELYASVFARTYSFKTIGLRYFNILGKRQDPNGAYAAVIPLWTAAMINDETVFINGDGETSRDFCFIENAVQANILAATATEEARDNVYNVAVGDRTTLNELFNLIKHNLADHGIVYNLDPSYRDFRAGDVRHSQADTTKIKRLLGYSPQYKIGAGIEKAMGWYVQSLSVSGHK

SEQ ID NO: 110741 - DNA, 1032 bp, Azoarcus sp. EbN1
  CDS (1)..(1032): transl_table=11
atgatcgcctaccaagccctgcaatccatcctccgcgacgcccccaagacctggctcgtcaccggcgtggccggtttcatcggttcgaacctgctcgaaaccctgctcaagctcgaccagcgcgtggtgggcctcgacaacttcgccaccggccacgcgcgcaacctcgacgaagtgcaaacgctggtcaccgccgagcaatgggcacgctttgcattcgtccgcggcgacatccgccaactggacgactgccgccgcgcctgcgcaggcgtcgactacgtgctgcatcaggccgcgctcggttcggtgccgcgcagcctcgatgacccgatcaccagcaacgccaccaacatcgacggcttcctcaacatgctggtcgccgcgcgcgacgcggaggtcaagagctttacctacgccgccagcagttccacgtacggcgaccatccaagccttccaaaagtcgaagaccttatcggcaaaccgctctcaccctatgccgttaccaagtacgtgaatgagctgtatgcggatgttttcgcgcgctgttacgggttcaatacgattggcctgcgttacttcaatgtcttcggcaaacgacaggatcccaacggcgcctacgctgctgtgatcccgaaatggacgacggcgatgattcagggcgaagacgtcttcatcaacggcgacggcgagacgagccgcgacttttgctttgtcgacaacgccgtacaggccaacctgttggcagcaaccacagtcgatgacgcagcacgggaccagatctacaatgtcgcggtcagcggtcgcacgacgctcaatgagctctacggctacctgcaggaggcgctcggccagaacggcgtcaactatgaccgtacgccgaaataccgggatttccgcgccggcgatgtgcgtcactcccaggcggacatcgacaaggcgaaccgcttgttgggctacgcgccccaattcgacatccgctctggcatccaggcagtaatgccctggtatatcggcctgatcgatccgcgctga

SEQ ID NO: 110742 - protein, 343 aa, Azoarcus sp. EbN1
MIAYQALQSILRDAPKTWLVTGVAGFIGSNLLETLLKLDQRVVGLDNFATGHARNLDEVQTLVTAEQWARFAFVRGDIRQLDDCRRACAGVDYVLHQAALGSVPRSLDDPITSNATNIDGFLNMLVAARDAEVKSFTYAASSSTYGDHPSLPKVEDLIGKPLSPYAVTKYVNELYADVFARCYGFNTIGLRYFNVFGKRQDPNGAYAAVIPKWTTAMIQGEDVFINGDGETSRDFCFVDNAVQANLLAATTVDDAARDQIYNVAVSGRTTLNELYGYLQEALGQNGVNYDRTPKYRDFRAGDVRHSQADIDKANRLLGYAPQFDIRSGIQAVMPWYIGLIDPR

SEQ ID NO: 110743 - DNA, 1035 bp, Psychrobacter arcticus 273-4
  CDS (1)..(1035): transl_table=11
atgatacagacacagacagtctatgaacaaattaagcaaacactggcaaatgagccaaaaacatggctcattacaggggttgcgggtttcataggatctaatctattagaaactttattattgctaaatcaaaaagtagtgggtttagataatttcgcgactgggtttcaacataatttagatgaagtccaaagcttagtgagcgcgcaacaatggcaaggctttacttttatagaaggtgatatacgtaacttagcagattgccaagcggcgtgtattggtatcgattatgtcttgcaccaagcagcgctaggttcggtcccacgctctatcgctgatcctattaatactaatgagactaatatttcaggctttttaaatatgctgaccgcagcacgtgatgcaaaggtcgctagctttacttatgcggctagtagctcaacgtatggtgatcatcctgcattacccaaggtcgaggatgccattggtaagcctttatcaccctatgcagtgactaaatatgtcaatgagctatatgccgatgtatttgctcgtacctatgacttcaatacgattggtctacgttatttcaatatatttggcaaacgccaaacgccagatggtgcttatgccgcagtgatacctaaatggacggcggctatgatagctggtgatgcggtctatatcaatggtgatggtgataccagtcgagactttaactttattgagaatgcggtacaagctaatattttgtcggcgactgctacggatgaagctaaaaacgaggtgtataacgtggcagtgggtggtcgtacaacgctcaatacactatttacggcgctacacgagaatctagccctcaatggggtgaattatactcaagaagcagtatatcgagattttagagcaggagatgtgcgtcatagtcaggctgatattagtaaaatacagaacgcattaggctatgcaccgcagtttgatattgttcagggtattgagaaagctatgccttggtatgttaagtttttaggttga

SEQ ID NO: 110744 - protein, 344 aa, Psychrobacter arcticus 273-4
MIQTQTVYEQIKQTLANEPKTWLITGVAGFIGSNLLETLLLLNQKVVGLDNFATGFQHNLDEVQSLVSAQQWQGFTFIEGDIRNLADCQAACIGIDYVLHQAALGSVPRSIADPINTNETNISGFLNMLTAARDAKVASFTYAASSSTYGDHPALPKVEDAIGKPLSPYAVTKYVNELYADVFARTYDFNTIGLRYFNIFGKRQTPDGAYAAVIPKWTAAMIAGDAVYINGDGDTSRDFNFIENAVQANILSATATDEAKNEVYNVAVGGRTTLNTLFTALHENLALNGVNYTQEAVYRDFRAGDVRHSQADISKIQNALGYAPQFDIVQGIEKAMPWYVKFLG

SEQ ID NO: 110745 - DNA, 1035 bp, Colwellia psychrerythraea 34H
  CDS (1)..(1035): transl_table=11
atgactcaatttaaaaaaattaaacaagaactactcaattcaccaaagacttggcttatcacaggttgtgctggttttattggttcgaatcttttagaaacattacttttattaaatcagaaagttgtcggtttagataacttcgctacgggtcatcagcacaactttgatgaagttcaaacacaggtttcggctgagcaatggcaaaatttttattttgttaaaggtgatattcgccaattggaagactgtcaaaccgcgttaagccattacaaaagtggtgttgattatatccttcatcaagcagcgttaggctcagtacctagatcaattgctgatcccctattaactaactcagcaaatattaccggttttttgactatgttaacggcagcgaaagaaactcaagttaaaagcttcgtttacgctgcatcaagttctacttatggagatcacccagcattacctaaagttgaagatgctatcggtaaaccgctatctccttatgcagtaactaaatatgtaaatgagctttatgccgatgtgtttcataaaacctatggtttgaattgcactggcttacgctactttaatgtttttggtaaaagacaagaccctgacggcgcttatgctgcggtaatccctaagtggacagttgcaatgatcgctaatgaagaattacttataaatggtgatggtgaaacgagtcgcgatttctgttttgttgaaaatgccgtacaagctaatattttagctgcaacggccaatgatgcaggtaaaaaccaagtgtataatgttgccctcggtgatagaacgagtttaaataccttatttaatagcttgaaagttgccttacaagcaaatggtgttgattatcaaaagtcgccaacgtatcaagattttagagcaggtgatgttagacattcacaggctgatatttctaaagcaaaatctttgattggctttgagcctgagtttaaaattcaacaaggtatagacaaagcgatgccttggtatattaaattcttgaattaa

SEQ ID NO: 110746 - protein, 344 aa, Colwellia psychrerythraea 34H
MTQFKKIKQELLNSPKTWLITGCAGFIGSNLLETLLLLNQKVVGLDNFATGHQHNFDEVQTQVSAEQWQNFYFVKGDIRQLEDCQTALSHYKSGVDYILHQAALGSVPRSIADPLLTNSANITGFLTMLTAAKETQVKSFVYAASSSTYGDHPALPKVEDAIGKPLSPYAVTKYVNELYADVFHKTYGLNCTGLRYFNVFGKRQDPDGAYAAVIPKWTVAMIANEELLINGDGETSRDFCFVENAVQANILAATANDAGKNQVYNVALGDRTSLNTLFNSLKVALQANGVDYQKSPTYQDFRAGDVRHSQADISKAKSLIGFEPEFKIQQGIDKAMPWYIKFLN

SEQ ID NO: 110747 - DNA, 1134 bp, Ralstonia eutropha JMP134
  CDS (1)..(1134): transl_table=11
atgtcgacgcccgcctctagaagcgcaccgccacgaagagctcacatggaatccatcacctacgcgaatctgaggaccagtctggttgccaatccgtgcacgtggctggtcacaggagtggccggattcatcggcagcaatttgctggaggccttgctgcgcctgaaccagcgcgtggtcggcctggacaacttcttgaccggccaccgccgcaacctgcatgaagtgcaggcgctggtatctcccgcgcagtgggagaactttcaattcatcgaaggcgacatccgggaccttgaacagtgccggagcgccatgcgcttttgctccggggagcgcgaaggaacgcacggcgcgagcagccatccggtcgatttcgtgctgcaccaggccgcgctgggctccgtgccacgcagcctggaggaccccatcgcgacccacagcgtcaacatcagtggcttcctgaatatgctggtcgctgcgcgcgacgccgaggtacgcgctttcgtttacgcggcgagcagcagcacctacggcgatcaccccggcctgcccaagaccgaagacaggatcggcaagccattgagcccctacgcggtcacgaaatacgcgaacgagttgtatgccgacgtcttcaggcgctgctacagtttgcgtgccatcggactacgctacttcaatgtattcggtccacgccaggatccgaacggggcatacgcagccgtgattccgcggtggatttccgcgttgctgcggcgcgagaccgtctacatcaatggcgacggcgaaacgagccgcgacttctgttacgtggcgaatgctgtgcaggccaacctgcttgccgctctcagctgcagcggagacgcggaaagccagatctacaacgtcgccgtcggtgaccgcaccacgctgagtaccctgttccagcttctgcgcgacgggcttcgtccttatggcatccccgcggacacgcagccgacctatcgggccttccgtgcgggcgacgtgcgccacagccaggctgatatcggcaaggcacaacggttgctcggatatcagcccacccaccgcatcggtgacgggctggccgaggcaatgcactggtatgtgcagttgcaccggacgcaggacgcctga

SEQ ID NO: 110748 - protein, 377 aa, Ralstonia eutropha JMP134
MSTPASRSAPPRRAHMESITYANLRTSLVANPCTWLVTGVAGFIGSNLLEALLRLNQRVVGLDNFLTGHRRNLHEVQALVSPAQWENFQFIEGDIRDLEQCRSAMRFCSGEREGTHGASSHPVDFVLHQAALGSVPRSLEDPIATHSVNISGFLNMLVAARDAEVRAFVYAASSSTYGDHPGLPKTEDRIGKPLSPYAVTKYANELYADVFRRCYSLRAIGLRYFNVFGPRQDPNGAYAAVIPRWISALLRRETVYINGDGETSRDFCYVANAVQANLLAALSCSGDAESQIYNVAVGDRTTLSTLFQLLRDGLRPYGIPADTQPTYRAFRAGDVRHSQADIGKAQRLLGYQPTHRIGDGLAEAMHWYVQLHRTQDA

SEQ ID NO: 110749 - DNA, 927 bp, Methanosarcina barkeri str. Fusaro
  CDS (1)..(927): transl_table=11
ttgaaaactaaaaatgtagtagtcacaggtggtatgggtttcattggttcccatcttactgagaggctacttgaagataatgaagtaacagttattgataacgaatctacaggtaacattgaaaatataagacatctactagaccacgaaaatctaactgtaataaaaggcagtatagtagacttgaatttaacagaaattttcaaagacaaggattatgtttttcatcttgcagcaattcccagtgttccaagaagtgtaaaagatccttttagttcaaataactctaatatcacaggaacactgaatgttctgacagctgcaaaagatactggaattaagaaattaatattttcttcttcctcttcggtgtatggcgatacgccaactctcccaaaaagagaagatatgcccataaacccaatgtctccatatgcaattacaaaagcaaccggagaaatgtactgcagggtttttcaggatctttatgatctgccaacagttagtttaagatatttcaacgtttttggccctcggcaggacccaaattctcaatatgcagctgtaatcccaaaatttataactgcaattctaaacgatgagagtcccgtgatatacggagacggagaacaaagcagagacttcacttttgtcaaaaaagttgttgatgcgaatattctttcctgcgagtctaagaaaactggagttttcaatatagcatgtggtagaagaattacaattaatcagttagtcgattacgttaatgaaatactgggaaagaaaataaaatcgatacatgcagaaccaagaccaggggatattaagcactcattagcagatatatcaaaggctaaagaattcggatataatcccattggtaattttagggatgaacttaagacagtagcagaatggttcctgaactaa

SEQ ID NO: 110750 - protein, 308 aa, Methanosarcina barkeri str. Fusaro
MKTKNVVVTGGMGFIGSHLTERLLEDNEVTVIDNESTGNIENIRHLLDHENLTVIKGSIVDLNLTEIFKDKDYVFHLAAIPSVPRSVKDPFSSNNSNITGTLNVLTAAKDTGIKKLIFSSSSSVYGDTPTLPKREDMPINPMSPYAITKATGEMYCRVFQDLYDLPTVSLRYFNVFGPRQDPNSQYAAVIPKFITAILNDESPVIYGDGEQSRDFTFVKKVVDANILSCESKKTGVFNIACGRRITINQLVDYVNEILGKKIKSIHAEPRPGDIKHSLADISKAKEFGYNPIGNFRDELKTVAEWFLN

SEQ ID NO: 110751 - DNA, 1029 bp, Thiobacillus denitrificans ATCC 25259
  CDS (1)..(1029): transl_table=11
atgtccgcgttcgacgcgctcaaggctgagctcgtggccgaaccgaagacctggctggtgacgggggccgccggcttcatcggcagcaatctcgtcgaagccctgctgaggctcgatcagcgtgtcgtcggcctcgacaacttcgccaccgggcacgaaaagaacctcgcgcaggtgcaggcgagcgtcggccctgcacgctgggcgaacctgagcttcaagcgcggcgacatccgcgacctcatcacctgtcatgacgcctgcaagggcgtcgactacgtactgcatcaggccgccctcggctcggtgccgcgttcgatcgaggatccgatctcgacccacgccgccaacaacaccggctttctcaacatgctggttgcggcgcgcgacgcccgggtcaagcgtttcgtctacgccgcatcgagctcgacctacggcgaccacccggcgctgcccaaggtcgaggacatcatcggcaagccgctgtcgccgtacgcggtgaccaagctcgtgaacgagctctacgccgacgtgttcggccgctgctatggcatggagtcgatcggcctcagatatttcaacatcttcggccgccgtcaggatccccagggcgcgtacgccgccgtcatcccgaaatgggtcgccagcatgatccacggcgagccggtctacatcaacggcgacggcgagaccagccgcgacttctgctacatcgacaacgtcatccaggccaacctgctcgccgcgacgagcccgcacgccgacgccgcgaaccaggtctacaacatcgcggtcggcgaccgcacgacgctcaacgaattgttcgaggcgatccgctcgctgctggcgccgcgcttcccccatctcgccgacgtgaagccggtctaccgtgacttccgctcgggcgacgtgcgtcattcgcttgccgacatttccaaggcgcgcacgcggctcggctacgcgccgagccatcgcatcgcagacggcctcgccgaggcgatggactggtacgtgcaggacctcgcctaa

SEQ ID NO: 110752 - protein, 342 aa, Thiobacillus denitrificans ATCC 25259
MSAFDALKAELVAEPKTWLVTGAAGFIGSNLVEALLRLDQRVVGLDNFATGHEKNLAQVQASVGPARWANLSFKRGDIRDLITCHDACKGVDYVLHQAALGSVPRSIEDPISTHAANNTGFLNMLVAARDARVKRFVYAASSSTYGDHPALPKVEDIIGKPLSPYAVTKLVNELYADVFGRCYGMESIGLRYFNIFGRRQDPQGAYAAVIPKWVASMIHGEPVYINGDGETSRDFCYIDNVIQANLLAATSPHADAANQVYNIAVGDRTTLNELFEAIRSLLAPRFPHLADVKPVYRDFRSGDVRHSLADISKARTRLGYAPSHRIADGLAEAMDWYVQDLA

SEQ ID NO: 110753 - DNA, 942 bp, Carboxydothermus hydrogenoformans Z-2901
  CDS (1)..(942): transl_table=11
ttggcaaaattcctggttaccggtggagcaggttttattggctcgcacatagtggaaaggttggtacgagacggagctgaggtcgttgtcctggatgatttatcaagcggtaaagaggaaaatctctcggaagttttagataaaattacctttattaaaggagatgtccgggatttagatttgataaaaggaattactaaagatgtggattatattttgcacgaagcggcgatggcgtcggtgccggcttctatcgatgaccctttaaaatgccatgaagtaaacgttaccgggacgattaatgtgcttttatctgctaaagaaaacggagtaaaaagagtggtttacgcggcatcttcggcagtatacgggaataatgaaactttacccaagaaagaagatatgtacccggagccgctttctccctatgcggtttcgaagtatgccggagagttatatcttcaagtttttgcccggatttacggtattgaagcggtgggacttcggtactttaatgtttttgggccaaagcaggatcccaattcccagtacgcagcggtgatacctaagtttatcgatgcattgttaaaaggtatgccgccgacaatttacggggatggaatgcagaccagggattttatttttatcgatgatgtggtggaggcaaatatgctggctttaacggcccggggggcttcagggaaggtatttaatattgcctgcggagagcggattagtttaaataggctttacaaagtgataaaagagattatcggggtggatattgagccggtatatgctgaggcaagggttggagatgtccgggactccctggcggatatatctttggcccggaatattttggggtttgagccaaaggtgagtttggaggagggccttaaaaagacggttgagtggcataaacggaatttggaggtttga

SEQ ID NO: 110754 - protein, 313 aa, Carboxydothermus hydrogenoformans Z-2901
MAKFLVTGGAGFIGSHIVERLVRDGAEVVVLDDLSSGKEENLSEVLDKITFIKGDVRDLDLIKGITKDVDYILHEAAMASVPASIDDPLKCHEVNVTGTINVLLSAKENGVKRVVYAASSAVYGNNETLPKKEDMYPEPLSPYAVSKYAGELYLQVFARIYGIEAVGLRYFNVFGPKQDPNSQYAAVIPKFIDALLKGMPPTIYGDGMQTRDFIFIDDVVEANMLALTARGASGKVFNIACGERISLNRLYKVIKEIIGVDIEPVYAEARVGDVRDSLADISLARNILGFEPKVSLEEGLKKTVEWHKRNLEV

SEQ ID NO: 110755 - DNA, 1026 bp, Desulfovibrio desulfuricans G20
  CDS (1)..(1026): transl_table=11
atgtccagatataccgaactgctccgtcaattgcaggaggctccccgcacatggctcataaccggcgtggcgggcttcataggctccaacctgcttgaaaccctgctcagccacggccagaccgtcaccggtcttgataatttcatgaccggacacagaaaaaacctcgacatggtgcgcgacgctgtcactccggaacagtggagccgcttccggttcatcgaaggtgacatccgctcgctggaaacctgccgcgaagcgtgcgccggcgcggactacgttctgcatcaggctgcgctcggttcggtaccgcgttccattgatgacccgctgctgaccaatacctgtaacatcgacggctttgtaaacatgctggtggccgcacgcgatgcggatgtccgcagatttgtctacgccgcttccagctcgacctacggtgacgagcccaacctgcccaagcaggaagaccgcatcggcaggccgctttcgccgtatgccgttacaaagtatgtcaacgaactgtatgcagacgtctttgccagaacctacggcatggaatgcaccggactgcgctatttcaacgtattcggcaaacgtcaggatcctgaaggcgcctatgccgcggtcatcccgctgtggtttgccggtctgctgcgcgaccagccagtattcataaacggtgacggcgaaaccagccgcgacttctgtcacatagacaacactgtgcaggccaacctgctggcggccaccgctcccgatcccgaagcaaccaatactgtatacaacgtggccttcggagaacgcacatcgctgaccgaactgtacggcctcatccgcgaggaagtggcgcgccacaatccgcatgcgtcagaaaaagaagcacagtaccgcgatttccgcgcgggcgacgtgcgccactctctggctgatatcagccgtgcccgcaccctgctgggctatgatccgcagatttccgtccgtcaggggctgcgcatttccggcgactggtacgcagcaaacctgtag

SEQ ID NO: 110756 - protein, 341 aa, Desulfovibrio desulfuricans G20
MSRYTELLRQLQEAPRTWLITGVAGFIGSNLLETLLSHGQTVTGLDNFMTGHRKNLDMVRDAVTPEQWSRFRFIEGDIRSLETCREACAGADYVLHQAALGSVPRSIDDPLLTNTCNIDGFVNMLVAARDADVRRFVYAASSSTYGDEPNLPKQEDRIGRPLSPYAVTKYVNELYADVFARTYGMECTGLRYFNVFGKRQDPEGAYAAVIPLWFAGLLRDQPVFINGDGETSRDFCHIDNTVQANLLAATAPDPEATNTVYNVAFGERTSLTELYGLIREEVARHNPHASEKEAQYRDFRAGDVRHSLADISRARTLLGYDPQISVRQGLRISGDWYAANL

SEQ ID NO: 110757 - DNA, 969 bp, Acidobacteria bacterium Ellin345
  CDS (1)..(969): transl_table=11
atggcgctttacctggtgaccggcgcggccggttttatcggccgttcaattgcgcagcaactgctggcaggtggcgcagcggtgcgcgggatcgacaatttttcgacgggaaaacgcggcaacctcgtaggactcgaagggatggagttcatcgagggagatatcaccgatccggctgcagtggggcgggcttgcgacggagtggaggtcgtgtttcacgaggcagcgctggcttccgttccacgatcggttgccgatccgcttgccaccaaccacgccaacgtgactgggacattgcaattgctgcaggcggcgcatcgtgccggagtgcggcgcgtgatctacgcgggttcgtcgtcggcgtatggcgatacgccgaccctaccgaagaacgaagagatgctggcgaatccgatttcgccctatgcggtgtcgaaactgacaggcgagtactacctgcgttctatgtacgcggtacatggaatggagacggtgacgatccgctacttcaatgtctttggaccctaccaggatccgggctcgcagtactcgggagtgctggcgaaattcattccgcaaatgctgcgcggcgaaacgccgacgattcacggcgatggcgagcagagtcgcgacttcacgtacatcgaaaacgtggtgaaggcgaacattgcgctggcgaatgcgccggcagaacgggtggcaggcgaagtgttcaacgtcgctaccggaactcgcatctcgctgaatgaaaccgtcgcgttgttgcgcgagatgactggatatacgggggcggtgcatcatgggccggagcgcaagggcgacgtgaaacattcgctggcggacatcagcaaggcgaagcgggcgtttggatttgagccgaccgtgatgttccccgcgggattgcatcgcacggtggagtggtatcggaaggcgctggcggaagatgcggtggagacggcacgaaagtag

SEQ ID NO: 110758 - protein, 322 aa, Acidobacteria bacterium Ellin345
MALYLVTGAAGFIGRSIAQQLLAGGAAVRGIDNFSTGKRGNLVGLEGMEFIEGDITDPAAVGRACDGVEVVFHEAALASVPRSVADPLATNHANVTGTLQLLQAAHRAGVRRVIYAGSSSAYGDTPTLPKNEEMLANPISPYAVSKLTGEYYLRSMYAVHGMETVTIRYFNVFGPYQDPGSQYSGVLAKFIPQMLRGETPTIHGDGEQSRDFTYIENVVKANIALANAPAERVAGEVFNVATGTRISLNETVALLREMTGYTGAVHHGPERKGDVKHSLADISKAKRAFGFEPTVMFPAGLHRTVEWYRKALAEDAVETARK

SEQ ID NO: 110759 - DNA, 960 bp, Cytophaga hutchinsonii ATCC 33406
  CDS (1)..(960): transl_table=11
atgaaaagaatattgattacaggcggagcagggtttatcggttcaaacctgacagaagcgttattgaacagaagtgatgttgagctggtgcgtgtactggataatttttcaacaggataccagcacaacatacatgaatttttgacccaccccaaatatgaatttgttgagggcgatatccgtaactatgaagatgtagttaaagcagtagagggaatcgaagtgatcagccatcaggctgcacttggttctgtaccgcgttcgctaaaagatcctatgaccagtaataatgcaaacgtgctgggttccatgaatgtttttcatgctgcaaaagaatcaggtgcagaccgtgtcgtgtacgcatcttcctcttcggtttatggagatgatccgggttcacctaaggaagaagaccgtttgggtaatgtgttgtctccgtacgctgcaagtaagcgcagtattgaactgtatgcaaaggcgttcagcaacgtctatccatttcgttttattgctatgcgttacttcaatgtgtttggtcccaggcaaaatgcgcagggagcatatgctgccgtaatacctcaattcataactgcattattaaatgggcagcaggctacaatcttcggagatggctcccagacacgcgattttacctttattgataatgtattacaaatgaatataaaagcactgtctacagataatgcagatgcgtttaacagatattataatgtagcctgcggctcaacaacttccttgaaccgtgtatatgctatacttgcaggctgtgccggctcagacattaagccccattatacggatccaagacaaggagatataaaagacagtctggccaatatcagtttagcgcaaaagcacattggatataaacccgaaatacagattgaagaaggattaattaaaaccttcgactggtttaaaaagaatcaaggtgaataa

SEQ ID NO: 110760 - protein, 319 aa, Cytophaga hutchinsonii ATCC 33406
MKRILITGGAGFIGSNLTEALLNRSDVELVRVLDNFSTGYQHNIHEFLTHPKYEFVEGDIRNYEDVVKAVEGIEVISHQAALGSVPRSLKDPMTSNNANVLGSMNVFHAAKESGADRVVYASSSSVYGDDPGSPKEEDRLGNVLSPYAASKRSIELYAKAFSNVYPFRFIAMRYFNVFGPRQNAQGAYAAVIPQFITALLNGQQATIFGDGSQTRDFTFIDNVLQMNIKALSTDNADAFNRYYNVACGSTTSLNRVYAILAGCAGSDIKPHYTDPRQGDIKDSLANISLAQKHIGYKPEIQIEEGLIKTFDWFKKNQGE

SEQ ID NO: 110761 - DNA, 1008 bp, Croceibacter atlanticus HTCC2559
  CDS (1)..(1008): transl_table=11
atgaacttaaccaatcaacaaaaagaaaaacttaagggagcaaaaatccttataaccggcggtgctggttttataggatcaaatctatgcgaattctttttaaagcaaaatgcaatagtgacttgtttagataattttgcgacaggacataaacacaatatagcgcatcttatgactcatgaaaacttcagtttagttgaaggagatattagagatgtagaaacatgtcaaaacgctgcaaatggtcaagattatattttacaccaagcggctttaggctcggtaccaagatctattaatgatccgattacgtctaacgacgttaatgttggtgggtttcttaatatgttgattgctgcaagagatcaaaaggtgaagcgttttacatatgcagcaagttcatcaacgtatggcgattctgtaaaattacctaagatagaagaagagataggacagccactatcgccttacgcaattaccaaatatgtaaatgagttatacgcgaccaattttaagctaacttatggtttagatacggtaggcttgcgttattttaatgtatttggcaggaaacaagatccaaagggtgcatatgcagcagtgatacctaagtttgtcattcaatttatgaatcatgaaagccctaccattaacggagacggtacattttctagagattttacatatatagacaatgtcattcaaatgaatatgttaaccattacaacagataatgaagacgcattaaataaggtgtacaatacggctgtaggagacagaacaaccattaaagatgtagcgacacaattaagaaagcaactttcgaaatttgacactaaaattaaagaagtagaaatattaaatggcccaattagaaaaggtgatgtaccacattcattggcctctatagataaagcaaaaagattattagactacaaaccaacccacgaatttaatgatgggttaaaggaagctgtagactggtattggaataatttaaataaataa

SEQ ID NO: 110762 - protein, 335 aa, Croceibacter atlanticus HTCC2559
MNLTNQQKEKLKGAKILITGGAGFIGSNLCEFFLKQNAIVTCLDNFATGHKHNIAHLMTHENFSLVEGDIRDVETCQNAANGQDYILHQAALGSVPRSINDPITSNDVNVGGFLNMLIAARDQKVKRFTYAASSSTYGDSVKLPKIEEEIGQPLSPYAITKYVNELYATNFKLTYGLDTVGLRYFNVFGRKQDPKGAYAAVIPKFVIQFMNHESPTINGDGTFSRDFTYIDNVIQMNMLTITTDNEDALNKVYNTAVGDRTTIKDVATQLRKQLSKFDTKIKEVEILNGPIRKGDVPHSLASIDKAKRLLDYKPTHEFNDGLKEAVDWYWNNLNK

SEQ ID NO: 110763 - DNA, 1023 bp, Photobacterium sp. SKA34
  CDS (1)..(1023): transl_table=11
atgacaaaatacgaacagattaataaagaattattagcgtcaccaaagacgtggttaataacaggtgtagctggttttatcggctcaaacttattagaaaaattgcttaaacttaatcagactgtggtaggtctagataactttgcaacaggccatcaacacaacttagatgaagtaaaaagcttagttacagaactccaatgggatcgctttaccttcattgaaggtgacattcgagattataaaacatgtcaattagctgttaaagatgttgattatgtattacatgaagcggcattaggttctgttcctcgttcgattaatgatcctctgactactgattctgtaaatatcggtggttttttgaatatgctaaccgcatctaaagaagaacaagtaaaaagctttacttatgctgcatctagttcaacatatggcgatcacccagcattacctaaagttgaagaaaatattggtaatccactatctccgtatgcggttactaaatatgtaaatgaactttatgctggcgtatttgcacgaacatatggttttaaaactattggattacgttattttaatgtattcggaaagcgccaagaaccaaatggcgcttatgctgcggttattcctaaatggacatctgccatgattaataatgaagaagtttttattaatggtgatggtgaaactagtcgtgatttttgttttatcgaaaatacagtacaaatgaatattttggcagcaacagcgtctgaagaagctaaagatagtgtatataacgtagctgtaggtgatcgtactacacttaatgatttatatcgttcaattcaatctgcgttagctgaaaataatatttcacatacgattgaacctacttatcgtgatttccgtgctggcgatgtccgccattctcaagctgatatcacaaaagcaacaaatcagcttggctatcagcctgaatatcgaatatttgcagggattagcaaagcaatgccttggtataaaaagttcttaggataa

SEQ ID NO: 110764 - protein, 340 aa, Photobacterium sp. SKA34
MTKYEQINKELLASPKTWLITGVAGFIGSNLLEKLLKLNQTVVGLDNFATGHQHNLDEVKSLVTELQWDRFTFIEGDIRDYKTCQLAVKDVDYVLHEAALGSVPRSINDPLTTDSVNIGGFLNMLTASKEEQVKSFTYAASSSTYGDHPALPKVEENIGNPLSPYAVTKYVNELYAGVFARTYGFKTIGLRYFNVFGKRQEPNGAYAAVIPKWTSAMINNEEVFINGDGETSRDFCFIENTVQMNILAATASEEAKDSVYNVAVGDRTTLNDLYRSIQSALAENNISHTIEPTYRDFRAGDVRHSQADITKATNQLGYQPEYRIFAGISKAMPWYKKFLG

SEQ ID NO: 110765 - DNA, 975 bp, Flavobacteria bacterium BBFL7
  CDS (1)..(975): transl_table=11
ttgacaaaaaacactaagatattaatcactggtgcagccggttttataggcagtaatttaagtgaatattttgttggtgccgggtatgacgtcatcggattggataacttatctacgggtcatttaagtaatatctctcacttacaagaaaaggataactttcatttcgtggaaggtgatattagagatgttgaaacttgtagctcagtagtaattggttgtgactatgtacttcatcaagcagcattaggtagtgttcctcgttctataaaagaccctattacctcgaatgatgtgaatgtaggaggttttttaaatatgttggttgcttctaaagaagctggagttaaaaaaatggtctatgcagcgagttcttctacttatggtgattccaaagcattacctaaagttgaagagcatattgggaagccattgtctccttacgcgataactaaatatgtgaatgaattgtatgctgatgttttttataaaacttatggtttaaacacaataggtttacgttatttcaatgtgtttggtcgtaaacaagaccctaatggagcttatgctgctgttataccgttgtttacaaaacaattaatgaataaacaatcgccgactattaatggtgatggaacttattcaagagattttacctacatagataacgtcattcaggctaatgaaaaagcgatgcttactgaccatcctgaagctgtaaataccgtttttaatgtagcttatggtgatcgtacggatttaaatctattagtagatttattaaaaaagtcattgtctaaatacgattctgaaattttaaatgtagatacgatttacggtccgctcagagcaggtgatgtacctcattctttggcttccatttataaagcaaaacgccttttaaattataatccgcagtttgatctcaaagctggtcttgatgaagctgtagattggtattgggctaatttataa

SEQ ID NO: 110766 - protein, 324 aa, Flavobacteria bacterium BBFL7
MTKNTKILITGAAGFIGSNLSEYFVGAGYDVIGLDNLSTGHLSNISHLQEKDNFHFVEGDIRDVETCSSVVIGCDYVLHQAALGSVPRSIKDPITSNDVNVGGFLNMLVASKEAGVKKMVYAASSSTYGDSKALPKVEEHIGKPLSPYAITKYVNELYADVFYKTYGLNTIGLRYFNVFGRKQDPNGAYAAVIPLFTKQLMNKQSPTINGDGTYSRDFTYIDNVIQANEKAMLTDHPEAVNTVFNVAYGDRTDLNLLVDLLKKSLSKYDSEILNVDTIYGPLRAGDVPHSLASIYKAKRLLNYNPQFDLKAGLDEAVDWYWANL

SEQ ID NO: 110767 - DNA, 1035 bp, delta proteobacterium MLMS-1
  CDS (1)..(1035): transl_table=11
atgacctcctaccagcaaaccattgccaccctgcaagccgccccccaaagctggctgattaccggggtggccggctttatcggctccaacctgttggagaccctgcttaagctgaaccagcaggtaacggggctggataacttcgccaccggccatcagcgcaacctggacgaggtgcaaagcctggtcagcccggcccaatgggccaacttcagctttattgaaggcgatatccgcgacccggccacctgccgccgggcctgccggggcagcgattacgtcctccaccaggcggccctgggcagtgtgccccgttcgctggaagatcccatcaccaccaacggcgccaatatcgacggcttcctcaatatgctggtggccgcccgcgacgccgaggtaaaacggttcgtttacgccgccagcagctccacctacggcgaccacccggccctgcccaaggtggaggatgccatcggcaaaccgctctccccctacgcggtgaccaagtacgtcaacgaactctacgccgaggtcttcgcacgctgctataacttccccagtatcggcctgcgctacttcaacatcttcggccgccgccaggacccggaaggggcctacgcggcggtaattcccaaatggatcgcggcgatgatccaaaacgaaacggtcttcatcaacggcgatggcgaaaccagccgcgacttctgctatatcgacaacgccgtccaggttaacctgctggccgccaccagccccaacctcgaagcggccaaccaggtttacaacgtagcggtgggcgagcgcaccagcctgaaccagctttaccaacacctgcgcgaccacctggcccccagctacccccacctgcaaaatgcccaggccagccaccgcgacttccgccccggcgatgtccgccactccctggccgacatcagcaaggcccaaaccctgctgggctaccagcccagccaccggatcgacgaagggttgcgggaagcgatgggctggtacaccaattttctgggagaaaaataa

SEQ ID NO: 110768 - protein, 344 aa, delta proteobacterium MLMS-1
MTSYQQTIATLQAAPQSWLITGVAGFIGSNLLETLLKLNQQVTGLDNFATGHQRNLDEVQSLVSPAQWANFSFIEGDIRDPATCRRACRGSDYVLHQAALGSVPRSLEDPITTNGANIDGFLNMLVAARDAEVKRFVYAASSSTYGDHPALPKVEDAIGKPLSPYAVTKYVNELYAEVFARCYNFPSIGLRYFNIFGRRQDPEGAYAAVIPKWIAAMIQNETVFINGDGETSRDFCYIDNAVQVNLLAATSPNLEAANQVYNVAVGERTSLNQLYQHLRDHLAPSYPHLQNAQASHRDFRPGDVRHSLADISKAQTLLGYQPSHRIDEGLREAMGWYTNFLGEK

SEQ ID NO: 110769 - DNA, 1023 bp, Vibrio sp. Ex25
  CDS (1)..(1023): transl_table=11
atgaccaaatacgaacaaatccaacaagaactagttgaatcaccaaagacgtggttagtaacgggtgttgcgggctttattggctcaaacctactggaaaaattactcaagcttgatcaaaccgtagtgggtttagataacttcgcgacaggccatcaacacaacttagatgaagttaaaggtctagtaagtgaagcacagtgggatcgttttacccttattgaaggagacatccgtgagccgaaaacatgccaacaagccgtaaaaggtgttgattacgtactacaccaagcagcactcggttctgtacctcgctctatcgctgatccactaaccacaaacgcagcgaacatcaccggctttttaaatatgctggacgccgcaaaagaagaaagggtaagcagctttacttatgctgcaagcagctcgacatacggtgaccatccagcactgccgaaagtggaagaaaacatcggtaacccgctttctccttatgcggtaactaaatacgtaaatgagctttatgccggtgtatacgcccgcacttacggttttaaaacgatagggcttcgttattttaatgtatttggtcgtcgacaagatcctaacggcgcttacgctgcggtaattccaaaatggacagcagcaatgatcaatggtgaagatgtctacattaatggtgatggtgaaacaagccgagatttttgctatatcgataacgttgttcaaatgaacctgttagcagcaacggcaaaagaagacgcaaaagacgaagtatacaacgtagctgttggtgatagaaccacattaaatgaactatactatgcaattaaaaatgcgctgaacgataatggtgttctagtcgatgctgagcctaaatatcgtgattttcgagcaggagatgtgaggcattctcaggctgagatatcaaaagctaaaaataagctagattacttaccagagttcaaagtattgaaaggtataagtgtcgccatgaaatggtataaaaatgaagttctataa

SEQ ID NO: 110770 - protein, 340 aa, Vibrio sp. Ex25
MTKYEQIQQELVESPKTWLVTGVAGFIGSNLLEKLLKLDQTVVGLDNFATGHQHNLDEVKGLVSEAQWDRFTLIEGDIREPKTCQQAVKGVDYVLHQAALGSVPRSIADPLTTNAANITGFLNMLDAAKEERVSSFTYAASSSTYGDHPALPKVEENIGNPLSPYAVTKYVNELYAGVYARTYGFKTIGLRYFNVFGRRQDPNGAYAAVIPKWTAAMINGEDVYINGDGETSRDFCYIDNVVQMNLLAATAKEDAKDEVYNVAVGDRTTLNELYYAIKNALNDNGVLVDAEPKYRDFRAGDVRHSQAEISKAKNKLDYLPEFKVLKGISVAMKWYKNEVL

SEQ ID NO: 110771 - DNA, 1086 bp, Escherichia coli B
  CDS (1)..(1086): transl_table=11
gtgaagatacttgttactggtggcgcaggatttattggttctgctgtagttcgtcacattataaataatacgcaggatagtgttgttaatgtcgataaattaacgtacgccggaaacctggaatcacttgctgatgtttctgattctgaacgctatgtttttgaacatgcggatatttgcgatgcagctgcaatggcacggatttttgctcagcatcagccggatgcagtgatgcacctggctgctgaaagccatgttgaccgttcaattacaggccctgcggcatttattgaaaccaatattgttggtacttatgtccttttggaagccgctcgcaattactggtctgctcttgatagcgacaagaaaaatagcttccgttttcatcatatttctactgacgaagtctatggcgatctgcctcatcctgacgaagtaaataataaagaagaattacccctctttactgagacgacagcttacgcgccaagcagcccatattctgcttctaaagcatccagcgatcatttagtccgcgcgtggaaacgtacctatggtttaccgaccattgtgactaactgttcgaataactacggcccttatcactttccggaaaaattgattccgctggtaattcttaatgctctggaaggtaaggcattacctatttatggcaaaggggatcaaattcgcgattggctgtatgttgaagatcatgcgcgtgcgttatataccgttgtaaccgaaggtaaagcgggtgaaacttataacattggcggacacaacgaaaagaaaaacatcgatgttgtgctgactatttgtgatttgttggatgagattgtaccgaaagagcaatcttatcgtgagcaaattacttatgttgccgatcgtccgggacacgatcgccgttatgcgattgatgctgagaagattagccgcgaattgggctggaaaccgcaggaaacgtttgagagcgggattcggaagacagtggaatggtacctgtccaatacaaaatgggtcgaaaatgtgaaaagtggtgcctatcagtcatggattgcacagaactatgagggccgccagtaa

SEQ ID NO: 110772 - protein, 361 aa, Escherichia coli B
MKILVTGGAGFIGSAVVRHIINNTQDSVVNVDKLTYAGNLESLADVSDSERYVFEHADICDAAAMARIFAQHQPDAVMHLAAESHVDRSITGPAAFIETNIVGTYVLLEAARNYWSALDSDKKNSFRFHHISTDEVYGDLPHPDEVNNKEELPLFTETTAYAPSSPYSASKASSDHLVRAWKRTYGLPTIVTNCSNNYGPYHFPEKLIPLVILNALEGKALPIYGKGDQIRDWLYVEDHARALYTVVTEGKAGETYNIGGHNEKKNIDVVLTICDLLDEIVPKEQSYREQITYVADRPGHDRRYAIDAEKISRELGWKPQETFESGIRKTVEWYLSNTKWVENVKSGAYQSWIAQNYEGRQ

SEQ ID NO: 110773 - DNA, 1020 bp, Escherichia coli B
  CDS (1)..(1020): transl_table=11
atgacaattctcgtcactggcggtgcaggatatataggttcgcatactgtgttggctctccaggaaaggaatgatgacgttgtagttcttgataatctttctaacgcttcgcaaacctctctggaaagagttgcagaattaaccgggaagaaacccattttctataaaggcgacgtgatggacagacatcttctgaagaagatttttgcgtcgcataatattactgatgtgattcattttgcaggtctaaaatccgtttctgaatcgataaaagatccgctctcttattaccagaataacgtcactggcacactggttctgctcgaggaaatgcgtgcggccggcgtaaacagctttatattcagttcttcggccaccgtgtacggcaacccggatcgcgtaccgctcaatgaaaactcccgtacgggcggtaccactaatccatatggcacatccaaatatatggttgaacagattctggaagatttttcgcgagctcagcctgaattccgtattacctgtctgcgttacttcaacccagtcggggcgcatccgtcaggacgtattggtgaagatcccaatgggatcccgaacaatctggtcccttatattgctcaggtgaccattggcaggctggaagtactatccgtgtacggtaatgattaccccactccggacggtacgggcgtacgcgactatattcatgtaatggatctcgcccatggccatctggcagcactggacaataaggataaaggtgacgcgtataaagtctttaatcttggcaccggtatcggctattccgtactcgaccttgtgaacgcgttcgaaaaagcggcgcagacaaaaatcaattaccgctttgcaccgaggagaggaggagatattgcagaatgctggtcagatccgtcccgagcacggcgggaattgggctggcaggccacccgcactattgaagaaatgatgcgtgatacctggaactggcagaaaaataacccgaacggctatcgcagcgtctga

SEQ ID NO: 110774 - protein, 339 aa, Escherichia coli B
MTILVTGGAGYIGSHTVLALQERNDDVVVLDNLSNASQTSLERVAELTGKKPIFYKGDVMDRHLLKKIFASHNITDVIHFAGLKSVSESIKDPLSYYQNNVTGTLVLLEEMRAAGVNSFIFSSSATVYGNPDRVPLNENSRTGGTTNPYGTSKYMVEQILEDFSRAQPEFRITCLRYFNPVGAHPSGRIGEDPNGIPNNLVPYIAQVTIGRLEVLSVYGNDYPTPDGTGVRDYIHVMDLAHGHLAALDNKDKGDAYKVFNLGTGIGYSVLDLVNAFEKAAQTKINYRFAPRRGGDIAECWSDPSRARRELGWQATRTIEEMMRDTWNWQKNNPNGYRSV

SEQ ID NO: 110775 - DNA, 975 bp, Pseudomonas putida GB-1
  CDS (1)..(975): transl_table=11
atgcccgtactgattaccggcgtggccggcttcatcggcttccatgtcgctcgccgcctgtgcgaggcaggcatcgatgtggtcggcatcgacaacctcaatgcctactacagcgtcgagctgaaactggcgcgcctgcaacggctgttcggcttcgccaatttccgcttccaaaccctcgatatcgccaacagcgccgacctgcaacagctgttcgccaggcaggcgttcagtgaagtgatccacctggcggcccaggccggggtgcgctattcgctggacaaccctggcgcctacgggcaggccaacctggtcggtttcctcaacatcctcgaagcctgccgccagcagccaccacgccacctgatctacgcctccagcagctcggtgtacggcgccaatgccaagctgccgttcagcatcgatgacccggtcgagcagccggtttcgctgtacgccgccagcaagcgtgccaatgaactgatggcgcacagctacgcgcacctgtatcggataccaaccaccggcctgcgctttttcaccgtctacggcccctggggccggcccgacatggcgctgttcaagttcacccgcgccatgctcgaaggacggccgatcgaggtttacaacaacggcctgatgggccgcgacttcacctacatcgacgacatcgtcgaaagcatcgtgcgcctgcgcctgaaaccaccccggccgaccgaggggcagccgccctgccagctgttcaacatcggccgtgggcagccggtaaggctgctgcaattcgtcgaatgcctggaagccgccttgggcatcaaggcccagcgcgactacctgccgctacaagcgggcgacgtgctggagacctgggccgatgtcggctcactggcacgctggatcgactactccccaggcacgtcgctggagcacggcgtcaacgctttcgttggctggtaccgggatttctaccgggtttga

SEQ ID NO: 110776 - protein, 324 aa, Pseudomonas putida GB-1
MPVLITGVAGFIGFHVARRLCEAGIDVVGIDNLNAYYSVELKLARLQRLFGFANFRFQTLDIANSADLQQLFARQAFSEVIHLAAQAGVRYSLDNPGAYGQANLVGFLNILEACRQQPPRHLIYASSSSVYGANAKLPFSIDDPVEQPVSLYAASKRANELMAHSYAHLYRIPTTGLRFFTVYGPWGRPDMALFKFTRAMLEGRPIEVYNNGLMGRDFTYIDDIVESIVRLRLKPPRPTEGQPPCQLFNIGRGQPVRLLQFVECLEAALGIKAQRDYLPLQAGDVLETWADVGSLARWIDYSPGTSLEHGVNAFVGWYRDFYRV

SEQ ID NO: 110777 - DNA, 975 bp, Pseudomonas putida GB-1
  CDS (1)..(975): transl_table=11
atgaaatttctggtggtgggtggcgcgggttacattggctcgcacatggtcaagcacctgcttgctgtgggccacgaagtggtggtggcagacctggtctggcctggcccgggcatccagtgggccaagctcgacatcgccgacgaggccgcactggatgtgctgtttggcgtctgtcgcttcgatgcggtgttccattttgcctcgttcattcaagtgggcgagtcggtcagcgcgcccggcaagtactaccagaacaacgtcgcagccacccttgccctgctgcaggccatggtgaatgccggcatcaagcacctggtgttttcttcgagtgccgccgtttatggcaacccacagtacgtgccgatcgatgaagcgcacaccaaggggccgatcaacccttatgggctgagtaaatggatggtcgagcagattcttgaggacttcgaccgtgcctatggcttgaagtcggtttgcctgcgctatttcaatgccgcaggcgctgaccccgaagggcagctgggggaacgtcacgacccggaaacccacctgattccattgatcctgcaggcggcatctggccggcgggaggcggtgaccgtgtttggccgcgactacgatacgccggatggcacctgcatacgtgactacgtgcatgttgcagacctggcggcggcccatgcgttggcagtggactatttgctggcaggtggcgagcgtaccgcgttcaacctgggcaacggcttgggcttttcggtgcagcaggtgatcgatacggcgcggacggtgaccgggcggcagatcaatgccctcgatgcgccgcgccgcgctggcgacccgccacggctggtggctgatgcgagcaaggcgatacaggtactgggctggcggccagagtttgcctcgctggagcaaattgtgcggcatgcctggcagtgggagttgcagtatccctggaccgtgcagcagggctga

SEQ ID NO: 110778 - protein, 324 aa, Pseudomonas putida GB-1
MKFLVVGGAGYIGSHMVKHLLAVGHEVVVADLVWPGPGIQWAKLDIADEAALDVLFGVCRFDAVFHFASFIQVGESVSAPGKYYQNNVAATLALLQAMVNAGIKHLVFSSSAAVYGNPQYVPIDEAHTKGPINPYGLSKWMVEQILEDFDRAYGLKSVCLRYFNAAGADPEGQLGERHDPETHLIPLILQAASGRREAVTVFGRDYDTPDGTCIRDYVHVADLAAAHALAVDYLLAGGERTAFNLGNGLGFSVQQVIDTARTVTGRQINALDAPRRAGDPPRLVADASKAIQVLGWRPEFASLEQIVRHAWQWELQYPWTVQQG

SEQ ID NO: 110779 - DNA, 1071 bp, Pseudomonas putida GB-1
  CDS (1)..(1071): transl_table=11
atgaccattctggtaaccggcggtgcaggctttatcggggcgaacttcgttttggactggctggccggcagtgatgagcctgtggtcaacctggacaaacttacctacgcgggcaatttgcagaccctgcgcagccttcagggcgacaagcgccatatctttgtgcacggcgacattggcgatagccagctcgtcgcagaattactgaaagcccaccagccacgcgccatcgtcaactttgccgccgagtcccacgtcgaccgctcgatccacggcccgcaagccttcatcgaaaccaacgtcgttggcaccttccacttgctggaagccgtgcgtgcctactggggtggcttgaatgggccggcgcgccaggcattccgcttcctgcatgtgtccacagacgaagtctatggttcgctaacggctggcgaaccggccttcaccgaaacccaccagtaccagcccaacagcccgtactcggccagcaaggccgccagcgaccacttggtgcgttcgtatcaccacacctatggcctgccggtgctgaccaccaactgctccaacaattacggcccctaccatttcccggaaaagctcatcccactgatgatcgtcaatgccttggcaggcaagccgctgcctgtgtacggcgacggccagcaaattcgcgactggttgttcgtcaaggatcactgcagcgccatccgccgtgtgatggaagccggcaaagccggagaggtctacaacgtcggtggctggaacgaaaaacccaatctggaaatcgtcaaccgtgtctgtgcgctgctggacgaactgcgcccgcgcaccgacggcaagccctacgccgaacagatcacctacgtgaccgaccgccctggccacgaccgccgttacgccatcgatgcccgcaagctggagcgcgaactgggctggaaacccaccgaaacgttcgaaaccggcattcgcaaaaccgtggcctggtacctcgacaaccaggaatgggtgcagaacgtgcagtccggcagctaccgcgactgggtcgagaaaaattacgcagggcgttctgcatga

SEQ ID NO: 110780 - protein, 356 aa, Pseudomonas putida GB-1
MTILVTGGAGFIGANFVLDWLAGSDEPVVNLDKLTYAGNLQTLRSLQGDKRHIFVHGDIGDSQLVAELLKAHQPRAIVNFAAESHVDRSIHGPQAFIETNVVGTFHLLEAVRAYWGGLNGPARQAFRFLHVSTDEVYGSLTAGEPAFTETHQYQPNSPYSASKAASDHLVRSYHHTYGLPVLTTNCSNNYGPYHFPEKLIPLMIVNALAGKPLPVYGDGQQIRDWLFVKDHCSAIRRVMEAGKAGEVYNVGGWNEKPNLEIVNRVCALLDELRPRTDGKPYAEQITYVTDRPGHDRRYAIDARKLERELGWKPTETFETGIRKTVAWYLDNQEWVQNVQSGSYRDWVEKNYAGRSA

SEQ ID NO: 110781 - DNA, 981 bp, Pseudomonas putida GB-1
  CDS (1)..(981): transl_table=11
gtgcctggcgcgctggcttgccgcctctactggaccggttctaccgccatggctgacgcccccatcctgatcaccggcggtgccggcttcattggctcccacctgtgcgatgcgttgttggacaaaggctacgccgtacgcattcttgatgacttttccacaggccgcaggagcaacctgcaggtcgaccacccacggttggagctgatcgaaggcgatgtagccgatgccgggttggttacacagacagcggctggctgccgtgctgtagtgcacctggcggcggtggcctcggtgcaggcctcggtcgaggacccggtacgcacccatcagagcaacttcatcggcaccctcaatgtttgtgaagccatgcgcgtgcatggcgtgcgtcgggtgctgttcgcttccagtgcggcggtgtatggcaacaatggcgagggcgagtcgattgccgaagagacccccaaggcgccgctgaccccctatgccgtggacaaactggccagtgagcaatacctggacttctaccgccgccagcatggtctggagccggtggtgtttcgcttcttcaatattttcgggccacgtcaggacccgtcctcaccgtattccggtgtgatcagcattttctgcgagcgcgctgtacagggcttgccgatcacggtgtttggcgatggcgagcagacccgtgatttcctctacgtgggtgatctggtgcaggtgatggtgcaagcattggagcagccgcaggtcgaggagggggcggtgaacatcggcctcaaccaggcgacttcgctgaaccagttgctggcagcgctggagaaggtggtggggagcttgccagcgatcagctatgtcgcggcccgttcgggggatattcgccattcgcgggcggataatcagcggttgctggcgcggttcaagttcgcgcaggcgacgccgatggtcgaggggctggcgcggcttctgggcaaggcctga

SEQ ID NO: 110782 - protein, 326 aa, Pseudomonas putida GB-1
MPGALACRLYWTGSTAMADAPILITGGAGFIGSHLCDALLDKGYAVRILDDFSTGRRSNLQVDHPRLELIEGDVADAGLVTQTAAGCRAVVHLAAVASVQASVEDPVRTHQSNFIGTLNVCEAMRVHGVRRVLFASSAAVYGNNGEGESIAEETPKAPLTPYAVDKLASEQYLDFYRRQHGLEPVVFRFFNIFGPRQDPSSPYSGVISIFCERAVQGLPITVFGDGEQTRDFLYVGDLVQVMVQALEQPQVEEGAVNIGLNQATSLNQLLAALEKVVGSLPAISYVAARSGDIRHSRADNQRLLARFKFAQATPMVEGLARLLGKA

SEQ ID NO: 110783 - DNA, 1002 bp, Marinobacter sp. ELB17
  CDS (1)..(1002): transl_table=11
atgaagttatctcttcttgaatccaaaacttggctaatcactggcgtagccggcttcataggttccaacttacttgagcacttgctaaaactgaaccaaaatgttgtcggcttggacaactttgccaccggccataagcacaacctagatgaagtgcaaagcctcgtcaccctggaacaatggtcccgtttctctttcaccgaaggtgacatacgaaacgaaaaagattgtgcgaaagcctgcgggggggtggattacgtcctgcatcaagctgccttgggatcagtaccacgctccattaacgaccccgtcaccacaagcgcagtcaatatcacgggctttttaaatatgctagtagctgcccgggcggcaggggttaaaagcttcacctatgccgccagtagctcaacctatggtgaccatcctgcgcttccaaaggttgaggataatatcggtaagccactgtcaccctatgccgttactaagtatgtgaatgagctgtatgcggatgtgttcgctataacttacggtttcaaaaccatcggcttgcgctatttcaatgttttcggcaaacggcaggaccctaaaggtgcctatgcggcggttatccctaagtggacggaagccatgctatgcggtgataatgtattcatcaacggcgatggcgaaaccagccgtgatttctgtttcattgaaaatgccgttcaggcgaatctcttagcagctacggctgatgaagccgtcaagaatgaggtttacaacgtagcggtgggtgaccgcaccacgctcaatattctttttgattcgctcaaagaagctttggcggaaaacggggttgtttatgagaaagcgcccgtatatcgcgatttccgtcccggtgatgtgcggcactctcaggcagatatcagcaaagcggctagcaagctgggttatgcgccggagtatcggattgttgagggcatttccaaggcaatgccttggtaccttgcttatagactttga

SEQ ID NO: 110784 - protein, 333 aa, Marinobacter sp. ELB17
MKLSLLESKTWLITGVAGFIGSNLLEHLLKLNQNVVGLDNFATGHKHNLDEVQSLVTLEQWSRFSFTEGDIRNEKDCAKACGGVDYVLHQAALGSVPRSINDPVTTSAVNITGFLNMLVAARAAGVKSFTYAASSSTYGDHPALPKVEDNIGKPLSPYAVTKYVNELYADVFAITYGFKTIGLRYFNVFGKRQDPKGAYAAVIPKWTEAMLCGDNVFINGDGETSRDFCFIENAVQANLLAATADEAVKNEVYNVAVGDRTTLNILFDSLKEALAENGVVYEKAPVYRDFRPGDVRHSQADISKAASKLGYAPEYRIVEGISKAMPWYLAYRL

SEQ ID NO: 110785 - DNA, 981 bp, unidentified eubacterium SCB49
  CDS (1)..(981): transl_table=11
atgtttacacacacctatcatacaaaagaattaagtgattataactttttaatcacaggaggcgcaggttttattgggtcaaacattgttggttatttattaaaaaataatgctaaaaaagttagagtattagacaacctcgcaacagggtctatggacaaccttgcagaacacatggagcatccctcttttgagttcatgaagggagatattagaaacatagaagattgtaagcgagctatgcaagacatagattatgtaagccatcaagctgcattaggttctgtgcctcgctctataaacgatcctgcaacatcaaatgatgtaaatgtaggcggttttttaaatatgttaattgctcaaaacgaaagcaaaaccgtaaaaaaaatggtgtatgcagcttctagctctacctatggcgatagcccatctttacctaaagtagaagatgtaataggtaaaccattatcgccatatgcggttactaaattggtaaacgaactttacgcagatgtgttttataaaacctacggaaccaaaactttggggatgcgttactttaatgtttttggacctaaacaaagtcctacaggtgcctatgcagcagtgatccctttgtttatgcaagccttagtagatgaaaaatcacctacaatgaatggcgacggagagcaaacacgagattttacctatgtagaaaatgctgtacaagcaaatgtacgtggtatgttatctggtgacgaagcaaataatgaagtgattaatattgcctatggaaatcgtataagcttaaacactttgtggagcgacttaaaagacgtttctggtaaagagctagcggctgtttacggaccacctagaaaaggagatgttcgtgactctttagcaaacatcgataaggctaaaaaactaataggctacgaccctaagttttctgtggcagaaggcctaaaagtaacttgggagtatttcacaaaataa

SEQ ID NO: 110786 - protein, 326 aa, unidentified eubacterium SCB49
MFTHTYHTKELSDYNFLITGGAGFIGSNIVGYLLKNNAKKVRVLDNLATGSMDNLAEHMEHPSFEFMKGDIRNIEDCKRAMQDIDYVSHQAALGSVPRSINDPATSNDVNVGGFLNMLIAQNESKTVKKMVYAASSSTYGDSPSLPKVEDVIGKPLSPYAVTKLVNELYADVFYKTYGTKTLGMRYFNVFGPKQSPTGAYAAVIPLFMQALVDEKSPTMNGDGEQTRDFTYVENAVQANVRGMLSGDEANNEVINIAYGNRISLNTLWSDLKDVSGKELAAVYGPPRKGDVRDSLANIDKAKKLIGYDPKFSVAEGLKVTWEYFTK

SEQ ID NO: 110787 - DNA, 1023 bp, Streptomyces ghanaensis
  CDS (1)..(1023): transl_table=11
gtgtcgagcgatacacacggaacggacttagcggacggcgacgttttggtcaccggtgcggccggcttcatcgggtcgcacctggtgacggaactgaggaattccggcagaaacgttgtggcggtggaccggagaccccttccggacgacttggagagtacgtccccgccctttaccggttcgctccgggagatacgcggtgacctcaactcattgaatctggtggactgcctgaaaaacatctcgacggtcttccacttggccgcgttacccggagtccgcccgtcctggacccaattccccgagtacctccggtgcaatgtactggcgacccagcgcctgatggaggcctgtgtgcaggccggcgtggaacgcgtggtggtcgcctcgtcctccagcgtctacggcggcgcggacggcgtgatgagcgaggacgacctgccccgtccgctctccccctacggggtcaccaaactcgccgcggagcggctggccctggccttcgcggcccgcggcgacgccgagctctcggtcggcgccctgaggttcttcaccgtctacggccccggccagcgcccggacatgttcatctcccggctgatccgggcgacgctccggggcgaacccgtcgagatctacggcgacgggacccagctccgcgacttcacccatgtgtccgacgtggtgcgggcgctgatgctgaccgcgtcggtgcgggaccggggcagcgcggtgctgaacatcggcaccgggagcgccgtctcggtcaacgaagtggtctccatgaccgcggagctgaccggtctgcgcccgtgcaccgcgtacggttccgcccgcatcggcgacgtccgctcgaccaccgccgacgtgcggcaggcccagagcgtcctgggcttcacggcccggacgggtctgcgggaaggtctcgccacccagatcgagtggacccggcggtcactgtccggcgccgagcaggacaccgtcccggtcggcggctcctcggtgtccgtgccgcggctgtag

SEQ ID NO: 110788 - protein, 340 aa, Streptomyces ghanaensis
MSSDTHGTDLADGDVLVTGAAGFIGSHLVTELRNSGRNVVAVDRRPLPDDLESTSPPFTGSLREIRGDLNSLNLVDCLKNISTVFHLAALPGVRPSWTQFPEYLRCNVLATQRLMEACVQAGVERVVVASSSSVYGGADGVMSEDDLPRPLSPYGVTKLAAERLALAFAARGDAELSVGALRFFTVYGPGQRPDMFISRLIRATLRGEPVEIYGDGTQLRDFTHVSDVVRALMLTASVRDRGSAVLNIGTGSAVSVNEVVSMTAELTGLRPCTAYGSARIGDVRSTTADVRQAQSVLGFTARTGLREGLATQIEWTRRSLSGAEQDTVPVGGSSVSVPRL

SEQ ID NO: 110789 - DNA, 987 bp, Francisella novicida
  CDS (1)..(987): transl_table=11
ttggagattgtagtggcttacgataatgttaaatttcctcatggttcgttttttttggtgactggaggtgcgggctttattggctctaatttatgtgaagttttacttagtaagggttatagagttaggtgtttagatgatctctcaaatggtcactatcacaatgttgagccgtttttaactaattctaattatgagtttataaaaggtgatattagagatttagatacttgcatgaaggcttgtgaaggtattgattatgttctacatcaagctgcttggggaagcgtaccaagaagtattgagatgccattagtgtatgaagatataaatgttaaaggtacattaaatatgcttgaagcggctagacaaaataacgttaaaaaatttgtctatgcttctagttcatcagtatatggtgatgaaccaaatttacctaaaaaagaaggtagagaaggaaatattttatcaccctatgcatttacaaagaaagctaatgaagagcgggcgagactatacacaaagttatatggtctagatacttatggtctaagatattttaatgtttttggtagaagacaagatcctaatggtgcgtatgcagcagttatacctaaatttatcaaacagttattaaatgatgaagcgccaactataaatggagatggtaaacagtcgagagattttacatatatagagaatgttattgaggcaaatcttaaagcatgtttagcagatagtaagtatgccggagaggcttttaatatagcttatggaggtagagagtatcttatagatttgtactataatctttgtgatgccttgggtaaaaaaatagagccaaattttggtccagatagagcgggtgatattaagcatagtaatgctgatatttcgaaggctaggaatatgctcggatataatccggaatatgattttgaattaggcataaagcatgctgttgagtggtatagttctgagttatga

SEQ ID NO: 110790 - protein, 328 aa, Francisella novicida
MEIVVAYDNVKFPHGSFFLVTGGAGFIGSNLCEVLLSKGYRVRCLDDLSNGHYHNVEPFLTNSNYEFIKGDIRDLDTCMKACEGIDYVLHQAAWGSVPRSIEMPLVYEDINVKGTLNMLEAARQNNVKKFVYASSSSVYGDEPNLPKKEGREGNILSPYAFTKKANEERARLYTKLYGLDTYGLRYFNVFGRRQDPNGAYAAVIPKFIKQLLNDEAPTINGDGKQSRDFTYIENVIEANLKACLADSKYAGEAFNIAYGGREYLIDLYYNLCDALGKKIEPNFGPDRAGDIKHSNADISKARNMLGYNPEYDFELGIKHAVEWYSSEL

SEQ ID NO: 110791 - DNA, 1044 bp, Herbaspirillum seropedicae
  CDS (1)..(1044): transl_table=11
atgacacgatacgacacgctctgcgagcaactgccccagcatcccaagcgctggctcatcaccggcgtggccggcttcatcggctccaacctgctggcgcgcctgctcacgctgggccagcaggtgaccggcctggacaacttcagcaccggccgccaggccaacctggaggaggtgcgcgccgaagtgggcgcggccgcctgggccaacttccgcttcatcgaaggcgatatctgcgatgccgctacctgcctgcgcgcctgcgacggcgccgactatgtgctgcaccaggcggcgctgggttcggtgtcgcgctccatcgaagatccggtgcgcaccaacctgaacaacgtcaacggtttcctcaacatgctggtggccgcgcgcgatgcgggcgtggcgcgcttcgtctatgccgcctccagttccacctatggcgaccatcccggcctgcccaaggtggaagaggtgatcggcaagccgctctcgccctatgccgtgaccaagtatgtcaatgaactgtacgccgaggtctttgcccgctgctatggcatggagagcatcggcctgcgctacttcaacgtcttcggccgccgccaggacccgcacggcgcctatgccgcggtgatcccgcaatgggtgacggcgatgatccgcaatggcgaactgcgcatcaatggcgatggccagaccagccgcgatttctgctacatcgacaatgtcgtgcaagccaacctgctggccgccaccgccggcgaggaagcggtcaaccaggtctacaacgtggccctgaacgaccgcaccagtctcaacgatttgtacgcgatgatgcgcgaactgctggtgcagcgcttcccgcatctgcaagagcaccggcccagctatgtgggatttcgcgccggcgacatccgcgactcccaggccgacatcggcaaggcgcgccagcgcctgggctatgcgcctacccatcgcctgcgcgccgggctggagcaggccatgtcctggtacatcgatcacctgggcagcactgcctgcaacacctga

SEQ ID NO: 110792 - protein, 347 aa, Herbaspirillum seropedicae
MTRYDTLCEQLPQHPKRWLITGVAGFIGSNLLARLLTLGQQVTGLDNFSTGRQANLEEVRAEVGAAAWANFRFIEGDICDAATCLRACDGADYVLHQAALGSVSRSIEDPVRTNLNNVNGFLNMLVAARDAGVARFVYAASSSTYGDHPGLPKVEEVIGKPLSPYAVTKYVNELYAEVFARCYGMESIGLRYFNVFGRRQDPHGAYAAVIPQWVTAMIRNGELRINGDGQTSRDFCYIDNVVQANLLAATAGEEAVNQVYNVALNDRTSLNDLYAMMRELLVQRFPHLQEHRPSYVGFRAGDIRDSQADIGKARQRLGYAPTHRLRAGLEQAMSWYIDHLGSTACNT

SEQ ID NO: 110793 - DNA, 1848 bp, Oryza sativa subsp
  CDS (1)..(1848)
atggcaattttagttaccggtggcgctggttacatcggatcgcacaccgtgctatcgcttctggagcgtggcgaggacgttgtggtgctggataatttgtccaactcatctgcggagtcattgcagcgcgtggagaaactgacggggaaagccgcggtgttctatcaaggcgatgttcaggatgctgaatgcctgcatcgtatcttcggcgcgcatgatatcactgccgtgatccacttcgccggcctcaaggctgttggagagtcaacgcgcaaaccgcttgagtattatcagaataacgtcaccggcacgctggtactgttggatgctatgcgccgtgccggcgtacatgatttcatcttcagttcctccgccactgtctatggtgccaattcgccggtgccttatgttgaaacgacaccgatcggcggcacgaccagcccttatggcacgtctaagctgatggtggagcagatcctgcaggatttcgctaaggctgaaccgcagttttcgattattgccttgcgttacttcaacccggtcggcgctcatgaatcgggtttgatcggcgaagatcctaacggtattcccaataacctgctgccttatatttcgcaggtggctatcggcaaactggagaagttgggtattttcggtggtgactatccaacaaaagacggcacgggcgagcgcgactatattcacgttatggacttggccgacggtcatctcaaagcgatggatcatctggcgaagatcagcggatttaaggcttataacctgggggccggtgtagggcactcggtgttggcgatggttcaggcatttgaaaaagcttccggcgtaacgatcccttaccaaatcttgcctcgccgcgacggcgatctgcctgctttctgggcgaacgcggatctggcatatcaagagctaggatggaaatcgttgggagcccccacagatatgctgaaagctgtcattcccgttgccggtcttggtacccgcatgttaccggccactaaggcgattcctaaggaaatgctaccggttgtcgacaaacctcttatccaatacatcgtaaatgaatgcgtcgccgccggtattaaagagattattctggttacgcactcgtcaaaaaatgctattgaaaaccattttgacacctcgtttgaattggaaagcatgctggagtcacgcgttaagcgccaactgctggaagaagttcagtctatctgtccgaaaggcgtgaccctgatgcatgtgcggcaggggcaatccaaagggttgggccatgcggtactctgtgccagacccctgatcggtgatgcgccgtttgccgtgttgctgccggatgtgctgatggacgacatcgcctctgatctaacgaaagataacctcgccagcatgatcgctgaatttgaagcgcacggtcgcagccagatcatggtagaacctgtgccagaaaaagacgtgtccaaatacggcgtggttgattgtcgcggcgtggccgtggcgccaggccaaagcgtaccgatgcatgcgatcgtcgaaaaaccttcccaagaagaggcaccttcaaatttggctgtcgttggccgctatgttttggctgctgatatctggccgctgctggaaaaaacgccttatggcgctggcggtgagatccagcttaccgatgctatcgccatgctgatggagcaaaaaccggttgaggctttcgcgatggttgggcgttcgcatgactgcggtgataaattaggttatatgaaggcctttgttgagtatggtcttcgtcatccgacgcagggtgaagcattttctgagtggttaaaggggatgttgcaggcttaa

SEQ ID NO: 110794 - protein, 615 aa, Oryza sativa subsp
MAILVTGGAGYIGSHTVLSLLERGEDVVVLDNLSNSSAESLQRVEKLTGKAAVFYQGDVQDAECLHRIFGAHDITAVIHFAGLKAVGESTRKPLEYYQNNVTGTLVLLDAMRRAGVHDFIFSSSATVYGANSPVPYVETTPIGGTTSPYGTSKLMVEQILQDFAKAEPQFSIIALRYFNPVGAHESGLIGEDPNGIPNNLLPYISQVAIGKLEKLGIFGGDYPTKDGTGERDYIHVMDLADGHLKAMDHLAKISGFKAYNLGAGVGHSVLAMVQAFEKASGVTIPYQILPRRDGDLPAFWANADLAYQELGWKSLGAPTDMLKAVIPVAGLGTRMLPATKAIPKEMLPVVDKPLIQYIVNECVAAGIKEIILVTHSSKNAIENHFDTSFELESMLESRVKRQLLEEVQSICPKGVTLMHVRQGQSKGLGHAVLCARPLIGDAPFAVLLPDVLMDDIASDLTKDNLASMIAEFEAHGRSQIMVEPVPEKDVSKYGVVDCRGVAVAPGQSVPMHAIVEKPSQEEAPSNLAVVGRYVLAADIWPLLEKTPYGAGGEIQLTDAIAMLMEQKPVEAFAMVGRSHDCGDKLGYMKAFVEYGLRHPTQGEAFSEWLKGMLQA

SEQ ID NO: 110795 - DNA, 1122 bp, Cryptococcus neoformans var
  CDS (1)..(1122)
atgactcagctcaagcgcgtccttgtcaccggtggtctgggttacattggctcccacgttgtcgtctctctcctcctgacaggcaaataccagcccattgttattgacaactgccacaactcgtatccagaagctctcaatcgatgcgccgagattgcgcgtgacgagctgggtgctgatgctcctcaaccgatattacacgatctcgatctgagagatgcttccgcgatcgaacaagtgtttgagcagtacgcggcggatggtggcatctgggctgtcattcacttggctgccctcaaggctgtgggcgaatctgcagagcttccgctcagttactatagagtaaatgttgccgggtcaatttcattgctcgagataatggccaaatactcttgcaacaatctcgtcttctcttcgtccgcaacagtctacggcactcctgccactatccctatcccggaaacttccccgctgattcccgaatcatgttacggtcgcacaaaagcaatggtcgaggagatcatccacgatttgaccaaagtcggtgccgaagagggcaagcctaatttgagggcggtcagtgtccggtatttcaaccctgcaggtgcacacccttctggtaaacttggtgaagaacctcgaggtaaaccaggaaaccttctcccactccttgcccagatggcagttggccgagaaaaatcgcaactcaaagtctttggcacggatttccccacccccgatggtacatgcgtcagagactatcttcacatcatggatcttgcccatggccacgtgcttgcgcttgacgctcttgccgttccctcgtcccgacccaatatcttttctgaaattgatcccaaggatggttacttccgtgctttcaatctcggcagaggacagggtatgagcgtcttgaacatgattgaagcgatgaggaaggcaacagggtttgattaccaatatgagattgtgggaaggaggaaaggagacgtcccagatcttactgccgacccttctctcgcccaaaaagaactcggttttgtcgcaaaagaagatcttgaatccatgtgcagagatctctggaacttccaaacaagacatcccacaggctactcatcttag

SEQ ID NO: 110796 - protein, 373 aa, Cryptococcus neoformans var
MTQLKRVLVTGGLGYIGSHVVVSLLLTGKYQPIVIDNCHNSYPEALNRCAEIARDELGADAPQPILHDLDLRDASAIEQVFEQYAADGGIWAVIHLAALKAVGESAELPLSYYRVNVAGSISLLEIMAKYSCNNLVFSSSATVYGTPATIPIPETSPLIPESCYGRTKAMVEEIIHDLTKVGAEEGKPNLRAVSVRYFNPAGAHPSGKLGEEPRGKPGNLLPLLAQMAVGREKSQLKVFGTDFPTPDGTCVRDYLHIMDLAHGHVLALDALAVPSSRPNIFSEIDPKDGYFRAFNLGRGQGMSVLNMIEAMRKATGFDYQYEIVGRRKGDVPDLTADPSLAQKELGFVAKEDLESMCRDLWNFQTRHPTGYSS

SEQ ID NO: 110797 - DNA, 987 bp, Rhizobium meliloti
  CDS (1)..(987): transl_table=11
atgggagcgccacgtatcctggttacgggtggcgccggatatatcggcagccacaccgccaagcttctgcgcctggagggcatcgagcccatcgtctacgataacctgacgacgggaaaccgctccgcggttcgctggggaccattcgttctcggagacattctggacggaaaccacctggtcgaggtgttagaataccaccggcctgacgcggtgatccatttcgctgcatccgcctatgtcggcgagtccgttgccgatccggcaaaatactacaacaacaacgtccgcgggacgctgtcgctcctcgatgcatgccgccggacgggcgtcgacaaggtgatcttctcatcgagctgcgccacctatggcgttccggctgtgctccccatccacgagacgacgccgcaggatcccatcaatccctacggcaagacaaagttgatggccgagcacatgcttgccgactatgcggccgccttcaagctgaactacgtcgcgctacgctatttcaacgcatgcggcgccgatcctgagggggacctcggggaatggcacgatccggaaacacacctcattccgcaggcgctgatggctgcggccggcacgatttcgcatctggagattttcggcgaggactacgataccccggatggaacctgcgtgcgtgactatattcacgtgtctgatctcgcgagtgctcacgtgctggcatatcggcatctcgccaagggtggcgaaaacctcgcaatcaacgtcggcacaggccgcggcttctcgatcagggaagtcctgcgagcaatcgtcgaggttaccggacgcgatgttcctgtcgtctttcgccgccgccgctttggagacccgccaacgctttatgcggatggcgggcttgcatgccggacactgggatttcttccgcgttactccgatctggagacgatcgtacgaacggcggcccctatcttcggactggaggcgcggtcatga

SEQ ID NO: 110798 - protein, 328 aa, Rhizobium meliloti
MGAPRILVTGGAGYIGSHTAKLLRLEGIEPIVYDNLTTGNRSAVRWGPFVLGDILDGNHLVEVLEYHRPDAVIHFAASAYVGESVADPAKYYNNNVRGTLSLLDACRRTGVDKVIFSSSCATYGVPAVLPIHETTPQDPINPYGKTKLMAEHMLADYAAAFKLNYVALRYFNACGADPEGDLGEWHDPETHLIPQALMAAAGTISHLEIFGEDYDTPDGTCVRDYIHVSDLASAHVLAYRHLAKGGENLAINVGTGRGFSIREVLRAIVEVTGRDVPVVFRRRRFGDPPTLYADGGLACRTLGFLPRYSDLETIVRTAAPIFGLEARS

SEQ ID NO: 110799 - DNA, 1047 bp, Rhizobium meliloti
  CDS (1)..(1047): transl_table=11
gtgaactatttcaggaacgattttaaaaaaactctcttaaacgtaaatgaagacagggatgcactgccacgccgaagcatccagaagagcatacttgttacgggtggtgccggctttctggggtcgcatctctgcgagctgcttctgggcgccgggcacgaagtcatctgcctcgacaatttctccacgggcctgagacgcaatatcgcgccgctcaagcgctacgacacgttccgtgtcatcgcccacgatatcgttgacccgatcgacctcgaggtcgacgagatctacaaccttgcctgcccggcatcgccgccgcactatcaggcagacccgattcagacgaccaagacctgtgtgatcggctcgttgaacctgcttgatctggccgcgcgccgtggcgcgcgcattttccaggcgtccacatccgagatctacggcgatccgcaggtccacccgcaggtggaaagctattggggcaatgtgaattccttcggtccgcgctcctgctacgacgagggcaagcgctgcgcagagaccctgttcttcgactaccaaaaagtgcacggggtcgaaacgaagatcgtccgcatcttcaacacctacggcccccggatgcgcccggatgatggtcgcgtcgtttccaatttcatcgttcaggctctgaaaggtgagaacatcacgatctatggtgacggctcgcagacgcgttccttctgtttcgtcgacgacctgatcgacggcttcgttcgtctcatgggatcgcccgcgtcgcttaccggcccggtcaatctcggcaatccgacagaattcactatcggcgaactcgccgatgaggtgatccggctgaccaattcgcgttcgaagatcgttcggctgcccctcccggttgacgatcctcgtcagcgccgacccgacatttcgctcgcaaccaaagagctcggctggcgtccgaaggtcaatctggccgaaggccttgcgcaaacgatcagatatttcgacggcgttctctcccggtcgacacgggaaaatgcggagctggtctga

SEQ ID NO: 110800 - protein, 348 aa, Rhizobium meliloti
MNYFRNDFKKTLLNVNEDRDALPRRSIQKSILVTGGAGFLGSHLCELLLGAGHEVICLDNFSTGLRRNIAPLKRYDTFRVIAHDIVDPIDLEVDEIYNLACPASPPHYQADPIQTTKTCVIGSLNLLDLAARRGARIFQASTSEIYGDPQVHPQVESYWGNVNSFGPRSCYDEGKRCAETLFFDYQKVHGVETKIVRIFNTYGPRMRPDDGRVVSNFIVQALKGENITIYGDGSQTRSFCFVDDLIDGFVRLMGSPASLTGPVNLGNPTEFTIGELADEVIRLTNSRSKIVRLPLPVDDPRQRRPDISLATKELGWRPKVNLAEGLAQTIRYFDGVLSRSTRENAELV

SEQ ID NO: 110801 - DNA, 1041 bp, Vitis vinifera
  CDS (1)..(1041)
  misc_feature (243)..(243): r is g or a
atggcaaagaatacttcgaatggagagcatcaaatcacaacaaagccccctcccacgccttcgcctttgaggaattccaaattttttcagtccaatatgagaatattggtcactggaggagctggattcattggttcacatttggtggacaagctgatggaaaatgaaaagaatgaggtaattgttgccgataactacttcaccggttctaaggacaatctcaagaaatggattggtcatccragatttgagcttattcgtcatgatgtcactgagccattgttgattgaggttgataagatataccaccttgcatgtcccgcttctcctattttttataaacacaatcctgtaaagacaataaaaacaaacgtcattggtacactgaatatgctgggacttgccaaacgagttggagcaaggatattgcttacatcaacttcagaagtatatggagatcctcttgagcatccccaaactgagagctattggggaaatgttaacccaataggtgtgcggagctgctatgatgaggggaagcgtgtggctgagactttgatgtttgattatcataggcaacatgggatagaaatacgcattgctagaattttcaacacatatgggccccgcatgaatattgatgatggacgtgttgtcagcaatttcatagctcaagcacttcgtggtgaacctttgacagttcaggctcctggaacacagactcgcagtttctgctatgtctctgacatggttgatgggctgattcgactcatggaaggagagaacactgggccaatcaacattggaaacccaggtgaatttactatgctcgagcttgctgagacagtgaaggagctaattaatcctgaggtggtgataaaaatggtagataacactcctgatgatccacgacagaggaaaccagacatttctaaggctaaagaattgttaggatgggaaccaaaaatcaaactgcgggatggccttcccctcatggaggaggatttccgtctgagacttggagttcccaaaaagaagtga

SEQ ID NO: 110802 - protein, 346 aa, Vitis vinifera
MAKNTSNGEHQITTKPPPTPSPLRNSKFFQSNMRILVTGGAGFIGSHLVDKLMENEKNEVIVADNYFTGSKDNLKKWIGHPRFELIRHDVTEPLLIEVDKIYHLACPASPIFYKHNPVKTIKTNVIGTLNMLGLAKRVGARILLTSTSEVYGDPLEHPQTESYWGNVNPIGVRSCYDEGKRVAETLMFDYHRQHGIEIRIARIFNTYGPRMNIDDGRVVSNFIAQALRGEPLTVQAPGTQTRSFCYVSDMVDGLIRLMEGENTGPINIGNPGEFTMLELAETVKELINPEVVIKMVDNTPDDPRQRKPDISKAKELLGWEPKIKLRDGLPLMEEDFRLRLGVPKKK

SEQ ID NO: 110803 - DNA, 1308 bp, Vitis vinifera
  CDS (1)..(1308)
  misc_feature (1146)..(1146): m is a or c
atgtcgcagcacatggacaacatcccctccacgcccggaaaattcaagtccgacaagtatcactacattcaccgattccgatcccactcgtctctcgctaagctcattctctggtcattattcttcttcagcgtcatttgctttttctttctgttatcgcctacgtcgccgacgtcctctcccgctgaccggtctcgccgggttctggcgaactatacttggggaggtcctgaatgggaaaagaaggtgcggcaatcggcgcgtgtccgctctgatcacggccataccgtgctggtgaccggtggcgccggcttcgtcggtagccacgtctctgcagcgctgaagcggcggggagatggcgttatcggcctcgacaattttaacaactactacgacccggaactgaagcgccaccgccgcgacctgcttgagcgcgccggcgtgtttgtggtggaaggcgatatcaatgactcggagcttcttaggaagctcttcgatgtggtcgcgttcacacacgtaatgcaccttgctgctcaggccggtgttcgctacgcaatgcagaatcctaagtcatatgtcaacagtaacattgctgggcttgtgaatcttcttgaagtttgtaaatctgcggacccgcagccagctatcgtctgggcatcttcgagctctgtttatgggcttaattctaaggtgcccttctcggaaaaagatcgaacggaccgtccggcgagcctatacgcagcgacaaagaaagcaggtgaagccattgctcatacatataatcatatatacggtctttcaattactggcttgcgatttttcaccgtgtacggaccgtggggcaggccagatatggcatatttcttctttactcgagatattctcacagggaagccaattacgatctttgaagggccagatcatggatctgttgctagagattttacatacattgatgatatagtgaaggggtgtttggcatcattggataccgcgaagaaaagtacaggtactggtggtaagaagaagggggcggctcaatttcggattttcaatttggggaacacgtcgccggtggatgtgagcaagctggtgagcatactggagaagcttttgaaggtgaaagcaaaaaggagggtgttgccmatgcccaggaatggagatgtgcagtatacacatgcgaatataagtttggcacagagggagctcgggtataagcctacaactgatcttgagtcagggctgaagaaatttgtgcggtggtacatcacttaccagtcaaaatcgaagaaaaagagctcatggtga

SEQ ID NO: 110804 - protein, 435 aa, Vitis vinifera
MSQHMDNIPSTPGKFKSDKYHYIHRFRSHSSLAKLILWSLFFFSVICFFFLLSPTSPTSSPADRSRRVLANYTWGGPEWEKKVRQSARVRSDHGHTVLVTGGAGFVGSHVSAALKRRGDGVIGLDNFNNYYDPELKRHRRDLLERAGVFVVEGDINDSELLRKLFDVVAFTHVMHLAAQAGVRYAMQNPKSYVNSNIAGLVNLLEVCKSADPQPAIVWASSSSVYGLNSKVPFSEKDRTDRPASLYAATKKAGEAIAHTYNHIYGLSITGLRFFTVYGPWGRPDMAYFFFTRDILTGKPITIFEGPDHGSVARDFTYIDDIVKGCLASLDTAKKSTGTGGKKKGAAQFRIFNLGNTSPVDVSKLVSILEKLLKVKAKRRVLPMPRNGDVQYTHANISLAQRELGYKPTTDLESGLKKFVRWYITYQSKSKKKSSW

SEQ ID NO: 110805 - DNA, 1047 bp, Vitis vinifera
  CDS (1)..(1047)
atggcgaaaaccattctgatcaccggcggtgccggatacattggcagccacaccgttcttcagcttctgttgggcggattcagggcggtcgtcgttgacaacctcgacaactcctccgaaatcgccattcaccgcgttaaagaactggctgctgagttcggcgacaacctcgtcttccacaagttggatctaagggacaaacaagcgcttgaacaactttttgcctcaacaaattttgatgctgtcattcactttgctgggttgaaggcagttggtgaaagtgtgcaaaaaccattgctttactatgataacaaccttattggcacaattactctattggaagtcatggctgcccatggatgcaaaaagcttgttttttcatcatcagctactgtttatggttggccaaaggaggttccatgtacagaagagttcccgctatgtgctgcaaatccatatggacgaaccaagcttgttattgaagatatatgccgtgatatttacggttcagattctgaatggaaaatagtgttgctgagatacttcaacccggttggtgcacattctagtggccatattggtgaggatcctcgtggaatcccaaacaaccttatgccctttgtgcagcaagttgctgttggcaggcgacctgcacttacagtttttggaagtgactattcaacaaaggatggtaccggggtacgtgattacatccatgttgttgatttggcagatgggcacattgcagctttgtgcaagctattcaactcagaaataggctgtgaagtgtacaacttgggaacaggaaaaggaacatcggttttggagatggttgcagcatttgagaaggcatctggaaagaaaattcctctagtcatggccggacgaagacctggtgatgctgagattgtttatgcatcgacagccaaagcagaaaaagagttaaactggaaggccaagtatggcatcagcgagatgtgtcgggaccaatggaattgggccagcaagaacccctatggctacgaatcgtccccaacacaagactaa

SEQ ID NO: 110806 - protein, 348 aa, Vitis vinifera
MAKTILITGGAGYIGSHTVLQLLLGGFRAVVVDNLDNSSEIAIHRVKELAAEFGDNLVFHKLDLRDKQALEQLFASTNFDAVIHFAGLKAVGESVQKPLLYYDNNLIGTITLLEVMAAHGCKKLVFSSSATVYGWPKEVPCTEEFPLCAANPYGRTKLVIEDICRDIYGSDSEWKIVLLRYFNPVGAHSSGHIGEDPRGIPNNLMPFVQQVAVGRRPALTVFGSDYSTKDGTGVRDYIHVVDLADGHIAALCKLFNSEIGCEVYNLGTGKGTSVLEMVAAFEKASGKKIPLVMAGRRPGDAEIVYASTAKAEKELNWKAKYGISEMCRDQWNWASKNPYGYESSPTQD

SEQ ID NO: 110807 - DNA, 1038 bp, Vitis vinifera
  CDS (1)..(1038)
  misc_feature (1002)..(1002): r is g or a
atggcgaaggaagtttccaatggggatcacaattcagttacgaagccgccaccgacgccgtctcctctgcgaaattctaagtttttccagtccaatatgagaattttggttacgggaggggctggattcattggctctcaccttgtagacaaattgatgcagaatgagaagaatgaggtgattgttgctgataactacttcactggatcgaaagataacctgaggaaatggattggtcatccaagatttgagcttattcgtcatgatgttactgagccattgttgattgaggttgatcaaatataccatcttgcttgtcctgcatcaccaattttctacaaatacaatcctgtgaagacaataaagacaaatgtgattggcaccttgaacatgttggggcttgccaagagagttggagcaaggattttgctcacatcaacttcagaggtgtatggtgatcctcttgtgcatccacaggaagagagctactggggcaatgtcaatccgataggagtcaggagttgctatgatgagggaaagcgagtggctgaaactctgatgtttgattatcacaggcagcatggaatagagatacggattgccaggatattcaatacttatggaccccgaatgaatattgatgacgggcgtgttgtcagcaatttcattgctcaagcaattcgtggtgaatccttgactgttcaagctcctggaacacaaactcggagtttttgttacgtgtctgacatggttgatggacttgttcgactcatggaaggagacaacacaggccccatcaacatcgggaatccaggtgaatttacaatgctcgaacttgctgagacagtgaaggagcttatcaaccctaaggttgagatcagcatggtggaaaacacaccagacgatcctcgccagaggaagccagacatcacaaaggcaaaggagttgctgggatgggaaccgaacgtcaagttgcgtgaaggccttcccctcatggaggargatttcaggctgaggcttggagtggcaaaaaattga

SEQ ID NO: 110808 - protein, 345 aa, Vitis vinifera
MAKEVSNGDHNSVTKPPPTPSPLRNSKFFQSNMRILVTGGAGFIGSHLVDKLMQNEKNEVIVADNYFTGSKDNLRKWIGHPRFELIRHDVTEPLLIEVDQIYHLACPASPIFYKYNPVKTIKTNVIGTLNMLGLAKRVGARILLTSTSEVYGDPLVHPQEESYWGNVNPIGVRSCYDEGKRVAETLMFDYHRQHGIEIRIARIFNTYGPRMNIDDGRVVSNFIAQAIRGESLTVQAPGTQTRSFCYVSDMVDGLVRLMEGDNTGPINIGNPGEFTMLELAETVKELINPKVEISMVENTPDDPRQRKPDITKAKELLGWEPNVKLREGLPLMEEDFRLRLGVAKN

SEQ ID NO: 110809 - DNA, 1380 bp, Vitis vinifera
  CDS (1)..(1380)
atggcgtctccgcccgacacaagcaaaaccacaaagctagagcgctataacagctacatccgccgagtaaatagcacaaaactcatggctgcctcctccaagctgctatttagagcaacccttttggtggcgttggtcctcatcttcttcttcaccctcaattaccctccgctttccgataacccccaccacgtcctcacccaccaaaacttcctctcctccgccttctacggttccggcgcctcctgggagaaacaagtccgccactcctccactcctcgccgccccaacgggttttccgtcctcgtcactggggccggcggcttcgttggcacccactgctccctcgctctcaaaaagcggggcgatggggtcctcggcctcgataacttcaacgactactacgacccatctctaaaacgagcgcgccaagctatgttgtccaaacaccaaatcttcatagttgaaggtgacctcaacgacgctcctttgctctcaaagctcttcgacatggtgcctttcacccatatactccatctggctgctcaggccggtgtgcgctatgcaatgcagaaccctcagtcctacgtgaggtccaacattgctggcttcgtcaacctcctcgagatcgccaaggccgccgatcctcagcctgccatcgtctgggcgtcatccagctctgtctatggcctcaacacagagaacccattttcagagctccaccgaacagaccagccagcaagcctttacgccgccaccaagaaagccggagaagaaatcgcccacacatataaccacatctacggtctctcactcaccggcctgaggttcttcaccgtgtacggaccttgggggagacccgacatggcatacttcttcttcaccaaggacatactccaaggaaagcccataaccatataccagactcaggacgacaaggaggtggcgcgtgacttcacgtacattgatgacgtggtgaaggggtgccttggagcgctggacacagcggagaagagcaccggcagtggcggaaaaaagaggggtccggcccagctgagaatttacaacctggggaacacgtcgccggtaccagtagggaggctagtgggtattctggaagggctgttgaacgtgaaggccaagaagcacgtcatcaagatgccacgaaacggcgacgttccatacacacacgccaatgtgagcttggcatacagagactttggatacaagcccagcaccgatttggccaccgggctgaggcggttcgtgaagtggtacgttagttattatggaattcagacgaggttattgctgtggtccatgctggcatgccgtatccgatcaatcggtcgatgctgccccttcctgtttgtagtatag

SEQ ID NO: 110810 - protein, 459 aa, Vitis vinifera
MASPPDTSKTTKLERYNSYIRRVNSTKLMAASSKLLFRATLLVALVLIFFFTLNYPPLSDNPHHVLTHQNFLSSAFYGSGASWEKQVRHSSTPRRPNGFSVLVTGAGGFVGTHCSLALKKRGDGVLGLDNFNDYYDPSLKRARQAMLSKHQIFIVEGDLNDAPLLSKLFDMVPFTHILHLAAQAGVRYAMQNPQSYVRSNIAGFVNLLEIAKAADPQPAIVWASSSSVYGLNTENPFSELHRTDQPASLYAATKKAGEEIAHTYNHIYGLSLTGLRFFTVYGPWGRPDMAYFFFTKDILQGKPITIYQTQDDKEVARDFTYIDDVVKGCLGALDTAEKSTGSGGKKRGPAQLRIYNLGNTSPVPVGRLVGILEGLLNVKAKKHVIKMPRNGDVPYTHANVSLAYRDFGYKPSTDLATGLRRFVKWYVSYYGIQTRLLLWSMLACRIRSIGRCCPFLFVV

SEQ ID NO: 110811 - DNA, 1284 bp, Vitis vinifera
  CDS (1)..(1284)
  misc_feature (248)..(248): r is g or a
atgtcccatcttgacaacatcccttctaccccaggaaaattcaagatggagaagagactcaggtggcattcctctcttgccaagctaacgttttggtccttcgtcttcttgggcttgattttcatctttttcttcctatccccgtcatcatcatctctgccgtccgacccctcccgccggtccctccggacctacagttggggcggtcctgcctgggaaaagcgggtccgatcatcggccaaagtgcrtgctcgcaatgggatctctgtgctcgtcaccggcgctgccggattcgttggaacccacgtctccgccgcactcaagcgccgcggcgatggcgttgtcgggcttgataacttcaatgactactatgatccctccttgaaacgtgcccggcaagctcttcttgagcgtaccggtgtgttcattgtggagggtgatataaacgattcagagcttctccggaagctatttgaggtagttgcatttacccatgtaatgcatttggccgctcaggctggtgttcggtatgctatggaaaatccaagttcgtatgttcatagtaatattgctggtcttgttaatcttcttgaagtctgtaaatcggcgaatccacagcctgcaattgtgtgggcttcttcgagttcagtgtatggactcaatacaaaggtacccttttccgagagagatcggacggatcagcctgccagtctctatgccgccaccaagaaggctggcgaagagattgcccatacttataatcatatatatggcctttcgcttactgggttgcggttctttaccgtttatggaccatggggaagacctgatatggcgtatttctttttcacgaaggatattttgaaggggaaatcgattcgcatatttgaggctccaaatcatgggacggttgcccgggattttacctacattgatgatatcgtgaagggatgtgtggcagcattagatactgcggagaagagcactggtagtggtgggaagaagaaggggccagcccaattgagggttttcaatttgggcaacacatcaccggttccagtcacggatcttgtgagcattttggagagactcttgaaggtgaaggcaaaaagaacgatgatgaagatgccaaggaatggggatgtgcagtttacccatgccaacatcagcttggctcaaagggagctcggatacaagcccacaacagatctgcaaacaggtttgaagaaatttgttaggtggtacatcaaatactattcagcaggggagaagagtgctcagtaa

SEQ ID NO: 110812 - protein, 427 aa, Vitis vinifera
  misc_feature (83)..(83): The Xaa at location 83 stands for Arg, or His.
MSHLDNIPSTPGKFKMEKRLRWHSSLAKLTFWSFVFLGLIFIFFFLSPSSSSLPSDPSRRSLRTYSWGGPAWEKRVRSSAKVXARNGISVLVTGAAGFVGTHVSAALKRRGDGVVGLDNFNDYYDPSLKRARQALLERTGVFIVEGDINDSELLRKLFEVVAFTHVMHLAAQAGVRYAMENPSSYVHSNIAGLVNLLEVCKSANPQPAIVWASSSSVYGLNTKVPFSERDRTDQPASLYAATKKAGEEIAHTYNHIYGLSLTGLRFFTVYGPWGRPDMAYFFFTKDILKGKSIRIFEAPNHGTVARDFTYIDDIVKGCVAALDTAEKSTGSGGKKKGPAQLRVFNLGNTSPVPVTDLVSILERLLKVKAKRTMMKMPRNGDVQFTHANISLAQRELGYKPTTDLQTGLKKFVRWYIKYYSAGEKSAQ

SEQ ID NO: 110813 - DNA, 1047 bp, Escherichia coli
  CDS (1)..(1047): transl_table=11
atgtgtcagagaggatgcctagtgaaatataaaaaaatagaagacgctttgtcttctaaatctgaaacatggttgattacaggtgttgcgggatttatcggttctaacctattagaggccttactaaaacttaatcaaaaagtagttggcttagataattttgcaactggacatcaagcaaaccttgatgaggttaaagagtccgtttcagctgaacaatggtctgcttttacctttgtggaaggagacatatgtgagccagagacgtgtgtggaggttgttaaaggagttgatcatgtcctacatcaggctgcattaggttctgtgcctcgttcaattaaagatccaattactacaaataatacaaatatatcgggtttcattaatatgttggttgccgccaaagatgccaatgtcagaagtttcacttacgctgcaagtagctcaacgtatggtgatcatcctgcattacctaaaattgaagaaaatataggtaatccgctatctccatacgcagtgacaaagtatgtaaatgaattatatgcgcaagtatttgcaagaacctacggattcaaatcaattggattaagatactttaatgtatttggaaaacgccaggatcctaatggggcatatgctgctgtgataccgaagtggactgctgcaatgatcaatgatgaaccgctgtatatcaatggtgatggcgaaacaagtagagacttttgttttattgagaatgtcgtgcaaatgaatattcttgctgcacagtctgatgcgtctgcaagagatcaggtttataacgttgcagttggtgaccgtacgacgctcaatcaactgtttaatgtacttaaaaatacattaaaaaataataatgttatttatgaaaaaaaaccagtctataaggactttagggctggggatgttcgtcattctcaagcaaacatagataaagcaaagcgcttattagggtatgtgccaacacatgatatattggatggtattaaggaatctatgccttggtatataagcacattagatgttaaataa

SEQ ID NO: 110814 - protein, 348 aa, Escherichia coli
MCQRGCLVKYKKIEDALSSKSETWLITGVAGFIGSNLLEALLKLNQKVVGLDNFATGHQANLDEVKESVSAEQWSAFTFVEGDICEPETCVEVVKGVDHVLHQAALGSVPRSIKDPITTNNTNISGFINMLVAAKDANVRSFTYAASSSTYGDHPALPKIEENIGNPLSPYAVTKYVNELYAQVFARTYGFKSIGLRYFNVFGKRQDPNGAYAAVIPKWTAAMINDEPLYINGDGETSRDFCFIENVVQMNILAAQSDASARDQVYNVAVGDRTTLNQLFNVLKNTLKNNNVIYEKKPVYKDFRAGDVRHSQANIDKAKRLLGYVPTHDILDGIKESMPWYISTLDVK

SEQ ID NO: 110815 - DNA, 1068 bp, Streptomyces viridochromogenes
  CDS (1)..(1068): transl_table=11
atgcgagacggcagcgcgggtgcggaacggggacggcacgtcctggtcatcggtggagcgggcttcatcggctcccagtacgtgcgcgaactggtccgggacggcgatccggcgcgggtgaccgtgctggacaagctgacctacgccgggaacctggcgaacctggagccggtcgccggccggtacaccttcgtgcacggcgacatctgcgatgccaggctgctcgccgaggtggtccccggccacgatctggtggtcaacttcgcggccgaatcgcacgtcgaccggtcgatcgccgacgcggcgccgttcatacgtaccaatgtgcagggcgtccaggcactcatgcaggtgtgcctggaggccggcacggccaggatcgtgcaggtctccaccgacgaggtgtacggcagcatcgagacgggctcctgggacgaggacgcgccgatcgcccccaactcgccctacgcggcgtccaaggcgggcggcgacatggtcgccctcgcctacgcccgcacccatgggctgccggtgagcgtgacgcggtgcggcaacaactacgggccctatcagttcccggagaaggtcgttccgctgttcaccacccggctgctggacggccacagcatcccgctgtacggggatggcggcaacgtccgggactgggtgcacgtgtccgaccacgtgcggggcatccggctggtcgccgaacgcgggctgccggggcaggtctaccacatcgcgggctcggccgagctgaccaatctggaactgacgcaacaactgctggacgccctgggcgccggctgggaccgggtcgagcgtgtacccgaccggaagggacacgaccggcgctactcgctgtgcgacgcccgcctcggcgcgctcggctacgcaccccgtgtgtcgttcgagcaaggcctcgccgacaccgtgcgctggtacgccgagaaccgggactggtgggagccgttgaacgagcgcgcgctgtccgacggcatggctctggccgtgccgacagcacccatgactaggggagagcccgcccgcgggcttccccttcgctga

SEQ ID NO: 110816 - protein, 355 aa, Streptomyces viridochromogenes
MRDGSAGAERGRHVLVIGGAGFIGSQYVRELVRDGDPARVTVLDKLTYAGNLANLEPVAGRYTFVHGDICDARLLAEVVPGHDLVVNFAAESHVDRSIADAAPFIRTNVQGVQALMQVCLEAGTARIVQVSTDEVYGSIETGSWDEDAPIAPNSPYAASKAGGDMVALAYARTHGLPVSVTRCGNNYGPYQFPEKVVPLFTTRLLDGHSIPLYGDGGNVRDWVHVSDHVRGIRLVAERGLPGQVYHIAGSAELTNLELTQQLLDALGAGWDRVERVPDRKGHDRRYSLCDARLGALGYAPRVSFEQGLADTVRWYAENRDWWEPLNERALSDGMALAVPTAPMTRGEPARGLPLR

SEQ ID NO: 110817 - DNA, 990 bp, Streptomyces kasugaensis
  CDS (1)..(990): transl_table=11
atgtcacccacgaccacgcactgggcaggacgccaggtgctcgtcacgggagccgacggtttcatcggttcgcatctcaccgagaccctggtgagccgcggcgcccgagtcaccgcggtcgtccgacgcgtctcggccgcacaggtgacgcaccggctccgcaatctctccgccgcgaccgtcgacgccctcgaacgggtggtgcacgtggacctcgcgggaccttcggcggtcgacgtcctcggccggctggaggccgacacctggttccacctcgccgcggacgcctacgtaccggcatcgctggaccagcccgccgatgtggtgcgcaccaatgtgatgtccactctccacgtcctgctggcagcccagcagcggcagcccgcgcacctcctggtgacgagttcgagcgaggtctacggcagccagccggacgcgatcaccgaacggcatccgctggaaccggccacgccctacgcggcgtccaaggtggcctgcgaccgcctggcctggtcctggcaccacacctacggcctgccgctcaccatcgtccggccgttcaacagctacgggccccgccacgtctacgacgcggtaccgctcttcctggccagagcgctgcggggcgagccgatcaccatcaacggcagcggtgagcagacgcgcgacctcaccttcgtggccgacaccgtcgcggggttcctcgccctggcggagctgccggccaccggcgagacgtacaacatcggcaccggcacggaccaccgcatcatcgacgtggcccgcgccatcgtggccctgaccgggtcgcagagcgagatcgtgcacggcccaccgcgctccggcgaagtgctcaagctgcaggccgatccggcgaaactcaccgaggccaccgggtggcgtgccgagtacgacctggccaggggcctggcggacaacctggtctggatgcgggaacacgtggagacggtatggccgacacgatcctga

SEQ ID NO: 110818 - protein, 329 aa, Streptomyces kasugaensis
MSPTTTHWAGRQVLVTGADGFIGSHLTETLVSRGARVTAVVRRVSAAQVTHRLRNLSAATVDALERVVHVDLAGPSAVDVLGRLEADTWFHLAADAYVPASLDQPADVVRTNVMSTLHVLLAAQQRQPAHLLVTSSSEVYGSQPDAITERHPLEPATPYAASKVACDRLAWSWHHTYGLPLTIVRPFNSYGPRHVYDAVPLFLARALRGEPITINGSGEQTRDLTFVADTVAGFLALAELPATGETYNIGTGTDHRIIDVARAIVALTGSQSEIVHGPPRSGEVLKLQADPAKLTEATGWRAEYDLARGLADNLVWMREHVETVWPTRS

SEQ ID NO: 110819 - DNA, 1074 bp, Erwinia carotovora subsp
  CDS (1)..(1074): transl_table=11
atggcgttgaaacgtattttaattaccggtggtgcagggtttattggttccgcgttagtcagatacattttggctgagacgcaggacagcgtcgtggttgtcgataaactgacttatgcgggcaacctgtcttcactggcaccggttgccgatagctcacgcttcgcattcgagcaggtagatatctgcgatcgtgctgaactggatcgtgtctttacggcttaccagcctgcgctggtgatgcatttagcggcagaaagccatgttgaccgctctatcgacggccctgcggcgtttatcgaaaccaatattgtcggcacctatacgatgctggaagcagcacgccactattggcagaacctggctgatgcggacaagaatgcgttccgctttcaccatatttctaccgatgaagtctttggcgatctgcatgggacggacgatctgtttacagaaactacaccttatgcgccgagcagcccttattcggcatcgaaagcctccagcgatcaccttgttcgcgcctggttgcgcacctacgggttcccgaccgttatcacgaactgctcgaataactacggcccttaccatttccctgagaagctgattccgttggtgattctgaacgcggtcgcgggcaaaccgttgccggtttacggcgatggcgcacaaattcgtgattggttgtttgtcgaagaccatgcccgcgcactttacaaagtcgtgacggaaggcgaagtcggtgagacgtacaacattggcggccacaacgaacgtaaaaatattgaagtggtgcagaccatttgcgcgctgctagaagagctggcaccgaataagcctgctggtgtggcgcattatcgcgatctcatcacctatgtgaaagaccggccaggccacgatatgcgttatgcgatcgatgctgggaaaatcgaacgtgagttgggctggcgtccagaagaaacgtttgagacgggcatgaaaaaaaccgtcagctggtatctgaataacgaaaagtggtggcgcagtgtgcaggacggttcctataccggcgagcgtttaggactgaacgactaa

SEQ ID NO: 110820 - protein, 357 aa, Erwinia carotovora subsp
MALKRILITGGAGFIGSALVRYILAETQDSVVVVDKLTYAGNLSSLAPVADSSRFAFEQVDICDRAELDRVFTAYQPALVMHLAAESHVDRSIDGPAAFIETNIVGTYTMLEAARHYWQNLADADKNAFRFHHISTDEVFGDLHGTDDLFTETTPYAPSSPYSASKASSDHLVRAWLRTYGFPTVITNCSNNYGPYHFPEKLIPLVILNAVAGKPLPVYGDGAQIRDWLFVEDHARALYKVVTEGEVGETYNIGGHNERKNIEVVQTICALLEELAPNKPAGVAHYRDLITYVKDRPGHDMRYAIDAGKIERELGWRPEETFETGMKKTVSWYLNNEKWWRSVQDGSYTGERLGLND

SEQ ID NO: 110821 - DNA, 990 bp, Streptomyces glaucescens
  CDS (1)..(990): transl_table=11
atggccacacgtctgctcgtcaccggcggcgccggattcatcggctcgcactacgtccgcaccctcctcggtccggacgggccgcccgacgccgtcgtcaccgtgctcgacgccctgagctacgccggcaacctcgccaacctcgacccggtccgcgaccaccccccggtgcgcttcgtccacggcgacatctgcgacgcggacctggtccgggtcatggccggccaggaccaggtcgtgcacctcgccgccgagtcgcacgtggaccgctcgctgctcgatgccgccgcgttcgtgcggaccaacgccggcggcacgcagacactcctcgacgcggccctgcggcacggcgtggcccccttcgtgcaggtgtccaccgacgaggtctacggctcgctggagacggggtcgtggacggaggacgaggccgtgcgccccaacagcccctatgccgcctccaaggcgtcgggcgacctgctcgcgctggccatgcacgtcagccacggcctggacgtgcgcatcacccgctgctccaacaactacggcccctaccagttcccggagaagctcgtcccacggttcgtcaccctgctgctggagggccgcaaggtgccgttgtacggcgacgggctgcacgtacgggactggctgcacgtggacgaccacgtgcgcggtatcgaggcggtgcgggcccgcggccgggccgggcgcgtctacaacatcggaggcggcacctcgctggccaaccgggacctcgtggacctgctgctgaaggcgtgcggcgccggctgggacagggtggagcacgtccccgaccgcaagggccacgaccgccgctactcggtcgacgcgagccggatccgccgcgagctgggacacgtccccgcgacggacctgagcaccggcctggccgccacggtggcctggtaccgcgacaaccgcgcctggtgggagcccctgtgcgccggccgcgccccgcagaccgcgtga

SEQ ID NO: 110822 - protein, 329 aa, Streptomyces glaucescens
MATRLLVTGGAGFIGSHYVRTLLGPDGPPDAVVTVLDALSYAGNLANLDPVRDHPPVRFVHGDICDADLVRVMAGQDQVVHLAAESHVDRSLLDAAAFVRTNAGGTQTLLDAALRHGVAPFVQVSTDEVYGSLETGSWTEDEAVRPNSPYAASKASGDLLALAMHVSHGLDVRITRCSNNYGPYQFPEKLVPRFVTLLLEGRKVPLYGDGLHVRDWLHVDDHVRGIEAVRARGRAGRVYNIGGGTSLANRDLVDLLLKACGAGWDRVEHVPDRKGHDRRYSVDASRIRRELGHVPATDLSTGLAATVAWYRDNRAWWEPLCAGRAPQTA

SEQ ID NO: 110823 - DNA, 1071 bp, Streptococcus pneumoniae
  CDS (1)..(1071): transl_table=11
atgagaggaaaaacaattctaattacaggagtagctggttttattggatcaaatctggttaggaaattattggaattagaaggaacgatgacaatcattggtttggacaatttgaatgattactatgatattgcacttaaagattatcgattgcttcaacttaataagctaattcaggattatccagaaaaaaactggatatttatcaagggtgatattgcagataaaatgcttattaataagatttttaagagttatcatcctcagattgttgttaatctagctgcccaggcaggagtacgctactccattacaaatccagatgtatatatagaaagtaatatcgttggctttcataatgtgttggaagcttgtcgtcattcgtatgagatatatgatggtggtgtggaacacttagtttatgcatcgtcctcatcggtatatggtggaaataaaaaaatcccgtttgcaacagaagataaggtagacaatcctatttcactatatgctgcgactaaaaaaacaaatgaacttcaagcgtatgcttattcaaagatttacaatattccttcgacaggcttacgcttttttacagtttatggtcctgctgggcgcccagatatggcctattttggatttacagataaattgcgaagtggttccgatattgagatttataatcatggtaattgtaaacgagattttacttatatagatgatatcgttgaggggatagtaagggtcatgcaatcagctccgaagaaactagtgggatctgataatttaccgttagccccatataaagtgtacaatattgggaatagtaaacccgaaaatttgttagattttgtggatgttcttcaacaggagctaatcaaggcaggagttttgccggaaaattatgattttgatagtcataaaaaattagttcctatgcaaccaggcgatgttcctgttacttatgcagatacaagtgatttagagagagattttggttttaaaccaaaaacttctttacgagaaggtttgagaaagtttgcagagtggtataaagactactataatgtataa

SEQ ID NO: 110824 - protein, 356 aa, Streptococcus pneumoniae
MRGKTILITGVAGFIGSNLVRKLLELEGTMTIIGLDNLNDYYDIALKDYRLLQLNKLIQDYPEKNWIFIKGDIADKMLINKIFKSYHPQIVVNLAAQAGVRYSITNPDVYIESNIVGFHNVLEACRHSYEIYDGGVEHLVYASSSSVYGGNKKIPFATEDKVDNPISLYAATKKTNELQAYAYSKIYNIPSTGLRFFTVYGPAGRPDMAYFGFTDKLRSGSDIEIYNHGNCKRDFTYIDDIVEGIVRVMQSAPKKLVGSDNLPLAPYKVYNIGNSKPENLLDFVDVLQQELIKAGVLPENYDFDSHKKLVPMQPGDVPVTYADTSDLERDFGFKPKTSLREGLRKFAEWYKDYYNV

SEQ ID NO: 110825 - DNA, 1464 bp, Ostreococcus tauri
  CDS (1)..(1464)
atgagcgccgcgaacgagctgtcgcagcgcatcgtcggcgtctcgcacgacgacgtggagggcggcgcgagcgtggcgccgaatgggtcgacgagcgatggggttttacgcgcgtcgacgatcaccgacaatggggcgaacgagcgacggacggcgaagcgacagcgcgcgcactcgcataattacagtgggcccacgccgagggcggtgaaggcgttcttggtggcgagcgtggtgacgctgctcgcgctcatcaccacggctgcgacgtcggggaaaattgaagcgctgcgagaatctctgtcgcagtacggcgccgaggaagggaactcgggtgggcgggtggtaatggatgggagtgccccgcgacgtgactgcggggtgacgcaggaggcgtggaacaaagccacgggacttgaccgacacgacccgtgtagagacgtttcggcgcgagggagcggatcaatcaaggacgcgtacgatgccatcaagggtgatggtgagaattcatgggcactcgtcaccggtggcgcgggtttcatcggtagtgaggtggtcaggcagcttttggacatcggaatgcgcgtgcgcgtcctggacgatttgagcaccggatcgccggcaaagcttgcgttcgcacaggcggcgcaaaaggaaggaagatacgctttcgtcaagggagatgttcgcaagtacgaagacgtctcgagagctatgaacggtgtcgacttcgtttttcatctcgccgcggtgagcaaagtgaagcccacgctcgatttcgggcgcgaggatgtcgtcttggcgtgcgtcgaatcgaacgttcgcgggacggaaaatgtacttagggcgactcgagcgagggatagtggtggggatcgacgcgctcgctttgtctacgtgggttcatcgacgtattacgggaaccaacctacgccgttcgacgaggagcggacgcatttgcggacgacgacgtcgccgtatgcgacgacaaaggcgcagggagaagatttagcgcgtttatactactcgttgtacggcgtcgaggctgtcgtaacgaggatattcatggtgtatgggccgggcgaaccagcagaggccgagcaggcggtcgtgactggtagattcttcgcagcggcatcgaagggcgatgcgctcgaaatcgagggcgacgggtcgcagtttcgagatttcattcacgttagtgatgccgctcgaggtatcgtcctcgctgcgtttgccgagggcgctccagggaggacatttaacatcggttccggtaagagcacgacaattctcgacttggctaagatgatttcgaaaagacacacgttcgttgatgcgcgcgagccagatttgaagggcacgctagcttccacgtgcgccgccaagcgcgtgcttggattcgaagcgaagatgtccttgacggactacatccgtaaaacgaagcgcgagcgcagtgcatga

SEQ ID NO: 110826 - protein, 487 aa, Ostreococcus tauri
MSAANELSQRIVGVSHDDVEGGASVAPNGSTSDGVLRASTITDNGANERRTAKRQRAHSHNYSGPTPRAVKAFLVASVVTLLALITTAATSGKIEALRESLSQYGAEEGNSGGRVVMDGSAPRRDCGVTQEAWNKATGLDRHDPCRDVSARGSGSIKDAYDAIKGDGENSWALVTGGAGFIGSEVVRQLLDIGMRVRVLDDLSTGSPAKLAFAQAAQKEGRYAFVKGDVRKYEDVSRAMNGVDFVFHLAAVSKVKPTLDFGREDVVLACVESNVRGTENVLRATRARDSGGDRRARFVYVGSSTYYGNQPTPFDEERTHLRTTTSPYATTKAQGEDLARLYYSLYGVEAVVTRIFMVYGPGEPAEAEQAVVTGRFFAAASKGDALEIEGDGSQFRDFIHVSDAARGIVLAAFAEGAPGRTFNIGSGKSTTILDLAKMISKRHTFVDAREPDLKGTLASTCAAKRVLGFEAKMSLTDYIRKTKRERSA

SEQ ID NO: 110827 - DNA, 1146 bp, Ostreococcus tauri
  CDS (1)..(1146)
atgtcgacggcgaccgcgcgttcgtgcgcgcggacgacgcgcggtggagaacgtgggtgggaggcgaaacgacgcgtgaaagcgtcgggcgaacggatgtcgacgcgcgtgacgacgacggacgacgacgtcgtggtgtgcacgggcgggctcggcttcatcggatcgcacctgtgcgaaggtttggtcacgcgcgcgcgcgtggtggcggtggattcggtggacgcgcgcgggccgtatccggagaggcacaagcgcgcgaacgcgcgccggctcgaggcgctcggcgtggaggttcgggagatggacgtggcgagcgacgcgacggcgttcgaaacgctcgtgcgtgatttaggggggggtggacgacgaagagtcgcgatcgcgcacttggcggcgcggtcaggagtcggttcggcgaacgagaatccggcgggcgcgactcgggcgaacgtcgagacgacggcggtggtgatgcgagcggcgtcgagcgcgggcgtcgctcgagtggttttagcgtcgagtggatccgtgtacggcgaggcatcgatgacggccgagggtgcgccgcgcgcgagcgccgtcggtgactcaacagagcacccgaaatctgcgtacgccgcgacgaaacgcggagccgaactcttggctaaggtgtacgccgacggttatggtcacgtcccggtcgtcgttgcgagaatttttaccgtattcggaccgcgaggtcgtcccgacatggcggtctggcgtttcatcaaggcactcgaggaggggaaacggctcacgcgatttggagacgggaagagcacttggagagattacgtcttcatagacgacgtcgtcgatgcgttgacgcgagcgctcatgaacgatatcgaggttccattttcaatcgtgaacgtatcgggaggcgcgccggtgtatttatgcgaggtaattaaggcgtgcgagcgagcgtgtgaaaaacacggcgccgtggacgagtcgccgccgcgaccgggcgacgtcggcggcacctttggagatatatcgtgcgccgaaagaacgctcgatggttggcgaccgacgacttcacttgccgacggtctcgctcgcacggtaaaatggtggcgaagcgccgacgcggatgactatcgcgagccgtga

SEQ ID NO: 110828 - protein, 381 aa, Ostreococcus tauri
MSTATARSCARTTRGGERGWEAKRRVKASGERMSTRVTTTDDDVVVCTGGLGFIGSHLCEGLVTRARVVAVDSVDARGPYPERHKRANARRLEALGVEVREMDVASDATAFETLVRDLGGGGRRRVAIAHLAARSGVGSANENPAGATRANVETTAVVMRAASSAGVARVVLASSGSVYGEASMTAEGAPRASAVGDSTEHPKSAYAATKRGAELLAKVYADGYGHVPVVVARIFTVFGPRGRPDMAVWRFIKALEEGKRLTRFGDGKSTWRDYVFIDDVVDALTRALMNDIEVPFSIVNVSGGAPVYLCEVIKACERACEKHGAVDESPPRPGDVGGTFGDISCAERTLDGWRPTTSLADGLARTVKWWRSADADDYREP

SEQ ID NO: 110829 - DNA, 936 bp, Thermus aquaticus
  CDS (1)..(936): transl_table=11
atgcgcgtgctggtgacgggcggcgccggcttcatcgggagccacatcgccgaggcccttctgcgggagggcctcgaggtggcggtattggacaacctctccacgggcaagcgggaaaacgtccccccgggggtccccttctaccaggtggacctgagggacggggaaggggtggagcgggtcttccgggagttccgccccacccacgtctcccaccaggcagcccaggcctcggtcaaggtgagcgtggaggacccccttctggacttcgccgtgaacctggtgggggggatgaacctcctggaggcctgccggaggcacggcgtggagaagctggtcttcgcctccaccggcggggccatctacggggaggtgcccgagggggaggccgccgaggagacctggccccccaggcccaaaagcccctacgccgccagcaaggcggcctttgaggggtacctctccgcctacgggcagaactacggcctcaagtgggtctccttgcgctacggcaacgtctacgggcccaggcaggacccccacggggaggcgggggtggtggccatcttcgccgagcgggtccttaaaggggagcccgtgaccctctacgccaggaggaccccgggggacgaagggtgcgtgcgggactacgtttatgtgggcgacgtggccgaggcccacaccctggcccttttgagcctcgagggggtctacaacgtgggcaccggggaggggcacaccaccctcgaggtcctaaaggccgtggccgaggccgcccttaggaccccggaggtgcgccacgccccaccgcgccccggggacctggaaaggagcgtcctccccccccttaagctcatggcccacggctggcggccgcgggtgggcttccgggaggggatccgccttaccgtggaacacttccggggcgccgtatag

SEQ ID NO: 110830 - protein, 311 aa, Thermus aquaticus
MRVLVTGGAGFIGSHIAEALLREGLEVAVLDNLSTGKRENVPPGVPFYQVDLRDGEGVERVFREFRPTHVSHQAAQASVKVSVEDPLLDFAVNLVGGMNLLEACRRHGVEKLVFASTGGAIYGEVPEGEAAEETWPPRPKSPYAASKAAFEGYLSAYGQNYGLKWVSLRYGNVYGPRQDPHGEAGVVAIFAERVLKGEPVTLYARRTPGDEGCVRDYVYVGDVAEAHTLALLSLEGVYNVGTGEGHTTLEVLKAVAEAALRTPEVRHAPPRPGDLERSVLPPLKLMAHGWRPRVGFREGIRLTVEHFRGAV

SEQ ID NO: 110831 - DNA, 1002 bp, Yersinia kristensenii
  CDS (1)..(1002): transl_table=11
ctgcgagataatcagaaaacatggctaataacgggtgtggcagggtttataggttctaatctcttggagtctttactattacttaatcagaaagttgttggcctggataattttgcaactggtcatcaatacaaccttgatgaggttcaatcgctggttacggaagaccaatgggcgcaatttacttttatcgaaggtgatatttgtgatgccgatgtatgtcaaaaagcggtagttggcgttaactatgttttgcatgaagcggctttagggtctgttcctcgttcaatcgctgaccctttgaccactaatgctgcaaatattaccggctttttaaatatgctagtagctgctagagataagaaggtagacagttttacttacgcggccagcagttctacatatggtgatcatccagcactaccaaaagttgaagaaaatattggtaatcctctttcgccttatgcggttactaaatacgtgaatgagctttacgcacaagtttttgcacggacctatggttttaaaactattggacttcgttatttcaatgtgttcggtaagcgacaggatcctaatggagcttacgcggcggttattccaaaatggacatccgctatgatcaacaatgacgatgtttttatcaatggtgatggtgaaacgagtagggatttctgttatatcgagaatgttgtacaaatgaacattctcgctgctttggctaacgatgcggctaaaaatgaagtttataatgttgcggttggtgatagaacaacacttaatgaattatttaatgctcttaaaaacgctctgaggaataataacgttttatatgagaaatcagctgtttataaggacttccgttcaggtgatgttcgccattcccaagctgatattagtaaagctaaacggtctttaggttatatagcgtcacataatatctttgatggtgttgaagaagcaatgccatggtatataagattttttgatgtcaaacaataa

SEQ ID NO: 110832 - protein, 333 aa, Yersinia kristensenii
MRDNQKTWLITGVAGFIGSNLLESLLLLNQKVVGLDNFATGHQYNLDEVQSLVTEDQWAQFTFIEGDICDADVCQKAVVGVNYVLHEAALGSVPRSIADPLTTNAANITGFLNMLVAARDKKVDSFTYAASSSTYGDHPALPKVEENIGNPLSPYAVTKYVNELYAQVFARTYGFKTIGLRYFNVFGKRQDPNGAYAAVIPKWTSAMINNDDVFINGDGETSRDFCYIENVVQMNILAALANDAAKNEVYNVAVGDRTTLNELFNALKNALRNNNVLYEKSAVYKDFRSGDVRHSQADISKAKRSLGYIASHNIFDGVEEAMPWYIRFFDVKQ

SEQ ID NO: 110833 - DNA, 1056 bp, Rhizobium leguminosarum bv
  CDS (1)..(1056): transl_table=11
atgcgcatcctggtcacgggcggagcgggcttcatcggatcggcattggtgcgtcatctcgtcagcgagatcggcgccgaggtcctgaatgtcgacacgctgacctatgccggcaatctggcgtcactaaaatccgtcgaatcggcgccgaactatcaatttctgcgcgccgacatctgcgaccgcgccaggatgcaggaagcattcgcgtccttccgccctgatatcgtcatgcatctcgcggccgagagccatgtcgaccgctcgatcttgggcgcggccgatttcatccagaccaacatcgtcggcacattcagcctgctggacaccgcacggcactattgggatgagcttgacgctcgccgcaagagcgccttccgctttctgcatgtctcgacggacgaggtctacggctcgctcggcgacgagggcctcttcgaggagacgacgccttacgatccgtcctcgccctactctgcctccaaggccgccagcgaccatctggcgatcgcctggcatcgaacctacggcctgcccgtcgtcgtctccaattgctccaacaactacggcccgttccatttccccgaaaagctcattccgctgatgatcctgaacgcactggagggcaagcctcttccgatttacggtaatggcgcgaatgtccgcgactggctctatgtcgaagaccacgcccgcgcactcttcacgatcgcatccagagggcgccccggcgaaaaatacaatgtgggcggccgcaatgagcgcaggaacatcgatgtcgttcatcgcatctgcgctattctcgacggcgtctacagtgacaggggaccgcatgcacgtctgatcaccaacgtcacggaccgccccggacacgacgcacgctatgcgatcgatgcctccaaactcgaaagcgaactcggctggaaggcgcaagagaccttcgaaaccggcatcgagaagaccgtgcactggtacctggaaaacgaatggtggtggcggccgctgcgcgaaaacgtctactccggcgaacgcctcggcgttttcaagggacgataa

SEQ ID NO: 110834 - protein, 351 aa, Rhizobium leguminosarum bv
MRILVTGGAGFIGSALVRHLVSEIGAEVLNVDTLTYAGNLASLKSVESAPNYQFLRADICDRARMQEAFASFRPDIVMHLAAESHVDRSILGAADFIQTNIVGTFSLLDTARHYWDELDARRKSAFRFLHVSTDEVYGSLGDEGLFEETTPYDPSSPYSASKAASDHLAIAWHRTYGLPVVVSNCSNNYGPFHFPEKLIPLMILNALEGKPLPIYGNGANVRDWLYVEDHARALFTIASRGRPGEKYNVGGRNERRNIDVVHRICAILDGVYSDRGPHARLITNVTDRPGHDARYAIDASKLESELGWKAQETFETGIEKTVHWYLENEWWWRPLRENVYSGERLGVFKGR

SEQ ID NO: 110835 - DNA, 981 bp, Streptomyces mycarofaciens
  CDS (1)..(981): transl_table=11
atgcagaggatcctggtcaccggaggggccggcttcatcggctcacgctttgtgaacgccctgctgaacggctcgctgccggagttcggcaagcccgaggtggtggtgctggacgcgcttacctacgcgggcaacctggccaatctggcgccggtgggcgactgtggggggctgagggtcgttgcgtgggacatctgcgaccgcagcaccgtcgcccttgccatggcgggcgccgatctggtggtgcacttcgcggccgagtcgcatgtggaccggtcgatcgacgacgcggacgccttcgtgcgcaccaatgtgctgggcacccacgtcctcctccgggaggcgctggccgtgcgcccgggccggttcgtgcatgtctccacggacgaggtgtacggctcgattccggaagggtcgtggtctgaggaccacccgctgagccccaactccccctacgccgcctccaaggcggcctccgaccagctggcgctggccttccaccggacacacgggctgccggtgtgcgtcacccgctgctccaacaactacggcccgtaccagtacccggagaagatcattccgctgttcgtcagcaatctgcttgacggggcggccgtcccgctctacggcgacggcggcaaccggcgcgactggctgcacgtggacgaccactgccggggcatcgccctggtggcccggggcggccgcccggcgaaggtctacaacatcggcggcggcaccgaactgaccaacaccgagctcaccgaacgccctgctgaagctgtgcgaaccgactggtcggcggtgcgggaggtaccggaccgcaagggccacgaccgccgctactccgtcgactacgccaagatcgccaatgagctgggctatgcgccgcggatcggtatcgacgagggactggcggagaccgtgcgctggtatcgcgagaaccgcgcgtggtggaagcccctcaagaaaggacgatga

SEQ ID NO: 110836 - protein, 326 aa, Streptomyces mycarofaciens
MQRILVTGGAGFIGSRFVNALLNGSLPEFGKPEVVVLDALTYAGNLANLAPVGDCGGLRVVAWDICDRSTVALAMAGADLVVHFAAESHVDRSIDDADAFVRTNVLGTHVLLREALAVRPGRFVHVSTDEVYGSIPEGSWSEDHPLSPNSPYAASKAASDQLALAFHRTHGLPVCVTRCSNNYGPYQYPEKIIPLFVSNLLDGAAVPLYGDGGNRRDWLHVDDHCRGIALVARGGRPAKVYNIGGGTELTNTELTERPAEAVRTDWSAVREVPDRKGHDRRYSVDYAKIANELGYAPRIGIDEGLAETVRWYRENRAWWKPLKKGR

SEQ ID NO: 110837 - DNA, 984 bp, Streptomyces antibioticus
  CDS (1)..(984): transl_table=11
atgaggtacttcgtcaccggcggcgccggattcatcggcggccactatgtgcgcgccctgctcgccggcgcctacccgggcaccgccggctgcgaggtcaccgtcctggacaagctgacctacgcggcccacctcgacaacctccccctggaccacgaccggttgaccttcgtacgcggcgacatctgcgacgccggcctgctggcggacctgctgcccggacatgacgccgtggtgcacttcgccgccgagtcgcacgtcgaccgctccctcgccgacggcacgcccttcgtgacgacgaacgtgctcggcacccagatcctcctcgacgcctgcgcccgcacgggcgttccgcggttcgtccatgtctccaccgacgaggtctacggctcactgcggcacggctcctggaccgaggacaccctcctggagcccaactccccgtacgcggcctcgaaggcggcgagcgatctgatggcccgcgcctactggcgcaccagcgatgtcgccgtctccatcacacggtgctccaacaactacggcacccaccagttcatcgagaaggtcgtaccgctgttcgtgaccaacctgctggacggcctggacgtgccgctgtacggggacggtcaccatgtgcgcgagtggctgcatgtcgaggaccactgccgcgccctccacctggtgctcaccgaggggcgcgccggcgagatctacaacatcggtgccggagacgggctgaccaaccgggaactgacgcagcgtctgctcacgctctgcggggcggactggagccgggtgcgcgaggttcccgaccggacggcccacgacgagcggtactcggtcgacacggcgaagatccgcgaggagctgggcttcacaccgaggatcgggctggacgagggactggcggacgtcgtggcctggtaccgcgacaaccgcgcgtggtgggagccgctgcgcgagcgggcggccctgcccgcctga

SEQ ID NO: 110838 - protein, 327 aa, Streptomyces antibioticus
MRYFVTGGAGFIGGHYVRALLAGAYPGTAGCEVTVLDKLTYAAHLDNLPLDHDRLTFVRGDICDAGLLADLLPGHDAVVHFAAESHVDRSLADGTPFVTTNVLGTQILLDACARTGVPRFVHVSTDEVYGSLRHGSWTEDTLLEPNSPYAASKAASDLMARAYWRTSDVAVSITRCSNNYGTHQFIEKVVPLFVTNLLDGLDVPLYGDGHHVREWLHVEDHCRALHLVLTEGRAGEIYNIGAGDGLTNRELTQRLLTLCGADWSRVREVPDRTAHDERYSVDTAKIREELGFTPRIGLDEGLADVVAWYRDNRAWWEPLRERAALPA

SEQ ID NO: 110839 - DNA, 996 bp, Streptomyces argillaceus
  CDS (1)..(996): transl_table=11
atgaccaccacatccatcctggtgacgggcggggccggcttcatcggctcgcactacgtgcggaccctgctcggtccgcgcggcgtgccggacgtgacggtcaccgtgctcgacaagctgacgtacgccgggaccctcaccaacctcgccgaggtgagcgacagcgaccggttccggttcgtccggggcgacatctgcgacgcacccctggtcgacgacctgctcgcagtgcacgaccaagtggtgcacttcgccgccgagtcgcacgtcgaccggtccattctgggcgccgccgacttcgtacgcaccaatgtcaccggtacccagacgctcctcgacgcggcgctgcggcaggggatcgagacgttcgtgcacatctccaccgacgaggtgtacggctccatcgacgccgggtcctggccggagacggcgccggtcagccccaactcgctctattccgcagccaaggcgtccagcgatctcgtggcgctggcctaccaccgcacccacggtctggacgtgcgggtcacgcgttgctcgaacaactacgggtcccatcagttcccggagaaggtcatcccgctgttcgtcaccagtctgctcgacggccgcgaggtgccgttgtacggggacggcaccaacgtacgcgactggctgcacgtcgacgaccacgtccgcgcgatcgagctggtccgcacgggaggtcgggccggcgaggtctacaacatcggcggcggcaccgagctgtccaacaaggagctgacgcagctgctcctggacgcctgtggcgccggctgggaccgcgtgcggtacgtcaccgaccgcaaggggcacgaccggcgctactccgtcgactgcacgaagatccggcgtgagctcgggtaccggccggctcgggagttcggggacgcactggccgagactgtcgcctggtaccgccaccaccgtgcctggtgggagccgctgacgcgggcgtacggggcggtggcggcctga

SEQ ID NO: 110840 - protein, 331 aa, Streptomyces argillaceus
MTTTSILVTGGAGFIGSHYVRTLLGPRGVPDVTVTVLDKLTYAGTLTNLAEVSDSDRFRFVRGDICDAPLVDDLLAVHDQVVHFAAESHVDRSILGAADFVRTNVTGTQTLLDAALRQGIETFVHISTDEVYGSIDAGSWPETAPVSPNSLYSAAKASSDLVALAYHRTHGLDVRVTRCSNNYGSHQFPEKVIPLFVTSLLDGREVPLYGDGTNVRDWLHVDDHVRAIELVRTGGRAGEVYNIGGGTELSNKELTQLLLDACGAGWDRVRYVTDRKGHDRRYSVDCTKIRRELGYRPAREFGDALAETVAWYRHHRAWWEPLTRAYGAVAA

SEQ ID NO: 110841 - DNA, 1323 bp, Medicago truncatula
  CDS (1)..(1323)
atgtctcagctgaagcaaatgtcgcacgctgataacagtgctccgtcgacaccgggaaagttcaagatggagaaagcttcttacttcaaccgtgtacggtggcacgcttctccggcaaagctttgtctttggagttttgttttctcagctgcgatcttgatcttctttttccgttctccggcgagttctcctcttccggcggacccttcacggcgatcattgaggagtccttccaactggggtggtcccgtttgggagaaacgtgtccgttcctccgctagagtccggtcacggaatggattctccgttcttgtgaccggagctgctggtttcgtcggaacacatgtctccgcggcgcttaagcgtcgcggagatggtgttcttgggattgataatttcaatgactattatgacccttctttgaagcgtgcaagacaagcacttttggaacgtactggtgttttcattgttgaaggtgatatcaatgatgctgctttgttaaggaagctttttgaggttgttccttttactcatgtcatgcatttggctgctcaagctggtgtgaggtatgctatggagaatcctggttcttatgttcatagtaacattgctggttttgttaatttgcttgaggtttgtaaaagtgttaatcctcaaccttcaattgtttgggctagttctagttctgtttatggattgaatactaaggttcctttttctgaaagagatagaactgatcaacctgctagtttgtatgccgctactaagaaagccggtgaagaaatcgcacatacttataatcatatctatggtctttctttaactggtttgaggtttttcactgtttatggtccttggggtaggcctgatatggcttacttctttttcactagagatattttgaaggggaagactattcctatttttgaggcggcgaatcatggcaccgttgcgagggattttacttatattgatgatattgtgagggggtgtttaggtgctttggatactgctgagaagagtactggaagtggtgggaagaagagggggccggcacagttgagggttttcaatttggggaatacctcgcctgttcctgttagtgatcttgtgggtattttggagaggctgttgaagactaaggcgaagaggaatattatgaagttgccgaggaatggggatgtgcagtttactcatgcgaatattagttatgcgcagagagagcttggttataagccggtgacggatctgcaggctggtttgaagaaatttgtgaggtggtatctgaattactattcttctgggaagaaagctgttgagtga

SEQ ID NO: 110842 - protein, 440 aa, Medicago truncatula
MSQLKQMSHADNSAPSTPGKFKMEKASYFNRVRWHASPAKLCLWSFVFSAAILIFFFRSPASSPLPADPSRRSLRSPSNWGGPVWEKRVRSSARVRSRNGFSVLVTGAAGFVGTHVSAALKRRGDGVLGIDNFNDYYDPSLKRARQALLERTGVFIVEGDINDAALLRKLFEVVPFTHVMHLAAQAGVRYAMENPGSYVHSNIAGFVNLLEVCKSVNPQPSIVWASSSSVYGLNTKVPFSERDRTDQPASLYAATKKAGEEIAHTYNHIYGLSLTGLRFFTVYGPWGRPDMAYFFFTRDILKGKTIPIFEAANHGTVARDFTYIDDIVRGCLGALDTAEKSTGSGGKKRGPAQLRVFNLGNTSPVPVSDLVGILERLLKTKAKRNIMKLPRNGDVQFTHANISYAQRELGYKPVTDLQAGLKKFVRWYLNYYSSGKKAVE

SEQ ID NO: 110843 - DNA, 1092 bp, Xanthomonas maltophilia
  CDS (1)..(1092): transl_table=11
ctgcccgatggaccaaaccgaacaggagaacgggtagtgcccacttggcttgttaccggcggagccggattcattggcggaaatttcgtgctcgaagcggtcgcgcggggcgtgcgcgtggtgaacctggatgctctgacctatgcgggaaacctgaaaacgctggcaccgctcgacggcaacccggaccacctcttcgtacacggtgacatcggcgaccgcgcgttcgtcgcgcagctgctggccgaccaccagcccgatgccgtgctgaatttcgccgcagaaagccatgtcgaccgctcgatcgatggtcccggcgcattcatccagaccaacgtggtgggtacccttggcctcctcgagagcgtgcgcgattactggaaagcgctgcctgcggacaagggcgcggccttccgcttcctgcacgtctccaccgatgaggtgtacggcacccttggcgaaaccggcaagttcagcgaaaccaccccctacgctcccaattcgccctattcggcgtccaaagctgcttcggaccacctggtgcgggcgttccaccacacctacgggctgccggtgctgaccaccaactgctcgaacaattacggtccgtatcatttccctgaaaagctcattccgcttgtgatcgccaaggctttggccggcgagccgctgccggtctacggcgacggcaagcaggtacgtgactggctgttcgtgtccgaccactgcgaagcgatccgtaccgtgctggccaagggccaggtcggggaaacctacaacgtgggcggcaactccgagaaggaaaacatcgaagtggtgcacgcaatctgcgcgctgctagatgcgcgccgtccgcgcgaagatggtcagctgcgcagcagccagatcacctacgtggccgaccgccccgggcatgaccgccgctatgcgatcgatgcgtccaagctcaaggaccagctggggtgggagccgaagtacaccttcgaccagggcattgcgttcaccgtcgactggtacctggacaaccaggaatgggtcaacggcgtgctcgatggaagctaccgcctgcagcgcatcggcactgcggcttga

SEQ ID NO: 110844 - protein, 363 aa, Xanthomonas maltophilia
MPDGPNRTGERVVPTWLVTGGAGFIGGNFVLEAVARGVRVVNLDALTYAGNLKTLAPLDGNPDHLFVHGDIGDRAFVAQLLADHQPDAVLNFAAESHVDRSIDGPGAFIQTNVVGTLGLLESVRDYWKALPADKGAAFRFLHVSTDEVYGTLGETGKFSETTPYAPNSPYSASKAASDHLVRAFHHTYGLPVLTTNCSNNYGPYHFPEKLIPLVIAKALAGEPLPVYGDGKQVRDWLFVSDHCEAIRTVLAKGQVGETYNVGGNSEKENIEVVHAICALLDARRPREDGQLRSSQITYVADRPGHDRRYAIDASKLKDQLGWEPKYTFDQGIAFTVDWYLDNQEWVNGVLDGSYRLQRIGTAA

SEQ ID NO: 110845 - DNA, 1095 bp, Paspalum vaginatum
  CDS (1)..(1095)
atggcgatcggcggggcggaggccggcgggggaggcgcgggggccagcggccggagcgtgctggtgacgggcggcgcggggttcatcggcacgcacacggcgctgcgcctgctggagcagggctacggcgtcaccgtcgtcgacaacttccacaactccgtccccgaggcgctcgaacgcgtccgcctcatcgccgggcccgcgctctccgcccgcctcgacttcatccggggggatctgaggagcgccggggacttggagaaggcgttcgcggccaggaggtacgacgccgtcgtccacttcgcggggctcaaggccgtcggggagagcgtcgcgcgcccggacatgtactacgagaacaacctcgccggcaccatcaacctctacaaggccatgaacgagcacggctgcaagaagatggtgttctcgtcgtccgcgaccgtgtacggctggccggaggtgatcccgtgcgtcgaggactccaagctgcaggccgccaacccctacggcaggaccaagctcatcctggaggagttggcgcgggactaccagcgcgcggacccgggctggagcatcgtcctgctgcgctacttcaaccccatcggcgcccacagctccggcgagatcggcgaggaccccaagggggtgcccaacaacctgctgccctacatccagcaggtcgccgtcggcaggctccccgagctcaacgtctacggccacgattaccccacccgtgacggcaccgcgatcagggactacatacacgtcgtcgacctggccgacgggcacatcgcggcgctgaacaagctgttcgacactcctgatttcggttgtgtggcctacaatctgggcacagggcgcggcacatccgttctcgagatggtggcggcgttcaagaaggcatccggcaaggagatccccaccaagatgtgccccaggagaccgggtgacgcgacggaggtttacgcgtccactgagaaggccgaaagggagctcggatggagggcccagtatggaatcgaggagatgtgcagggaccagtggaactgggccaagaagaacccctatggctactgcggcactgccgaaaaatag

SEQ ID NO: 110846 - protein, 364 aa, Paspalum vaginatum
MAIGGAEAGGGGAGASGRSVLVTGGAGFIGTHTALRLLEQGYGVTVVDNFHNSVPEALERVRLIAGPALSARLDFIRGDLRSAGDLEKAFAARRYDAVVHFAGLKAVGESVARPDMYYENNLAGTINLYKAMNEHGCKKMVFSSSATVYGWPEVIPCVEDSKLQAANPYGRTKLILEELARDYQRADPGWSIVLLRYFNPIGAHSSGEIGEDPKGVPNNLLPYIQQVAVGRLPELNVYGHDYPTRDGTAIRDYIHVVDLADGHIAALNKLFDTPDFGCVAYNLGTGRGTSVLEMVAAFKKASGKEIPTKMCPRRPGDATEVYASTEKAERELGWRAQYGIEEMCRDQWNWAKKNPYGYCGTAEK

SEQ ID NO: 110847 - DNA, 1032 bp, Vibrio vulnificus
  CDS (1)..(1032): transl_table=11
atgaccaaatacgaaaaaatccaacaagatttagttgaatcaccaaaaacatggttgataaccggtgttgctggttttattggctccaatttactagaaaaactactaaagcttgatcaaaccgtggtggggttagataactttgccacgggtcatcaacataacttagatgaagttaaaagtttagtaacagaagcccaatggcaacgatttacctttattgaaggcgatatacgtaatcctgagacctgtgtagcagcggttcaaggtgtagactatgtattacaccaagcggcactagggtctgtgccccgttcaattaatgatcctattactacaaattccgctaacatcactggttttttaaacatgttagtagcagccaaagatcagcaagtgaaaagctttacttatgccgcctcaagttcgacttatggtgatcaccctgcattgccgaaggtagaagaaaatattggcaacccgttatccccctacgccgtaaccaaatacgtaaatgaactttatgcgaatgtatttgcgcggacttatggttttaaaagtattggactgcgttattttaatgtgtttggaaaacgccaagatccaaatggtgcctatgcggctgttattccaaaatggacagcagcaatgattcaaggtgatgttatttatattaatggtgacggcgagactagtcgcgatttctgttatatagctaatacagtgcaaatgaatattcttgccgccaccgcaccagaagaagcaaaagacaagatttacaatgttgcagtaggagacagaacaaccttaaacgatctattctctgccattaaattggcattatcgaataatactgttgttgtttctcaagaacctatttatagagagtttcgtactggtgatgtaaggcattctcaggctgatgttaataaagctaagcagtatttaggctatgcgccgtcgcaccgtattctagatggaatcaacgaagcaatgccatggtatataagctttataaatgataaaaaataa

SEQ ID NO: 110848 - protein, 343 aa, Vibrio vulnificus
MTKYEKIQQDLVESPKTWLITGVAGFIGSNLLEKLLKLDQTVVGLDNFATGHQHNLDEVKSLVTEAQWQRFTFIEGDIRNPETCVAAVQGVDYVLHQAALGSVPRSINDPITTNSANITGFLNMLVAAKDQQVKSFTYAASSSTYGDHPALPKVEENIGNPLSPYAVTKYVNELYANVFARTYGFKSIGLRYFNVFGKRQDPNGAYAAVIPKWTAAMIQGDVIYINGDGETSRDFCYIANTVQMNILAATAPEEAKDKIYNVAVGDRTTLNDLFSAIKLALSNNTVVVSQEPIYREFRTGDVRHSQADVNKAKQYLGYAPSHRILDGINEAMPWYISFINDKK

SEQ ID NO: 110849 - DNA, 960 bp, Streptomyces hygroscopicus subsp
  CDS (1)..(960): transl_table=11
atgcggctcctggtgacgggcggcgcggggtacatcggcagtgtggtggcgcggcggctgctggacgagggccaccgggtggtggtcgtggacgatctgtctagcggcttcgccgacgccgtgccggagggcgcgcagttcgtgcgcggtgacatggcggtggcggcacggatcctggccggtcccgaccgcttcgacggggtggtgcatctggcggcgcgttcgctgatcgacgactcggtgcgccggccggagcgctactggcgcggcaacacccagcagtcgctcgtgctcctggacggtatgctggccgccggggtgggccggatcgtcttctcctccacggcggcgacgtacgggcagccggagcgggtgccgatcccggaggacgccccgacgcggcccaccaatccgtacggcgcctccaagctggcggtggacgtggcgctggccgactacgcgcgggcgcacggtctcgccgcggtgagcctgcgctacttcaacgtcgccggggcggtcggccgccacggggagcgccacgagccggagacccatctcctgccgctcgccctggccgcggcgctgggccgggggccggagctgcggctgaacggcgacgactatccgacccgggacggcacctgcgtacgggacttcatccatgtcgcggacgtcgcggacgcgcatctggcggcgctgagcggggcggtgagcggcacgcaccggatctacaacctgggcaacggccgggggttcaccgtgctggaggtgctggaggcggtggcccgggtcaccgggcgccgggtgccgttccgccgggcggagcgccggccgggagatccggcgacgctggtggcctccgccgagcggatccttgccgagctgggatggaagcccggccgacccaccctggaggagatgatcgaggatgccagggcctttcacgcccgccgctgctga

SEQ ID NO: 110850 - protein, 319 aa, Streptomyces hygroscopicus subsp
MRLLVTGGAGYIGSVVARRLLDEGHRVVVVDDLSSGFADAVPEGAQFVRGDMAVAARILAGPDRFDGVVHLAARSLIDDSVRRPERYWRGNTQQSLVLLDGMLAAGVGRIVFSSTAATYGQPERVPIPEDAPTRPTNPYGASKLAVDVALADYARAHGLAAVSLRYFNVAGAVGRHGERHEPETHLLPLALAAALGRGPELRLNGDDYPTRDGTCVRDFIHVADVADAHLAALSGAVSGTHRIYNLGNGRGFTVLEVLEAVARVTGRRVPFRRAERRPGDPATLVASAERILAELGWKPGRPTLEEMIEDARAFHARRC

SEQ ID NO: 110851 - DNA, 1356 bp, Trifolium pratense
  CDS (1)..(1356)
atggcttctccaccagacacaagcaaaaccattaaacttgaacgttacaacagttacataagaaaagttaacagcacaaaactccttaacgcttcttcaaaacttctcttccgcgccacactcttaatcgctctcgttctcgttttcttcttcactttcaattatccaccactctccgacaccaccagccaccacttccacacccattcccacttcctcacctccgcattcggcggaggtggagcatgggaacgacaagtccgtcactccgcgactccccgccgtcctaacggtttcactgtccttgtcaccggcgcagccggtttcgtcggttctcactgttccctcgctcttaaaaaacgcggcgacggcgttataggtcttgataatttcaacaactactacgatccgtcgttgaagcgtgcacgacaagatctactatctcagcatcaaatcttcatcgtcgaaggtgacttaaacgacggaccgttgttatcgaaactcttcgacgtagttccgataactcacatccttcatctcgcagcacaagccggagttcgttacgcaatgcaaaatccacaatcatacatcaaatcaaacattgcaggtttcgtgaatcttctagaagtttccaaaaccgcgaatcctcaaccgtcgattgtttgggcttcatcaagctcagtttacggtctaaacacagagaatccattctcagaacttgaccgaacagatcaaccggcgagtctctacgccgcaactaaaaaagccggcgaagaaatcgcacatacttacaatcacatctacggtctctccctcaccggactccgattcttcaccgtctacggtccttggggaagaccagacatggcgtatttcttcttcacgaaagatatcctccacggaaaaacgatcgatgtttatcaaacacaagacggaaaagaagtggcgcgtgatttcacatacatcgatgatatagtgaaaggatgcgtcggagctttggacacggcggagaaaagtacaggaagtggcggaaagaaaaaaggaccggcgcaattgagaatttacaatctcggaaacacgtcgccggtgccggtggggaaacttgtaacgattctggaaaatctgttaacaacgaaagcgaagaaacacgtcatcaagatgccgcgaaacggtgacgtaccgtatacgcatgcgaatgttacattggcttatagagatttcgggtataaaccagtaacggatctttcaacgggtttgagaaaattcgtgaaatggtatgttcggtattatggaattcagccaaggttaaaaaaggaaaatcgtattgataatgaacaacccgatggttccgcttga

SEQ ID NO: 110852 - protein, 451 aa, Trifolium pratense
MASPPDTSKTIKLERYNSYIRKVNSTKLLNASSKLLFRATLLIALVLVFFFTFNYPPLSDTTSHHFHTHSHFLTSAFGGGGAWERQVRHSATPRRPNGFTVLVTGAAGFVGSHCSLALKKRGDGVIGLDNFNNYYDPSLKRARQDLLSQHQIFIVEGDLNDGPLLSKLFDVVPITHILHLAAQAGVRYAMQNPQSYIKSNIAGFVNLLEVSKTANPQPSIVWASSSSVYGLNTENPFSELDRTDQPASLYAATKKAGEEIAHTYNHIYGLSLTGLRFFTVYGPWGRPDMAYFFFTKDILHGKTIDVYQTQDGKEVARDFTYIDDIVKGCVGALDTAEKSTGSGGKKKGPAQLRIYNLGNTSPVPVGKLVTILENLLTTKAKKHVIKMPRNGDVPYTHANVTLAYRDFGYKPVTDLSTGLRKFVKWYVRYYGIQPRLKKENRIDNEQPDGSA

SEQ ID NO: 110853 - DNA, 1116 bp, Aspergillus oryzae
  CDS (1)..(1116)
atgccttccggttcagttcttgtcactggtgggacgggctacattggctctttcaccgcccttgctctcctcgaggctggttacaaggtcgtcgtcgcggacaacctctacaactcctccgccgaggctcttcgtcgcattgagttgatctccggcaagaaggctgagttcgctcaggtcgatgtcaccgacgaggcggctttcgacaaggttttcgaggcccaccccgacattgacagtgttattcacttcgctgccctcaaggccgtcggcgagtctggtgagaagcctctggactactactatgtcaacgtttacggaactctcaacctcctgcgttccatggtccgccacaatgtctacaacattgtcttttccagctcggccaccgtctatggtgatgccacccgctttcccaacatgatccccatccccgaggagtgccctctgggccctaccaacccctacggtaacaccaagttcgccgtcgagaccgcaatcaccgatgtcatcaacgcccagcgtaacaacgctgccaaggccggaaacgaggaagagagcaagaagtggaacggtgctttgctgcgctacttcaaccccgctggtgcccaccccagtggcatcatgggtgaggatcctcagggtgttccttacaacctgcttccccttcttgcccaggtcgctaccggcaagcgtgagaagctccttgtgttcggtgatgactacaagtcccacgacggcactgccatccgtgactacattcacatcctcgaccttgccgatggtcacttgaaggctctcaactacctgcgcgcgaacaaccccggtgttcgtgcctggaacttgggtactggcaggggcagcactgtctacgagatggtccgtgccttctccgcctctgttggccgcgagcttccctacgaggttgctccccgccgtgctggtgacgtccttaacctcaccgctaaccccacccgcgccaacaccgagcttggctggaaggctgagcgcactctcgagcaggcttgcgacgacctctggcgctggaccaagaacaaccctcagggctaccgccaggagccccctgctgagctgctggaacagctgaagaaataa

SEQ ID NO: 110854 - protein, 371 aa, Aspergillus oryzae
MPSGSVLVTGGTGYIGSFTALALLEAGYKVVVADNLYNSSAEALRRIELISGKKAEFAQVDVTDEAAFDKVFEAHPDIDSVIHFAALKAVGESGEKPLDYYYVNVYGTLNLLRSMVRHNVYNIVFSSSATVYGDATRFPNMIPIPEECPLGPTNPYGNTKFAVETAITDVINAQRNNAAKAGNEEESKKWNGALLRYFNPAGAHPSGIMGEDPQGVPYNLLPLLAQVATGKREKLLVFGDDYKSHDGTAIRDYIHILDLADGHLKALNYLRANNPGVRAWNLGTGRGSTVYEMVRAFSASVGRELPYEVAPRRAGDVLNLTANPTRANTELGWKAERTLEQACDDLWRWTKNNPQGYRQEPPAELLEQLKK

SEQ ID NO: 110855 - DNA, 1020 bp, Aspergillus oryzae
  CDS (1)..(1020)
atgcttgttagggagtatactccgtatactattttacgtgatatggcgaatcacgacgacaagctgaaaatcctcatcactggggctgcggggttcctcggatccaaccttgcagattacctccttgcaaagggccaggtagtcattgggatggatagcttccaaacaggttctccgcagaatcttgagcacctcaggaaccatcccgactttacatttgtcaatcaaaatatacaactgcccttggaagatgtgggccagatcgatcagatttacaacctagcatgcccagccagtccgatccagtatcaaaaagacccgatctcaacgctaaggacatgcttccagggtacacaaaacgtgctcgacttagctatatcgaaaaacgcccgcgtcttacatactagcacatcagaggtatatggcgatcccctcgttcacccccagcccgaaacatactggggaaatgtcaacccctttgggatgcgatcttgctacgatgaaggcaagagagtagcagaagcactgtgctatgcataccgtgaacaacaaggcgctgatatccggatcgctcgcatttttaacacatatggccctcgcatgaatggcagcgatggtcgggtcgtgtcgaactttatcgtcgctgcattgtccggtgaagacctgaagatcaccggcgatggaactgcaacacggtctttccaatatgtcacagactgtatgaaaggactctatcgcctaatgaacagtgactacagtgaaggtcctgtgaatatcggaaatgatggggagtttactatccagcagctagcagagaaggtagctggtctcgtggccgagatgaccaatcagcctaaggtcaacattacctaccatccacgccctgcagatgatcctgctgttcgtcgaccccagatctcgctagccaaagctgtgttgaactggtgcccaacaatccccttgcaggaagggctacgaagaacgattgagtggcatgtaagcgagcgagtcgtgtcctag

SEQ ID NO: 110856 - protein, 339 aa, Aspergillus oryzae
MLVREYTPYTILRDMANHDDKLKILITGAAGFLGSNLADYLLAKGQVVIGMDSFQTGSPQNLEHLRNHPDFTFVNQNIQLPLEDVGQIDQIYNLACPASPIQYQKDPISTLRTCFQGTQNVLDLAISKNARVLHTSTSEVYGDPLVHPQPETYWGNVNPFGMRSCYDEGKRVAEALCYAYREQQGADIRIARIFNTYGPRMNGSDGRVVSNFIVAALSGEDLKITGDGTATRSFQYVTDCMKGLYRLMNSDYSEGPVNIGNDGEFTIQQLAEKVAGLVAEMTNQPKVNITYHPRPADDPAVRRPQISLAKAVLNWCPTIPLQEGLRRTIEWHVSERVVS

SEQ ID NO: 110857 - DNA, 1323 bp, Zea mays
  CDS (1)..(1323)
atgcgggtgttggaggaggacctcttcccctccaccccaggcaaggtgaagatcgagcgggcgggcgccatgaaccggcagctccaccgctgcttcgcgtccaccagcaccatgttcctgtgggcgctgttcctcgtcgccatgacggcgtcctacctcagcttccagtccttcgtcgacacctcctccaagtacttcgccgcctcctggggcggcctgcactgggagaggcagatccgcgcgtccgccgtgccgaggcggccccccgggtcagccgccggggccgggatgtcggtgctcgtcacgggcgccgcgggcttcgtgggcacccactgctccctcgccctccgcaggcgcggcgacggcgtggtcggcgtcgacaacttcaacgcctactacgacccgtcgctgaagaaggcgcgcagggcgctgctcgcctcccacggggtgttcgtcgtcgagggcgacatcaacgacggccgcctcctggccaagctcttcgatgtcgtgcccttcacccacgtgctccacctcgccgcgcaggccggcgtgcgctacgccatggagaacccggcgtcgtacgtgcactccaacgtcgccggcctcgtcacgctcctcgaggcctgcaaggacgccgacccgcagccggccatcgtctgggcctcctcctcctccgtctacggcctcaacgacaaggtccccttctcggagcgcgaccgcaccgaccagccggcctcactctacgcggccaccaagaaggccggcgaggagatcacgcacacgtacaaccacatctacggactctccatcaccggcctccgcttcttcaccgtgtacgggccctggggccgccccgacatggcctacttctccttcacccgcaacatccttcaggggaagcccatcacggtttaccgcggcaaggaccacgtggacctggcccgcgacttcacctacatcgacgatattgtcaagggctgcctcgcctccctggaaacggccggcaagagcaccggcaccggcggcaagaagcgcgggccggcgccctacaggatcttcaacctcggcaacacctctcccgttacggtgcccaacctggtgtccatcctggagaagcacctccgcgtcaaggccaagaagaacgtggtcgagatgcccggcaacggcgacgtgcccttcacgcacgccaacatctccctagccagggagcagctcgggtacaaacccaccaccaacctggacgtcggcctcaagaagtttgtcaagtggtacctgtcctattacggctacaccaggggaggatccaagaactcgcgacaatga

SEQ ID NO: 110858 - protein, 440 aa, Zea mays
MRVLEEDLFPSTPGKVKIERAGAMNRQLHRCFASTSTMFLWALFLVAMTASYLSFQSFVDTSSKYFAASWGGLHWERQIRASAVPRRPPGSAAGAGMSVLVTGAAGFVGTHCSLALRRRGDGVVGVDNFNAYYDPSLKKARRALLASHGVFVVEGDINDGRLLAKLFDVVPFTHVLHLAAQAGVRYAMENPASYVHSNVAGLVTLLEACKDADPQPAIVWASSSSVYGLNDKVPFSERDRTDQPASLYAATKKAGEEITHTYNHIYGLSITGLRFFTVYGPWGRPDMAYFSFTRNILQGKPITVYRGKDHVDLARDFTYIDDIVKGCLASLETAGKSTGTGGKKRGPAPYRIFNLGNTSPVTVPNLVSILEKHLRVKAKKNVVEMPGNGDVPFTHANISLAREQLGYKPTTNLDVGLKKFVKWYLSYYGYTRGGSKNSRQ

SEQ ID NO: 110859 - DNA, 969 bp, Streptomyces aureofaciens
  CDS (1)..(969): transl_table=11
atgcgcgccctagtgaccggagcggccggtttcatcggctcggctttcgtccggagctccctcacgcaacccgggtccgctttcccggagatggagataacggccttcgacgcgctgacgtacgccgggaacacggagaatctcagctcggtcgcggacgatccgcgtttcacgttcgtccggggcgacatcgccgacgggaaactgctcgccgaggtgctgccgggccacgacatcgtgctcaatttcgcggcggagacccatgtggaccgctccatcgagggcccgtcggtgttcgtgcgaacgaacgtcctggggactcacacgctcctcgaagccgcacgtcgggcgggggttgagcggttcgtgcagatctccacggacgaggtgtacgggtcgatcgacaccggatcctggaccgaggagtccgcgctctgcccgaactcgccgtacgccgcggccaaggccggcgccgaccatctggcgctggcctacgcccggacgtacggaatgcacgtctgtatcacccggtgttccaacaactacggcccccatcaattcccggagaaagtcatcccacgctttgtgaccctgctcatggaagggcacagagtgccgctgtacggcgacggcggaaatgtccgcgactggctgcacgtggacgaccactgcgccggtattcgcttggtcctggaaaaggggaaaccgggcgaggtgtatcacatcggcggcggcacagaactcaccaatgcggagctggcgcggctgctgctggaggaattcggccacggtgccgacagggtcgagcgggtccccgaccggctgggccacgaccggcgctactcactcgacgactcgaaactccgcgctctggggtaccggcccggcgtcccgttcgccgagggcctgcgggcgaccgtcgcctggtaccgggagaacacctcctggtggaagccactgctgccctga

SEQ ID NO: 110860 - protein, 322 aa, Streptomyces aureofaciens
MRALVTGAAGFIGSAFVRSSLTQPGSAFPEMEITAFDALTYAGNTENLSSVADDPRFTFVRGDIADGKLLAEVLPGHDIVLNFAAETHVDRSIEGPSVFVRTNVLGTHTLLEAARRAGVERFVQISTDEVYGSIDTGSWTEESALCPNSPYAAAKAGADHLALAYARTYGMHVCITRCSNNYGPHQFPEKVIPRFVTLLMEGHRVPLYGDGGNVRDWLHVDDHCAGIRLVLEKGKPGEVYHIGGGTELTNAELARLLLEEFGHGADRVERVPDRLGHDRRYSLDDSKLRALGYRPGVPFAEGLRATVAWYRENTSWWKPLLP

SEQ ID NO: 110861 - DNA, 963 bp, Streptomyces sp
  CDS (1)..(963): transl_table=11
ctggtgaccggggcggcgggcttcatcggctcgcacttcgtcagacagctcctgtcgggctcctatccggagctggccgacgcccacgtcctctcgctggacaagctcacgtacgccgggaacaccgagaacctcgccgaggtcgccggccacccccgtcacaccttcctgcacggcgacatctgcgaccggtccacggtcacccaggccctgcgcggcatcgacctggtggtgcatttcgccgccgaatcgcacgtggaccgctcgatcacggactccgccgccttcatcaccaccaacgtgctggggacgcacacactgctgcggtcggcgcttgaggcgggcgtgagccgcttcgtccacgtctccaccgacgaggtgtacggttcgatccccgagggctcctcggccgaaaccgaccccctggacccgaactccccctacgcggcgtccaaggcctcctccgacctcctggcgctcgccttccaccgcacacacggcctcgacgtccgggtgacgcgctgctccaacaactacggcccccatcagcaccccgaaaaggtcgtcccgctcttcgtgacccacttgctggagggcctgcgccttcccctgtacggcgacggcctccaccggcgcgactggctgcacgtggacgaccactgccggggcatcgccatggtcgccggccggggaagggccggagaggtgtacaacatcggtggcggtacggaactgtccaacgtcgacctcacccgtcgtcttctgggcgtcttcggcgccgactggtccgtggtggacagggtgccggaccgggcggcgcacgaccgtcgctactgcgtggacacccggaagatcaccgaggagctgggatgggctccccgggtcgccttcgagcgcgggctcgcggagaccgtcgactggtaccgggacaacggcacgtggtggaaggcgctgaaaccgtga

SEQ ID NO: 110862 - protein, 320 aa, Streptomyces sp
MVTGAAGFIGSHFVRQLLSGSYPELADAHVLSLDKLTYAGNTENLAEVAGHPRHTFLHGDICDRSTVTQALRGIDLVVHFAAESHVDRSITDSAAFITTNVLGTHTLLRSALEAGVSRFVHVSTDEVYGSIPEGSSAETDPLDPNSPYAASKASSDLLALAFHRTHGLDVRVTRCSNNYGPHQHPEKVVPLFVTHLLEGLRLPLYGDGLHRRDWLHVDDHCRGIAMVAGRGRAGEVYNIGGGTELSNVDLTRRLLGVFGADWSVVDRVPDRAAHDRRYCVDTRKITEELGWAPRVAFERGLAETVDWYRDNGTWWKALKP

SEQ ID NO: 110863 - DNA, 981 bp, Streptomyces neyagawaensis
  CDS (1)..(981): transl_table=11
gtgaatctgctggtcaccggcgccgccggcttcatcggctccgcttatgtacggatgctgctcgcgggcggcaccgcacagcgcagcggcgtgtccgaggtcacggtgctggacagcctgacctacgccgggagcctggacaatctcgatctcggcgatccccggctgacgttcgtccggggcgacatctgcgacgcccccctcgtcgacaagctgatgcaacaggccgaccaggtggtgcacttcgccgccgagtcccatgtggaccgctcgatcgcctccgccgacgctttcgtgcgcaccaacgtcacgggcacccagaccctgctggacgccgcgctgcgacacggcgtcgaccgcttcgtgcacgtgtccacggacgaggtctacggctcggtggagagcggctcccgcaccgagcgggaccccctcgaccccaactccccctacgccgcctccaaggcggcctcggaccttctggccctgtcgtaccaccgcacccacggcctcgacgtgcgggtcacccggtgcagcaacaactacgggccgcggcagttccccgagaagatcatcccgctgttcctcacgacgctgctcgacggtggtgacgtcccgctgtacggcgacgggctcaaccggcgcgactggctgcacgtcgaggaccactgcgcggccatcgagctggtccgcgccggcggtgtcgcgggccgtgtctacaacatcagcggcggtatcgagctgagcaaccgggaactgaccgcgcggctgctcgcggcagtcggcgcgacctgggcgcgcgtacggcaggtaccggaccgcaagggccacgacaggcgctatgcgatcgactgcaccaggttgcggaccgagttgggctaccgtccgcggcacgacttcgagtccgggctggccgagaccttcgcctggtatcgcgacaaccgggactggtgggagcccctcaagcgtcggcagcccgcctga

SEQ ID NO: 110864 - protein, 326 aa, Streptomyces neyagawaensis
MNLLVTGAAGFIGSAYVRMLLAGGTAQRSGVSEVTVLDSLTYAGSLDNLDLGDPRLTFVRGDICDAPLVDKLMQQADQVVHFAAESHVDRSIASADAFVRTNVTGTQTLLDAALRHGVDRFVHVSTDEVYGSVESGSRTERDPLDPNSPYAASKAASDLLALSYHRTHGLDVRVTRCSNNYGPRQFPEKIIPLFLTTLLDGGDVPLYGDGLNRRDWLHVEDHCAAIELVRAGGVAGRVYNISGGIELSNRELTARLLAAVGATWARVRQVPDRKGHDRRYAIDCTRLRTELGYRPRHDFESGLAETFAWYRDNRDWWEPLKRRQPA

SEQ ID NO: 110865 - DNA, 1008 bp, Erwinia amylovora
  CDS (1)..(1008): transl_table=11
atgaaatatctggtcaccggcgcagcgggcttcattggcttccatgtggcgcaacgcctgcttaacgccggtcaccaggttgtcggccttgacaacctgaatgactattacgatgtgaatctcaaaacggcccgcctggcgcttatttctcatcacgccagttttacctttattaagggcgatcttgccgaccgggaaggtagggcagaattatttcgctgccatcgctttcagcgggtaatccatcttgccgcacaggcaggagtgcgttattcactggaaaaccctctggcatatgcagatgccaatctggtgggtcatcttaatattctggaagggtgccgccataatcaggtggaacacctgttatacgcctcttcaagctcggtatacgggcttaaccgcaaaatgccattttctgccgatgattcagtcgatcacccggtttccctgtatgctgctaccaaaaaagccaatgagctgatgtcccatacctattctcatctgtatggcatcccgactagcggactgcacttcttcaccgtttacggtccgtggggacgtccggatatggcattatttaaatttacccgcgcaataattgccggcgaaaaaatcgacgtttataaccatggccagatgcggcgcgatttcacctatatcgacgacattgttgaatctgttttccgcctgcaggaggtgatcccgcaggcggacaaagactggacggtagaagcaggtagccctgctaccagttcggccccttaccgggtttacaatattggcaacagccagcccgtcaccttgatggactatattggggcgctggagagcgcactgggcacggtagcggataagaacatgttgcagatgcagcctggtgacgtcgtcgacaccagcgcggatatcagtgccttgtataaggccattggtttcaaaccgcaaacttcagtgaaagagggggttgcgcgctttgtgtcctggtataaagagttttatcacaagtaa

SEQ ID NO: 110866 - protein, 335 aa, Erwinia amylovora
MKYLVTGAAGFIGFHVAQRLLNAGHQVVGLDNLNDYYDVNLKTARLALISHHASFTFIKGDLADREGRAELFRCHRFQRVIHLAAQAGVRYSLENPLAYADANLVGHLNILEGCRHNQVEHLLYASSSSVYGLNRKMPFSADDSVDHPVSLYAATKKANELMSHTYSHLYGIPTSGLHFFTVYGPWGRPDMALFKFTRAIIAGEKIDVYNHGQMRRDFTYIDDIVESVFRLQEVIPQADKDWTVEAGSPATSSAPYRVYNIGNSQPVTLMDYIGALESALGTVADKNMLQMQPGDVVDTSADISALYKAIGFKPQTSVKEGVARFVSWYKEFYHK

SEQ ID NO: 110867 - DNA, 990 bp, Streptomyces griseus subsp; identical to SEQ ID NO: 73019
  CDS (1)..(990): transl_table=11

SEQ ID NO: 110868 - protein, 329 aa, Streptomyces griseus subsp; identical to SEQ ID NO: 73020

SEQ ID NO: 110869 - DNA, 1002 bp, Streptomyces fradiae
  CDS (1)..(1002): transl_table=11
atgcgcgtcctggtgaccggaggtgcgggcttcatcggctcgcacttcaccggacaactgctgaccggtgcgtatccggacctcggtgccacccggacggtggtgctcgacaagctgacctacgccgggaaccccgccaatctggagcacgtcgccggccacccggacctggagttcgtccggggtgacatcgccgaccacggctggtggcgccggctgatggagggcgtcggtctggtggtccacttcgccgccgagtcccatgtcgaccgctccatcgagagttccgaggcgttcgtgcggaccaatgtggagggcacccgggtgctgctccaggcggcggtggacgcgggcgtggggcggttcgtgcacatctccacggacgaggtctacgggtcgatcgccgagggctcctggccggaggaccaccccgtggcgcccaactccccctacgcggccaccaaggcggcctccgatctgctggccctggcctaccaccgcacctacggcctggacgtccgcgtcacccgctgctccaacaactacgggccccgccagtacccggagaaggccgtcccgctgttcaccaccaatctgctggacgggctcccggtcccgctgtacggcgacggcggcaacacccgggagtggctgcacgtcgacgaccactgccggggtgtcgcgctggtcggcgccgggggccggccgggcgtgatctacaacatcggcggcggcacggagctgaccaacgccgagctgaccgaccggatcctggagctgtgcggggccgaccggtcggcgctacgccgggtggccgaccggcccggccacgaccggcggtactcggtcgacaccaccaagatcagggaggagctgggctacgcgccccggaccggcatcaccgaggggctggccggcaccgtcgcctggtaccgcgacaaccgcgcctggtgggagccgctcaagcggtccccgggcggcagggaactggagcgcgcatga

SEQ ID NO: 110870 - protein, 333 aa, Streptomyces fradiae
MRVLVTGGAGFIGSHFTGQLLTGAYPDLGATRTVVLDKLTYAGNPANLEHVAGHPDLEFVRGDIADHGWWRRLMEGVGLVVHFAAESHVDRSIESSEAFVRTNVEGTRVLLQAAVDAGVGRFVHISTDEVYGSIAEGSWPEDHPVAPNSPYAATKAASDLLALAYHRTYGLDVRVTRCSNNYGPRQYPEKAVPLFTTNLLDGLPVPLYGDGGNTREWLHVDDHCRGVALVGAGGRPGVIYNIGGGTELTNAELTDRILELCGADRSALRRVADRPGHDRRYSVDTTKIREELGYAPRTGITEGLAGTVAWYRDNRAWWEPLKRSPGGRELERA

SEQ ID NO: 110871 - DNA, 1026 bp, Shigella sonnei
  CDS (1)..(1026): transl_table=11
atgtctcgctatgaagagattacacagcagttaattttttcaccgaaaacttggttaattactggtgtcgctggctttataggatcaaatcttttagaaaagttacttaaattaaaccaggttgttattgggttagataacttttccacgggacatcaatataatcttgatgaagttaaaacattagtttccactgaacagtggagtcgattttgctttatagaaggtgatattcgagatctcactacctgtgagcaagttatgaaaggtgttgatcatgtcttacatcaggctgcgctaggttctgtacctcgttcaattgttgatcctataacaaccaatgcaactaatattactggatttttgaatatcttacatgcggctaaaaatgcacaagtacaaagttttacttatgctgcatcaagctcaacttatggagatcatcccgcactaccaaaagtagaggaaaacattggtaatccactttctccttatgcagttactaaatatgttaacgagatttatgctcaggtatatgctcgaacatatggtgttaaaactattggattacgttattttaatgtatttggtcgtcgtcaagatcctaatggagcttatgctgcagtaattccaaaatggacagcagcaatgcttaaaggtgatgacgtatatattaatggcgatggtgaaacgagtcgtgatttttgttatatagataatgttatacaaatgaatatattatctgcattagcgaaggacagtgctaaagataatatatataatgttgcagttggtgatagaacaacgttaaatgaattatctggttacatttatgatgagcttaatttaattcaccatatcgataaattgagcattaagtatagagagtttagatctggagatgttaggcattctcaggctgatgttactaaggctatagatttactaaagtatagaccaaatataaaaatcagagagggattacgactttcaatgccgtggtatgtgagatttttaaaaggctaa

SEQ ID NO: 110872 - protein, 341 aa, Shigella sonnei
MSRYEEITQQLIFSPKTWLITGVAGFIGSNLLEKLLKLNQVVIGLDNFSTGHQYNLDEVKTLVSTEQWSRFCFIEGDIRDLTTCEQVMKGVDHVLHQAALGSVPRSIVDPITTNATNITGFLNILHAAKNAQVQSFTYAASSSTYGDHPALPKVEENIGNPLSPYAVTKYVNEIYAQVYARTYGVKTIGLRYFNVFGRRQDPNGAYAAVIPKWTAAMLKGDDVYINGDGETSRDFCYIDNVIQMNILSALAKDSAKDNIYNVAVGDRTTLNELSGYIYDELNLIHHIDKLSIKYREFRSGDVRHSQADVTKAIDLLKYRPNIKIREGLRLSMPWYVRFLKG

SEQ ID NO: 110873 - DNA, 966 bp, Streptomyces violaceoruber
  CDS (1)..(966): transl_table=11
atgaggctcctggtcaccggcgcggccgggttcatcggctcgcactacgtgcgcgagatactggcggggagctacccggagtccgacgacgtccacgtcacggtcgtcgaccggctcacctacgcggggcgccgcgacaacctgcccgagcaccacgaacggctcgacttcgtccacggcgacatctgcgaccgcgacctcctggaccgggtcctccccggccacgacgcggtcgtgcacttcgccgccgagtcccacgtggaccgctccctcaccggccccggcgagttcgtccgtacgaacgtcatgggcacccagcagctgctcgacgccgcactccacgccggtgtggaccgagtcctgcacgtctccacggacgaggtgtacggctcgttggacagcggcacctggaccgaggacagccccctgctgcccaactccccctacgcggcgtccaaggcctccacgacctggtccgccgcgcctaccaccgtacgccacggactcgacgtccgcatcacccgctgctccaacaactacggcccgcgccagcaccccgagaagctcatcccgaacttcgtcacccggctgctgaccggtcggcaggttccgctgtacggcgacggacgcaacgtgcgcgagtggctgcacgtggacgaccactgccgggcgctgcaactggtgctcaccaagggccgcgcgggcgagatctacaacatcggcggtggcagcggtatgagcaaccgcgagatgaccgcccgcctgctggacctcctgggggcggactgggacatggtgcgccatgtcgaggaccgcctcgggcacgacttccgctatgcgatcgacgactccaagatccgcgaggagctgggctacgcgccccgctggtcgatcgagagcgggctgggggcggtcgtggactggtaccgcgaccaccccgacttctggcgcgccccggcctcctga

SEQ ID NO: 110874 - protein, 321 aa, Streptomyces violaceoruber
MRLLVTGAAGFIGSHYVREILAGSYPESDDVHVTVVDRLTYAGRRDNLPEHHERLDFVHGDICDRDLLDRVLPGHDAVVHFAAESHVDRSLTGPGEFVRTNVMGTQQLLDAALHAGVDRVLHVSTDEVYGSLDSGTWTEDSPLLPNSPYAASKASTTWSAAPTTVRHGLDVRITRCSNNYGPRQHPEKLIPNFVTRLLTGRQVPLYGDGRNVREWLHVDDHCRALQLVLTKGRAGEIYNIGGGSGMSNREMTARLLDLLGADWDMVRHVEDRLGHDFRYAIDDSKIREELGYAPRWSIESGLGAVVDWYRDHPDFWRAPAS

SEQ ID NO: 110875 - DNA, 1125 bp, Hordeum vulgare
  CDS (1)..(1125)
atggcggtcaacggggcggccaacgggtcgtcgggggccaacgggtcctcgggcccgaccaggaccgtgctggttaccggaggggccggctacatcggcagccacgccgtgctgcagctgctcgccgcgggcttccgcgccgtcgtcgtcgacagcctcgagaactcctccgagctcgccgtccgccgcgtcgccgcgctcgccggggaacacgcgcggaacctctccttccacaaggttgatatccgtgacgaggatgcactggacgctgtttttgcttccacaagatttgatgctgttattcactttgctggactgaaagctgtcggtgaaagtgtacagaagccattgttttactatgaccataacattgctggcacaataaatcttttgaaagttatggcggcccatgaatgcaagaagttggtgttctcatcatcagctgcagcttatggatcacctaagaactcaccctgcacagaggagtttcctctccttccgcacaatccatatggcagaaccaagcttatggctgaggagatatgccgtgatatataccggtcagattctgagtggaggatcattttacttaggtatttcaacccggttggggctcaccccagtggataccttggtgaagacccacgtggagttccaaacaaccttatgcccttcgttcagcaagttgctgttgggaggaggccgtcagtgacaatctttggaaataactatgcaactaaagatgggactggggtacgagattatattcatgtgcttgatcttgctgaggggcatattgctgcactacggaagctttttgatagttcgtctaacataggatgtgaaccatacaaccttggaactggaaaagggacgtcagtgttggagatagtaaatgcattcgagaaggcttctggaaagaaaatcccgctggtcgtcggtcagcgccgccctggtgacgcggagattctctttgcaggaactggtaaagcagagagagaactcaactggaaagcaaagtatggcatcacggagatgtgcagggaccagtggaactgggctagcaagaacccttacgggtacgggtcacccgactcgaccaagcagaacggcaattcacactga

SEQ ID NO: 110876 - protein, 374 aa, Hordeum vulgare
MAVNGAANGSSGANGSSGPTRTVLVTGGAGYIGSHAVLQLLAAGFRAVVVDSLENSSELAVRRVAALAGEHARNLSFHKVDIRDEDALDAVFASTRFDAVIHFAGLKAVGESVQKPLFYYDHNIAGTINLLKVMAAHECKKLVFSSSAAAYGSPKNSPCTEEFPLLPHNPYGRTKLMAEEICRDIYRSDSEWRIILLRYFNPVGAHPSGYLGEDPRGVPNNLMPFVQQVAVGRRPSVTIFGNNYATKDGTGVRDYIHVLDLAEGHIAALRKLFDSSSNIGCEPYNLGTGKGTSVLEIVNAFEKASGKKIPLVVGQRRPGDAEILFAGTGKAERELNWKAKYGITEMCRDQWNWASKNPYGYGSPDSTKQNGNSH

SEQ ID NO: 110877 - DNA, 1113 bp, Hordeum vulgare; identical to SEQ ID NO: 73023
  CDS (1)..(1113)

SEQ ID NO: 110878 - protein, 370 aa, Hordeum vulgare; identical to SEQ ID NO: 73024

SEQ ID NO: 110879 - DNA, 1023 bp, Vibrio vulnificus
  CDS (1)..(1023): transl_table=11
atgaccaaataccaacaaatccaacaagagctcatcgaatcacctaaaacttggctcgttaccggtgtggccggttttatcggctccaacttactagaaaaactgctaaagcttgatcaaaccgtggtggggttagataactttgccacgggtcatcaacacaacctagatgaagtgcaatcactggttacggcagagcagtggcaacgatttacctttattgaaggcgatattcgtgactatccaagctgtgaacaagcggtaacaggggtcgattatgttttacaccaagccgcactagggtcggtgccacgctcgattgccgacccactgaccactaatgctgctaatatcaccggttttctcaatatgttgcaagctgccaaagaggcacaagtgaaaagctttacctatgcggcatccagctccacctatggcgaccaccctgcactgccaaaagttgaagagaacattggtaaaccactgtctccttatgcggtcactaaatatgtaaatgaagtttatgcttccgtttacgcaagaacttatggttttaaagcaacaggtttacgctactttaatgtattcggccgtcgtcaagatcccaatggtgcttatgcagcagtcattcctaaatggacatcagcaatgatcaataatgaagaagtatttattaatggggatggtgaaacaagccgtgacttttgctatatagaaaatgtagttcaaatgaatatgttggctgcaacaggatctgaggatgcattgggtgaagtatataactgtgccgtgggggggagaacgacattaaataccttatttgatacgttaaaaattgaactatctaataacaatgttaactattctaaaaatgttacttaccgtgattttaggcttggtgatgtaaggcactcgcaggcatccattgaaaaagcaaatgtaaaattagggtatgaacccaaatataatattcaacaaggaatatctgaagctatgccatggtatgtgcgatttataaaatag

SEQ ID NO: 110880 - protein, 340 aa, Vibrio vulnificus
MTKYQQIQQELIESPKTWLVTGVAGFIGSNLLEKLLKLDQTVVGLDNFATGHQHNLDEVQSLVTAEQWQRFTFIEGDIRDYPSCEQAVTGVDYVLHQAALGSVPRSIADPLTTNAANITGFLNMLQAAKEAQVKSFTYAASSSTYGDHPALPKVEENIGKPLSPYAVTKYVNEVYASVYARTYGFKATGLRYFNVFGRRQDPNGAYAAVIPKWTSAMINNEEVFINGDGETSRDFCYIENVVQMNMLAATGSEDALGEVYNCAVGGRTTLNTLFDTLKIELSNNNVNYSKNVTYRDFRLGDVRHSQASIEKANVKLGYEPKYNIQQGISEAMPWYVRFIK

SEQ ID NO: 110881 - DNA, 972 bp, Streptomyces bikiniensis
  CDS (1)..(972): transl_table=11
atgcgcgtcctggtgaccggggcagcgggcttcatcggctcgcacttcgtcagacagctcctgtcgggctcctatccggagctggccggcgcccacgtcctctcgctggacaagctcacgtacgccgggaacaccgagaacctcgccgaggtcgccggccacccccgtcacaccttcctgcacggcgacatctgcgacccgcccacggtggcccaggccctgcgcggcaccgacctggtggtgcacttcgccgccgagtcgcacgtggaccgctcgatcacggactccgccgccttcgtcaccaccaacgtgctggggacgcagaccctgctgcggtcggcgctcgaagcgggcgtcagccgcttcgtccacgtctccaccgacgaggtgtacggatcgatccccgagggctcctccaccgaggccgatccgctggacccgaactccccctacgcggcgtccaaggcctcctccgacctcctggcgctcgccttccaccgtacccacggcctcgacgtccgggtgacgcgctgctccaacaactacggcccccaccagcaccccgagaaggtcgtcccgctcttcgtgacccatctgctggagggcctgcgccttcccctgtacggggacggcctccaccggcgcgactggctgcacgtggacgaccactgccggggcatcgccatggtcgccgcccgggggcgggccggagaggtgtacaacatcggcggcgggacggaactgtccaacgtcgacctcacccgtcgtcttctcggcgtcttcggtgccgactggtccgtggtggaccgggtgccggaccgggccgcgcacgaccgtcgctactgcgtggacacccggaagatcaccgaggagctgggatgggctccccgcgtcgccttcgatcgcgggctcgcggagaccgtcgactggtaccgggacaacggcacgtggtggaaggcgctgacaccgtga

SEQ ID NO: 110882 - protein, 323 aa, Streptomyces bikiniensis
MRVLVTGAAGFIGSHFVRQLLSGSYPELAGAHVLSLDKLTYAGNTENLAEVAGHPRHTFLHGDICDPPTVAQALRGTDLVVHFAAESHVDRSITDSAAFVTTNVLGTQTLLRSALEAGVSRFVHVSTDEVYGSIPEGSSTEADPLDPNSPYAASKASSDLLALAFHRTHGLDVRVTRCSNNYGPHQHPEKVVPLFVTHLLEGLRLPLYGDGLHRRDWLHVDDHCRGIAMVAARGRAGEVYNIGGGTELSNVDLTRRLLGVFGADWSVVDRVPDRAAHDRRYCVDTRKITEELGWAPRVAFDRGLAETVDWYRDNGTWWKALTP

SEQ ID NO: 110883 - DNA, 1041 bp, Nicotiana tabacum
  CDS (1)..(1041)
atggcaaagaattctgcaaatggagatcaccaaacaacaacaaagcctcctccaactccatctccgttgcgcttctcaaagttctttcaacctaacatgagaattttggttactggaggagctggatttattggttcccatctagttgacaaattgatggagaatgagaagaatgaggttattgttgtcgacaactttttcactggttcaaaggataatcttaaaagatggattggtcatcccagattcgagcttaaacgccatgatgtgacagagcctttgttagttgaggttgatcagatttatcatcttgcatgcccggcttctccaatattctacaagtacaatcctgttaagacaataaagactaatgtcattggcacgctaaatatgttgggcttagcaaagcgtgtcggagcaaggattctgctaacgtcaacctcagaggtttatggtgaccctcttgtgcatcctcagactgaggaatattggggtaatgttaacccaattggggttcggagctgttatgatgaggggaagcgtgtggcagagacattgatgtttgactaccaccgacaacatgggattgaaattcggattgctagaatattcaatacatatggacctcggatgaatatcgatgatgggcgtgttgtcagcaactttatagctcaagcacttcgtgatgaaccattaacagttcaagctcctgggacacagactcgcagtttctgttatgtttctgatatggttaatgggcttattcggctaatggaaggggaaaacacagggccaatcaacattggaaatccaggtgaatttaccatgattgagcttgcagaactagtgaaggagcttatcaatccgaaagtggagatcaaatcggtggaaaatacaccagatgatccaagacaaaggaaaccagatatcacaaaagcaaaagaattgttaggatgggaaccaaaagtcaagttgcgcgatggccttccactaatggaagaagatttcagactcaggcttggggtctctaagaagatataa

SEQ ID NO: 110884 - protein, 346 aa, Nicotiana tabacum
MAKNSANGDHQTTTKPPPTPSPLRFSKFFQPNMRILVTGGAGFIGSHLVDKLMENEKNEVIVVDNFFTGSKDNLKRWIGHPRFELKRHDVTEPLLVEVDQIYHLACPASPIFYKYNPVKTIKTNVIGTLNMLGLAKRVGARILLTSTSEVYGDPLVHPQTEEYWGNVNPIGVRSCYDEGKRVAETLMFDYHRQHGIEIRIARIFNTYGPRMNIDDGRVVSNFIAQALRDEPLTVQAPGTQTRSFCYVSDMVNGLIRLMEGENTGPINIGNPGEFTMIELAELVKELINPKVEIKSVENTPDDPRQRKPDITKAKELLGWEPKVKLRDGLPLMEEDFRLRLGVSKKI

SEQ ID NO: 110885 - DNA, 1032 bp, Nicotiana tabacum
  CDS (1)..(1032)
atggcttccaatggaaacaatcatgtatcaacaaaaccaccaccagagccttcaccattgcgaaaggcaaaatttttccaggctaacatgaggattctggtgactggtggtgctggatttattggctctcaccttgttgacaaattgatggaaaatgagaagaatgaggtggttgttgtcgataattactttactggatcaaaggataatctaaagcaatggattggtcatccaagatttgagctaattcgccatgatgttactgagccattgttgattgaagttgaccgaatttatcaccttgcttgccctgcttcccctattttttacaagtataatcctgttaagacaattaagacaaatgtacttggaacaatgaacatgttgggacttgccaagcgaactggggcaaggattttactcacatcgacttctgaggtttatggagatccactcgtgcaccctcaagacgaaagctattggggcaatgttaatccaattggagttagaagttgttatgatgaagggaaaagagtggctgagactttgatgtttgattatcacagacaacatggaattgaaatccgaattgctagaatcttcaatacttatggtcctcgaatgaatattgatgatggtcgtgttgtcagcaacttcattgcccaagcaattcgtgatgaagcgttgactgtccagttgccaggaacacaaacacgcagcttttgttatgtctctgacatggttgatggccttattcggcttatggagggagataacactggaccaattaacattggaaatccaggtgaattcacgatgattgaactcgcggagaatgtgaaggagctcatcaatccggaagtgaaaattatcacagtggaaaacactccagatgatcctcggcagagaaaaccggacatcacaaaggcaaaagagttaataggctgggaaccaaagatcaagttgcgcgatggtattcctctgatggaggaagatttccgcggcaggcttggaatttcaagaaagaagtaa

SEQ ID NO: 110886 - protein, 343 aa, Nicotiana tabacum
MASNGNNHVSTKPPPEPSPLRKAKFFQANMRILVTGGAGFIGSHLVDKLMENEKNEVVVVDNYFTGSKDNLKQWIGHPRFELIRHDVTEPLLIEVDRIYHLACPASPIFYKYNPVKTIKTNVLGTMNMLGLAKRTGARILLTSTSEVYGDPLVHPQDESYWGNVNPIGVRSCYDEGKRVAETLMFDYHRQHGIEIRIARIFNTYGPRMNIDDGRVVSNFIAQAIRDEALTVQLPGTQTRSFCYVSDMVDGLIRLMEGDNTGPINIGNPGEFTMIELAENVKELINPEVKIITVENTPDDPRQRKPDITKAKELIGWEPKIKLRDGIPLMEEDFRGRLGISRKK

SEQ ID NO: 110887 - DNA, 1029 bp, Shigella dysenteriae
  CDS (1)..(1029): transl_table=11
atgaaatataaaaaaatagaagacgctttgtcttctaaatctgaaacatggttgattacaggtgttgcgggatttatcggttctaacctattagaggccttactaaaacttaatcaaaaagtagttggcttagataattttgcaactggacatcaagcaaaccttgatgaggttaaagagtctgtttcagctgaacaatggtctgcttttacctttgtggaaggagacatatgtgagccagagacgtgtgtggaggttgttaaaggagttgatcatgtcctacatcaggctgcattaggttctgtgcctcgttcaattaaagatccaattactacaaataataccaatatatcgggtttcattaatatgttggttgccgccaaagatgccaatgtcagaagtttcacttacgctgcaagtagctcaacgtatggtgatcatcctgcattacctaaaattgaagaaaatataggtaatccgctatctccatacgcagtgacaaagtatgtaaatgaattatatgcgcaagtatttgcaagaacctacggattcaaatcaattggattaagatactttaatgtatttggaaaacgccaggatcctaatggggcatatgctgctgtgataccgaagtggactgctgcaatgatcaatgatgaaccgctgtatatcaatggtgatggcgaaacaagtagagacttttgttttattgagaatgtcgtgcaaatgaatattcttgctgcacagtctgatgcgtctgcaagagatcaggtttataacgttgcagttggtgaccgtactacgcttaaacaattattcactgtattaaagaatgcacttaatgaaaatggtgtttcgtataacaaagaacctgaatataaagattttcgtgcaggtgatgttcgccattcgcaagctgatatcactaaagccaaaactagacttggatacgagccacagttcagtatatcggagggcatcctcaaagcgatgccgtggtatgtaaactctctgggcaacaaaaaataa

SEQ ID NO: 110888 - protein, 342 aa, Shigella dysenteriae
MKYKKIEDALSSKSETWLITGVAGFIGSNLLEALLKLNQKVVGLDNFATGHQANLDEVKESVSAEQWSAFTFVEGDICEPETCVEVVKGVDHVLHQAALGSVPRSIKDPITTNNTNISGFINMLVAAKDANVRSFTYAASSSTYGDHPALPKIEENIGNPLSPYAVTKYVNELYAQVFARTYGFKSIGLRYFNVFGKRQDPNGAYAAVIPKWTAAMINDEPLYINGDGETSRDFCFIENVVQMNILAAQSDASARDQVYNVAVGDRTTLKQLFTVLKNALNENGVSYNKEPEYKDFRAGDVRHSQADITKAKTRLGYEPQFSISEGILKAMPWYVNSLGNKK

SEQ ID NO: 110889 - DNA, 1089 bp, Solanum tuberosum
  CDS (1)..(1089)
  misc_feature (1024)..(1024): y is t or c
atgtcgaagagtatacttgtgacagggggagcagggtatattgggagtcacacagtgttgcaattgttgcttggtggctataagactgtggtgattgatagtttggataattcttctgaaattgctgtgaaaagggtcaaggaaattgctggtgaatatggttctaatctctcttttcataaggtggatctacgtgataagccggcagttgaggagattttcaggtctaacaaatttgatgctgttatccattttgctggactaaaagcggttggtgaaagtgttgaaaaacctctgatgtactatgacaacaaccttattggaacaattaccctcttggaaatcatggcagctcatggatgcaaaaggcttgtgttttcatcgtcagctactgtttatggttggccaaaagtggttccttgtactgaggaattccccctgagtgctgcaaatccttatggacggacaaagctcttcattgaagaaatatgccgtgatgtacaaaacgcggactctgaatggaaaatcatattgctgcggtactttaatcctgttggtgctcatccaagtggccgaattggtgaagatccgcgaggaattcctaacaaccttatgccatttgttcagcaagttgctgttggcagaagaaaagagctgacagtttatggaactgattatggaacgaaggatggtacaggggtccgtgattacattcatgttatggatttagcagatggacacattgctgccttgcagaagctatctgatccttccataggctgtgaagtgtacaacttgggaactggaaaaggaacttcagtccttgaaatggtggccgcatttgagaaggcttctggaaagaaaattccaatggttatgtctggtcgacgccctggagatgctgaaattgtatatgctgctacagagaaagcagaacgcgaattgaagtggaaggcgaaatatggcatcgaagagatgtgtagggatcagtggaactgggctaagaaaaatccctatggctacygaaggaactcccagaatctaataactgtcactgatgtctacttcaactgcataatatcgtcatag

SEQ ID NO: 110890 - protein, 362 aa, Solanum tuberosum
  misc_feature (342)..(342): The Xaa at location 342 stands for Stop, or Arg.
MSKSILVTGGAGYIGSHTVLQLLLGGYKTVVIDSLDNSSEIAVKRVKEIAGEYGSNLSFHKVDLRDKPAVEEIFRSNKFDAVIHFAGLKAVGESVEKPLMYYDNNLIGTITLLEIMAAHGCKRLVFSSSATVYGWPKVVPCTEEFPLSAANPYGRTKLFIEEICRDVQNADSEWKIILLRYFNPVGAHPSGRIGEDPRGIPNNLMPFVQQVAVGRRKELTVYGTDYGTKDGTGVRDYIHVMDLADGHIAALQKLSDPSIGCEVYNLGTGKGTSVLEMVAAFEKASGKKIPMVMSGRRPGDAEIVYAATEKAERELKWKAKYGIEEMCRDQWNWAKKNPYGYXRNSQNLITVTDVYFNCIISS

SEQ ID NO: 110891 - DNA, 981 bp, Streptomyces griseus subsp
  CDS (1)..(981): transl_table=11
atgagggtcctcgtcaccggcggcgccggtttcatcgggtcgcactatgtgcgcagcctgctgtccggcgcctacgccgggtacgagcgagcccacgtcaccgtgctggacagactcacctacgcgggcagcaccgccaacctgccgatgacccacccccggctgaccctggtccggggcgacgtctgcgaccggcgaccgctgctcgatctgctgccggaacacgacgcggtggtgcacttcgcggccgagtcgcacgtggaccgctccatccacgacgcctccctcttcgcccgtacgaacgtggtcggcacccagaacctgctcgactgctgcgtgcgcaccggtgtgcggaaggtggtgcacgtgtcgaccgacgaggtctacggctccatcgacgagggctcctggacggaggaccatccgctggaacccaactccccctacgccgcctcgaaggcgggggcggacctcatggcccgcgcctacgggcgcacccacgggctcgacgtctcggtcacccgctgctccaacaactacggcccccaccagcacccggagaagctgctcccgcacttcatcacccggctcctggacgggctccaggtgccgctgtacggggacggccgccacgtacgcgaatggatccacgtggacgaccactgccgcgccgtccagctcgtcctggacaagggagcgccgggcgcggcctacaacatcgccggcgtcgcgcggtccaacgaggacatgacccgcgacctgctgcgcctgtgcggcgccgactggagccgggtgcgcagggtcgaggaccgcaagggccacgaccggcggtacgcggtggacgactccctgatccgcgacacgctcggcttcacaccccgtatcccgctcgaagccggactggccggcctcgtcgactggtaccgcgcccaccgggcgtggtggcaaccgctcacccgcaccgcccaggaggccagatga

SEQ ID NO: 110892 - protein, 326 aa, Streptomyces griseus subsp
MRVLVTGGAGFIGSHYVRSLLSGAYAGYERAHVTVLDRLTYAGSTANLPMTHPRLTLVRGDVCDRRPLLDLLPEHDAVVHFAAESHVDRSIHDASLFARTNVVGTQNLLDCCVRTGVRKVVHVSTDEVYGSIDEGSWTEDHPLEPNSPYAASKAGADLMARAYGRTHGLDVSVTRCSNNYGPHQHPEKLLPHFITRLLDGLQVPLYGDGRHVREWIHVDDHCRAVQLVLDKGAPGAAYNIAGVARSNEDMTRDLLRLCGADWSRVRRVEDRKGHDRRYAVDDSLIRDTLGFTPRIPLEAGLAGLVDWYRAHRAWWQPLTRTAQEAR

SEQ ID NO: 110893 - DNA, 972 bp, Streptomyces halstedii
  CDS (1)..(972): transl_table=11
atgagcacccgactgctcgtcacgggcgccgccggattcatcggatcggcctacgtccgcggactcctcaccgaccagcccgacctgcgggtcaccgtcctcgacagcctcacctacgcgggcaaccgggccaacctcgacctgacacacccctccctcgacctcgtcgagggtgacatctgcgacaccgagctcgtggaccgcctcaccgccgaagccgaccagatcgtccacttcgccgccgagagccacgtcgaccggtccatcaccggctccgccgagttcatccgcaccaacgtcctcggcacccacaccctcctcgacgccgcgctccgccacggcatcgaccggttcgtccacatctccacggacgaggtctacggatcgatcgagaagggctcctggccggagaccgacccgctgcgccccaactccccctactcggcgtccaaggcatccagcgacctcctggcgctcgcctaccaccggacccacgggctcgacgtacgggtcacccgttgctccaacaactatggcccctaccagcatcccgagaaggtcatcccgctcttcgtcaccaacctcctcgacggcaagcgggtacccctgtacggggacggccagaacgtccgcgactggctgcacgtcgaggaccactgcgccgccatcgaatgcgtccgcacccgcggtggcgccggggagatctacaacatcggcggcggcaccgaactgagcaaccgggaactcaccggcctgctcctggaggcgtgcggggcggactgggacagcgtggagtacgtcaccgaccgcaagggccacgacctgcgctactccgtcgactggtccaaggtcgccgacctcggctacacccccgcccacgacttccgtgccgggctcgcggagaccgtcgactggtaccgctccaaccgcacctggtgggaaccggcgaagtacggccacagccccgcctga

SEQ ID NO: 110894 - protein, 323 aa, Streptomyces halstedii
MSTRLLVTGAAGFIGSAYVRGLLTDQPDLRVTVLDSLTYAGNRANLDLTHPSLDLVEGDICDTELVDRLTAEADQIVHFAAESHVDRSITGSAEFIRTNVLGTHTLLDAALRHGIDRFVHISTDEVYGSIEKGSWPETDPLRPNSPYSASKASSDLLALAYHRTHGLDVRVTRCSNNYGPYQHPEKVIPLFVTNLLDGKRVPLYGDGQNVRDWLHVEDHCAAIECVRTRGGAGEIYNIGGGTELSNRELTGLLLEACGADWDSVEYVTDRKGHDLRYSVDWSKVADLGYTPAHDFRAGLAETVDWYRSNRTWWEPAKYGHSPA

SEQ ID NO: 110895 - DNA, 1011 bp, Streptomyces griseoflavus
  CDS (1)..(1011): transl_table=11
atgaccgccacgaggatcctcgtcaccggtggtgccggcttcatcggctcccactacgtccgcaccctgctcggcccgcacgggcccgccggggtccgcatcaccgtgctcgacaaactgacctatgccggcaacccggccaacctcgacccggtccgtgcccaccccgggttccgcctcgtccagggcgatgtctgcgacgccgcggtcgtggaccggctggtcgccgagcacgaccagatcgtgcacttcgccgcggagtcgcacgtggaccggtcgatcctggggggcgccgagttcgtccgcacgaacgtgggcggaacgcaggtcctgctcgacgcggcgctgcgccaccacggacgcggccgcggcgtcttcgtccaggtctccacggacgaggtgtacggctcgatcccctacggttcgtggccggagacgcacccgctgtcacccagttcgccctacgcggcctcgaaggccgccgccgacctcgtcgccctcgcccaccaccgcacccacggcctcgacgtccgggtgacccgctgctccaacaactacggccatcaccacttccccgagaagctgatcccgctgttcatcacgcgcctcctcgagggccgcaccgtcccgctgtacggggacgggctcaacgtccgcgactggctgcacatcgacgaccacgtccagggcatcgaactggtccgcacgaagggcagacccggcgaggtctacaacatcggcggcggcaccgagctcaccaacagggaactggtgtcactgctcctggaggcgtgcggggccggctgggagtcggtggagtacgtcgccgaccgcaagggacacgacaggcgctactcggtggactgcgccaagatcaccctggagctgggctacgagccccgcaaggatttcgccaccggcctcgcggagaccgtctcctggtaccgggagaaccgggactggtgggaaccgctgcggcagcgcgccgagctgggacaggcggtccgctga

SEQ ID NO: 110896 - protein, 336 aa, Streptomyces griseoflavus
MTATRILVTGGAGFIGSHYVRTLLGPHGPAGVRITVLDKLTYAGNPANLDPVRAHPGFRLVQGDVCDAAVVDRLVAEHDQIVHFAAESHVDRSILGGAEFVRTNVGGTQVLLDAALRHHGRGRGVFVQVSTDEVYGSIPYGSWPETHPLSPSSPYAASKAAADLVALAHHRTHGLDVRVTRCSNNYGHHHFPEKLIPLFITRLLEGRTVPLYGDGLNVRDWLHIDDHVQGIELVRTKGRPGEVYNIGGGTELTNRELVSLLLEACGAGWESVEYVADRKGHDRRYSVDCAKITLELGYEPRKDFATGLAETVSWYRENRDWWEPLRQRAELGQAVR

SEQ ID NO: 110897 - DNA, 1155 bp, Streptomyces capreolus
  CDS (1)..(1155): transl_table=11
gtgcgttcccgcactcacgcgagtgaaattcgaatacgtccttcaacgcacgtgcgccgggtcggcgaacgccctgcgtcccggcgccgagagtcggcccatgtcggacatcacgtcgatcggatggagtccatgcccccagggaagaagcgtgcactggtcaccggtgccggaggtttcatcggccaccacctggtctcctacctgcgacggcaggggtactgggtgcggggcgcggatctgcggcaccccgagttccggccgaccgaggccgacgagttcgtgctggccgacctgcgggagcccggcgtcgccgaaaaggtggtcgagggcgtcgacgaggtgtactcgctggccgccgacatgggcgggatgggattcatctccgccaatcacgcgaccattatgaagaataactcgctcattgacctgaacaccctggaggctgcccgaaaggccagagtcaaccggttcttctacgcctcatccgcctgtgtttacccagcttatcgacagaacatcactgaggtggtcggcctgcgcgaagaggacgcctaccccgccgccccggaggacggctacggctgggagaagctgaacaccgagcatctctgctcgtattaccgggaggaatacgggctgccggtccgggtggcgcgtctgcacaacgtctacggcccgtactgcacctatgacggcggccgggagaagtcccccgccgcgctggcccgcaaggccgcgctggccgagcccggcggccggatggagatctggggggacgggatgcagacccgctcctactgctacgtcgacgactgcgtcgaaggcatccaccggctgacccggtcggacttccccggaccggtcaacctcggcaccgaacggctgatcgcgatcaacgacctggcccggatgctgctggagatcgcgggcaagcccggcgtgacgctggagcaccgcccgggaccgcagggcgtgcgcggccgcaactccgacaacgcgctgctgcgcgccgagctgggctgggagccgagcactccgctggagaccgggatggccgcgacctaccactggatccggtccgacatcgaacgccgcgccggaacggtccaggcggcctccgagatcgtccgagtgggggaccccggtgcctga

SEQ ID NO: 110898 - protein, 384 aa, Streptomyces capreolus
MRSRTHASEIRIRPSTHVRRVGERPASRRRESAHVGHHVDRMESMPPGKKRALVTGAGGFIGHHLVSYLRRQGYWVRGADLRHPEFRPTEADEFVLADLREPGVAEKVVEGVDEVYSLAADMGGMGFISANHATIMKNNSLIDLNTLEAARKARVNRFFYASSACVYPAYRQNITEVVGLREEDAYPAAPEDGYGWEKLNTEHLCSYYREEYGLPVRVARLHNVYGPYCTYDGGREKSPAALARKAALAEPGGRMEIWGDGMQTRSYCYVDDCVEGIHRLTRSDFPGPVNLGTERLIAINDLARMLLEIAGKPGVTLEHRPGPQGVRGRNSDNALLRAELGWEPSTPLETGMAATYHWIRSDIERRAGTVQAASEIVRVGDPGA

SEQ ID NO: 110899 - DNA, 1005 bp, Streptomyces sp
  CDS (1)..(1005): transl_table=11
atgaagatccttgtcacgggaggcgccggcttcatcggctcccacttcgtacgctcctacgccgaccaggacgaactgaccgtcctcgacaaactcacctacgccggcaacttggccaacctggagccggtcgagggccgcttcaccttcgtccacggcgacatcggcgacgccgctctcgtcgccgaagtggtccccggccacgacctcgtcgtcaacttcgcggccgagtcccatgtcgaccggtcgatagccgacgccgacgagttcgtgcacagcaacgttctcggcgtgcagaccctgatgcgggcctgcctggacgccggcaccccgcgcgtcgtccatgtgtccaccgacgaggtgtacggcagcatcgacaccggctcctgggacgagacggccccgttgaaccccaactccccctacgcggcggccaaggcgggcggcgatctgatcgccctggcccacgcccgtacgcacggcctcccggtgagcatcacacgctgtggcaacaactacggcccgtaccagtaccccgagaaggtcatcccgctcttcgtgaccaacctcctggacggcctgagcgtcccgctctacggcgacggcggcaacgtacgcgactggatccacgtcgacgaccactgccgggcgatccgcctggtggccgaacggggcgaaccgggcgaggtctaccacatagccggaacggccgagctgacgaacatggacctcacgacccgcctcctgaacgccctcgacgccgactggcggagcgtcgagaaggtgcgggaccgcaaggcccacgaccgccgctactccctgaccgacgccaggctacgggccctcggccaccggtcccggatccccttcgaggagggcctcgtcgaaacgatcgagtggtacaccgacaaccgcgcctggtgggagcccctgaagaagcgcgcccgccctcacgccctcagccgaatcagcgcggtgcgcgaccggatgcccaacttccggtag

SEQ ID NO: 110900 - protein, 334 aa, Streptomyces sp
MKILVTGGAGFIGSHFVRSYADQDELTVLDKLTYAGNLANLEPVEGRFTFVHGDIGDAALVAEVVPGHDLVVNFAAESHVDRSIADADEFVHSNVLGVQTLMRACLDAGTPRVVHVSTDEVYGSIDTGSWDETAPLNPNSPYAAAKAGGDLIALAHARTHGLPVSITRCGNNYGPYQYPEKVIPLFVTNLLDGLSVPLYGDGGNVRDWIHVDDHCRAIRLVAERGEPGEVYHIAGTAELTNMDLTTRLLNALDADWRSVEKVRDRKAHDRRYSLTDARLRALGHRSRIPFEEGLVETIEWYTDNRAWWEPLKKRARPHALSRISAVRDRMPNFR

SEQ ID NO: 110901 - DNA, 1050 bp, Escherichia coli
  CDS (1)..(1050): transl_table=11
atgtgtcagagaggatgcctaatgaaatataaaaaaatagaagacgctttgtcttctaaatctgaaacatggttgattacaggtgttgcgggatttatcggttctaacctattagaggccttactaaaacttaatcaaaaagtagttggcttagataattttgcaactggacatcaagcaaaccttgatgaggttaaagagtctgtttcagctgaacaatggtctgcttttacctttgtggaaggagacatatgtgagccagagacgtgtgtggaggttgttaaaggagttgatcatgtcctacatcaggctgcattaggttctgtgcctcgttcaattaaagatccaattactacaaataataccaatatatcgggtttcattaatatgttggttgccgccaaagatgccaatgtcagaagtttcacttacgctgcaagtagctcaacgtatggtgatcatcctgcattacctaaaattgaagaaaatataggtaatccgctatctccatacgcagtgacaaagtatgtaaatgaattatatgcgcaagtatttgcaagaacctacggattcaaatcaattggattaagatactttaatgtatttggaaaacgccaggatcctaatggggcatatgctgctgtgataccgaagtggactgctgcaatgatcaatgatgaaccgctgtatatcaatggtgatggcgaaacaagtagagacttttgttttattgagaatgtcgtgcaaatgaatattcttgctgcacagtctgatgcgtctgcaagagatcaggtttataacgttgcagttggtgaccgtactacgcttaaacaattattcactgtattaaagaatgcacttaatgaaaatggtgtttcgtataacaaagaacctgaatataaagattttcgtgcaggtgatgttcgccattcgcaagctgatatcactaaagccaaaactagacttggatacgagccacagttcagtatatcggagggcatcctcaaagcgatgccgtggtatgtaaactctctgggcaacaaaaaataa

SEQ ID NO: 110902 - protein, 349 aa, Escherichia coli
MCQRGCLMKYKKIEDALSSKSETWLITGVAGFIGSNLLEALLKLNQKVVGLDNFATGHQANLDEVKESVSAEQWSAFTFVEGDICEPETCVEVVKGVDHVLHQAALGSVPRSIKDPITTNNTNISGFINMLVAAKDANVRSFTYAASSSTYGDHPALPKIEENIGNPLSPYAVTKYVNELYAQVFARTYGFKSIGLRYFNVFGKRQDPNGAYAAVIPKWTAAMINDEPLYINGDGETSRDFCFIENVVQMNILAAQSDASARDQVYNVAVGDRTTLKQLFTVLKNALNENGVSYNKEPEYKDFRAGDVRHSQADITKAKTRLGYEPQFSISEGILKAMPWYVNSLGNKK

SEQ ID NO: 110903 - DNA, 1434 bp, Oryza sativa subsp
  CDS (1)..(1434)
atgccgcactccggcgtggtggacgcggcggcgaagggggtgaagctggggggcggtggtggcggggcgctgatggtgcgccgggtggcgagcggcaagctcctgtcggcgtcgtcgcacctgctgttccgggcaaccatcctggcgacgctctgcctcgtctgcctcttcaccgtgcactacccgtcgctgctgtcccactccttccacctctcctccgccgccgccgccgcgaacgggaagcacagggcggcgtcgcggtcgtcgcaccggagcttgcttgggtcgtcggcggcggtggcgtatgggggcgcggcgtgggagaaggaggtgaggaggagcgcggcgccgaggagggacgggggcttgtcggtgctggtgacgggcgccgccgggttcgtcggcgcgcactgctcgctggcgctccgggcgcgcggggacggcgtggtggggctcgacaacttcaactcctactacgacccgtccctgaagcgggcgcggcagcgactgctggcgtcgcgcggcgtcgccgtgctcgacgccgacatcaacgacgccgcgctgctggagcggctgttcgacgcggcgcgcttcacgcacgtgctccacctcgccgcgcaggccggggtgcgctacgcgatgcgcgcgccgcagacgtacgtcgcgtccaacgtcgccggcctcgtcagcgtcttcgaggtcgccgccaagcacgccgacccgcagccggcgatcgtgtgggcgtcctcgtcgtcggtgtacgggctcaacaccgacgcgcccttctccgaggagcaccgcaccgaccggccggcgtcgctgtacgcggcgaccaagaaggccggcgaggccatcgcccacgcgtacaaccacatctacggcctctccatcaccggcctccgcttcttcaccgtgtacgggccgtggggccgccccgacatggcctacttctccttcgcccgcagcatcgtcgctggcgagcccatcacgctgttccgcaccgccgacggcgccgacgcgcgccgcgacttcacctacatcgacgacgtcgtcaagggctgcctcggcgcgctcgacacggccggcgagagcaccggcaccaagtccggcaagaagcgcggcccggcgccgctccgcgtctacaacctcggcaacacctcgccggtgccggtcacccgcatggtcgccatcctcgagaagctcctcggcaggaaggcgaacaagcgcgtcgtcaccatgcccagcaatggcgacgtgccgttcacccacgccaacgtcagccacgccgcgcgcgacttcggctaccgcccggcgacccccctcgacgccggcctccgccgcttcgtcgactggttcgtccactactacaagctcgacacggccaagatcgccaagggcaagaggaaatccatggccatgtccgccgcgtcgtga

SEQ ID NO: 110904 - protein, 477 aa, Oryza sativa subsp
MPHSGVVDAAAKGVKLGGGGGGALMVRRVASGKLLSASSHLLFRATILATLCLVCLFTVHYPSLLSHSFHLSSAAAAANGKHRAASRSSHRSLLGSSAAVAYGGAAWEKEVRRSAAPRRDGGLSVLVTGAAGFVGAHCSLALRARGDGVVGLDNFNSYYDPSLKRARQRLLASRGVAVLDADINDAALLERLFDAARFTHVLHLAAQAGVRYAMRAPQTYVASNVAGLVSVFEVAAKHADPQPAIVWASSSSVYGLNTDAPFSEEHRTDRPASLYAATKKAGEAIAHAYNHIYGLSITGLRFFTVYGPWGRPDMAYFSFARSIVAGEPITLFRTADGADARRDFTYIDDVVKGCLGALDTAGESTGTKSGKKRGPAPLRVYNLGNTSPVPVTRMVAILEKLLGRKANKRVVTMPSNGDVPFTHANVSHAARDFGYRPATPLDAGLRRFVDWFVHYYKLDTAKIAKGKRKSMAMSAAS

SEQ ID NO: 110905 - DNA, 1026 bp, Pseudomonas aeruginosa
  CDS (1)..(1026): transl_table=11
atgatgagtcgttatgaagagctaagaaaggaattgccggcgcagccgaaagtctggctgattacaggtgtggcgggctttattggctctaatcttcttgaaactttgctaaaacttgatcagaaggttgtcggcctggataattttgctactggtcatcagcggaacctggacgaagtgcggtccttggttagcgagaagcaatggtcaaattttaaacttattcaaggtgatattcgcaatctggatgattgcaataacgcctgtgcaggtgttgattacgttttacatcaagctgccttgggttcggtgccgcgttctattaacgatccgatcacctccaatgcaacgaacatcgatggtttcttgaatatgctgattgcagccagagatgccaaggtgcagagtttcacttatgcggcaagtagctctacctatggagatcatcccggtttaccgaaggtggaggatactataggtaagcctctttccccttatgcggttaccaaatatgtgaatgagctttatgccgatgtgttttcgcgctgctacggcttttcgaccattgggcttcgttatttcaatgtgttcggtcgtcgacaggatcccaatggtgcctatgcggcagtcataccaaaatggacctcttcgatgatccagggtgatgacgtctatattaacggtgatggcgagaccagtcgggatttttgttatattgaaaacaccgttcaggccaatctgcttgctgcaaccgcggggcttgatgctcgtaatcaagtttacaatattgctgttggcgggcggacgagtttgaatcagttgttctttgcgcttcgcgacggccttgccgaaaacggtgtgtcctatcaccgggaacctgtttatcgtgattttagggagggggatgtacgtcactctctcgctgatatcagcaaggctgccaaactgctggggtatgcgccgaaatatgatgtgtctgcaggtgtggcgttggccatgccttggtacatcatgtttttgaaatga

SEQ ID NO: 110906 - protein, 341 aa, Pseudomonas aeruginosa
MMSRYEELRKELPAQPKVWLITGVAGFIGSNLLETLLKLDQKVVGLDNFATGHQRNLDEVRSLVSEKQWSNFKLIQGDIRNLDDCNNACAGVDYVLHQAALGSVPRSINDPITSNATNIDGFLNMLIAARDAKVQSFTYAASSSTYGDHPGLPKVEDTIGKPLSPYAVTKYVNELYADVFSRCYGFSTIGLRYFNVFGRRQDPNGAYAAVIPKWTSSMIQGDDVYINGDGETSRDFCYIENTVQANLLAATAGLDARNQVYNIAVGGRTSLNQLFFALRDGLAENGVSYHREPVYRDFREGDVRHSLADISKAAKLLGYAPKYDVSAGVALAMPWYIMFLK

SEQ ID NO: 110907 - DNA, 1083 bp, Oryza sativa subsp
  CDS (1)..(1083)
atggtggggaacggggaggggaggaagggtgcgggggcgagcgtgctggtgacggggggagcggggtacatcgggacgcacacggtgctgcggctgctggagaaggggttcgcggtcaccgtcgtcgacaacttccacaactccgtcccggaggcgctcgaccgcgtccgcctcatcgccggcgccgccctctccgcccgcctcgacttcatcgccggggatctcaagagcaaggacgacatggagaaggtgttcgccgccaagaggtatgacgccgtgatccacttcgccgggctgaaggcggtgggggagagcgtcgcgcacccgcagatgtactacgagaacaacgtcgccggcaccatgaacctctactccgccatgaccaagtacggctgcaagaagatagtgttctcgtcgtcggcgacggcgtacggccagccggagaagaccccctgcgtcgaggattccaagctgagcgctctcaacccatacggcaccaccaagctcgtcctggagaactacttccggcaggtgcaggccgccgacccggagatgagggtgatcctgctcaggtacttcgaccccatcggcgctcaccggagcggcgacatcggggaggaccccaggggcatccccaacaaccttcttccgtacatccagcaggtcgccgtcggccgccgccccgagctcaacgtctacggcgtcgactacccaaccagggacggcaccgcgatcagggattacatacatgtagtggaccttgccgatggccacattgccgcactggagaagctcttcgctactcctgacattggttgtgtggcttacaatctaggaacagggtgtggaacaacggtgctcgaggtggtgaaggcgttcgaggaggcgtccggaaagaaaattcctatcaagatttgccccagaagacctggagattgcactgaggtttacgcttccactgacaaggccaagaaggagctcggatggagtgctcggtttggaatagaggacatgtgcagggaccagtggaattgggccaagaagaatccgtacggatacagcgccaatgctgagcagaattag

SEQ ID NO: 110908 - protein, 360 aa, Oryza sativa subsp
MVGNGEGRKGAGASVLVTGGAGYIGTHTVLRLLEKGFAVTVVDNFHNSVPEALDRVRLIAGAALSARLDFIAGDLKSKDDMEKVFAAKRYDAVIHFAGLKAVGESVAHPQMYYENNVAGTMNLYSAMTKYGCKKIVFSSSATAYGQPEKTPCVEDSKLSALNPYGTTKLVLENYFRQVQAADPEMRVILLRYFDPIGAHRSGDIGEDPRGIPNNLLPYIQQVAVGRRPELNVYGVDYPTRDGTAIRDYIHVVDLADGHIAALEKLFATPDIGCVAYNLGTGCGTTVLEVVKAFEEASGKKIPIKICPRRPGDCTEVYASTDKAKKELGWSARFGIEDMCRDQWNWAKKNPYGYSANAEQN

SEQ ID NO: 110909 - DNA, 1227 bp, Oryza sativa subsp
  CDS (1)..(1227)
atggcggtggagaagacggtgccgggcggggtgaggacggtgctggtgacgggcggggcggggtacatcggcagccacgccgtgctgcagctcctcctcgccggattccgcgccgtcgtcgtcgacaacctcaacaactcctccgagctcgccgtccgccgcgtcgccgccctcgccggcgaccactcccggaacctcgccttccacaaggttgacctccgtgacaagggagcactggaaaaggtttttgcttcaacaagattcgatgctgtagttcactttgctgggctaaaagctgtgggcgaaagtgtgcagaagccattgctttattacgacaacagtgttaatggaacagtaaatcttctggaagttatgtctgcccatggatgtaagaagttggtgttctcatcatcagctgcagtttatggatcaccgaagaactcaccctggacagaagagtttcctctcactccaaacaatccatatggcaaaacaaagcttgttgttgaagatatttgccgtgatatctaccgtacagatcctgaatggaagattattctacttaggtacttcaatccagttggggctcatcctagcggataccttggggaagatccatgtggcattcccaacaatcttatgccttatgttcagcaagttgctgttggcaggaggccagctctgacaatactaggaaatgattatgcaaccagagatggtaccggggtccgagattacatccatgtggttgaccttgctgatggacatattgcggcattgcagaaactctttgagagctccagcatagggtgtgaagcatacaaccttggaactggtaaaggtacctctgtgctggagatagtcaaggcatttgagaaggcttctgggaagaaaattcctctgattattggcccaagacgccctggtgatgcggagattctattttcattacctgctaaagcagagaaggaactcaactggaaagcgaaatttggcatcgatgaaatgtgtagggatcaatggaactgggctagcaagaacccttatggatacgggtcacttgactccaccaagcagaacggacaccactcgtacggatcaattggctctcccaagcagaatggccactgcacaaatggattttctgaatccactaggcataatggtcacaacggatatggactggtcgactctgccaagcataacggcaacggccacttccactga

SEQ ID NO: 110910 - protein, 408 aa, Oryza sativa subsp
MAVEKTVPGGVRTVLVTGGAGYIGSHAVLQLLLAGFRAVVVDNLNNSSELAVRRVAALAGDHSRNLAFHKVDLRDKGALEKVFASTRFDAVVHFAGLKAVGESVQKPLLYYDNSVNGTVNLLEVMSAHGCKKLVFSSSAAVYGSPKNSPWTEEFPLTPNNPYGKTKLVVEDICRDIYRTDPEWKIILLRYFNPVGAHPSGYLGEDPCGIPNNLMPYVQQVAVGRRPALTILGNDYATRDGTGVRDYIHVVDLADGHIAALQKLFESSSIGCEAYNLGTGKGTSVLEIVKAFEKASGKKIPLIIGPRRPGDAEILFSLPAKAEKELNWKAKFGIDEMCRDQWNWASKNPYGYGSLDSTKQNGHHSYGSIGSPKQNGHCTNGFSESTRHNGHNGYGLVDSAKHNGNGHFH

SEQ ID NO: 110911 - DNA, 1026 bp, Pseudomonas aeruginosa
  CDS (1)..(1026): transl_table=11
atgaacgcttacgctaaggctttaagtaggctagagactactactagtagttggctggtcactggggttgccggttttattggatcgaatcttctggagttacttctgaaatttaatcagaaggttgtggggttggatgatttttctaccgggcatatgtataaccttgatgaagtgagggggcttgttggcgaggagagatggaggaacttcaagcttatacagggggatatcagagacattggtgattgcaggcgtgcagtcgagggcgtcgattatgttcttcatcaggccgccttgggttccgttcctcgctcaattgcagatccgattactacaaactcggtaaatatctcaggatttctgaatatcctcgtggcgtccaaagaggcgggggttaagagccttacctatgcagctagtagttcaacctatggtgaccacccaggattgcctaaggtagaggaagttatagggaaaccactgtcgccctatgcagtaaccaagtacgtcaatgagctttatgctgatgtcttttcgcgctgctatggcttcaacttgattggtttgagatattttaatgtttttggaaaacggcaggatcctaatggggcctatgctgcagtgattccaaaatggatttcagctatgataaagggtgagcccgtatatattaatggggatggtgaaactagtcgggatttttgcttcattaataatgtgataaaagcgaatctgctggctgctttttgtgaaaccgaagaggcaaaaaatcaggtttataatgttgcttatggtggtcgcacaacattgggtcagctttttgactcgctaaaagttgagctttcccggaacggtattaactatgagcaaggacctatttatagggagtttcgtgcgggggatgtacgtcactctcaagcggaaatcaaaaaggctcaagcctatctaggctataatcccgaatatgatatccaggctggtattgctgaggctatgccttggtatatatcttttgtaaagtag

SEQ ID NO: 110912 - protein, 341 aa, Pseudomonas aeruginosa
MNAYAKALSRLETTTSSWLVTGVAGFIGSNLLELLLKFNQKVVGLDDFSTGHMYNLDEVRGLVGEERWRNFKLIQGDIRDIGDCRRAVEGVDYVLHQAALGSVPRSIADPITTNSVNISGFLNILVASKEAGVKSLTYAASSSTYGDHPGLPKVEEVIGKPLSPYAVTKYVNELYADVFSRCYGFNLIGLRYFNVFGKRQDPNGAYAAVIPKWISAMIKGEPVYINGDGETSRDFCFINNVIKANLLAAFCETEEAKNQVYNVAYGGRTTLGQLFDSLKVELSRNGINYEQGPIYREFRAGDVRHSQAEIKKAQAYLGYNPEYDIQAGIAEAMPWYISFVK

SEQ ID NO: 110913 - DNA, 1026 bp, Pseudomonas aeruginosa
  CDS (1)..(1026): transl_table=11
atgatgagtcgttatgaagagctaagaaaggaattgccggcgcagccgaaagtctggctgattacaggtgtggcgggctttattggctctaatcttcttgagactttgctaaagcttgatcagaaggttgtcggtctggataattttgctactggtcatcagcggaacctggacgaagtgcggtccttggttagcgagaagcaatggtcaaattttaaatttattcaaggtgatattcgcaatctggatgattgcaataacgcctgtgcaggtgttgattacgttttacatcaagctgccttgggttcggtaccgcgttctattaacgatccgatcacctccaatgcaacgaacatcgatggtttcttgaatatgctgattgcagccagagatgccaaggtgcagagtttcacttatgcggcaagtagctctacctatggagatcatcctggtttaccgaaggtggaggatactataggtaagcctctttccccttatgcggttaccaaatatgtgaatgagctttatgccgatgtgttttcacgctgctacggcttttcgaccattgggcttcgttatttcaatgtgttcggtcgtcgacaggatcccaatggtgcctatgcggcagtcataccaaaatggacctcttcgatgatccagggtgatgacgtctatattaacggtgatggcgagaccagtcgggatttttgttatattgaaaacaccgttcaggccaatctgcttgctgcaaccgcggggcttgatgctcgtaatcaagtttacaatattgctgttggcgggcggacgagtttgaatcagttgttctttgcgcttcgcgacggccttgccgaaaacggtgtgtcctatcaccgggaacctgtttatcgtgattttagggagggggatgtacgtcactctctcgctgatatcagcaaggctgccaaactgctggggtatgcgccgaaatatgatgtgtctgcaggtgtggcgttggccatgccttggtacatcatgtttttgaaatga

SEQ ID NO: 110914 - protein, 341 aa, Pseudomonas aeruginosa
MMSRYEELRKELPAQPKVWLITGVAGFIGSNLLETLLKLDQKVVGLDNFATGHQRNLDEVRSLVSEKQWSNFKFIQGDIRNLDDCNNACAGVDYVLHQAALGSVPRSINDPITSNATNIDGFLNMLIAARDAKVQSFTYAASSSTYGDHPGLPKVEDTIGKPLSPYAVTKYVNELYADVFSRCYGFSTIGLRYFNVFGRRQDPNGAYAAVIPKWTSSMIQGDDVYINGDGETSRDFCYIENTVQANLLAATAGLDARNQVYNIAVGGRTSLNQLFFALRDGLAENGVSYHREPVYRDFREGDVRHSLADISKAAKLLGYAPKYDVSAGVALAMPWYIMFLK

SEQ ID NO: 110915 - DNA, 1035 bp, Streptomyces narbonensis
  CDS (1)..(1035): transl_table=11
gtgcggcttctggtgaccggaggtgcgggcttcatcggctcgcacttcgtgcggcagctcctcgccggggcgtaccccgacgtccccgccggtgaggtgatcgtcctggacagcctcacctacgcgggcaaccgcgccaacctcgccccggtggaagcggacccgcggctgcggttcgtccacggcgacatccgcgacgccgacctcctcgcccgggaactgcgcggcgtcgacgccgtcgtccacttcgccgccgagagccacgtcgaccgctccatcgcgggggcgtccgtgttcaccgggaccaacgtccagggcacgcagaccctgctccagtgcgccctcgacgccggcgtcggccgggtcgtgcacgtctccaccgacgaggtgtacgggtcgatcgactccggctcgtggaacgagagcagcccgctggaacccaactccccctacgcggcctccaaggccggctccgacctcgtcgcccgcgcctaccaccgcacctacggcctcgacgtacggatcacccgctgctgcaacaactacgggccgtaccagcaccccgagaagctcatccccctcttcgtgacgaacctcctcgacggcgggacgctcccgctgtacggcgacggcgcgaacgtccgcgagtgggtccacaccgacgaccactgccggggcatcgcgctcgtcctcgcgggcggccgggccggcgaggtctaccacatcggcggcggccgggagctgaccaaccgcgaactcaccggcatcctcctggactcgctcggcgccgactggtcctcggtccggcgggtcgccgaccgccagggccacgacctgcgctactccctcgacggcggcaagatcgagcgcgaactcggctaccgcccgcagatcgccttcgcggacggcctcgcgcgcaccatccgctggtaccgggagaaccgcgactggtgggaaccgctcaaggccaccgccccgcagccgcccgccaccgccccgcagccgcccgccaccgccgtgggggtgtccgcgtga

SEQ ID NO: 110916 - protein, 344 aa, Streptomyces narbonensis
MRLLVTGGAGFIGSHFVRQLLAGAYPDVPAGEVIVLDSLTYAGNRANLAPVEADPRLRFVHGDIRDADLLARELRGVDAVVHFAAESHVDRSIAGASVFTGTNVQGTQTLLQCALDAGVGRVVHVSTDEVYGSIDSGSWNESSPLEPNSPYAASKAGSDLVARAYHRTYGLDVRITRCCNNYGPYQHPEKLIPLFVTNLLDGGTLPLYGDGANVREWVHTDDHCRGIALVLAGGRAGEVYHIGGGRELTNRELTGILLDSLGADWSSVRRVADRQGHDLRYSLDGGKIERELGYRPQIAFADGLARTIRWYRENRDWWEPLKATAPQPPATAPQPPATAVGVSA

SEQ ID NO: 110917 - DNA, 984 bp, Streptomyces violaceus
  CDS (1)..(984): transl_table=11
gtgaacatcccggtgaccggtgcggccggcttcatcggctcgcacttcgtcagaacactgctgagcggcggttacccggggcacgaggacgaccgggtgaccgtcgtggacaagctcacctacgcggggacgctgaacaacctgcccccgcgccatccgcggctgaccttcgtgcacggcgacatctgcgacaccccgctgctgggcaaggtcttcccgggccacgaggcggtggtgcacttcgccgcggagtcgcacgtggaccgttcggtggcgggtgccgaggccttcgtccgcacgaacgtgctcggcacgcaggccctgctcgaagcggcgctgcggcacgggacgggcgtcttcgtccaggtctccacggacgagacgtacggctccatcgccgagggaagctggacggaggacgagccgctgctgcccaactccccgtacgcggcgtccaaggcgtcggccgatctgatcgcccggtcgtactggcgcacccacggtctcgacgtgcgcgtcacccggtgcgccaacaactacggccccggccagcaccccgagaagctggtcccgctgttcgtcacccggctcctcgacgggcagccggtcccgctgtacggggacggctcgaacctgcgggagtggctgcacgtcgacgaccactgccgggcggtgcggctggtgctggacgagggccggccgggggagatctacaacatcggcggcggcacccatctgaccaacaaggagatgaccggccgtctcctcgcgctctgcgggcgcgactgggacctggtccagcgggtcgcggaccgcaaggggcacgacttccgctacgcggtggacgactccaagatccgccgcgaactcggctacgcgccgcggtggtcgctggaggacggactgcgcgagacggtcgagtggtacgcagcccaccgtgaccactgggacgcccgggaggagggcggcgacggggggtactaa

SEQ ID NO: 110918 - protein, 327 aa, Streptomyces violaceus
MNIPVTGAAGFIGSHFVRTLLSGGYPGHEDDRVTVVDKLTYAGTLNNLPPRHPRLTFVHGDICDTPLLGKVFPGHEAVVHFAAESHVDRSVAGAEAFVRTNVLGTQALLEAALRHGTGVFVQVSTDETYGSIAEGSWTEDEPLLPNSPYAASKASADLIARSYWRTHGLDVRVTRCANNYGPGQHPEKLVPLFVTRLLDGQPVPLYGDGSNLREWLHVDDHCRAVRLVLDEGRPGEIYNIGGGTHLTNKEMTGRLLALCGRDWDLVQRVADRKGHDFRYAVDDSKIRRELGYAPRWSLEDGLRETVEWYAAHRDHWDAREEGGDGGY

SEQ ID NO: 110919 - DNA, 960 bp, Streptomyces antibioticus
  CDS (1)..(960): transl_table=11
atgagggtcgcggtgaccggcggcgccggcttcatcggctcgaacttcgtgcgtgacctggtcggtgaacggttcgcggccctcgatgtgcagcacgtcgtggtgctcgacaacctcacctatgcgggcaccctcgacaatctcacaggcgtgctcgacgatgtcgagttccaccgcacggacatctgcgacacccaggcagtcacccgtcagatcgtcggctgtgacgcggtcgtgcatttcgcggccgagtcgcacgtggaccgctcgatctcgtccggcttgcccttcatgcgcagcaacgtgctcggcactcaatccgtgctcgaggcggctgcggcggccggcgcggccaggttcgtgcacatctccactgacgaggtctacggatcgattccggtcggtgcgacgggcgaggacgccccgctcgcgccgaactcgccgtacgccgcatcgaaggcgggatccgacctggttgctctcgccttcgcacgcacccacggtctgccggtcaccgtgaccaggtgttcgaacaactacggcccgtaccagaaccccgagaaggcgataccgcatttcgtcacgacgctgctgcgcggcggcgacatcccgctctacggggctgggacgaacgtgcgcgactggctgcatgtcggcgaccacggaaaggccgttgcgttgctgctcgccggcacgcccaaggaacaggtgtacaacatcgggggtggccaccagatcaccaatttgcagctggcccacatcattctcgacgaactcgggctcgatgcggacagggtctccttcgtccccgatcggaaggcccacgacgcgcgctactgcgtggacgactctcggctgcgcgaggaattcggctaccggccggagcgcgacttcgctgaggccattcgggagacgatctcgtggtactcggacaaccggagttggtggacccatgactga

SEQ ID NO: 110920 - protein, 319 aa, Streptomyces antibioticus
MRVAVTGGAGFIGSNFVRDLVGERFAALDVQHVVVLDNLTYAGTLDNLTGVLDDVEFHRTDICDTQAVTRQIVGCDAVVHFAAESHVDRSISSGLPFMRSNVLGTQSVLEAAAAAGAARFVHISTDEVYGSIPVGATGEDAPLAPNSPYAASKAGSDLVALAFARTHGLPVTVTRCSNNYGPYQNPEKAIPHFVTTLLRGGDIPLYGAGTNVRDWLHVGDHGKAVALLLAGTPKEQVYNIGGGHQITNLQLAHIILDELGLDADRVSFVPDRKAHDARYCVDDSRLREEFGYRPERDFAEAIRETISWYSDNRSWWTHD

SEQ ID NO: 110921 - DNA, 969 bp, Streptomyces viridochromogenes
  CDS (1)..(969): transl_table=11
atgtccatgttcccggggttctcagccggaacacgtctgctggtgaccggaggggcgggcttcatcggctcgcacgtggtcgacgccttcctggaggccggggccgaggtcaccgtgctggacgacctgaccaccggtgacccggaacgtctggacccacgtgcggtcatccgtcgcgtcgacgtgaccgatgccgccgccctggacgaggccgtgcggtcggcgcgccccgacgtcatctgccatctcgcggcccagatcgacgtccgggtctcggtggccacaccggccgtcgacgcgcgggtcaacgtcgagggcacgatcaacgtgctggaagcggcgcacgccgtcggggcgcgggtcgtgttcgcctccaccggcggggcgctctacggggaaggcgttccggtcccgacgaacgaggacacgctgcccaggccgggggcgccctacggcacggccaagtactgcgcggagaagtacatcggcctgttcaaccggctgcacggaaccgagcacagcgtgttgcggctcggcaacgtgtacgggccccggcagagcccgggcggtgaggcgggcgtcatcgccatctactgcgggctggcctccgagggcggagtgcccacggtgttcggcgacggttcgcagacccgtgactacgtgtacgtcggcgacgtcgccgcggcgttcgtcgcgccgtacggcaccgtcggcccggcgtctggaacatcggacacgggcaaggggagcacggtgctggaggtcctcgaccacatcgccgccgcctccgggcgcgacctgcctccccgtttcgcgccccgccggccgggcgagatccagcacagcaccctggacgtcactcgtgtcgccgccgatctgggctggaccgcgtccgtcccgctggagaaaggcatcgccgccacctacgcctgggtccgttccggttcgcccgtccggcagcaggcatga

SEQ ID NO: 110922 - protein, 322 aa, Streptomyces viridochromogenes
MSMFPGFSAGTRLLVTGGAGFIGSHVVDAFLEAGAEVTVLDDLTTGDPERLDPRAVIRRVDVTDAAALDEAVRSARPDVICHLAAQIDVRVSVATPAVDARVNVEGTINVLEAAHAVGARVVFASTGGALYGEGVPVPTNEDTLPRPGAPYGTAKYCAEKYIGLFNRLHGTEHSVLRLGNVYGPRQSPGGEAGVIAIYCGLASEGGVPTVFGDGSQTRDYVYVGDVAAAFVAPYGTVGPASGTSDTGKGSTVLEVLDHIAAASGRDLPPRFAPRRPGEIQHSTLDVTRVAADLGWTASVPLEKGIAATYAWVRSGSPVRQQA

SEQ ID NO: 110923 - DNA, 1041 bp, Citrobacter freundii
  CDS (1)..(1041): transl_table=11
atgacagcctatgatgaattagaaatacaactcgttcttgaaccaaaacgttggcttattactggcgtagcaggttttatcggctctggattattagaagaactactctatttaaatcaaacagtaattgggttggataacttttcaactggctatcaacataatttagaggatgtccgtgccgctgtcagtgaagaacaatggtcgcggtttacctttgttcatggggatatccggtcgtttgccgattgtcaggctgtttgtgagaatgtcgattacgttttacatcaggccgctctgggaagcgtaccacgttccttgcaggatcctatcacgacaaatagcgctaacattgatggttttttaaatatgttgacggcggcgagagatgcacatgtatctggtttcacctatgccgcaagcagtagtacttatggtgaccatcccgatttacctaaaattgaggaccggatcggccggccattaagcccgtatgcggttacaaaatacgtcaatgaattgtacgccgaggtgtttgctcgcagctatgattttaacgctattggcctgcgctactttaatgtatttggccgccgccaaaaccctaacggagcatactctgcagtcattcctcgctggatactatcgcttcttaaagatgaaccaatttatatcaatggcgatggttcaacaagccgggatttttgctatatagaaaatgtgattcaggccaatttattatcagcaacgactaatgatttagcctcaaaaaataaaatctataatgtggctgttggagacagaacttcgctaaatgagctttattatctcatccgcggtgggttgaatttatggcgggacgaacaaattagtgctgaaccaatttataaagattttcgtgacggtgacgttaagcatagtcaggcagatattaccagaataaaaacatttctttcatatgagcctgagtttgatatcaaagaaggacttaagcagactctaaaatggtatatcgataaaaagactgctttgtattcctga

SEQ ID NO: 110924 - protein, 346 aa, Citrobacter freundii
MTAYDELEIQLVLEPKRWLITGVAGFIGSGLLEELLYLNQTVIGLDNFSTGYQHNLEDVRAAVSEEQWSRFTFVHGDIRSFADCQAVCENVDYVLHQAALGSVPRSLQDPITTNSANIDGFLNMLTAARDAHVSGFTYAASSSTYGDHPDLPKIEDRIGRPLSPYAVTKYVNELYAEVFARSYDFNAIGLRYFNVFGRRQNPNGAYSAVIPRWILSLLKDEPIYINGDGSTSRDFCYIENVIQANLLSATTNDLASKNKIYNVAVGDRTSLNELYYLIRGGLNLWRDEQISAEPIYKDFRDGDVKHSQADITRIKTFLSYEPEFDIKEGLKQTLKWYIDKKTALYS

SEQ ID NO: 110925 - DNA, 1056 bp, Agrobacterium tumefaciens
  CDS (1)..(1056): transl_table=11
  misc_feature (483)..(483): n is a, g, c or t
atgcgcgttctagttaccggcggcgccggatttatcggctcagccctcgtacgttaccttgtaagcgaggtcggtgcggatgtcctcactgtagacaagctgacttatgcggggaacctagcctccctcaagcccattgaaaacgcgccgaaccatcgttttctccaggccgacatatgtgaccgagccgcaatgaatgacgccttcgcgacatttcagccggattatgtgatgcacctggccgccgaaagccatgtcgatcgctccataaccggcgccgctgatttcattcagaccaatataaacggcactttcacaatgctggaagcagcgcggcaatattggagcagccttgcggatgacgccaaggcgaatttccgcatgcttcacgtctccaccgacgaggtttacggctcgctcggagacgacggccttttcgaggaaacaacgccttacgacccttcctcgccctattccgcctcnaaagccgcaagcgatcatctcgccacggcctggcagcgcacgtatggccttccattcgtgatctccaactgctccaacaattatgggccattccacttcccggaaaagctcattcctctgatcattctcaacgccttggaaggcaagccgttgccggtctatggaaacggcgccaacatacgcgactggctttacgtggaagaccacgcacgcgcgctttggcttatcgtgcaaaaaggccttgccggagaaaaatacaatgtaggcggcagaaatgaacagaagaatatcgatgtggtaaactgcatctgctccattctcgatgagttgcgcccgcaatcaaaaccctatgcgaatctcatccaatatgtgacggatcgtcccggccacgatgcccgctacgccatcgacgcgacaaaactggaaaccgaactcggctggaaagcgcaagaaaacttcgccaccggcattcgcaagactgtggaatggtaccttgacaatgcatggtggtggcagccgctgcgtgaaggtgtgtactccggagagcgccttggcgttctgacaaagggctaa

SEQ ID NO: 110926 - protein, 351 aa, Agrobacterium tumefaciens
MRVLVTGGAGFIGSALVRYLVSEVGADVLTVDKLTYAGNLASLKPIENAPNHRFLQADICDRAAMNDAFATFQPDYVMHLAAESHVDRSITGAADFIQTNINGTFTMLEAARQYWSSLADDAKANFRMLHVSTDEVYGSLGDDGLFEETTPYDPSSPYSASKAASDHLATAWQRTYGLPFVISNCSNNYGPFHFPEKLIPLIILNALEGKPLPVYGNGANIRDWLYVEDHARALWLIVQKGLAGEKYNVGGRNEQKNIDVVNCICSILDELRPQSKPYANLIQYVTDRPGHDARYAIDATKLETELGWKAQENFATGIRKTVEWYLDNAWWWQPLREGVYSGERLGVLTKG

SEQ ID NO: 110927 - DNA, 999 bp, Streptomyces sp
  CDS (1)..(999): transl_table=11
atgcgagtcctggtcacgggtggtgccggattcatcggatcgcactacgtgcgggagctgctcggcggggcctacccggcgttcgccgacgccgaggtcgtggtgctcgacaagctcacctacgccggcaacgaggccaacctggccccggtcgccgacgcggccggctcccggctgcggttcgtgcggggcgacatctgcgacgccgagctggtccgcacgctgatgaccggcgtcgacgtggtggtgcacttcgcggcggagtcccacgtggaccggtccatcctcggggcgaccgagttcgtgatgaccaacgtgctgggcacccagaccctgctccaggccgcgctggaggccggggtgggcaagttcgtgcacgtctccacggacgaggtctacggctccatcgacgagggctcctggcccgaggaccacccgctggagccgaactcgccgtactcggcgtccaaggccagctcggacctgctggcgcgggccttccaccgcacccacgggctgccggtctgcgtcacgcggtgctcgaacaactacggcccgtaccagttcccggagaaggtcatcccgctgttcgtgaccaacctcatggacggcaggccggtgccgctgtacggcgacggcctgaacgtgcgcgactggctgcacgtggacgaccactgccggggtatccaactcgtcgtggagggcggacgacccggcgaggtctacaacatcggcggcggcaccgagctgaccaaccgggagctgaccgagcggctgctggcggtgatgggcgccgactggtccatggtggagcaggtgcccgaccgcaaggggcacgaccgccgctactcggtcgacatcaccaagatctccacggagctgggctaccggccgcgcgtcccgttcgaggagggcctggcccgcaccgtggcgtggtaccgcgagaaccgggagtggtgggagccgctcaagcgccgcgccgccctcgccgcgcgctga

SEQ ID NO: 110928 - protein, 332 aa, Streptomyces sp
MRVLVTGGAGFIGSHYVRELLGGAYPAFADAEVVVLDKLTYAGNEANLAPVADAAGSRLRFVRGDICDAELVRTLMTGVDVVVHFAAESHVDRSILGATEFVMTNVLGTQTLLQAALEAGVGKFVHVSTDEVYGSIDEGSWPEDHPLEPNSPYSASKASSDLLARAFHRTHGLPVCVTRCSNNYGPYQFPEKVIPLFVTNLMDGRPVPLYGDGLNVRDWLHVDDHCRGIQLVVEGGRPGEVYNIGGGTELTNRELTERLLAVMGADWSMVEQVPDRKGHDRRYSVDITKISTELGYRPRVPFEEGLARTVAWYRENREWWEPLKRRAALAAR

SEQ ID NO: 110929 - DNA, 954 bp, Streptomyces rimosus subsp
  CDS (1)..(954): transl_table=11
atgaagaccctcgtcaccggaggagccggcttcatcggctcccacttcgtccgttccctgctggccgacggcacggggcaggaggcggtcaccgtcctggacgccctgacctacgcgggcaacctcgccaatctccggtccgtgcagggcgatccgcggctgcgcttcgtacagggtgacatcctcgacagcgcgcgtgtcgccgagttggtggccggacacgacgccgtggtaaacctcgccgctgaatcgcacgtggaccgctccatcgccaacggcgccaagttctcctccaccaatgtgctcggtactcagacgctgttggaagctgccgtccaagccggtggagtcaccgtcgtccatgtctccaccgacgaggtgtacgggtccatacccataggctcatggaccgaggaggagccgctcgcgcccaactccccctacgcggcggccaaggcgggctccgaccttctggccctcgcctaccaccgcacccatggcctcgatgtacggatcacccgctgctccaacaactacggtccctaccagttccccgagaagatcatcccgttgttcatcacccgcctcctgcaagggcgcaaggtgccgctgtacggcgacggcagccagatacgtgactggctgcacgtggtggaccactgccgcgccatccggctcgtgctggaaggcggccgggccggcgagatctacaacgtgggcggcggcaccgagctgaccaacaagcacctcaccgatcgcctcctggacgcctgcggcgcggactgggacagcgtcgagcacgtagcggaccgcaaggggcacgaccagcggtattcggtggactggtccaagatccgcgacgagctcggctacgagccgcgccacactttcgacgagggactggcgagcaccgtgtcctggtaccggcaaaaccgcgactggtggagacgctga

SEQ ID NO: 110930 - protein, 317 aa, Streptomyces rimosus subsp
MKTLVTGGAGFIGSHFVRSLLADGTGQEAVTVLDALTYAGNLANLRSVQGDPRLRFVQGDILDSARVAELVAGHDAVVNLAAESHVDRSIANGAKFSSTNVLGTQTLLEAAVQAGGVTVVHVSTDEVYGSIPIGSWTEEEPLAPNSPYAAAKAGSDLLALAYHRTHGLDVRITRCSNNYGPYQFPEKIIPLFITRLLQGRKVPLYGDGSQIRDWLHVVDHCRAIRLVLEGGRAGEIYNVGGGTELTNKHLTDRLLDACGADWDSVEHVADRKGHDQRYSVDWSKIRDELGYEPRHTFDEGLASTVSWYRQNRDWWRR

SEQ ID NO: 110931 - DNA, 972 bp, Streptomyces galilaeus
  CDS (1)..(972): transl_table=11
atgcgtgtcctgatcaccggcggcgccggtttcatcggatcccactacgtccgttccctgctggcggggaccctgcccggtccccgcccgagccgggtcaccgtcgtcgacctgctcacgtacgcgggagacaccggcaatctgcccctggccgatccccggctggacttccgccggctcgacatccgcgacctggacgcgctgctgacggtggtccccggccacgacgcggtcgtacacttcgcggccgagacccatgtcgaccgttcgctgagcgagccggcggagttcgtccgcaccaacgtactgggcacccagtcgctgctggaggcgagcctgcgcggcggggtcggcacgttcgtgcacgtctccacggacgaggtctacggatcgatcgcgcagggcacctggacggaggaggcgccgctgctccccaactccccctacgcggcctcgaaggcgggaagcgacctggtcgcacggtcctactggcgcacccacggcctcgatgtgcgcacgacccgctgcgccaacaactacggcccccgtcagcacccggagaagctcatcccgctgttcgtcaccgaactgctggccggccggccggtgccgctgtacggcgacggaggcaacgtcagggaatggctgcacgtggacgaccactgccgggccgtccacgcggtgctgaccggtggccggcccggcgagatctacaacatcggcggcggtacccatctgacgaaccgtgagatgacggccaagctgctcgcgctgtgcggcaccgactggtccagggtccgccaggtgcccgaccgcaagggccacgacctgcggtacgcggtggacgacacgaagatccgcgaagaactcggctaccggccgctgcggtccctggacgacggtctgcgcgaggtcgtcgactggtaccgcgaccggcagacccaccggccggaaccggccgagcgggtctga

SEQ ID NO: 110932 - protein, 323 aa, Streptomyces galilaeus
MRVLITGGAGFIGSHYVRSLLAGTLPGPRPSRVTVVDLLTYAGDTGNLPLADPRLDFRRLDIRDLDALLTVVPGHDAVVHFAAETHVDRSLSEPAEFVRTNVLGTQSLLEASLRGGVGTFVHVSTDEVYGSIAQGTWTEEAPLLPNSPYAASKAGSDLVARSYWRTHGLDVRTTRCANNYGPRQHPEKLIPLFVTELLAGRPVPLYGDGGNVREWLHVDDHCRAVHAVLTGGRPGEIYNIGGGTHLTNREMTAKLLALCGTDWSRVRQVPDRKGHDLRYAVDDTKIREELGYRPLRSLDDGLREVVDWYRDRQTHRPEPAERV

SEQ ID NO: 110933 - DNA, 1014 bp, Bradyrhizobium japonicum
  CDS (1)..(1014): transl_table=11
atgaccgtgctcgtgaccggcggtgccggctatatcggaagtcacatggttcatgcgctggtcgatgccggcgagagcgtcgtcgtgatcgacaacctttccaccggcttctccgcgttcctgcccgaaggcgtgccgctgttcattggcgacgccggcgacgagaacctcgtcgaaggcgtgatcgcccagcacggcatcgacagcatcatccatttcgcgggctccgtcgtggtaccggactcgatgcgcgatccgctcggctactaccgcaacaacaccatgacgacgggcagcctgctcaacgcggcggtgaagggcggcgtcagccgcttcatcttctcctcgaccgcggccgtctacggcaacccggaccgggtgccggtgccggagatcgcaccgacccgtccgctgtcgccctacggctcgtcgaagctgatgaccgagatcatgctgcacgacgtcgcatccgctcatggcatgagctacgtcgtgctgcgctacttcaacgtcgccggcgccgacccgaagggccgcgtcggccttgccaccaccggcgccacccatctgctcaagatcgcggtcgaggccgcaaccggccagcgcgccaagatcgacgtgttcggcaccgactatccgacccaggacggcagctgcatcagggacttcatccatgtcagcgacctcgtcgaggcgcatcgcgcggcgctgtcctatctgcgcgccggcgggcaatcggtgacgctgaattgcggttatggccgcggctattccgtgctcgaaaccatcgaggcggtgcgccgggtctcgatgcgcaacttcgcggtcgcctacgccgcgcgccggcccggcgacatcatgaccatggtggccgacacgacaaggatccgctcgctgctcgactggacgccgcgcttcgacgatctcgagaccatcgcgagccacgcactggcctgggaggagaagctgttccgggagcgcgcgggctccgcgcgacaggcggaatcggcctaa

SEQ ID NO: 110934 - protein, 337 aa, Bradyrhizobium japonicum
MTVLVTGGAGYIGSHMVHALVDAGESVVVIDNLSTGFSAFLPEGVPLFIGDAGDENLVEGVIAQHGIDSIIHFAGSVVVPDSMRDPLGYYRNNTMTTGSLLNAAVKGGVSRFIFSSTAAVYGNPDRVPVPEIAPTRPLSPYGSSKLMTEIMLHDVASAHGMSYVVLRYFNVAGADPKGRVGLATTGATHLLKIAVEAATGQRAKIDVFGTDYPTQDGSCIRDFIHVSDLVEAHRAALSYLRAGGQSVTLNCGYGRGYSVLETIEAVRRVSMRNFAVAYAARRPGDIMTMVADTTRIRSLLDWTPRFDDLETIASHALAWEEKLFRERAGSARQAESA

SEQ ID NO: 110935 - DNA, 1008 bp, Streptomyces antibioticus
  CDS (1)..(1008): transl_table=11
atgaacctcctcgtcaccggtgccgccggattcatcggctcccgctacgtgcaccacctgctggaagcagcgcgggcgggcggggagcccgcccccgtgatcacggtgctggacaagctcacctacgccggcgtcctcggcaacgtccccgacgaccccgccgtcaccttcgtgcgcggtgacatcgccgacgcaccactggtggactccctgatggccgaagccgaccaggtggtgcacttcgccgcggagtcgcacgtggaccgctccatcacctcgcccggaaccttcgtgcgcaccaacgtcctcggcacccagatgctgctcgacgcctgtctgcggcacggcgtcggcccgttcgtgcacgtgtccaccgacgaggtctacggctccatcgagcacggatcctggccggagcaccagccgctgtgcccgaactcgccgtactccgcctccaaagcctcctccgacctgctcgcgctgtcctaccaccgcacccacggcctggacgtccgcgtcacccgctgctccaacaactacgggccgcaccagttccccgagaagctcgtcccgctgttcgtcaccaacctcctcgacggcctgcgggtccccctctacggcgacggcctcaacgtccgcgagtggctgcacgtggacgaccactgcctgggcgtcgacctggtccgcacccagggccggcccggcgaggtctaccacatcggcggcggcaccgaactgaccaaccgggacctcacgggcctcctgctggacgcgttcggcgtgggctgggacgtcgtggacccggtcgcggaccgcaagggccacgaccgccgctacgccctcgactgcgccaaggccgcggacgagctgggctaccggccgcgccgggacttcgccgagggcatcgcccgcaccatcgactggtaccgcgacaaccgcgcctggtgggaacccctgaagaagcggccggccggtcccgccgccccccgaggggcagcggccccatga

SEQ ID NO: 110936 - protein, 335 aa, Streptomyces antibioticus
MNLLVTGAAGFIGSRYVHHLLEAARAGGEPAPVITVLDKLTYAGVLGNVPDDPAVTFVRGDIADAPLVDSLMAEADQVVHFAAESHVDRSITSPGTFVRTNVLGTQMLLDACLRHGVGPFVHVSTDEVYGSIEHGSWPEHQPLCPNSPYSASKASSDLLALSYHRTHGLDVRVTRCSNNYGPHQFPEKLVPLFVTNLLDGLRVPLYGDGLNVREWLHVDDHCLGVDLVRTQGRPGEVYHIGGGTELTNRDLTGLLLDAFGVGWDVVDPVADRKGHDRRYALDCAKAADELGYRPRRDFAEGIARTIDWYRDNRAWWEPLKKRPAGPAAPRGAAAP

SEQ ID NO: 110937 - DNA, 990 bp, Rhodococcus erythropolis
  CDS (1)..(990): transl_table=11
atgaaactcctggtcaccggcggcgccggttacgtcggcagtgtgtgcagcactgtgttgctcgagcgtggacacgaggttgtcgtcatcgacgacctctccaccggaaatgccgacgcggtgcctgccggtgccgagttcatcgaaggagacgtgggagcgcttgctgccgacgtcctcggcagtgcgggttcaccggttttcgacggtgtgcttcacttcgcagcgcagtcgctggtgggcgaatcggtgcttcaccctgaaaagtactggcgcggaaacgtcgtcacgaccatcgagttgctcgaggctatccgtgtctccggtactccccgcctcgtgttctcgtccaccgccgctacgtacggcgaaccggagcagtcacccatcgtggagaccgctccgacccgccccaccaatccgtacggcgcgaccaagctcgcgatcgatcatgcgatcacctcgtactcgatcgcccacggcctcggtgcgacgagcttgcgctacttcaacgtcgcaggtgcgtacaagtccgccggcgagaaccgggtgatcgaaacccacctgattccactcgtcctgcaggtcgcgctcgaacagcgggacaagatctcggtcttcggaaccgactggcccacgccggacggaaccgcggtacgcgactacatccacgtgctggacctcgccgaagcacatctactggcgctcgaatcctcggttcccggcgagcaccgcatctacaacctcggaagcggtgccggcttcagcgtgcgcgaggtgatcgccgcctgtgcgcgggtcaccggcctgccgatcaacgtcgaggacgcgtcacgacggctgggtgatccggcagtactgatcgcatcgagcgacaaggcgattgccgagctgggttggacgcccacgcgtaccgatctcgacgtcatcgtcgccgacgcatggcagttcctccaggatctgggcgaccgctcacacgctgctcgctag

SEQ ID NO: 110938 - protein, 329 aa, Rhodococcus erythropolis
MKLLVTGGAGYVGSVCSTVLLERGHEVVVIDDLSTGNADAVPAGAEFIEGDVGALAADVLGSAGSPVFDGVLHFAAQSLVGESVLHPEKYWRGNVVTTIELLEAIRVSGTPRLVFSSTAATYGEPEQSPIVETAPTRPTNPYGATKLAIDHAITSYSIAHGLGATSLRYFNVAGAYKSAGENRVIETHLIPLVLQVALEQRDKISVFGTDWPTPDGTAVRDYIHVLDLAEAHLLALESSVPGEHRIYNLGSGAGFSVREVIAACARVTGLPINVEDASRRLGDPAVLIASSDKAIAELGWTPTRTDLDVIVADAWQFLQDLGDRSHAAR

SEQ ID NO: 110939 - DNA, 1011 bp, Streptomyces sphaeroides
  CDS (1)..(1011): transl_table=11
atgcgaattctggtgacgggcggcgccggcttcatcggctcggaattcgtccgggccaccttgcgcggaactctgccgggctcatcgggaactcaggtcaccgttctggacaagttgacgtactccggcaacgtgctgaacctcgcgccgatcgcggacctgcgcaactaccgtttcgtgcggggcgacatctgtgatcaggacctggtggacgacgtggtcgccggtcacgacgcgatcgtgcacttcgccgccgagacacatgtggaccgctcgatcggcagcgccgcctcgttcgtccgcacgaacgcgatgggcacccaggtactgctcgaagcggcctcccgccaccggctgggacggttcgttcacatctcgaccgacgaggtgtacggatcgatccccgagggcgcctgggacgaggagtccccggtggccccgaacgccccgtacgcggcggccaaggcggcgggagacctgctggcgctggcctggcaccggacccacgggctcgacgtcgtggtcaccaggtgcaccaacaactacgggccgtaccagtatccggagaagctgatcccgctgttcacgaccaacgtgatggacggtcagcaggtcccggtgtacggcgagggccacaaccgccggcagtggctgcacgtctcggaccactgccgcgccatccagctggtgctcctcggtggccgggccggggaggtctaccacatcggcggtggcaccgagttgaccaatctcgaactggccgaacagatcctgaagtcctgcggtgccggctgggacatggtccggcacgtgccggacaggccggggcacgatttccgctactccctggacaccaccaagatccgtacagaactcggtttctcgccccgggtcgcgttcgcggacgggctggtggagaccgtggagtggtatcgcgacaaccgggcctggtgggaaccgctcaagagtcccgacgaagccacgggttcacccggcgacgccggcagatga

SEQ ID NO: 110940 - protein, 336 aa, Streptomyces sphaeroides
MRILVTGGAGFIGSEFVRATLRGTLPGSSGTQVTVLDKLTYSGNVLNLAPIADLRNYRFVRGDICDQDLVDDVVAGHDAIVHFAAETHVDRSIGSAASFVRTNAMGTQVLLEAASRHRLGRFVHISTDEVYGSIPEGAWDEESPVAPNAPYAAAKAAGDLLALAWHRTHGLDVVVTRCTNNYGPYQYPEKLIPLFTTNVMDGQQVPVYGEGHNRRQWLHVSDHCRAIQLVLLGGRAGEVYHIGGGTELTNLELAEQILKSCGAGWDMVRHVPDRPGHDFRYSLDTTKIRTELGFSPRVAFADGLVETVEWYRDNRAWWEPLKSPDEATGSPGDAGR

SEQ ID NO: 110941 - DNA, 1026 bp, Pseudomonas aeruginosa
  CDS (1)..(1026): transl_table=11
atgatgagtcgttatgaagagctaagaaaggaattgccggcgcagccgaaagtctggctgattacaggtgtggcgggctctattggctctaatcttcttgagactttgctaaagcttgatcagaaggttgtcggtctggataattttgctactggtcatcagcggaacctggacgaagtgcggtccttggctagcgagaagcaatggtcaaattttaaatttattcaaggtgatattcgcaatctggatgattgcaataacgcctgtgcaggtgttgattacgtcttacatcaagctgccttgggttcggtaccgcgttctattaacgatccgatcacctccaatgcaacgaacatcgatggtttcttgaatatgctgattgcagccagagatgccaaggtgcagagtttcacttatgcggcaagtagctctacctatggagatcatcctggtttaccgaaggtggaggatactataggtaagcctctttccccttatgcggttaccaaatatgtgaatgagctttatgccgatgtgttttcacgctgctacggcttttcgaccattgggcttcgttatttcaatgtgttcggtcgtcgacaggatcccaatggtgcctatgcggcagtcataccaaaatggacctcttcgatgatccagggtgatgacgtctatattaacggtgatggcgagaccagtcgggatttttgttatattgaaaacaccgttcaggccaatctgcttgctgcaaccgcggggcttgatgctcgtaatcaagtttacaatattgctgttggcgggcggacgagtttgaatcagttgttctttgcgcttcgcgacggccttgccgaaaacggtgtgtcctatcaccgggaacctgtttatcgtgattttagggagggggatgtacgtcactctctcgctgatatcagcaaggctgccaaactgctggggtatgcgccgaaatatgatgtgtctgcaggtgtggcgttggccatgccttggtacatcatgtttttgaaatga

SEQ ID NO: 110942 - protein, 341 aa, Pseudomonas aeruginosa
MMSRYEELRKELPAQPKVWLITGVAGSIGSNLLETLLKLDQKVVGLDNFATGHQRNLDEVRSLASEKQWSNFKFIQGDIRNLDDCNNACAGVDYVLHQAALGSVPRSINDPITSNATNIDGFLNMLIAARDAKVQSFTYAASSSTYGDHPGLPKVEDTIGKPLSPYAVTKYVNELYADVFSRCYGFSTIGLRYFNVFGRRQDPNGAYAAVIPKWTSSMIQGDDVYINGDGETSRDFCYIENTVQANLLAATAGLDARNQVYNIAVGGRTSLNQLFFALRDGLAENGVSYHREPVYRDFREGDVRHSLADISKAAKLLGYAPKYDVSAGVALAMPWYIMFLK

SEQ ID NO: 110943 - DNA, 999 bp, Streptomyces globisporus
  CDS (1)..(999): transl_table=11
atgaggatgctggtgacgggcggagcgggtttcatcggctcgcagttcgtgcgggccacactgcacggcgagctgccgggttccgaggacgcccgggtgacggtcctggacaagctgacgtactccggcaatccggccaacctcacctccgtcgcggcccatccgcggtacaccttcgtccagggcgacaccgtcgacccgcgcgtcgtcgacgaggtggtcgccggccacgacgtcatcgtccacttcgcggcggagtcgcacgtggaccgctcgatcgacaccgccacccggttcgtcacgaccaacgtgctcgggacccagacgctgctggaagcggctctccggcacggggtcggccggttcgtgcacgtgtcgaccgacgaggtctacgggtcgatcgcctccggctcatggaccgaggacaccccgctcgcccccaacgtcccctacgcggcgtcgaaggcgggttcggacctgatggcgctcgcctggcaccgcacccggggcctggacgtcgtcgtcacccggtgcaccaacaactacggtccctaccagtaccccgagaaggtgatcccgctcttcgtcaccaacatcctcgacggcttgcgggtgcccctgtacggggacggcgcccaccgccgggactggctgcacgtgtccgaccactgccgggccatccagatggtcatgaactccggccgggccggggaggtctaccacatcggcggcggcaccgaactctccaacgaggaactcaccggcctgttgctcacggcgtgcggcaccgactggtcctgcgtggaccgggtggccgaccggcaggggcacgaccgccgctactcgctcgacatcacgaagatccggcaggaactgggctacgagcccctggtcgccttcgaggacggcctggccgcgacggtgaagtggtaccacgagaaccgttcgtggtggcagccgctgaaggaagcggccggcctcctggacgccgtcggctga

SEQ ID NO: 110944 - protein, 332 aa, Streptomyces globisporus
MRMLVTGGAGFIGSQFVRATLHGELPGSEDARVTVLDKLTYSGNPANLTSVAAHPRYTFVQGDTVDPRVVDEVVAGHDVIVHFAAESHVDRSIDTATRFVTTNVLGTQTLLEAALRHGVGRFVHVSTDEVYGSIASGSWTEDTPLAPNVPYAASKAGSDLMALAWHRTRGLDVVVTRCTNNYGPYQYPEKVIPLFVTNILDGLRVPLYGDGAHRRDWLHVSDHCRAIQMVMNSGRAGEVYHIGGGTELSNEELTGLLLTACGTDWSCVDRVADRQGHDRRYSLDITKIRQELGYEPLVAFEDGLAATVKWYHENRSWWQPLKEAAGLLDAVG

SEQ ID NO: 110945 - DNA, 1053 bp, Streptomyces nogalater
  CDS (1)..(1053): transl_table=11
atggcgtcgcacacctccgcgacgacggacgtgaacatcctggtcaccggcgcggtcggtttcatcggctcggcctatgtgcgcatgctgctggagaaccgggcccccggagcgggggccccggcggtacgcgtcaccgtcctcgacaaactgacgtacgcgggcaacctcacgaacctggacgcggtacgcggtgaccggctgcgcttcgtgcggggcgacatcctcgacgccgagctggtcgacgagctgatggcacacagcgaccaggtcgtccacttcgccgcggagtcgcacgtcgaccggtccatccgcgcggccgacgacttcgtgctgaccaacgtcgtcggcacccagcggctgctggacgccgcgctgcgccacggcgtggagcccttcgtcctggtgtccacggacgaggtctacggctccatcgcgtccggttcctggccggaggagcacccgctgagccccaactccccgtacgccgcctccaaggcgtcggccgacctgatggcgttcgcctgccaccgcacgcacggcctggacgtgcgggtgacccgctgttccaacaactacggcccgcgtcagcacccggagaagctcatcccgcgcttcgtcaccaacttgttggacgggctgccggtgccgctgtacggggacgggcggaacgtgcgggagtggctgcacgtggaggaccactgccggggcgtggacctggtgcgcaccgcgggccggcccggcggtgtgtaccacatcggcggcggccgggagctctccaaccgggagctggtgggtatgttgctggagctgtgcggggcggactggagcagcgtccggcacgtgcccgaccgcaaggggcacgacctgcgttacagcctggactggggcagggcccgtgaggaactgggctaccgtccggcgcgggagttctcctcggggctgcgctcgacggtccagtggtaccgcgagaaccggtcctggtgggagccgctcaagcggggagtcacggcgccgggcggtacgtccaccgtcgtccccggggtccggtga

SEQ ID NO: 110946 - protein, 350 aa, Streptomyces nogalater
MASHTSATTDVNILVTGAVGFIGSAYVRMLLENRAPGAGAPAVRVTVLDKLTYAGNLTNLDAVRGDRLRFVRGDILDAELVDELMAHSDQVVHFAAESHVDRSIRAADDFVLTNVVGTQRLLDAALRHGVEPFVLVSTDEVYGSIASGSWPEEHPLSPNSPYAASKASADLMAFACHRTHGLDVRVTRCSNNYGPRQHPEKLIPRFVTNLLDGLPVPLYGDGRNVREWLHVEDHCRGVDLVRTAGRPGGVYHIGGGRELSNRELVGMLLELCGADWSSVRHVPDRKGHDLRYSLDWGRAREELGYRPAREFSSGLRSTVQWYRENRSWWEPLKRGVTAPGGTSTVVPGVR

SEQ ID NO: 110947 - DNA, 987 bp, Streptomyces fradiae
  CDS (1)..(987): transl_table=11
atgaacatcctggtcaccggcgcggccggtttcatcggctcgcacttcgtccgcagcctgctggccgacacctactccggctgggagggagcccgggtcactgccctggacaaactgacctacgcgggcaaccggaacaacctgccgccctcaaacccgcgcctggagttcgtgcggggcgacgtgtgcgaccgcgccctgctccgcgagctgctgcccgggcaccacgccgtggtccatttcgcggcggaatcccacgtggaccgctccctcgaaggcgcgggcgagttcttccgcacgaacgtcctcggtacgcagacactcctcgacgccgtactggacagcggagtcgagcgggtcgttcacgtctccaccgacgaggtgtacggctcgatcgagcaaggctcctggaccgaggactggccgctgcagcccaattctccgtacgccgcctcgaaggcatgctcggacctggtcgcgcgagcctactgcgcacccacggaggtggacctctccatcacccgctgctccaacaactacggcccgcaccagcaccctgagaaggtcattcccaggttcgtcacgaacctcctcgaaggacgccaggtcccgctgtacggcgacggccgcaatgtgcgcgagtggctccacgtggaggaccactgccgcggtatccacctggtgctcaacaaggggcaggccggcgagatctacaacatcggcgggggcaacgagtacaccaacctcgccctcaccgagaaactgctcgaactgacgggtgccggcccggagatgatccgccgcgtccccgaccgcaaggcgcacgacctgcggtactcgatcgacgagtccaagatccgcgagaagctcggctacgccccgcggatcagcttcgaacagggcctgtccgacaccgtcgcctggtaccgcgacaacccggactggtggaagagcatcgagcatggcggggacagtgcggcggcctga

SEQ ID NO: 110948 - protein, 328 aa, Streptomyces fradiae
MNILVTGAAGFIGSHFVRSLLADTYSGWEGARVTALDKLTYAGNRNNLPPSNPRLEFVRGDVCDRALLRELLPGHHAVVHFAAESHVDRSLEGAGEFFRTNVLGTQTLLDAVLDSGVERVVHVSTDEVYGSIEQGSWTEDWPLQPNSPYAASKACSDLVARAYCAPTEVDLSITRCSNNYGPHQHPEKVIPRFVTNLLEGRQVPLYGDGRNVREWLHVEDHCRGIHLVLNKGQAGEIYNIGGGNEYTNLALTEKLLELTGAGPEMIRRVPDRKAHDLRYSIDESKIREKLGYAPRISFEQGLSDTVAWYRDNPDWWKSIEHGGDSAAA

SEQ ID NO: 110949 - DNA, 1008 bp, Streptomyces antibioticus
  CDS (1)..(1008): transl_table=11
atgaacctcctcgtcaccggtgccgccggattcatcggctcccgctacgtgcaccacctgctggaagcgacgcggcgcgggcgggagcccgcccccgtgatcacggtgctggacaagctcacctacgccggcgtcctcggcaacgtccccgacgaccccgccgtcaccttcgtgcgcggtgacatcgccgacgcaccactggtggactccctgatggccgaagccgaccaggtggtgcacttcgcggccgagacccacgtggaccgctccatcacctcgcccggaaccttcgtccgcaccaacgtcctcggcacccaggtgctgctcgacgcggccctgcggcacggcgtcggcccgttcgtgcacgtgtccaccgacgaggtctacggctccatcgagcacggatcctggccggagcaccagccgctgtgcccgaactcgccgtactccgcctccaaagcctcctccgacctgctcgcgctgtcctaccaccgcacccacggcctggacgtccgcgtcacccgctgctccaacaactacgggccgcaccagttccccgagaagatcgtcccgctgttcgtcaccaacctcctcgacggcctgcgggtccccctctacggcgacggcctcaacgtccgcgagtggctgcacgtggacgaccactgcctgggcgtcgacctggtccgcacccagggccggcccggcgaggtctaccacatcggcggcggcaccgaactgaccaaccgggacctcacgggcctcctgctggacgcgttcggcgtgggctgggacgtcgtggacccggtcgcggaccgcaagggccacgaccgccgctacgccctcgactgcgccaaggccgcggacgagctgggctaccggccgcgccgggacttcgccgagggcatcgcccgcaccatcgactggtaccgcgacaaccgcgcctggtgggaacccctgaagaagcggccggccggtcccgccgcccccccgagaggcagcggcccatga

SEQ ID NO: 110950 - protein, 335 aa, Streptomyces antibioticus
MNLLVTGAAGFIGSRYVHHLLEATRRGREPAPVITVLDKLTYAGVLGNVPDDPAVTFVRGDIADAPLVDSLMAEADQVVHFAAETHVDRSITSPGTFVRTNVLGTQVLLDAALRHGVGPFVHVSTDEVYGSIEHGSWPEHQPLCPNSPYSASKASSDLLALSYHRTHGLDVRVTRCSNNYGPHQFPEKIVPLFVTNLLDGLRVPLYGDGLNVREWLHVDDHCLGVDLVRTQGRPGEVYHIGGGTELTNRDLTGLLLDAFGVGWDVVDPVADRKGHDRRYALDCAKAADELGYRPRRDFAEGIARTIDWYRDNRAWWEPLKKRPAGPAAPPRGSGP

SEQ ID NO: 110951 - DNA, 1038 bp, Plesiomonas shigelloides
  CDS (1)..(1038): transl_table=11
atggatatttatatgtctcgctatgaagagattacacagcagttaattttttcaccgaaaacttggttaattactggtgtcgctggctttataggatcaaatcttttagaaaagttacttaaattaaaccaggttgttattgggttagataacttttccacgggacatcaatataatcttgatgaagttaaaacattagtttccactgaacagtggagtcgattttgctttatagaaggtgatattcgagatctcactacctgtgagcaagttatgaaaggtgttgatcatgtcttacatcaggctgcgctaggttctgtacctcgttcaattgttgatcctataacaaccaatgcaactaatattactggatttttgaatatcttacatgcggctaaaaatgcacaagtacaaagttttacttatgctgcatcaagctcaacttatggagatcatcccgcactaccaaaagtagaggaaaacattggtaatccactttctccttatgcagttactaaatatgttaacgagatttatgctcaggtatatgctcgaacatatggttttaaaactattggattacgttattttaatgtatttggtcgtcgtcaagatcctaatggagcttatgctgcagtaattccaaaatggacagcagcaatgcttaaaggtgatgacgtatatattaatggcgatggtgaaacgagtcgtgatttttgttatatagataatgttatacaaatgaatatattatctgcattagcgaaggacagtgctaaagataatatatataatgttgcagttggtgatagaacaacattaaatgaattatctggttacatttatgatgagcttaatttaattcaccatatcgataaattgagcattaagtatagagagtttagatctggagatgttaggcattctcaggctgatgttactaaggctatagatttactacagtatagaccaaatataaaaatcagagagggattacgactttcaatgccgtggtatgtgagatttttaaaaggctaa

SEQ ID NO: 110952 - protein, 345 aa, Plesiomonas shigelloides
MDIYMSRYEEITQQLIFSPKTWLITGVAGFIGSNLLEKLLKLNQVVIGLDNFSTGHQYNLDEVKTLVSTEQWSRFCFIEGDIRDLTTCEQVMKGVDHVLHQAALGSVPRSIVDPITTNATNITGFLNILHAAKNAQVQSFTYAASSSTYGDHPALPKVEENIGNPLSPYAVTKYVNEIYAQVYARTYGFKTIGLRYFNVFGRRQDPNGAYAAVIPKWTAAMLKGDDVYINGDGETSRDFCYIDNVIQMNILSALAKDSAKDNIYNVAVGDRTTLNELSGYIYDELNLIHHIDKLSIKYREFRSGDVRHSQADVTKAIDLLQYRPNIKIREGLRLSMPWYVRFLKG

SEQ ID NO: 110953 - DNA, 987 bp, Streptoverticillium netropsis
  CDS (1)..(987): transl_table=11
atgcggattctcgtcaccggcggcgctggattcatcggttcagaatttgtccggtcgctgctcttgacagcggagcccgaaaggaacacgccctgggtgaccgtgctggacaagctgacctatgcgggtgtcgcagcgaacctcgatccggtcgccgggcatcccagatatcggttcgtgcggggtgacatatgcgacgcgcatcttgcggaccacgtgatgcggggacacgacgccgtggtgcacttcgcggccgagtcgcacgtggaccggtccatctcaggggccggccctttcgtcacgaccaatgtcgtgggaacgcaggtgatgttggacgcggcgtaccggcacggtgtcggtcgattcgtgcaggtgtcgacggacgaggtctatggatcgatatccgagggctcctggagcgagggcgcccctcttgaccctaattcgccatatgcggccagcaaggcgggagcggatctgctcgcgcattcatatcaccgtacgcacggcatggatgtggtggtgacccggtgctccaacaactacgggccacgccagttccccgagaaagtcatcccgctcttcatcaccaatctgctggacggccgggaggtgccgctgtacggggacgggcagcacatgcgcgactggctgcacgtgtccgaccactgccgcgggatccggttggcactccggcacgggaaggccggcgagacgtatcacatcggcggcggcaccgagctgaccaatgaggcgcttactggtctgctgctggaggcgacaggccgtggctgggacagcgtgcggcgggttcccgaccgcaaggggcacgacctgcggtactcgctccgctgcgacaacgcgcggcagcatctggggtacgaggccgaggtcgggttcgagaagggcctggcggacaccgtcgcctggtaccggaacaatcgttcctggtgggagccgctgaagcgcaggatggcgcagccatag

SEQ ID NO: 110954 - protein, 328 aa, Streptoverticillium netropsis
MRILVTGGAGFIGSEFVRSLLLTAEPERNTPWVTVLDKLTYAGVAANLDPVAGHPRYRFVRGDICDAHLADHVMRGHDAVVHFAAESHVDRSISGAGPFVTTNVVGTQVMLDAAYRHGVGRFVQVSTDEVYGSISEGSWSEGAPLDPNSPYAASKAGADLLAHSYHRTHGMDVVVTRCSNNYGPRQFPEKVIPLFITNLLDGREVPLYGDGQHMRDWLHVSDHCRGIRLALRHGKAGETYHIGGGTELTNEALTGLLLEATGRGWDSVRRVPDRKGHDLRYSLRCDNARQHLGYEAEVGFEKGLADTVAWYRNNRSWWEPLKRRMAQP

SEQ ID NO: 110955 - DNA, 993 bp, Streptomyces spectabilis
  CDS (1)..(993): transl_table=11
atgcggattattgtgacgggcggtgccggtttcatcgggtccgaatttgtccggtccatgctgttggcccctggcgcggcgaacgacatccgtatcaccgtcctggacaagctgacgtatgccggagtgcgggaaaacctcgacccggtcgcgggccatccacggcacgccttcgtgcacggggacatatgcgacggcgatttcctggaccaggtggtgccggggcacgacgcggtggtgcacttcgccgccgagacgcacgtggaccggtccatcacggggtccgcccccttcgtgacgacgaacgtcctcggcacgcagctgctgctcgacgcggcgcgccggcacggggtcggccggttcctgcacgtgtcgaccgacgaggtctacggctcgatcccggtgggctcctggtccgaggagagcccgctcgcgccgaactcgccgtacgcggccaccaaggcgggctccgaactgctcgcgctcgcctgtcaccgcacgcacggcatggacgtcgtggtgacccgctgctcgaacaactacgggccctaccagttccccgagaaggtcatcccgctgttcatcacccgcctcctcgacggcggcaaggtgccgctgtacggcgacgggcagcacgtccgcgactggctgcacgtgtcggaccactgccggggcgtcgaactggcgctgcgccacggcagggccggggaggtctaccacatcggcggcggcaccgagctgacgaacgagcagctgaccgggcacctgctcgccgcgacaggccggggctgggagcaggtcgagcgcgtccccgaccgcaagggccacgacgcgcggtactccctcgactgcaccaaggccgccacggagctgggctacgcccccctcgtcggcttcgagcgcggcctcgccgacaccgtcgcctggtacgcgggcaaccgctcctggtgggagccgctccagcggcgcgcggccctgcgcgcctccgcgtag

SEQ ID NO: 110956 - protein, 330 aa, Streptomyces spectabilis
MRIIVTGGAGFIGSEFVRSMLLAPGAANDIRITVLDKLTYAGVRENLDPVAGHPRHAFVHGDICDGDFLDQVVPGHDAVVHFAAETHVDRSITGSAPFVTTNVLGTQLLLDAARRHGVGRFLHVSTDEVYGSIPVGSWSEESPLAPNSPYAATKAGSELLALACHRTHGMDVVVTRCSNNYGPYQFPEKVIPLFITRLLDGGKVPLYGDGQHVRDWLHVSDHCRGVELALRHGRAGEVYHIGGGTELTNEQLTGHLLAATGRGWEQVERVPDRKGHDARYSLDCTKAATELGYAPLVGFERGLADTVAWYAGNRSWWEPLQRRAALRASA

SEQ ID NO: 110957 - DNA, 975 bp, Streptomyces griseus
  CDS (1)..(975): transl_table=11
gtgagaatcctggtcaccggcggggccgggttcatcggttcccactatgcgcggtcacttctggcgggccgttacggcgcggccccggacacccggatcaccgtgctcgacaaactgacctacgcgggcgaccgggggaacctgccggcacaccacgaccggctggagttcgtccggggagacgtctgcgacggggctctgctgcgcgaactgctgccgggccacgacgcgatcgtccacttcgccgccgagtcccacgtggaccgctccgtcgccggcggccgggagttcgtccgtaccaacgcgctgggcacccaggtgctgctggaggccgcctccctgagccgggtcgagcgggtcctgcacatctccaccgacgaggtctacggttcgatcgagcagggctcctggaccgaggagcggcctctcctgccgaactccccgtacgccgcgtcgaaggccagcgccgacctgatcgcccgcagctactggcgcacccacggtctggacgtgtccatcactcgctgctcgaacaactacgggccctaccagcaccccgagaagctcgtcccgcggttcgtgacgaatctgctgcggggccgcaaggtccccgtctacggcgacgggcgcaaccgccgtgagtggattcacgtcgacgaccactgccgcgccatccacctggtcctcgccaagggcggcgccggcgagatctacaacgtcggcagcggcgacgagctggagaacctgcggctggccgagcaccttctggcgctgtgcggcgccgacgcctcgatgatcgagtacgtcgaggaccgcaagggccacgacctccgctacgcgctggacgacaccaagatccgcgagcagctcggctacgagccgcaggtgcccctcgaccgcgggatcgccgagacggtggcctggtacgaggccaatccgaggtggtggcaggccgccgggcggcgagaggaatga

SEQ ID NO: 110958 - protein, 324 aa, Streptomyces griseus
MRILVTGGAGFIGSHYARSLLAGRYGAAPDTRITVLDKLTYAGDRGNLPAHHDRLEFVRGDVCDGALLRELLPGHDAIVHFAAESHVDRSVAGGREFVRTNALGTQVLLEAASLSRVERVLHISTDEVYGSIEQGSWTEERPLLPNSPYAASKASADLIARSYWRTHGLDVSITRCSNNYGPYQHPEKLVPRFVTNLLRGRKVPVYGDGRNRREWIHVDDHCRAIHLVLAKGGAGEIYNVGSGDELENLRLAEHLLALCGADASMIEYVEDRKGHDLRYALDDTKIREQLGYEPQVPLDRGIAETVAWYEANPRWWQAAGRREE

SEQ ID NO: 110959 - DNA, 981 bp, Streptomyces cyanogenus
  CDS (1)..(981): transl_table=11
atgaagaagatcctgatcaccggtggcgcgggcttcatcggttcgcactacgtgcgcaccctcctgaacgacggctacgaggactggaagggcgcccacgtcaccgtcctcgacaagctcacctacgccggcaaccgcgacaacctgcccgaggcgcacccgcgcctgaccttcgtccagggcgacatctgcgacttcgagctgctgctcgaactgctgccgggacacgacgcggtcgtccacttcgccgccgagtcgcacgtggaccgctctctggagtccgcggaggagttcgtccacaccaacgtcaccggcacccagcgactgctcgacgcggtgctcgccacccgagtcaagcgcgtcgtccacgtctccaccgacgaggtctacggctccatcgacgagggatcctggaccgaggagtggccgctggcgcccaactccccgtactccgcctccaaggccgcgtccgacctgctcgcacgctcgtactggcgcacccacggcctcgacctctccatcacccggtgctccaacaactacggcccgtaccagcacccggagaagctcatcccgctgttcgtcaccaacctgctggagggtgagcaggtgccgctctacggcgacggcggcaacatccgcgagtggctgcacgtcgacgaccactgccgtgcgatcgacctcgtcctcaacaagggccgggccggggagatctacaacatcggcggcggcaacgagcagacgaaccgggccatcaccgagcggctcatcgctctgacgggacaggactggtccaaggtccgtcacgtccccgaccgcaaggcgcacgacctgcgctactccctcgacgagtcgaagatccgcgaagagctcggctacgccccgcgcatcaccttcgagcagggcctcgccgacaccgtcgcctggtaccacgacaaccccggctggtggaaggggaccaagcacaacaagcagggatga

SEQ ID NO: 110960 - protein, 326 aa, Streptomyces cyanogenus
MKKILITGGAGFIGSHYVRTLLNDGYEDWKGAHVTVLDKLTYAGNRDNLPEAHPRLTFVQGDICDFELLLELLPGHDAVVHFAAESHVDRSLESAEEFVHTNVTGTQRLLDAVLATRVKRVVHVSTDEVYGSIDEGSWTEEWPLAPNSPYSASKAASDLLARSYWRTHGLDLSITRCSNNYGPYQHPEKLIPLFVTNLLEGEQVPLYGDGGNIREWLHVDDHCRAIDLVLNKGRAGEIYNIGGGNEQTNRAITERLIALTGQDWSKVRHVPDRKAHDLRYSLDESKIREELGYAPRITFEQGLADTVAWYHDNPGWWKGTKHNKQG

SEQ ID NO: 110961 - DNA, 1014 bp, Streptomyces venezuelae
  CDS (1)..(1014): transl_table=11
gtgcggcttctggtgaccggaggtgcgggcttcatcggctcgcacttcgtgcggcagctcctcgccggggcgtaccccgacgtgcccgccgatgaggtgatcgtcctggacagcctcacctacgcgggcaaccgcgccaacctcgccccggtggacgcggacccgcgactgcgcttcgtccacggcgacatccgcgacgccggcctcctcgcccgggaactgcgcggcgtggacgccatcgtccacttcgcggccgagagccacgtggaccgctccatcgcgggcgcgtccgtgttcaccgagaccaacgtgcagggcacgcagacgctgctccagtgcgccgtcgacgccggcgtcggccgggtcgtgcacgtctccaccgacgaggtgtacgggtcgatcgactccggctcctggaccgagagcagcccgctggagcccaactcgccctacgcggcgtccaaggccggctccgacctcgttgcccgcgcctaccaccggacgtacggcctcgacgtacggatcacccgctgctgcaacaactacgggccgtaccagcaccccgagaagctcatccccctcttcgtgacgaacctcctcgacggcgggacgctcccgctgtacggcgacggcgcgaacgtccgcgagtgggtgcacaccgacgaccactgccggggcatcgcgctcgtcctcgcgggcggccgggccggcgagatctaccacatcggcggcggcctggagctgaccaaccgcgaactcaccggcatcctcctggactcgctcggcgccgactggtcctcggtccggaaggtcgccgaccgcaagggccacgacctgcgctactccctcgacggcggcgagatcgagcgcgagctcggctaccgcccgcaggtctccttcgcggacggcctcgcgcggaccgtccgctggtaccgggagaaccgcggctggtgggagccgctcaaggcgaccgccccgcagctgcccgccaccgccgtggaggtgtccgcgtga

SEQ ID NO: 110962 - protein, 337 aa, Streptomyces venezuelae
MRLLVTGGAGFIGSHFVRQLLAGAYPDVPADEVIVLDSLTYAGNRANLAPVDADPRLRFVHGDIRDAGLLARELRGVDAIVHFAAESHVDRSIAGASVFTETNVQGTQTLLQCAVDAGVGRVVHVSTDEVYGSIDSGSWTESSPLEPNSPYAASKAGSDLVARAYHRTYGLDVRITRCCNNYGPYQHPEKLIPLFVTNLLDGGTLPLYGDGANVREWVHTDDHCRGIALVLAGGRAGEIYHIGGGLELTNRELTGILLDSLGADWSSVRKVADRKGHDLRYSLDGGEIERELGYRPQVSFADGLARTVRWYRENRGWWEPLKATAPQLPATAVEVSA

SEQ ID NO: 110963 - DNA, 1011 bp, Streptomyces fradiae
  CDS (1)..(1011): transl_table=11
atgagggccgcgggcgactgggccgggcggacggtggttgtcaccggcgccctgggcttcatcggctcccactacgcggagcggctcgccgccctcggcgcccgggtcgtcggcctccaccggagcgcccgcccggcggccggagcggaaccggcggcgccggcggccggccggtcgtgcctggtacgggccgatctgtgcgacgaggccgccacccgcagggccttccaggagtgggcgcccggggccgacgtcgtcatccactgcgcggggctggacggcaacgcccagtacaagcgcgaccattccgcctccgtcctggacgcgaacgtgcgcggcaccgcccatgtgctcaacaccgcccgggacaccggcgccggcgcggtggtcctcctcagctccaccgaggtgtactgcgccccgcgggactccccggcccgggaggacgaggagatccgccgttatgtgccgcacgccggcaacggctacgtcctgtcgaagatcttctgcgagatcatggccgaactgcacggcgccgagttcggcagccggatcttccgggtccggccgggaaacgtctacgggccccgggacgggaacggcggaacccgcacccgggtcattcccagcatggtcgcccgggccgcggcgggcgagacgatagagatctggggggacggccgtcagacccgttccttcatccatgtggaggacctggtgaacgccaccctccgcatggtcgaggcggacaagtacccggtgatgaacatcggctcccccgaagaggtgtccatcctcgacctggccaggaccgtggtctcggccgtcggcgggaagggaggcatccgcacctacccggacaagccctccggtcctccggcccagcgcctggacctgtcgcggatgcgtgacgtcaccggctgcgaacccaggcccctgcgcgtggggatcgagcagaccatccgctggtaccgcggacaccaccggccgtcgcgggcaccccactcgtga

SEQ ID NO: 110964 - protein, 336 aa, Streptomyces fradiae
MRAAGDWAGRTVVVTGALGFIGSHYAERLAALGARVVGLHRSARPAAGAEPAAPAAGRSCLVRADLCDEAATRRAFQEWAPGADVVIHCAGLDGNAQYKRDHSASVLDANVRGTAHVLNTARDTGAGAVVLLSSTEVYCAPRDSPAREDEEIRRYVPHAGNGYVLSKIFCEIMAELHGAEFGSRIFRVRPGNVYGPRDGNGGTRTRVIPSMVARAAAGETIEIWGDGRQTRSFIHVEDLVNATLRMVEADKYPVMNIGSPEEVSILDLARTVVSAVGGKGGIRTYPDKPSGPPAQRLDLSRMRDVTGCEPRPLRVGIEQTIRWYRGHHRPSRAPHS

SEQ ID NO: 110965 - DNA, 1260 bp, Arabidopsis thaliana
  CDS (1)..(1260)
atgtttagttttggccgagcaagaagccaagggaggcaaaacagatctatgtctcttggaggactggattatgcagaccccaagaagaaaaacaattacttgggaaagattcttttgacagcttctcttacagccttgtgcattttcatgctcaagcaatctccaacattcaatactcctagcgtgttttctcgacatgagccaggggttacacatgttttggtcactggtggtgctgggtatattggttcacatgcagctctaaggcttctaaaggaatcatatcgagtaaccattgtggacaatctatcacggggcaatctcgctgcagtcaggattttgcaagaactatttccggaacctggaaggcttcaatttatttatgctgatcttggagatgccaaagctgtcaacaagatattcacagagaatgcctttgacgctgtgatgcatttcgctgctgttgcatatgttggggaaagcacacaattccctcttaagtattatcacaatattacatcgaacactttggtagtattagagacaatggctgctcatggagtaaagactttgatatattcaagcacttgtgcaacgtatggggagcctgatattatgccaattacagaggaaactcctcaggtgccaatcaacccatatggtaaggccaagaagatggcagaagatatcattttggatttctcgaaaaactcagatatggcagttatgatcctaagatatttcaatgtgattgggtccgatccagagggcagattgggtgaagccccaagacctgagctgcgagagcatggacgcatctccggtgcttgttttgatgcagcacgtggcatcatgcctggcctacagatcaaaggaacagactacaaaaccgctgatggaacttgcgtacgggattacattgatgtcactgatttggttgatgctcatgttaaagctcttcaaaaggcaaaaccacgcaaagttggaatctacaatgttggcaccgggaaaggtagctcggtgaaagagtttgttgaggcgtgcaagaaagcaactggtgttgagatcaagatcgactatttgcctagacgtgcaggtgattacgctgaggtttacagtgatccaagcaagattaggaaggaacttaactggacagctaagcacactaatctcaaagagagtcttgagactgcatggagatggcagaagctgcaccgtaatggctatggcttaacaacctcatcggtctcggtttactga

SEQ ID NO: 110966 - protein, 419 aa, Arabidopsis thaliana
MFSFGRARSQGRQNRSMSLGGLDYADPKKKNNYLGKILLTASLTALCIFMLKQSPTFNTPSVFSRHEPGVTHVLVTGGAGYIGSHAALRLLKESYRVTIVDNLSRGNLAAVRILQELFPEPGRLQFIYADLGDAKAVNKIFTENAFDAVMHFAAVAYVGESTQFPLKYYHNITSNTLVVLETMAAHGVKTLIYSSTCATYGEPDIMPITEETPQVPINPYGKAKKMAEDIILDFSKNSDMAVMILRYFNVIGSDPEGRLGEAPRPELREHGRISGACFDAARGIMPGLQIKGTDYKTADGTCVRDYIDVTDLVDAHVKALQKAKPRKVGIYNVGTGKGSSVKEFVEACKKATGVEIKIDYLPRRAGDYAEVYSDPSKIRKELNWTAKHTNLKESLETAWRWQKLHRNGYGLTTSSVSVY

SEQ ID NO: 110967 - DNA, 984 bp, Rhizobium leguminosarum bv
  CDS (1)..(984): transl_table=11
atggcaggtgaaacggttcttgtcgtcggcggcgccggctatatcggctcgcatacgtgcctcgacctggcgaacaagggctataggcctgtcgtcttcgacaatttttcgaacggtcatcgcgagtttgtcagatgggggccggccgaagagggcgatattcgcgaccgcgcccggctggatgaggtgctggccaagcacaagccggcggcgatcctgcatttcgccgcgctgatcgaagtcggcgaatcggtcaaggatccggtttccttctacgagaacaatgtgatcggcacgttgacgctgctttcggcggcacaagcggccggcatcaacgccttcgtcttctcctcgacctgcgccacttacggcctgccgcagagcgtgccgctcgacgagacccatcggcaggtgccgatcaatccctacgggcgaacgaaatatatcgtcgaacaggcgcttgccgattacgaccagtacgggagcctgcgctcggtggtgctgcgctatttcaatgcggccggcgccgattttgagggccggatcggcgaatggcaccagccggaaacgcatgcgatacccctggcgatcgacgcggcactcggccgccgccaaggcttcaaggtgttcggcagcgattacgagacacgcgacggcacctgtgtgcgcgactatatccatgtgctggatctcgccgatgcgcatgtgcgcgccgtcgaatatctgctgaagggcggcgattccgttgcgctcaacctcggcaccggcaccggcacgacggtgaaggaattgctcggcgcgatcgaagaagtgtcgaaccggcctttcccggtcgaatatatcggccggcgcgaaggcgattcgcacacgctggtggccaataacgacaaggcgcgcgacgtgctcggctgggtgccgcagtatgatctgtctgagatcatccgctccgcctgggattggcatgcaaaatccaaccagcattga

SEQ ID NO: 110968 - protein, 327 aa, Rhizobium leguminosarum bv
MAGETVLVVGGAGYIGSHTCLDLANKGYRPVVFDNFSNGHREFVRWGPAEEGDIRDRARLDEVLAKHKPAAILHFAALIEVGESVKDPVSFYENNVIGTLTLLSAAQAAGINAFVFSSTCATYGLPQSVPLDETHRQVPINPYGRTKYIVEQALADYDQYGSLRSVVLRYFNAAGADFEGRIGEWHQPETHAIPLAIDAALGRRQGFKVFGSDYETRDGTCVRDYIHVLDLADAHVRAVEYLLKGGDSVALNLGTGTGTTVKELLGAIEEVSNRPFPVEYIGRREGDSHTLVANNDKARDVLGWVPQYDLSEIIRSAWDWHAKSNQH

SEQ ID NO: 110969 - DNA, 987 bp, Rhizobium meliloti
  CDS (1)..(987): transl_table=11
gtgcagaacaacaacattctcgtggtcggcggcgccggctatatcggctcgcatacctgccttcagcttgcggcaaagggttaccaacccgtcgtttacgacaacctctccaacggccacgaggaattcgtcaagtggggcgttctcgaaaagggcgatatccgtgacaggcagcgtcttgacgaggttcttgcgcggcacaagccgcgggcgatcctgcacttcgcggcgatgatcgaggtgggcgagtcggtcaaggacccggccgccttctatgacaacaacgtcatcggcacgctgaccctcttgtctgcggcgcttgccgcgggcatcgacgccttcgtcttctcatcgacgtgcgcgacctacggactgcccgacagcgtaccgatggatgagagccataagcaggccccgatcaatccctatggccgcaccaagtggatctgcgagcaggcgctgaaggactacggtctctacaagggcctgcgctcggtaatcctgcgctacttcaatgccgcgggtgccgacttcgagggccgcatcggcgaatggcatgagccggaaacccatgcgatcccgctcgcgatcgatgcggcacttgggcggcgcgaaggcttcaaggtcttcgggacagactacgacacgcgcgacggaacgtgcgtgcgggactatatccacgtcctcgatctggcggatgcccatgtgcgcgcggtcgactatctcctcgagggcggcgagagcgttgcgctcaatctcgggaccggcaccggtaccacggtgaaggagttgctggacgcgatcgagaaagtggccaagcgaccgttcaacatcggctacgccgagcggcgcgaaggcgactcgaccacgcttgtcgccaacaatgacaaggcgcgtcaggttctaggctgggagccgcaatacgatctcgcagcgattaccgaatcggcatggaactggcactcgcgcagaaatcagggcggctga

SEQ ID NO: 110970 - protein, 328 aa, Rhizobium meliloti
MQNNNILVVGGAGYIGSHTCLQLAAKGYQPVVYDNLSNGHEEFVKWGVLEKGDIRDRQRLDEVLARHKPRAILHFAAMIEVGESVKDPAAFYDNNVIGTLTLLSAALAAGIDAFVFSSTCATYGLPDSVPMDESHKQAPINPYGRTKWICEQALKDYGLYKGLRSVILRYFNAAGADFEGRIGEWHEPETHAIPLAIDAALGRREGFKVFGTDYDTRDGTCVRDYIHVLDLADAHVRAVDYLLEGGESVALNLGTGTGTTVKELLDAIEKVAKRPFNIGYAERREGDSTTLVANNDKARQVLGWEPQYDLAAITESAWNWHSRRNQGG

SEQ ID NO: 110971 - DNA, 1290 bp, Arabidopsis thaliana
  CDS (1)..(1290)
atgccttcaatagaagatgagctgtttccgtcaacgccgggtaaattcaaaattgaccggtcaaaccgtcagctccaccgttgtttcgcttctacgagcaccatgtttctttgggctctcttcctcatcgctctcaccgcttcttacttgagtttccaaagcttcgtcgattccggtagccgttatctaaccgcttcttggggcggcatccagtgggagaaacaggttcgtacctccgctcagatccatcgctccggcggtatctccgtccttgttaccggcgctaccggattcgtcggtagccacgtgtcacttgccttgaggaaacgcggcgatggtgttgttggacttgataatttcaacaattactacgatccgtcgttgaaacgtgctcgtagatctctgttgtcgtcgagagggatcttcgtcgttgaaggagatctaaacgacgcgaagctgttagcaaagcttttcgatgtggttgctttcactcacgtgatgcatctcgctgctcaagctggtgttagatacgctttggagaatcctcaatcgtatgttcatagcaacatcgccggacttgtgaatcttctcgagatttgcaaagcggcgaatcctcagccggcgatagtttgggcttcatcgagctccgtttatggactcaacgagaaagttccattctctgaatctgaccggacggatcaaccggcgagtctctacgccgcaacgaaaaaagccggcgaagaaatcacccacacttataaccatatttacggtcttgccattaccggtttaagattcttcacggtttacggaccatggggtagaccggatatggcttacttctccttcaccagaaacatcctacaaggtaaaccgatcacaatctaccggggcaaaaaccgggtcgatttagcccgggatttcacatacatcgacgatatagtgaaaggatgtttaggatctctggattcatcgggtaaaagtaccgggtcgggtggtaaaaaacgtggagcagcaccgtaccggatatttaacctgggaaacacatctccggttacagtaccgattctggtggatatattggagaagcatttaaaggtgaaagcgaagaggaacttcgtggagatgccaggaaacggcgacgtaccgttcacacatgccaatattagctcagcccgaaatgaattcgggtataaaccgacaaccgatttggaaaccgggttgaagaagttcgttagatggtatctttcttattacggatacaatactaaagccaagcttgtacattaa

SEQ ID NO: 110972 - protein, 429 aa, Arabidopsis thaliana
MPSIEDELFPSTPGKFKIDRSNRQLHRCFASTSTMFLWALFLIALTASYLSFQSFVDSGSRYLTASWGGIQWEKQVRTSAQIHRSGGISVLVTGATGFVGSHVSLALRKRGDGVVGLDNFNNYYDPSLKRARRSLLSSRGIFVVEGDLNDAKLLAKLFDVVAFTHVMHLAAQAGVRYALENPQSYVHSNIAGLVNLLEICKAANPQPAIVWASSSSVYGLNEKVPFSESDRTDQPASLYAATKKAGEEITHTYNHIYGLAITGLRFFTVYGPWGRPDMAYFSFTRNILQGKPITIYRGKNRVDLARDFTYIDDIVKGCLGSLDSSGKSTGSGGKKRGAAPYRIFNLGNTSPVTVPILVDILEKHLKVKAKRNFVEMPGNGDVPFTHANISSARNEFGYKPTTDLETGLKKFVRWYLSYYGYNTKAKLVH

SEQ ID NO: 110973 - DNA, 1305 bp, Arabidopsis thaliana
  CDS (1)..(1305)
atgtcgcatctggacgacattccttctacgcctgggaaattcaagatgatggataaatcccccttcttcctgcaccgtactcgttggcaatcctccgtcgccaagcttgccttttggtcccttgtctttttcggattgctcttcatcttcttctaccgatctcccatctccaatcccgattcctctcgccgctctcttcgcacctactcttggggcggtcccgcctgggagaaacgcgtccgatcctccgctcgtgtccgcacccgcaacggcgtctccgttctcgtcaccggggccgccggtttcgtcgggactcacgtctctgccgctcttaaacgacgcggcgacggcgttctaggcctcgacaacttcaacgattactacgacacctctctcaagagatctcgacaagccctcctcgagagaagcggagtgttcatcgttgaaggagacatcaacgatctgtctctcctcaagaagctcttcgaggtcgtccctttcactcacgtcatgcatcttgccgctcaagctggtgtcagatacgccatggagaaccccggctcctacgttcacagcaacatcgctggtttcgttaacctcctcgaggtctgtaaatccgctaatcctcagccggcgatcgtgtgggcatcgtctagctccgtctacggtttaaacaccaaagtccccttctctgagaaagacagaacagatcagcctgcgagtctctacgctgcgaccaagaaagctggagaagagattgcccacacttacaaccacatctacgggctctctctcaccggcttgaggtttttcacggtgtacgggccgtggggaagacctgacatggcttacttcttcttcaccagagacatcctcaaagggaaagctatttcgatcttcgaaggagccaatcacggaacagtggctagggatttcacatacatcgatgacatagtgaaaggatgtttgggggctctggacacggcggagaagagcacagggagtggtggcaagaagcggggagcggctcagctaagggtattcaacctggggaacacatctccggtgccggtgacggatcttgtgagtatattggagagattgttgaaagtgaaagccaagaggaacatgatgaagctgccgaggaatggtgatgtgcccttcacacatgctaatatcagttcggcacagagagagtttgggtacaaaccaagcacggatttgcagactggtctaaagaagtttgtgagatggtatcttggttactacaagcaggggggaaagaaagttgctgctgctgcttga

SEQ ID NO: 110974 - protein, 434 aa, Arabidopsis thaliana
MSHLDDIPSTPGKFKMMDKSPFFLHRTRWQSSVAKLAFWSLVFFGLLFIFFYRSPISNPDSSRRSLRTYSWGGPAWEKRVRSSARVRTRNGVSVLVTGAAGFVGTHVSAALKRRGDGVLGLDNFNDYYDTSLKRSRQALLERSGVFIVEGDINDLSLLKKLFEVVPFTHVMHLAAQAGVRYAMENPGSYVHSNIAGFVNLLEVCKSANPQPAIVWASSSSVYGLNTKVPFSEKDRTDQPASLYAATKKAGEEIAHTYNHIYGLSLTGLRFFTVYGPWGRPDMAYFFFTRDILKGKAISIFEGANHGTVARDFTYIDDIVKGCLGALDTAEKSTGSGGKKRGAAQLRVFNLGNTSPVPVTDLVSILERLLKVKAKRNMMKLPRNGDVPFTHANISSAQREFGYKPSTDLQTGLKKFVRWYLGYYKQGGKKVAAAA

SEQ ID NO: 110975 - DNA, 1293 bp, Arabidopsis thaliana
  CDS (1)..(1293)
atgaagcaaatgtcgcatcttgatgatattccttcgacgcctggcaagttcaagccctacttccaccgtacgcggtggcaatcctccgtcgccaagctcgccttttggtctctcgtcttcgttggtttgatcttcatcttcttctaccgatctcccgtttcctccaatcccgccgatccttctcgccgttctcttcgtacctactcctggggtggacccgcttgggagaaacgggtcagatcctccgcccgtctccgtacccgccgcggtttctctgttctcgtcaccggagccgccggtttcgtcggtacccatgtctccgccgctctcaaacgccgcggagatggcgttctggggcttgacaacttcaacgattactacgatccatcgctcaagagagcaaggcaagcccttttggagagaagcggagtgtttgttgttgaaggagacatcaatgacgctgctctcttgaagaagctctttgaagttgttccctttacccacgttatgcatttggctgctcaagctggtgtcaggtacgccatggaaaatcctagctcttatgttcacagtaacatcgctggcttcgtcaatctccttgaggtttgcaaatctgccaatccccaacccgccattgtctgggcttcctctagctctgtctacgggctcaacactaaggtccccttctccgagaaagacagaactgaccaaccagctagtctctatgctgctactaagaaggctggtgaagagattgctcacacttacaatcacatctatggactctctcttactggcttgaggtttttcaccgtctatggtccttggggaaggcctgacatggcctatttcttcttcaccagagacattctcaaagggaaagccatttcaatctttgagggggtcaaccatggaaccgtggctagggacttcacttacattgatgacattgtcaaggggtgtttaggggctttggacacggctgagaagagcactggtagtggtggtaagaagcgcggtgcggctcagttacgggttttcaatctcggcaacacttcgcccgttccagtgactgatcttgtcaccattcttgagagacttctcaaagtcaaggccaagaggaacattatgaagttgccgaggaacggggatgtgcagttcactcatgctaatatcagttctgcgcagagagagctcggctacaaacccaccaccgatcttcagacgggtctcaagaagtttgcgagatggtatttgggttactacaatggcggaaagaaagctgcaagctga

SEQ ID NO: 110976 - protein, 430 aa, Arabidopsis thaliana
MKQMSHLDDIPSTPGKFKPYFHRTRWQSSVAKLAFWSLVFVGLIFIFFYRSPVSSNPADPSRRSLRTYSWGGPAWEKRVRSSARLRTRRGFSVLVTGAAGFVGTHVSAALKRRGDGVLGLDNFNDYYDPSLKRARQALLERSGVFVVEGDINDAALLKKLFEVVPFTHVMHLAAQAGVRYAMENPSSYVHSNIAGFVNLLEVCKSANPQPAIVWASSSSVYGLNTKVPFSEKDRTDQPASLYAATKKAGEEIAHTYNHIYGLSLTGLRFFTVYGPWGRPDMAYFFFTRDILKGKAISIFEGVNHGTVARDFTYIDDIVKGCLGALDTAEKSTGSGGKKRGAAQLRVFNLGNTSPVPVTDLVTILERLLKVKAKRNIMKLPRNGDVQFTHANISSAQRELGYKPTTDLQTGLKKFARWYLGYYNGGKKAAS

SEQ ID NO: 110977 - DNA, 1314 bp, Arabidopsis thaliana
  CDS (1)..(1314)
atgtcacgtcttgacgacataccttcaagcccaggcaaattcaagatggagaaatcttcctacttgcatcgtctcagattccaatcttctctcacaaagtttgcatttttctccttcttcctcctctgtctcatctctctactcttcctccgatctccaccgtccattaacccttcttcaccgtccgatccatctcgccgttcactccgaaccaacacctacggaggaccagcttgggaaaaacgtctcagatcctcagctcgaatccgaacctcaacaaacaacggaatcacagttttagtaaccggagcagctggtttcgtcggaacacacgtctccgccgcattaaaacgccgcggagacggcgtaatcggcctcgacaacttcaacgattactacgatccatctctgaaacgagcaagacgagctttactcgagagaagtgggatcttcatcgtagaaggagacataaacgacgtcgaattactccgtaagctattcaagatcgtctccttcacacacgttatgcatttagcagctcaagctggtgtacggtacgcaatggaaaaccctagctcgtacgttcatagcaacatcgccggattcgtcaatctcctcgagatctgcaaatctgtgaatccacaacctgctatagtctgggcttcgtctagctccgtctacggactcaacaccaaagttccgttctcggagaaagataaaacagatcaaccggcgagtttatacgccgccactaaaaaagccggcgaagagatcgcacatacctacaaccacatctatggattatctctaaccggattaagatttttcaccgtgtatggaccttggggaagaccagacatggcgtatttcttcttcactaaagatattctaaaaggcaaatcgatttcgatattcgaatcggcgaatcacggaacggtggctagggatttcacttacatagacgatatagtgaagggatgtttagcggcgctagatacggcggagaagagtacagggagtggagggaagaagagaggtccggcgcaattgagagtgtttaacctcggaaacacgtcgccggtgccggtttcagatctggtgaggatattggagagacaattgaaagtgaaggcgaagaagaatttgattaagatgccacgaaacggtgacgttccgtttactcatgctaatattagtttagctcaacgtgagcttggttataaaccgactacggatttgcaaaccggtttgaagaagtttgtcagatggtatttgagttattactccggcgacaaaaaagccgccgctagatga

SEQ ID NO: 110978 - protein, 437 aa, Arabidopsis thaliana
MSRLDDIPSSPGKFKMEKSSYLHRLRFQSSLTKFAFFSFFLLCLISLLFLRSPPSINPSSPSDPSRRSLRTNTYGGPAWEKRLRSSARIRTSTNNGITVLVTGAAGFVGTHVSAALKRRGDGVIGLDNFNDYYDPSLKRARRALLERSGIFIVEGDINDVELLRKLFKIVSFTHVMHLAAQAGVRYAMENPSSYVHSNIAGFVNLLEICKSVNPQPAIVWASSSSVYGLNTKVPFSEKDKTDQPASLYAATKKAGEEIAHTYNHIYGLSLTGLRFFTVYGPWGRPDMAYFFFTKDILKGKSISIFESANHGTVARDFTYIDDIVKGCLAALDTAEKSTGSGGKKRGPAQLRVFNLGNTSPVPVSDLVRILERQLKVKAKKNLIKMPRNGDVPFTHANISLAQRELGYKPTTDLQTGLKKFVRWYLSYYSGDKKAAAR

SEQ ID NO: 110979 - DNA, 1311 bp, Arabidopsis thaliana
  CDS (1)..(1311)
atgtctcaccttgatgatcttccttctactcccggaaagtacaaaaccgataaagttccaccgtacgggattctccaccaccaccgttacctccgtctctcaaaactcaccctttgggcttctctcttcctcgctctcttcctcttctacctcgttttatctcctcctccgtcaccatctcgccggaatctcaacgattcttcctccatttccgccgcgaaatacggcggctctcactgggagaaacaagtccgtaaatccgctcgtcctaggtctcacggcggtttaacggtattagtcaccggagcttccggattcgtcggtactcacgtctcgatcgcgttacgaagacgcggcgatggtgttctaggtctcgacaatttcaatcgatactacgatccaaagcttaaacgagcaagacaaggccttttagaaagatcaggtgttttcgtagtcgaaggcgatataaacgacgccgttttactcagaaagctctttgatgttgtcctcttcacacatgttatgcatctcgctgctcaagctggtgtgcgttacgcaatgcaaaaccctggctcatatgttaacagtaacattgctgggtttgtgaatctattagaagtatcgaaatcagcgaatccgcaacctgctatagtctgggcttcctctagctctgtttatggtctgaattcgaaagtacccttttcggagaaagaccgtaccgatcaaccagcgagtttgtacgcagctacgaagaaagcaggtgaaggaattgcgcatacttacaatcacatctacggattatcgttaacgggtttgcggtttttcactgtctatggaccttggggtagaccagatatggcgtatttcttctttactaaagatattcttaaagggaagacgattactgtgtttgaatctcctgataaaggtagtgttgctagggacttcacttacattgatgatattgtaaaaggttgtttaggtgcgttagatactgctgagaagagtactggtagtggtggtaagaagaaaggtcctgctatgtttaggatttataatttggggaatacttctcctgttcctgttactaagcttgtgactatattagagaagcttttgaagatgaaagctaagaaaaagatcatgcctctaccgaggaatggggatgttgagtttactcatgccaatatcacgttagcgcaagcagagctcggttataaacctgcggttgatcttgagacgggtttgaaaaagtttgtgaaatggtatatgggtttttacactggctcgaagaagaagagttcttggtga

SEQ ID NO: 110980 - protein, 436 aa, Arabidopsis thaliana
MSHLDDLPSTPGKYKTDKVPPYGILHHHRYLRLSKLTLWASLFLALFLFYLVLSPPPSPSRRNLNDSSSISAAKYGGSHWEKQVRKSARPRSHGGLTVLVTGASGFVGTHVSIALRRRGDGVLGLDNFNRYYDPKLKRARQGLLERSGVFVVEGDINDAVLLRKLFDVVLFTHVMHLAAQAGVRYAMQNPGSYVNSNIAGFVNLLEVSKSANPQPAIVWASSSSVYGLNSKVPFSEKDRTDQPASLYAATKKAGEGIAHTYNHIYGLSLTGLRFFTVYGPWGRPDMAYFFFTKDILKGKTITVFESPDKGSVARDFTYIDDIVKGCLGALDTAEKSTGSGGKKKGPAMFRIYNLGNTSPVPVTKLVTILEKLLKMKAKKKIMPLPRNGDVEFTHANITLAQAELGYKPAVDLETGLKKFVKWYMGFYTGSKKKSSW

SEQ ID NO: 110981 - DNA, 1383 bp, Arabidopsis thaliana
  CDS (1)..(1383)
atgcccctgtcggcgacggcggatacaagcaagacggtgaagctggagaggtacaatagctacctccggaagattcacagcaccaaagttctcaacgcttcttctaaagttcttttccgagcaacgcttctcgtagctcttgtcctcgtcctcatcttcgccatcaactaccctccactctccgatagccgcgccgccgcagcacaccacctccaccgtcgtagcttcttatccaccggactcttctcctcctcctcttcttcctcctctatcggtggagccgcgtgggaaaagcgcgttagacaatcctcaacagccaaacgaccacacggtctctccgtcctagtcaccggagctgccggattcgtcggatcccactgctcacttgcgctgcgaaaacgtggcgatggagtcttaggattcgacaacttcaacgattactatgacccatcactcaaaagagcaagacaagagctcttggagaaacaacaagtgttcatcgtcgaaggtgatctcaacgatggaccactcttacgtaaactcttcgacgttgtccctttcactcacatccttcacttagccgctcaagccggagtacgttacgctatgaaaaaccctcaatcttacatcgcctccaacatcgccggattcgttaaccttcttgaagtggctaaagcagctaatccacaacctgcgattgtttgggcttcctctagctctgtttacggtctcaacactgagaatccattctctgaagaacaccgaacagaccaaccagcgagtctttacgcagcaaccaagaaagctggtgaagagatcgcacatacttacaaccacatctacggtctctccttaaccggactccggttctttacggtttacggtccatggggaagaccagacatggcttacttcttcttcactaaagacatcctccacggtaaatcaatcgacatttacagaactcaggacaatcaagaagtggcgcgtgacttcacctacatcgatgacatcgttaaaggttgtgtcggtgcgttagacacggctgagaaaagcaccggaagcggcggaaagaagcgaggacaagctcagctacgtgtttacaatctaggaaacacgtccccggttccggttgggagattggtctcgatcttggaaggattgttagggacaaaagctaagaagcatcttatcaaaatgccaagaaacggtgacgtgccttacacgcatgctaatgtgagtttagcgtataaagatttcgggtacaaaccgacgacggatctcgcggcggggctgaggaagttcgtcaagtggtacgttggttattatgggattcagccgagggtaaaaaaggaaacttctcacgccgaagattccgcttaa

SEQ ID NO: 110982 - protein, 460 aa, Arabidopsis thaliana
MPLSATADTSKTVKLERYNSYLRKIHSTKVLNASSKVLFRATLLVALVLVLIFAINYPPLSDSRAAAAHHLHRRSFLSTGLFSSSSSSSSIGGAAWEKRVRQSSTAKRPHGLSVLVTGAAGFVGSHCSLALRKRGDGVLGFDNFNDYYDPSLKRARQELLEKQQVFIVEGDLNDGPLLRKLFDVVPFTHILHLAAQAGVRYAMKNPQSYIASNIAGFVNLLEVAKAANPQPAIVWASSSSVYGLNTENPFSEEHRTDQPASLYAATKKAGEEIAHTYNHIYGLSLTGLRFFTVYGPWGRPDMAYFFFTKDILHGKSIDIYRTQDNQEVARDFTYIDDIVKGCVGALDTAEKSTGSGGKKRGQAQLRVYNLGNTSPVPVGRLVSILEGLLGTKAKKHLIKMPRNGDVPYTHANVSLAYKDFGYKPTTDLAAGLRKFVKWYVGYYGIQPRVKKETSHAEDSA

SEQ ID NO: 110983 - DNA, 1053 bp, Drosophila melanogaster
  CDS (1)..(1053)
atggccccacccacggtcctggtcaccggaggagccggctacattggctcccacacggttctggagatgctcaatgcgggctacaacgtcatctgcgtggacaacctgtgcaacgcctacagcagcggggccaaactgccggaggccctcagccgggtgcaggaaatcaccggcaagaaggtcaacttctatagagtggacatcacggacagggagcaggtgcgctccgtcttccaggagcacaaaatcgacatggtggcccactttgccgccctgaaggccgtgggtgagtcctgccgcatacctttgcagtactaccacaacaacatgaccggcaccaatgtcctgctggaggcgatggccgacaacaatgtcttcaagttcgtgtacagctccagcgccaccgtatacggtgagccaaagttcctgcccgtgaccgaggagcatcccacgggcaactgtacatcgccctacggcaagactaaatatttcaccgaggagattctcaaggatctgtgcaagtctgacaagcgttgggcagtggtttcgctgcggtacttcaacccggtgggtgcccacatcagtggtcggattggcgaggatccgaacggcgagcccaacaacctgatgccctacatcgcacaggtggccgtgggtcgacgtcccagcctgagtgtctacggcagcgactttcccacgcacgacggcaccggcgtgcgcgattacatccacatcgtggacctggccgagggacacgtaaaggcgttggacaagctgcgcaacatcgcggagacgggctttttcgcctacaatttgggcaccggcgtgggctactcggtgctggacatggtgaaggcgtttgagaaggcctccggcaagaaggtcaactacactctggtggaccgacggtccggagatgtggccacttgctatgcggacgccacgttggcggataagaagctgggctggaaggccgagcgtggcatcgacaagatgtgcgaggacacgtggcgctggcagagccagaacccaaacgggtatgccaacaagtag

SEQ ID NO: 110984 - protein, 350 aa, Drosophila melanogaster
MAPPTVLVTGGAGYIGSHTVLEMLNAGYNVICVDNLCNAYSSGAKLPEALSRVQEITGKKVNFYRVDITDREQVRSVFQEHKIDMVAHFAALKAVGESCRIPLQYYHNNMTGTNVLLEAMADNNVFKFVYSSSATVYGEPKFLPVTEEHPTGNCTSPYGKTKYFTEEILKDLCKSDKRWAVVSLRYFNPVGAHISGRIGEDPNGEPNNLMPYIAQVAVGRRPSLSVYGSDFPTHDGTGVRDYIHIVDLAEGHVKALDKLRNIAETGFFAYNLGTGVGYSVLDMVKAFEKASGKKVNYTLVDRRSGDVATCYADATLADKKLGWKAERGIDKMCEDTWRWQSQNPNGYANK

SEQ ID NO: 110985 - DNA, 1017 bp, Escherichia coli
  CDS (1)..(1017): transl_table=11
atgagagttctggttaccggtggtagcggttacattggaagtcatacctgtgtgcaattactgcaaaacggtcatgatgtcatcattcttgataacctctgtaacagtaagcgcagcgtactgcctgttatcgagcgtttaggcggcaaacatccaacgtttgttgaaggcgatattcgtaacgaagcgttgatgaccgagatcctgcacgatcacgctatcgacaccgtgatccacttcgccgggctgaaagccgtgggcgaatcggtacaaaaaccgctggaatattacgacaacaatgtcaacggcactctgcgcctgattagcgccatgcgcgccgctaacgtcaaaaactttatttttagctcctccgccaccgtttatggcgatcagcccaaaattccatacgttgaaagcttcccgaccggcacaccgcaaagcccttacggcaaaagcaagctgatggtggaacagatcctcaccgatctgcaaaaagcccagccggactggagcattgccctgctgcgctacttcaacccggttggcgcgcatccgtcgggcgatatgggcgaagatccgcaaggcattccgaataacctgatgccatacatcgcccaggttgctgtaggccgtcgcgactcgctggcgatttttggtaacgattatccgaccgaagatggtactggcgtacgcgattacatccacgtaatggatctggcggacggtcacgtcgtggcgatggaaaaactggcgaacaagccaggcgtacacatctacaacctcggcgctggcgtaggcaacagcgtgctggacgtggttaatgccttcagcaaagcctgcggcaaaccggttaattatcattttgcaccgcgtcgcgagggcgaccttccggcctactgggcggacgccagcaaagccgaccgtgaactgaactggcgcgtaacgcgcacactcgatgaaatggcgcaggacacctggcactggcagtcacgccatccacagggatatcccgattaa

SEQ ID NO: 110986 - protein, 338 aa, Escherichia coli
MRVLVTGGSGYIGSHTCVQLLQNGHDVIILDNLCNSKRSVLPVIERLGGKHPTFVEGDIRNEALMTEILHDHAIDTVIHFAGLKAVGESVQKPLEYYDNNVNGTLRLISAMRAANVKNFIFSSSATVYGDQPKIPYVESFPTGTPQSPYGKSKLMVEQILTDLQKAQPDWSIALLRYFNPVGAHPSGDMGEDPQGIPNNLMPYIAQVAVGRRDSLAIFGNDYPTEDGTGVRDYIHVMDLADGHVVAMEKLANKPGVHIYNLGAGVGNSVLDVVNAFSKACGKPVNYHFAPRREGDLPAYWADASKADRELNWRVTRTLDEMAQDTWHWQSRHPQGYPD

SEQ ID NO: 110987 - DNA, 1014 bp, Erwinia amylovora
  CDS (1)..(1014): transl_table=11
atgtctattttagtcacggggggagcaggctatattggatcccataccgtactctcattgctgcaacgtggcgatgacgtggtgatactggataatctgagtaatgcatcgcgcgagtcaattaatcgtgttgaaaagctaaccggtaaaacggcgactttcttcgaaggggacctcctcgatcgtagctgtttgcggagtgttttcagcgctcaccgtatcagcgcagtgatccactttgccggacttaaggctgtaggggcgtcgacgcgcaaaccgctggagtattaccaaaataatgtcaccggtacgctggtactgctggaagagatgcgcagtgcaggggtgaatcaatttattttcagctcgtctgccaccgtatatggagccgatgcgccagtaccttatgttgaaaccacgccaattggcggtaccaccagcccctacggcacgtctaagctgatggttgaacagattttacgtgactacgccaaagctaaccctgaattcaaaactattgcattacgctattttaatccggtcggtgctcatgaatccggtcagatgggcgaagatcctaacggtatcccaaacaacctgctaccgtatattgctcaggtcgccatcggtcggctggaaaaactcggcatattcggtgatgactatccgacggaggatggcaccggcgtgcgggactacatccatgtgatggatctggcagagggacacctcaaggcactggatcatctttcggcgattgaaggttataaagcctataatcttggcgcggggaaaggctactcggtgctggaaatggttaaggcgtttgaaaaagcgtctggcggcacggtcgcatatcagatttctccacgtcgtgatggcgacctggctgctttctgggccgatgccacgctggctgataaagagttgaactggcgcgtctcgcgcggtattgacgagatgatgcgtgatacatggaactggcagagccagaatccccaaggcgatagttga

SEQ ID NO: 110988 - protein, 337 aa, Erwinia amylovora
MSILVTGGAGYIGSHTVLSLLQRGDDVVILDNLSNASRESINRVEKLTGKTATFFEGDLLDRSCLRSVFSAHRISAVIHFAGLKAVGASTRKPLEYYQNNVTGTLVLLEEMRSAGVNQFIFSSSATVYGADAPVPYVETTPIGGTTSPYGTSKLMVEQILRDYAKANPEFKTIALRYFNPVGAHESGQMGEDPNGIPNNLLPYIAQVAIGRLEKLGIFGDDYPTEDGTGVRDYIHVMDLAEGHLKALDHLSAIEGYKAYNLGAGKGYSVLEMVKAFEKASGGTVAYQISPRRDGDLAAFWADATLADKELNWRVSRGIDEMMRDTWNWQSQNPQGDS

SEQ ID NO: 110989 - DNA, 1017 bp, Salmonella typhimurium
  CDS (1)..(1017): transl_table=11
atgagagtattggttacaggtggtagcggttacattggaagtcatacctgcgtacagttgctgcaaaatggtcatgacgtcgtcatcctcgataacctctgcaacagcaagcgcagcgtgctgcccgtgattgaacgtctgggcggtaagcacccgacctttgtcgaaggcgatattcgcaacgaagcgcttataaccgaaattctgcacgatcacgcgattgataccgtgattcactttgccggcctgaaagccgtcggcgaatcggtcgccaggccgctggagtactatgacaacaacgtcaacggtacgctacggttggtcagcgccatgcgtgcggccaacgttaaaaaccttatttttagctcctctgccaccgtttatggcgatcagcccaagatcccttacgtcgaaagttttcctaccggcacgccgcaaagcccctacggcaaaagtaaattgatggtagaacagatcctcaccgatctgcaaaaagcccagccggagtggagtattgcgctgctgcgttatttcaacccggtcggcgcgcacccgtcgggcgacatgggagaagatccgcaaggtattccgaataacctgatgccctatatcgcccaggtcgccgtgggtcgtcgcgaatcgctcgccgttttcggcaatgattacccgaccgaggatggcaccggcgtacgcgattacattcacgttatggacttagccgacgggcacgtcgtggcaatggaaaaactggcggacaaatccggcgtacatatttataacctcggcgcgggtgtcggcagtagcgtcctggatgtggtcaacgcctttagtaaagcctgcggtaaacccattaattaccacttcgcgccgcgccgcgacggcgatctcccggcgtattgggcggatgccagcaaagccgatcgcgagctgaactggcgcgtcacccgcacgcttgacgaaatggcgcaggacacctggcactggcagtcacgccatccgcagggatacccagattaa

SEQ ID NO: 110990 - protein, 338 aa, Salmonella typhimurium
MRVLVTGGSGYIGSHTCVQLLQNGHDVVILDNLCNSKRSVLPVIERLGGKHPTFVEGDIRNEALITEILHDHAIDTVIHFAGLKAVGESVARPLEYYDNNVNGTLRLVSAMRAANVKNLIFSSSATVYGDQPKIPYVESFPTGTPQSPYGKSKLMVEQILTDLQKAQPEWSIALLRYFNPVGAHPSGDMGEDPQGIPNNLMPYIAQVAVGRRESLAVFGNDYPTEDGTGVRDYIHVMDLADGHVVAMEKLADKSGVHIYNLGAGVGSSVLDVVNAFSKACGKPINYHFAPRRDGDLPAYWADASKADRELNWRVTRTLDEMAQDTWHWQSRHPQGYPD

SEQ ID NO: 110991 - DNA, 1122 bp, Arabidopsis thaliana; identical to SEQ ID NO: 104595
  CDS (1)..(1122)

SEQ ID NO: 110992 - protein, 373 aa, Arabidopsis thaliana; identical to SEQ ID NO: 104596

SEQ ID NO: 110993 - DNA, 1086 bp, Escherichia coli
  CDS (1)..(1086): transl_table=11
gtgaaaatacttgttactggtggcgcaggatttattggttcagctgtagttcgtcacattataaataatacgcaggatagtgttgttaatgtcgataaattaacgtacgccggaaaccgggaatcacttgctgatgtttctgattctgaacgctatgtttttgaacatgcggatatttgcgatgcacctgcaatggcacggatttttgctcagcatcagccggatgcagtgatgcacctggctgctgaaagccatgttgaccgttcaattacaggccctgcggcatttattgaaaccaatattgttggtacttatgtccttttggaagccgctcgcaattactggtctgctcttgatagcgacaagaaaaatagcttccgttttcatcatatttctactgacgaagtctatggtgatttgcctcatccagatgaagtaaataatacagaagaattacccttatttactgagacgacagcttacgcgccaagcagcccttattccgcatccaaagcatccagcgatcatttagtccgcgcgtggaaacgtacatatggtttaccgacaattgtgactaattgctcgaacaactatggtccttatcatttcccggaaaagcttattccactggttattcttaatgcactggaaggtaaggcattacctatttatggcaaaggagatcagatccgcgactggttgtatgttgaagatcatgcgcgtgcgttatataccgtcgtaaccgaaggtaaagcgggtgaaacttataacattggtgggcacaacgaaaagaaaaacatcgatgtagtgctcactatttgtgatttgctggatgagattgtaccgaaagagaaatcttatcgtgagcaaatcacttatgttgctgatcgtccgggacacgatcgccgctatgctattgatgctgagaagattggtcgcgcattgggatggaaaccacaggaaacgtttgagagcgggattcgtaaaacggtggaatggtacctgtccaatacaaaatgggttgataatgtgaaaagtggtgcctatcaatcgtggattgaacagaactatgagggccgccagtaa

SEQ ID NO: 110994 - protein, 361 aa, Escherichia coli
MKILVTGGAGFIGSAVVRHIINNTQDSVVNVDKLTYAGNRESLADVSDSERYVFEHADICDAPAMARIFAQHQPDAVMHLAAESHVDRSITGPAAFIETNIVGTYVLLEAARNYWSALDSDKKNSFRFHHISTDEVYGDLPHPDEVNNTEELPLFTETTAYAPSSPYSASKASSDHLVRAWKRTYGLPTIVTNCSNNYGPYHFPEKLIPLVILNALEGKALPIYGKGDQIRDWLYVEDHARALYTVVTEGKAGETYNIGGHNEKKNIDVVLTICDLLDEIVPKEKSYREQITYVADRPGHDRRYAIDAEKIGRALGWKPQETFESGIRKTVEWYLSNTKWVDNVKSGAYQSWIEQNYEGRQ

SEQ ID NO: 110995 - DNA, 1086 bp, Salmonella typhimurium
  CDS (1)..(1086): transl_table=11
gtgaagatacttattactggcggggcaggttttattggatcagctgttgtccgccatattattaagaatacacaggacactgtagttaatattgataaattaacctacgccggtaatcttgaatccctttctgatatttctgaaagtaatcgctacaattttgaacacgcggatatttgtgattccgctgaaataacgcgtatttttgagcagtaccagccggacgcggtgatgcatttggctgcggaaagtcatgtggaccgttcgattaccgggccagcagcatttattgaaaccaatatcgtcggcacctatgcacttcttgaagttgcgcgtaaatactggtctgcccttggcgaagataaaaaaaataattttcgttttcatcatatttccactgatgaagtttacggcgatttaccgcatcctgatgaagttgaaaacagcgttacgctgccgttatttactgaaacgacggcatatgcgccaagtagcccctattctgcgtcaaaagcatccagcgatcatttagtccgtgcctggcggcgtacctatggtctaccaacgatcgttaccaattgttctaataactatggcccttatcacttccctgaaaaactgattccgttggtcattttgaacgcactggaaggaaagcctttgccaatttatggcaaaggggatcagattcgcgattggctatatgtagaagatcatgctcgcgcgcttcatatggtagtgactgaaggcaaggcaggggagacttataacattggtggacacaatgagaagaaaaatctcgatgtggtatttaccatctgtgatctgctggatgagattgtacccaaagcgacttcttatcgtgaacaaatcacttatgtcgcggatcgtccgggccatgatcgtcgttatgccattgatgcaggtaaaattagccgcgaattaggctggaaaccgctggagacctttgaaagcggtattcgtaaaacagtggaatggtaccttgcaaatactcaatgggtaaacaatgttaaaagtggggcgtatcagagttggatagaacagaactatgaaggacgccagtaa

SEQ ID NO: 110996 - protein, 361 aa, Salmonella typhimurium
MKILITGGAGFIGSAVVRHIIKNTQDTVVNIDKLTYAGNLESLSDISESNRYNFEHADICDSAEITRIFEQYQPDAVMHLAAESHVDRSITGPAAFIETNIVGTYALLEVARKYWSALGEDKKNNFRFHHISTDEVYGDLPHPDEVENSVTLPLFTETTAYAPSSPYSASKASSDHLVRAWRRTYGLPTIVTNCSNNYGPYHFPEKLIPLVILNALEGKPLPIYGKGDQIRDWLYVEDHARALHMVVTEGKAGETYNIGGHNEKKNLDVVFTICDLLDEIVPKATSYREQITYVADRPGHDRRYAIDAGKISRELGWKPLETFESGIRKTVEWYLANTQWVNNVKSGAYQSWIEQNYEGRQ

SEQ ID NO: 110997 - DNA, 1068 bp, Escherichia coli
  CDS (1)..(1068): transl_table=11
atgagaaaaattctgataacaggtggtgccgggtttattggctcggcgctggtgcgttatatcatcaacgaaacgagcgacgcggtggtagtggtcgataagctgacctacgccggaaacctgatgtcgctggcaccggtcgcgcaaagcgagcgctttgcctttgagaaagttgatatctgcgatcgggcagaactggcacgcgtattcactgagcatcagccagactgtgtcatgcatctggcagccgaaagccatgttgaccgttctattgacggcccggcagcgtttattgaaaccaacattgtcgggacttatacattgcttgaagcggcgcgggcttactggaatgcgctgacggaagataaaaaatcagcgttccgttttcatcatatctccactgacgaagtatatggtgacctgcactcgacggatgatttcttcaccgaaaccacgccgtatgcgccgagcagcccttattccgcgtcaaaagccagcagcgaccatctggtgcgcgcctggctgcggacctatggtctgccgacgcttatcaccaactgctcgaataactacggcccttaccactttccggaaaaactgatcccgctgatgatcctcaacgcgctggcgggtaaatcgctgccggtatatggcaacgggcagcaaatccgtgactggctgtatgtggaagatcacgcccgcgcgctgtattgcgtggcgaccaccgggaaagtcggtgaaacctataatattggtggtcacaacgagcgtaagaatctcgatgttgtggaaaccatttgcgagctgctggaagaactggctccgaacaagccgcacggcgtggcgcactatcgtgacctgatcacctttgtcgctgaccgtccggggcatgatctgcgttatgccattgatgcttcgaaaattgcccgtgaacttggctggctgccgcaggaaacctttgaaagtggaatgcgtaaaacggttcagtggtatctggctaatgaaagctggtggaagcaggtgcaggacggcagctatcagggcgagcgtttaggtctgaaaggctaa

SEQ ID NO: 110998 - protein, 355 aa, Escherichia coli
MRKILITGGAGFIGSALVRYIINETSDAVVVVDKLTYAGNLMSLAPVAQSERFAFEKVDICDRAELARVFTEHQPDCVMHLAAESHVDRSIDGPAAFIETNIVGTYTLLEAARAYWNALTEDKKSAFRFHHISTDEVYGDLHSTDDFFTETTPYAPSSPYSASKASSDHLVRAWLRTYGLPTLITNCSNNYGPYHFPEKLIPLMILNALAGKSLPVYGNGQQIRDWLYVEDHARALYCVATTGKVGETYNIGGHNERKNLDVVETICELLEELAPNKPHGVAHYRDLITFVADRPGHDLRYAIDASKIARELGWLPQETFESGMRKTVQWYLANESWWKQVQDGSYQGERLGLKG

SEQ ID NO: 110999 - DNA, 987 bp, Streptomyces griseus
  CDS (1)..(987): transl_table=11
ttgaccacccatctgctcgtcaccggcgcggccggtttcatcggttcccagtacgtccgcaccctgctcggccccggcgggccgcccgacgtggtggtgaccgcactggacgccctcacctacgcgggcaacccggacaacctggccgccgtccgcggacatccccggtaccgcttcgagcggggcgacatctgcgacgcgcctggtcgacgggtgatggcgggacaggaccaggtcgtccacctcgccgccgaatcccatgtggaccgctccctgctcgacgcgtcggtcttcgtgcggaccaatgtgcacggcacccagaccctgttggacgcggcgacccggcacggggtcgcgtccttcgtacaggtgtcgaccgacgaggtctacggctccctggagcacgggtcctggaccgaggacgagcccctgcggcccaacagcccctactccgcgtccaaggcctccggcgacctgctcgccctggcccatcatgtcagccacggtctggacgtacgggtgacccgctgctccaacaactacgggccccgccagttcccggagaagctgatcccccggttcatcaccctgctgatggacgggcaccgggtgccgctgtacggggacgggctgaacgtgcgggaatggctgcacgtcgacgaccacgtgagggggatcgaggcggtccgcacccgcggccgggcgggccgggtgtacaacatcggcggcggcgccacgctgagcaacaaggagttggtggggctgctgctcgaagccgccggcgccgactggggcagcgtggagtacgtcgaggaccgcaagggacacgaccggcgctacgccgtggactccacgcgcatccagcgggagctcggcttcgctccggccgtcgacctggccgacgggctggccgccaccgtcgcctggtaccacaagcaccgttcctggtgggagccgctggtcccggccggctcgctacccgcctga

SEQ ID NO: 111000 - protein, 328 aa, Streptomyces griseus
MTTHLLVTGAAGFIGSQYVRTLLGPGGPPDVVVTALDALTYAGNPDNLAAVRGHPRYRFERGDICDAPGRRVMAGQDQVVHLAAESHVDRSLLDASVFVRTNVHGTQTLLDAATRHGVASFVQVSTDEVYGSLEHGSWTEDEPLRPNSPYSASKASGDLLALAHHVSHGLDVRVTRCSNNYGPRQFPEKLIPRFITLLMDGHRVPLYGDGLNVREWLHVDDHVRGIEAVRTRGRAGRVYNIGGGATLSNKELVGLLLEAAGADWGSVEYVEDRKGHDRRYAVDSTRIQRELGFAPAVDLADGLAATVAWYHKHRSWWEPLVPAGSLPA

SEQ ID NO: 111001 - DNA, 1047 bp, Salmonella typhi
  CDS (1)..(1047): transl_table=11
atgacggcttacgaagaactacggaccaaactggttctggcaccaaagcgctggctgatcactggcgtagcaggctttattggctccggcttattagaagaattactctttctcaaccagactgtcattggactggataacttttccaccggttatcagcataatctagacgacgttcgcacgtccgtcagtgaggagcaatggtcgcgatttatttttattcagggtgacatcaggaaatttactgactgtcagaaagcgtgtaagaacgttgactatgttctccaccaagccgcgctaggaagcgtgccacgttccctaaaggatcccatcgcgactaatagcgccaatattgatggttttttaaatatgttgacggcggcgagagatgctcatgtctctagtttcacctacgccgcaagcagtagcacctatggagaccatcccgatttacctaaaattgaggaacggatcggtcgaccactcagcccgtatgcggtaacaaaatacgtcaatgaattgtacgctgatgtgtttgcacgtagctatgaatttaacgctattggcctacgctactttaatgtctttggtcgccgccaaaatcctaacggagcgtactcggcagttattcctcgctggatactatcgcttcttaaagatgaaccaatttatatcaatggcgatggctcaacaagcagggatttttgctatatagagaatgtgattcaggccaatctattatcagcaacaactaatgatttagcctctaaaaataaggtctataatgtggcagttggagatagaacttcgttaaatgagctttattatctaattcgcgatgggcttaatttatggcggaacgaacaaagtagagctgaaccaatttataaagattttcgtgacggtgacgttaagcatagccaggcagatattaccaaaataaaaacatttctttcatatgagcctgaatttgatatcaaagaaggacttaagcagactctaaaatggtatatcgataaacattctactttgtattcctcggtataa

SEQ ID NO: 111002 - protein, 348 aa, Salmonella typhi
MTAYEELRTKLVLAPKRWLITGVAGFIGSGLLEELLFLNQTVIGLDNFSTGYQHNLDDVRTSVSEEQWSRFIFIQGDIRKFTDCQKACKNVDYVLHQAALGSVPRSLKDPIATNSANIDGFLNMLTAARDAHVSSFTYAASSSTYGDHPDLPKIEERIGRPLSPYAVTKYVNELYADVFARSYEFNAIGLRYFNVFGRRQNPNGAYSAVIPRWILSLLKDEPIYINGDGSTSRDFCYIENVIQANLLSATTNDLASKNKVYNVAVGDRTSLNELYYLIRDGLNLWRNEQSRAEPIYKDFRDGDVKHSQADITKIKTFLSYEPEFDIKEGLKQTLKWYIDKHSTLYSSV

SEQ ID NO: 111003 - DNA, 1005 bp, Escherichia coli O111
  CDS (1)..(1005): transl_table=11
atgaaatacctggttacgggtgccgctggtttcatcggcttccacgttagcaaacgcctccttgaggctggccatcaagtagtcggtattgataatctgaacgattactacgacgtcagccttaaacaagctcgtctggaattactggcacaacctggtttccagtttcataaaattgatttagccgaccgcgaaggcatgaccgatctcttcgcatccgggcatttcgaacgtgtgttcatctcgccgcataggctggcggtacgctattcactcgaaaacccgcatgcctatgctgactcaaatctcacaggatttctgaacatactggaagggtgtcgccataataaaattcagcatttactctatgcttcctccagttctgtttacggcctgaatcgcaaaatgcctttctctacggatgattccgttgatcaccccgtatctctgtatgcggcaaccaaaaaagccaacgaactgatggcccatacttattcccatttgtacggattgcccgcaaccgggttgcgtttctttaccgtgtacggcccctggggtcgtccggatatggcactgtttaagttcaccaaagcaatgctggaagggaaaagtattgacgtctataactacggcaaaatgaagcgtgactttacctatatcgatgatatcgcagaagcaatcattcgcctgcaggatgtcattccacacgcagacacacaatggaccgttgaaacaggcacgccagcagccagcattgccccctatcgcgtctacaatatcggcaatagttcaccggttgagctcatggactatatccaggctttggaagatgcgctgggtattgaagcaaagaaaaacatgctaccgctacagcctggtgatgtgctggaaaccagcgcggacactaaagcactgtatgaggtaattggttttacgcctgaaaccacggtcaaagatggggtgaagaactttgttaactggtaccgtgatttctacaaagtttga

SEQ ID NO: 111004 - protein, 334 aa, Escherichia coli O111
MKYLVTGAAGFIGFHVSKRLLEAGHQVVGIDNLNDYYDVSLKQARLELLAQPGFQFHKIDLADREGMTDLFASGHFERVFISPHRLAVRYSLENPHAYADSNLTGFLNILEGCRHNKIQHLLYASSSSVYGLNRKMPFSTDDSVDHPVSLYAATKKANELMAHTYSHLYGLPATGLRFFTVYGPWGRPDMALFKFTKAMLEGKSIDVYNYGKMKRDFTYIDDIAEAIIRLQDVIPHADTQWTVETGTPAASIAPYRVYNIGNSSPVELMDYIQALEDALGIEAKKNMLPLQPGDVLETSADTKALYEVIGFTPETTVKDGVKNFVNWYRDFYKV

SEQ ID NO: 111005 - DNA, 1314 bp, Oryza sativa
  CDS (1)..(1314)
atgcgggtgctggaggacgacatgttcccgtcgacgccggggaaggtgaagatcgagagggcgacggcgatgaaccgccagctccaccgctgcttcgcgtcgaccagcaccatgttcctctgggcgctcttcctcgtcgccatgaccgcgtcgtacctcagcttccagtccttcgtcgacacctcgtccaagtacttcgccgcctcctggggcgggctgcactgggagcgccagatccgcgcgtccgccgcgccgaggcggccgcccgggtcggcggcgggcgcggggatgtcggtgctcgtgacgggcgccgccgggttcgtcggcacgcactgctccctcgcgctccgcaagcgcggcgacggcgtcgtcggcatcgacaacttcaactcctactacgacccctcgctcaagaaggcgcgcaggtcgctgctcgcctcgcacggggtgttcgtcatcgagggcgacatcaacgacggccgcctcctcgccaagctcttcgacgtcgtgcccttcacgcacgtgctccacctcgcggcgcaggcgggcgtgcgctacgccatggagaacccggcgtcctacgtgcactccaacatcgccggcctcgtcaccctcctcgaggcatgcaaggacgccgacccgcagccggccatcgtctgggcctcctcctcctccgtctacggcctcaacgacaaggtgcccttcacggagagcgaccgcactgaccagccggcgtcgctgtacgccgccaccaagaaggccggcgaggagatcacccacacgtacaaccacatctacggcctctccatcaccggactccgcttcttcaccgtgtacgggccatgggggcggccggacatggcctacttctccttcacccgcaacatcctgcaggggaagcccatcacggtgtaccgcggcaagaaccgcgtcgacctcgcccgcgacttcacctacatcgacgacatcgtcaagggctgcctcggctcgctcgacacggccgggaagagcaccggcaccgggggcaagaagcgcgggccggcgccctacaggatcttcaacctcggcaacacctcgccggtgacggtgcccaacctggtgtccatcctggagaagcacctccgcgtgaaggccaagaagaacgtggtcgagatgcccggcaatggcgacgtgccattcacgcacgccaacatctccctcgcgaggcagcagctcggctacaagccgaccaccaacctcgacgtcgggctcaagaagttcgtcaagtggtacctctcctactacggctacaccaggggatccaagaacttgtga

SEQ ID NO: 111006 - protein, 437 aa, Oryza sativa
MRVLEDDMFPSTPGKVKIERATAMNRQLHRCFASTSTMFLWALFLVAMTASYLSFQSFVDTSSKYFAASWGGLHWERQIRASAAPRRPPGSAAGAGMSVLVTGAAGFVGTHCSLALRKRGDGVVGIDNFNSYYDPSLKKARRSLLASHGVFVIEGDINDGRLLAKLFDVVPFTHVLHLAAQAGVRYAMENPASYVHSNIAGLVTLLEACKDADPQPAIVWASSSSVYGLNDKVPFTESDRTDQPASLYAATKKAGEEITHTYNHIYGLSITGLRFFTVYGPWGRPDMAYFSFTRNILQGKPITVYRGKNRVDLARDFTYIDDIVKGCLGSLDTAGKSTGTGGKKRGPAPYRIFNLGNTSPVTVPNLVSILEKHLRVKAKKNVVEMPGNGDVPFTHANISLARQQLGYKPTTNLDVGLKKFVKWYLSYYGYTRGSKNL

SEQ ID NO: 111007 - DNA, 1455 bp, Oryza sativa
  CDS (1)..(1455)
atggcgccgcagctgaccggcgcgcccggcacggcgggggcggcgggcggcgcggcgtccgtcaagccgcagttccaccacttccaccaccaccgcctcgccacgcgccaccaccacccctcgccgacctcgctcctctccaagctcgccttctggtccgtctgctccctctcgctcctcctcgccttcctcctcctctccccctccgccgcgccggccccgcgggcggcgcccgactccccgcgccgctccctccacacgtcctccccgtccgccgccgccacgtggggcggcgccgcatgggagaagaaggtgcgggcgtccgcgcgcgtcaggcgggccaacgggcgggggctcaccgtcctcgtcacgggcgccgcgggcttcgtcggctgccacgcggccgccgccctccgccgccgcggcgacggcgtgcttgggctggacaacttcaacgactactacgaccccgccctcaagcggggccgcgccgcgctcctcgcccgctcgggggtctacgtcgtcgacggcgacatcgccgatgcggagctcctcgccaagctgttcgacgtcgtgccgttcacccacgtcctccacctcgccgctcaggcgggcgttcggcacgcgctcgttgacccgatgtcctacgtgcgcgccaacgtcggcgggttcgtggcgctgctcgaggcggcgcgcatggcgaatccccagccggcgatcgtctgggcgtcgtcgtcttcagtgtacgggctcaactcccatgtgcctttctccgaacatgacaggacggaccgacccgcctctctgtatgcagcgaccaagaaggccggtgaggagatcgctcatgcctacaaccacatctatgggctctcgctcacggcgctccgtttcttcaccgtgtatgggccgtgggggcgcccagacatggcatacttcttcttcacccgggacattcttgctggtcggccaatcaccgtgtatgaaagtgcaggtggaggcacacaccagaccaccatttcccgagatttcacctatattgatgacattgtgaaggggtgtgttggggcattggatacagccgggcgtagcacaggcagtggaggcaagaagcgagggccggcaccattcaggacatacaatttggggaacacatctcctgtgccggtgacacagctggtggatttactggagaagttgctcaaggtgaaagcggtgaggaagattgtcaagatgccaaggaatggtgatgtgccatatacacatgctaacatcagtcttgctcagcgggagcttgggtaccgaccgtcaactgatcttcaaacaggggttaagaagtttgtgcggtggtatctcgagtactacatgcctgggtttgctggtaagcagaagcagcatggcagtagcaacagcaagtcttcgcgaggtcggagtggcaacacaagcagtgcaagatga

SEQ ID NO: 111008 - protein, 484 aa, Oryza sativa
MAPQLTGAPGTAGAAGGAASVKPQFHHFHHHRLATRHHHPSPTSLLSKLAFWSVCSLSLLLAFLLLSPSAAPAPRAAPDSPRRSLHTSSPSAAATWGGAAWEKKVRASARVRRANGRGLTVLVTGAAGFVGCHAAAALRRRGDGVLGLDNFNDYYDPALKRGRAALLARSGVYVVDGDIADAELLAKLFDVVPFTHVLHLAAQAGVRHALVDPMSYVRANVGGFVALLEAARMANPQPAIVWASSSSVYGLNSHVPFSEHDRTDRPASLYAATKKAGEEIAHAYNHIYGLSLTALRFFTVYGPWGRPDMAYFFFTRDILAGRPITVYESAGGGTHQTTISRDFTYIDDIVKGCVGALDTAGRSTGSGGKKRGPAPFRTYNLGNTSPVPVTQLVDLLEKLLKVKAVRKIVKMPRNGDVPYTHANISLAQRELGYRPSTDLQTGVKKFVRWYLEYYMPGFAGKQKQHGSSNSKSSRGRSGNTSSAR

SEQ ID NO: 111009 - DNA, 1065 bp, Oryza sativa
  CDS (1)..(1065)
atggtttcggccttgttgcggacgatcctggtgacgggcggcgccggctacatcggcagccacaccgtcctccagcttctccaactcggcttccgcgttgtcgtcctcgacaacctcgacaacgcctccgagctcgccatcctccgcgtcagggaactcgccggacacaacgccaacaacctcgacttccgcaaggttgacctccgcgacaagcaagcgttggaccaaatcttctcctctcaaaggtttgaggctgtcatccattttgccgggctgaaagctgttggcgagagcgtgcagaagcccctgctttactacgacaacaacctcatcggcaccatcactctcctgcaggtcatggccgcacatggctgcaccaagctggtgttctcatcatccgcaactgtctacgggtggcccaaggaggtgccctgcactgaagaatccccactttgtgcaatgaacccctacggcagaacaaagctggtaatcgaagacatgtgccgggatctgcatgcctcagacccaaactggaagatcatactgctccgatacttcaaccctgttggagctcacccaagcgggtacattggtgaggacccctgcggcatcccaaacaacctcatgcccttcgtccagcaggtcgctgttggcaggaggccggcccttaccgtctatggaaccgactacaacaccaaggatggaactggggttcgtgactatatccatgttgttgatctagcggatggtcatatcgccgcgttaaggaagctctatgaagattctgatagaataggatgtgaggtgtacaatctgggcactggaaaggggacatctgtgctggaaatggttgcagcattcgagaaagcttctggaaagaaaatcccgcttgtatttgctggacgaaggcctggagatgccgagatcgtttacgctcaaactgccaaagctgagaaggaactgaaatggaaggcaaaatacggggtagaggagatgtgcagggacctgtggaattgggcgagcaagaacccctacgggtatggatcgccggacagtagcaactga

SEQ ID NO: 111010 - protein, 354 aa, Oryza sativa
MVSALLRTILVTGGAGYIGSHTVLQLLQLGFRVVVLDNLDNASELAILRVRELAGHNANNLDFRKVDLRDKQALDQIFSSQRFEAVIHFAGLKAVGESVQKPLLYYDNNLIGTITLLQVMAAHGCTKLVFSSSATVYGWPKEVPCTEESPLCAMNPYGRTKLVIEDMCRDLHASDPNWKIILLRYFNPVGAHPSGYIGEDPCGIPNNLMPFVQQVAVGRRPALTVYGTDYNTKDGTGVRDYIHVVDLADGHIAALRKLYEDSDRIGCEVYNLGTGKGTSVLEMVAAFEKASGKKIPLVFAGRRPGDAEIVYAQTAKAEKELKWKAKYGVEEMCRDLWNWASKNPYGYGSPDSSN

SEQ ID NO: 111011 - DNA, 1128 bp, Oryza sativa; identical to SEQ ID NO: 104601
  CDS (1)..(1128)

SEQ ID NO: 111012 - protein, 375 aa, Oryza sativa; identical to SEQ ID NO: 104602

SEQ ID NO: 111013 - DNA, 1362 bp, Oryza sativa
  CDS (1)..(1362)
atgcgggtggtggtggaggaggaggaggccgaggtgatgtacccgtcgacgccggggaaggtgaaggtggagcagcggtcgtcggcggcgatgagccggcaggttcaccggtgcttcgcgtcgacggggaccatgttcctgtgggcgctgttcctggtggcgatgacggcgacgtacctgagcttccgctccctcgccggcgacgccgcggcgtcgtcgtcgcgctacttcccggcggcgtcgtggggcgggctgcactgggagcggcagatcagggcgtcggcgtcgccgcggcggccgcccgggtcggcggagggcgccgggctgtccgtgctggtcaccggcgccgccgggttcgtcggcgcgcactgctccctcgccctccgcaagcgcggcgacggcgtcgtcggcatcgacaactacaactcctactacgacccgtcgctgaagaaggcgcggcgcgccctcctgggctcgcacggcgtgttcgtcgtcgacggcgacatcaacgacggccgcctcctcgccaagctgttcgacgtcgtccccttcacccacgtcctccacctcgccgcgcaggccggcgtccgctacgccatggagaacccctcgtcgtacgtccgctccaacgtcgccggcctcgtctccctcctcgagtcctgcaaggacgccgacccgcagccggccgtcgtctgggcctcctcctcctccgtctacggtctcaacgacgccgtccccttctccgaggcgcaccgcaccgacaagccggcgtcgctctacgccgccaccaagaaagccggcgaggccatcacccacacctacaaccacatctacggcctctccatcaccggcctccgcttcttcacggtgtacggtccctggggccgccccgacatggcctacttcttcttcacccgcaacatcctgcaggggaagccggtcaccgtctaccggggccgtgatcacgtcgacatcgccagggacttcacctacatcgacgacatcgtgcgggggtgcctggcggcgctggacacggctgggcggagcacgggcgggggcgggaggaagcgcggggcggcgccgtacaggatcttcaacctcgggaacacgtcgccggtgacggtgccggcgctggtggcgatgctggagaggtgcctgatggtgaaggcgaggaggcacgtcgtcgagatgcccggcaatggcgacgtgcccttcacccacgccaacatcagcctggcgagggagcagctcgggtacaagccgacgaccagcctcgagatggggctcaagaagttcgtccggtggtacctctcctactacggctacaacagaggaactcacgcattcaggagccgcttgtga

SEQ ID NO: 111014 - protein, 453 aa, Oryza sativa
MRVVVEEEEAEVMYPSTPGKVKVEQRSSAAMSRQVHRCFASTGTMFLWALFLVAMTATYLSFRSLAGDAAASSSRYFPAASWGGLHWERQIRASASPRRPPGSAEGAGLSVLVTGAAGFVGAHCSLALRKRGDGVVGIDNYNSYYDPSLKKARRALLGSHGVFVVDGDINDGRLLAKLFDVVPFTHVLHLAAQAGVRYAMENPSSYVRSNVAGLVSLLESCKDADPQPAVVWASSSSVYGLNDAVPFSEAHRTDKPASLYAATKKAGEAITHTYNHIYGLSITGLRFFTVYGPWGRPDMAYFFFTRNILQGKPVTVYRGRDHVDIARDFTYIDDIVRGCLAALDTAGRSTGGGGRKRGAAPYRIFNLGNTSPVTVPALVAMLERCLMVKARRHVVEMPGNGDVPFTHANISLAREQLGYKPTTSLEMGLKKFVRWYLSYYGYNRGTHAFRSRL

SEQ ID NO: 111015 - DNA, 1227 bp, Oryza sativa
  CDS (1)..(1227)
atggcggtggagaagacggtgccgggcggggtgaggacggtgctggtgacgggcggggcggggtacatcggcagccacgccgtgctgcagctcctcctcgccggattccgcgccgtcgtcgtcgacaacctcaacaactcctccgagctcgccgtccgccgcgtcgccgccctcgccggcgaccactcccggaacctcgccttccacaaggttgacctccgtgacaagggagcactggaaaaggtttttgcttcaacaagattcgatgctgtagttcactttgctgggctaaaagctgtgggcgaaagtgtgcagaagccattgctttattacgacaacaatgttaatggaacagtaaatcttctggaagttatgtctgcccatggatgtaagaagttggtgttctcatcatcagctgcagtttatggatcaccgaagaactcaccctgcacagaagagtttcctctcactccaaacaatccatatggcaaaacaaagcttgttgttgaagatatttgccgtgatatctaccgtacagatcctgaatggaagattattctacttaggtacttcaatccagttggggctcatcctagcggataccttggggaagatccatgtggcattcccaacaatcttatgccttatgttcagcaagttgctgttggcaggaggccagctctgacaatactaggaaatgattatgcaaccagagatggtaccggggtccgagattacatccatgtggttgaccttgctgatggacatattgcggcattgcagaaactctttgagagctccagcatagggtgtgaagcatacaaccttggaactggtaaaggtacctctgtgctggagatagtcaaggcatttgagaaggcttctgggaagaaaattcctctgattattggcccaagacgccctggtgatgcggagattctattttcattacctgctaaagcagagaaggaactcaactggaaagcgaaatttggcatcgatgaaatgtgtagggatcaatggaactgggctagcaagaacccttatggatacgggtcacttgactccaccaagcagaacggacaccactcgtacggatcaattggctctcccaagcagaatggccactgcacaaatggattttctgaatccactaggcataatggtcacaacggatatggactggtcgactctgccaagcataacggcaacggccacttccactga

SEQ ID NO: 111016 - protein, 408 aa, Oryza sativa
MAVEKTVPGGVRTVLVTGGAGYIGSHAVLQLLLAGFRAVVVDNLNNSSELAVRRVAALAGDHSRNLAFHKVDLRDKGALEKVFASTRFDAVVHFAGLKAVGESVQKPLLYYDNNVNGTVNLLEVMSAHGCKKLVFSSSAAVYGSPKNSPCTEEFPLTPNNPYGKTKLVVEDICRDIYRTDPEWKIILLRYFNPVGAHPSGYLGEDPCGIPNNLMPYVQQVAVGRRPALTILGNDYATRDGTGVRDYIHVVDLADGHIAALQKLFESSSIGCEAYNLGTGKGTSVLEIVKAFEKASGKKIPLIIGPRRPGDAEILFSLPAKAEKELNWKAKFGIDEMCRDQWNWASKNPYGYGSLDSTKQNGHHSYGSIGSPKQNGHCTNGFSESTRHNGHNGYGLVDSAKHNGNGHFH

SEQ ID NO: 111017 - DNA, 1437 bp, Oryza sativa
  CDS (1)..(1437)
atgatgccgcactccggcgtggtggacgcggcggcgaagggggtgaagctggggggcggtggtggcggggcgctgatggtgcgccgggtggcgagcggcaagctcctgtcggcgtcgtcgcacctgctgttccgggcaaccatcctggcgacgctctgcctcgtctgcctcttcaccgtgcactacccgtcgctgctgtcccactccttccacctctcctccgccgccgccgccgcgaacgggaagcacagggcggcgtcgcggtcgtcgcaccggagcttgcttgggtcgtcggcggcggtggcgtatgggggcgcggcgtgggagaaggaggtgaggaggagcgcggcgccgaggagggacgggggcttgtcggtgctggtgacgggcgccgccgggttcgtcggcgcgcactgctcgctggcgctccgggcgcgcggggacggcgtggtggggctcgacaacttcaactcctactacgacccgtccctgaagcgggcgcggcagcgactgctggcgtcgcgcggcgtcgccgtgctcgacgccgacatcaacgacgccgcgctgctggagcggctgttcgacgcggcgcgcttcacgcacgtgctccacctcgccgcgcaggccggggtgcgctacgcgatgcgcgcgccgcagacgtacgtcgcgtccaacgtcgccggcctcgtcagcgtcttcgaggtcgccgccaagcacgccgacccgcagccggcgatcgtgtgggcgtcctcgtcgtcggtgtacgggctcaacaccgacgcgcccttctccgaggagcaccgcaccgaccggccggcgtcgctgtacgcggcgaccaagaaggccggcgaggccatcgcccacgcgtacaaccacatctacggcctctccatcaccggcctccgcttcttcaccgtgtacgggccgtggggccgccccgacatggcctacttctccttcgcccgcagcatcgtcgctggcgagcccatcacgctgttccgcaccgccgacggcgccgacgcgcgccgcgacttcacctacatcgacgacgtcgtcaagggctgcctcggcgcgctcgacacggccggcgagagcaccggcaccaagtccggcaagaagcgcggcccggcgccgctccgcgtctacaacctcggcaacacctcgccggtgccggtcacccgcatggtcgccatcctcgagaagctcctcggcaggaaggcgaacaagcgcgtcgtcaccatgcccagcaatggcgacgtgccgttcacccacgccaacgtcagccacgccgcgcgcgacttcggctaccgcccggcgacccccctcgacgccggcctccgccgcttcgtcgactggttcgtccactactacaagctcgacacggccaagatcgccaagggcaagaggaaatccatggccatgtccgccgcgtcgtga

SEQ ID NO: 111018 - protein, 478 aa, Oryza sativa
MMPHSGVVDAAAKGVKLGGGGGGALMVRRVASGKLLSASSHLLFRATILATLCLVCLFTVHYPSLLSHSFHLSSAAAAANGKHRAASRSSHRSLLGSSAAVAYGGAAWEKEVRRSAAPRRDGGLSVLVTGAAGFVGAHCSLALRARGDGVVGLDNFNSYYDPSLKRARQRLLASRGVAVLDADINDAALLERLFDAARFTHVLHLAAQAGVRYAMRAPQTYVASNVAGLVSVFEVAAKHADPQPAIVWASSSSVYGLNTDAPFSEEHRTDRPASLYAATKKAGEAIAHAYNHIYGLSITGLRFFTVYGPWGRPDMAYFSFARSIVAGEPITLFRTADGADARRDFTYIDDVVKGCLGALDTAGESTGTKSGKKRGPAPLRVYNLGNTSPVPVTRMVAILEKLLGRKANKRVVTMPSNGDVPFTHANVSHAARDFGYRPATPLDAGLRRFVDWFVHYYKLDTAKIAKGKRKSMAMSAAS

SEQ ID NO: 111019 - DNA, 1110 bp, Oryza sativa
  CDS (1)..(1110)
atggcggggggcgaggtggtggcggtggcggcggcggcggcggggacgagcaggacggtgctggtgacgggaggggccgggtacatcgggagccacaccgtgctgcagctgctcgccgcggggttccgcgtcgtcgtcgccgacagcctcgggaactcctccgagctcgccgtccgccgcgtcgccgcgctcgccggggacaaggcgcggaacctctccttacacaaggttgatattcgtgataagggtggactggaaaaggttttttcttcgacaagatttgatgctgtcgttcattttgctggtctgaaagctgtgggtgaaagtgtgcagaagccattgctttattatgaccataatgttgctgggacaataattcttctagaagttatggcagcccatggatgtaaaaagttggtgttttcatcgtcagctgcagtttatggatcacctaaaaactcaccctgcacagaagagtttcctctcactccacacaatccatatggcagaaccaagctcatagcagaggagatttgccgtgatatataccattcagattctgaatggagcataattttacttaggtacttcaatcctgttggagctcatcccagtggataccttggtgaagacccatgtggaattcctaacaacctcatgcccttcgtccagcaagttgctgtcgggaggagaccgtcacttacaatatttggaaatgactatgcaacaaaagatgggacaggggtacgtgattatattcatgtagttgatcttgctgaggggcatattgctgcactacggaagctgtttgaaagctcaataggatgtcaagcatacaaccttggaacaggaaagggaacatcagtgttggaaatagttaatgcatttgagaaagtttctggaaagaaaatacctttggttattggtccacgacgccctggtgatgctgagattctcttttcgtcagctgctaaagcagagagagaattcaagtggaaggcaaaatatggcatcgaagaaatgtgcagagaccaatggaactgggcgagcaagaatcctttcgggtacgcctcgcccgactccaccaagcagaatggtcattcacactga

SEQ ID NO: 111020 - protein, 369 aa, Oryza sativa
MAGGEVVAVAAAAAGTSRTVLVTGGAGYIGSHTVLQLLAAGFRVVVADSLGNSSELAVRRVAALAGDKARNLSLHKVDIRDKGGLEKVFSSTRFDAVVHFAGLKAVGESVQKPLLYYDHNVAGTIILLEVMAAHGCKKLVFSSSAAVYGSPKNSPCTEEFPLTPHNPYGRTKLIAEEICRDIYHSDSEWSIILLRYFNPVGAHPSGYLGEDPCGIPNNLMPFVQQVAVGRRPSLTIFGNDYATKDGTGVRDYIHVVDLAEGHIAALRKLFESSIGCQAYNLGTGKGTSVLEIVNAFEKVSGKKIPLVIGPRRPGDAEILFSSAAKAEREFKWKAKYGIEEMCRDQWNWASKNPFGYASPDSTKQNGHSH

SEQ ID NO: 111021 - DNA, 1497 bp, Oryza sativa
  CDS (1)..(1497)
atgccggcggacgcggcggcgaaggggatgaagctggagaggtacgcgagcggcgcgggcgcgatgctgctgctgcggcgggcggcgagcgggaaggtcgtgtcggcgtcgtcgcacctgctgttccgcgccaccgtgctcgccacgatggcgctcgtgttcctcttcacgttccactacccgtcgctgctgtcgcgctccttcacgctctcctccggcgccggcgccggcgaggggggagccgcggcgcacgcctcgcaccggagcttgctcatgtcgtcgtcgtcggcgtcggcgtcggcggcgtcggtgtacgggggcgcggcgtgggagaaggaggtgaggcggagcgcgaagccgaggaaggacggggggatagccgtgctggtgaccggcgcggcggggttcgtcggcacgcactgctcgctggcgctgagggcgcgcggcgacggcgtgctggggctcgacaacttcaacgcctactacgacccggagctgaagcgcgcgcggcagaggctcctcgccggccgcggcgtgctcgtgctcgacgccgacatcaacgacgcgctcctgctcgagaagctgttcgacctggtgccgttcacccacgtgctgcacctcgccgcgcaggccggcgtgcgctacgccatggaggcgccgcagacgtacgtggcgtccaacgtggccgggctcgtgaccgtcctcgaggtcgccgccaagcacgccgacccgcagccggcgatcgtctgggcgtcgtcgtcgtcggtgtacggcctcaacaccgacgcacccttctccgaggagcaccgcaccgaccggccggcgtcgctgtacgcggcgaccaagaaggccggcgaggccatcgcgcacacgtacaaccacatctacggcctctccatcaccggcctccgcttcttcaccgtgtacgggccatggggccgccccgacatggcctacttcttcttcgccaagagcatcgtctccggcgagcccatcacgctgttccgcgccgccgacggcgccgacgcgcgccgcgatttcacctacatcgacgacgtcgtcaagggctgcctcggcgcgctcgacacctccggcaagagcaccggctcctccaagtccggcaagaagtccggcccggcgccgctccgcgtctacaacctcggcaacacctcgccggtgccggtcacccgcatggtcgccatcctcgagaagctcctcggcaagaaggccaacaagcgcatcgtcgccatgcccagcaatggcgacgtgcccttcacccacgccaacgtcacccacgccgcccacgacttcggctaccgccccaccacctccctcgacgccggcctccgccacttcgtcgactggttcgccgactactacaagctcaagctcgacgtccccaagatcgccgccaaggtcgccggcgccggcaagccctcctcctcgtcggcctccaagaagaagaagaaggccgcggcgatgtcggcgtcatcatga

SEQ ID NO: 111022 - protein, 498 aa, Oryza sativa
MPADAAAKGMKLERYASGAGAMLLLRRAASGKVVSASSHLLFRATVLATMALVFLFTFHYPSLLSRSFTLSSGAGAGEGGAAAHASHRSLLMSSSSASASAASVYGGAAWEKEVRRSAKPRKDGGIAVLVTGAAGFVGTHCSLALRARGDGVLGLDNFNAYYDPELKRARQRLLAGRGVLVLDADINDALLLEKLFDLVPFTHVLHLAAQAGVRYAMEAPQTYVASNVAGLVTVLEVAAKHADPQPAIVWASSSSVYGLNTDAPFSEEHRTDRPASLYAATKKAGEAIAHTYNHIYGLSITGLRFFTVYGPWGRPDMAYFFFAKSIVSGEPITLFRAADGADARRDFTYIDDVVKGCLGALDTSGKSTGSSKSGKKSGPAPLRVYNLGNTSPVPVTRMVAILEKLLGKKANKRIVAMPSNGDVPFTHANVTHAAHDFGYRPTTSLDAGLRHFVDWFADYYKLKLDVPKIAAKVAGAGKPSSSSASKKKKKAAAMSASS

SEQ ID NO: 111023 - DNA, 1122 bp, Oryza sativa
  CDS (1)..(1122)
atggtgagcggcggaggagtagcggcggagaacggcgagatggtggggaacggggaggggaggaagggtgcgggggcgagcgtgctggtgacggggggagcggggtacatcgggacgcacacggtgctgcggctgctggagaaggggttcgcggtcaccgtcgtcgacaacttccacaactccgtcccggaggcgctcgaccgcgtccgcctcatcgccggcgccgccctctccgcccgcctcgacttcatcgccggggatctcaagagcaaggacgacatggagaaggtgttcgccgccaagaggtatgacgccgtgatccacttcgccgggctgaaggcggtgggggagagcgtcgcgcacccgcagatgtactacgagaacaacgtcgccggcaccatgaacctctactccgccatgaccaagtacggctgcaagaagatagtgttctcgtcgtcggcgacggtgtacggccagccggagaagaccccctgcgtcgaggattccaagctgagcgctctcaacccatacggcaccaccaagctcgtcctggagaactacttccggcaggtgcaggccgccgacccggagatgagggtgatcctgctcaggtacttcaaccccatcggcgctcaccggagcggcgacatcggggaggaccccaggggcatccccaacaaccttcttccgtacatccagcaggtcgccgtcggccgccgccccgagctcaacgtctacggcgtcgactacccaaccagggacggcaccgcgatcagggattacatacatgtagtggaccttgccgatggccacattgccgcactggagaagctcttcgctactcctgacattggttgtgtggcttacaatctaggaacagggtgtggaacaacggtgctcgaggtggtgaaggcgttcgaggaggcgtccggaaagaaaattcctatcaagatttgccccagaagacctggagattgcactgaggtttacgcttccactgacaaggccaagaaggagctcggatggagtgctcggtttggaatagaggacatgtgcagggaccagtggaattgggccaagaagaatccgtacggatacagcgccaatgctgagcagaattag

SEQ ID NO: 111024 - protein, 373 aa, Oryza sativa
MVSGGGVAAENGEMVGNGEGRKGAGASVLVTGGAGYIGTHTVLRLLEKGFAVTVVDNFHNSVPEALDRVRLIAGAALSARLDFIAGDLKSKDDMEKVFAAKRYDAVIHFAGLKAVGESVAHPQMYYENNVAGTMNLYSAMTKYGCKKIVFSSSATVYGQPEKTPCVEDSKLSALNPYGTTKLVLENYFRQVQAADPEMRVILLRYFNPIGAHRSGDIGEDPRGIPNNLLPYIQQVAVGRRPELNVYGVDYPTRDGTAIRDYIHVVDLADGHIAALEKLFATPDIGCVAYNLGTGCGTTVLEVVKAFEEASGKKIPIKICPRRPGDCTEVYASTDKAKKELGWSARFGIEDMCRDQWNWAKKNPYGYSANAEQN

SEQ ID NO: 111025 - DNA, 1221 bp, Oryza sativa
  CDS (1)..(1221)
atgattccgctaaacaggagggcgagtcagactaggggtgggatggagtacttcgatgctaggcggaagcctcataatgttgggaaagttattgcagctctggtcctcacaacactatgtatatttattttgaagcaatctcctggttttggtggcagtagtgtgttttctcgccatgaacctggtgttactcatgtcttagtaacaggaggagctggctatattgggtcacatgcttcattacgcctgttaaaggacaattatcgagttaccattgtggacaatctttctagaggaaacatgggagcagtaaaggttctccaagagttgttcccccagccaggaagacttcagtttatctatgctgatcttggagatcaaaaaactgtcaacaagatctttgccgaaaatgcgtttgatgctgttatgcactttgctgctgttgcctatgtgggtgagagtacattggaaccccttaggtactatcacaatattacatcgaacaccttattgattttggaggctatggcgtctcatggagtcaagacccttatttactctagtacatgtgccacctatggagaaccagagaagatgcctattgtagaaaccacacgtcagttaccaattaatccctatggaaaagctaagaaaatggcggaggacatcatactagatttcacgaaggggagaaaggacatggctgtgatgattttaagatatttcaatgttattggatcagacccagagggaagactaggtgaagctcctagacctgaactacgagagcatggaaggatatccggggcatgctttgatgctgcgttaggaatcattccagggctgaaggttaaaggaacagattatcctacaactgatggaacctgcataagagactacattgatgtcacagatcttgttgatgctcatgtgaaagcactcaacaaggcagagccaagtaaagttggcatttacaatgttggcactggaagaggtcgttcagtcaaggagtttgtggatgcctgcaaaaaggcaactggagtcaacattaaaattgagtacctcagcaggaggccaggggactatgctgaagtatacagtgacccaacaaagatcaacacggagctcaactggactgctcaatataccgacctcaaggagagcctgtcagtcgcttggagatggcaaaagtcacatccacgcggatatgggtcaaactaa

SEQ ID NO: 111026 - protein, 406 aa, Oryza sativa
MIPLNRRASQTRGGMEYFDARRKPHNVGKVIAALVLTTLCIFILKQSPGFGGSSVFSRHEPGVTHVLVTGGAGYIGSHASLRLLKDNYRVTIVDNLSRGNMGAVKVLQELFPQPGRLQFIYADLGDQKTVNKIFAENAFDAVMHFAAVAYVGESTLEPLRYYHNITSNTLLILEAMASHGVKTLIYSSTCATYGEPEKMPIVETTRQLPINPYGKAKKMAEDIILDFTKGRKDMAVMILRYFNVIGSDPEGRLGEAPRPELREHGRISGACFDAALGIIPGLKVKGTDYPTTDGTCIRDYIDVTDLVDAHVKALNKAEPSKVGIYNVGTGRGRSVKEFVDACKKATGVNIKIEYLSRRPGDYAEVYSDPTKINTELNWTAQYTDLKESLSVAWRWQKSHPRGYGSN

SEQ ID NO: 111027 - DNA, 1056 bp, Brassica napus
  CDS (1)..(1056)
atgggttcgtctgtggagcagaacattctcgttaccggcggtgctggattcatcgggacgcataccgtcgtccagcttctcaaagaggggtttaaggtctcgatcatcgataatcttgataactctgttatcgaagccgttgatcgggttagggagctcgttggtcctgatctctccaagaagctcgagttcactcagggtgatctaaggaacaaaggggacattgagaaactcttctccaaacagaggtttgatgctgtgatccatttcgcgggtctcaaagctgtgggtgaaagcgttggcaaccctcgccgctactttgacaataacttggttggaactatcaatctctacgagaccatggcaaagcacaactgcaaaatgatggtgttttcatcgtctgcaactgtctacggacaacctgagaagattccatgcatggaggactttgagttaaaagctatgaacccttatggtcgcacaaagctctttcttgaggagatagctagagacatccaggcggcggagccagagtggaggattgtgctgctgaggtacttcaaccctgtgggtgcacacgagagtggaagaattggcgaggatccaaagggtatccctaataacctcatgccttacatacagcaagtagctgttggacgcttgcctgaactcaatgtctatggacatgactatcctaccgaggatggtagtgcggtgagggactacatccatgtgatggatttggctgatgggcatatcgctgcgctaaggaagctgtttgatgatccaaagataggctgtactgcttacaatctagggactggaagaggaacgtctgtgttagagatggttgctgcttttgagaaagcttctggcaagaaaataccgatcaagctttgtccgagaaggctaggagatgcaacagcagtttatgcctcaacagagaaagctgagaaagaacttggctggaaggcaaagtatggagtggaggagatgtgcagagaccagtggaattgggcaaacaacaatccatggggttaccagaagaagcgttga

SEQ ID NO: 111028 - protein, 351 aa, Brassica napus
MGSSVEQNILVTGGAGFIGTHTVVQLLKEGFKVSIIDNLDNSVIEAVDRVRELVGPDLSKKLEFTQGDLRNKGDIEKLFSKQRFDAVIHFAGLKAVGESVGNPRRYFDNNLVGTINLYETMAKHNCKMMVFSSSATVYGQPEKIPCMEDFELKAMNPYGRTKLFLEEIARDIQAAEPEWRIVLLRYFNPVGAHESGRIGEDPKGIPNNLMPYIQQVAVGRLPELNVYGHDYPTEDGSAVRDYIHVMDLADGHIAALRKLFDDPKIGCTAYNLGTGRGTSVLEMVAAFEKASGKKIPIKLCPRRLGDATAVYASTEKAEKELGWKAKYGVEEMCRDQWNWANNNPWGYQKKR

SEQ ID NO: 111029 - DNA, 1056 bp, Brassica napus
  CDS (1)..(1056)
atgggttcttctgtggagcagtgcattttggtgacaggtggtgctgggttcattggaacgcacactgtggttcagcttttgaatcagggcttcaaggtttccatcatcgacaatcttgataactctgtccatgaagctgttcatagggttcgtgagcttgttggtcctgatctctcttccaagcttgaattcaatctgggtgatttgagaaacaaaggagatatagagaaactcttttccaatcagagatttgatgctgtgattcactttgctggtcttaaagctgtgggtgaaagtgtagcaaaccctcgtcgttactttgataacaacttagttggaactatcaatctctatgagaccatggcaaagtacaactgcaaaatgatggtgttctcgtcgtctgcaacagtttatggccaaccagaagtagtcccttgtgtggaagactttgagttgcaggctatgaatccttatggtcgcactaagctgtatcttgaagagatagctagagacattcaagcggcagagccagagtggaggataattctcttgaggtacttcaatcctgttggagctcacgagagcggaaggattggagaagatccaaagggcataccgaacaatctcatgccttatatccagcaagttgctgttggaagattacctgagctcaatgtgtttggacatgattatcctacaccggatggtagcgcggtcagagactatatccatgtgatggatttagcagatggacatgttgctgcattgaacaagctatttactgatccaaagattggttgtactgcttataatcttgggactggtcaaggaacttctgtcttggaaatggtttctgctttcgaaaaagcttctggcaagaaaattccaatgaagttatgtccaagaagagctggagatgcaacagctgtgtatgcttcaactgagagagctgagaaagaactaggatggaaggcaaaatatggagtggatgagatgtgcagagatcagtggaactgggcaaacaacaacccatggggtttccatgaaaagcattga

SEQ ID NO: 111030 - protein, 351 aa, Brassica napus
MGSSVEQCILVTGGAGFIGTHTVVQLLNQGFKVSIIDNLDNSVHEAVHRVRELVGPDLSSKLEFNLGDLRNKGDIEKLFSNQRFDAVIHFAGLKAVGESVANPRRYFDNNLVGTINLYETMAKYNCKMMVFSSSATVYGQPEVVPCVEDFELQAMNPYGRTKLYLEEIARDIQAAEPEWRIILLRYFNPVGAHESGRIGEDPKGIPNNLMPYIQQVAVGRLPELNVFGHDYPTPDGSAVRDYIHVMDLADGHVAALNKLFTDPKIGCTAYNLGTGQGTSVLEMVSAFEKASGKKIPMKLCPRRAGDATAVYASTERAEKELGWKAKYGVDEMCRDQWNWANNNPWGFHEKH

SEQ ID NO: 111031 - DNA, 1056 bp, Brassica napus
  CDS (1)..(1056)
atgggttcttctgtggagcagaacattcttgttactggtggcgctggatttattgggacacatactgttgttcagcttctgaaagagggttttaaggtttcgatcattgataatcttgataactctgttatcgaagccgtcgatagggttagggagctcgttggtcctgatctctcaaataagcttgagtttaatctgggtgatctaagaaacaaaggggatattgagaaacttttctccaagcagagattcgatgctgtgatccattttgcgggtcttaaagctgtgggtgaaagtgttggcaaccctcgtcgctactttgacaataacttggtgggaacaatcaatctatatgaggccatggcaaaataccactgcaaaatgatggtgttttcatcatctgcaactgtttatggacaacctgagaaaattccatgcgtggaagactttgaattgaaagcaatgaatccttatggccgtactaagctctttcttgaagaaatagctagagacatccacgcagcggaaccagaatggaggattgttctgctgaggtacttcaatcctgtgggagcacatgagagtggcagaattggtgaggatccaaagggaatccctaataacctcatgccttatatccaacaagtggctgtgggacgtcttcctgagctcaatgtctacggacatgactatcctaccgaggatggcagtgcggtaagagattacatccatgtgatggacttggcagatggccatatcgctgcgctgaggaagctatttgctgatccgaagattggctgtactgcttacaatctagggactggacgaggaacgtctgtgttagaaatggttgcagcttttgaaaaagcttccggcaagaaaatacctatcaagctctgtccaagaagggcgggagatgcaactgcagtttatgcttcaacagagagagctgagaaagaacttggctggaaggcaaaatacggagttgatgagatgtgcagagatcagtggaactgggcaaacaacaatccatggggctaccagaagaagctttga

SEQ ID NO: 111032 - protein, 351 aa, Brassica napus
MGSSVEQNILVTGGAGFIGTHTVVQLLKEGFKVSIIDNLDNSVIEAVDRVRELVGPDLSNKLEFNLGDLRNKGDIEKLFSKQRFDAVIHFAGLKAVGESVGNPRRYFDNNLVGTINLYEAMAKYHCKMMVFSSSATVYGQPEKIPCVEDFELKAMNPYGRTKLFLEEIARDIHAAEPEWRIVLLRYFNPVGAHESGRIGEDPKGIPNNLMPYIQQVAVGRLPELNVYGHDYPTEDGSAVRDYIHVMDLADGHIAALRKLFADPKIGCTAYNLGTGRGTSVLEMVAAFEKASGKKIPIKLCPRRAGDATAVYASTERAEKELGWKAKYGVDEMCRDQWNWANNNPWGYQKKL

SEQ ID NO: 111033 - DNA, 1383 bp, Brassica napus
  CDS (1)..(1383)
atgccactgtcggcgtcgtcggcggacacaagcaagacggtgaagctggagaggtacaacagctacctccgcaagatccacagcaccaaagttctcaaggcgtcttctaaagttcttttccgagcaacactcctcgtcgctcttgtcctagtccttgtcttcgctatcaactaccatccactctccgacagccactccgccgcatcacaccatctccaccgtcgcagcttcttatcaaccggcatcttctcttcctcctcctcctccctaggcgaaggagccgcgtgggagaagcgcgtgagacaatcctcaacaccaaaacgaccgcacggcctctccgtcctcgtaaccggagcagccgggttcgtcggatcccactgctccatcgcgcttcgaaaacgcggggatggagttttaggattcgacaacttcaacgactactacgacccatcgctcaaaagagcaagacaagagctgttagagaagaaccaggtgttcatcgtggaaggagatctcaacgacggtcctctcttgcgtaagctcttcgacgtcgtccctttcactcacgtccttcacttagcagctcaagccggagttcgttacgccatgaagaaccctcagtcttacatcagctcaaacatcgctggactcgttaacctcctcgaagtagctaaagcagctaatcctcagcccgcgatcgtctgggcttcgtccagctccgtttacggactaaacaccgagaacccgttctccgaagagcacagaacggatcagccggcgagtctttacgcggcgacgaagaaagcaggagaggagatagcccacacttacaatcacatctacggtctttctttaaccggtctccggttctttacggtttacggtccttggggaagacccgacatggcttacttcttcttcaccaaagccatactccacgggaaatcaatcgacatttaccgaacgcaagacaatcaagaagtggcgcgtgacttcacctacatagacgatatcgttaaaggatgtgtcggtgcgttggacacggcggagaaaagcacgggaagcggcgggaagaagcgaggaccggctcagttacgtgtttacaatctcgggaacacttctccggttcctgtcgggagactggtttcgatcttggaaggattgttggggagtaaagcgaagaagcatctgatcaaaatgcctaggaacggtgacgtgccttacacgcatgcgaacgtgagcttggcgtataaagactttgggtataaaccaacgacggatctcgcggcggggttaaggaagttcgtcaaatggtacgttggttattacgggatacagccgaggctaaaaagggaaaactctcacgccgatgattccgcttaa

SEQ ID NO: 111034 - protein, 460 aa, Brassica napus
MPLSASSADTSKTVKLERYNSYLRKIHSTKVLKASSKVLFRATLLVALVLVLVFAINYHPLSDSHSAASHHLHRRSFLSTGIFSSSSSSLGEGAAWEKRVRQSSTPKRPHGLSVLVTGAAGFVGSHCSIALRKRGDGVLGFDNFNDYYDPSLKRARQELLEKNQVFIVEGDLNDGPLLRKLFDVVPFTHVLHLAAQAGVRYAMKNPQSYISSNIAGLVNLLEVAKAANPQPAIVWASSSSVYGLNTENPFSEEHRTDQPASLYAATKKAGEEIAHTYNHIYGLSLTGLRFFTVYGPWGRPDMAYFFFTKAILHGKSIDIYRTQDNQEVARDFTYIDDIVKGCVGALDTAEKSTGSGGKKRGPAQLRVYNLGNTSPVPVGRLVSILEGLLGSKAKKHLIKMPRNGDVPYTHANVSLAYKDFGYKPTTDLAAGLRKFVKWYVGYYGIQPRLKRENSHADDSA

SEQ ID NO: 111035 - DNA, 1176 bp, Glycine max
  CDS (1)..(1176)
atggcatcgcgcgtcagcattggcaaccttacctcctccgcgccgtatattaattcccctcactttcgctcaccacttaagatttccaacaacccctctctgcaaaacgcttcgcataaggtacttatgcgcgataagactgtactggtaaccggcggagccggttacatcggcagccacaccgttcttcagctcttgctcggaggtttcagagccgtcgtcctcgacaacctcgaaaattcctccgaggttgccatccacagagtcagggagctcgccggcgaatttgggaacaacctctcctttcacaaggtggacctacgggacagagctgctctagaccaaatattttcttccacacaattcgatgctgtcatacattttgctggactgaaagcagtaggagaaagtgtgcaaaaacctttactatactataacaacaacttgactgggacaatcactctattggaagtcatggctgcccatggatgcaagaagctcgtgttttcatcttcagcaactgtatatggttggccaaaggaggttccatgcacagaagagttccctctgtcagcaatgaacccatatggacgaactaagcttatcattgaagaaatttgccgtgatgtccactgtgcagagccagattgtaaaataattttgttaagatacttcaacccagttggtgcacaccccagtggttatattggggaggatcctcgtggaattccaaacaatctcatgccatttgttcagcaagtagcagttggccgacggcctgcactgacagtttttggaaatgattataatacaagtgatggcactggggttcgggattacattcatgttgttgatttagcagatgggcacattgctgcattgcttaaactagatgaacctaatataggttgtgaggtttataacctgggaacaggaaagggaacatcagttttggagatggttagagcttttgaaatggcatctggaaagaaaattccacttgtgatggctggccgtagacctggtgatgctgaaattgtttatgcatcaacaaagaaagcggaaagagagcttaaatggaaggcaaaatatggcattgatgagatgtgccgtgatcaatggaattgggctagcaaaaacccttatggctatggagatcagggctccaccgattaa

SEQ ID NO: 111036 - protein, 391 aa, Glycine max
MASRVSIGNLTSSAPYINSPHFRSPLKISNNPSLQNASHKVLMRDKTVLVTGGAGYIGSHTVLQLLLGGFRAVVLDNLENSSEVAIHRVRELAGEFGNNLSFHKVDLRDRAALDQIFSSTQFDAVIHFAGLKAVGESVQKPLLYYNNNLTGTITLLEVMAAHGCKKLVFSSSATVYGWPKEVPCTEEFPLSAMNPYGRTKLIIEEICRDVHCAEPDCKIILLRYFNPVGAHPSGYIGEDPRGIPNNLMPFVQQVAVGRRPALTVFGNDYNTSDGTGVRDYIHVVDLADGHIAALLKLDEPNIGCEVYNLGTGKGTSVLEMVRAFEMASGKKIPLVMAGRRPGDAEIVYASTKKAERELKWKAKYGIDEMCRDQWNWASKNPYGYGDQGSTD

SEQ ID NO: 111037 - DNA, 1047 bp, Brassica napus
  CDS (1)..(1047)
atggtgaagaacgttctggtcacaggcggcgctggctacatcggtagccacacggtgcttcaacttctcaacggaggctactccgtcgtagtcgtcgacaatcacgacaattcatccgctgtttctctccaacgcgtcaaaaaactcgccggcgataacggaaaccgcctctccttccaccaggtggatctcagagacaggcctgcgcttgagaagattttctcagaaactaagtttgatgcagtgatacactttgctggacttaaagcagtaggtgagagtgtggagaagcccctgctttattataataataacttatttggcactgttatccttttggaggttatgtctcagttcggctgcaaaaatcttgtgttttcgtcatcagctactgtctatggctggccaaaagaggttccttgtaccgaggagtccccaatttctgcaaccaacccttatggccgtaccaagctttttatcgaggaaatttgccgggatgtacatcgctccgaccctgaatggaagatcatattgctcagatacttcaaccctgttggtgcacatcctagtggttacattggtgaagatcctcttggggttccaaacaacctcatgccttatgtccaacaagttgcagttggccggagacctcacctcaccgtctttggaactgactataacacaaaggatggcacaggggtgagagattacattcatgtgattgacttagcagatggacatatagccgctctgcgcaagctggatgatctcaaaatcagttgtgaggtatacaatcttggaacgggtaatggaacatcagttctagaaatggttgctgcctttgagaaggcatccggaaagaaaatccctttggtgttggctggacgacgtcctggagacgctgagattgtttacgcctcaaccgagaaagcagaacgcgagctaaactggaaggctaagtatgggattgaagacatgtgtagggatctatggaactgggccagcaataatccttacggctacgcctcctccaatggctcctcttaa

SEQ ID NO: 111038 - protein, 348 aa, Brassica napus
MVKNVLVTGGAGYIGSHTVLQLLNGGYSVVVVDNHDNSSAVSLQRVKKLAGDNGNRLSFHQVDLRDRPALEKIFSETKFDAVIHFAGLKAVGESVEKPLLYYNNNLFGTVILLEVMSQFGCKNLVFSSSATVYGWPKEVPCTEESPISATNPYGRTKLFIEEICRDVHRSDPEWKIILLRYFNPVGAHPSGYIGEDPLGVPNNLMPYVQQVAVGRRPHLTVFGTDYNTKDGTGVRDYIHVIDLADGHIAALRKLDDLKISCEVYNLGTGNGTSVLEMVAAFEKASGKKIPLVLAGRRPGDAEIVYASTEKAERELNWKAKYGIEDMCRDLWNWASNNPYGYASSNGSS

SEQ ID NO: 111039 - DNA, 2004 bp, Triticum aestivum
  CDS (1)..(2004)
atggcgacaccctacacacctaagagcatcctcattacaggagctgctggtttcatcgcttcccatgtcacaaaccgcattgtacggaactaccctgattacaagattgtcgtccttgacaagcttgattactgctccaatctgaagaaccttctccctgccaactcgtcaccaaacttcaagtttgtcaagggcgatattgccagtgctgatcttgtcaacttcctcctggtcacagagaacattgatacaataatgcactttgcagcccagacacatgttgacaattcttttggtaactcctttgaattcatcaagaacaacatttatggtactcatgttcttcttgaagcttgcaaggtcactggccagatcaggaggttcatccacgttagcactgatgaggtctatggcgagactgatgaggatgcagtggttggtaaccatgaggcctcacagctgctccccacaaatccttattcagccaccaaagctggagcagagatgcttgtcatggcttatgggagatcctatggtctgccggtcatcactacccggggaaataatgtgtatggtcctaaccagtttcctgaaaagcttattccgaagttcattcttttggctatgagaggaaagcccctcccaattcatggtgatggatccaatgtccgaagctacctctattgtgaggatgttgctgaggcttttgaagtcattcttcatcgtggagaagttggacatgtttacaacattggaacaaagagagagaggacagtcactgatgtggcaaaggatgtctgcaggcttttcaatcttgaagctgataaagtaatccagttggtcgataatagacctttcaatgatcagaggtatttcttggatgatgagaagctcaagagtcttgggtggtctgagcgcactagatgggaggagggcctgaggaagacaatggaatggtatgtagctaattctgactattggggtgatgtttctggtgcactgttgcctcatccgaggacactgatgatgcctgggtatgagggctctgaggaaattaaaggaatgctaaatctgtttactaacaatcaaacgaagatggtggctccaacatcagaaggttcttcccaaactcgtttgctcaagttcttgatatatggccggacaggatggattggtggacttcttggcaaaatatgtgagaagcaaggaattccatacgagtacggaaaaggtcgcttggaagagcgcttttccattgtccttgatatccaaactgttaagccaacacatgtcttcaatgctgctggtgttactggcagacccaatgttgactggtgtgagtctcacaagccagacaccatacgtaccaatgttgtgggcaccttgactctagctgatgtttgtcgggagcatgggttattggtgataaactatgccactgggtgcatatttgaatatgatgcaaatcatcctgaagggtcaggcatcggcttcaaagaagaggataaaccaaacttcactggttcattctactcaaagactaaggcaatggtcgaggaactgttgaaggagtacgagaatgtctgcactctgcgagtccggatgccaatatcgtctgacctcaacaatccccgaaacttcataacaaagattagccgttatgacaaggtggtaaacatcccaaacagcatgactgtattggatgagcttttgccaatttcagttgagatggcaaaaaggaacttgcggggcatctggaacttcaccaatcctggcgtggtcagccacaatgagattctggagatgtataagaagtacatggatcccagctacaagtggacaaacttcacgctagaagaacaggctaaggtcattgttgcacctcggagcaacaacgagatggacgcgacaaaactgaagagagagttccccgagctgctatcgatcaaagactcgttgatcaagtatgtctttgagcccaacaggaaggtcccagcaacttga

SEQ ID NO: 111040 - protein, 667 aa, Triticum aestivum
MATPYTPKSILITGAAGFIASHVTNRIVRNYPDYKIVVLDKLDYCSNLKNLLPANSSPNFKFVKGDIASADLVNFLLVTENIDTIMHFAAQTHVDNSFGNSFEFIKNNIYGTHVLLEACKVTGQIRRFIHVSTDEVYGETDEDAVVGNHEASQLLPTNPYSATKAGAEMLVMAYGRSYGLPVITTRGNNVYGPNQFPEKLIPKFILLAMRGKPLPIHGDGSNVRSYLYCEDVAEAFEVILHRGEVGHVYNIGTKRERTVTDVAKDVCRLFNLEADKVIQLVDNRPFNDQRYFLDDEKLKSLGWSERTRWEEGLRKTMEWYVANSDYWGDVSGALLPHPRTLMMPGYEGSEEIKGMLNLFTNNQTKMVAPTSEGSSQTRLLKFLIYGRTGWIGGLLGKICEKQGIPYEYGKGRLEERFSIVLDIQTVKPTHVFNAAGVTGRPNVDWCESHKPDTIRTNVVGTLTLADVCREHGLLVINYATGCIFEYDANHPEGSGIGFKEEDKPNFTGSFYSKTKAMVEELLKEYENVCTLRVRMPISSDLNNPRNFITKISRYDKVVNIPNSMTVLDELLPISVEMAKRNLRGIWNFTNPGVVSHNEILEMYKKYMDPSYKWTNFTLEEQAKVIVAPRSNNEMDATKLKREFPELLSIKDSLIKYVFEPNRKVPAT

SEQ ID NO: 111041 - DNA, 1053 bp, Zea mays
  CDS (1)..(1053)
atggcgcagaaggagactaatggcagcaacggcgatcacatctccacccgcccgccgccgaccccctcgcccctccgcttctccaagttctttcaggctaacctgcggatcctggtcactggtggggcgggcttcatcggctcgcacctcgtagacaagctcatggagaacgagaagcacgaggtcattgttgctgataactttttcactggttcaaaagacaacctgaagaagtggattggccacccaagatttgagctcatccgtcatgatgtcaccgagccgcttcttgtggaagttgaccaaatctatcaccttgcttgccctgcttcaccaatcttctacaagcacaaccctgttaagaccatcaagacaaatgttattggtaccctgaacatgctaggacttgcaaagagagttggagctaggattttgttgacatcaacctctgaagtttatggtgatccacttgagcatcctcaaactgaggcctactggggcaatgttaacccgattggtgttaggagttgttatgatgagggtaagcgtgtagcagagacgctgatgttcgactatcacaggcagcatggcattgaaatccggattgccaggattttcaacacctatgggcctaggatgaacattgatgatggccgtgttgttagcaacttcattgctcaggctgtgcgcggtgagcccctgactgtccagaggccaggaacacagactaggagtttctgctatgttgccgatatggttgatggtcttattaagctgatgaatggaaacaagactggaccgattaacttggggaacccaggtgaattcaccatgctggaacttgctgagaatgtgaaggagttgatcaacccagatgtgacagtgacgatgaccgagaacactcctgatgatccccgccagaggaagccggacatcacaaaggcgaaggaagttctgggatgggagcccaagatcgtcctgcgggacggcttggtgctcatggaggatgatttccgggagcgcctgaccgtgcccaagaaaaccaaggcctaa

SEQ ID NO: 111042 - protein, 350 aa, Zea mays
MAQKETNGSNGDHISTRPPPTPSPLRFSKFFQANLRILVTGGAGFIGSHLVDKLMENEKHEVIVADNFFTGSKDNLKKWIGHPRFELIRHDVTEPLLVEVDQIYHLACPASPIFYKHNPVKTIKTNVIGTLNMLGLAKRVGARILLTSTSEVYGDPLEHPQTEAYWGNVNPIGVRSCYDEGKRVAETLMFDYHRQHGIEIRIARIFNTYGPRMNIDDGRVVSNFIAQAVRGEPLTVQRPGTQTRSFCYVADMVDGLIKLMNGNKTGPINLGNPGEFTMLELAENVKELINPDVTVTMTENTPDDPRQRKPDITKAKEVLGWEPKIVLRDGLVLMEDDFRERLTVPKKTKA

SEQ ID NO: 111043 - DNA, 1290 bp, Zea mays
  CDS (1)..(1290)
atggcgtcggagctgacgtaccgcggcggcagcgtggcgccaggctccgcctccaacggtggggaatactccccgaagccctccaagccgctctcctggctcgcccgcgccgcgcgctacgccgccgccgagcaccgccccgtcttcgccctcgccggcatgctcttcgctgccgctatcttcaccttctcttccccctccaccttatctccgtccgaacccgccgcgtcggtcggcttcaaccaccttgccgtcagcgggcacccgtccttccgggagtccgtcggcgggaaggttcccctggggctgcgtcggcgcgcgctgcgggtgctcgtgacgggcggcgccgggttcgtggggagccacctggtggaccggctgttggagcgcggcgacagcgtgattgtggtggataacttcttcacggggcgcaagggcaacgtggcgcaccatctccagaaccccaggttcgaggtgatccgccacgacgtcgtcgagcccatactgctcgaggtagaccagatctaccaccttgcctgtccagccagccccgtgcactacaagtacaaccccatcaagaccatcaagacaaatgttgttgggacactgaacatgcttggattggccaagaggattggggcaaggtttctacttacaagcaccagtgaggtctatggtgatcccctccagcaccctcaggtggaaacctattggggcaatgtcaaccctataggtgtcaggagctgctatgatgagggcaaacgtacagctgaaacattaaccatggactaccatcgtggtgccaaccttgaggtaaggattgcccggatctttaacacatatggtcctcgcatgtgcattgatgacggccgtgttgtcagtaatttcgttgctcaggcgctgaggaaggagcctttgacagtctatggtgatggcaagcagactaggagctttcaatatgtctcagatttggtggaagggctgatgaagctcatggaaggggagcacattgggccgttcaacctcggcaaccctggagaattcagcatgctggagctggctaaggtggtccaggacaccatcgacccagaggcgcacatcgagttccgtccgaacaccgcagatgatccgcacaagcgcaagcctgacatcagccgcgcgaaagagctcctcggctgggagcccaaggttcccctccgtgagggccttccccgcatggtcactgacttccgcaaacgtatcttcggggaccaggaagggtccaccgaggcagctggtggcctttcttaa

SEQ ID NO: 111044 - protein, 429 aa, Zea mays
MASELTYRGGSVAPGSASNGGEYSPKPSKPLSWLARAARYAAAEHRPVFALAGMLFAAAIFTFSSPSTLSPSEPAASVGFNHLAVSGHPSFRESVGGKVPLGLRRRALRVLVTGGAGFVGSHLVDRLLERGDSVIVVDNFFTGRKGNVAHHLQNPRFEVIRHDVVEPILLEVDQIYHLACPASPVHYKYNPIKTIKTNVVGTLNMLGLAKRIGARFLLTSTSEVYGDPLQHPQVETYWGNVNPIGVRSCYDEGKRTAETLTMDYHRGANLEVRIARIFNTYGPRMCIDDGRVVSNFVAQALRKEPLTVYGDGKQTRSFQYVSDLVEGLMKLMEGEHIGPFNLGNPGEFSMLELAKVVQDTIDPEAHIEFRPNTADDPHKRKPDISRAKELLGWEPKVPLREGLPRMVTDFRKRIFGDQEGSTEAAGGLS

SEQ ID NO: 111045 - DNA, 1068 bp, Zea mays
  CDS (1)..(1068)
atggtgtccgccgtgctccggaccatcctcgtgacgggcggcgccgggtacatcggcagccacacggtgctgcagctgctgcagcagggcttccgcgtcgtcgtcgtcgacaacctcgacaacgcctccgaggccgccctcgcccgcgtcgccgagctcgccgggcacgacggcgccaacctcgtcttccacaaggttgaccttcgcgacaggcacgcgttggtggacatcttctcgtcgcacaggttcgaggctgtcattcactttgctgggctcaaggctgttggggagagcgtgcacaagcccctactttactacgacaacaacctggtcggcaccatcaccctcctggaggtgatggctgcgaacggctgcaagaagctggtgttctcgtcatctgcaactgtctatgggtggcccaaggaagtaccctgcaccgaagaattcccgctctgcgccaccaatccctatgggcggacaaagcttgtgattgaagacatctgccgcgacgtccaccgctccgaccccgactggaagatcatactgctcaggtacttcaaccccgttggcgctcatccaagcgggtacatcggcgaagacccctgcggtgtcccgaacaacctgatgccctacgtgcagcaagtcgctgttgggaagttacctcacctcacggtctacgggacggactacagcaccaaggatgggactggggtgcgtgattacatccacgttgtcgacctggctgacggccacatagcagccctgaggaagctctacgaagactccgacaaaataggctgtgaagtgtacaacttggggactggaaaggggacgtccgtgttggaaatggtggctgcattcgagaaggcttctgggaagaaaatccctctggtgttcgctgggcgaagacccggagacgcagagatcgtctacgccgcaactgccaaggcagagaaggagctcaaatggaaggccaagtacgggatcgaggagatgtgcagagatctgtggaactgggcgagcaagaacccgtacgggtacgctgggtcacgcgacaacagcaaatga

SEQ ID NO: 111046 - protein, 355 aa, Zea mays
MVSAVLRTILVTGGAGYIGSHTVLQLLQQGFRVVVVDNLDNASEAALARVAELAGHDGANLVFHKVDLRDRHALVDIFSSHRFEAVIHFAGLKAVGESVHKPLLYYDNNLVGTITLLEVMAANGCKKLVFSSSATVYGWPKEVPCTEEFPLCATNPYGRTKLVIEDICRDVHRSDPDWKIILLRYFNPVGAHPSGYIGEDPCGVPNNLMPYVQQVAVGKLPHLTVYGTDYSTKDGTGVRDYIHVVDLADGHIAALRKLYEDSDKIGCEVYNLGTGKGTSVLEMVAAFEKASGKKIPLVFAGRRPGDAEIVYAATAKAEKELKWKAKYGIEEMCRDLWNWASKNPYGYAGSRDNSK

SEQ ID NO: 111047 - DNA, 1272 bp, Zea mays
  CDS (1)..(1272)
atggcggtggagaagacgctgcccggcgcgagtgctgggaggaccgtgctggtcacgggcggggcgggctacatcggtagccacgccgtgctgcagctcctcctcgcgggcttccgcgccgtcgtcgtcgacaacctcaacaactcctccgagctggccgtccgccgcgtcgccgcgctcgcgggggaccactcccgcaacctctctttccacaagattgatctccgtgacaagggagcactggaaatggtttttgcttctacaagatttgaagctgtcattcacttcgctggattgaaagctgtgggtgaaagcgtacagaagccattactttattatgacaacaacgtcattggcacgataaatcttctagaagttatgtctgttcacggttgcaagaagttggtgttctcatcatcagctgcagtttatggatcacccaaaaactcaccctgcacagaaaattttcctcttactccaaacaatccatatggcaaaacaaagctcgttgttgaagatatttgccgggatatctaccgttcagatcctgaatggaagatcattttacttaggtacttcaatccagttggtgctcatcctagtggatatcttggcgaggacccacgaggaattcccaacaatcttatgccctatgttcagcaagttgcggttggtaggaggccagctctaacagttttaggaaatgactatgcaacaagagatgggactggggtccgagattacatccatgtggttgaccttgctgacggacatattgctgcattgcagaagctttttgagaactctagcatagggtgtgaagcgtacaaccttggaaccggaagaggtacatctgtgctggagattgttaaagcatttgagaaggcttctgggaagaaaatacctctgatttttggtgaaagacgcccaggtgatgcagagattctgttttcagagactactaaagcagagagggagcttaactggaaagcaaaatacggtattgaagagatgtgccgcgaccaatggaactgggccagcaagaacccttatggctatggatcacctgactctatcaagcagaatggtcaccaaacaaacggatccgctgactcctccaagcagaatggccaccgcacaaacggttcaactgactcacccaagcggaacggccaccatgcgtatgggtctgctgactcacccaagcgcaacgggcactgcgtttttggatcatcagacctcaagccgaatggtaatggccacctgcgctga

SEQ ID NO: 111048 - protein, 423 aa, Zea mays
MAVEKTLPGASAGRTVLVTGGAGYIGSHAVLQLLLAGFRAVVVDNLNNSSELAVRRVAALAGDHSRNLSFHKIDLRDKGALEMVFASTRFEAVIHFAGLKAVGESVQKPLLYYDNNVIGTINLLEVMSVHGCKKLVFSSSAAVYGSPKNSPCTENFPLTPNNPYGKTKLVVEDICRDIYRSDPEWKIILLRYFNPVGAHPSGYLGEDPRGIPNNLMPYVQQVAVGRRPALTVLGNDYATRDGTGVRDYIHVVDLADGHIAALQKLFENSSIGCEAYNLGTGRGTSVLEIVKAFEKASGKKIPLIFGERRPGDAEILFSETTKAERELNWKAKYGIEEMCRDQWNWASKNPYGYGSPDSIKQNGHQTNGSADSSKQNGHRTNGSTDSPKRNGHHAYGSADSPKRNGHCVFGSSDLKPNGNGHLR

SEQ ID NO: 111049 - DNA, 1059 bp, Helianthus annuus
  CDS (1)..(1059)
atgacgcggccgatgtgcatactggtgaccggtggtgccggttatataggaagtcatactgttttgcagttgttgttaaatggttacagtacggtggtggttgataatttggataattcgtcggaagttgctatcagtcgggttcgagaactcgctggtgatcgtggtcgtaatctgtcttttcacaagatggatatccgggataagcctgcactagagcagctttttgcttctacaaagtttgacgcggttatacattttgctggattaaaggcagttggtgaaagcgtgcagaagccgttgatgtattacaacaataatatcgttggtactataactttattggaagttatggctgcctatggctgcaagaagcttgtgttttcatcatcggctactgtttatggctggccaaaggagttgccgtgcacagaagagtttcccttgtctgcagccaacccgtatggacgaacaaagctaatgatcgaggagatgtgccgagatgtatatgcttcagaccctgagtggaaatttgtattgttgcggtattttaaccctgttggtgcacatcccagtggccgaattggcgaagatcctcatggaattccaaacaatcttatgccttttattcagcatgttgctgttggtagacaacctgcgcttaaagtgttcggaactgattactccacaaaagatggaactggggtacgtgattacatccatgtcgtagatttagcagacggacatactgcggcgttggcgaaactttctgatcccaaaataggttgtgaagtttataacttggggactggtaaagggacatctgttttggagatggtatcagcctttgaaaaggcatcaggaaagaaaatcccattaataaagactgcacgacgacctggtgatgctgagattgtatatgcgtcaacaacaaaggcagaacgcgagttaaactggaaggcaaagtatggaatagaggagatgtgcagagatcagtggaactgggctagcaggaatccttacggctatcagactgaagcaaagaaacttggtgcatga

SEQ ID NO: 111050 - protein, 352 aa, Helianthus annuus
MTRPMCILVTGGAGYIGSHTVLQLLLNGYSTVVVDNLDNSSEVAISRVRELAGDRGRNLSFHKMDIRDKPALEQLFASTKFDAVIHFAGLKAVGESVQKPLMYYNNNIVGTITLLEVMAAYGCKKLVFSSSATVYGWPKELPCTEEFPLSAANPYGRTKLMIEEMCRDVYASDPEWKFVLLRYFNPVGAHPSGRIGEDPHGIPNNLMPFIQHVAVGRQPALKVFGTDYSTKDGTGVRDYIHVVDLADGHTAALAKLSDPKIGCEVYNLGTGKGTSVLEMVSAFEKASGKKIPLIKTARRPGDAEIVYASTTKAERELNWKAKYGIEEMCRDQWNWASRNPYGYQTEAKKLGA

SEQ ID NO: 111051 - DNA, 1206 bp, Zea mays
  CDS (1)..(1206)
atggactactttgatgcaaggcggaagcctcataatgttggtaaaatcattgcagccctggtcctcacaacactctgtatatttgttctgaagcaatctcctggttttggtggcaatagtgtgttttctcgccatgaacatggggttacccacgtcttagtaacaggaggagctggttatattggttcacatgctgctttaaggctcttaaaggataactatcgagttactatcgataatctatctagaggaaacatgggagcagtaaaggttctgcagggcttatttccgcagcctgggagactacaattcatctttgctgatctggggaaccagaaatctgtcaacaagatatttgctgaaaatgcatttgatgctgtgatgcactttgcagctgttgcttatgtgggagagagcacattggaaccccttaggtactatcacaatattacatcgaacacactactgattttggaggctatggcatctcatggagtccaaacccttatttactccagtacatgtgctacctacggagaaccagataagatgcctattacagaagccacacctcagttccctatcaatccatatggaaaagctaagaaaatggcagaggatatcataatagatttctcaaactcaaagggagctgacatggctgtcatgattttaaggttagaaccttttcttcagttgcatagatatttcaatgttattggatctgaccctgagggaagattaggtgaggctcctaggccagaacttcgagagcatggtcggatatctggggcttgctttgatgcagcattaggagtcattccaggattaaaggttaaaggaacagattatcccacagctgatggaacctgcataagagattatattgatgtcacagatttagttgatgctcatgtgaaagcactcaacaaggcagagcctagaaaagtcggcatttacaatgttggaacaggaagaggtcgctcagttaatgagtttgttgatgcctgcaagaaggcaactggggtcaacatcaaaattgagtacctcaacagaaggccaggagattatgcagaagtatacagcgacccaacaaagataaacaaggagctcaactggacagctcattataccgatctcaaagagagcctatcagtcgcatggaggtggcaaaagtcgcatccgcgtggctacgggccaaactaa

SEQ ID NO: 111052 - protein, 401 aa, Zea mays
MDYFDARRKPHNVGKIIAALVLTTLCIFVLKQSPGFGGNSVFSRHEHGVTHVLVTGGAGYIGSHAALRLLKDNYRVTIDNLSRGNMGAVKVLQGLFPQPGRLQFIFADLGNQKSVNKIFAENAFDAVMHFAAVAYVGESTLEPLRYYHNITSNTLLILEAMASHGVQTLIYSSTCATYGEPDKMPITEATPQFPINPYGKAKKMAEDIIIDFSNSKGADMAVMILRLEPFLQLHRYFNVIGSDPEGRLGEAPRPELREHGRISGACFDAALGVIPGLKVKGTDYPTADGTCIRDYIDVTDLVDAHVKALNKAEPRKVGIYNVGTGRGRSVNEFVDACKKATGVNIKIEYLNRRPGDYAEVYSDPTKINKELNWTAHYTDLKESLSVAWRWQKSHPRGYGPN

SEQ ID NO: 111053 - DNA, 1299 bp, Brassica napus
  CDS (1)..(1299)
atgaagcagcttcacaagcaaatgagctcgaagcgcgacgacgacacaatccccatgagccagtcgtctccttactcacccaaggccttaaagcaccccagatctctcccgagatcgctccactacctcttccgcgaacagaggctcctcttcatcctcgtcgggatcctgatcggatcaaccttcttcatcctccagccttctctctcccgcttagcccccgccgagtccacctccctcatcaccagatccgtcgtcgacagtagcaactactcgccttccaagatgagtttcaattacggcggaggtaaaacaggccgtgttcccgtcggtatcggagggcggaggctgaggatcgtggtgacaggtggagctggattcgtcgggagtcatctcgtggataagcttatagggaggggagatgaggtgatcgtgattgataacttcttcacggggaggaaggagaatctggttcatctgttctcgaatccgaggtttgagctcattcgtcacgatgtggtggagccgatcctcctcgaggttgatcagatttaccatttagcttgccctgcctcacctgttcattacaagtttaatccagtcaagactatcaagacaaatgtaatgggaacgctcaatatgttgggacttgcaaagagagttggagcaaggtttctgctcactagcacaagtgaagtctatggagatcctcttgagcatccacaaaaggagacgtattggggaaatgtgaacccaatcggtgagaggagttgctatgatgaaggaaagcgtactgcacaaacactggccatggattatcaccgaggagcacgtgaggaggtaaggattgctcggattttcaacacgtacggaccgcgaatgtgcctcgatgatgggcgtgttgttagcaacttcgttgcccaggccatccgcaaaaacccaatgactgtttatggtgatggaaaacaaactcgaagctttcaatatgtttctgacttagtggatggacttgtagcattaatggaacatgatcacgtaggacctttcaatcttggtaacccaggagaattcacaatgcttgagcttgcagaggtggttaaggaggtgattgacccgagtgcgaccatagagttcaaaccaaacacagcggacgatccacacaagaggaaaccagacataagcaaggcaaaggagcttctgaactgggaaccaaagatctctctgcgtgatggtctccctcgtatggtgagtgacttccgtaaccgaatcttgaacgaagatgaaggcaaaggtctctaa

SEQ ID NO: 111054 - protein, 432 aa, Brassica napus
MKQLHKQMSSKRDDDTIPMSQSSPYSPKALKHPRSLPRSLHYLFREQRLLFILVGILIGSTFFILQPSLSRLAPAESTSLITRSVVDSSNYSPSKMSFNYGGGKTGRVPVGIGGRRLRIVVTGGAGFVGSHLVDKLIGRGDEVIVIDNFFTGRKENLVHLFSNPRFELIRHDVVEPILLEVDQIYHLACPASPVHYKFNPVKTIKTNVMGTLNMLGLAKRVGARFLLTSTSEVYGDPLEHPQKETYWGNVNPIGERSCYDEGKRTAQTLAMDYHRGAREEVRIARIFNTYGPRMCLDDGRVVSNFVAQAIRKNPMTVYGDGKQTRSFQYVSDLVDGLVALMEHDHVGPFNLGNPGEFTMLELAEVVKEVIDPSATIEFKPNTADDPHKRKPDISKAKELLNWEPKISLRDGLPRMVSDFRNRILNEDEGKGL

SEQ ID NO: 111055 - DNA, 1047 bp, Brassica napus
  CDS (1)..(1047)
atggtgaagaacgttctcgtcacaggcggcgctggctacatcggaagccacacggtgcttcaactgctcaacggtggatactccgccgtagtcgtcgacaatcacgacaattcatccgctgtttctctccaacgcgtcaaaaaactcgccggcgataacggaaaccgcctctccttccaccaggtggatctcagagacaggcctgcgcttgagaagattttctctgaaactaagtttgatgcagtgatacactttgctggacttaaagcagtaggtgagagtgtggagaagcctttgctctattataataataacctttttggcactgttatccttttggaggttatgtctcaattcggctgcaaaaatcttgtgttttcgtcatcagctactgtctatggctggccaaaagaggttccttgcaccgaggagtccccaatttctgcaaccaacccttatggccgtaccaagctttttatcgaggaaatttgccgggatgtacatcgctccgaccctgaatggaagatcatattgcttagatacttcaaccctgttggtgcacatcctagtggttacattggtgaagatcctcttggggttccaaacaacctcatgccttatgtccaacaagttgcagttggccggagacctcacctcaccgtctttggaactgactataacacaaaggatggcacaggggtgagagattacattcatgtgattgacttagcagatggacatatagccgctctgcgcaagctggatgatctcaaaatcagttgtgaggtatacaatcttggaacgggtaatggaacatcagttctagaaatggttgctgcctttgagaaggcatccggaaagaaaatccctttggtgttggctggacgacgtcctggagacgctgagattgtttacgcctcaaccgagaaagcagaacgcgagctaaactggaaggctaagtatgggattgaagacatgtgtagggatctatggaactgggccagcaataatccttacggctacgcctcctccaatggctcctcttaa

SEQ ID NO: 111056 - protein, 348 aa, Brassica napus
MVKNVLVTGGAGYIGSHTVLQLLNGGYSAVVVDNHDNSSAVSLQRVKKLAGDNGNRLSFHQVDLRDRPALEKIFSETKFDAVIHFAGLKAVGESVEKPLLYYNNNLFGTVILLEVMSQFGCKNLVFSSSATVYGWPKEVPCTEESPISATNPYGRTKLFIEEICRDVHRSDPEWKIILLRYFNPVGAHPSGYIGEDPLGVPNNLMPYVQQVAVGRRPHLTVFGTDYNTKDGTGVRDYIHVIDLADGHIAALRKLDDLKISCEVYNLGTGNGTSVLEMVAAFEKASGKKIPLVLAGRRPGDAEIVYASTEKAERELNWKAKYGIEDMCRDLWNWASNNPYGYASSNGSS

SEQ ID NO: 111057 - DNA, 1293 bp, Brassica napus
  CDS (1)..(1293)
atgaagcatctggatgaaactccgtcgacgccgggcaagttcaagatggataaatctccatacttccttcaccgcacgcggtggcaatcatcggtggcaaagctggccttctggtctctggtcttcgtcggcttcatcttcatcttcttctaccgatctccctcctcccttcccgatccatctcgccgctcccttcgcacctactcctggggaggccccgcttgggagaagcgtgtcagatcctccgcccatgtccgcacccgccgcggtgtctctgttctcgtcaccggcgccgccggattcgtgggcacccatgtctcggcggccttgaaaagacgcggggacggcgttctggggctggacaacttcaacgattactacgatccgtcgctcaagagagcgaggcaagccctcctggagcggagcggggtgttcgtggtggaaggagacatcaacgacgcggcgctcctcaagaagctcttcgaggtcgtccctttcacccacgttatgcatttggccgctcaagccggcgtcaggtacgccatggaaaaccccagctcctacgttcacagcaacatcgctggcttcgtcaatctcctcgaggtctgtaaatctgctaacccccagcctgccatcgtctgggcctcctctagctccgtctacggattgaacaccaaagtccctttctccgagaaagaccgcaccgaccaacctgctagcctctacgctgctactaagaaagccggcgaagagattgctcacacttacaaccacatctatggcctctctctcaccggtttgcgcttcttcacggtctacggcccctggggaagacctgacatggcctacttcttcttcaccagagacattctcaagggcaaagccatttctgtcttccaaggcgccaaccacggcactgtcgctcgggacttcacctacatcgatgacattgtcaagggctgtttgggggctttggacaccgccgagaagagcactgggagtggtggcaagaagcgtggtgccgctcagttgagggttttcaatctcggaaacacctccccggttccagtgactgatctggtgactattctcgagaggttgttgaaagtcaaggcaaagaggaacattgtgaagatgcctaggaatggcgatgtgcccttcactcatgctaacatcagttccgcgcaaagagagctcggttacaagcccaccaccgatcttcagactggtcttaagaagtttgccagatggtatttgggttactacaatggcggaaagaaagctgcaagctga

SEQ ID NO: 111058 - protein, 430 aa, Brassica napus
MKHLDETPSTPGKFKMDKSPYFLHRTRWQSSVAKLAFWSLVFVGFIFIFFYRSPSSLPDPSRRSLRTYSWGGPAWEKRVRSSAHVRTRRGVSVLVTGAAGFVGTHVSAALKRRGDGVLGLDNFNDYYDPSLKRARQALLERSGVFVVEGDINDAALLKKLFEVVPFTHVMHLAAQAGVRYAMENPSSYVHSNIAGFVNLLEVCKSANPQPAIVWASSSSVYGLNTKVPFSEKDRTDQPASLYAATKKAGEEIAHTYNHIYGLSLTGLRFFTVYGPWGRPDMAYFFFTRDILKGKAISVFQGANHGTVARDFTYIDDIVKGCLGALDTAEKSTGSGGKKRGAAQLRVFNLGNTSPVPVTDLVTILERLLKVKAKRNIVKMPRNGDVPFTHANISSAQRELGYKPTTDLQTGLKKFARWYLGYYNGGKKAAS

SEQ ID NO: 111059 - DNA, 1272 bp, Brassica napus
  CDS (1)..(1272)
atgttcaattttactcgagcaagaagccaagcgaggcaaaacagatctctctctcttggaggactggattacgcagaccccaagaagaaaaacaattactttggaaagtttcttttgaccgcttctctcacagccttgtgcattttcatgcttaagcaatctccaaccttcaatactcccagtgtgttttctatacatgagccaggggttactcatgtcctagtcactggtggtgctgggtatattggttcacatgcagctcttaggcttcttaaggaatcctaccgagtcaccattgtggacaatctatcacgtgggaacctcggtgcagtcaaggttttgcaagaactgtttccggaacctggaaggcttcagtttatttatgctgatcttggagatgcaaaggctgtcaacaagatattctctgagaacgcctttgacgctgtcatgcatttcgcagctgttgcatacgttggagaaagcacacagttccctctcaagtattaccacaacatcacatcaaacacactggtggtgttagagacaatggctgctcatggagtaaagactttgatatattcaagcacatgcgcaacgtatggagagcctgagaagatgccaataacagaggaaactcctcaggtgccaattaatccatatggaaaggctaagaaaatggcagaagacatcatcttggacttctccaaaaactcaaacatggcggtcatgatcctaagatatttcaatgtgattgggtctgatccagagggaagactgggtgaagcaccaagaccagaactcagagagcatggaagaatctccggtgcttgctttgatgctgcacgtggcatcatgcccggtctacagatcaaaggaacagactacaaaacccccgatggaacttgtgtacgggactacatagatgtcacagacctggttgatgctcatgttaaagctcttgaaaaggcgacacctagcagagttggaatctttaatgttggtaccgggaaaggtagctcggtgaaggagtttgtggaagcgtgcaagaaggcgacaggggttgatataaaggtcgattacttggagagacgagcaggagattacgcagaggtttacagcgatccaagaaagattaaagaggagctgaactggacagctaagcacacaaatcttaaagagagtttggagactgcatggagatggcaaaagcttcaccgcaatggctatgaatcttcttctttttcttctacctccttgttctctgcttactga

SEQ ID NO: 111060 - protein, 423 aa, Brassica napus
MFNFTRARSQARQNRSLSLGGLDYADPKKKNNYFGKFLLTASLTALCIFMLKQSPTFNTPSVFSIHEPGVTHVLVTGGAGYIGSHAALRLLKESYRVTIVDNLSRGNLGAVKVLQELFPEPGRLQFIYADLGDAKAVNKIFSENAFDAVMHFAAVAYVGESTQFPLKYYHNITSNTLVVLETMAAHGVKTLIYSSTCATYGEPEKMPITEETPQVPINPYGKAKKMAEDIILDFSKNSNMAVMILRYFNVIGSDPEGRLGEAPRPELREHGRISGACFDAARGIMPGLQIKGTDYKTPDGTCVRDYIDVTDLVDAHVKALEKATPSRVGIFNVGTGKGSSVKEFVEACKKATGVDIKVDYLERRAGDYAEVYSDPRKIKEELNWTAKHTNLKESLETAWRWQKLHRNGYESSSFSSTSLFSAY

SEQ ID NO: 111061 - DNA, 1038 bp, Brassica napus
  CDS (1)..(1038)
atggtgaagaatattctggttaccggcggtgctggttacatcggaagtcacgcggtgcttcagcttcttctccggggttatacagctgtcgtaatcgacaacctggacaattcatctttggtttcgatccaacgcgtcaaggagctcgccggagatcgtggagataatctcacattccaccaggtggacctttgcgataaacccgcgcttgagagacttttctcccaatccaagtttgatgcagtgatgcattttgctggattgaaagcagtgggggagagcgtagccaaaccgcttctctattataacaacaacttgattggcactatcactctcttggaagtcatggccgcacacggttgtaaaaaacttgtattttcatcgtcggctactgtgtatggctggccaaaggaggttccttgtactgaagagtcccccctctccggaatgagcccttacgctagaactaagctcttcattgaggacatatgccgtgatgtacaacgtggtgatcctgaatggagaatcattatgctcagatactttaaccctgtcggtgctcaccctagcggtcgcattggtgaggatccttgtggcactcccaataacctcatgccttatgtccagcaagtcgttgttggcaggcttcctaacctcaagatttatggaaccgactataccactaaagacggcaccggtgtacgagactatattcatgttgttgatctagcagatggccatatatctgcgcttcaaaagctagaagattctgaaataggttgcgaggtatacaacctaggaaccggaaaaggaacaacggtgttggagatggttgatgcatttgaaaaagcttcgggaatgaaaatcccagtggtgaaggttggaagaagaccaggtgatgcagagacggtgtacgcatcaaccgaaaaagctgaacatgaacttaactggaagccaaagtatggaatagacgagatgtgtagggaccaatggaactgggcaagcaataatcctctcggttacggttcttcaccataa

SEQ ID NO: 111062 - protein, 345 aa, Brassica napus
MVKNILVTGGAGYIGSHAVLQLLLRGYTAVVIDNLDNSSLVSIQRVKELAGDRGDNLTFHQVDLCDKPALERLFSQSKFDAVMHFAGLKAVGESVAKPLLYYNNNLIGTITLLEVMAAHGCKKLVFSSSATVYGWPKEVPCTEESPLSGMSPYARTKLFIEDICRDVQRGDPEWRIIMLRYFNPVGAHPSGRIGEDPCGTPNNLMPYVQQVVVGRLPNLKIYGTDYTTKDGTGVRDYIHVVDLADGHISALQKLEDSEIGCEVYNLGTGKGTTVLEMVDAFEKASGMKIPVVKVGRRPGDAETVYASTEKAEHELNWKPKYGIDEMCRDQWNWASNNPLGYGSSP

SEQ ID NO: 111063 - DNA, 1371 bp, Brassica napus
  CDS (1)..(1371)
atgcccccatcggcgacggcggcggatacaagcaagacggtgaagctggagaggtacaacagctacctccgcaagattcacagcaccaaagtcctcaacgcctcttccaaagtcctcttccgagcaacactcctcgtcgctctcgtcctcctcctcctcttcgcattcaactaccacccactctccgacagccgcgccgccgcatcgcaccacctccaccgacgcagcttcttatccaccggaatcttctcctcctcctcatcctcctccgcttgggagaagcgcgtgaggcaatcctcgacagcaaaacgacagcacggtctctccgtcctagtcaccggagcagccgggttcgtcgggtcccactgctccatcgccctaagaaaacgcggcgacggagtcttagggttcgacaacttcaacgactactacgacacgtcactcaaaagagcaagacaaaacctcttagagaagcaacaagtgttcatcgtcgaaggcgacctcaacgacggccccctcttgcgcaagctcttcgacatcgtccctttcactcacgtcctccacttagcagctcaagccggagttcgctacgccatgaagaaccctcagtcctacatcagctcgaacatcgccggcctcgtgaacctcctcgaagtagccaaagcggctaaccctcagcccgcgatcgtatgggcctcgtcgagctccgtgtacgggctcaacaccgagaaccccttctccgaagagcacaggacggaccagcccgcgagtctttacgcggccacgaagaaagcaggggaggagatagcgcatacttacaatcacatctacggtctttcgttaaccggactccggttctttacggtttacggtccttggggaagaccggacatggcttacttcttcttcactaaagccatactccacgggaagtcgatagacatttaccgaactcaggacaatcaagaagtggcgcgtgacttcacctacatcgacgatatcgttaagggatgtgtcggtgcgttagacacggcggagaaaagcaccggaagcggcgggaagaagcgagggccggctcagttacgtgtttataacctcgggaacacttctccggttcctgtcgggagattggtttcgatattggaagggttgttagggacgaaagcgaagaagcatctgatcaaaatgcctagaaacggtgacgtgccatacacgcatgcgaatgtgagcttagcgtatagagactttgggtataaaccaacgacggatctcgcgacggggttgaggaagttcgtcaagtggtacgttggttattatgggattcagccgagggtaaaaaaggaaaactctcacgccgatgattccgcttaa

SEQ ID NO: 111064 - protein, 456 aa, Brassica napus
MPPSATAADTSKTVKLERYNSYLRKIHSTKVLNASSKVLFRATLLVALVLLLLFAFNYHPLSDSRAAASHHLHRRSFLSTGIFSSSSSSSAWEKRVRQSSTAKRQHGLSVLVTGAAGFVGSHCSIALRKRGDGVLGFDNFNDYYDTSLKRARQNLLEKQQVFIVEGDLNDGPLLRKLFDIVPFTHVLHLAAQAGVRYAMKNPQSYISSNIAGLVNLLEVAKAANPQPAIVWASSSSVYGLNTENPFSEEHRTDQPASLYAATKKAGEEIAHTYNHIYGLSLTGLRFFTVYGPWGRPDMAYFFFTKAILHGKSIDIYRTQDNQEVARDFTYIDDIVKGCVGALDTAEKSTGSGGKKRGPAQLRVYNLGNTSPVPVGRLVSILEGLLGTKAKKHLIKMPRNGDVPYTHANVSLAYRDFGYKPTTDLATGLRKFVKWYVGYYGIQPRVKKENSHADDSA

SEQ ID NO: 111065 - DNA, 1026 bp, Brassica napus
  CDS (1)..(1026)
atggcgacaagtgagaaacaaagcagcccaaagcccccaccttcgccttcacctctccgcaattccaagttttttcagtcgaatatgaggatattgatctcaggaggagctggattcattggatctcaccttgttgataagctgatggaaaacgagaagaatgaggtgattgttgctgataactacttcactggttccaaggacaacctcaagaaatggatcggtcatcctagatttgagctcatccgtcatgatgtcacggagccactgttgatcgaggttgatcagatttaccatctcgcatgtcccgcatctcccattttctacaagtacaatcccgtgaagaccatcaagaccaatgtgatcggcacacttaacatgctaggtcttgccaagcgtgttggcgcaagaatcttgcttacctctacctcggaggtgtatggagatcctctcatccatccccagcctgagagctattggggaaacgtcaacccaattggggttaggagctgttatgatgaaggcaagcgtgtagctgagactttaatgtttgactaccataggcaacatggaattgaaatccgcattgccagaatcttcaacacttatggtccacgcatgaacatagatgatgggcgtgtcgtaagcaacttcattgctcaagcacttaggggtgaggcattgactgttcagaaacctgggacacagacccgtagtttctgttatgtatctgacatggttgaggggctaatgcgcctcatggaaggagatgaaactggtcccatcaacatcggtaacccaggcgagtttacgatggtggaactagctgagacagtgaaggagctgataaacccgagcataaagataaagatggtggagaacacacccgatgatccaagacagaggaagccagatatcacaaaggctaaagaagtgttggggtgggaaccgaaggtgaagctccgtgaaggccttcctcttatggaagaagatttcaggcaaaggctcggagtccccaagaagtaa

SEQ ID NO: 111066 - protein, 341 aa, Brassica napus
MATSEKQSSPKPPPSPSPLRNSKFFQSNMRILISGGAGFIGSHLVDKLMENEKNEVIVADNYFTGSKDNLKKWIGHPRFELIRHDVTEPLLIEVDQIYHLACPASPIFYKYNPVKTIKTNVIGTLNMLGLAKRVGARILLTSTSEVYGDPLIHPQPESYWGNVNPIGVRSCYDEGKRVAETLMFDYHRQHGIEIRIARIFNTYGPRMNIDDGRVVSNFIAQALRGEALTVQKPGTQTRSFCYVSDMVEGLMRLMEGDETGPINIGNPGEFTMVELAETVKELINPSIKIKMVENTPDDPRQRKPDITKAKEVLGWEPKVKLREGLPLMEEDFRQRLGVPKK

SEQ ID NO: 111067 - DNA, 1029 bp, Brassica napus
  CDS (1)..(1029)
atggcggcgacaagtgagaaacagaacggatcaaaggctcctcctctgccttctcctctccgcaactccaagtttctccagtcgaatatgaggatcttgatctcgggaggagctggcttcatcgggtctcatttggttgataagctcatggaaaacgagaagaatgaggtcgttgttgctgataactatttcactggctctaaagaaaacctcaagaagtggatcggtcaccccaggttcgagcttattcgtcacgatgttacggagcctctgttgcttgaggttgataggatctaccatcttgcttgtcctgcctctcctatcttctacaagtacaaccccgtcaagacaatcaagaccaatgtgatgggtacaatgaacatgcttggtcttgccaagcgtgttggagcaaggattctgctcacctcaacctcggaagtgtatggagaccctctcatccaccctcaaccagagagctactggggaaatgtcaaccccattggtgttcggagttgttatgacgaaggcaagcgtgtagctgagactttgatgtttgactaccacaggcaacacggcattgaaatccgcattgctagaatcttcaacacgtatggtcctcggatgaacatcgatgacgggcgtgtggtgagcaacttcattgctcaagcactccgaggtgaggcgttgacggttcagaaaccggggacacagacacgcagtttctgctatgtctccgacatggttgatggacttatccgtctcatggaaggagatgatactggccctatcaacatcggtaacccaggtgaattcacaatggtggaactggctgagacggttaaggagctgattaacccgagcatagagataaagatggtggagaacacaccggacgatccaagacagaggaaaccagacataagcaaggccaaagaagtgttgggttgggagccaaaggtgaagctcagagaaggacttcctctcatggaagaagatttccgtctaaggcttaacgtccccaaaaactga

SEQ ID NO: 111068 - protein, 342 aa, Brassica napus
MAATSEKQNGSKAPPLPSPLRNSKFLQSNMRILISGGAGFIGSHLVDKLMENEKNEVVVADNYFTGSKENLKKWIGHPRFELIRHDVTEPLLLEVDRIYHLACPASPIFYKYNPVKTIKTNVMGTMNMLGLAKRVGARILLTSTSEVYGDPLIHPQPESYWGNVNPIGVRSCYDEGKRVAETLMFDYHRQHGIEIRIARIFNTYGPRMNIDDGRVVSNFIAQALRGEALTVQKPGTQTRSFCYVSDMVDGLIRLMEGDDTGPINIGNPGEFTMVELAETVKELINPSIEIKMVENTPDDPRQRKPDISKAKEVLGWEPKVKLREGLPLMEEDFRLRLNVPKN

SEQ ID NO: 111069 - DNA, 1056 bp, Brassica napus
  CDS (1)..(1056)
atgggttcgtctgtggagcagaacattctcgttaccggcggtgctggattcatcgggacgcataccgtcgtccagcttctcaaagaggggtttaaggtctcgatcatcgataatcttgataactctgttatcgaagccgttgatcgggttagggagctcgttggtcctgatctctccaagaagctcgagttcactcagggtgatctaaggaacaaaggggacattgagaaactcttctccaaacagaggtttgatgctgtgatccatttcgcgggtctcaaagctgtgggtgaaagcgttggcaaccctcgccgctactttgacaataacttggttggaactatcaatctctacgagaccatggcaaagcacaactgcaaaatgatggtgttttcatcgtctgcaactgtctacggacaacctgagaagattccatgcatggaggactttgagttaaaagctatgaacccttatggtcgcacaaagctctttcttgaggagatagctagagacatccaggcggcggagccagagtggaggattgtgctgctgaggtacttcaaccctgtgggtgcacacgagagtggaagaattggcgaggatccaaagggtatccctaataacctcatgccttacatacagcaagtagctgttggacgcttgcctgaactcaatgtctatggacatgactatcctaccgaggatggtagtgcggtgagggactacatccatgtgatggatttggctgatggacatatcgctgcgctaaggaagctgtttgatgatccaaagataggctgtactgcttacaatctagggactggaagaggaacgtctgtgttagagatggttgctgcttttgaaaaagcttctggcaagaaaataccgatcaagctctgtccgagaaggccaggagatgcaacagcagtttatgcttcaacagagaaagctgagaaagaacttgggtggaaggcaaaatacggagtggatgagatgtgcagggatcaatggaattggacaaacaacaatccatggggctaccagaagaagctttga

SEQ ID NO: 111070 - protein, 351 aa, Brassica napus
MGSSVEQNILVTGGAGFIGTHTVVQLLKEGFKVSIIDNLDNSVIEAVDRVRELVGPDLSKKLEFTQGDLRNKGDIEKLFSKQRFDAVIHFAGLKAVGESVGNPRRYFDNNLVGTINLYETMAKHNCKMMVFSSSATVYGQPEKIPCMEDFELKAMNPYGRTKLFLEEIARDIQAAEPEWRIVLLRYFNPVGAHESGRIGEDPKGIPNNLMPYIQQVAVGRLPELNVYGHDYPTEDGSAVRDYIHVMDLADGHIAALRKLFDDPKIGCTAYNLGTGRGTSVLEMVAAFEKASGKKIPIKLCPRRPGDATAVYASTEKAEKELGWKAKYGVDEMCRDQWNWTNNNPWGYQKKL

SEQ ID NO: 111071 - DNA, 1053 bp, Zea mays
  CDS (1)..(1053)
atggcgcagaaggagactaatggcagcaacggcgatcacatctccacccgcccgccgccgaccccctcgcccctccgcttctccaagttctttcaggctaacctgcggatcctggtcactggtggggcgggcttcatcggctcgcacctcgtagacaagctcatggagaacgagaagcacgaggtcattgttgctgataactttttcactggttcaaaagacaacctgaagaagtggattggccacccaagatttgagctcatccgtcatgatgtcaccgagccgcttcttgtggaagttgaccaaatctatcaccttgcttgccctgcttcaccaatcttctacaagcacaaccctgttaagaccatcaagacaaatgttattggtaccctgaacatgctgggccttgcaaagagagttggagctaggattttgttgacatcaacatctgaagtttatggtgatccgcttgagcatcctcaaaccgaggcctactggggcaatgttaacccaattggagtcaggagctgttatgatgagggtaagcgtgtagcagagacgctgatgttcgactatcacaggcagcatggcattgaaatccgaattgccaggattttcaacacctatggaccaaggatgaacattgacgatggccgtgttgttagcaacttcattgctcaggctgtgcgtggcgaaccccttactgtccagaagccaggaacacagactaggagcttctgctatgtcgccgatatggttgatggtcttattaggctgatgaatggaaacaacactggaccgattaacttggggaacccaggtgaattcaccatgctggaacttgctgagaatgtgaaggagttgattaacccagatataacagtgacgatgaccgagaacactcctgatgatccccgccagaggaagccggacatcaccaaggcaaaggaagttctagggtgggagcccaagatcgtcctgaaggacggcttggtgctcatggaggatgatttccgggagcgcctggccgtgcccaagaaaaccaaggcctaa

SEQ ID NO: 111072 - protein, 350 aa, Zea mays
MAQKETNGSNGDHISTRPPPTPSPLRFSKFFQANLRILVTGGAGFIGSHLVDKLMENEKHEVIVADNFFTGSKDNLKKWIGHPRFELIRHDVTEPLLVEVDQIYHLACPASPIFYKHNPVKTIKTNVIGTLNMLGLAKRVGARILLTSTSEVYGDPLEHPQTEAYWGNVNPIGVRSCYDEGKRVAETLMFDYHRQHGIEIRIARIFNTYGPRMNIDDGRVVSNFIAQAVRGEPLTVQKPGTQTRSFCYVADMVDGLIRLMNGNNTGPINLGNPGEFTMLELAENVKELINPDITVTMTENTPDDPRQRKPDITKAKEVLGWEPKIVLKDGLVLMEDDFRERLAVPKKTKA

SEQ ID NO: 111073 - DNA, 1029 bp, Glycine max
  CDS (1)..(1029)
atggcaacgaattcttctaatggagcaacaaagcaacctcccatgccatctcccttgcgtttttccaagttctttcagtccaatatgagaattctggttactggaggagctggatttattggctctcacctagttgacaaattgatggaaaatgaaaaaaatgaggtcattgttgctgacaactacttcactggatctaaagacaaccttaaaagatggattggccatccaagatttgagctaattcgtcatgatgtcacagagcaattgttgattgaggttgatcaaatctatcatcttgcatgccctgcttctccaatcttctacaaatacaaccctgtaaagacaataaagacaaatgtgattggaacactgaacatgcttgggcttgctaagcgtgtgggagcaaggattttgcttacatctacttcagaagtatatggggaccctcttgtgcatccacaaccagaaagctattggggcaatgtaaaccccattggagttcggagttgttatgatgagggcaagcgtgttgcagaaactttgatgtttgattatcataggcagcatggaatcgaaatacgcattgcgagaatctttaacacatatggaccacgcatgaatattgatgatgggcgtgttgtcagtaacttcatcgctcaagcaattcgtggtgaacccttaactgtccaagttccaggaactcaaactcgcagtttttgctatgtctctgacatggttgatggacttatacgtctaatggaaggggaaaacactggtccaatcaacattgggaacccaggtgaatttacaatgattgaacttgccgagaatgtgaaagagcttatcaatccaaaagtgcagataaatatggttgagaacactcctgacgatcctcgtcagagaaaaccagacattacaaaagcaaaggaattgctgagatgggaaccaaaggtcaagttgtatgatggccttcctctcatggaagaggatttccgtcagaggcttggagttcccaagagcaactaa

SEQ ID NO: 111074 - protein, 342 aa, Glycine max
MATNSSNGATKQPPMPSPLRFSKFFQSNMRILVTGGAGFIGSHLVDKLMENEKNEVIVADNYFTGSKDNLKRWIGHPRFELIRHDVTEQLLIEVDQIYHLACPASPIFYKYNPVKTIKTNVIGTLNMLGLAKRVGARILLTSTSEVYGDPLVHPQPESYWGNVNPIGVRSCYDEGKRVAETLMFDYHRQHGIEIRIARIFNTYGPRMNIDDGRVVSNFIAQAIRGEPLTVQVPGTQTRSFCYVSDMVDGLIRLMEGENTGPINIGNPGEFTMIELAENVKELINPKVQINMVENTPDDPRQRKPDITKAKELLRWEPKVKLYDGLPLMEEDFRQRLGVPKSN

SEQ ID NO: 111075 - DNA, 1347 bp, Glycine max
  CDS (1)..(1347)
atgggttcttcttctcctccggacactagcaagagcataaagctagagcgatacaacagctacatcaggagactcaacagcaccaaactcctcaacgcctcctccaaactcctcttccgtgccactatcttagtcgcactcatcctcgtcttcctcttcaccttcaactaccctcccctcgccccagacttcacctcccaccgccacctccactcccactcccacttcctctcctcctcctcctccttcgcctcctgggagaagcaggtccgccactcctccacccctcgccgccccaacggcctcaccgtcctcgtcaccggcgccgctggcttcgtcggcagccactgctcccttgccctcaaaaaacgcggcgacggcgttctcgggctcgacaacttcaacagctactacgatccctccctgaaacgctcccgtcaggcaatgctctggaaacaccaggttttcatcgtggaaggtgaccttaacgacacccccttgcttgagaagctcttcgacgttgtccccttcacccacatcctccacctcgccgctcaggctggcgtccgctacgccatgcagaacccccaatcctacgtcaccgccaacattgctggcttcgtcaacctcctcgaggctgccaaatccgccaatccccaacccgccatagtctgggcttcatccagctccgtctacggcctcaacacccaaaaccctttctccgagctccaccgcaccgaccaacccgccagcctctacgccgccaccaagaaagccggcgaggagatcgcccacacctacaaccacatctacggcctctccctcaccggactccgcttcttcaccgtctacggcccctgggggagacccgacatggcttactttttcttcaccaaggacatcctccaagggaaaaccatcgacgtgtaccagacgcaggaggggaagcaggtggcccgtgacttcacctacatcgacgacatcgttaaaggctgcctgggagccctggacaccgcccagaagagcaccgggagcggcggcaagaagaagggccccgcccagctcagagtatacaatctggggaacacttcaccggtgccggttgggaccttggtgtccattctggaaggtctgctaagcaccaaggccaagaagcacgtcattaagatgccatcaaacggcgacgttcccttcacacacgccaatgtcagcttggcctacagggatttctcttacaatcccaccaccgatctcgccaccggtctcaggaagttcgtcaagtggtacctcggttattacggcctccagcaaaggctaaaaaaggaatatcaccttgacaatgaataa

SEQ ID NO: 111076 - protein, 448 aa, Glycine max
MGSSSPPDTSKSIKLERYNSYIRRLNSTKLLNASSKLLFRATILVALILVFLFTFNYPPLAPDFTSHRHLHSHSHFLSSSSSFASWEKQVRHSSTPRRPNGLTVLVTGAAGFVGSHCSLALKKRGDGVLGLDNFNSYYDPSLKRSRQAMLWKHQVFIVEGDLNDTPLLEKLFDVVPFTHILHLAAQAGVRYAMQNPQSYVTANIAGFVNLLEAAKSANPQPAIVWASSSSVYGLNTQNPFSELHRTDQPASLYAATKKAGEEIAHTYNHIYGLSLTGLRFFTVYGPWGRPDMAYFFFTKDILQGKTIDVYQTQEGKQVARDFTYIDDIVKGCLGALDTAQKSTGSGGKKKGPAQLRVYNLGNTSPVPVGTLVSILEGLLSTKAKKHVIKMPSNGDVPFTHANVSLAYRDFSYNPTTDLATGLRKFVKWYLGYYGLQQRLKKEYHLDNE

SEQ ID NO: 111077 - DNA, 1296 bp, Glycine max
  CDS (1)..(1296)
atgccgtcattagaggaggaactcttcccatcaaccccaggaaagttcaagatcgagcggtcccaccacatgaaccgccaactctatcgctgtttcgcctccaccagcaccatgttcctgtgggccctcttcttaatcgccctcaccgcttcctatctcagcttccaaggcttcgtcgattccggcagccgctacctcaccgcctcctggggcgggatccagtgggagaagcaggtccgcacctccgcccagatccaccgtcaaggcggcatgtccgtcctcgtcaccggcgcagccggcttcgtcggctcccacgtctccctcgccttaaaacgacgcggagacggcgtcgtcggactcgacaacttcaacgactactacgatccgtccctcaaaaaagcccgcaagtccctcctcgccacgcacgacgtcttcatcgtcgaaggcgatgtcaacgacgcgaaactcttggcgaagctcttcgatgtggttgctttcactcacgtgatgcacctcgcggcgcaggctggggttcgctacgccatggagaatccccactcgtacgtccacagcaacatcgcgggcctcgtcacgcttctcgaggcctgcaaaaccgcgaaccctcagcccgctatcgtctgggcctcgtccagctccgtctacgggctcaacgagaaggttcccttttccgaatcggaccagaccgaccagcccgctagtctctacgccgcaacgaaaaaggccggtgaggaaatcactcacacctacaatcacatctacggtttatccatcaccggtttgagattcttcaccgtgtacggaccctgggggagacccgacatggcttatttctctttcaccaggaacatcttacaagggaaacctattaccgtttaccgcggtaaaaaccatgtcgacctggctagggatttcacctacattgatgatattgtgaagggttgcgtcgggtcgttggatacttcggctaagagtaccgggtcgggtgggaagaagcgtggacccgctccgtatagaatatttaacctggggaatacttcgccggttactgttcctactcttgtgagtatattggagcggcatttgaaggtgaaggcgaagaggaatattgtggacatgcctggaaacggtgacgttccgtttactcacgcgaatattagttcggcccggagagagctcgggtacaagcccacgaccgatttgcaaaccgggttgaagaagttcgtcaagtggtatctttcctattacggctacaatcacggcaaacctgtaaattaa

SEQ ID NO: 111078 - protein, 431 aa, Glycine max
MPSLEEELFPSTPGKFKIERSHHMNRQLYRCFASTSTMFLWALFLIALTASYLSFQGFVDSGSRYLTASWGGIQWEKQVRTSAQIHRQGGMSVLVTGAAGFVGSHVSLALKRRGDGVVGLDNFNDYYDPSLKKARKSLLATHDVFIVEGDVNDAKLLAKLFDVVAFTHVMHLAAQAGVRYAMENPHSYVHSNIAGLVTLLEACKTANPQPAIVWASSSSVYGLNEKVPFSESDQTDQPASLYAATKKAGEEITHTYNHIYGLSITGLRFFTVYGPWGRPDMAYFSFTRNILQGKPITVYRGKNHVDLARDFTYIDDIVKGCVGSLDTSAKSTGSGGKKRGPAPYRIFNLGNTSPVTVPTLVSILERHLKVKAKRNIVDMPGNGDVPFTHANISSARRELGYKPTTDLQTGLKKFVKWYLSYYGYNHGKPVN

SEQ ID NO: 111079 - DNA, 1053 bp, Glycine max
  CDS (1)..(1053)
atggtgtcttcctcccaacacattctggtcaccggtggtgccggtttcattggcacccacaccgtcgttcagcttctcaaagctggcttcagcgtttcaataatcgacaatttcgataactccgtcatggaagcagtggaccgcgtccgccaagtggttggccctctgctttctcagaacctccaattcacccagggcgatctccggaatagggatgacttggagaaactcttctccaaaacaacatttgatgccgtgatccactttgctggcttgaaagcggttgctgaaagcgttgcgaagccccgtcgctattttgattttaatttggttggcaccatcaacctctacgaatttatggcaaagtataattgcaaaaagatggttttctcatcatctgcaaccgtttatggccaacctgaaaagataccgtgtgaggaggatttcaagttacaagctatgaatccctatggacggaccaagcttttcctggaagaaattgcccgagatattcagaaagctgaaccagaatggaagatcatattactgagatacttcaatccagttggggctcatgaaagtggcaaactcggtgaagatcccaagggcatcccaaataacctcatgccttacattcagcaagtagctgttggaagattgactgaactcaatgtatacggtcatgattatccaacgagggatggctctgcgatccgggactatatccatgtgatggacttggcagatggccatattgctgccctgcgaaagctcttcacaacggagaacataggttgtactgcttacaacctgggaactggtcgtggaacatctgtgcttgaaatggttacagcatttgaaaaggcttctggcaagaaaattccagtaaaattatgtccaagaagaccgggagatgcgactgaggtttatgcatctacagagagagctgagaaagaacttggttggaaggcaaactatggtgtggaggagatgtgcagggaccaatggaattgggcaaagaacaatccctggggttacgcggggaagccttga

SEQ ID NO: 111080 - protein, 350 aa, Glycine max
MVSSSQHILVTGGAGFIGTHTVVQLLKAGFSVSIIDNFDNSVMEAVDRVRQVVGPLLSQNLQFTQGDLRNRDDLEKLFSKTTFDAVIHFAGLKAVAESVAKPRRYFDFNLVGTINLYEFMAKYNCKKMVFSSSATVYGQPEKIPCEEDFKLQAMNPYGRTKLFLEEIARDIQKAEPEWKIILLRYFNPVGAHESGKLGEDPKGIPNNLMPYIQQVAVGRLTELNVYGHDYPTRDGSAIRDYIHVMDLADGHIAALRKLFTTENIGCTAYNLGTGRGTSVLEMVTAFEKASGKKIPVKLCPRRPGDATEVYASTERAEKELGWKANYGVEEMCRDQWNWAKNNPWGYAGKP

SEQ ID NO: 111081 - DNA, 2013 bp, Glycine max
  CDS (1)..(2013)
atggccaacacctacaagccaaagaacattctcataacaggagcagcaggcttcattgcatcccatgtatgcaacaggatagtgcgaaactaccctgactacaaaatcatagtccttgacaagctcgattactgctcaaatctgaagaatctcattccctcgcgttcatctccgaatttcaagttcatcaagggagacattggaagtgctgatttagtaaactacatcctcctcacagagtccattgacaccatcatgcactttgcagcacaaacccatgtagacaattcctttggcaacagttttgagttcaccaagaacaacatctatggcacacatgtgctcctagaggcttgcaaggtctcaaagggtcaagtgaagaggttcattcatgtgagcactgatgaggtctatggtgagacagatgaggatgctgtggttggaaaccatgaggcttctcaattactacccacaaacccatactctgcaacaaaagctggggcagaaatgcttgtcatggcatatggcagagcgtatgggttacccgggaacacgacgagagggaacaatgtttatgggcccaatcagttccctgagaagttaattccaaagttcattctcctggctatgcaaggcaagcctcttccaatccacggggatggttctaatgtgaggagttatttgtattgtgaagatgttgcagaagcttttgaacttatccttcacaagggagaggtcgggcatgtttacaatattggtactaagaaggaaaggagggttattgatgttgccaaagatatgtgcaggctttttaagatggacccagagactagtataaaatttgtggagaacagaccatttaatgaccagagatactttcttgatgatgaaaagctgaaaatcttgggttggtctgagaggaccacttgggaagagggcttgaagaaaaccatggactggtatatcaacaatcctgattggtggggtgatgtcagtggtgcattgcttccccatccaaggatgctgatgatgcccggtggactggagagacattttgatggatctgacgaagaaaaacctccatcgtatgtctcaactaatactcgaatggtggttccgacatccaagaatgttaactcctcacagaaacatcctctcaagttcttgatctatggtagaacagggtggattgggggtttgctggggaaattgtgtgaaaaacaagaaattccctacgaatatggaaaaggacgactagaggaccgctcctcactcgtggctgatcttcagaatgtgaagccaacacacatttttaatgctgcaggagtgactggcagacccaatgttgattggtgtgaatcccataaaacagaaaccatccgcaccaatgttgttggcaccttaacaatggctgatgtctgcagagagcatgggatcttgatggttaattatgctactgggtgcatatttgagtataatgcaacacatcctgaaggctctggcattggttttaaggaggaagacaagcccaatttcattggctctttctattccaaaactaaagctatggttgaggagctcttgagagaatatgacaatgtatgcacactcagggttcgcatgccaatttcatctgacctgagcaacccacgcaacttcataacgaagatttctcgttataacaaagtagtcaacattccaaacagtatgactattttggatgaacttctgcctatctcaattgagatggcaaagaggaacttgaggggaatctggaacttcacaaatccaggggttgtgagccacaatgagatccttgagatgtacagggattacattgaccccaacttcaagtgggctaacttcacccttgaagagcaagcgaaggtgatcgttgctcctcgaagcaacaacgagatggatgcatccaaattgaagacggaattcccagaattgctttccatcaaggaatcactcatcaaatatgtctttgagccaaacaagaaaacataa

SEQ ID NO: 111082 - protein, 670 aa, Glycine max
MANTYKPKNILITGAAGFIASHVCNRIVRNYPDYKIIVLDKLDYCSNLKNLIPSRSSPNFKFIKGDIGSADLVNYILLTESIDTIMHFAAQTHVDNSFGNSFEFTKNNIYGTHVLLEACKVSKGQVKRFIHVSTDEVYGETDEDAVVGNHEASQLLPTNPYSATKAGAEMLVMAYGRAYGLPGNTTRGNNVYGPNQFPEKLIPKFILLAMQGKPLPIHGDGSNVRSYLYCEDVAEAFELILHKGEVGHVYNIGTKKERRVIDVAKDMCRLFKMDPETSIKFVENRPFNDQRYFLDDEKLKILGWSERTTWEEGLKKTMDWYINNPDWWGDVSGALLPHPRMLMMPGGLERHFDGSDEEKPPSYVSTNTRMVVPTSKNVNSSQKHPLKFLIYGRTGWIGGLLGKLCEKQEIPYEYGKGRLEDRSSLVADLQNVKPTHIFNAAGVTGRPNVDWCESHKTETIRTNVVGTLTMADVCREHGILMVNYATGCIFEYNATHPEGSGIGFKEEDKPNFIGSFYSKTKAMVEELLREYDNVCTLRVRMPISSDLSNPRNFITKISRYNKVVNIPNSMTILDELLPISIEMAKRNLRGIWNFTNPGVVSHNEILEMYRDYIDPNFKWANFTLEEQAKVIVAPRSNNEMDASKLKTEFPELLSIKESLIKYVFEPNKKT

SEQ ID NO: 111083 - DNA, 1029 bp, Glycine max
  CDS (1)..(1029)
atggcaacgaattcttctaatggagcaacaaagcaacctcccatgccatctcccttgcggttttccaagttctttcagtccaatatgagaattctggttactggaggagctggatttattggctctcacctagttgacaaattgatggaaaatgaaaaaaatgaggtcattgttgctgacaacttcttcactggatctaaagacaaccttaaaaaatggattggccatccaagattcgagctaattcgtcatgatgtcacagagcaattgttgattgaggttgatcaaatctatcatcttgcatgcccagcttctccaattttctacaaatacaaccctgtaaagacaataaagacaaatgtgattggaacactgaacatgcttggtcttgctaagcgtgtgggagcaaggattttgcttacatctacttcagaagtatatggggaccctcttgagcatccacaaccagaaagctattggggcaatgtgaatcctattggagttcggagttgttatgatgaggggaaacgtgttgcagaaactttgatgtttgattatcataggcagcatggaatagaaatacgtgttgcaagaatctttaacacatatgggccgcgcatgaatattgatgatggacgtgttgtcagcaacttcattgctcaagcaattcgtggtgaacccttgacagtccagtctccaggaacacaaactcgcagtttctgctatgtctctgatctggttgatggacttatccgtctcatggaaggatccgacactggaccaatcaaccttggaaatccaggtgaatttacaatgctagaacttgctgagacagtgaaggagcttattaatccagatgtggagataaaggtagtggagaacactcctgatgatccgcgacagagaaaaccaatcataacaaaagcaatggaattgcttggctgggaaccaaaggttaagctgcgagatgggcttcctcttatggaagaggattttcgtttgaggcttggatttgacaaaaaaaattaa

SEQ ID NO: 111084 - protein, 342 aa, Glycine max
MATNSSNGATKQPPMPSPLRFSKFFQSNMRILVTGGAGFIGSHLVDKLMENEKNEVIVADNFFTGSKDNLKKWIGHPRFELIRHDVTEQLLIEVDQIYHLACPASPIFYKYNPVKTIKTNVIGTLNMLGLAKRVGARILLTSTSEVYGDPLEHPQPESYWGNVNPIGVRSCYDEGKRVAETLMFDYHRQHGIEIRVARIFNTYGPRMNIDDGRVVSNFIAQAIRGEPLTVQSPGTQTRSFCYVSDLVDGLIRLMEGSDTGPINLGNPGEFTMLELAETVKELINPDVEIKVVENTPDDPRQRKPIITKAMELLGWEPKVKLRDGLPLMEEDFRLRLGFDKKN

SEQ ID NO: 111085 - DNA, 1026 bp, Glycine max
  CDS (1)..(1026)
atggcagggaattcttctgatgtactgtcgccgaagcaacctcccttgccatctcccttgcgtttctccaaattctttcagtctaacatgagaattttgattacgggaggagctggattcattggttctcacctagtcgatagattgatggaaaatgaaaaaaatgaggtcattgttgctgataactacttcactggatcaaaggacaacctcaaaaaatggattggtcatccaagattcgagcttattcgtcatgatgtcactgaacctttgacgattgaggttgatcagatctaccatcttgcgtgccctgcatctcctattttctacaaatataatcccgtgaagacaataaagacaaatgtgattggcacactgaacatgcttgggcttgcaaaacgagttggggcaaggattttactcacatcaacatctgaggtatatggggatcctcttgtgcatccccaacctgaaggctattggggcaatgtgaaccctattggagttcgtagttgctatgatgaggggaaacgtgtggctgaaactttgatgtttgattatcataggcagcatggaatagaaatacgtgttgcaagaatctttaacacatatgggccacgcatgaatattgatgatggacgtgttgtcagcaacttcattgctcaagcgattcgtggtgaacccttgacagtccagtctccaggaacacaaactcgcagtttctgctatgtctctgatctggttgatggacttatccgtctcatggaaggatccgacactgggccaatcaaccttggaaatccaggtgaatttacaatgcttgaacttgctgagacagtgaaggagctaattaatccagatgtggagataaaggtagtggagaacactcctgatgatccgcgacagagaaaaccaattataacaaaagcaatggaattgcttggctgggaaccaaaggttaagctgcgagatggccttcctcttatggaagaggatttccgtttgaggcttgacaaaaacaattaa

SEQ ID NO: 111086 - protein, 341 aa, Glycine max
MAGNSSDVLSPKQPPLPSPLRFSKFFQSNMRILITGGAGFIGSHLVDRLMENEKNEVIVADNYFTGSKDNLKKWIGHPRFELIRHDVTEPLTIEVDQIYHLACPASPIFYKYNPVKTIKTNVIGTLNMLGLAKRVGARILLTSTSEVYGDPLVHPQPEGYWGNVNPIGVRSCYDEGKRVAETLMFDYHRQHGIEIRVARIFNTYGPRMNIDDGRVVSNFIAQAIRGEPLTVQSPGTQTRSFCYVSDLVDGLIRLMEGSDTGPINLGNPGEFTMLELAETVKELINPDVEIKVVENTPDDPRQRKPIITKAMELLGWEPKVKLRDGLPLMEEDFRLRLDKNN

SEQ ID NO: 111087 - DNA, 1296 bp, Glycine max
  CDS (1)..(1296)
atgccgtccttagaggaggagctcttcccttcaaccccaggcaagttcaagatcgagcgggcccaccacatgaaccgccagctctaccgctgcttcgcctccaccagcaccatgttcctgtgggccctctttttaatcgccctcaccgcttcatatctcagcttccaaggcttcgttgattccggcagccgctacctctccgcctcctggggcgggatccagtgggagaagcaggtccgcacctccgcccagatccaccgtcaaggcggcatgtccgtcctcgtcaccggcgctgccggcttcgtcggctcccacgtctccctcgcgttaaaacgacgcggagacggcgtcgtcggactcgacaacttcaacgactactacgatccgtctctgaaaaaagcccgcaagtccctcctcgccaagcatgacgtcttcatcgtcgatggcgacctcaacgacgccaagctcttggcaaagctcttcgatgtggtcgctttcacccacgtgatgcacctcgcggcgcaggccggggttcgctacgccatggagaatccccactcctacgtccacagcaacatcgcgggcctcgtcacgcttctcgaggcctgcaaatcggcgaaccctcagcccgcggtcgtttgggcctcgtccagctccgtctacgggctcaacgagaaggttccattttccgaatcggaccagaccgaccggcccgctagcctctacgccgcaaccaaaaaagccggtgaggaaatcacacacacctacaatcacatctacggcttatccatcaccggtttgaggtttttcaccgtgtacggaccctgggggaggcccgacatggcttatttctctttcaccagaaacatcttacaagggaaacctatcaccgtttaccgcggtaaaaaccatgtcgacctggccagggatttcacctacattgatgatattgtcaagggttgcgtcgggtcgttggatacttcggccaagagtaccgggtcgggtgggaagaaacggggacccgctccgtatagaatatttaacctggggaacacgtcgccggttactgttcccactcttgtcagtatattggagcgccatttgaaggtgaaggccaagaggaatattgtggacatgcctggaaacggcgacgttccgtttactcacgcgaatattagttcggcccggagagaactcgggtacaagcccaccaccgatttgcaaaccgggttgaagaagttcgtcaagtggtacctttcctattacggctacaatcacggcaaacctgtaaattaa

SEQ ID NO: 111088 - protein, 431 aa, Glycine max
MPSLEEELFPSTPGKFKIERAHHMNRQLYRCFASTSTMFLWALFLIALTASYLSFQGFVDSGSRYLSASWGGIQWEKQVRTSAQIHRQGGMSVLVTGAAGFVGSHVSLALKRRGDGVVGLDNFNDYYDPSLKKARKSLLAKHDVFIVDGDLNDAKLLAKLFDVVAFTHVMHLAAQAGVRYAMENPHSYVHSNIAGLVTLLEACKSANPQPAVVWASSSSVYGLNEKVPFSESDQTDRPASLYAATKKAGEEITHTYNHIYGLSITGLRFFTVYGPWGRPDMAYFSFTRNILQGKPITVYRGKNHVDLARDFTYIDDIVKGCVGSLDTSAKSTGSGGKKRGPAPYRIFNLGNTSPVTVPTLVSILERHLKVKAKRNIVDMPGNGDVPFTHANISSARRELGYKPTTDLQTGLKKFVKWYLSYYGYNHGKPVN

SEQ ID NO: 111089 - DNA, 1047 bp, Glycine max
  CDS (1)..(1047)
atggcaacggattcttcaaatggtaatggacatcaccagacaacaacaaagcagcctcctttgccatctcccctgcgcttttccaaattttttcagtccaacatgagaatcttggttactggaggagctggattcattgggtctcacttagttgacagattgatggaaaatgaaaaaaatgaggtcattgttgctgacaactacttcactggatccaaggacaacctcaaaaaatggattggtcatccaagatttgagcttatccgtcatgatgtcacggagcctttattgatcgaggttgatcagatctaccatcttgcatgccctgcctctcctattttctacaaatacaatccagtaaagacaataaagacaaatgtgattggcacactgaacatgcttgggctcgctaagcgagtaggagcaaggattctgcttacatcaacttcagaggtatatggggatcctcttgtgcatccccaacctgaaagttattggggcaatgttaaccctattggagttcgtagttgctatgatgaggggaaacgggtggctgagacattgatgtttgattaccataggcagcatggaattgaaatacgcattgcaagaatctttaacacatatggaccacgcatgaatattgatgatgggcgtgttgtcagcaacttcattgctcaagcactgcggggggaaccattgacagtccaatgtccgggaacacaaactcgaagtttctgttatgtctctgacctggttgatggccttatccgtctcatggaaggatcaaacaccggaccaatcaaccttggaaacccaggtgaatttacaatgactgaacttgctgagacagttaaagagcttattaatccaggtgtggagatcaagatggtggagaacactcctgatgacccacgacaaagaaaaccagacatcacaaaagcaaaggaattgttgggctgggagccaaaggtcaagttgcgtgatggtcttcctcgtatggaagaggatttccgtctgaggcttggagttggcaaaaagaattaa

SEQ ID NO: 111090 - protein, 348 aa, Glycine max
MATDSSNGNGHHQTTTKQPPLPSPLRFSKFFQSNMRILVTGGAGFIGSHLVDRLMENEKNEVIVADNYFTGSKDNLKKWIGHPRFELIRHDVTEPLLIEVDQIYHLACPASPIFYKYNPVKTIKTNVIGTLNMLGLAKRVGARILLTSTSEVYGDPLVHPQPESYWGNVNPIGVRSCYDEGKRVAETLMFDYHRQHGIEIRIARIFNTYGPRMNIDDGRVVSNFIAQALRGEPLTVQCPGTQTRSFCYVSDLVDGLIRLMEGSNTGPINLGNPGEFTMTELAETVKELINPGVEIKMVENTPDDPRQRKPDITKAKELLGWEPKVKLRDGLPRMEEDFRLRLGVGKKN

SEQ ID NO: 111091 - DNA, 1317 bp, Glycine max
  CDS (1)..(1317)
atgtcccaactgaagccaatgtcgcatatagacagtgccccttcgaccccagggaagttcaagatggagaaagcttcgtacttcaaccgcgtgcggtggcacacctcgctggcgaagctcgcagtgtggtccttcgtattcctgggcgcgatcttgatctttttcctccggtcgccggcgtcgtcgccggtcccggcggacctctcccggcggtctctgcggacctacaactggggcggacccgtctgggagaaacgggtccgggcatccgcccagatccggtcccgaaacgggttcgccgtgttggtcaccggcgccgccggtttcgtaggcacccacgtctccgcggccctcaaacgccgcggtgacggggtgctgggacttgacaatttcaatgactattatgacccttcactaaagcgtgcacgccaggggctcctggagcgcaatggcgtgtacatagttgagggtgatatcaatgatgaggcactcttgaggaaacttttcgaggttgtgcctttcactcatgtgatgcacttggctgctcaggctggtgtgaggtatgccatggagaatcctggctcttatgttcatagcaacattgctggttttgtgaatttgcttgaggtttgtaagagtgtgaatccacaacctgctattgtgtgggcctctagtagctcagtttatggactcaacactaaggttccattctctgagagggataggactgatcagcctgctagtttgtatgctgcaaccaagaaggctggtgaggagattgctcacacttataaccatatctatggtctttcattgactggattgaggttcttcactgtttatggtccttggggtaggcctgatatggcttacttcttcttcactagggatcttttgaaggggaagcccatccctattttcgaggccgcgaatcatggaaccgttgctagggattttacttacattgatgatattgtgaggggttgtttgggggctttggatactgcggagaagagcacggggagtggggggaagaagagggggccagcacagttgagggtgttcaatttggggaacacttcgccggttcccgttagtgatctcgtgagcattttggagaggcttctgaaggttaaggcgaagaggaacataatgaagttgccgcggaatggggatgtgcagtttactcatgccaacattagctatgctcagagtgagcttgggtacaagccgaccacggatctgcagagtggtttgaagaaattcgtgcggtggtacctgaattactattctggcgggaagaaagctgttgagtga

SEQ ID NO: 111092 - protein, 438 aa, Glycine max
MSQLKPMSHIDSAPSTPGKFKMEKASYFNRVRWHTSLAKLAVWSFVFLGAILIFFLRSPASSPVPADLSRRSLRTYNWGGPVWEKRVRASAQIRSRNGFAVLVTGAAGFVGTHVSAALKRRGDGVLGLDNFNDYYDPSLKRARQGLLERNGVYIVEGDINDEALLRKLFEVVPFTHVMHLAAQAGVRYAMENPGSYVHSNIAGFVNLLEVCKSVNPQPAIVWASSSSVYGLNTKVPFSERDRTDQPASLYAATKKAGEEIAHTYNHIYGLSLTGLRFFTVYGPWGRPDMAYFFFTRDLLKGKPIPIFEAANHGTVARDFTYIDDIVRGCLGALDTAEKSTGSGGKKRGPAQLRVFNLGNTSPVPVSDLVSILERLLKVKAKRNIMKLPRNGDVQFTHANISYAQSELGYKPTTDLQSGLKKFVRWYLNYYSGGKKAVE

SEQ ID NO: 111093 - DNA, 1284 bp, Glycine max
  CDS (1)..(1284)
atgggctccgaattgattttcagaggccacgaggctcagcccgtggacgactcgtactcgccgaagccccacaagccctggttcaccgtgactcgcccgattcactacatgctccgcgagcagcgactcgtcttcgtcctcgtcggcgtcatcatagcaaccctcttcttcacactcgtcccttcctcatcctcttcaagcgttccgtacgagtctctcccgatctcgtacttcgagcgcgagtcaaagattccggcgtaccaccaccgcgtcgctgcggcggtgcactcggtggggaaggtgccgttgggaattaagaggaaggggctccggatcgtggtgaccggcggcgcggggttcgttgggtcgcacctggtggatcggttgattgcgagaggggacagcgtgatcgtggtggacaatttcttcacgggaagaaaagagaacgtgatgcaccattttgggaaccctagattcgagctcatccgacacgacgtcgttgagcctctcctgctcgaggttgatcagatctaccatctggcttgccctgcttcccctgtccactacaagttcaatcccgtcaagactatcaagaccaatgtggtggggaccttgaacatgcttggtctagctaagcgagtgggagcgaggttcttgttgacgagtaccagtgaggtttatggagatcctctgcagcaccctcagaaggagacttactggggaaacgtcaacccaattggtgtccgaagctgctacgacgagggaaagcgtacggccgagacgttgaccatggactaccaccgaggtgccggcgttgaggttagaattgctagaatctttaacacctacgggcctagaatgtgcttagatgatggccgtgttgttagtaacttcgttgctcaggcactaaggaaggagcctttgaccgtttatggagatgggaaacagacaagaagtttccaatatgtctctgatttggtggagggtctaatccgccttatggaaggagaacacgtgggacctttcaatcttggaaatcccggagaatttaccatgcttgaacttgccaaggtggttcaagaaacaatagaccctgatgctaggatagagtacaggcccaacacagaggatgacccgcacaagagaaagcctgatataagtagggctaaggatcaacttggctgggaacccaaggttgacctgcgcaagggcctcccactaatggtttctgacttccggcaacgcatttttggtgaccagaaggaaaaggcatccgtagcctaa

SEQ ID NO: 111094 - protein, 427 aa, Glycine max
MGSELIFRGHEAQPVDDSYSPKPHKPWFTVTRPIHYMLREQRLVFVLVGVIIATLFFTLVPSSSSSSVPYESLPISYFERESKIPAYHHRVAAAVHSVGKVPLGIKRKGLRIVVTGGAGFVGSHLVDRLIARGDSVIVVDNFFTGRKENVMHHFGNPRFELIRHDVVEPLLLEVDQIYHLACPASPVHYKFNPVKTIKTNVVGTLNMLGLAKRVGARFLLTSTSEVYGDPLQHPQKETYWGNVNPIGVRSCYDEGKRTAETLTMDYHRGAGVEVRIARIFNTYGPRMCLDDGRVVSNFVAQALRKEPLTVYGDGKQTRSFQYVSDLVEGLIRLMEGEHVGPFNLGNPGEFTMLELAKVVQETIDPDARIEYRPNTEDDPHKRKPDISRAKDQLGWEPKVDLRKGLPLMVSDFRQRIFGDQKEKASVA

SEQ ID NO: 111095 - DNA, 1350 bp, Glycine max
  CDS (1)..(1350)
atgggttcttcttcccctccggacactagcaagagcataaagctagagcgatacaacagctacatccggagactcaacagcaccaagctcctcaacgcctcctccaaactcctcttccgcgccactctcttggtcgcactcatcctcgtcttcctcttcaccttcaactaccctcccctctccgccaccgactccacccaccgccacctccacgcccactcccactacttcctctcctcctcctccttcggcgcctgggagaagcaggtccgccactccgcctccccccgccgccccaacggcctcaccgtccttgtcactggggctgcgggcttcgtgggcagccactgctccctggccctgaagaagcgcggcgacggtgtcctggggcttgacaacttcaacaactactacgacccttcccttaaacgcgcccggcaggcaatgctctggaaacaccaagtgttcatcgtggaaggtgacctcaacgacacccccttgctccagaagctcttcgacctcgtccccttcacccacatcctccacctggccgcacaggccggcgtccgctacgccatgcagaacccccaatcctacgtcaccgccaacatcgctggcttcgtcaaccttctcgaggctgccaaatccgccaacccccaacccgccattgtctgggcttcgtccagctccgtctacggcctcaacacccaaaaccctttctccgagctccaccgcaccgaccagcccgccagcctctacgccgccaccaagaaggccggcgaggaaatcgcccacacctacaaccacatttacggcctctccctcaccggactccgtttcttcaccgtctacggcccctggggaagacccgacatggcttacttcttcttcaccaaagacatcctccatgggaagaccatcgacgtctaccagacgccggaggggaagcaggtggcgcgtgactttacctacatcgacgacatcgtcaagggttgcctcggcgccctcgactccgcccagaagagcaccgggagcggcggcaagaagcggggccctgcccagctcagagtgtacaatctagggaacacgtcaccggtgccggtggggaccttggtgtccattctagaaggtttgctgaaaaccaaggccaagaagcacgtcattaagatgccatctaacggcgacgttcccttcactcacgccaacgtcagcttggccttcagggatttcgcctacaaacccaccaccgatctctccaccggtctcagcaagttcgtcaagtggtacctcggttattacggcctccagccaagcctgaaaaaggataatcaccttcacaatattgaatga

SEQ ID NO: 111096 - protein, 449 aa, Glycine max
MGSSSPPDTSKSIKLERYNSYIRRLNSTKLLNASSKLLFRATLLVALILVFLFTFNYPPLSATDSTHRHLHAHSHYFLSSSSFGAWEKQVRHSASPRRPNGLTVLVTGAAGFVGSHCSLALKKRGDGVLGLDNFNNYYDPSLKRARQAMLWKHQVFIVEGDLNDTPLLQKLFDLVPFTHILHLAAQAGVRYAMQNPQSYVTANIAGFVNLLEAAKSANPQPAIVWASSSSVYGLNTQNPFSELHRTDQPASLYAATKKAGEEIAHTYNHIYGLSLTGLRFFTVYGPWGRPDMAYFFFTKDILHGKTIDVYQTPEGKQVARDFTYIDDIVKGCLGALDSAQKSTGSGGKKRGPAQLRVYNLGNTSPVPVGTLVSILEGLLKTKAKKHVIKMPSNGDVPFTHANVSLAFRDFAYKPTTDLSTGLSKFVKWYLGYYGLQPSLKKDNHLHNIE

SEQ ID NO: 111097 - DNA, 1053 bp, Glycine max
  CDS (1)..(1053)
atgcctgcccaatcgattctggttaccggaggagccggttacatcggtagccacaccatccttcagcttctcctcagcggttaccatgtcttcgccgtcgacaacttcgacaattcttccgaaaccgccatcaacagagtcaaggaactcgccggagaattagcaaataacctttccttttgcaagcttgacttgcgggacagagctgccctcgagaaaatattttcaaccgtaaagtttgatgccgtcatacattttgctgggcttaaagcagtgggtgaaagcgtgaagaaaccactgctctactttgacaacaatttgatagggacaatcgttctatttgaagtcatggctgcccacggatgcaagaagcttgtgttctcatcttcagcaactgtatatgggtggccaaaggaggtcccatgtaccgaagagttccctttgtcagcaacaaacccatatggacgaaccaagcttatcatcgaagaaatttgtcgcgatatccaccgtgcagattcagattggacagttatactattgagatacttcaacccagttggtgcacatcccagtggttatattggtgaggatcctcttggaattccaaacaatctcatgccctttgttcaacaagtggcagttggcagacgccctgcattgacagtttttggaagcgattataaaacaactgacggcactggagttcgtgattacattcatgttcttgatttagcagatgggcatattgctgcgttgcgtaaactggatgatcctaaaataggttgtgaggtttataacttgggaacaggaaagggaacatcagttttggagatggtaaacgcttttgaacaggcctctggaaagaaaattccacttgcaatggcgggtcggagacctggagatgctgaaattgtttatgcatcaacagaaaaagcggaaagagaacttaattggaagactaaatatagcatcgatgatatgtgccgcgatcaatggaattgggctagcaaaaacccttatggctatggtgcatctgcagattcctccaattga

SEQ ID NO: 111098 - protein, 350 aa, Glycine max
MPAQSILVTGGAGYIGSHTILQLLLSGYHVFAVDNFDNSSETAINRVKELAGELANNLSFCKLDLRDRAALEKIFSTVKFDAVIHFAGLKAVGESVKKPLLYFDNNLIGTIVLFEVMAAHGCKKLVFSSSATVYGWPKEVPCTEEFPLSATNPYGRTKLIIEEICRDIHRADSDWTVILLRYFNPVGAHPSGYIGEDPLGIPNNLMPFVQQVAVGRRPALTVFGSDYKTTDGTGVRDYIHVLDLADGHIAALRKLDDPKIGCEVYNLGTGKGTSVLEMVNAFEQASGKKIPLAMAGRRPGDAEIVYASTEKAERELNWKTKYSIDDMCRDQWNWASKNPYGYGASADSSN

SEQ ID NO: 111099 - DNA, 1251 bp, Glycine max
  CDS (1)..(1251)
atggcatcttcaccggacaccagcaaaaccataaagctggtgcgtaacaacagctacctccgcagactcaacatatccttcaaaatcctcttcctcctcctcgccctcctcctcctttacactctttccacccaccaccaccacctccccctctcctccgcctgggagaatcaggtccgccactccgccctccctcgccgccccaacggcatgtcggtgcttgtcaccggcgccgcgggcttcgtcggctcccactgctccctcgccctcaagaagcgcggcgacggcgtcctcggcctcgacaactttaacccctactacgacccctccctaaaacgcgcccgccaacacctcctggcgaaacaccgaatcctcatcatcgaagccgacctaaacgacgcgccgttgctcgccaagctcttcgacgtcgtttccttctcccacgtcctccacctcgcagcacaagcgggcgtccgctacgccatgcagaacccccagtcctacgtggcatccaacatcgccggcttcgtcacccttctagaagcttccaaaacctccaacccccagcccgccatcgtttgggcctcttccagttccgtctatgggctcaataatgaaagcccattctccgaactccaccgtacggaccagcccgcgagcctctacgccgcaactaaaaaagccggcgaggccatcgcgcatacctacaatcatatctatggactctccctcaccggattgcgcttcttcactgtttacgggccctggggaaggcccgacatggcttactttttcttcactaagtccatcctccagggaaagcccattgacgtgtaccagacgcaggacgaaagagaagtggcgcgcgacttcacttacatcgacgacgtcgtcaagggctgcctcggcgctctagacacggcggagaagagcaccggcggcggcgggaagaagcacggcgccgcgcagctcagggtttacaatctcggcaacacctcgccggtgccggtggggaaactcgtttccgtgttggagacgttgctcagggtgaaggcgaagaagcacgtgatcaaaatgccgcgaaacggcgacgttccattcacgcatgctaacgtgagcctggcgtggagggacttcgggtacaagcccaccactgatctcgccactggtctcagaaagttcgtgcagtggtacgttgggtattacggggttcgcttaggggtagaaaaggaaaagatttcgcttgattga

SEQ ID NO: 111100 - protein, 416 aa, Glycine max
MASSPDTSKTIKLVRNNSYLRRLNISFKILFLLLALLLLYTLSTHHHHLPLSSAWENQVRHSALPRRPNGMSVLVTGAAGFVGSHCSLALKKRGDGVLGLDNFNPYYDPSLKRARQHLLAKHRILIIEADLNDAPLLAKLFDVVSFSHVLHLAAQAGVRYAMQNPQSYVASNIAGFVTLLEASKTSNPQPAIVWASSSSVYGLNNESPFSELHRTDQPASLYAATKKAGEAIAHTYNHIYGLSLTGLRFFTVYGPWGRPDMAYFFFTKSILQGKPIDVYQTQDEREVARDFTYIDDVVKGCLGALDTAEKSTGGGGKKHGAAQLRVYNLGNTSPVPVGKLVSVLETLLRVKAKKHVIKMPRNGDVPFTHANVSLAWRDFGYKPTTDLATGLRKFVQWYVGYYGVRLGVEKEKISLD

SEQ ID NO: 111101 - DNA, 1248 bp, Glycine max
  CDS (1)..(1248)
atgctaaattttaataggatcagaagtcagcccaggacaaccagatctatgtctttgggaggcatggattacgtggatccaaaaaggaaaggcaattttgttggaaaagtttttcttgctgcagcattaacggcattatgcattatcatgatcaagagatctccatctttgaatcccccgagtccgttttccatccatgaaccaggtgtcactcatgttttagtgacaggaggtgcaggctatatcggctcacatgctaccctacgacttctgagggaaaattatcgtgtcaccatagtggataacctgtcacgaggaaatttgggtgctgtcagggttcttcaagacttatttccagaacctggaaggcttcaatttatatatgctgacttgggagataaagaatctgtaaataaaatattttcagagaataaatttgatgccgtgatgcactttgctgccgttgcatacgtgggagagagcacacttgaccctcttaagtattatcacaatattacatcgaataccttgttggtattggagtctatggctaaatatggtgtgaagacattaatatattctagtacgtgtgcaacatatggggaacctgaaaagatgcctattatagaaacaacagaacagaaaccaattaatccatacggaaaagccaagaagatggcagaagatatcatccttgatttttccaaaaattctaagatggcagtaatgattctgagatacttcaatgtgattggatcagacccagagggcagattgggtgaggctccaagacctgaacttcgtgaacatggccgaatttctggtgcctgctttgatgcagctcgtggtattacaactggcttaaaggttagaggaactgactacaagacaccggatggaacatgcatacgagactacattgatgtaactgatttggttgatgctcacgtgaaggctcttgagaaggcacaacctgctaaagtagggatctacaatgttggaactggaaagggtagatcagtgaaggagtttgtgaatgcttgcaaaaaggccacaggggtggacatcaaagtagactaccttccacgtcgacccggcgattatgccgaggtgtatagtgacccttctaagatcaacagggaactgaattggaccgcacaatacactgaccttgagaagagtttgcaggttgcatggaaatggcaaaaagctcatcgtaacggttacggtatttcatctgcaatctga

SEQ ID NO: 111102 - protein, 415 aa, Glycine max
MLNFNRIRSQPRTTRSMSLGGMDYVDPKRKGNFVGKVFLAAALTALCIIMIKRSPSLNPPSPFSIHEPGVTHVLVTGGAGYIGSHATLRLLRENYRVTIVDNLSRGNLGAVRVLQDLFPEPGRLQFIYADLGDKESVNKIFSENKFDAVMHFAAVAYVGESTLDPLKYYHNITSNTLLVLESMAKYGVKTLIYSSTCATYGEPEKMPIIETTEQKPINPYGKAKKMAEDIILDFSKNSKMAVMILRYFNVIGSDPEGRLGEAPRPELREHGRISGACFDAARGITTGLKVRGTDYKTPDGTCIRDYIDVTDLVDAHVKALEKAQPAKVGIYNVGTGKGRSVKEFVNACKKATGVDIKVDYLPRRPGDYAEVYSDPSKINRELNWTAQYTDLEKSLQVAWKWQKAHRNGYGISSAI

SEQ ID NO: 111103 - DNA, 1050 bp, Glycine max
  CDS (1)..(1050)
atgcgcgacaagactgtgctggtaaccggcggagccggttacatcggcacccacaccgttcttcagctcttgctcggaggttgcagaaccgtcgtcgtcgacaatctcgacaattcctccgaggtttctatccaccgagtcagggagcttgccggcgaatttgggaacaacctctcctttcacaaggtggacctacgggacagggatgcactagagcaaatttttgtttccacacaatttgatgctgtcatacactttgctggactgaaagcagtaggagaaagtgtgcaaaaacctttactatactataacaacaacttgactgggacaatcactctattggaagtcatggctgcccatggatgcaagaagctcgtgttctcttcttcagcaactgtatatggttggccaaaggaagttccatgcacagaagagttccctctgtcagcaatgaacccatatggacgaactaagcttatcattgaagaaatttgtcgtgatgtccaccgtgcagagccagattggaaaataatattgttaagatacttcaacccagtcggtgcacaccctagcggttgtattggggaggatccccgcggaattccaaacaatctcatgccatttgttcagcaagtagcagttggccgacggcctgcactgacagtttttggaaatgattataatacaactgatggcactggggttcgggattacattcatgttgttgatttagcagatgggcacattgctgcattgcttaaactagatgaacctaatataggttgtgaggtttataacctgggaacaggaaagggaacatcagttttggagatggttagagcttttgaaatggcatctggaaagaaaattccacttgtgatggctggccgtagacctggtgatgctgaaattgtttatgcatcaacaaagaaagcggaaagagagcttaaatggaaggcaaaatatggcattgatgagatgtgccgaaatcaatggaattgggctagcaaaaacccttatggctatggagatcagggctccaccgattaa

SEQ ID NO: 111104 - protein, 349 aa, Glycine max
MRDKTVLVTGGAGYIGTHTVLQLLLGGCRTVVVDNLDNSSEVSIHRVRELAGEFGNNLSFHKVDLRDRDALEQIFVSTQFDAVIHFAGLKAVGESVQKPLLYYNNNLTGTITLLEVMAAHGCKKLVFSSSATVYGWPKEVPCTEEFPLSAMNPYGRTKLIIEEICRDVHRAEPDWKIILLRYFNPVGAHPSGCIGEDPRGIPNNLMPFVQQVAVGRRPALTVFGNDYNTTDGTGVRDYIHVVDLADGHIAALLKLDEPNIGCEVYNLGTGKGTSVLEMVRAFEMASGKKIPLVMAGRRPGDAEIVYASTKKAERELKWKAKYGIDEMCRNQWNWASKNPYGYGDQGSTD

SEQ ID NO: 111105 - DNA, 1029 bp, Glycine max
  CDS (1)..(1029)
atggcaacgaattcttctaatggagcaacaaagcaacctcccatgccatctcccttgcgtttttccaagttctttcagtccaatatgagaattctggttactggaggagctggatttattggctctcacctagttgacaaattgatggaaaatgaaaaaaatgaggtcattgttgctgacaactacttcactggatctaaagacaaccttaaaaaatggattggccatccaagattcgagctaattcgtcatgatgtcacagagcaattgttgattgaggttgatcaaatctatcatcttgcatgcccagcttctccaattttctacaaatacaaccctgtaaagacaataaagacaaatgtgattggaacactgaacatgcttggtcttgctaagcgtgtgggagcaaggattttgcttacatctacttcagaagtatatggggaccctcttgagcatccacaaccagaaagctattggggcaatgtgaatcctattggagttcggagttgttatgatgaggggaaacgtgttgcagaaactttgatgtttgattatcataggcagcatggaatagaaatacgtgttgcaagaatctttaacacatatgggccgcgcatgaatattgatgatggacgtgttgtcagcaacttcattgctcaagcaattcgtggtgaacccttgacagtccagtctccaggaacacaaactcgcagtttctgctatgtctctgatctggttgatggacttatccgtctcatggaaggatccgacactggaccaatcaaccttggaaatccaggtgaatttacaatgctagaacttgctgagacagtgaaggagcttattaatccagatgtggagataaaggtagtggagaacactcctgatgatccgcgacagagaaaaccaatcataacaaaagcaatggaattgcttggctgggaaccaaaggttaagctgcgagatgggcttcctcttatggaagaggattttcgtttgaggcttggatttgacaaaaaaaattaa

SEQ ID NO: 111106 - protein, 342 aa, Glycine max
MATNSSNGATKQPPMPSPLRFSKFFQSNMRILVTGGAGFIGSHLVDKLMENEKNEVIVADNYFTGSKDNLKKWIGHPRFELIRHDVTEQLLIEVDQIYHLACPASPIFYKYNPVKTIKTNVIGTLNMLGLAKRVGARILLTSTSEVYGDPLEHPQPESYWGNVNPIGVRSCYDEGKRVAETLMFDYHRQHGIEIRVARIFNTYGPRMNIDDGRVVSNFIAQAIRGEPLTVQSPGTQTRSFCYVSDLVDGLIRLMEGSDTGPINLGNPGEFTMLELAETVKELINPDVEIKVVENTPDDPRQRKPIITKAMELLGWEPKVKLRDGLPLMEEDFRLRLGFDKKN

SEQ ID NO: 111107 - DNA, 1053 bp, Glycine max
  CDS (1)..(1053)
atggtgtcttcctcccaacacattctggtcaccggtggtgccggtttcattggcacccacaccgtcgttcagcttctcaaagctggcttcagcgtttcaataatcgacaatttcgataactccgtcatggaagcagtggaccgcgtccgccaagtggttggccctctgctttctcagaacctccaattcacccagggcgatctccggaatagggatgacttggagaaactcttctccaaaacaacatttgatgccgtgatccactttgctggcttgaaagcggttgctgaaagcgttgcgaagccccgtcgctattttgattttaatttggttggcaccatcaacctctacgaatttatggcaaagtataattgcaaaaagatggttttctcatcatctgcaaccgtttatggccaacctgaaaagataccgtgtgaggaggatttcaagttacaagctatgaatccctatggacggaccaagcttttcctggaagaaattgcccgagatattcagaaagctgaaccagaatggaagatcatattactgagatacttcaatccagttggggctcatgaaagtggcaaactcggtgaagatcccaagggcatcccaaataacctcatgccttacattcagcaagtagctgttggaagattgactgaactcaatgtatacggtcatgattatccaacgagggatggctctgcgatccgggactatatccatgtgatggacttagcagatggccatattgctgccctgcgaaagctcttcacaacggagaacataggttgtactgcttacaacctgggaactggtcgtggaacatctgtgcttgaaatggttgcagcatttgaaaaggcttctggcaagaaaattccagtaaaattatgtccaagaagaccgggagatgcgactgaggtttatgcatctacagagagagctgagaaagaacttggttggaaggcaaactatggtgtggaggagatgtgcagggaccaatggaattgggcaaagaacaatccctggggttacgcggggaagccttga

SEQ ID NO: 111108 - protein, 350 aa, Glycine max
MVSSSQHILVTGGAGFIGTHTVVQLLKAGFSVSIIDNFDNSVMEAVDRVRQVVGPLLSQNLQFTQGDLRNRDDLEKLFSKTTFDAVIHFAGLKAVAESVAKPRRYFDFNLVGTINLYEFMAKYNCKKMVFSSSATVYGQPEKIPCEEDFKLQAMNPYGRTKLFLEEIARDIQKAEPEWKIILLRYFNPVGAHESGKLGEDPKGIPNNLMPYIQQVAVGRLTELNVYGHDYPTRDGSAIRDYIHVMDLADGHIAALRKLFTTENIGCTAYNLGTGRGTSVLEMVAAFEKASGKKIPVKLCPRRPGDATEVYASTERAEKELGWKANYGVEEMCRDQWNWAKNNPWGYAGKP

SEQ ID NO: 111109 - DNA, 1050 bp, Glycine max
  CDS (1)..(1050)
atgcgcgacaagactgtgctggtaaccggcggagccggttacatcggcacccacaccgttcttcagctcttgctcggaggttgcagaaccgtcgtcgtcgacaatctcgacaattcctccgaggtttctatccaccgagtcagggagcttgccggcgaatttgggaacaacctctcctttcacaaggtggacctacgggacagggatgcactagagcaaatttttgtttccacacaatttgatgctgtcatacactttgctggactgaaagcagtaggagaaagtgtgcaaaaacctttactatactataacaacaacttgactgggacaatcactctattggaagtcatggctgcccatggatgcaagaagctcgtgttctcttcttcagcaactgtatatggttggccaaaggaagttccatgcacagaagagttccctctgtcagcaatgaacccatatggacgaactaagcttatcattgaagaaatttgccgtgatgtccactgtgcagagccagattgtaaaataattttgttaagatacttcaacccagttggtgcacaccccagcggttatattggggaggatcctcgcggaattccaaacaatctcatgccatttgttcagcaagtagcagttggccgacggcctgcactgacagtttttggaaatgattataatacaagtgatggcactggggttcgggattacattcatgttgttgatttagcagatgggcacattgctgcattgcttaaactagatgaacctaatataggttgtgaggtttataacctgggaacaggaaagggaacatcagttttggagatggttagagcttttgaaatggcatctggaaagaaaattccacttgtgatggctggccgtagacctggtgatgctgaaattgtttatgcatcaacaaagaaagcggaaagagagcttaaatggaaggcaaaatatggcattgatgagatgtgccgtgatcaatggaattgggctagcaaaaacccttatggctatggagatcagggctccaccgattaa

SEQ ID NO: 111110 - protein, 349 aa, Glycine max
MRDKTVLVTGGAGYIGTHTVLQLLLGGCRTVVVDNLDNSSEVSIHRVRELAGEFGNNLSFHKVDLRDRDALEQIFVSTQFDAVIHFAGLKAVGESVQKPLLYYNNNLTGTITLLEVMAAHGCKKLVFSSSATVYGWPKEVPCTEEFPLSAMNPYGRTKLIIEEICRDVHCAEPDCKIILLRYFNPVGAHPSGYIGEDPRGIPNNLMPFVQQVAVGRRPALTVFGNDYNTSDGTGVRDYIHVVDLADGHIAALLKLDEPNIGCEVYNLGTGKGTSVLEMVRAFEMASGKKIPLVMAGRRPGDAEIVYASTKKAERELKWKAKYGIDEMCRDQWNWASKNPYGYGDQGSTD

SEQ ID NO: 111111 - DNA, 1290 bp, Brassica napus
  CDS (1)..(1290)
atgtctcaccttgacgatcttcctcccactcccggaaagtacaaagttgtgccgtacggggttctccacaaccaccgctacctccgcctctcgaaactcacgctctgggcttctctcttcctcgccctcttcctcttctacctcgtcttatctgctccgccgtctccttctcgccggagcctcaacgattcatccgttaagtacggcggctctcactgggagaaacaagtccgtaaatccgctcgtccgaggtctcgcggcggcttaacggttctagtcaccggagccgccggattcgtgggtacccacgtctcgatcgcgctacggagacgcggcgacggggtcctgggtctcgacaacttcaaccgatactacgatccgaagctgaaacgagcgagacaagggcttctggagagatcgggagtcttcgtcgtggaaggagacataaacgacgccgttttgctgaagaagctcttcgacgtcgtcctcttcacgcacgtgatgcatctcgccgctcaagcgggtgtccgttacgcgatgcaaaaccctggatcgtatgtgagcagcaacatcgctgggttcgtgaatctgctcgaagtctcgaaagctgcgaatcctcagcctgcggttgtctgggcttcttctagctctgtttacggtctcaacaagaaagtgcccttctcggagaaagaccgtacggaccaccccgcgagcttatacgcggccaccaagaaagcaggtgaagggatagctcatacttacaatcacatctacggtttatcgctaaccggtttgagattcttcacggtttacgggccttgggggagaccagacatggcctacttcttcttcactaaggatatactcaaagggaagacgattacggtgttcgagtctcctgataaaggtagtgtcgctagggacttcacttacattgatgatattgtgaaaggctgtttaggtgcgttggatactgctgagaagagtactggtagtggtggcaagaagaaaggtcctgccatgtgtaggatttacaatttggggaatacttctcctgttcctgttactaagcttgtgaagatattggagaagctgttgaagatgaaagctaagaaaaaggtcatgcctttgccgaggaatggggatgttgagttcactcatgctaatatcacgttggcgcagagtgagattggttataaacctgaggttgatcttgagacgggtttgaagaagtttgtgaaatggtacatgggtttttacacaggctcgaagaagaagagttcttggtga

SEQ ID NO: 111112 - protein, 429 aa, Brassica napus
MSHLDDLPPTPGKYKVVPYGVLHNHRYLRLSKLTLWASLFLALFLFYLVLSAPPSPSRRSLNDSSVKYGGSHWEKQVRKSARPRSRGGLTVLVTGAAGFVGTHVSIALRRRGDGVLGLDNFNRYYDPKLKRARQGLLERSGVFVVEGDINDAVLLKKLFDVVLFTHVMHLAAQAGVRYAMQNPGSYVSSNIAGFVNLLEVSKAANPQPAVVWASSSSVYGLNKKVPFSEKDRTDHPASLYAATKKAGEGIAHTYNHIYGLSLTGLRFFTVYGPWGRPDMAYFFFTKDILKGKTITVFESPDKGSVARDFTYIDDIVKGCLGALDTAEKSTGSGGKKKGPAMCRIYNLGNTSPVPVTKLVKILEKLLKMKAKKKVMPLPRNGDVEFTHANITLAQSEIGYKPEVDLETGLKKFVKWYMGFYTGSKKKSSW

SEQ ID NO: 111113 - DNA, 1251 bp, Zea mays
  CDS (1)..(1251)
atgtcaacaaccccaaggagcagaagccagggtagtaggaccactaggccgtggatcttgtcagggatggactttgctggttccagacggaagcctaatctcacggggaagattgccgtggctgctgccctcacggtcatgtgcataatcgtgttgaaacagtcccctagtttcagcggtaccagcgtgttctctcgccatgaaactggggtgacccatgtgttagtaacagggggtgctgggtatattggctcacatgctactcttcgtctccttagtgacaagtaccgagttaccattgtggataacctatccagagggaacatgggagctgttagagttcttcaacggctatttccagaacccggaaggcttcaatttatttatgctgatttaggcgatgccaaagctgtgaacaaaatattttcggagaacgcatttgatgctgttatgcactttgctgctgttgcttatgttggtgagagcacaatggagccactcaggtactaccacaacataacgtcaaacacattgacagttcttgaggcaatggcagcacataatgtaaatactctgatttactcgagtacgtgtgcaacctatggtgaacctgatacaatgccaattgtagaaacaactcctcagaatcctatcaatccatatggtaaggcaaagaagatggcggaggacatcatcttagattttacaaaatcaaagaagcaatcaaatatggctgtcatgatcttaagatacttcaacgtgattggatcagacccagagggacggctaggagaagctccaaggccagagctacgcgagcatggacggatatccggtgcttgctttgatgcagctttgggaatcattccagggctaaaggttcgtggaaccgattactccactgcagatggaacttgcgttagagactacatcgatgtcacagatcttgtagatgctcacgtaaaagctcttggtaaagctcagccaggcaaagttggaatctacaatgtcggaacaggccaaggtagatcagtgactgagtttgtagaagcttgcaagaaggcaacaggagcttctatcaaggtcgaatatcttgcacgtagacccggagattatgccgaggtatacagcgatccgtcgaaaatccacatggaactcaactggacagcccagtacactgatcttggccaaagcctcgcccaggcgtggaaatggcagaaagcgcacccgaacggatatggaccagcctga

SEQ ID NO: 111114 - protein, 416 aa, Zea mays
MSTTPRSRSQGSRTTRPWILSGMDFAGSRRKPNLTGKIAVAAALTVMCIIVLKQSPSFSGTSVFSRHETGVTHVLVTGGAGYIGSHATLRLLSDKYRVTIVDNLSRGNMGAVRVLQRLFPEPGRLQFIYADLGDAKAVNKIFSENAFDAVMHFAAVAYVGESTMEPLRYYHNITSNTLTVLEAMAAHNVNTLIYSSTCATYGEPDTMPIVETTPQNPINPYGKAKKMAEDIILDFTKSKKQSNMAVMILRYFNVIGSDPEGRLGEAPRPELREHGRISGACFDAALGIIPGLKVRGTDYSTADGTCVRDYIDVTDLVDAHVKALGKAQPGKVGIYNVGTGQGRSVTEFVEACKKATGASIKVEYLARRPGDYAEVYSDPSKIHMELNWTAQYTDLGQSLAQAWKWQKAHPNGYGPA

SEQ ID NO: 111115 - DNA, 1320 bp, Zea mays
  CDS (1)..(1320)
atgcgggtgttggaggaggacctcttcccctccaccccaggcaaggtgaagatcgagcgggcgggcgccatgaaccggcagctccaccgctgcttcgcgtccaccagcaccatgttcctgtgggcgctgttcctcgtcgccatgacggcgtcctacctcagcttccagtccttcgtcgacacctcctccaagtacttggccgcctcctggggcggcctgcactgggagcggcagatccgcgcgtccgccgcgccgaggcggccccccgggtccgccgccggggccgggatgtcggtgctggtcacgggcgccgcgggcttcgtcggcacccactgctccctcgcgctccgcaagcgtggcgacggcgtcgtcggcgtcgacaacttcaacgcctactacgacccgtcgctcaagaaggcgcgcagggcgctgctggcctcccacggggtgttcgtcgtcgagggcgacatcaacgacggccgcctcctggccaagctcttcgacgtcgtgccattcacccacgtgctccacctcgccgctcaggccggcgtgcgctacgccatgcagaacccggcgtcgtacgtgcactccaacatcgcggggctcgtcacgctcctcgaggcctgcaaggacgccgacccgcaaccggccatcgtctgggcctcctcctcctccgtctacggcctcaacgacaaggtccccttctccgagcgcgaccgcaccgaccagccggcctcgctctacgcggccaccaagaaggccggcgaggagatcacgcacacgtacaaccatatctacggcctatccatcaccggcctccgcttcttcaccgtgtacgggccctggggccgccccgacatggcctacttctccttcacccgcaacatcctgcaggggaaacccatcacggtgtaccgcggcaaggaccgcgtcgacctggcccgcgacttcacctacatcgacgacattgtcaagggctgcctcggctccctggacacggccggcaagagcaccggcaccggcggcaagaagcgcgggccggcgccctacaggatcttcaacctcggcaacaccgcgcccgtcacggtgcctaacctggtgtccatcctggagaagcacctccgcgtcaaggccaagaagaacgtggtcgagatgcccggcaatggcgacgtgcccttcacccacgccaacatcaccctcgccaggcagcagctcgggtacaagcccaccaccaacctcgatgtcggcctcaagaagttcgtcaagtggtaccagtcctactacggctacaccaggggatccaagaactcgcgacaatga

SEQ ID NO: 111116 - protein, 439 aa, Zea mays
MRVLEEDLFPSTPGKVKIERAGAMNRQLHRCFASTSTMFLWALFLVAMTASYLSFQSFVDTSSKYLAASWGGLHWERQIRASAAPRRPPGSAAGAGMSVLVTGAAGFVGTHCSLALRKRGDGVVGVDNFNAYYDPSLKKARRALLASHGVFVVEGDINDGRLLAKLFDVVPFTHVLHLAAQAGVRYAMQNPASYVHSNIAGLVTLLEACKDADPQPAIVWASSSSVYGLNDKVPFSERDRTDQPASLYAATKKAGEEITHTYNHIYGLSITGLRFFTVYGPWGRPDMAYFSFTRNILQGKPITVYRGKDRVDLARDFTYIDDIVKGCLGSLDTAGKSTGTGGKKRGPAPYRIFNLGNTAPVTVPNLVSILEKHLRVKAKKNVVEMPGNGDVPFTHANITLARQQLGYKPTTNLDVGLKKFVKWYQSYYGYTRGSKNSRQ

SEQ ID NO: 111117 - DNA, 2001 bp, Zea mays
  CDS (1)..(2001)
atggcgaggccttacaaacctaagaatatcctcattacaggagctgctggttttatcgcctcccatgtcgcaatccgcattaccaagaagtaccccgattacaagattatcgtccttgacaaacttgactactgctctaatctgaagaacctgcttcctgtgagctcatcaccaaacttcaagtttgtgaagggtgatattgcaagtgttgatcttgtcaacttccttcttgtcacagagaacattgataccataatgcacttcgcggcccagacacatgtcgacaattcatttgggaattctttcgaatttaccaagaacaatatttatggtacacatgtacttcttgaggcctgcaggattagtggccagatcaagaggttcatccatgtcagcactgatgaggtctatggggagactgacgaggatgcagttgttggcaaccatgaagcatcacagctgcttcctacaaacccatatgcagccaccaaagcgggagcggagatgcttgtaatggcatatgggagatcctatggactgccagttatcactactcggggaaacaatgtctatggcccaaatcagttccctgagaagcttatcccaaagttcattctcttggccatgagaggggagcccctccctatccatggtgatggagtcaatgtccgtagctacctctattgtgaggatgttgcggaggcatttgaggtcattcttcatcatggagaagttggacatgtttataatattggaacaaaaagggagaggacagtgcttgatgtggcaaaagatgtttgcagactcttcaatcttgaacctgacaaagtcatcatgtttgtcgagaacagaccttttaatgaccagaggtatttcttggacgatgagaagctcaagagccttggatgggctgagcgcaccccatgggaagaaggcttaaaaaagacaatggagtggtatgtagcaaattctgattattggggtgatgtttctggggccttactgcctcatccaaggacattgatgatgccagggtgcgaggggtctgaggagattaaaggaatactcagccggtttaataacattcaaacaaaggtcggttcaacatcagataatgctccagaaccgcatgccttcaagttcttgatatatggcaggacaggatggatcggcggacttcttgggaaaatatgtgagaagaaaggaattccatatgaatatggaaatggccgcttgcaagagcgttcttcactcgtcctagacatccaaactattaagccaacacatgtcttcaatgccgctggtgtgactggaaggcccaatgttgattggtgtgaatcgcacaagccggacaccatccgtaccaatgttgtgggcaccttgaatctagcagatgtatgtaggaagcatggcttattgatgatgaactatgccactgggtgcatatttgaatacgatgcacatcatcctgaagggtcaggtatcggcttcaaagaggaagatacaccaaattttactggttcgttctactcgaagacgaaggcaatggtcgaggagttattgaaggagtatgagaacgtctgcactctgcgagttcggatgccgatatcctctgacctcagcaacccgcggaacttcgtgacaaagatcagccgttacaacaaggtggtgaacatccccaacagcatgacgatattggacgaactcctgcccatctcagtggagatggcgaagaggaacctgcggggcatctataacttcaccaaccccggcgtcgtcagccacaacgagatcctagagatgtacaagcagtacatcgaccctagcttcaagtggacaaacttcaccctcgaggagcaggcgaaggtcatcgttgctccgcgaagcaacaacgagatggacgcaaccaagctgaagaacgagttccccgagctgctgtcgatcaaggactcgttgatcaagtacgtctttgagcccaacagaaaggtgcccacagactga

SEQ ID NO: 111118 - protein, 666 aa, Zea mays
MARPYKPKNILITGAAGFIASHVAIRITKKYPDYKIIVLDKLDYCSNLKNLLPVSSSPNFKFVKGDIASVDLVNFLLVTENIDTIMHFAAQTHVDNSFGNSFEFTKNNIYGTHVLLEACRISGQIKRFIHVSTDEVYGETDEDAVVGNHEASQLLPTNPYAATKAGAEMLVMAYGRSYGLPVITTRGNNVYGPNQFPEKLIPKFILLAMRGEPLPIHGDGVNVRSYLYCEDVAEAFEVILHHGEVGHVYNIGTKRERTVLDVAKDVCRLFNLEPDKVIMFVENRPFNDQRYFLDDEKLKSLGWAERTPWEEGLKKTMEWYVANSDYWGDVSGALLPHPRTLMMPGCEGSEEIKGILSRFNNIQTKVGSTSDNAPEPHAFKFLIYGRTGWIGGLLGKICEKKGIPYEYGNGRLQERSSLVLDIQTIKPTHVFNAAGVTGRPNVDWCESHKPDTIRTNVVGTLNLADVCRKHGLLMMNYATGCIFEYDAHHPEGSGIGFKEEDTPNFTGSFYSKTKAMVEELLKEYENVCTLRVRMPISSDLSNPRNFVTKISRYNKVVNIPNSMTILDELLPISVEMAKRNLRGIYNFTNPGVVSHNEILEMYKQYIDPSFKWTNFTLEEQAKVIVAPRSNNEMDATKLKNEFPELLSIKDSLIKYVFEPNRKVPTD

SEQ ID NO: 111119 - DNA, 1314 bp, Zea mays
  CDS (1)..(1314)
atggcgtcggagctgacgtaccgcggcggcagcgcggcgccaggctccacctccaacggaggggaacactccccgaagccctccaagccgctctcccggctcgcccgcaccgcacgctacgccgccgccgagcaccgccccgtcttcgccctcgccggcatgctcttcgctgccgctatcttcaccttctcttccccctccaccttatctccgtccgaacccgccgcgtcggtcggcttcaaccaccttgccgtcagcgggcacccgtccttccgggagtccgtcggcgggaaggttcccctggggctgcgtcggcgcgcgctgcgggtgctcgtgacgggcggcgccgggttcgtggggagccacctggtggaccggctgttggagcgcggcgacagcgtgattgtggtggataacttcttcacggggcgcaagggcaacgtggcgcaccatctccagaaccccaggttcgaggtgatccgccacgacgtcgtcgagcccatactgctcgaggtagaccagatctaccaccttgcctgtccagccagccccgtgcactacaagtacaaccccatcaagaccatcaagacaaatgttgttgggacactgaacatgcttggattggccaagaggattggggcaaggtttctacttacaagcaccagtgaggtctatggtgatcccctccagcaccctcaggtggaaacctattggggcaatgtcaaccctataggtgtcaggagctgctatgatgagggcaaacgtacagctgaaacattaaccatggactaccatcgtggtgccaaccttgaggtaaggattgcccggatctttaacacatatggtcctcgcatgtgcattgatgacggccgtgttgtcagtaatttcgttgctcaggcgctgaggaaggagcctttgacagtctatggtgatggcaagcagactaggagctttcaatatgtctcagatttggtggaagggctgatgaagctcatggaaggggagcacattgggccgttcaacctcggcaaccctggagaattcagcatgctggagctggctaaggtggtccaggacaccatcgacccagaggcgcacatcgagttccgtccgaacaccgcagatgatccgcacaagcgcaagcctgacatcagccgcgcgaaagagctcctcggctgggagcccaaggttcccctccgtgagggccttccccgcatggtcactgacttccgcaaacgtatcttcggggaccaggaagggtccaccgaggcagctggtggcctttcccaagcccccaaaaacttgttgaagtga

SEQ ID NO: 111120 - protein, 437 aa, Zea mays
MASELTYRGGSAAPGSTSNGGEHSPKPSKPLSRLARTARYAAAEHRPVFALAGMLFAAAIFTFSSPSTLSPSEPAASVGFNHLAVSGHPSFRESVGGKVPLGLRRRALRVLVTGGAGFVGSHLVDRLLERGDSVIVVDNFFTGRKGNVAHHLQNPRFEVIRHDVVEPILLEVDQIYHLACPASPVHYKYNPIKTIKTNVVGTLNMLGLAKRIGARFLLTSTSEVYGDPLQHPQVETYWGNVNPIGVRSCYDEGKRTAETLTMDYHRGANLEVRIARIFNTYGPRMCIDDGRVVSNFVAQALRKEPLTVYGDGKQTRSFQYVSDLVEGLMKLMEGEHIGPFNLGNPGEFSMLELAKVVQDTIDPEAHIEFRPNTADDPHKRKPDISRAKELLGWEPKVPLREGLPRMVTDFRKRIFGDQEGSTEAAGGLSQAPKNLLK

SEQ ID NO: 111121 - DNA, 2019 bp, Zea mays
  CDS (1)..(2019)
atggcgacttatgagcccaagaacattctcataactggtgctgctggtttcattgcatcgcatgtcgccaaccgtctggtcaggaactatccccaatacaagatcgttgtccttgacaagattgactactgctccaacctaaagaacctcaatccttcacggtcttcaccaaatttcaaatttgtcaagggtgatattgcaagtgctgacctggtgaattaccttctgatcaccgagtcaattgacaccatcatgcactttgctgctcagacgcatgttgataattcttttggcaattcatttgagttcacaaaaaacaatatatatggcacccatgttcttcttgaggcttgcaaggttactggtcagatcaggaggtttattcatgtcagtaccgacgaggtgtatggtgaaactgatgaagatgctgtggttggtaaccatgaggcctcacagctgcttccaacaaatccatattcagctacaaaggctggggctgaaatgcttgtgatggcatacggaaggtcttatggtcttcctgtgattaccactcgtggcaacaatgtgtatgggccaaatcaatttcctgagaaactcattcccaaattcattcttttggccatgcaaggtctgcctcttccaattcatggagatggctccaacgtcaggagctacctgtactgtgaggatgtggccgaagcttttgaggtggtccttcacaaaggagaagttggacatgtgtataatattggtactgtgaaggagaggagggtgattgatgtggccaaggacatatgcaagctctttggcttggatactgagaaagtcatcaggtttgttgaaaacaggccattcaatgaccagaggtacttcttagatgatcagaagctaaagagattgggatgggcagagcgcacaccatgggaagagggcttgaagaagacgatggagtggtacaccaccaatcctgattactggggagatgtcactggtgcgctgcttcctcatccaaggatgttgatgactcctggagttgaaaggcataactgggctgaagaaatcaagtctctggcttcttcgccagctgaagctagtacaatagctccagcaaccagtaccaaaagcatctctgatgcccctcagaagccttcctacaggtttttaatctatggtaggactggatggattggtggcctccttggaaagatttgtgaaaagcaagggataccatatgagtatgggaaaggacgcttggaggagcgctctcagctgttggaggacattagaaatgtgaagccaactcatgttttcaatgctgccggagtcactgggagaccaaatgttgactggtgcgagacccataaacaggacactatccgcaccaatgttgtaggcactttgaatctagctgatgtctgtcgcaagcagggtctgctcatgattaattatgctacaggctgtatatttgagtatgatgctaagcaccctgaagggtctggtattggctttaaagaggaagacacgcccaactttattggttccttttattccaaaacaaaagcaatggtggaagagctattgaaggagtatgataatgtctgtactcttagggtcaggatgcctatatcatcagatctaagcaaccctcgtaacttcatcacaaagatagctcgttacgacaaggtggtgaacattcccaacagcatgacaatcttggatgagcttctgcctatctccattgagatggcgaaacgggactgcaggggcatatggaacttcaccaaccctggcgctgtaagccacaacgagattctagagatgtacaagaaatacatcaatcctgatttcaagtggaccaatttcacactcgaagaacaggccaaggtgatagtcgcgcctagaagcaacaacgagatggacacgtcgaaactgaaggccgagttccctcagctgctgtccatcaaggattctttgatcaagtacgtctttgagcccaacaggaaggttcctgttaattga

SEQ ID NO: 111122 - protein, 672 aa, Zea mays
MATYEPKNILITGAAGFIASHVANRLVRNYPQYKIVVLDKIDYCSNLKNLNPSRSSPNFKFVKGDIASADLVNYLLITESIDTIMHFAAQTHVDNSFGNSFEFTKNNIYGTHVLLEACKVTGQIRRFIHVSTDEVYGETDEDAVVGNHEASQLLPTNPYSATKAGAEMLVMAYGRSYGLPVITTRGNNVYGPNQFPEKLIPKFILLAMQGLPLPIHGDGSNVRSYLYCEDVAEAFEVVLHKGEVGHVYNIGTVKERRVIDVAKDICKLFGLDTEKVIRFVENRPFNDQRYFLDDQKLKRLGWAERTPWEEGLKKTMEWYTTNPDYWGDVTGALLPHPRMLMTPGVERHNWAEEIKSLASSPAEASTIAPATSTKSISDAPQKPSYRFLIYGRTGWIGGLLGKICEKQGIPYEYGKGRLEERSQLLEDIRNVKPTHVFNAAGVTGRPNVDWCETHKQDTIRTNVVGTLNLADVCRKQGLLMINYATGCIFEYDAKHPEGSGIGFKEEDTPNFIGSFYSKTKAMVEELLKEYDNVCTLRVRMPISSDLSNPRNFITKIARYDKVVNIPNSMTILDELLPISIEMAKRDCRGIWNFTNPGAVSHNEILEMYKKYINPDFKWTNFTLEEQAKVIVAPRSNNEMDTSKLKAEFPQLLSIKDSLIKYVFEPNRKVPVN

SEQ ID NO: 111123 - DNA, 1098 bp, Zea mays
  CDS (1)..(1098)
atgtctgtggcgaaggaggcggggccgagcagcagggcggtgcttgtgacgggcggggcgggatacatcggcagccacgccgtgctgcagctgctcaccgcgggcttccgggtcgtcgtcgtcgacagcctcgccaactcctccgagctcgtgatccgccgcctgcgctcgctcgcggtggaacacgccaaaaacctcgcgttccacaaggttgatatccgtgacaaagatggattggaaaaggtttttgcttcaacaagatttgatgctgttattcattttgctggactgaaagctgttggagaaagtgtacaaaagcctttgctttattatgaccataatgttgttggcacaataaatcttctggaagtaatggcagctcatggatgtaagaagttagtgttctcatcatcagctgcagtttatgggtcacctaagaactcaccctgcactgaagattttcctctcactccacataacccatatggcagaaccaaacttatggcagaggagatatgccgtgatatctaccattcagatcctgaatggaatatcattttgcttaggtactttaatccagttggggctcaccccagtggataccttggtgaagacccatgtggaactcctaacaaccttatgcccttcgttcagcaaattgcagttggcaggaggccatcgctaacaatatttggaaataactacgcaacaaaggatgggacaggggttcgtgattatattcatgtggttgaccttgctgaaggacatcttttcgcattaaagaagctttttgaaagctcatctaacataggatgtgaagcatacaaccttggaaccggaaaaggaacatcagtgttggagatagtcaatgcatttgagaaggcttctggaaagaaaatccctttgatcatgggccaacggcgtcctggtgatgctgagattctcttttcatcgccggcaaaagcagagagagagctccactggaaagcgaaatatggcatcacagaaatgtgcggagacctgtggaactgggctagcaagagcccttatggatacgcggcatctgagtctccgaagctgaatggtagttcacgctga

SEQ ID NO: 111124 - protein, 365 aa, Zea mays
MSVAKEAGPSSRAVLVTGGAGYIGSHAVLQLLTAGFRVVVVDSLANSSELVIRRLRSLAVEHAKNLAFHKVDIRDKDGLEKVFASTRFDAVIHFAGLKAVGESVQKPLLYYDHNVVGTINLLEVMAAHGCKKLVFSSSAAVYGSPKNSPCTEDFPLTPHNPYGRTKLMAEEICRDIYHSDPEWNIILLRYFNPVGAHPSGYLGEDPCGTPNNLMPFVQQIAVGRRPSLTIFGNNYATKDGTGVRDYIHVVDLAEGHLFALKKLFESSSNIGCEAYNLGTGKGTSVLEIVNAFEKASGKKIPLIMGQRRPGDAEILFSSPAKAERELHWKAKYGITEMCGDLWNWASKSPYGYAASESPKLNGSSR

SEQ ID NO: 111125 - DNA, 1320 bp, Zea mays
  CDS (1)..(1320)
atgcgggtgttggaggaggacctcttcccctccaccccaggcaaggtgaagatcgagcgggcgggcgccatgaaccggcagctccaccgctgcttcgcgtccaccagcaccatgttcctgtgggcgctgttcctcgtcgccatgacggcgtcctacctcagcttccagtccttcgtcgacacctcctccaagtacttggccgcctcctggggcggcctgcactgggagcggcagatccgtgcgtccgccgcgccgaggcggccccccgggtccgccgccggggccgggatgtcggtgctggtcacgggcgccgcgggcttcgtcggcacccactgctccctcgcgctccgcaagcgcggcgacggcgtcgtcggcgtcgacaacttcaacgcctactacgacccgtcgctcaagaaggcgcgcagggcgctgctggcctcccacggggtgttcatcgtcgagggcgacatcaacgacggccgcctcctggccaagctcttcgacgtcgtgccattcacccacgtgctccacctcgctgcgcaggccggcgtgcgctacgccatgcagaacccggcgtcgtacgtgcactccaacatcgcggggctcgtcacgctcctcgaggcctgcaaggacgccgacccgcaaccggccatcgtctgggcctcctcctcctccgtctacggcctcaacgacaaggtccccttctccgagcgcgaccgcaccgaccagccggcctcgctctacgcggccaccaagaaggccggcgaggagatcacgcacacgtacaaccatatctacggcctatccatcaccggcctccgcttcttcaccgtgtacgggccctggggccgccccgacatggcctacttctccttcacccgcaacatcctgcaggggaaacccatcacggtgtaccgcggcaaggaccgcgtcgacctggcccgcgacttcacctacatcgacgacattgtcaagggctgcctcggctccctggacacggccggcaagagcaccggcaccggcggcaagaagcgcgggccggcgccctacaggatcttcaacctcggcaacaccgcgcccgtcacggtgcctaacctggtgtccatcctggagaagcacctccgcgtcaaggccaagaagaacgtggtcgagatgcccggcaatggcgacgtgcccttcacccacgccaacatcaccctcgccaggcagcagctcgggtacaagcccaccaccaacctcgatgtcggcctcaagaagttcgtcaagtggtaccagtcctactacggctacaccaggggatccaagaactcgcgacaatga

SEQ ID NO: 111126 - protein, 439 aa, Zea mays
MRVLEEDLFPSTPGKVKIERAGAMNRQLHRCFASTSTMFLWALFLVAMTASYLSFQSFVDTSSKYLAASWGGLHWERQIRASAAPRRPPGSAAGAGMSVLVTGAAGFVGTHCSLALRKRGDGVVGVDNFNAYYDPSLKKARRALLASHGVFIVEGDINDGRLLAKLFDVVPFTHVLHLAAQAGVRYAMQNPASYVHSNIAGLVTLLEACKDADPQPAIVWASSSSVYGLNDKVPFSERDRTDQPASLYAATKKAGEEITHTYNHIYGLSITGLRFFTVYGPWGRPDMAYFSFTRNILQGKPITVYRGKDRVDLARDFTYIDDIVKGCLGSLDTAGKSTGTGGKKRGPAPYRIFNLGNTAPVTVPNLVSILEKHLRVKAKKNVVEMPGNGDVPFTHANITLARQQLGYKPTTNLDVGLKKFVKWYQSYYGYTRGSKNSRQ

SEQ ID NO: 111127 - DNA, 1053 bp, Zea mays
  CDS (1)..(1053)
atggcgcagaaggagaccaatggcagcaacggcgagcacatctccacccgcccgccgccgaccccgtcgcccctccgcttctccaagttcttccaggctaacctgcggatcctggtcactggtggggcgggcttcatcggctcgcacctcgtggacaggctcatggagaacgagaagcacgaggtcattgttgctgataactttttcaccggttcaaaagataacctgaagaagtggatcggacacccaagatttgagctcatccgccatgatgtcaccgagccacttcttgtggaggttgaccagatctatcaccttgcttgccctgcttcaccaatcttctacaagcacaatcctgttaagaccatcaagacaaatgttattggtaccctgaacatgctgggacttgcaaagagagttggagctaggattttgttgacatcaacatctgaagtttatggtgatccgcttgagcatcctcaaaccgaggcctactggggcaatgttaacccaattggagtcaggagttgttatgatgagggtaagcgtgtagcagagacgctgatgttcgactatcacaggcagcatggcattgaaatccgaattgccaggattttcaacacctatgggccaaggatgaacattgacgatggtcgtgttgttagcaacttcattgctcaggctgtgcgtggcgaaccccttactgtccagaagccaggaacacagactaggagcttctgctatgtcgccgatatggttgatggtcttattaggctgatgaatggaaacaacactggaccgattaacttggggaacccaggtgaattcaccatgctggaacttgctgagaatgtgaaggagttgattaacccagatataacagtgacgatgaccgagaacactcctgatgatccccgccagaggaagccggacatcaccaaggcaaaggaagttctagggtgggagcccaagatcgtcctgaaggacggcttggtgctcatggaggatgatttccgggagcgcctggccgtgcccaagaaaaccaaggcctaa

SEQ ID NO: 111128 - protein, 350 aa, Zea mays
MAQKETNGSNGEHISTRPPPTPSPLRFSKFFQANLRILVTGGAGFIGSHLVDRLMENEKHEVIVADNFFTGSKDNLKKWIGHPRFELIRHDVTEPLLVEVDQIYHLACPASPIFYKHNPVKTIKTNVIGTLNMLGLAKRVGARILLTSTSEVYGDPLEHPQTEAYWGNVNPIGVRSCYDEGKRVAETLMFDYHRQHGIEIRIARIFNTYGPRMNIDDGRVVSNFIAQAVRGEPLTVQKPGTQTRSFCYVADMVDGLIRLMNGNNTGPINLGNPGEFTMLELAENVKELINPDITVTMTENTPDDPRQRKPDITKAKEVLGWEPKIVLKDGLVLMEDDFRERLAVPKKTKA

SEQ ID NO: 111129 - DNA, 1323 bp, Zea mays
  CDS (1)..(1323)
atgcgggtgctggaggaggacctcttcccctccaccccgggcaaggtgaagatcgagcgggcgggcgccatgaaccggcagctccaccgctgcttcgcgtccaccagcaccatgttcctgtgggcgctgttcctcgtcgccatgacggcgtcctacctcagcttccagtccttcgtcgacacctcctccaagtacttcgccgcctcctggggcggcctgcactgggagaggcagatccgcgcgtccgccgtgccgaggcggccccccgggtcagccgccggggccgggatgtcggtgctcgtcacgggcgccgcgggcttcgtgggcacccactgctccctcgccctccgcaggcgcggcgacggcgtggtcggcgtcgacaacttcaacgcctactacgacccgtcgctgaagaaggcgcgcagggcgctgctcgcctcccacggggtgttcgtcgtcgagggcgacatcaacgacggccgcctcctggccaagctcttcgatgtcgtgcccttcacccacgtgctccacctcgccgcgcaggccggcgtgcgctacgccatggagaacccggcgtcgtacgtgcactccaacgtcgccggcctcgtcacgctcctcgaggcctgcaaggacgccgacccgcagccggccatcgtctgggcctcctcctcctccgtctacggcctcaacgacaaggtccccttctcggagcgcgaccgcaccgaccagccggcctcactctacgcggccaccaagaaggccggcgaggagatcacgcacacgtacaaccacatctacggactctccatcaccggcctccgcttcttcaccgtgtacgggccctggggccgccccgacatggcctacttctccttcacccgcaacatccttcaggggaagcccatcacggtttaccgcggcaaggaccacgtggacctggcccgcgacttcacctacatcgacgatattgtcaagggctgcctcgcctccctggaaacggccggcaagagcaccggcaccggcggcaagaagcgcgggccggcgccctacaggatcttcaacctcggcaacacctctcccgttacggtgcccaacctggtgtccatcctggagaagcacctccgcgtcaaggccaagaagaacgtggtcgagatgcccggcaacggcgacgtgcccttcacgcacgccaacatctccctagccagggagcagctcgggtacaaacccaccaccaacctggacgtcggcctcaagaagtttgtcaagtggtacctgtcctattacggctacaccaggggaggatccaagaactcgcgacattga

SEQ ID NO: 111130 - protein, 440 aa, Zea mays
MRVLEEDLFPSTPGKVKIERAGAMNRQLHRCFASTSTMFLWALFLVAMTASYLSFQSFVDTSSKYFAASWGGLHWERQIRASAVPRRPPGSAAGAGMSVLVTGAAGFVGTHCSLALRRRGDGVVGVDNFNAYYDPSLKKARRALLASHGVFVVEGDINDGRLLAKLFDVVPFTHVLHLAAQAGVRYAMENPASYVHSNVAGLVTLLEACKDADPQPAIVWASSSSVYGLNDKVPFSERDRTDQPASLYAATKKAGEEITHTYNHIYGLSITGLRFFTVYGPWGRPDMAYFSFTRNILQGKPITVYRGKDHVDLARDFTYIDDIVKGCLASLETAGKSTGTGGKKRGPAPYRIFNLGNTSPVTVPNLVSILEKHLRVKAKKNVVEMPGNGDVPFTHANISLAREQLGYKPTTNLDVGLKKFVKWYLSYYGYTRGGSKNSRH

SEQ ID NO: 111131 - DNA, 1068 bp, Zea mays
  CDS (1)..(1068)
atggtgtccgccgtgctccggaccatcctcgtgacgggcggcgccgggtacatcggcagccacacggtgctgcagctgctgcagcagggcttccgcgtcgtcgtcgtcgacaacctcgacaacgcctccgaggccgccctcgcccgcgtcgccgagctcgccgggcacgacggcgccaacctcgtcttccacaaggttgaccttcgcgacaggcacgcgttggtggacatcttctcgtcgcacaggttcgaggctgtcattcactttgctgggctcaaggctgttggggagagcgtgcacaagcccctactttactacgacaacaacctggtcggcaccatcaccctcctggaggtgatggctgcgaacggctgcaagaagctggtgttctcgtcatctgcaactgtctatgggtggcccaaggaagtaccctgcaccgaagaattcccgctctgcgccaccaatccctatgggcggacaaagcttgtgattgaagacatctgccgcgacgtccaccgctccgaccccgactggaagatcatactgctcaggtacttcaaccccgttggcgctcatccaagcgggtacatcggcgaagacccctgcggtgtcccgaacaacctgatgccctacgtgcagcaagtcgctgttgggaggttacctcacctcacggtctacgggacggactacagcaccaaggatgggactggggtgcgtgattacatccacgttgtcgacctggctgacggccacatagcagccctgaggaagctctacgaagactccgacaaaataggctgtgaagtgtacaacttggggactggaaaggggacgtccgtgttggaaatggtggctgcattcgagaaggcttctgggaagaaaatccctctggtgttcgctgggcgaagacccggagacgcagagatcgtctacgccgcaactgccaaggcagagaaggagctcaaatggaaggccaagtacgggatcgaggagatgtgcagagatctgtggaactgggcgagcaagaacccgtacgggtacgctgggtcacgcgacaacagcaaatga

SEQ ID NO: 111132 - protein, 355 aa, Zea mays
MVSAVLRTILVTGGAGYIGSHTVLQLLQQGFRVVVVDNLDNASEAALARVAELAGHDGANLVFHKVDLRDRHALVDIFSSHRFEAVIHFAGLKAVGESVHKPLLYYDNNLVGTITLLEVMAANGCKKLVFSSSATVYGWPKEVPCTEEFPLCATNPYGRTKLVIEDICRDVHRSDPDWKIILLRYFNPVGAHPSGYIGEDPCGVPNNLMPYVQQVAVGRLPHLTVYGTDYSTKDGTGVRDYIHVVDLADGHIAALRKLYEDSDKIGCEVYNLGTGKGTSVLEMVAAFEKASGKKIPLVFAGRRPGDAEIVYAATAKAEKELKWKAKYGIEEMCRDLWNWASKNPYGYAGSRDNSK

SEQ ID NO: 111133 - DNA, 1230 bp, Zea mays
  CDS (1)..(1230)
atgatccctttgaaccggagggcaagcctgcccagggctgggatggagtactttgatgcaaggcggaagcctcgtaatgttggaaaaatcattgcagccctggtcctcacaacactctgtatatttgctctgaagcaatctcctggttttggtggcaatagtgtgttttctcgccatgaacctggtgttacccacgtcttagtaacaggaggagctggttatattggttcacatgccgctttaaggctcttacaggatagctatcgagttaccattgtggataatctatctagaggaaatatgggagcagtaaaggttctgcagggcttatttccgcagcctggtagactacaattcatctttgctgatctgggggaccagaaatctgtcaacaagatatttgctgaaaatgcatttgatgctgtgatgcactttgcagctgttgcttatgtgggagagagcacattggaaccccttaggtactatcacaatattacatcgaacactttactgattttggaggctatggcatctcatggagtcaaaacccttatctactccagtacatgtgctacctacggagaaccagagaagatgcctattacagaagccacacctcagttccctatcaatccatatggaaaagctaagaaaatggcagaggatatcatattagatttctcaaagtcgaagggagctgacatggctgtcatgattttaagatatttcaatgttattggctctgaccctgagggaagattaggtgaggctcctaggccagaactccgagagcatggtcggatatctggggcatgcttcgatgcagcattaggagtcattacaggattaaaggttaaaggaacagattatcccacaactgatggaacctgcataagagattatattgatgtcacagatttagttgatgctcatgtgaaagcactcaacaaggcagagcctagaaaagtcagcatttacaatgttggaacaggaagaggtcgctcggttaatgagttcgtcgatgcctgcaagaaggcaactggggttaacatcaaaattgagtacctcagcagaaggccaggagattatgcagaagtatatagcgacccaacaaaaatcaacaaggagctcaactggacagctcgatatactgatcttaaagagagtctgtcagtcgcatggaggtggcaaaagtcgcatcccagtggctacgggccaaatcgaatatag

SEQ ID NO: 111134 - protein, 409 aa, Zea mays
MIPLNRRASLPRAGMEYFDARRKPRNVGKIIAALVLTTLCIFALKQSPGFGGNSVFSRHEPGVTHVLVTGGAGYIGSHAALRLLQDSYRVTIVDNLSRGNMGAVKVLQGLFPQPGRLQFIFADLGDQKSVNKIFAENAFDAVMHFAAVAYVGESTLEPLRYYHNITSNTLLILEAMASHGVKTLIYSSTCATYGEPEKMPITEATPQFPINPYGKAKKMAEDIILDFSKSKGADMAVMILRYFNVIGSDPEGRLGEAPRPELREHGRISGACFDAALGVITGLKVKGTDYPTTDGTCIRDYIDVTDLVDAHVKALNKAEPRKVSIYNVGTGRGRSVNEFVDACKKATGVNIKIEYLSRRPGDYAEVYSDPTKINKELNWTARYTDLKESLSVAWRWQKSHPSGYGPNRI

SEQ ID NO: 111135 - DNA, 1464 bp, Zea mays
  CDS (1)..(1464)
atgccgtcgtcggggatcaccgcggtggacgcggccgccaaggggatgaagctggagcggtacgccagcgggggcgcgctgctgctgcgccgggcgaccagcgccaagctcgtgtccgcgtcgtcgcacctgctcttccgcgccaccgtgctggccacgctcgcgctcgtcttcctcttcacgctgcactacccgtccctcctctcgcgctccttccacctctccgccggcggcggcggcggcgccgacgacggcgcgcgctcctccgcctcgcaccgcagcctgctcatgtcctcggcgtcgtacgggggcgccgcgtgggagaaggaggtgcggcggagcgccaggccgagccgggacgggggcatctccgtgctggtcaccggcgccgcgggcttcgtgggcacgcactgctcgctcgcgctgagggcccgcggcgacggcgtcctgggcctcgacaacttcaactcctactacgacccgtcgctgaagcgcgcgcgccaggcgctgctggccagccgcggcgtcctggtgctcgacgccgacatcaacgacgccccgctgctggagaggctcttcgacgtggcggcgttcacgcacgtgctgcacctggccgcgcaggccggggtgcggtacgccatggaggcgccgcagacgtacgtggcgtccaacgtggccgggctcgtcagcgtcttggaggtggcggccaagcacgccgacccgcagccggcggtcgtctgggcctcgtcctcgtccgtgtacgggctcaacaccgacgcgcccttctccgaggaccaccgcaccgaccgcccggcgtcgctgtacgcggccaccaagaaggccggcgaggccatcgcgcacgcctacaaccacatctacgggctctccatcaccggcctccgcttcttcaccgtgtacgggccgtggggccgccccgacatggcctacttcttcttcgcccgcagcatcgtggccggcgagcccgtcacgctgttccgcgccgccgacggctccgacgcgcgccgcgacttcacctacatcgacgacgtcgtcaagggctgcctcggcgcgctcgacaccgccggcaagagcaccggctccaggtccggcagaaaaagcgggccagcgccgctccgcgtctacaacctcggcaacacctcccccgtgcccgtcacccggatggtggccatcctcgagaagctgctgggcaggaaggccaacaagcgcgtcgtcaccatgcccagcaacggcgacgtgcctttcacccacgccaacgtcagccacgccgcgcacgacttcggctaccgccctaccacctccctcgaggccggcctccgccacttcgtcgactggttcgtcagctactataagctcgacgccaagatcgccaagcccgccgccgccgacgacgacaagcccgcgaagaagaagaagaagaacaaagccatgtcggcgtcgtcgtga

SEQ ID NO: 111136 - protein, 487 aa, Zea mays
MPSSGITAVDAAAKGMKLERYASGGALLLRRATSAKLVSASSHLLFRATVLATLALVFLFTLHYPSLLSRSFHLSAGGGGGADDGARSSASHRSLLMSSASYGGAAWEKEVRRSARPSRDGGISVLVTGAAGFVGTHCSLALRARGDGVLGLDNFNSYYDPSLKRARQALLASRGVLVLDADINDAPLLERLFDVAAFTHVLHLAAQAGVRYAMEAPQTYVASNVAGLVSVLEVAAKHADPQPAVVWASSSSVYGLNTDAPFSEDHRTDRPASLYAATKKAGEAIAHAYNHIYGLSITGLRFFTVYGPWGRPDMAYFFFARSIVAGEPVTLFRAADGSDARRDFTYIDDVVKGCLGALDTAGKSTGSRSGRKSGPAPLRVYNLGNTSPVPVTRMVAILEKLLGRKANKRVVTMPSNGDVPFTHANVSHAAHDFGYRPTTSLEAGLRHFVDWFVSYYKLDAKIAKPAAADDDKPAKKKKKNKAMSASS

SEQ ID NO: 111137 - DNA, 2019 bp, Zea mays
  CDS (1)..(2019)
atggcgacttatgagcccaagaacattctcataactggtgctgctggtttcattgcatcgcatgtcgccaaccgtctggtcaggaactatccccaatacaagatcgttgtccttgacaagattgactactgctccaacctaaagaacctcaatccttcacggtcttcaccaaatttcaaatttgtcaagggtgatattgcaagtgctgacctggtgaattaccttctgatcaccgagtcaattgacaccatcatgcactttgctgctcagacgcatgttgataattcttttggcaattcatttgagttcacaaaaaacaatatatatggcacccatgttcttcttgaggcttgcaaggttactggtcagatcaggaggtttattcatgtcagtaccgacgaggtatatggtgaaactgatgaagatgctgtggttggtaaccatgaggcctcacagctgcttccaacaaatccatattcagctacaaaggctggggctgaaatgcttgtgatggcatacggaaggtcttatggtcttcctgtgattaccactcgtggcaacaatgtgtatgggccaaatcaatttcctgagaaactcattcccaaattcattcttttggccatgcaaggtctgcctcttccaattcatggagatggctccaacgtcaggagctacctgtactgtgaggatgtggccgaagcttttgaggtggtccttcacaaaggagaagttggacatgtgtataatattggtactgtgaaggagaggagggtgattgatgtggccaaggacatatgcaagctctttggcttggatactgagaaagtcatcaggtttgttgaaaacaggccattcaatgaccagaggtacttcttagatgatcagaagctaaagagattgggatgggcagagcgcacaccatgggaagagggtttgaagaagacgatggagtggtacaccaccaatcctgattactggggagatgtcactggtgcgctgcttcctcatccaaggatgttgatgactcctggagttgaaaggcataactgggctgaagaaatcaagtctctggcttcttcgccagctgaagctagtacaatagctccagcaaccagtaccaaaagcatctctgatgcccctcagaagccttcctacaggtttttaatctatggtaggactggatggattggtggcctccttggaaagatttgtgaaaagcaagggataccatatgagtatgggaaaggacgcttgggggagcgctctcagctgttggaggacattagaaatgtgaagccaactcatgttttcaatgctgccggagtcactgggagaccaaatgttgactggtgcgagacccataaacaggacactatccgcaccaatgttgtaggcactttgaatctagctgatgtctgtcgcaagcagggtctgctcatgattaattatgctacaggctgtatatttgagtatgatgctaagcaccctgaagggtctggtattggctttaaagaggaagacacgcccaactttattggttccttttattccaaaacaaaagcaatggtggaagagctattgaaggagtatgataatgtctgtactcttagggtcaggatgcctatatcatcagatctaagcaacccccgtaatttcatcacaaagatagctcgttacgacaaggtggtgaacattcccaacagcatgacaatcttggatgagcttctgcctatctccattgagatggcgaaacgggactgcaggggcatatggaacttcaccaaccctggcgctgtaagccacaacgagattctagagatgtacaagaaatacatcaatcctgatttcaagtggaccaacttcacactcgaagagcaggccaaggtgatagtcgcgcctagaagcaacaacgagatggacacgtcgaaactgaaggctgagttccctcagcttctgtccatcaaggattctttgatcaagtacgtctttgagcccaacaggaaggttcctgttaattga

SEQ ID NO: 111138 - protein, 672 aa, Zea mays
MATYEPKNILITGAAGFIASHVANRLVRNYPQYKIVVLDKIDYCSNLKNLNPSRSSPNFKFVKGDIASADLVNYLLITESIDTIMHFAAQTHVDNSFGNSFEFTKNNIYGTHVLLEACKVTGQIRRFIHVSTDEVYGETDEDAVVGNHEASQLLPTNPYSATKAGAEMLVMAYGRSYGLPVITTRGNNVYGPNQFPEKLIPKFILLAMQGLPLPIHGDGSNVRSYLYCEDVAEAFEVVLHKGEVGHVYNIGTVKERRVIDVAKDICKLFGLDTEKVIRFVENRPFNDQRYFLDDQKLKRLGWAERTPWEEGLKKTMEWYTTNPDYWGDVTGALLPHPRMLMTPGVERHNWAEEIKSLASSPAEASTIAPATSTKSISDAPQKPSYRFLIYGRTGWIGGLLGKICEKQGIPYEYGKGRLGERSQLLEDIRNVKPTHVFNAAGVTGRPNVDWCETHKQDTIRTNVVGTLNLADVCRKQGLLMINYATGCIFEYDAKHPEGSGIGFKEEDTPNFIGSFYSKTKAMVEELLKEYDNVCTLRVRMPISSDLSNPRNFITKIARYDKVVNIPNSMTILDELLPISIEMAKRDCRGIWNFTNPGAVSHNEILEMYKKYINPDFKWTNFTLEEQAKVIVAPRSNNEMDTSKLKAEFPQLLSIKDSLIKYVFEPNRKVPVN

SEQ ID NO: 111139 - DNA, 1224 bp, Zea mays
  CDS (1)..(1224)
atgaagcagctgcaccggcagtccagcattagcaagcagcaccgcccgcaccaccaccgtacctccctctcccgcaccctcgcttcctacctcctccgcgagcagcgcctcctcttcgtcctcctcggcttcctcctagcctcgtccttcttcttcctctacccgcattccgccgccggatcctcctcggccaccaatatcaccgccgccttcgccagaaagaacccccgcagcagcggcgcctcctcctccgcgcgccgcctccccgtcggtgtccggaagccctccctgcgcatcgtcgtcaccggcggcgcgggttttgttggcagccacctcgtcgacaagctcctcgcccgcggggatagcgtcatcgtcgtcgacaacttcttcacgggccgcaaggacaacgtcgcgcaccacctcggcaacccgcgattcgagctcatccgccacgacgtcgtcgaacccattctcctagaggtcgaccagatctaccacctcgcctgccccgcatcccccgtgcactacaagttcaaccccatcaaaaccatcaagacaaatgtcatggggaccttgaatatgcttggactggctaagagggttggggctcggttcttgttgactagtaccagtgaagtgtatggtgatcctcttgagcatccacagaaggagagctactggggacatgtcaatcccataggtgttaggagctgttatgatgagggaaagagaacagctgaaactcttaccatggattaccaccgcggtgctggtgttgaggtgagaattgcacgcatatttaacacatatggccctcgaatgtgtttagatgatggccgagttgttagcaactttgttgcacaggctttgcggaaacaaccaatgacagtttatggcgatggaaaacagactagaagttttcagtatgtttcagatttggttgatgggttggtaactctaatggaaagcgaccatattggaccattcaacttggggaatcctggagaatttacaatgctggagcttgcacaggtggtaaaagaaactatcgacccaggtgcatctgtcgagttcaaacccaatactgcggatgatccacacatgagaaaacctgacatttcgaaggccaaatctcttctcaattgggagccccaagtttcactaaaacaaggtctgccgcgtatggtgtcggacttccagaaacgcatcatggatgagaaatga

SEQ ID NO: 111140 - protein, 407 aa, Zea mays
MKQLHRQSSISKQHRPHHHRTSLSRTLASYLLREQRLLFVLLGFLLASSFFFLYPHSAAGSSSATNITAAFARKNPRSSGASSSARRLPVGVRKPSLRIVVTGGAGFVGSHLVDKLLARGDSVIVVDNFFTGRKDNVAHHLGNPRFELIRHDVVEPILLEVDQIYHLACPASPVHYKFNPIKTIKTNVMGTLNMLGLAKRVGARFLLTSTSEVYGDPLEHPQKESYWGHVNPIGVRSCYDEGKRTAETLTMDYHRGAGVEVRIARIFNTYGPRMCLDDGRVVSNFVAQALRKQPMTVYGDGKQTRSFQYVSDLVDGLVTLMESDHIGPFNLGNPGEFTMLELAQVVKETIDPGASVEFKPNTADDPHMRKPDISKAKSLLNWEPQVSLKQGLPRMVSDFQKRIMDEK

SEQ ID NO: 111141 - DNA, 1272 bp, Zea mays
  CDS (1)..(1272)
atggcggtggagaagacgctgcccggcgcgagtgcggggaggaccgtgctggtcacgggcggggcgggctacatcggtagccacgccgtgctgcagctcctcctcgcgggcttccgcgccgtcgtcatcgacaacctcaacaactcctccgagctggccgtccgccgcgtcgccgcgctcgcgggggaccactcccgcaacctctctttccacaagattgatctccgtgacaagggagcactggaaatggtttttgcttctacaagatttgaagctgtcattcacttcgctggattgaaagctgtgggtgaaagcgtacagaagccattactttattatgacaacaacgtcattggcacgataaatcttctagaagttatgtctgttcacggttgcaagaagttggtgttctcatcatcagctgcagtttatggatcacccaaaaactcaccctgcacagaaaattttcctcttactccaaacaatccatatggcaaaacaaagctcgttgttgaagatatttgccgggatatctaccgttcagatcctgaatggaagatcattttacttaggtacttcaatccagttggtgctcatcctagtggatatcttggcgaggacccacgaggaattcccaacaatcttatgccctatgttcagcaagttgcggttggtaggaggccagctctaacagttttaggaaatgactatgcaacaagagatgggactggggtccgagattacatccatgtggttgaccttgctgacggacatattgctgcattgcagaagctttttgagaactctagcatagggtgtgaagcgtacaaccttggaaccggaagaggtacatctgtgctggagattgttaaagcatttgagaaggcttctgggaagaaaatacctctgatttttggtgaaagacgcccaggtgatgcagagattctgttttcagagactactaaagcagagagggagcttaactggaaagcaaaatacggtattgaagagatgtgccgcgaccaatggaactgggccagcaagaacccttatggctatggatcacctgactctatcaagcagaatggtcaccaaacaaacggatccgctgactcctccaagcagaatggccaccgcacaaacggttcaactgactcacccaagcggaacggccaccatgcgtatgggtctgctgactcacccaagcgcaacgggcactgcgtttttggatcatcagacctcaagccgaatggtaatggccacctgcgctga

SEQ ID NO: 111142 - protein, 423 aa, Zea mays
MAVEKTLPGASAGRTVLVTGGAGYIGSHAVLQLLLAGFRAVVIDNLNNSSELAVRRVAALAGDHSRNLSFHKIDLRDKGALEMVFASTRFEAVIHFAGLKAVGESVQKPLLYYDNNVIGTINLLEVMSVHGCKKLVFSSSAAVYGSPKNSPCTENFPLTPNNPYGKTKLVVEDICRDIYRSDPEWKIILLRYFNPVGAHPSGYLGEDPRGIPNNLMPYVQQVAVGRRPALTVLGNDYATRDGTGVRDYIHVVDLADGHIAALQKLFENSSIGCEAYNLGTGRGTSVLEIVKAFEKASGKKIPLIFGERRPGDAEILFSETTKAERELNWKAKYGIEEMCRDQWNWASKNPYGYGSPDSIKQNGHQTNGSADSSKQNGHRTNGSTDSPKRNGHHAYGSADSPKRNGHCVFGSSDLKPNGNGHLR

SEQ ID NO: 111143 - DNA, 1290 bp, Zea mays
  CDS (1)..(1290)
atggcgtcggagctgacgtaccgcggcggcagcgtggcgccaggctccgcctccaacggtggggaatactccccgaagtcctccaagccgctctcctggctcgcccgcgccgcgcgctacgccgccgccgagcaccgccccgtcttcgccctcgccggcatgctcttcgctgccgctatcttcaccttctcttccccctccactttatctccgtccgaacccgccgcgtcggtcggcttcaaccaccttgccgtcagcgggcacccgtccttccgcgagtccgtcggcgggaaggttcccctggggctgcgtcggcgcgcgctgcgggtgctcgtgacgggcggcgccgggttcgtggggagccacctggtggaccggctgttggagcgcggcgacagcgtgattgtggtggataacttcttcacggggcgcaagggcaacgtggcgcaccatctccagaaccccaggttcgaggtgatccgccacgacgtcgtcgagcccatactgctcgaggtcgaccagatctaccaccttgcctgtccagccagccccgtgcactacaagtacaaccccatcaagaccatcaagacaaatgttgttgggacactgaacatgcttggattggccaagaggattggggcaaggtttctacttacaagcaccagtgaggtctatggtgatcccctccagcaccctcaggtggaaacctattggggcaatgtcaaccctataggtgtcaggagctgctatgatgagggcaaacgtacagctgaaacattaaccatggactaccatcgtggtgccaaccttgaggtaaggattgcccggatctttaacacatatggtcctcgcatgtgcattgatgacggccgtgttgtcagtaatttcgttgctcaggcgctgaggaaggagcctttgacagtctatggtgatggcaagcagactaggagctttcaatatgtctcagatttggtggaagggctgatgaagctcatggaaggggagcacattgggccgttcaacctcggcaaccctggagaattcagcatgctggagctggctaaggtggtccaggacaccatcgacccagaggcgcacatcgagttccgtccgaacaccgcagatgatccgcacaagcgcaagcctgacatcagccgcgcgaaagagctcctcggctgggagcccaaggttcccctccgtgagggccttccccgcatggtcactgacttccgcaaacgtatcttcggggaccaggaagggtccaccgagtcagctggtggcctttcttaa

SEQ ID NO: 111144 - protein, 429 aa, Zea mays
MASELTYRGGSVAPGSASNGGEYSPKSSKPLSWLARAARYAAAEHRPVFALAGMLFAAAIFTFSSPSTLSPSEPAASVGFNHLAVSGHPSFRESVGGKVPLGLRRRALRVLVTGGAGFVGSHLVDRLLERGDSVIVVDNFFTGRKGNVAHHLQNPRFEVIRHDVVEPILLEVDQIYHLACPASPVHYKYNPIKTIKTNVVGTLNMLGLAKRIGARFLLTSTSEVYGDPLQHPQVETYWGNVNPIGVRSCYDEGKRTAETLTMDYHRGANLEVRIARIFNTYGPRMCIDDGRVVSNFVAQALRKEPLTVYGDGKQTRSFQYVSDLVEGLMKLMEGEHIGPFNLGNPGEFSMLELAKVVQDTIDPEAHIEFRPNTADDPHKRKPDISRAKELLGWEPKVPLREGLPRMVTDFRKRIFGDQEGSTESAGGLS

SEQ ID NO: 111145 - DNA, 1218 bp, Zea mays
  CDS (1)..(1218)
atgaagcagctccacaagtcttcccctacccacgcgccatcgccggcgcacgcaccggctcccaaggccgccaagacggcgcgcccaggtccgcgctcctggatcggctacgtcctccgcgagcagcgcctcctcttcgtcctgctcggtgcgctcatcgcctccaccttcttcctcctccggccctacctctcgctctccccgtcttcccacctccccgacgcccgcccgctcttctccttcgccacccgctccggtgttcccgccggcttccgcccgccgcagcgccgcgtcgtcgtaacaggcggggcagggttcgtcggcagccacctcgtcgaccggcttctggagcagggggacagcgtgatcgtggtcgacaacttcttcaccggcaggaaggagaacgtcgcgcaccacctccggaaccccaggttcgagctgctccgccacgatgtagtcgagccaatcctcctcgaggtggaccggatctaccacctcgcgtgccccgcgtcgcctgtgcactacaagtacaacccaatcaagacgatcaagacaaatgtcatgggaactttgaatatgttgggtctggcgaagcgaattggtgcaaggtttttgttgactagcacaagtgaagtttatggtgatccgcttgagcatccacagaaggagtcatactgggggcacgttaatcctataggtgttaggagctgttacgatgaggggaagagaacagcagagactttaactatggactatcatcgtggtggtggtgttgaggtgcgtattgcccgtattttcaatacatatggtcctcgtatgtgcctcgacgatggtcgtgtggtcagcaattttgttgcacaggcactgcgaaggcaaccgatgacagtctatggtgacggaaaacaaactcgaagtttccaatatgttgctgatctggttgctggactgatggctctaatggagagtgatcatattggtcctttcaacttgggaaacccaggagagtttaccatgttggagctagcacaggttgtgaaggaaacaattgacccaatggcaaccattgaattcaaacccaacacagctgatgatccccatatgagaaagccagatatcaccaaggctaagcaactgctacattgggagccaaaggtctctctcaaagaaggccttccgctaatggttcaagatttccgtcaaaggatctcggatgagtaa

SEQ ID NO: 111146 - protein, 405 aa, Zea mays
MKQLHKSSPTHAPSPAHAPAPKAAKTARPGPRSWIGYVLREQRLLFVLLGALIASTFFLLRPYLSLSPSSHLPDARPLFSFATRSGVPAGFRPPQRRVVVTGGAGFVGSHLVDRLLEQGDSVIVVDNFFTGRKENVAHHLRNPRFELLRHDVVEPILLEVDRIYHLACPASPVHYKYNPIKTIKTNVMGTLNMLGLAKRIGARFLLTSTSEVYGDPLEHPQKESYWGHVNPIGVRSCYDEGKRTAETLTMDYHRGGGVEVRIARIFNTYGPRMCLDDGRVVSNFVAQALRRQPMTVYGDGKQTRSFQYVADLVAGLMALMESDHIGPFNLGNPGEFTMLELAQVVKETIDPMATIEFKPNTADDPHMRKPDITKAKQLLHWEPKVSLKEGLPLMVQDFRQRISDE

SEQ ID NO: 111147 - DNA, 1092 bp, Zea mays
  CDS (1)..(1092)
atggcgatcggcgggtcggaggccggcgggggaggcgcggggagcatgaggagcgtgctggtgacgggcggcgcggggttcatcggcacgcacacggtgctgcgcctgctggagcagggctacatcgtcaccgtcgtcgacaacttccacaactccgtccccgaggcgctcgaccgcgtccgcctcatcgccggccccgcgctctccacccgcctcgacttcatccgcggggacctgaggaacaccgatgacttggagaaggtgttcgctgccaggaggtacgacgccgtcatccacttcgctgggctgaaggccgtgggggagagcgtcgcgcacccggagatgtactacgagaacaacctcatcggcaccatcaacctctacaagagcatgaaggagcacggctgcaagaagctggttttctcgtcatccgccaccgtgtacggctggccggaggtgatcccatgcgtcgaggactccaagctgcaggccgccaacccatacggcaggaccaagcttatccttgaggatatggcgcgtgactaccaccgcgcggacacggagtggagcatcgtcctgctgcgctacttcaaccccatcggtgcgcacagctccggcgagatcggagaggaccccaaggggataccgaacaacctgctgccctacatccagcaggtcgccgtcggcaggctccccgagctcaacgtctacggccacgattaccccacccgggacggcaccgcgatcagggactacatacacgtcgtcgacctcgccgatgggcacatcgcagcgctcaagaagctcttcgactctcctgatataggttgtgtggcctacaatctgggtacagggcgcggcacatccgttctggagatggtggcggcgttcaagaaggcctccggcaaggagattcccaccaagttgtgccccaggagaccgggtgacgcgacggaggtttacgcgtccactgagaaggctgaaagagagcttgcatggagggcccaatatggaatcgaggagatgtgcagggaccaatggaactgggccaagaagaacccgtatggctactgcggcggtgcaaaaaaatag

SEQ ID NO: 111148 - protein, 363 aa, Zea mays
MAIGGSEAGGGGAGSMRSVLVTGGAGFIGTHTVLRLLEQGYIVTVVDNFHNSVPEALDRVRLIAGPALSTRLDFIRGDLRNTDDLEKVFAARRYDAVIHFAGLKAVGESVAHPEMYYENNLIGTINLYKSMKEHGCKKLVFSSSATVYGWPEVIPCVEDSKLQAANPYGRTKLILEDMARDYHRADTEWSIVLLRYFNPIGAHSSGEIGEDPKGIPNNLLPYIQQVAVGRLPELNVYGHDYPTRDGTAIRDYIHVVDLADGHIAALKKLFDSPDIGCVAYNLGTGRGTSVLEMVAAFKKASGKEIPTKLCPRRPGDATEVYASTEKAERELAWRAQYGIEEMCRDQWNWAKKNPYGYCGGAKK

SEQ ID NO: 111149 - DNA, 2031 bp, Zea mays
  CDS (1)..(2031)
atggattccaaaagcaatcatacaggggctatggcgaggccttacaaacctaagaatatcctcattacaggagctgctggttttatcgcctcccatgtcgcaatccgcattaccaagaagtaccccgattacaagattatcgtccttgacaaacttgactactgctctaatctgaagaacctgcttcctgtgagctcatcaccaaacttcaagtttgtgaagggtgatattgcaagtgttgatcttgtcaacttccttcttgtcacagagaacattgataccataatgcacttcgcggcccagacacatgtcgacaattcatttgggaattctttcgaatttaccaagaacaatatttatggtacacatgtacttcttgaggcctgcaggattagtggccagatcaagaggttcatccatgtcagcactgatgaggtctatggggagactgacgaggatgcagttgttggcaaccatgaagcatcacagctgcttcctacaaacccatatgcagccaccaaagcgggagcggagatgcttgtaatggcatatgggagatcctatggactgccagttatcactactcggggaaacaatgtctatggcccaaatcagttccctgagaagcttatcccaaagttcattctcttggccatgagaggggagcccctccctatccatggtgatggagtcaatgtccgtagctacctctattgtgaggatgttgcggaggcatttgaggtcattcttcatcatggagaagttggacatgtttataatattggaacaaaaagggagaggacagtgcttgatgtggcaaaagatgtttgcagactcttcaatcttgaacctgacaaagtcatcatgtttgtcgagaacagaccttttaatgaccagaggtatttcttggacgatgagaagctcaagagccttggatgggctgagcgcaccccatgggaagaaggcttaaaaaagacaatggagtggtatgtagcaaattctgattattggggtgatgtttctggggccttactgcctcatccaaggacattgatgatgccagggtgcgaggggtctgaggagattaaaggaatactcagccggtttaataacattcaaacaaaggtcggttcaacatcagataatgctccagaaccgcatgccttcaagttcttgatatatggcaggacaggatggatcggcggacttcttgggaaaatatgtgagaagaaaggaattccatatgaatatggaaatggccgcttgcaagagcgttcttcactcgtcctagacatccaaactattaagccaacacatgtcttcaatgccgctggtgtgactggaaggcccaatgttgattggtgtgaatcgcacaagccggacaccatccgtaccaatgttgtgggcaccttgaatctagcagatgtatgtaggaagcatggcttattgatgatgaactatgccactgggtgcatatttgaatacgatgcacatcatcctgaagggtcaggtatcggcttcaaagaggaagatacaccaaattttactggttcgttctactcgaagacgaaggcaatggtcgaggagttattgaaggagtatgagaacgtctgcactctgcgagttcggatgccgatatcctctgacctcagcaacccgcggaacttcgtgacaaagatcagccgttacaacaaggtggtgaacatccccaacagcatgacgatattggacgaactcctgcccatctcagtggagatggcgaagaggaacctgcggggcatctataacttcaccaaccccggcgtcgtcagccacaacgagatcctagagatgtacaagcagtacatcgaccctagcttcaagtggacaaacttcaccctcgaggagcaggcgaaggtcatcgttgctccgcgaagcaacaacgagatggacgcaaccaagctgaagaacgagttccccgagctgctgtcgatcaaggactcgttgatcaagtacgtctttgagcccaacagaaaggtgcccacagactga

SEQ ID NO: 111150 - protein, 676 aa, Zea mays
MDSKSNHTGAMARPYKPKNILITGAAGFIASHVAIRITKKYPDYKIIVLDKLDYCSNLKNLLPVSSSPNFKFVKGDIASVDLVNFLLVTENIDTIMHFAAQTHVDNSFGNSFEFTKNNIYGTHVLLEACRISGQIKRFIHVSTDEVYGETDEDAVVGNHEASQLLPTNPYAATKAGAEMLVMAYGRSYGLPVITTRGNNVYGPNQFPEKLIPKFILLAMRGEPLPIHGDGVNVRSYLYCEDVAEAFEVILHHGEVGHVYNIGTKRERTVLDVAKDVCRLFNLEPDKVIMFVENRPFNDQRYFLDDEKLKSLGWAERTPWEEGLKKTMEWYVANSDYWGDVSGALLPHPRTLMMPGCEGSEEIKGILSRFNNIQTKVGSTSDNAPEPHAFKFLIYGRTGWIGGLLGKICEKKGIPYEYGNGRLQERSSLVLDIQTIKPTHVFNAAGVTGRPNVDWCESHKPDTIRTNVVGTLNLADVCRKHGLLMMNYATGCIFEYDAHHPEGSGIGFKEEDTPNFTGSFYSKTKAMVEELLKEYENVCTLRVRMPISSDLSNPRNFVTKISRYNKVVNIPNSMTILDELLPISVEMAKRNLRGIYNFTNPGVVSHNEILEMYKQYIDPSFKWTNFTLEEQAKVIVAPRSNNEMDATKLKNEFPELLSIKDSLIKYVFEPNRKVPTD

SEQ ID NO: 111151 - DNA, 21 bp, Artificial sequence
  primer
atgacacgctaccaacgcctg

SEQ ID NO: 111152 - DNA, 21 bp, Artificial sequence
  primer
tcaccgttgcgcagcgaattg

SEQ ID NO: 111153 - protein, 573 aa, Artificial sequence
  consensus sequence
  Variant (2)..(2): Xaa in position 2 is any amino acid
  Variant (5)..(5): Xaa in position 5 is any amino acid
  Variant (8)..(8): Xaa in position 8 is any amino acid
  Variant (12)..(16): Xaa in position 12 to 16 is any amino acid
  Variant (18)..(41): Xaa in position 18 to 41 is any amino acid
  Variant (42)..(93): Xaa in position 42 to 93 is any or no amino acid
  Variant (95)..(102): Xaa in position 95 to 102 is any amino acid
  Variant (103)..(127): Xaa in position 103 to 127 is any or no amino acid
  Variant (129)..(129): Xaa in position 129 is any amino acid
  Variant (131)..(134): Xaa in position 131 to 134 is any amino acid
  Variant (135)..(139): Xaa in position 135 to 139 is any or no amino acid
  Variant (141)..(146): Xaa in position 141 to 146 is any amino acid
  Variant (148)..(153): Xaa in position 148 to 153 is any amino acid
  Variant (154)..(158): Xaa in position 154 to 158 is any or no amino acid
  Variant (160)..(161): Xaa in position 160 to 161 is any amino acid
  Variant (163)..(166): Xaa in position 163 to 166 is any amino acid
  Variant (168)..(180): Xaa in position 168 to 180 is any amino acid
  Variant (181)..(190): Xaa in position 181 to 190 is any or no amino acid
  Variant (192)..(195): Xaa in position 192 to 195 is any amino acid
  Variant (198)..(214): Xaa in position 198 to 214 is any amino acid
  Variant (215)..(252): Xaa in position 215 to 252 is any or no amino acid
  Variant (254)..(256): Xaa in position 254 to 256 is any amino acid
  Variant (258)..(276): Xaa in position 258 to 276 is any amino acid
  Variant (277)..(292): Xaa in position 277 to 292 is any or no amino acid
  Variant (294)..(295): Xaa in position 294 to 295 is any amino acid
  Variant (296)..(304): Xaa in position 296 to 304 is any or no amino acid
  Variant (306)..(307): Xaa in position 306 to 307 is any amino acid
  Variant (309)..(338): Xaa in position 309 to 338 is any amino acid
  Variant (339)..(359): Xaa in position 339 to 359 is any or no amino acid
  Variant (362)..(366): Xaa in position 362 to 366 is any amino acid
  Variant (368)..(384): Xaa in position 368 to 384 is any amino acid
  Variant (385)..(404): Xaa in position 385 to 404 is any or no amino acid
  Variant (406)..(432): Xaa in position 406 to 432 is any amino acid
  Variant (433)..(459): Xaa in position 433 to 459 is any or no amino acid
  Variant (461)..(474): Xaa in position 461 to 474 is any amino acid
  Variant (475)..(475): Xaa in position 475 is any or no amino acid
  Variant (477)..(492): Xaa in position 477 to 492 is any amino acid
  Variant (493)..(572): Xaa in position 493 to 572 is any or no amino acid
LXTGXAGXIGSXXXXXLXXXXXXXXXXXXXXXXXXXXXXXXXXXXXXXXXXXXXXXXXXXXXXXXXXXXXXXXXXXXXXXXXXXXXXXXXXXXDXXXXXXXXXXXXXXXXXXXXXXXXXXXXXXXXXHXAXXXXXXXXXVXXXXXXPXXXXXXXXXXXNXXGXXXXLXXXXXXXXXXXXXXXXXXXXXXXSXXXXYGXXXXXXXXXXXXXXXXXXXXXXXXXXXXXXXXXXXXXXXXXXXXXXXXXXXXXXXYXXXKXXXXXXXXXXXXXXXXXXXXXXXXXXXXXXXXXXXRXXXXXXXXXXXNXXGXXXXXXXXXXXXXXXXXXXXXXXXXXXXXXXXXXXXXXXXXXXXXXXXXXXRDXXXXXDXXXXXXXXXXXXXXXXXXXXXXXXXXXXXXXXXXXXXNXXXXXXXXXXXXXXXXXXXXXXXXXXXXXXXXXXXXXXXXXXXXXXXXXXXXXXGXXXXXXXXXXXXXXXLXXXXXXXXXXXXXXXXXXXXXXXXXXXXXXXXXXXXXXXXXXXXXXXXXXXXXXXXXXXXXXXXXXXXXXXXXXXXXXXXXXXXXXXXXXXXXXXXW

SEQ ID NO: 111154 - protein, 12 aa, Artificial sequence
  protein pattern
  Variant (2)..(2): Xaa in position 2 is Ile or Val
  Variant (5)..(5): Xaa in position 5 is any or no amino acid
  Variant (7)..(7): Xaa in position 7 is any or no amino acid
  Variant (9)..(9): Xaa in position 9 is Phe or Tyr
  Variant (10)..(10): Xaa in position 10 is Ile or Val
  Variant (12)..(12): Xaa in position 12 is Ala, Cys, Gly, Ser or Thr
LXTGXAXGXXGX

SEQ ID NO: 111155 - DNA, 813 bp, Azotobacter vinelandii
  CDS (1)..(813): transl_table=11
atgattactgaagatcggcgcttcggcggtatcgcccgtctctacggcagcgaaggcctggcccgcctggccgcggcccacgtggcggtggtcggcatcggcggggtcggctcctgggcggcggaagcgctggcgcgcagcggggtcggcgagatttccctgttcgacctggacgatatctgcatcaccaacaccaaccggcagatccatgccctggatagggcggtgggccggcccaaggtggaggcgatggccgaacgcctgcgcgccatcagccccgagtgccgggtgcatgcggtggccgacttcgtcacccgcgaaaccatggccgagcacatcaccgaagacctggatttcgtcatcgactgcatcgacagcgtggcggccaaggcggcgctgatcgcctggtgcaagcggcgcaagatcggcatcgtcgccaccggcggcgccggcgggcagatcgatccgacgcggatccaggtctgcgacctgaacaagaccttcaacgacccgctcgccgccaaggtgcgctcgaccctgcgccgcgactacggcttctcgcgcacgccggggcggacctatggcgtgccctgcgtgttctccagcgagcagttgcgctaccccaagccggacggcacggtatgccagagcaagggcttcgtcggcgagggcgtgaagctcgactgcgccggcggcttcggcgcggtgaccatggtcaccgccagcttcggcatggccgccgcggccagggcggtggacaagctggtggccggcgcccgtcgtccggcggagcggcgcgcatcgtccgcctga

SEQ ID NO: 111156 - protein, 270 aa, Azotobacter vinelandii
MITEDRRFGGIARLYGSEGLARLAAAHVAVVGIGGVGSWAAEALARSGVGEISLFDLDDICITNTNRQIHALDRAVGRPKVEAMAERLRAISPECRVHAVADFVTRETMAEHITEDLDFVIDCIDSVAAKAALIAWCKRRKIGIVATGGAGGQIDPTRIQVCDLNKTFNDPLAAKVRSTLRRDYGFSRTPGRTYGVPCVFSSEQLRYPKPDGTVCQSKGFVGEGVKLDCAGGFGAVTMVTASFGMAAAARAVDKLVAGARRPAERRASSA

SEQ ID NO: 111157 - DNA, 822 bp, Klebsiella pneumoniae subsp. pneumoniae MGH 78578
  CDS (1)..(822): transl_table=11
atgtctgttgtaatcagcgatgcctggcgccagcgttttggcggtacggcacgtttatatggtgaaaaagcgctgcaatgttttgccgacgcccacgtctgcgtggtcgggatcggcggggtcggctcctgggcggcggaagcgctggcgcggaccggcatcggggcgatcacccttatcgatatggacgatgtctgcgtcaccaacaccaatcgtcagatccacgccctcagcggcaacgtcgggctggcgaaagcggaggtgatggcggagcgtattcgcctgatcaacccggagtgtcgggtgacggtggtggatgatttcgtgaccccggaaaacgtggcggaatatcttggcgtcggctttagctatgttatcgacgccatcgatagcgtccggccgaaagcggcgcttatcgcctggtgtcgccgctacaaggtgccgctggtgactaccggcggggcgggtggtcagattgacccaacgcagatccaggtcgcggacctggcgaagaccatccaggatccgctggcggccaaactgcgagagcggctgaaaagccagtttggggtggtgaaaaacagcaaaggtaagctcggtgtagactgcgtcttctctacggaagcgctggtctacccgcaggcggacggcagcgtctgcgcaatgaagagcacggcggaagggccgaagcggatggactgcgcttccggctttggcgcggcgacgatggtgaccgcgacctttggcttcgtcgcggtgtcgcatgccctgaagaagatgctggcgaaagcgcagcgtgacgctgcggcttccggaaagtag

SEQ ID NO: 111158 - protein, 273 aa, Klebsiella pneumoniae subsp. pneumoniae MGH 78578
MSVVISDAWRQRFGGTARLYGEKALQCFADAHVCVVGIGGVGSWAAEALARTGIGAITLIDMDDVCVTNTNRQIHALSGNVGLAKAEVMAERIRLINPECRVTVVDDFVTPENVAEYLGVGFSYVIDAIDSVRPKAALIAWCRRYKVPLVTTGGAGGQIDPTQIQVADLAKTIQDPLAAKLRERLKSQFGVVKNSKGKLGVDCVFSTEALVYPQADGSVCAMKSTAEGPKRMDCASGFGAATMVTATFGFVAVSHALKKMLAKAQRDAAASGK

SEQ ID NO: 111159 - DNA, 1434 bp, Oryza sativa (japonica cultivar-group); identical to SEQ ID NO: 40797
  CDS (1)..(1434)

SEQ ID NO: 111160 - protein, 477 aa, Oryza sativa (japonica cultivar-group); identical to SEQ ID NO: 40798

SEQ ID NO: 111161 - DNA, 1371 bp, Arabidopsis thaliana
  CDS (1)..(1371)
atggaggagaaatcaaagtatctaagtctcgtcggagccggagctcttatcggatccatctccaccgtcgctctccttaaacttctctccaggagttcattgaagcagcttaatgaaaacccagaaactaatttcttaggaaatggtattgaatctgaaacaagaccagatactgtagcaaatggtcaagatcttttgaaagatgaaattgtttctgaacatttaaccaggaatatacagtttttcggtcttgaatcgcagcataaagtaactggatcatatgttgtggttattggacttggaggtgtagggagtcatgctgcatctatgctcttgaggtcaggtgttggcaagcttctccttgttgactttgatcaggtgtcactatcatcattaaatcgacacgctgttgcaacacgagcagatgttggtattccgaaagctatgtgtctcaagaagcatttctcttcaatctttcctgaatgccatatagaagccaaggtgatgctgtatgactcatcatctgaagaagaaattctttcaggcaagccagatttcgttctggactgcattgacaacatcgatacaaaggtgggacttttggctgcatgtgttaagaggggtttgaaagttctgagtgcaactggtgctggggctagagctgacccaacaagaatcagagtggctgatataagagagtcaacaattgacccgttatctcgatctgtaagacacagattgaggagaaaacacggcattgaaggaggcattcctgttgtattttccctggaaaaaccaaaagcaaagctgcttccctttgaggggacaaatggagaagacgagaatcctttagattatcaagttgttcctggctttcgtgttcggataattcctgttctcggaaccatcccggctatatttggacaaattatggcctcctatgttataacacaacttgcaggtgtgcaagttcagatggagcctatagtgaatctagatttggatcattaccgattgcttcatcaacgccttattgagcatgaggagacagtttatggcacatctgctgaagtcgaggtggatgttgaggaagtgatgtacatagtgaaagagttgtggcacggacgaagtgctagagatgagactgcaaaagatgttggcagagggatgtggcgagccatgaatgagttgatgctcgtaagatgggatgcaaaaaagccagcaacagtctcaaacttggttcttttgaagttcaaagaggcggatgaacatgagactaagactcttgaggaagtgaaggaaagtgaaacagagttctttgaaagagtttcatgcgtactgaagaaggcagagcttgatttctacggctag

SEQ ID NO: 111162 - protein, 456 aa, Arabidopsis thaliana
MEEKSKYLSLVGAGALIGSISTVALLKLLSRSSLKQLNENPETNFLGNGIESETRPDTVANGQDLLKDEIVSEHLTRNIQFFGLESQHKVTGSYVVVIGLGGVGSHAASMLLRSGVGKLLLVDFDQVSLSSLNRHAVATRADVGIPKAMCLKKHFSSIFPECHIEAKVMLYDSSSEEEILSGKPDFVLDCIDNIDTKVGLLAACVKRGLKVLSATGAGARADPTRIRVADIRESTIDPLSRSVRHRLRRKHGIEGGIPVVFSLEKPKAKLLPFEGTNGEDENPLDYQVVPGFRVRIIPVLGTIPAIFGQIMASYVITQLAGVQVQMEPIVNLDLDHYRLLHQRLIEHEETVYGTSAEVEVDVEEVMYIVKELWHGRSARDETAKDVGRGMWRAMNELMLVRWDAKKPATVSNLVLLKFKEADEHETKTLEEVKESETEFFERVSCVLKKAELDFYG

SEQ ID NO: 111163 - DNA, 1374 bp, Arabidopsis thaliana
  CDS (1)..(1374)
atggaggagaaatcaaagtatctaagtctcgtcggagccggagctcttatcggatccatctccaccgtcgctctccttaaacttctctccaggagttcattgaagcagcttaatgaaaacccagaaactaatttcttagcaggaaatggtattgaatctgaaacaagaccagatactgtagcaaatggtcaagatcttttgaaagatgaaattgtttctgaacatttaaccaggaatatacagtttttcggtcttgaatcgcagcataaagtaactggatcatatgttgtggttattggacttggaggtgtagggagtcatgctgcatctatgctcttgaggtcaggtgttggcaagcttctccttgttgactttgatcaggtgtcactatcatcattaaatcgacacgctgttgcaacacgagcagatgttggtattccgaaagctatgtgtctcaagaagcatttctcttcaatctttcctgaatgccatatagaagccaaggtgatgctgtatgactcatcatctgaagaagaaattctttcaggcaagccagatttcgttctggactgcattgacaacatcgatacaaaggtgggacttttggctgcatgtgttaagaggggtttgaaagttctgagtgcaactggtgctggggctagagctgacccaacaagaatcagagtggctgatataagagagtcaacaattgacccgttatctcgatctgtaagacacagattgaggagaaaacacggcattgaaggaggcattcctgttgtattttccctggaaaaaccaaaagcaaagctgcttccctttgaggggacaaatggagaagacgagaatcctttagattatcaagttgttcctggctttcgtgttcggataattcctgttctcggaaccatcccggctatatttggacaaattatggcctcctatgttataacacaacttgcaggtgtgcaagttcagatggagcctatagtgaatctagatttggatcattaccgattgcttcatcaacgccttattgagcatgaggagacagtttatggcacatctgctgaagtcgaggtggatgttgaggaagtgatgtacatagtgaaagagttgtggcacggacgaagtgctagagatgagactgcaaaagatgttggcagagggatgtggcgagccatgaatgagttgatgctcgtaagatgggatgcaaaaaagccagcaacagtctcaaacttggttcttttgaagttcaaagaggcggatgaacatgagactaagactcttgaggaagtgaaggaaagtgaaacagagttctttgaaagagtttcatgcgtactgaagaaggcagagcttgatttctacggctag

SEQ ID NO: 111164 - protein, 457 aa, Arabidopsis thaliana
MEEKSKYLSLVGAGALIGSISTVALLKLLSRSSLKQLNENPETNFLAGNGIESETRPDTVANGQDLLKDEIVSEHLTRNIQFFGLESQHKVTGSYVVVIGLGGVGSHAASMLLRSGVGKLLLVDFDQVSLSSLNRHAVATRADVGIPKAMCLKKHFSSIFPECHIEAKVMLYDSSSEEEILSGKPDFVLDCIDNIDTKVGLLAACVKRGLKVLSATGAGARADPTRIRVADIRESTIDPLSRSVRHRLRRKHGIEGGIPVVFSLEKPKAKLLPFEGTNGEDENPLDYQVVPGFRVRIIPVLGTIPAIFGQIMASYVITQLAGVQVQMEPIVNLDLDHYRLLHQRLIEHEETVYGTSAEVEVDVEEVMYIVKELWHGRSARDETAKDVGRGMWRAMNELMLVRWDAKKPATVSNLVLLKFKEADEHETKTLEEVKESETEFFERVSCVLKKAELDFYG

SEQ ID NO: 111165 - DNA, 822 bp, Vibrio cholerae O1 biovar eltor str. N16961; identical to SEQ ID NO: 40799
  CDS (1)..(822): transl_table=11

SEQ ID NO: 111166 - protein, 273 aa, Vibrio cholerae O1 biovar eltor str. N16961; identical to SEQ ID NO: 40800

SEQ ID NO: 111167 - DNA, 777 bp, Pasteurella multocida subsp. multocida str. Pm70; identical to SEQ ID NO: 40803
  CDS (1)..(777): transl_table=11

SEQ ID NO: 111168 - protein, 258 aa, Pasteurella multocida subsp. multocida str. Pm70; identical to SEQ ID NO: 40804

SEQ ID NO: 111169 - DNA, 813 bp, Pseudomonas aeruginosa PAO1; identical to SEQ ID NO: 40805
  CDS (1)..(813): transl_table=11

SEQ ID NO: 111170 - protein, 270 aa, Pseudomonas aeruginosa PAO1; identical to SEQ ID NO: 40806

SEQ ID NO: 111171 - DNA, 777 bp, Neisseria meningitidis Z2491; identical to SEQ ID NO: 40809
  CDS (1)..(777): transl_table=11

SEQ ID NO: 111172 - protein, 258 aa, Neisseria meningitidis Z2491; identical to SEQ ID NO: 40810

SEQ ID NO: 111173 - DNA, 807 bp, Escherichia coli O157:H7 EDL933
  CDS (1)..(807): transl_table=11
atgtctgtggtaattagtgatgcatggcgtcagcgttttggtggcacagcgcgtctgtatggtgaaaaagcgttgcaactgtttgctgacgcgcatatttgtgtggtcggtattggcggtgtcggttcctgggcggcggaagcgctggcgcgcacggggattggcgcaatcacgcttatcgatatggatgatgtgtgcgtcaccaataccaatcggcaaattcatgccctgcgcgataacgttgggctggcaaaagcggaagtcatggcggaacgtattcgccagattaactcggagtgctgtgtaacggtggtggatgatttcgtgacgccggataacgtagcgcagcatatgagcgtgggttattcgtacgtgattgatgccattgatagtgtacggcccaaagcggcgctgattgcttattgtcggcgcaataaaatcccgctggtcacgaccggtggcgcgggtgggcagattgacccaacgcagattcaggttaccgatctggcgaaaacgattcaggacccgctggcggcgaagttgcgtgagcgcctgaaaagcgattttggcgtagtgaaaaacagtaaaggtaagctcggtgtggattgcgtgttctctaccgaagcattggtgtatccgcagtcagacggtacggtgtgtgcgatgaaagccacggcggaaggaccaaagcggatggattgtgcatctggatttggcgcggcaacgatggtgaccgccacctttggttttgttgcggtttctcatgcgctgaagaagatgatggcgaaagcggcgcgtcaggggtaa

SEQ ID NO: 111174 - protein, 268 aa, Escherichia coli O157:H7 EDL933
MSVVISDAWRQRFGGTARLYGEKALQLFADAHICVVGIGGVGSWAAEALARTGIGAITLIDMDDVCVTNTNRQIHALRDNVGLAKAEVMAERIRQINSECCVTVVDDFVTPDNVAQHMSVGYSYVIDAIDSVRPKAALIAYCRRNKIPLVTTGGAGGQIDPTQIQVTDLAKTIQDPLAAKLRERLKSDFGVVKNSKGKLGVDCVFSTEALVYPQSDGTVCAMKATAEGPKRMDCASGFGAATMVTATFGFVAVSHALKKMMAKAARQG

SEQ ID NO: 111175 - DNA, 807 bp, Salmonella enterica subsp. enterica serovar Typhi str. CT18; identical to SEQ ID NO: 40837
  CDS (1)..(807): transl_table=11

SEQ ID NO: 111176 - protein, 268 aa, Salmonella enterica subsp. enterica serovar Typhi str. CT18; identical to SEQ ID NO: 40838

SEQ ID NO: 111177 - DNA, 807 bp, Salmonella typhimurium LT2
  CDS (1)..(807): transl_table=11
atgtcagtggtgataagtgatgcctggcgccaacgctttggcggcaccgcgcgtctgtacggtgaaaaagcgctgcagcggtttgctgaggcgcatatctgcgtcgtaggaatcggcggggtgggatcatgggcggcagaggcgctggcgcgtacgggcatcggcgcgattacgctgattgatatggacgatgtctgcgtgaccaatacgaaccgtcagatccatgcgttgcgtgataacgtcgggttggcgaaagcggaagtgatggccgaacggattcggcaaattaacccggagtgccgggtaacggttatcgatgatttcatcacgccggataatgtggcgggttatatgaacgcgggttttacctatgtcattgacgctattgacagcgttcgtccaaaagccgcgctgattgcgtactgtcgccgatataaggttcctttagtgaccactggcggcgcgggcgggcagatcgatccgacgcaaatccaggtcgctgatttggcgaaaaccatccaggatccgctggcggcaaaactgcgcgagagattgaaacataattttggcgtagtgaagaacagtaaaggtaagctgggcgtggactgcgttttttccaccgaagcgctggtttacccacaggcggacggttccgtatgcgcgatgaaagctaccgcagaagggccaaaacggatggattgcgcctctggcttcggcgcggcgacgatggtgacggcaacgttcggttttgtcgccgtttcccatgcgctgaagaagatcatggctaaagcggcgcgacaagaataa

SEQ ID NO: 111178 - protein, 268 aa, Salmonella typhimurium LT2
MSVVISDAWRQRFGGTARLYGEKALQRFAEAHICVVGIGGVGSWAAEALARTGIGAITLIDMDDVCVTNTNRQIHALRDNVGLAKAEVMAERIRQINPECRVTVIDDFITPDNVAGYMNAGFTYVIDAIDSVRPKAALIAYCRRYKVPLVTTGGAGGQIDPTQIQVADLAKTIQDPLAAKLRERLKHNFGVVKNSKGKLGVDCVFSTEALVYPQADGSVCAMKATAEGPKRMDCASGFGAATMVTATFGFVAVSHALKKIMAKAARQE

SEQ ID NO: 111179 - DNA, 903 bp, Ralstonia solanacearum GMI1000; identical to SEQ ID NO: 40817
  CDS (1)..(903): transl_table=11

SEQ ID NO: 111180 - protein, 300 aa, Ralstonia solanacearum GMI1000; identical to SEQ ID NO: 40818

SEQ ID NO: 111181 - DNA, 762 bp, Clostridium perfringens str. 13
  CDS (1)..(762): transl_table=11
atgttacaacattcattgtcaagaacagaattactaataggtaaagatgctttagataaattagcaaagagcaaagttatggtatttggagttggtggagtaggaagctttactgtagaagctttagctagagcaggagtaggaaacttaattttagttgatgatgatactgtttgtttaacaaatttaaacagacaaatacatgctacatataaaactataagtaaaaacaaagtagaagttatgaaggaaagagttctttcagtaaatagaaattgcaatgtggagactatacaagtttttgttactccagataatttagaagaaataataccagatgatgtagattatgtggtagatgctattgatactgtttcagctaagatagctcttgctgtttattgtgaacaaaagggaataaaacttatgagttcaatgggaactggaaacaaattaaatccagcagagtttaaagtagctgatatatataatacaaaggtatgtccactagctaaggttatgagatatgaacttagaaaaagaggagttaagaagttaaaggttgtttattcagaagaaatgcctagaaaaccaaaggttgaagatgtagttacttgcaaaacaggatgtgtttgtactggtggaactaaaaaatgttcagctaaaagacaaataccaggaagtgtatctttcgtacctccagtagctggtatgataatagcatcagaagtggttaaagatttaataaaagaatatatttaa

SEQ ID NO: 111182 - protein, 253 aa, Clostridium perfringens str. 13
MLQHSLSRTELLIGKDALDKLAKSKVMVFGVGGVGSFTVEALARAGVGNLILVDDDTVCLTNLNRQIHATYKTISKNKVEVMKERVLSVNRNCNVETIQVFVTPDNLEEIIPDDVDYVVDAIDTVSAKIALAVYCEQKGIKLMSSMGTGNKLNPAEFKVADIYNTKVCPLAKVMRYELRKRGVKKLKVVYSEEMPRKPKVEDVVTCKTGCVCTGGTKKCSAKRQIPGSVSFVPPVAGMIIASEVVKDLIKEYI

SEQ ID NO: 111183 - DNA, 831 bp, Xanthomonas campestris pv. campestris str. ATCC 33913
  CDS (1)..(831): transl_table=11
atgaaagcacaatggcgtgaacgctttgccggtatcgaccggctgtacggagttggcacggtggagcggctggccgagtgccgggtcgcggtagtgggcatgggcggggtgggctcgtgggtggtggaggcgctggcccgcaccggcgtgggccatctgcggctgatcgatgccgacgatctatgcgtgtccaacaccaatcggcagctgccggcgctggccggccagtacgggcgcaacaaggcgcgcgcaatggccgagcgctgcgtggcaatcaatccggagatcgaggccgatgcggtggagtcatttctcaccgccggcaatatcgagagcctgctgggcgagggcttcgatctggtgatcgatgcctgcgacagttttcgcgtgaaagtcgaaaccatcgcctggtgccggcgtcgcaagctgccgctgctgacggtgggtgctgcaggcgggcgcaccgacccgaccctggtgcgtgtacgcgatgtctcgcgcaccgagcacgacgcgatgctggcactgatccgcaagaagttgcgcagcgacttcaactttccgaaaagcgccaagcgctacttcggcgtgccggcggtgtattcgctggagaacgtgaagtacccgcaagccgatggcagcgtttgcggcattcgtccgcaactgggcgccgatgccgcgctcaagctggactgtggtgccgggctgggcgcggccacccacatcaccggcacgttcgccttcgtcgcggtcggcaaggcgctggagatgttgctcaagcccaagagcgcggcagcgttacctgccgcagcggatgcggcggcggcgtag

SEQ ID NO: 111184 - protein, 276 aa, Xanthomonas campestris pv. campestris str. ATCC 33913
MKAQWRERFAGIDRLYGVGTVERLAECRVAVVGMGGVGSWVVEALARTGVGHLRLIDADDLCVSNTNRQLPALAGQYGRNKARAMAERCVAINPEIEADAVESFLTAGNIESLLGEGFDLVIDACDSFRVKVETIAWCRRRKLPLLTVGAAGGRTDPTLVRVRDVSRTEHDAMLALIRKKLRSDFNFPKSAKRYFGVPAVYSLENVKYPQADGSVCGIRPQLGADAALKLDCGAGLGAATHITGTFAFVAVGKALEMLLKPKSAAALPAAADAAAA

SEQ ID NO: 111185 - DNA, 807 bp, Shigella flexneri 2a str. 301
  CDS (1)..(807): transl_table=11
atgtctgtggtaattagtgatgcatggcgtcagcgttttggtggcacagcgcgtctgtatggtgaaaaagcgttgcaactgtttgctgacgcgcatatttgtgtggttggtatcggtggtgtcggttcctgggcggcggaagcgctggcgcgcacggggattggcgcaatcacgcttatcgatatggatgatgtgtgcgtcaccaataccaatcggcaaattcacgctctgcgcgataacgtcgggctggcaaaagcggaagtcatggcggagcgcattcgccagattaacccggagtgccgtgtaacggtggtggatgatttcgtgacgccggataacgtagcgcaatatatgagtgccggttattcgtacgtgattgatgccattgatagtgtacggcccaaagcggcgctgattgcttattgtcggcgcaataaaatcccgctggtcacgaccggtggcgcgggtgggcagattgacccgacgcagattcaggttaccgatctggcgaaaacgattcaggatccgctggcggcgaagttgcgcgagcgcctgaaaagcgattttggcgtagtgaaaaacagtaaaggtaagctcggcgtggattgcgtgttttctactgaagcgctggtgtacccgcagtcagacggtacggtgtgtgcgatgaaagccacggcagaagggccgaagcggatggattgtgcatctggatttggcgcggcaacgatggtgaccgccacctttgggtttgttgcggtttctcatgcgctgaagaagatgatggcgaaagcggcgcgtcagggttaa

SEQ ID NO: 111186 - protein, 268 aa, Shigella flexneri 2a str. 301
MSVVISDAWRQRFGGTARLYGEKALQLFADAHICVVGIGGVGSWAAEALARTGIGAITLIDMDDVCVTNTNRQIHALRDNVGLAKAEVMAERIRQINPECRVTVVDDFVTPDNVAQYMSAGYSYVIDAIDSVRPKAALIAYCRRNKIPLVTTGGAGGQIDPTQIQVTDLAKTIQDPLAAKLRERLKSDFGVVKNSKGKLGVDCVFSTEALVYPQSDGTVCAMKATAEGPKRMDCASGFGAATMVTATFGFVAVSHALKKMMAKAARQG

SEQ ID NO: 111187 - DNA, 804 bp, Shewanella oneidensis MR-1; identical to SEQ ID NO: 40821
  CDS (1)..(804): transl_table=11

SEQ ID NO: 111188 - protein, 267 aa, Shewanella oneidensis MR-1; identical to SEQ ID NO: 40822

SEQ ID NO: 111189 - DNA, 816 bp, Pseudomonas putida KT2440; identical to SEQ ID NO: 40823
  CDS (1)..(816): transl_table=11

SEQ ID NO: 111190 - protein, 271 aa, Pseudomonas putida KT2440; identical to SEQ ID NO: 40824

SEQ ID NO: 111191 - DNA, 807 bp, Escherichia coli CFT073; identical to SEQ ID NO: 40825
  CDS (1)..(807): transl_table=11

SEQ ID NO: 111192 - protein, 268 aa, Escherichia coli CFT073; identical to SEQ ID NO: 40826

SEQ ID NO: 111193 - DNA, 831 bp, Xylella fastidiosa Temecula1; identical to SEQ ID NO: 40831
  CDS (1)..(831): transl_table=11

SEQ ID NO: 111194 - protein, 276 aa, Xylella fastidiosa Temecula1; identical to SEQ ID NO: 40832

SEQ ID NO: 111195 - DNA, 831 bp, Pseudomonas syringae pv. tomato str. DC3000; identical to SEQ ID NO: 40833
  CDS (1)..(831): transl_table=11

SEQ ID NO: 111196 - protein, 276 aa, Pseudomonas syringae pv. tomato str. DC3000; identical to SEQ ID NO: 40834

SEQ ID NO: 111197 - DNA, 765 bp, Haemophilus ducreyi 35000HP; identical to SEQ ID NO: 40841
  CDS (1)..(765): transl_table=11

SEQ ID NO: 111198 - protein, 254 aa, Haemophilus ducreyi 35000HP; identical to SEQ ID NO: 40842

SEQ ID NO: 111199 - DNA, 864 bp, Bordetella pertussis Tohama I; identical to SEQ ID NO: 40843
  CDS (1)..(864): transl_table=11

SEQ ID NO: 111200 - protein, 287 aa, Bordetella pertussis Tohama I; identical to SEQ ID NO: 40844

SEQ ID NO: 111201 - DNA, 873 bp, Bordetella parapertussis 12822; identical to SEQ ID NO: 40845
  CDS (1)..(873): transl_table=11

SEQ ID NO: 111202 - protein, 290 aa, Bordetella parapertussis 12822; identical to SEQ ID NO: 40846

SEQ ID NO: 111203 - DNA, 873 bp, Bordetella bronchiseptica RB50; identical to SEQ ID NO: 40847
  CDS (1)..(873): transl_table=11

SEQ ID NO: 111204 - protein, 290 aa, Bordetella bronchiseptica RB50; identical to SEQ ID NO: 40848

SEQ ID NO: 111205 - DNA, 777 bp, Chromobacterium violaceum ATCC 12472; identical to SEQ ID NO: 40849
  CDS (1)..(777): transl_table=11

SEQ ID NO: 111206 - protein, 258 aa, Chromobacterium violaceum ATCC 12472; identical to SEQ ID NO: 40850

SEQ ID NO: 111207 - DNA, 750 bp, Porphyromonas gingivalis W83; identical to SEQ ID NO: 40851
  CDS (1)..(750): transl_table=11

SEQ ID NO: 111208 - protein, 249 aa, Porphyromonas gingivalis W83; identical to SEQ ID NO: 40852

SEQ ID NO: 111209 - DNA, 651 bp, Wolinella succinogenes DSM 1740; identical to SEQ ID NO: 40853
  CDS (1)..(651): transl_table=11

SEQ ID NO: 111210 - protein, 216 aa, Wolinella succinogenes DSM 1740; identical to SEQ ID NO: 40854

SEQ ID NO: 111211 - DNA, 813 bp, Photorhabdus luminescens subsp. laumondii TTO1; identical to SEQ ID NO: 40855
  CDS (1)..(813): transl_table=11

SEQ ID NO: 111212 - protein, 270 aa, Photorhabdus luminescens subsp. laumondii TTO1; identical to SEQ ID NO: 40856

SEQ ID NO: 111213 - DNA, 861 bp, Vibrio vulnificus YJ016; identical to SEQ ID NO: 40857
  CDS (1)..(861): transl_table=11

SEQ ID NO: 111214 - protein, 286 aa, Vibrio vulnificus YJ016; identical to SEQ ID NO: 40858

SEQ ID NO: 111215 - DNA, 768 bp, Geobacter sulfurreducens PCA
  CDS (1)..(768): transl_table=11
atgtcccttcaccgtttttcacgcaccgagatcctgatcggccccgaaggacttcagcggctgcacggctcgactgtggccgtgttcggcctcggcggagtcggcagcttcgcggcagaggccctctgccgcgccggggtcggccggctggtcctcgtcgatttcgacgatatctgcctcaccaacgtcaaccggcagctccacgccctggacgggaccgtggggagggccaaggtgcaggtcatggccgaacgcctccgcctcatcaatccccaagcggacatcgtcccgcacaaggacttctacgaggcggcgaacagcgacttcctcctctcggggggtcatgactacgtggtggacgccattgaccacatcacgagcaagctccacctgatcagaagctgcaaggagcgggggctgcccatcgtctcaagcatgggggccgccaacaagcttgacccggctcggattcgcgtggctgacatcgcccagacgagcacctgccgcatggccaaggtggtgcgaaagctcctccgcaagcaggggatcaaaaacggggtgaaggtggtctactccaccgaagagtaccgtgaacaggctatgcctgatgccgggtgccggtccgactgcatctgccccaacaaagaggagcagcgcttctcctgcgagcaccgccggacgatcctcggcagcatttccttcattcccagcatattcggcctcaccatggccggcgtcgtggtgaacgacctgctggagccccgttga

SEQ ID NO: 111216 - protein, 255 aa, Geobacter sulfurreducens PCA
MSLHRFSRTEILIGPEGLQRLHGSTVAVFGLGGVGSFAAEALCRAGVGRLVLVDFDDICLTNVNRQLHALDGTVGRAKVQVMAERLRLINPQADIVPHKDFYEAANSDFLLSGGHDYVVDAIDHITSKLHLIRSCKERGLPIVSSMGAANKLDPARIRVADIAQTSTCRMAKVVRKLLRKQGIKNGVKVVYSTEEYREQAMPDAGCRSDCICPNKEEQRFSCEHRRTILGSISFIPSIFGLTMAGVVVNDLLEPR

SEQ ID NO: 111217 - DNA, 831 bp, Bdellovibrio bacteriovorus HD100; identical to SEQ ID NO: 40859
  CDS (1)..(831): transl_table=11

SEQ ID NO: 111218 - protein, 276 aa, Bdellovibrio bacteriovorus HD100; identical to SEQ ID NO: 40860

SEQ ID NO: 111219 - DNA, 1575 bp, Magnaporthe grisea 70-15; identical to SEQ ID NO: 40861
  CDS (1)..(1575)

SEQ ID NO: 111220 - protein, 524 aa, Magnaporthe grisea 70-15; identical to SEQ ID NO: 40862

SEQ ID NO: 111221 - DNA, 1572 bp, Gibberella zeae PH-1
  CDS (1)..(1572)
atgtcctccttcttatcgtcagaaacactttcaaatcctaggtttcagctatttgcggcagccgctttttcaggagctacagtcgcatctctaatattgggttaccaggcgttggagcgagaagagagagtttatgagctcaagaactcaatccctgcagatgatcctaatctccatcctgtactgtcgtcatgcttcttcagtaaaaacactactgaccagtcacagttgaacaactttggtggttcatcagcgccaccagtcgataaagaagatgccaggaaccaggccatggctcgtcgtgcgcaagcaggagactttgacgaagagttgatccttgagcaattggcgagaaaccgtgtatttctaacggacgagggtctcgataagcttcgaaactctttcgttattgtggtgggctgtggtggcgttggatcacactgtaccgctgctctggcacgctctggagtgtctaaaattcgattgatcgattttgaccaagtgactttgagctctctcaatcgccatgcggttgctactctggccgatgttggtattcccaaggtgcaatgcttggagaggcgcatgatggctatcgccccttgggtgaaatttgatctacgacaggagcagttcaacgagaatgttgcggaacgattacttcgaccttggggcgatgatggacgtgcccctgactttgtcatcgatgctattgacaacatagagaccaaggtttcgcttctcgaatactgccacaagaacaacctaccagtcatcagcgccatgggcgctggttgcaagagtgacccaaccagaatcatcgtaggagacataggatcaagcaaggatgacggtctctcgcgcgcgacccgaaggaagctcaagctaaagggtatcacaagcggagtcccagttgtttactctacagaaacagcaggtgctggcaaggccgagctgctccctcttcccgaggaggagttccaaaagggctctgttggcgatcttgcagccatgccaaacttccgagtccgaatcctccccgtccttggcacgatgcctgctatctttggtctcaccgtcgccaaccatgttatcctgagcatcacaggctatcccctcgactacgtgcccgccaagggtcgcgagaagatgtatgagggaatgctggcaacgatacagagctccgaggagaaactggcacgcatgacttacgagggcgacacagtcggcctcaaggtgcctattaccactggcgacgttgctttcctttccgaagagctgtaccgtggccgaagcgccataagcggcatccctacaaagctggtcctcatccgatgggagaagcccgaaggacccagcatgacaaccttgggcgagggcaaggacacccagaagtgctcgacggtgaaattgagggatctcgtattgatgacgaaggaggaggcaacacgccatgaaaaggggatctttaaggagggaaagtctcttgacgaggtgtacgacgccgagacactcgcgcgcgtagaggagaagagggcaacagctgaaaaatacgaggctttccgatcatga

SEQ ID NO: 111222 - protein, 523 aa, Gibberella zeae PH-1
MSSFLSSETLSNPRFQLFAAAAFSGATVASLILGYQALEREERVYELKNSIPADDPNLHPVLSSCFFSKNTTDQSQLNNFGGSSAPPVDKEDARNQAMARRAQAGDFDEELILEQLARNRVFLTDEGLDKLRNSFVIVVGCGGVGSHCTAALARSGVSKIRLIDFDQVTLSSLNRHAVATLADVGIPKVQCLERRMMAIAPWVKFDLRQEQFNENVAERLLRPWGDDGRAPDFVIDAIDNIETKVSLLEYCHKNNLPVISAMGAGCKSDPTRIIVGDIGSSKDDGLSRATRRKLKLKGITSGVPVVYSTETAGAGKAELLPLPEEEFQKGSVGDLAAMPNFRVRILPVLGTMPAIFGLTVANHVILSITGYPLDYVPAKGREKMYEGMLATIQSSEEKLARMTYEGDTVGLKVPITTGDVAFLSEELYRGRSAISGIPTKLVLIRWEKPEGPSMTTLGEGKDTQKCSTVKLRDLVLMTKEEATRHEKGIFKEGKSLDEVYDAETLARVEEKRATAEKYEAFRS

SEQ ID NO: 111223 - DNA, 1341 bp, Kluyveromyces lactis NRRL Y-1140; identical to SEQ ID NO: 40863
  CDS (1)..(1341)

SEQ ID NO: 111224 - protein, 446 aa, Kluyveromyces lactis NRRL Y-1140; identical to SEQ ID NO: 40864

SEQ ID NO: 111225 - DNA, 1236 bp, Debaryomyces hansenii CBS767
  CDS (1)..(1236)
atggactctcgtgataacgtaaagtcacctccatcgactaaacaaattacagaaacaaataaagactattcagaagaactaattcaagaacagttggctcgtaactatgcatctttgacggaaggaggcatggaaaaggtaagaaaccaaaacattgtggttgttggtgctggtggagttgggtcatgggtcacgacgatgttagttagatctggcgtgggcaaaattagggtaatagactttgaccaggtttcgttgagttccttgaatagacatgcagtagcaaacttgaaagatgttggaatatccaaagtggaatgtttgagaaatcatttattacaaattgcaccttggattgaaatcgataccaaaaaccaattgtggaacatagatgtggccgaagaattaatatttggcgaagatttcaaaccaacgtacgttgttgattgcattgataatatagatactaaagtggacttgttaactttctgtcacgaaaagaagttaccggttatttcctcgggaggtgcagcgtgcaagtcggacccaaccagagttaatatttctgatatatccaagactgaagaagatccattatcacgttcagtacgtattcgtttgaaaaagagaggtattattagcagcatcccagttgtattctctgccgaaaagccagacccaagaaaagctcaattaatgccattaactgatgccgaaattgcaaaaggtgaggttgatcaattatcggccatcaagaacttcagagttaggattttgcctgttttaggtacaatgccaggtatgtttggattgacccttgccacccacctcattacctccatctcaggatacccggttgaaccaattgagggtaagaacagatacaaggtctacgacggaatattacagagtttggcgggtcaacaatctagaattggcaaattggaccaaagagttcctatcgcattgaacgacgtcaactatatcttagaagaagttttccacggcaagtcccctatatccaactactcgaccaggttgacgttatccagatgggatccaagaaaagaattatcttatcaaaacgttgttataatgacgaaagaagaacagaagttgcacgaagatagggtcttaaaaggtggtgaactattgacagaagtttatacaaaggaaatacttgacagagtagaacaaagattctctgaagaacgcttctattctcaattccgttaa

SEQ ID NO: 111226 - protein, 411 aa, Debaryomyces hansenii CBS767
MDSRDNVKSPPSTKQITETNKDYSEELIQEQLARNYASLTEGGMEKVRNQNIVVVGAGGVGSWVTTMLVRSGVGKIRVIDFDQVSLSSLNRHAVANLKDVGISKVECLRNHLLQIAPWIEIDTKNQLWNIDVAEELIFGEDFKPTYVVDCIDNIDTKVDLLTFCHEKKLPVISSGGAACKSDPTRVNISDISKTEEDPLSRSVRIRLKKRGIISSIPVVFSAEKPDPRKAQLMPLTDAEIAKGEVDQLSAIKNFRVRILPVLGTMPGMFGLTLATHLITSISGYPVEPIEGKNRYKVYDGILQSLAGQQSRIGKLDQRVPIALNDVNYILEEVFHGKSPISNYSTRLTLSRWDPRKELSYQNVVIMTKEEQKLHEDRVLKGGELLTEVYTKEILDRVEQRFSEERFYSQFR

SEQ ID NO: 111227 - DNA, 1440 bp, Yarrowia lipolytica CLIB122
  CDS (1)..(1440)
atgtccaaacccggctggaccacggtggctctggcggctgcactcagttcgctggcgaccgcctgcgtgctgacctttacaaaatgcaatcccaacttctacgacgacgtgcgaacacaaaaacctgctgagtcagcgtcgaaatccacatctgcttcaaagcccttcctggctccctctgacgacgagcaggaagagctgattcttgaacagcttgcgcgatcccgtgtgttcttcggtgacgatggactggaggtgattcgaaagtcctcggtggttatcgtgggtgctggaggagtgggctcttgggccgctaccatgctgcttcgatctggtgttggaaacgtgcggttggtggactttgaccaggtgactctctcgtctcttaacagacatgccaccgccagcagagcccatgttggtatccccaaggtggagtctgtgaagcagtactttagcggagtcgtcccctgggccaacatcgaggctgtccaggacctgtgggtgcctgccaagctgagtaagagcgagcaagaatacactgagatggccgaacgacttatctatgttaacggcgacaagcccgactgggtgctggactgcatcgacaacattgacgccaaggtggacctgctgcatttctgcaagtcccgtgatatcaaggtcatttcgtccatgggtgcgggatgcaagagtgatttcacccaagtccgtattgccgacatctcccagactgccgaggatcccctttccaaggccactcgagtcaagcttcgaaagctcggtgtctacgaaggtattcctgtgatcttctcgactgagaagccaggagaagccaaactgcttcccttggaagattctgagtttgaaaagaagaacgaggaaaacgagacaactgtcggtgagctatccgttctaccccagtaccgtgtgcggattctgcctgtcctgggctccctacctgccatttttggactctccatggccacccatgtgcttacatctatcggggattacgccagcattcctgaatacattgtcactcaaagccgacacaagcccaaggcctacgaccagattcagcagaccttggttggccagctggctcgggaaagtaagcgtcgaaccggagaaaacggtattcgaattgcggctccttttgactcagccgacgtcggctatcttgtcgaggaggtatacaagaacaagtccgtaatttcaggcgaatgttcgcgactgtcgctttcgcgatggagaaaggagggccctattaacctgcagaatgtggttgtcatgaccaaggacgagcagaagaagcatgaggaactagtcttgcgcgacgagaaccccatgaccgtggaggaagtgtatccggagtgggttctgaatcaagttgagcatagattgagacaggagaagcattattctatgtatagatag

SEQ ID NO: 111228 - protein, 479 aa, Yarrowia lipolytica CLIB122
MSKPGWTTVALAAALSSLATACVLTFTKCNPNFYDDVRTQKPAESASKSTSASKPFLAPSDDEQEELILEQLARSRVFFGDDGLEVIRKSSVVIVGAGGVGSWAATMLLRSGVGNVRLVDFDQVTLSSLNRHATASRAHVGIPKVESVKQYFSGVVPWANIEAVQDLWVPAKLSKSEQEYTEMAERLIYVNGDKPDWVLDCIDNIDAKVDLLHFCKSRDIKVISSMGAGCKSDFTQVRIADISQTAEDPLSKATRVKLRKLGVYEGIPVIFSTEKPGEAKLLPLEDSEFEKKNEENETTVGELSVLPQYRVRILPVLGSLPAIFGLSMATHVLTSIGDYASIPEYIVTQSRHKPKAYDQIQQTLVGQLARESKRRTGENGIRIAAPFDSADVGYLVEEVYKNKSVISGECSRLSLSRWRKEGPINLQNVVVMTKDEQKKHEELVLRDENPMTVEEVYPEWVLNQVEHRLRQEKHYSMYR

SEQ ID NO: 111229 - DNA, 1548 bp, Aspergillus nidulans FGSC A4; identical to SEQ ID NO: 40865
  CDS (1)..(1548)

SEQ ID NO: 111230 - protein, 515 aa, Aspergillus nidulans FGSC A4; identical to SEQ ID NO: 40866

SEQ ID NO: 111231 - DNA, 1305 bp, Candida albicans SC5314
  CDS (1)..(1305): transl_table=12
atgtcaccaagatctataatactatctgtagtggctacggcggctgttactattggattagtagaggcgttccattgctatgaaagaaagaaaatacatccccaacctcccaaagagactcctgccaaacgagaccattcaaaagaattgattcgagaacagttagcccgtaattatgcctttcttactgaagatggtatggacaaggtgcgtaaacaacgagttgtagttgttggagctggtggtgtaggttcatgggtcgccaccatgttggcaagatcaggtgttgaaagcttgcgtattattgattttgaccaagtgtcgttgagctcattgaatagacatgcagttgcaacattaaaggatgtgggaatccctaaggtcgagtgcatcaagaaccatttattggagattgccccttggatagagatagatacacgcaatcaattgtggaatctagagctggcagaggagttgatttatggcgacgatttccagccaacatttatcgttgattgtattgataatttagacacaaagtgtgacttgttggcgtactgccacgaaaagaaattgccaatagtatcttcaggaggagcagccacaaagctggaccctacgagaattaatctagctgatatctccaaaaccgaagaagacccgttaatgaagaaaattagagtggttctcaaaaagcgtggtattattaatggtatacctgttgtgttttcagcagagaagcccgacccaagaaaggccaaattgttgccgttacccgatgacgagtttaccaaaggaaatgttgatcaattgtcggcactaaaggattttcgtgtgagaatcttgccggttttgggtacaatgcctggtatgtttgggttggctattgctacatatattttaactacagtcgcagggtatcccatggagccagttgaaggtaagaacaggtacaagatatacgacgacttgttgcaaagtcttgcgggacaacaaactagaataggcaagactgaccaacgtgtacagatagccatgcatgaggttaattatattttggaggaagttttccgtgggaaatcgccgatttcgaattactctacacgtttgacattatcgcgatgggaccccagtaaagaaatatcgtttcagaatgttgttgtcatgactaaagacgaacaaagaaatcacgaaaagagggttctcaatggtggtgaaaagattgaagatgtgtatctgaaagaagtggttgatttggtgaaatcaagatttgaagatgaaaagtacttttctcagtttagataa

SEQ ID NO: 111232 - protein, 434 aa, Candida albicans SC5314
MSPRSIILSVVATAAVTIGLVEAFHCYERKKIHPQPPKETPAKRDHSKELIREQLARNYAFLTEDGMDKVRKQRVVVVGAGGVGSWVATMLARSGVESLRIIDFDQVSLSSLNRHAVATLKDVGIPKVECIKNHLLEIAPWIEIDTRNQLWNLESAEELIYGDDFQPTFIVDCIDNLDTKCDLLAYCHEKKLPIVSSGGAATKSDPTRINLADISKTEEDPLMKKIRVVLKKRGIINGIPVVFSAEKPDPRKAKLLPLPDDEFTKGNVDQLSALKDFRVRILPVLGTMPGMFGLAIATYILTTVAGYPMEPVEGKNRYKIYDDLLQSLAGQQTRIGKTDQRVQIAMHEVNYILEEVFRGKSPISNYSTRLTLSRWDPSKEISFQNVVVMTKDEQRNHEKRVLNGGEKIEDVYSKEVVDLVKSRFEDEKYFSQFR

SEQ ID NO: 111233 - DNA, 1425 bp, Cryptococcus neoformans var. neoformans B-3501A
  CDS (1)..(1425)
atgaccatctcactgccggacatatcccaccgccagtctcttatcctcacagccctcgccgctgccctcggcacaacatctatcatcttatctttccaggcacttcgtcgtgaggcccggactgagcggcttaaacgccaagtcggacaggacgtcgaagaatgggagaggagtcatgagggcagtggaatgagtagccccgatgagaagattgagaggatcgtgagaaaagagaagaactgggagaaggagtttgatgagggattgatcagggaacagcttaccaggaactacaacttcttgggagaagagtccatggggttagttaggaaatcatatgtcgtggttgttggatgtggtggagttggaagttggtgtgctttaatgctgttaagaagtggtgttggccgtattctccttatcgattttgatctcgcaaccctttcttctctcaatagacatgcttgtgccaccctcgaggatgtaggcaccccgaaagttattgccatgcaaaaatatcttaaaaagattgctccctgggctcggattgaggtagaaattggattgtggcggaaaggcgaaggggaaaaatggcttgagggtgccgactgggtcgtggatgcaatcgacaacatcgacaccaaggctgaccttctcgcacactgccacgagcaaggaatcaaggtattttccagtatgggttcgggtgctaaaaaggaccctacaagagtacagatcgcggacatctcgtcgacgtacgaagatcctcttgctaggagcgtgaggcgaaggctgagaatggctggcatctcctccggtatccctgtggtctattccactgagaccccctccgaagtcaagcttcttccattggatgaagaggaattcaagcgaggcgcggtcaaggaactgcaagcatttgacgatttccgagtgcgaattatgcctgtgcttggtcccttgccagccatctttggtttgaacattgccacctatatccttcttgacctcgctggcaagcccttgacagattacatggagatcaaaaaccgaaagagggtataccaatccctcgaaaggggtctgtccgatcgagaaacaaaggtcaagggcgaaaaattgcagggcaagttgccaatttctcttgaagatattggatttgtctttgaggagctttaccacggtcgatcaagtttgccgcctttcgaagtgcttcagaaggcaaatgtcatcagatggcaaaagaaccaagatttatccgctgacaaccttgtggtgatggggaacaaggacgcagagaagcataccaaagagtgcttgattggggacagggatgtgcgcgaagtctggggtgatgaggtcgtagaatttatcaagcgaaaatccgatgaagcgcggaagactattgcctggagaagagcttag

SEQ ID NO: 111234 - protein, 474 aa, Cryptococcus neoformans var. neoformans B-3501A
MTISLPDISHRQSLILTALAAALGTTSIILSFQALRREARTERLKRQVGQDVEEWERSHEGSGMSSPDEKIERIVRKEKNWEKEFDEGLIREQLTRNYNFLGEESMGLVRKSYVVVVGCGGVGSWCALMLLRSGVGRILLIDFDLATLSSLNRHACATLEDVGTPKVIAMQKYLKKIAPWARIEVEIGLWRKGEGEKWLEGADWVVDAIDNIDTKADLLAHCHEQGIKVFSSMGSGAKKDPTRVQIADISSTYEDPLARSVRRRLRMAGISSGIPVVYSTETPSEVKLLPLDEEEFKRGAVKELQAFDDFRVRIMPVLGPLPAIFGLNIATYILLDLAGKPLTDYMEIKNRKRVYQSLERGLSDRETKVKGEKLQGKLPISLEDIGFVFEELYHGRSSLPPFEVLQKANVIRWQKNQDLSADNLVVMGNKDAEKHTKECLIGDRDVREVWGDEVVEFIKRKSDEARKTIAWRRA

SEQ ID NO: 111235 - DNA, 870 bp, Herminiimonas arsenicoxydans
  CDS (1)..(870): transl_table=11
atgaattctcagcctgtacccctcactcccgtcgttccagaaatcgatttcgagcgccgtttcggcggcattgcacgcctctatggccctgccgcattaacacgttttcgcgccgcgcatgtttgcgtagtcggcgtaggcggcgtcggctcctgggtggtcgaagcgctggcgcgtagcgccatcgggaaaatcacgatgatcgatctggacaatctggcggaatccaatgtcaaccggcaaatccatgccttgaccgacacgctgggcaaagccaaggtaaccgcactggcagaacgcatagatcaaatcaatccgtattgcgtagtgacggaaatcgaggattttctgagtgccgataatctggatgaaatgataggcgcgcaccactacgactacatcatcgatgcgatcgacaatgtacgtgccaaaacggcgctgattgcgtattgccgcaaacatggcttgaagctcgtcaccataggcagcgcaggcggacaaatcgacccgacaaaaatcgccgtgctcgatctgtgccgcaccgaacaggaaccgttgctggccaaggtgcgcaaacgcctgcgcgccgaacacggcttcccgcgcggaacaaaaaacaagttcggtatcgatgccgtattttcgaccgaaccactacgcttcccggaaagcgaagaagcatgtgacatcgatagcgacacaccagccggcatcaccggtctcaattgcgccggtttcggttccgcgatggtcgtcaccgcctccttcgggctggtcgctgcggcgcatgtgttgcgcaagctggcggcagaagccgaacttgccgcgccgggaaatacagccaccgtacttccccaacctttcgagtga

SEQ ID NO: 111236 - protein, 289 aa, Herminiimonas arsenicoxydans
MNSQPVPLTPVVPEIDFERRFGGIARLYGPAALTRFRAAHVCVVGVGGVGSWVVEALARSAIGKITMIDLDNLAESNVNRQIHALTDTLGKAKVTALAERIDQINPYCVVTEIEDFLSADNLDEMIGAHHYDYIIDAIDNVRAKTALIAYCRKHGLKLVTIGSAGGQIDPTKIAVLDLCRTEQEPLLAKVRKRLRAEHGFPRGTKNKFGIDAVFSTEPLRFPESEEACDIDSDTPAGITGLNCAGFGSAMVVTASFGLVAAAHVLRKLAAEAELAAPGNTATVLPQPFE

SEQ ID NO: 111237 - DNA, 858 bp, Burkholderia vietnamiensis G4
  CDS (1)..(858): transl_table=11
atgcccgctgccgacgctgccctgcccagttcctccgatcttaccgcgagcccgccgatccagcttgacgtggatcgcgagcgccgcttcggcggtatcgcacggctgtacggcgcgccggcgctcgccgcgttcgagcgcgcgcacgtggcggtgatcggcatcggcggcgtcgggtcgtggacggccgaggcgctggcgcgcagcgcggtcggcacgctgacgctgatcgatctcgacaacgtcgccgaaagcaatacgaaccggcagatccacgcgctcgacggcaatttcggcaagccgaaggtcgacgcgatggccgagcgcatcgcgctgatcgatcccgcgtgtcgcgtgaaccgggtcgaggatttcgtggaggccgacaacttcgatgtgctgctcggcggcggcttcgactacgtgatcgacgcgatcgacagcgtgcgcacgaaggtcgcgctgatcgcatggtgcgtcgcgaaagggcagccgctcgtgacggtcggcggcgcgggcgggcaactggacccgacccggatccgcatcgacgatcttgcgctgacgatccaggacccgctgctgtcgaaggtgcgcgcgcagttgcgcaagcagcatggctttgcgcgcggcccgaaggcgcgcttcaaggtcagcgcggtgtattcggacgagccgctgatctatccggaagctgccgcgtgcgacctcgaggacggcgcggagccgtcggccgccgcgcacgtcgcggggctcaattgcgcggggttcgggtcgagcgtgtgcgtgaccgcgagcttcggcttcgcggccgccgcgcatgcgttgcgggcgattgcggcgcgagccgggcgctga

SEQ ID NO: 111238 - protein, 285 aa, Burkholderia vietnamiensis G4
MPAADAALPSSSDLTASPPIQLDVDRERRFGGIARLYGAPALAAFERAHVAVIGIGGVGSWTAEALARSAVGTLTLIDLDNVAESNTNRQIHALDGNFGKPKVDAMAERIALIDPACRVNRVEDFVEADNFDVLLGGGFDYVIDAIDSVRTKVALIAWCVAKGQPLVTVGGAGGQLDPTRIRIDDLALTIQDPLLSKVRAQLRKQHGFARGPKARFKVSAVYSDEPLIYPEAAACDLEDGAEPSAAAHVAGLNCAGFGSSVCVTASFGFAAAAHALRAIAARAGR

SEQ ID NO: 111239 - DNA, 774 bp, Acinetobacter sp. ADP1; identical to SEQ ID NO: 40867
  CDS (1)..(774): transl_table=11

SEQ ID NO: 111240 - protein, 257 aa, Acinetobacter sp. ADP1; identical to SEQ ID NO: 40868

SEQ ID NO: 111241 - DNA, 819 bp, Erwinia carotovora subsp. atroseptica SCRI1043; identical to SEQ ID NO: 40869
  CDS (1)..(819): transl_table=11

SEQ ID NO: 111242 - protein, 272 aa, Erwinia carotovora subsp. atroseptica SCRI1043; identical to SEQ ID NO: 40870

SEQ ID NO: 111243 - DNA, 768 bp, Mannheimia succiniciproducens MBEL55E; identical to SEQ ID NO: 40877
  CDS (1)..(768): transl_table=11

SEQ ID NO: 111244 - protein, 255 aa, Mannheimia succiniciproducens MBEL55E; identical to SEQ ID NO: 40878

SEQ ID NO: 111245 - DNA, 822 bp, Azoarcus sp. EbN1; identical to SEQ ID NO: 40881
  CDS (1)..(822): transl_table=11

SEQ ID NO: 111246 - protein, 273 aa, Azoarcus sp. EbN1; identical to SEQ ID NO: 40882

SEQ ID NO: 111247 - DNA, 651 bp, Campylobacter jejuni RM1221; identical to SEQ ID NO: 40885
  CDS (1)..(651): transl_table=11

SEQ ID NO: 111248 - protein, 216 aa, Campylobacter jejuni RM1221; identical to SEQ ID NO: 40886

SEQ ID NO: 111249 - DNA, 777 bp, Neisseria gonorrhoeae FA 1090; identical to SEQ ID NO: 40889
  CDS (1)..(777): transl_table=11

SEQ ID NO: 111250 - protein, 258 aa, Neisseria gonorrhoeae FA 1090; identical to SEQ ID NO: 40890

SEQ ID NO: 111251 - DNA, 831 bp, Pseudomonas syringae pv. syringae B728a; identical to SEQ ID NO: 40893
  CDS (1)..(831): transl_table=11

SEQ ID NO: 111252 - protein, 276 aa, Pseudomonas syringae pv. syringae B728a; identical to SEQ ID NO: 40894

SEQ ID NO: 111253 - DNA, 816 bp, Pseudomonas fluorescens Pf-5; identical to SEQ ID NO: 40897
  CDS (1)..(816): transl_table=11

SEQ ID NO: 111254 - protein, 271 aa, Pseudomonas fluorescens Pf-5; identical to SEQ ID NO: 40898

SEQ ID NO: 111255 - DNA, 891 bp, Psychrobacter arcticus 273-4; identical to SEQ ID NO: 40899
  CDS (1)..(891): transl_table=11

SEQ ID NO: 111256 - protein, 296 aa, Psychrobacter arcticus 273-4; identical to SEQ ID NO: 40900

SEQ ID NO: 111257 - DNA, 819 bp, Colwellia psychrerythraea 34H; identical to SEQ ID NO: 40901
  CDS (1)..(819): transl_table=11

SEQ ID NO: 111258 - protein, 272 aa, Colwellia psychrerythraea 34H; identical to SEQ ID NO: 40902

SEQ ID NO: 111259 - DNA, 837 bp, Pseudomonas syringae pv. phaseolicola 1448A; identical to SEQ ID NO: 40903
  CDS (1)..(837): transl_table=11

SEQ ID NO: 111260 - protein, 278 aa, Pseudomonas syringae pv. phaseolicola 1448A; identical to SEQ ID NO: 40904

SEQ ID NO: 111261 - DNA, 768 bp, Dechloromonas aromatica RCB; identical to SEQ ID NO: 40905
  CDS (1)..(768): transl_table=11

SEQ ID NO: 111262 - protein, 255 aa, Dechloromonas aromatica RCB; identical to SEQ ID NO: 40906

SEQ ID NO: 111263 - DNA, 888 bp, Ralstonia eutropha JMP134; identical to SEQ ID NO: 40907
  CDS (1)..(888): transl_table=11

SEQ ID NO: 111264 - protein, 295 aa, Ralstonia eutropha JMP134; identical to SEQ ID NO: 40908

SEQ ID NO: 111265 - DNA, 804 bp, Thiobacillus denitrificans ATCC 25259; identical to SEQ ID NO: 40909
  CDS (1)..(804): transl_table=11

SEQ ID NO: 111266 - protein, 267 aa, Thiobacillus denitrificans ATCC 25259; identical to SEQ ID NO: 40910

SEQ ID NO: 111267 - DNA, 813 bp, Pseudomonas fluorescens PfO-1; identical to SEQ ID NO: 40911
  CDS (1)..(813): transl_table=11

SEQ ID NO: 111268 - protein, 270 aa, Pseudomonas fluorescens PfO-1; identical to SEQ ID NO: 40912

SEQ ID NO: 111269 - DNA, 729 bp, Carboxydothermus hydrogenoformans Z-2901; identical to SEQ ID NO: 40913
  CDS (1)..(729): transl_table=11

SEQ ID NO: 111270 - protein, 242 aa, Carboxydothermus hydrogenoformans Z-2901; identical to SEQ ID NO: 40914

SEQ ID NO: 111271 - DNA, 858 bp, Burkholderia sp. 383; identical to SEQ ID NO: 40915
  CDS (1)..(858): transl_table=11

SEQ ID NO: 111272 - protein, 285 aa, Burkholderia sp. 383; identical to SEQ ID NO: 40916

SEQ ID NO: 111273 - DNA, 768 bp, Geobacter metallireducens GS-15; identical to SEQ ID NO: 40917
  CDS (1)..(768): transl_table=11

SEQ ID NO: 111274 - protein, 255 aa, Geobacter metallireducens GS-15; identical to SEQ ID NO: 40918

SEQ ID NO: 111275 - DNA, 867 bp, Burkholderia thailandensis E264; identical to SEQ ID NO: 40919
  CDS (1)..(867): transl_table=11

SEQ ID NO: 111276 - protein, 288 aa, Burkholderia thailandensis E264; identical to SEQ ID NO: 40920

SEQ ID NO: 111277 - DNA, 783 bp, Desulfitobacterium hafniense Y51; identical to SEQ ID NO: 40921
  CDS (1)..(783): transl_table=11

SEQ ID NO: 111278 - protein, 260 aa, Desulfitobacterium hafniense Y51; identical to SEQ ID NO: 40922

SEQ ID NO: 111279 - DNA, 813 bp, Saccharophagus degradans 2-40; identical to SEQ ID NO: 40923
  CDS (1)..(813): transl_table=11

SEQ ID NO: 111280 - protein, 270 aa, Saccharophagus degradans 2-40; identical to SEQ ID NO: 40924

SEQ ID NO: 111281 - DNA, 804 bp, Methylobacillus flagellatus KT; identical to SEQ ID NO: 40925
  CDS (1)..(804): transl_table=11

SEQ ID NO: 111282 - protein, 267 aa, Methylobacillus flagellatus KT; identical to SEQ ID NO: 40926

SEQ ID NO: 111283 - DNA, 858 bp, Burkholderia xenovorans LB400; identical to SEQ ID NO: 40927
  CDS (1)..(858): transl_table=11

SEQ ID NO: 111284 - protein, 285 aa, Burkholderia xenovorans LB400; identical to SEQ ID NO: 40928

SEQ ID NO: 111285 - DNA, 867 bp, Myxococcus xanthus DK 1622; identical to SEQ ID NO: 40931
  CDS (1)..(867): transl_table=11

SEQ ID NO: 111286 - protein, 288 aa, Myxococcus xanthus DK 1622; identical to SEQ ID NO: 40932

SEQ ID NO: 111287 - DNA, 768 bp, Haemophilus somnus 129PT; identical to SEQ ID NO: 40933
  CDS (1)..(768): transl_table=11

SEQ ID NO: 111288 - protein, 255 aa, Haemophilus somnus 129PT; identical to SEQ ID NO: 40934

SEQ ID NO: 111289 - DNA, 819 bp, Shewanella sp. MR-4; identical to SEQ ID NO: 40935
  CDS (1)..(819): transl_table=11

SEQ ID NO: 111290 - protein, 272 aa, Shewanella sp. MR-4; identical to SEQ ID NO: 40936

SEQ ID NO: 111291 - DNA, 819 bp, Shewanella sp. MR-7; identical to SEQ ID NO: 40937
  CDS (1)..(819): transl_table=11

SEQ ID NO: 111292 - protein, 272 aa, Shewanella sp. MR-7; identical to SEQ ID NO: 40938

SEQ ID NO: 111293 - DNA, 813 bp, Pseudomonas aeruginosa UCBPP-PA14; identical to SEQ ID NO: 40939
  CDS (1)..(813): transl_table=11

SEQ ID NO: 111294 - protein, 270 aa, Pseudomonas aeruginosa UCBPP-PA14; identical to SEQ ID NO: 40940

SEQ ID NO: 111295 - DNA, 834 bp, Shewanella sp. ANA-3; identical to SEQ ID NO: 40941
  CDS (1)..(834): transl_table=11

SEQ ID NO: 111296 - protein, 277 aa, Shewanella sp. ANA-3; identical to SEQ ID NO: 40942

SEQ ID NO: 111297 - DNA, 837 bp, Azoarcus sp. BH72; identical to SEQ ID NO: 40943
  CDS (1)..(837): transl_table=11

SEQ ID NO: 111298 - protein, 278 aa, Azoarcus sp. BH72; identical to SEQ ID NO: 40944

SEQ ID NO: 111299 - DNA, 783 bp, Acidovorax sp. JS42; identical to SEQ ID NO: 40947
  CDS (1)..(783): transl_table=11

SEQ ID NO: 111300 - protein, 260 aa, Acidovorax sp. JS42; identical to SEQ ID NO: 40948

SEQ ID NO: 111301 - DNA, 771 bp, Haemophilus influenzae R2846; identical to SEQ ID NO: 40951
  CDS (1)..(771): transl_table=11

SEQ ID NO: 111302 - protein, 256 aa, Haemophilus influenzae R2846; identical to SEQ ID NO: 40952

SEQ ID NO: 111303 - DNA, 801 bp, Pseudoalteromonas tunicata D2; identical to SEQ ID NO: 40957
  CDS (1)..(801): transl_table=11

SEQ ID NO: 111304 - protein, 266 aa, Pseudoalteromonas tunicata D2; identical to SEQ ID NO: 40958

SEQ ID NO: 111305 - DNA, 810 bp, Photobacterium sp. SKA34; identical to SEQ ID NO: 40959
  CDS (1)..(810): transl_table=11

SEQ ID NO: 111306 - protein, 269 aa, Photobacterium sp. SKA34; identical to SEQ ID NO: 40960

SEQ ID NO: 111307 - DNA, 780 bp, Oceanobacter sp. RED65; identical to SEQ ID NO: 40961
  CDS (1)..(780): transl_table=11

SEQ ID NO: 111308 - protein, 259 aa, Oceanobacter sp. RED65; identical to SEQ ID NO: 40962

SEQ ID NO: 111309 - DNA, 798 bp, Alteromonadales bacterium TW-7; identical to SEQ ID NO: 40967
  CDS (1)..(798): transl_table=11

SEQ ID NO: 111310 - protein, 265 aa, Alteromonadales bacterium TW-7; identical to SEQ ID NO: 40968

SEQ ID NO: 111311 - DNA, 810 bp, Pseudomonas putida GB-1; identical to SEQ ID NO: 40969
  CDS (1)..(810): transl_table=11

SEQ ID NO: 111312 - protein, 269 aa, Pseudomonas putida GB-1; identical to SEQ ID NO: 40970

SEQ ID NO: 111313 - DNA, 792 bp, Marinobacter sp. ELB17
  CDS (1)..(792): transl_table=11
atgaacgccgacgattacgccttccgctttggcggcattgagcgcctgtatggacgcagtgcacttggggcctttcgccaagcccacattgccattgtcggccttggcggtgtgggttcttgggcagcggaagctttggcgcgcagtggtattggcacgctaacgctgattgacatggacgatatctgtgtatccaacaccaaccgccagctgcacgcgctcagtggccagtacggtaaaaccaaaaccgatgccatggccgagcgcttgcgggccatcaatcctgccgcagatattcgcacccagtttgcgtttattactatcgataacatcccgcaacggataaccgccgacatcaccggtgtcatcgatgctatcgacagtgtgaagccaaaagccgctttattggcttactgccagcgcaacaagttgccgattgtgtgtgcagggggcgccggagggcaaatggatccaacccagattcgcgtggccgatttaagcaaaaccacccaggacccactgctggccaaagtgcgcaacctgctgcgccgacagtacggtttttcacgtaatccgcaacggcgttttggcatagaagccgtatactcgctggagcagctgacgtatcccgccgccgacggtacaacctgcctgcaaaaaccggttaacgcaggcccggttcggctggattgcgccaccggctttggcgccgccagcccggtgaccgccagcttcgggttttttgcggcctcgcggctgcttaacaaaatcgcacaacgcgcccaaccctaa

SEQ ID NO: 111314 - protein, 263 aa, Marinobacter sp. ELB17
MNADDYAFRFGGIERLYGRSALGAFRQAHIAIVGLGGVGSWAAEALARSGIGTLTLIDMDDICVSNTNRQLHALSGQYGKTKTDAMAERLRAINPAADIRTQFAFITIDNIPQRITADITGVIDAIDSVKPKAALLAYCQRNKLPIVCAGGAGGQMDPTQIRVADLSKTTQDPLLAKVRNLLRRQYGFSRNPQRRFGIEAVYSLEQLTYPAADGTTCLQKPVNAGPVRLDCATGFGAASPVTASFGFFAASRLLNKIAQRAQP

SEQ ID NO: 111315 - DNA, 801 bp, Moritella sp. PE36
  CDS (1)..(801): transl_table=11
atgtcggccgaatatgacaatcgttttggtggtattgcacgtttatatggcgttaaagcactgcaattttttagtcaagcacatgtgtgtgtgattggtattggtggtgtgggttcttgggccgctgaaacattagcacgttcaggcatcggcaagatcaccctgatcgacatggatgatatttgtgtgactaataccaatcgtcaaattcatgctttaaaagacaccataggtaagcaaaaaatagatgtaatggcggcgcgtattcgtgccattaatccggaatgtgtagtgactgctatcgatgattttatcacggttgatgatgttggtatgcacataagcaaagattttgattatgtgattgatgcgattgatagcgtacgttcaaaaacggcactgttagcgcactgtaatcgacaaaaaataaaatgcattaccattggcgctgcgggtggtcaaatcgatccgacccaaatccaagtgctggatttatctcgaacacatcaagatcctttagctgcgaaagtacgctctgatctgcgccgtttgcataacttcagtaagaacccaaccagtcgatttggtattgaatgtgtattctcaaccgagcaattaatttacccaggtactgatggcgaagtatgttcgaccaagaacttccttgacggcgccacgggcatggattgttcaagtggcttcggctcttcaaccgcggtgacggctagctttggtttaattgcggcttcgcgggtattgaaaaaattagccgaaagagaagcgcgttatcgacctgaataa

SEQ ID NO: 111316 - protein, 266 aa, Moritella sp. PE36
MSAEYDNRFGGIARLYGVKALQFFSQAHVCVIGIGGVGSWAAETLARSGIGKITLIDMDDICVTNTNRQIHALKDTIGKQKIDVMAARIRAINPECVVTAIDDFITVDDVGMHISKDFDYVIDAIDSVRSKTALLAHCNRQKIKCITIGAAGGQIDPTQIQVLDLSRTHQDPLAAKVRSDLRRLHNFSKNPTSRFGIECVFSTEQLIYPGTDGEVCSTKNFLDGATGMDCSSGFGSSTAVTASFGLIAASRVLKKLAEREARYRPE

SEQ ID NO: 111317 - DNA, 1542 bp, Aspergillus oryzae; identical to SEQ ID NO: 40973
  CDS (1)..(1542)

SEQ ID NO: 111318 - protein, 513 aa, Aspergillus oryzae; identical to SEQ ID NO: 40974

SEQ ID NO: 111319 - DNA, 1344 bp, Saccharomyces cerevisiae
  CDS (1)..(1344)
atggtagagaaggatacatggaaactgataactgccactgcactattcactgtggcagtgacgacgattacagattatgcttggaccagttggcaagcacaaaagcaagtaattgcgcaaccaaaaaataagaataaaggtgggcaaacaaaatctgacacggataaatatcatcaatatgatgaacagtttattcgccaatctttgaaaaacaatgttgaatttcttggtgaggacacaattgaaaaactatccaatcaatatgttgttgtcgtgggagcaggtggagttggatcttgggtggttaactctttggtgcggtccggatgccgaaagatcagggtcgttgattttgaccaggtctcactaagttcactaaatagacacagctgtgccatactaaatgatgttggcacgccaaaagtggaatgtctacgaaggcatatgcgggaaattgcaccatggtgtgagattgatccgattaatgaattatggacgttacaaaatggcgaaagactgacccttggtaatggaactcctgactttatcgtggactgcattgataatattgatacaaaggtcgacttacttgagtttgcctataatcatggtatcaaagtgatctcttccatgggtgcttccgcgaaaagtgatcctacaaaacttaatgtgggggacttggctaccacggaggaggatcctcttgcaagggtagtgagaaggaaattaaagaaaagaggtatcttatccggaattcctgtagtatttagtgccgaaaaaccagatccgaagaaggctaaattattacccttaccagatgaggaatatgaaagaggaaaggtcgacgagctgagcgccctgaaggacttccgtgtaagaatcctacccgttttaggtactatgccaagtttgtttggattgaccatcactacgtggattttatctaatatatccgataaacctctagaacctgttgagggtaagaatagaattaaggtatacgatggtatatatcaatcgttggcaggtcaaatgagcagagtcggtataccgagccaaagaatcccattggctttgaaggatgttagttaccttgtcgaagaggtgtttaagggtaaatctccaattagcggcatttccactagactaactttaaccaaatgggatccctctaaacctatctctttgcaaaatgtggtagtactaactaaaaacgaacagaaagtgcacgaagaccgtgtcttgaagggtaaggaaagcttacaagatgtttatgatgccaaagttctaaaactggtttcacaaagattcagagaagaagcttattactctcaattcagatga

SEQ ID NO: 111320 - protein, 447 aa, Saccharomyces cerevisiae
MVEKDTWKLITATALFTVAVTTITDYAWTSWQAQKQVIAQPKNKNKGGQTKSDTDKYHQYDEQFIRQSLKNNVEFLGEDTIEKLSNQYVVVVGAGGVGSWVVNSLVRSGCRKIRVVDFDQVSLSSLNRHSCAILNDVGTPKVECLRRHMREIAPWCEIDPINELWTLQNGERLTLGNGTPDFIVDCIDNIDTKVDLLEFAYNHGIKVISSMGASAKSDPTKLNVGDLATTEEDPLARVVRRKLKKRGILSGIPVVFSAEKPDPKKAKLLPLPDEEYERGKVDELSALKDFRVRILPVLGTMPSLFGLTITTWILSNISDKPLEPVEGKNRIKVYDGIYQSLAGQMSRVGIPSQRIPLALKDVSYLVEEVFKGKSPISGISTRLTLTKWDPSKPISLQNVVVLTKNEQKVHEDRVLKGKESLQDVYDAKVLKLVSQRFREEAYYSQFR

SEQ ID NO: 111321 - DNA, 1245 bp, Arabidopsis thaliana
  CDS (1)..(1245)
atgttaacagcaggaaatggtattgaatctgaaacaagaccagatactgtagcaaatggtcaagatcttttgaaagatgaaattgtttctgaacatttaaccaggaatatacagtttttcggtcttgaatcgcagcataaagtaactggatcatatgttgtggttattggacttggaggtgtagggagtcatgctgcatctatgctcttgaggtcaggtgttggcaagcttctccttgttgactttgatcaggtgtcactatcatcattaaatcgacacgctgttgcaacacgagcagatgttggtattccgaaagctatgtgtctcaagaagcatttctcttcaatctttcctgaatgccatatagaagccaaggtgatgctgtatgactcatcatctgaagaagaaattctttcaggcaagccagatttcgttctggactgcattgacaacatcgatacaaaggtgggacttttggctgcatgtgttaagaggggtttgaaagttctgagtgcaactggtgctggggctagagctgacccaacaagaatcagagtggctgatataagagagtcaacaattgacccgttatctcgatctgtaagacacagattgaggagaaaacacggcattgaaggaggcattcctgttgtattttccctggaaaaaccaaaagcaaagctgcttccctttgaggggacaaatggagaagacgagaatcctttagattatcaagttgttcctggctttcgtgttcggataattcctgttctcggaaccatcccggctatatttggacaaattatggcctcctatgttataacacaacttgcaggtgtgcaagttcagatggagcctatagtgaatctagatttggatcattaccgattgcttcatcaacgccttattgagcatgaggagacagtttatggcacatctgctgaagtcgaggtggatgttgaggaagtgatgtacatagtgaaagagttgtggcacggacgaagtgctagagatgagactgcaaaagatgttggcagagggatgtggcgagccatgaatgagttgatgctcgtaagatgggatgcaaaaaagccagcaacagtctcaaacttggttcttttgaagttcaaagaggcggatgaacatgagactaagactcttgaggaagtgaaggaaagtgaaacagagttctttgaaagagtttcatgcgtactgaagaaggcagagcttgatttctacggctag

SEQ ID NO: 111322 - protein, 414 aa, Arabidopsis thaliana
MLTAGNGIESETRPDTVANGQDLLKDEIVSEHLTRNIQFFGLESQHKVTGSYVVVIGLGGVGSHAASMLLRSGVGKLLLVDFDQVSLSSLNRHAVATRADVGIPKAMCLKKHFSSIFPECHIEAKVMLYDSSSEEEILSGKPDFVLDCIDNIDTKVGLLAACVKRGLKVLSATGAGARADPTRIRVADIRESTIDPLSRSVRHRLRRKHGIEGGIPVVFSLEKPKAKLLPFEGTNGEDENPLDYQVVPGFRVRIIPVLGTIPAIFGQIMASYVITQLAGVQVQMEPIVNLDLDHYRLLHQRLIEHEETVYGTSAEVEVDVEEVMYIVKELWHGRSARDETAKDVGRGMWRAMNELMLVRWDAKKPATVSNLVLLKFKEADEHETKTLEEVKESETEFFERVSCVLKKAELDFYG

SEQ ID NO: 111323 - DNA, 1458 bp, Schizosaccharomyces pombe
  CDS (1)..(1458)
atggaaacgctgcaagtcgaagttttctttctatttgattttactagcattatggcaggtttcaaagtcccttcgtggataacgtataaatccttttggattgctgtctcctcttctgtaacgacagcatgcgtaatccttggaacgttggagtttcgtaaacatcgctcaattcgtcgcttacagtcgatgattgttcctgaagctggtaaaagtattcaactttcttcttctggtgtacctatagaaatttatgatgctggggaagaggatgaaggaataagcaaaggcgttccgtacgatgaaaatctgatacgtgaacagctggctcgaaattatgcattttttggagaagacggtatggagcgtctgcgcaactcttttgttatcgtcgtaggctgtggtggtgttggaagctgggtgattaatatgcttgcacgctctggtgtgcaaaaaattagaattgtcgattttgatcaagtatctcttagtagcctaaatcgtcattccatagccacgttgcaagatgttggtactccaaagactcttgctataaaaaaggcgattaaaaaatttgccccttggattgaagtagatgctcgtaacgcacttttcaatcccgactccgccgacgatcttttgtctggcaatcctgattttgtaatcgacgctatagataacatccaaactaaagttgatttattaagttattgctacaaccacaaacttcccgtaattgcttctaccgggtctgcatgcaaatctgatccgactcgtgttaacatagcagatatatcagctacttctgaagatcctttatcaagagctactcgtcgtaggttgcgtctccttggtattatggaaggtattcctgtcgtattttctactgaaaaaccagatcctagaaaagcaagtttgttacctctctctgaggaagagtttgaaaaaggagacgttgatgagttgagtgctttacccgaattccgtgctcgtattcttcctgtaataggacctatgcctggtatttttggacttacaattgctacttatgttttgacttctattgctaaataccctatggatcccatttctaccatgacgcgtcctcgcttatacgaagaggctgttaaacgtttacatgctgaagctcgcaaagctggagtaaacctagataaaacttttaatgcatctgagatgtcatatatcattgaggaggtttacgttggtagaagcgctcttcccccgcatgagtctcaaaaagtcactgttgttcgatggaacccacaattaccttttgatcacaccaatcttgtagctatgacacggaacgaagctcgctatcatgaagataatgtcttagcaaagaatgtggatccttctacagtatatggcaaggatgtaattgaggttgttcacagttttctaaggcgattacgaatgtgggaaatgctttattga

SEQ ID NO: 111324 - protein, 485 aa, Schizosaccharomyces pombe
METLQVEVFFLFDFTSIMAGFKVPSWITYKSFWIAVSSSVTTACVILGTLEFRKHRSIRRLQSMIVPEAGKSIQLSSSGVPIEIYDAGEEDEGISKGVPYDENLIREQLARNYAFFGEDGMERLRNSFVIVVGCGGVGSWVINMLARSGVQKIRIVDFDQVSLSSLNRHSIATLQDVGTPKTLAIKKAIKKFAPWIEVDARNALFNPDSADDLLSGNPDFVIDAIDNIQTKVDLLSYCYNHKLPVIASTGSACKSDPTRVNIADISATSEDPLSRATRRRLRLLGIMEGIPVVFSTEKPDPRKASLLPLSEEEFEKGDVDELSALPEFRARILPVIGPMPGIFGLTIATYVLTSIAKYPMDPISTMTRPRLYEEAVKRLHAEARKAGVNLDKTFNASEMSYIIEEVYVGRSALPPHESQKVTVVRWNPQLPFDHTNLVAMTRNEARYHEDNVLAKNVDPSTVYGKDVIEVVHSFLRRLRMWEMLY

SEQ ID NO: 111325 - DNA, 807 bp, Escherichia coli; identical to SEQ ID NO: 40795
  CDS (1)..(807): transl_table=11

SEQ ID NO: 111326 - protein, 268 aa, Escherichia coli; identical to SEQ ID NO: 40796

SEQ ID NO: 111327 - DNA, 1344 bp, Saccharomyces cerevisiae
  CDS (1)..(1344)
atggtagagaaggatacatggaaactgataactgccactgcactattcactgtggcagtgacgacgattacagattatgcttggaccagttggcaagcacaaaagcaagtaattgcgcaacaaaaaaataagaataaaggtgggcaaacaaaatctgacacggataaatatcatcaatatgatgaacagtttattcgccaatctttgaaaaacaatgttgaatttcttggtgaggacacaattgaaaaactatccaatcaatatgttgttgtcgtgggagcaggtggagttggatcttgggtggttaactctttggtgcggtccggatgccgaaagatcagggtcgttgattttgaccaggtctcactaagttcactaaatagacacagctgtgccatactaaatgatgttggcacgccaaaagtggaatgtctacgaaggcatatgcgggaaattgcaccatggtgtgagattgatccgattaatgaattatggacgttacaaaatggcgaaagactgacccttggtaatggaactcctgactttatcgtggactgcattgataatattgatacaaaggtcgacttacttgagtttgcctataatcatggtatcaaagtgatctcttccatgggtgcttccgcgaaaagtgatcctacaaaacttaatgtgggggacttggctaccacggaggaggatcctcttgcaagggtagtgagaaggaaattaaagaaaagaggtatcttatccggaattcctgtagtatttagtgccgaaaaaccagatccgaagaaggctaaattattacccttaccagatgaggaatatgaaagaggaaaggtcgacgagctgagcgccctgaaggacttccgtgtaagaatcctacccgttttaggtactatgccaagtttgtttggattgaccatcactacgtggattttatctaatatatccgataaacctctagaacctgttgagggtaagaatagaattaaggtatacgatggtatatatcaatcgttggcaggtcaaatgagcagagtcggtataccgagccaaagaatcccattggctttgaaggatgttagttaccttgtcgaagaggtgtttaagggtaaatctccaattagcggcatttccactagactaactttaaccaaatgggatccctctaaacctatctctttgcaaaatgtggtagtactaactaaaaacgaacagaaagtgcacgaagaccgtgtcttgaagggtaaggaaagcttacaagatgtttatgatgccaaagttctaaaactggtttcacaaagattcagagaagaagcttattactctcaattcagatga

SEQ ID NO: 111328 - protein, 447 aa, Saccharomyces cerevisiae
MVEKDTWKLITATALFTVAVTTITDYAWTSWQAQKQVIAQQKNKNKGGQTKSDTDKYHQYDEQFIRQSLKNNVEFLGEDTIEKLSNQYVVVVGAGGVGSWVVNSLVRSGCRKIRVVDFDQVSLSSLNRHSCAILNDVGTPKVECLRRHMREIAPWCEIDPINELWTLQNGERLTLGNGTPDFIVDCIDNIDTKVDLLEFAYNHGIKVISSMGASAKSDPTKLNVGDLATTEEDPLARVVRRKLKKRGILSGIPVVFSAEKPDPKKAKLLPLPDEEYERGKVDELSALKDFRVRILPVLGTMPSLFGLTITTWILSNISDKPLEPVEGKNRIKVYDGIYQSLAGQMSRVGIPSQRIPLALKDVSYLVEEVFKGKSPISGISTRLTLTKWDPSKPISLQNVVVLTKNEQKVHEDRVLKGKESLQDVYDAKVLKLVSQRFREEAYYSQFR

SEQ ID NO: 111329 - DNA, 1377 bp, Oryza sativa
  CDS (1)..(1377)
atgggggagagagcgaggcagtggctcctcgtcgccggcgccggcgccgcggttggggcgctctccaccgccgccgtcatgaggatcctctcgagatccaagcggagggaggggtacgtgcgcagcctgctggagtcgaacggcgtcgccagtggtggtgctggatcgagcgttggtactcgggttgtcgctacttcggatcttcttgatgatgaagtggtctccgaacagctcacaaggaatatacaattttttggcatggaatctcagaagaaagtgacagggtcgtttgttgtagtaattggtcttggaggggttggcagtcatgctgcttcaatgcttcttagatctggtgttggccggttgctccttgtggattttgatcaggtttcgctgtcttcgctgaatcggcatgctgtggcaacaagagatgacgttggaacacctaaagcattatgcctcaagaagcatttttcgatgatatatccagagtgtcaaatcgaagcaaaagtgcagttgtatgatccatcatgcgaggatgaaattctttctggacaaccagactttgttcttgattgtatagataacattgatacgaaggttgcactccttgcggcttgcgtacgcagaggtttaagggtgctttcagcaatgggggctggggctcgagcggacccaaccagaattcgtgttgcagatttgagggaatcaagcaatgatcctctttctcgggctgtgcggtatcggctgaagaaggaccatggaattgaaggtggaataccggtagttttttccttggagaagcccaaggcaaagctacttccttttcaagcttcaaaagaagaagaaactccatcagattaccagatcgtgccaggattcagggtgcgcattatcccagtgctgggaactatccctgcaatatttggtcaagttatggcctcatatgtgattactcagcttgccaagttggattttcaaactgaaccaattgttaacatggatttggatcattaccgtattcttcaccatcgtcttcttgagcatgaggagctaatatatggttctgctgaacaagttttggtcgatgctgaagaagtaatgtacattgtcaaagaattgtggcgtggtcgaagtgctagagatcaaaatctgaaggacactggccgtaaaatgtggagatctgtcaatgaattaatgcttgttcggtgggataaatcaaagcctgctggcgtgtcaaacttaatacttctcaagttcaatgaggcagatgcacatgaatccaccactcttgaccaaataaaggaagaagaacctgaattttacaacatggtttcacgtgttctgaaacaagctgaagcagaatttgctttatga

SEQ ID NO: 111330 - protein, 458 aa, Oryza sativa
MGERARQWLLVAGAGAAVGALSTAAVMRILSRSKRREGYVRSLLESNGVASGGAGSSVGTRVVATSDLLDDEVVSEQLTRNIQFFGMESQKKVTGSFVVVIGLGGVGSHAASMLLRSGVGRLLLVDFDQVSLSSLNRHAVATRDDVGTPKALCLKKHFSMIYPECQIEAKVQLYDPSCEDEILSGQPDFVLDCIDNIDTKVALLAACVRRGLRVLSAMGAGARADPTRIRVADLRESSNDPLSRAVRYRLKKDHGIEGGIPVVFSLEKPKAKLLPFQASKEEETPSDYQIVPGFRVRIIPVLGTIPAIFGQVMASYVITQLAKLDFQTEPIVNMDLDHYRILHHRLLEHEELIYGSAEQVLVDAEEVMYIVKELWRGRSARDQNLKDTGRKMWRSVNELMLVRWDKSKPAGVSNLILLKFNEADAHESTTLDQIKEEEPEFYNMVSRVLKQAEAEFAL

SEQ ID NO: 111331 - DNA, 1386 bp, Zea mays; identical to SEQ ID NO: 40975
  CDS (1)..(1386)

SEQ ID NO: 111332 - protein, 461 aa, Zea mays; identical to SEQ ID NO: 40976

SEQ ID NO: 111333 - DNA, 1374 bp, Zea mays; identical to SEQ ID NO: 40977
  CDS (1)..(1374)

SEQ ID NO: 111334 - protein, 457 aa, Zea mays; identical to SEQ ID NO: 40978

SEQ ID NO: 111335 - DNA, 20 bp, Artificial sequence
  primer
atgattactgaagatcggcg

SEQ ID NO: 111336 - DNA, 20 bp, Artificial sequence
  primer
tcaggcggacgatgcgcgcc

SEQ ID NO: 111337 - protein, 280 aa, Artificial sequence
  consensus sequence
  Variant (2)..(13): Xaa in position 2 to 13 is any amino acid
  Variant (14)..(14): Xaa in position 14 is any or no amino acid
  Variant (16)..(16): Xaa in position 16 is any amino acid
  Variant (18)..(18): Xaa in position 18 is any amino acid
  Variant (24)..(28): Xaa in position 24 to 28 is any amino acid
  Variant (30)..(30): Xaa in position 30 is any amino acid
  Variant (32)..(32): Xaa in position 32 is any amino acid
  Variant (34)..(34): Xaa in position 34 is any amino acid
  Variant (36)..(38): Xaa in position 36 to 38 is any amino acid
  Variant (40)..(40): Xaa in position 40 is any amino acid
  Variant (42)..(42): Xaa in position 42 is any amino acid
  Variant (44)..(50): Xaa in position 44 to 50 is any amino acid
  Variant (53)..(55): Xaa in position 53 to 55 is any amino acid
  Variant (57)..(59): Xaa in position 57 to 59 is any amino acid
  Variant (60)..(61): Xaa in position 60 to 61 is any or no amino acid
  Variant (63)..(64): Xaa in position 63 to 64 is any amino acid
  Variant (66)..(71): Xaa in position 66 to 71 is any amino acid
  Variant (73)..(74): Xaa in position 73 to 74 is any amino acid
  Variant (75)..(75): Xaa in position 75 is any or no amino acid
  Variant (77)..(77): Xaa in position 77 is any amino acid
  Variant (79)..(98): Xaa in position 79 to 98 is any amino acid
  Variant (99)..(118): Xaa in position 99 to 118 is any or no amino acid
  Variant (120)..(120): Xaa in position 120 is any amino acid
  Variant (122)..(122): Xaa in position 122 is any amino acid
  Variant (125)..(128): Xaa in position 125 to 128 is any amino acid
  Variant (130)..(131): Xaa in position 130 to 131 is any amino acid
  Variant (133)..(135): Xaa in position 133 to 135 is any amino acid
  Variant (137)..(144): Xaa in position 137 to 144 is any amino acid
  Variant (145)..(147): Xaa in position 145 to 147 is any or no amino acid
  Variant (151)..(153): Xaa in position 151 to 153 is any amino acid
  Variant (156)..(161): Xaa in position 156 to 161 is any amino acid
  Variant (163)..(168): Xaa in position 163 to 168 is any amino acid
  Variant (172)..(175): Xaa in position 172 to 175 is any amino acid
  Variant (177)..(178): Xaa in position 177 to 178 is any amino acid
  Variant (180)..(189): Xaa in position 180 to 189 is any amino acid
  Variant (190)..(207): Xaa in position 190 to 207 is any or no amino acid
  Variant (209)..(209): Xaa in position 209 is any amino acid
  Variant (211)..(211): Xaa in position 211 is any amino acid
  Variant (213)..(228): Xaa in position 213 to 228 is any amino acid
  Variant (229)..(278): Xaa in position 229 to 278 is any or no amino acid
GXXXXXXXXXXXXXVXGXGGVGSXXXXXLXRXGXGXXXLXDXDXXXXXXXNRXXXAXXXXXGXXKXXXXXXRXXXIXPXXXXXXXXXXXXXXXXXXXXXXXXXXXXXXXXXXXXXXXXVXDXIDXXXXKXXLXXXCXXXXXXXXXXXGAGXXXDPXXXXXXDXXXXXXDPLXXXXRXXLXXXXXXXXXXXXXXXXXXXXXXXXXXXXVXSXEXXXXXXXXXXXXXXXXXXXXXXXXXXXXXXXXXXXXXXXXXXXXXXXXXXXXXXXXXXXXXXXXXXFG

SEQ ID NO: 111338 - protein, 45 aa, Artificial sequence
  protein pattern
  Variant (2)..(3): Xaa in position 2 to 3 is any or no amino acid
  Variant (5)..(5): Xaa in position 5 is any or no amino acid
  Variant (7)..(7): Xaa in position 7 is any amino acid
  Variant (13)..(17): Xaa in position 13 to 17 is any amino acid
  Variant (18)..(18): Xaa in position 18 is Ile, Leu or Met
  Variant (19)..(19): Xaa in position 19 is any amino acid
  Variant (21)..(21): Xaa in position 21 is Ala, Cys, Asn, Ser or Thr
  Variant (22)..(22): Xaa in position 22 is Ala or Gly
  Variant (23)..(25): Xaa in position 23 to 25 is any amino acid
  Variant (26)..(26): Xaa in position 26 is Ile, Leu, Met or Val
  Variant (27)..(27): Xaa in position 27 is any amino acid
  Variant (28)..(28): Xaa in position 28 is Ile, Leu, Met or Val
  Variant (29)..(29): Xaa in position 29 is Phe, Ile or Val
  Variant (31)..(31): Xaa in position 31 is any amino acid
  Variant (33)..(33): Xaa in position 33 is any amino acid
  Variant (34)..(34): Xaa in position 34 is Ala, Ile, Leu or Val
  Variant (35)..(35): Xaa in position 35 is Ala, Cys, Ser, Thr or Val
  Variant (36)..(36): Xaa in position 36 is any amino acid
  Variant (37)..(37): Xaa in position 37 is Ser or Thr
  Variant (38)..(38): Xaa in position 38 is Asn or Ser
  Variant (39)..(39): Xaa in position 39 is any amino acid
  Variant (42)..(44): Xaa in position 42 to 44 is any amino acid
VXXVXGXGGVGSXXXXXXXRXXXXXXXXXDXDXXXXXXXNRXXXA

SEQ ID NO: 111339 - protein, 29 aa, Artificial sequence
  protein pattern
  Variant (2)..(2): Xaa in position 2 is Ala or Ser
  Variant (3)..(3): Xaa in position 3 is Ala, Gly or Ser
  Variant (4)..(4): Xaa in position 4 is Ala, Cys, Gly, Asn or Thr
  Variant (5)..(6): Xaa in position 5 to 6 is any amino acid
  Variant (9)..(10): Xaa in position 9 to 10 is any amino acid
  Variant (11)..(11): Xaa in position 11 is Phe, Ile, Leu or Val
  Variant (12)..(14): Xaa in position 12 to 14 is any amino acid
  Variant (16)..(16): Xaa in position 16 is Ile, Leu, Met or Val
  Variant (17)..(18): Xaa in position 17 to 18 is any amino acid
  Variant (19)..(19): Xaa in position 19 is Ala, Ser, Thr or Val
  Variant (20)..(21): Xaa in position 20 to 21 is any amino acid
  Variant (22)..(22): Xaa in position 22 is Cys or Asp
  Variant (23)..(23): Xaa in position 23 is any amino acid
  Variant (24)..(24): Xaa in position 24 is Phe, Leu or Met
  Variant (25)..(28): Xaa in position 25 to 28 is any amino acid
  Variant (29)..(29): Xaa in position 29 is Lys or Arg
GXXXXXDPXXXXXXDXXXXXXXXXXXXXX

SEQ ID NO: 111340 - DNA, 900 bp, Escherichia coli; identical to SEQ ID NO: 57635
  CDS (1)..(900): transl_table=11

SEQ ID NO: 111341 - protein, 299 aa, Escherichia coli; identical to SEQ ID NO: 57636

SEQ ID NO: 111342 - DNA, 1537 bp, Zea mays; identical to SEQ ID NO: 57239
  CDS (243)..(1334)

SEQ ID NO: 111343 - protein, 363 aa, Zea mays; identical to SEQ ID NO: 57240

SEQ ID NO: 111344 - DNA, 1283 bp, Helianthus annuus; identical to SEQ ID NO: 57505
  CDS (49)..(1119)

SEQ ID NO: 111345 - protein, 356 aa, Helianthus annuus; identical to SEQ ID NO: 57506

SEQ ID NO: 111346 - DNA, 1298 bp, Abies grandis
  CDS (90)..(1253)
attgattcatacatatggtatcgaaattggtgagagctatgtattagattgattctaaggtagacagcaggaacaaatataggaactacatggcttacagtggtatggtacgtagcttccaaggcgtgtattttatggctgttgctcttgatcgaaaccgtaatctgaagagaattgacattccatcaaaacgttttgatggagtttcgacctcatttgtggcttgtaatggcgagcatctgggccttcccgtaaatttgaagaaagagttcttatcatgcatacaacgggcatcgtcctctagatcctcaaacacaatcgtccagtttgctaatttgcctgaacaagggaagaaggtcgttgaatttgatttcaataagtacatgctttccaaggcaatggcagtgactgaggcattggataaggctatcccacatagttatccccagaaaatacatgaatccatgaggtattctcttctggcaggggggaagcgcgttcgtcctgttctgtgcattgctgcgtgtgaacttgtgggaggaagggaggagctcgccatgccaactgcctgcgcaatggaaatgatccacacaatgtctttgattcatgatgacttaccttgcatggacaacgatgatttacggcgaggtaagcctacaaaccataaggtcttcggccaggacactgctcttcttgcaggggatgcacttcatgcatttgcctttgagcacattgtagcctttacaagcaaatctgtggggagtgatgggattttgagggcggttactgaattggctagagcaacaggccctcaagggattatgggtggccagattgtcgatattgcgagcgagcgggatgcttttgttgaccttcagactctggaatggatccatattcacaagactgcggtgctcttcgagtgcgcgactgtgtgtggggcgatcatcggaggtgcttcgggggatgaaattgagagaattcgaaggtttgcccgttatttggggcttctgtttcaagtcgtggatgacatactcgatgtcacaaaatcttctgaagatttgggtaagactgcaggaaaggatttggttagtgataaggccacttatcccaagctgatgggtttagagaaagcaaagggattttctcttgaattgttgaacaaagctaaggaggagttatcatgcttcgatccaatgaaggctgcacctctgttcggtcttgcagattacatggcactcagacagaattgaaaagcctagtaaaatcgttcctacgtaaaaaaaaaaaaaaaaaaa

SEQ ID NO: 111347 - protein, 387 aa, Abies grandis
MAYSGMVRSFQGVYFMAVALDRNRNLKRIDIPSKRFDGVSTSFVACNGEHLGLPVNLKKEFLSCIQRASSSRSSNTIVQFANLPEQGKKVVEFDFNKYMLSKAMAVTEALDKAIPHSYPQKIHESMRYSLLAGGKRVRPVLCIAACELVGGREELAMPTACAMEMIHTMSLIHDDLPCMDNDDLRRGKPTNHKVFGQDTALLAGDALHAFAFEHIVAFTSKSVGSDGILRAVTELARATGPQGIMGGQIVDIASERDAFVDLQTLEWIHIHKTAVLFECATVCGAIIGGASGDEIERIRRFARYLGLLFQVVDDILDVTKSSEDLGKTAGKDLVSDKATYPKLMGLEKAKGFSLELLNKAKEELSCFDPMKAAPLFGLADYMALRQN

SEQ ID NO: 111348 - DNA, 1524 bp, Abies grandis; identical to SEQ ID NO: 57247
  CDS (122)..(1267)

SEQ ID NO: 111349 - protein, 381 aa, Abies grandis; identical to SEQ ID NO: 57248

SEQ ID NO: 111350 - DNA, 900 bp, Salmonella typhimurium
  CDS (1)..(900): transl_table=11
atggactttacgcagcagctacaggcttgcgtaacgcaagcgaatcaggcgctgagccgttttatcgcgccactgccctttcagaacactcccgtggtcgaagccatgcagtatggcgcattattaggcggtaaacgcctgcggccatttctggtttacgccaccggtcaaatgtttggcgtcagtacggcaacgctggatgcgccagctgcggcggtcgaatgcattcatgcctattcgctgatccatgacgacctgccagcaatggacgatgacgatttgcgtcgcggcctgccgacttgccatattaaatttggcgaagccaacgcaatcctggcgggagacgcgttgcagacgctggcgtttgccattatcagcgacgcgccgatgccggaagtcgccgatcgcgatcgtatcgcgatgatcgccgaactggcaaacgccagcggtatcgccggtatgtgcggcggtcaggcattggatctggcggcagaaggccagcggatcactctggacgcgctggaacgcattcatcgccataagaccggcgcgctcattcgcgccgccgttagacttggcgcattgagcgcgggcgataaaggacggaatactctgccgatacttgaccgctatgcagagagtatcggccttgccttccaggttcaggatgacattctggatgtggtgggcgatactgcaacgttaggtaaacgtcagggcgcagaccagcagcttggcaaaagtacctaccctgcacttctgggtcttgagcaagcccggaataaagcccgggacctgatagaggacgcccgtcagtcgttacatcagctggccgcgcaatcactggacacctcggcactggaagcgctagcgaactacataatccagcgtgataaataa

SEQ ID NO: 111351 - protein, 299 aa, Salmonella typhimurium
MDFTQQLQACVTQANQALSRFIAPLPFQNTPVVEAMQYGALLGGKRLRPFLVYATGQMFGVSTATLDAPAAAVECIHAYSLIHDDLPAMDDDDLRRGLPTCHIKFGEANAILAGDALQTLAFAIISDAPMPEVADRDRIAMIAELANASGIAGMCGGQALDLAAEGQRITLDALERIHRHKTGALIRAAVRLGALSAGDKGRNTLPILDRYAESIGLAFQVQDDILDVVGDTATLGKRQGADQQLGKSTYPALLGLEQARNKARDLIEDARQSLHQLAAQSLDTSALEALANYIIQRDK

SEQ ID NO: 111352 - DNA, 1131 bp, Oryza sativa; identical to SEQ ID NO: 57595
  CDS (1)..(1131)

SEQ ID NO: 111353 - protein, 376 aa, Oryza sativa; identical to SEQ ID NO: 57596

SEQ ID NO: 111354 - DNA, 1278 bp, Brassica napus; identical to SEQ ID NO: 57249
  CDS (11)..(1096)

SEQ ID NO: 111355 - protein, 361 aa, Brassica napus; identical to SEQ ID NO: 57250

SEQ ID NO: 111356 - DNA, 1268 bp, Glycine max; identical to SEQ ID NO: 57251
  CDS (9)..(1118)

SEQ ID NO: 111357 - protein, 369 aa, Glycine max; identical to SEQ ID NO: 57252

SEQ ID NO: 111358 - DNA, 1441 bp, Glycine max; identical to SEQ ID NO: 57253
  CDS (150)..(1202)

SEQ ID NO: 111359 - protein, 350 aa, Glycine max; identical to SEQ ID NO: 57254

SEQ ID NO: 111360 - DNA, 1470 bp, Glycine max; identical to SEQ ID NO: 57265
  CDS (238)..(1341)

SEQ ID NO: 111361 - protein, 367 aa, Glycine max; identical to SEQ ID NO: 57266

SEQ ID NO: 111362 - DNA, 891 bp, Abies grandis
  CDS (1)..(891)
atgtttgatttcaaggagtacttgcattccaaagcaatatcagtgaatgaggcactggagagggctgtcccacttcgctatcctgaaaaaatacatgaagctatgaggtattctcttctagcaggagggaagcggattcgtcctattctgactattgcagcatgtgagcttgtgggagggagtgaggagctcgccatgccaactgcctgtgcaatggagatgatccacacaatgtctttgattcatgatgatttgccttccatggacaatgatgatttacgccgaggtaagcttacaaaccacaaggtctttggcgaaggcactgctgttcttgcaggggatgcacttctttcatttgcatttgagcacattgcagtgtccacaaggaaaactgtggcgagtcatagggttttgagggtggtatctgaattgggtaaggcaataggctctcaaggggttgctggtgggcaggttgctgatattaccagtgaaggggatccatctgttgggcttgagactctcgaatggattcacattcacaagactgcagtgctcttggagtgcgccgttgtgagtggggcgatcatcggtggcgcttcagagaatgaaattgagagaactggaaggtatgcccgttgcgttgggcttctgtttcaggttgtggatgacatactcgatgtcaccagatcatcagaagaattgggaaagactgcaggaaaggatttggttagtgataaggccacttatcccaagctgatgggtttggagaaagcgaaggaatttgctgatgaattgttggacagagctaaggaggagttatcttgcttcaacccagctaaggctgcacctctgttgggtcttgcagattacattgcattaagacagaactga

SEQ ID NO: 111363 - protein, 296 aa, Abies grandis
MFDFKEYLHSKAISVNEALERAVPLRYPEKIHEAMRYSLLAGGKRIRPILTIAACELVGGSEELAMPTACAMEMIHTMSLIHDDLPSMDNDDLRRGKLTNHKVFGEGTAVLAGDALLSFAFEHIAVSTRKTVASHRVLRVVSELGKAIGSQGVAGGQVADITSEGDPSVGLETLEWIHIHKTAVLLECAVVSGAIIGGASENEIERTGRYARCVGLLFQVVDDILDVTRSSEELGKTAGKDLVSDKATYPKLMGLEKAKEFADELLDRAKEELSCFNPAKAAPLLGLADYIALRQN

SEQ ID NO: 111364 - DNA, 915 bp, Abies grandis; identical to SEQ ID NO: 57261
  CDS (1)..(915)

SEQ ID NO: 111365 - protein, 304 aa, Abies grandis; identical to SEQ ID NO: 57262

SEQ ID NO: 111366 - DNA, 921 bp, Bradyrhizobium sp. ORS278
  CDS (1)..(921): transl_table=11
atgaccgcgacggccaccgatttcacccaacgcctggataagaccgcggaggagaccgaagcgctgctcggcgaactgctgtccgatgcgccgctggccgacgagatcgcccggccgaagcggctgatcgagtcgatgcgctattccagcctgggcggcggcaagcggctgcgcccgttcctggtggtcgagagcgccgccgtattcggcgtgccgcgccgcggcgcgctgatggcgggcgcggcgctcgaatgcatccactgctactccctgatccatgacgacctgccggcaatggacaattccgacctgcgccgcggccgtccgaccctgcacaaggtctatgacgacgccaccgcgatccttgccggcgacgcgctgctgacgatcgccttcgacatcatcacccgcgacgagatccatcccgacgccggcgtccgcctggcgctgacccgggcgctcgcccgttgcgccggtgtcggcggcatggccggcggccagatcctcgacctggccggcgaaggcaggttcggcgaccgcgatccggtcgacgtcgcccgcgtgcagcagatgaagaccggcgccctgctccgcttcggctgcatcgccggcgccctgctcggccaggcatcggcggccgagtacaaggctctcgacgattacggccgtgcgctcggcgaagccttccagatcgccgacgatctgctcgacgtcgaaggcgatgccgccacgctcggcaagccggccggcgccgacgccgagctcggcaagaccaccttcgtcacgcagctcggcatcgagggtgccaagcagcgcgtccgcgacctgctcgcgcgtggcgacgcagcgctgtcgatcttcggcgccaagggcgacgtgctgcgcgccgccgcgcatttcgtcgccgagcgcaagagctga

SEQ ID NO: 111367 - protein, 306 aa, Bradyrhizobium sp. ORS278
MTATATDFTQRLDKTAEETEALLGELLSDAPLADEIARPKRLIESMRYSSLGGGKRLRPFLVVESAAVFGVPRRGALMAGAALECIHCYSLIHDDLPAMDNSDLRRGRPTLHKVYDDATAILAGDALLTIAFDIITRDEIHPDAGVRLALTRALARCAGVGGMAGGQILDLAGEGRFGDRDPVDVARVQQMKTGALLRFGCIAGALLGQASAAEYKALDDYGRALGEAFQIADDLLDVEGDAATLGKPAGADAELGKTTFVTQLGIEGAKQRVRDLLARGDAALSIFGAKGDVLRAAAHFVAERKS

SEQ ID NO: 111368 - DNA, 1101 bp, Oryza sativa (japonica cultivar-group); identical to SEQ ID NO: 57267
  CDS (1)..(1101)

SEQ ID NO: 111369 - protein, 366 aa, Oryza sativa (japonica cultivar-group); identical to SEQ ID NO: 57268

SEQ ID NO: 111370 - DNA, 918 bp, Mesorhizobium loti MAFF303099; identical to SEQ ID NO: 57269
  CDS (1)..(918): transl_table=11

SEQ ID NO: 111371 - protein, 305 aa, Mesorhizobium loti MAFF303099; identical to SEQ ID NO: 57270

SEQ ID NO: 111372 - DNA, 966 bp, Mesorhizobium loti MAFF303099
  CDS (1)..(966): transl_table=11
atgcagaccgattccacgctacacgacgacgcgcaggcgcgcggcgcatccggcaggctgccgtcggagatctggatgcaggacggcgtaaggcgggtcgaacaggcgctggcgcgtcttctctgcgccgaagacgacggtgagaccgagctgatggcggcgatgcgctacgccaccttgcatggcggaaagcgcacccgcgccttgctctgtctggctaccggcgcactggccgacacgccggcgcccatgctcgacgatgtcggcgccgccatcgagatgatgcacgcctgtaccctggtccacgacgacctgcccgcaatggacgatgacgtgcttcgccgcggccttccgaccgtgcacgtcaagttcggcgaagccactgcgatcctggtcggcgatgcgctgcaggcgcacgccttcctgaccctggcgagcctggatgcgccgagcgacaaccgtatcgcgctcgtgcgcgaactggcgcaggcggtgtccgccgagggtgccgcaggcgggcaggccatggatctgtcgctggtaggaaagcacgtcgagctggacaggatcgtggcgatgcaccggatgaagagcggagcactagtgcgcgcgtccgttcgcatgggcgcgctatgcgccatcgcggaggatgccgcccacgctgcgctgtactgtgcgctcgatcgctactccgcctgtttcggcctggcgttgcaggtggtcgacgacattctcgacgcgacagcggataccgcgacgttgggcaagacccccggcaaggacgcggcggcgcagaagccgacctgtgcgtcgatcatggggctgcaggcagcgcgccagttggcgctggatctgttgcgcgacgccggggaggccatccccccgctgggaacgcgtgcggaacggttggcgcagatgctgcaacgggccaacgcgtatctgttcaagcacgcgccatgcgcatga

SEQ ID NO: 111373 - protein, 321 aa, Mesorhizobium loti MAFF303099
MQTDSTLHDDAQARGASGRLPSEIWMQDGVRRVEQALARLLCAEDDGETELMAAMRYATLHGGKRTRALLCLATGALADTPAPMLDDVGAAIEMMHACTLVHDDLPAMDDDVLRRGLPTVHVKFGEATAILVGDALQAHAFLTLASLDAPSDNRIALVRELAQAVSAEGAAGGQAMDLSLVGKHVELDRIVAMHRMKSGALVRASVRMGALCAIAEDAAHAALYCALDRYSACFGLALQVVDDILDATADTATLGKTPGKDAAAQKPTCASIMGLQAARQLALDLLRDAGEAIPPLGTRAERLAQMLQRANAYLFKHAPCA

SEQ ID NO: 111374 - DNA, 1044 bp, Arabidopsis thaliana; identical to SEQ ID NO: 57273
  CDS (1)..(1044)

SEQ ID NO: 111375 - protein, 347 aa, Arabidopsis thaliana; identical to SEQ ID NO: 57274

SEQ ID NO: 111376 - DNA, 1035 bp, Arabidopsis thaliana; identical to SEQ ID NO: 57279
  CDS (1)..(1035)

SEQ ID NO: 111377 - protein, 344 aa, Arabidopsis thaliana; identical to SEQ ID NO: 57280

SEQ ID NO: 111378 - DNA, 1074 bp, Arabidopsis thaliana; identical to SEQ ID NO: 57281
  CDS (1)..(1074)

SEQ ID NO: 111379 - protein, 357 aa, Arabidopsis thaliana; identical to SEQ ID NO: 57282

SEQ ID NO: 111380 - DNA, 912 bp, Helicobacter pylori 26695
  CDS (1)..(912): transl_table=11
atgagtagccctaatttatccttttattataatgagtgcgagcgttttgaaagctttttaaaaaaccatcatttacaccttgaaagcttccacccttatttggaaaaagccttttttgaaatggtgcttaatggaggcaaaaggttccgccctaagctttttttagccgtgctttgcgcgttagtgggtcaaaaagattattctaaccaacaaacagaatattttaaaatcgctttaagcattgaatgcttgcacacttattcgctcatccatgacgatttgccatgcatggataacgccgctttaaggagaaaccaccccactttacacgctaaatacgatgaaaccacagccgttttaatcggcgatgcgctcaacacttactcttttgaattgctctcaaacgctttattagaaagccatatcattgtggaattaatcaaaatcttaagcgctaatggggggattaaaggcatgatcttagggcaggctttggattgctattttgaaaacacgcccttaaatttagaacaactcactttcttacacgagcataaaaccgctaaattgattagcgcaagtctgattatggggcttgttgcgagcggtattaaagatgaagagctttttaaatggcttcaggcttttgggttaaaaatgggtctttgctttcaagtgctagatgatattatagatgttacgcaagatgaagaagaaagcggtaaaaccactcatttagacagcgctaaaaacagctttgtgaatttattggggctagagagggcgaataattacgctcaaactttaaaaacagaggttttaaatgatttagatgcattgaaacccgcttatcctttattgcaagaaaatttaaacgcattattgaacactctatttaaaggcaagacatga

SEQ ID NO: 111381 - protein, 303 aa, Helicobacter pylori 26695
MSSPNLSFYYNECERFESFLKNHHLHLESFHPYLEKAFFEMVLNGGKRFRPKLFLAVLCALVGQKDYSNQQTEYFKIALSIECLHTYSLIHDDLPCMDNAALRRNHPTLHAKYDETTAVLIGDALNTYSFELLSNALLESHIIVELIKILSANGGIKGMILGQALDCYFENTPLNLEQLTFLHEHKTAKLISASLIMGLVASGIKDEELFKWLQAFGLKMGLCFQVLDDIIDVTQDEEESGKTTHLDSAKNSFVNLLGLERANNYAQTLKTEVLNDLDALKPAYPLLQENLNALLNTLFKGKT

SEQ ID NO: 111382 - DNA, 912 bp, Helicobacter pylori J99
  CDS (1)..(912): transl_table=11
atgagtaaccctaatttatccttttattgtaatgagtgcgagcgttttgaaagctttttaaaaaaccattatttacaccttgaaggcttccacccttatttggaaaaagccttttttgaaatggtgcttaatgggggcaaaaggttccgccccaagctttttttagccgtgctttgctctttagtgggtaaaaaagattattctaaccaacaaacagaatattttaaaatcgctttaagcattgaatgcttgcacacttattcgctcatccatgacgatttgccttgcatggataacgctattttaagaagaaaccaccccactttacacgccaaatacgatgaaaccacagccgttttaatcggcgatgcgctcaacacctattcttttgaattgctctcaaattctttactagaaagccgtatcattgtggaattagtcaaaatcttaagcgctaatggggggattaaaggcatgattttagggcaggctttggattgctattttgaaaacacccccttaaatttagagcagctcactttcttacacgagcataaaaccgctaaattgattagcgcaagcctgattatggggcttgttgcgagcggcattaacgatgaagagcttttaaaatggcttcaggcttttgggttaaaaatgggtctttgttttcaagtgctagatgatattatagacgttacacaagatgaaaaagaaagcggtaaaaccacgcatttagacagcgctaaaaacagctttgtgaatttattggggctaaaaaaggcaagcggttacgcccaaactttaaaaacagagattttaaacgatttgaatgcattagaacctacttatctttcattgcaagaaaatttaaacgcattattgaacactctatttaaaggcaagacatga

SEQ ID NO: 111383 - protein, 303 aa, Helicobacter pylori J99
MSNPNLSFYCNECERFESFLKNHYLHLEGFHPYLEKAFFEMVLNGGKRFRPKLFLAVLCSLVGKKDYSNQQTEYFKIALSIECLHTYSLIHDDLPCMDNAILRRNHPTLHAKYDETTAVLIGDALNTYSFELLSNSLLESRIIVELVKILSANGGIKGMILGQALDCYFENTPLNLEQLTFLHEHKTAKLISASLIMGLVASGINDEELLKWLQAFGLKMGLCFQVLDDIIDVTQDEKESGKTTHLDSAKNSFVNLLGLKKASGYAQTLKTEILNDLNALEPTYLSLQENLNALLNTLFKGKT

SEQ ID NO: 111384 - DNA, 819 bp, Thermotoga maritima MSB8
  CDS (1)..(819): transl_table=11
atgaagaaggagaaagttgaagaaagaatacgcgagattttgaggcctggatgggatcttctcacagaagaagccatgctgtactccgcgacggttggaggaaagaggatccgtcctctcctcgtcttgacactgggtgaggatttgggagtggaagaggaaaaacttctcgatgtggcggtggccgttgaactctttcacacggcttctctgatacacgatgatcttcccccaatagataacgcggattttcgaagagggaagccttcttgtcacaggacctatggtgaagatatcgcccttcttgcgggagatggtctgttcttcctcgctttttctcagatatctaaaatcggaaattcaaagatttttgaagagttttcggaaacggcctacaaacttcttttgggggaagcgatggatgtggaattcgaaagaagaaagatggaagtctcgcaggagatggtggagagaatgtacgctttcaaaacgggagcgctatttgctttctgtttctcagctccatttatcctgaaaggaaaggatcacaccaagatgaaactcctcggagagaagttcggggtggctttccagatatacgacgatctgaaagacattcttgggtctttcgaaaaggtgggaaaggacctcggaaaagacacagaaaaagtgacgcttgtgaaaaaggtggggattcagaaagctcgtgagatggccgataagtattatgaagaagttttgaaaggtatcgaatcagaaggtctctttcgcacgctgtttcttctgaaagaactcaaacagatggtggaggagagatga

SEQ ID NO: 111385 - protein, 272 aa, Thermotoga maritima MSB8
MKKEKVEERIREILRPGWDLLTEEAMLYSATVGGKRIRPLLVLTLGEDLGVEEEKLLDVAVAVELFHTASLIHDDLPPIDNADFRRGKPSCHRTYGEDIALLAGDGLFFLAFSQISKIGNSKIFEEFSETAYKLLLGEAMDVEFERRKMEVSQEMVERMYAFKTGALFAFCFSAPFILKGKDHTKMKLLGEKFGVAFQIYDDLKDILGSFEKVGKDLGKDTEKVTLVKKVGIQKAREMADKYYEEVLKGIESEGLFRTLFLLKELKQMVEER

SEQ ID NO: 111386 - DNA, 885 bp, Vibrio cholerae O1 biovar eltor str. N16961; identical to SEQ ID NO: 57285
  CDS (1)..(885): transl_table=11

SEQ ID NO: 111387 - protein, 294 aa, Vibrio cholerae O1 biovar eltor str. N16961; identical to SEQ ID NO: 57286

SEQ ID NO: 111388 - DNA, 885 bp, Bacillus halodurans C-125; identical to SEQ ID NO: 57287
  CDS (1)..(885): transl_table=11

SEQ ID NO: 111389 - protein, 294 aa, Bacillus halodurans C-125; identical to SEQ ID NO: 57288

SEQ ID NO: 111390 - DNA, 888 bp, Pasteurella multocida subsp. multocida str. Pm70; identical to SEQ ID NO: 57289
  CDS (1)..(888): transl_table=11

SEQ ID NO: 111391 - protein, 295 aa, Pasteurella multocida subsp. multocida str. Pm70; identical to SEQ ID NO: 57290

SEQ ID NO: 111392 - DNA, 888 bp, Pseudomonas aeruginosa PAO1; identical to SEQ ID NO: 57291
  CDS (1)..(888): transl_table=11

SEQ ID NO: 111393 - protein, 295 aa, Pseudomonas aeruginosa PAO1; identical to SEQ ID NO: 57292

SEQ ID NO: 111394 - DNA, 858 bp, Lactococcus lactis subsp. lactis Il1403
  CDS (1)..(858): transl_table=11
atggatacgaagatactaaagttagaagactttttaactgaattttatgaaagcgctgaatttccaactggcttagccgaatcagcaaaatattctttattggcaggcggtaaacgaattcgccccctcctttttttaaacctattagaggcttttgatttagaattgagtaaggctcattatcatgtggcagccgcacttgagatgattcatacgggttctttaatccatgatgacttaccagcaatggataatgatgattatcgtcgagggcagttaactaatcacaagaaatttgacgaggcaactgcaattttagctggtgatactttattttttgaccctttctttatcctttcaactgctgatttatccgcagaaataatagtagcgttgacgcgtgaattggcctttgcttcaggttcttatggaatggttgcgggtcaaatcttggatatggctggtgaaggaaaagagttgacattagctgaaattgagcagattcatcgcttgaaaactgggcgacttttaacttttccttttgtagctgctggaattgttgctcaaaaatcaacggatgaagttgaaaaacttcgtcaagtggggcaaattttgggattggcttttcaaattcgagacgatattttagatgtcacagcaacttttgctgagcttggaaaaacaccaggtaaggatattttagaggagaaatcaacatatgttgctcatttaggacttgagggagcaaaaaaatcactgacaggaaatttgtcagaagttaaaaaattactgacagacttatcagttactgacagctctgaaatttttaaaattattgagcaattggaagtgaaataa

SEQ ID NO: 111395 - protein, 285 aa, Lactococcus lactis subsp. lactis Il1403
MDTKILKLEDFLTEFYESAEFPTGLAESAKYSLLAGGKRIRPLLFLNLLEAFDLELSKAHYHVAAALEMIHTGSLIHDDLPAMDNDDYRRGQLTNHKKFDEATAILAGDTLFFDPFFILSTADLSAEIIVALTRELAFASGSYGMVAGQILDMAGEGKELTLAEIEQIHRLKTGRLLTFPFVAAGIVAQKSTDEVEKLRQVGQILGLAFQIRDDILDVTATFAELGKTPGKDILEEKSTYVAHLGLEGAKKSLTGNLSEVKKLLTDLSVTDSSEIFKIIEQLEVK

SEQ ID NO: 111396 - DNA, 780 bp, Neisseria meningitidis MC58
  CDS (1)..(780): transl_table=11
atgcgttatgcggctttggacggcggtaagcgtctgcggccgatgctggttctggcagcttcggaattaggcgaagccgtgcatgaagcagtagaacaggcaatggcggcaatcgaaatgatccacgtctattctttggttcacgacgatatgccggcgatggacaacgacagcctgcggcgcggcaaaccgacttgccacatcaaatatggcgaagcgaccgcccttctgaccggcgacgctttgcagacacaggcatttgacgtgttgagccgtccgacagaactgcccgccgcacgccagttggcaatgttgtcggtgttggcgaaagcgggcggcagcaggggtatggcgggcggtcaggcaatcgatttggcgaatgtcggcaaacaaatggttcaagccgatttggaacagatgcacagcctgaaaacgggtgcgctaatccgtgcggcggttttattgggggcgacggcgtgtcctgatctgtcagatgcggaactttccgtattggacgcttacgcggcaaaactggggctggcgttccaagtcattgacgatgtgttggattgtgaagcggacacggcgactttgggcaaaacggcgggcaaagacgcagacaacgacaagccgacttatgtgaaactgatgggcttggaagcggcgcgctcatacgcacacaaactggttgccgaagcggtcgcgctgctcgaacccttcggcgacaaagccctgcgcctgcggcagttggcagaatttgcagtcgcccgcaaatattaa

SEQ ID NO: 111397 - protein, 259 aa, Neisseria meningitidis MC58
MRYAALDGGKRLRPMLVLAASELGEAVHEAVEQAMAAIEMIHVYSLVHDDMPAMDNDSLRRGKPTCHIKYGEATALLTGDALQTQAFDVLSRPTELPAARQLAMLSVLAKAGGSRGMAGGQAIDLANVGKQMVQADLEQMHSLKTGALIRAAVLLGATACPDLSDAELSVLDAYAAKLGLAFQVIDDVLDCEADTATLGKTAGKDADNDKPTYVKLMGLEAARSYAHKLVAEAVALLEPFGDKALRLRQLAEFAVARKY

SEQ ID NO: 111398 - DNA, 846 bp, Campylobacter jejuni subsp. jejuni NCTC 11168; identical to SEQ ID NO: 57293
  CDS (1)..(846): transl_table=11

SEQ ID NO: 111399 - protein, 281 aa, Campylobacter jejuni subsp. jejuni NCTC 11168; identical to SEQ ID NO: 57294

SEQ ID NO: 111400 - DNA, 897 bp, Neisseria meningitidis Z2491
  CDS (1)..(897): transl_table=11
ttgaatccgacgaatgatttgaaagcgtggcaacagagggcgcaggcacagacagagctgctgctggaacgctttttgccgtctgaaaacgaaatcccgcacacgctgcacgaagcgatgcgttatgcggctttggacggcggcaaacgcctgcggccgatgctggttctggcggcttcggaattgggcgaagccgtgcatgaagcagtaggacaggcaatggcggcaatcgagatgattcacgcctattcgctggttcacgacgatatgccggcgatggacaacgacagcctgcgccggggcaaaccgacctgccatgtgaaatatggcgaagccaccgcgctactgaccggcgatgctttgcagacgcaggcgtttgacgtattgagccgtccgacagaactgcccgccgcacgccagttggcaatgttgtcggtgttggcaaaagcgggcggaagcatgggtatggcgggcggtcaggcaatcgatttggcgaatgtcggcaagcagatggcccaaaccgatttggaacagatgcacagcctgaaaacgggtgcgctaatccgtgccgcggttttattgggggcaatgtcttgcccgaatctgtctgaagacagtctggcggtattggacgattatgcggcaaaactggggctggcgttccaagtcattgacgatgtgttggattgtgaagcggacacggcgactttgggcaagacggcgggcaaagatgccgacaacgacaagccgacttatgtgaaactgatgggcttggaagcggcgcgctcatacgcacacaaactggttgccgaagcggtcgcgctgctcgaacccttcggcgacaaagccctgcgcctgcggcagttggcagaatttgcagtcgcccgcaaatattaa

SEQ ID NO: 111401 - protein, 298 aa, Neisseria meningitidis Z2491
MNPTNDLKAWQQRAQAQTELLLERFLPSENEIPHTLHEAMRYAALDGGKRLRPMLVLAASELGEAVHEAVGQAMAAIEMIHAYSLVHDDMPAMDNDSLRRGKPTCHVKYGEATALLTGDALQTQAFDVLSRPTELPAARQLAMLSVLAKAGGSMGMAGGQAIDLANVGKQMAQTDLEQMHSLKTGALIRAAVLLGAMSCPNLSEDSLAVLDDYAAKLGLAFQVIDDVLDCEADTATLGKTAGKDADNDKPTYVKLMGLEAARSYAHKLVAEAVALLEPFGDKALRLRQLAEFAVARKY

SEQ ID NO: 111402 - DNA, 900 bp, Escherichia coli O157:H7 EDL933; identical to SEQ ID NO: 57295
  CDS (1)..(900): transl_table=11

SEQ ID NO: 111403 - protein, 299 aa, Escherichia coli O157:H7 EDL933; identical to SEQ ID NO: 57296

SEQ ID NO: 111404 - DNA, 876 bp, Streptococcus pneumoniae TIGR4; identical to SEQ ID NO: 57297
  CDS (1)..(876): transl_table=11

SEQ ID NO: 111405 - protein, 291 aa, Streptococcus pneumoniae TIGR4; identical to SEQ ID NO: 57298

SEQ ID NO: 111406 - DNA, 870 bp, Clostridium acetobutylicum ATCC 824
  CDS (1)..(870): transl_table=11
atgaacaataaagtaataaagaaagaagtagaggaatatttaagtagatactttgaaggaaaagataactacaataaaagggtatatgaatctatgaactatagcctaaatgcgggtggaaaaagggtaagacctctgcttttattagcttcgtatgccatatataataaagattacaaagaagtaattgacatagcggcagcaattgaaatgatacatacttattcactaatacatgatgatttaccgtgtatggataatgatgatttaagaagaggaagaccaacaaatcataagatttttggctattctattgctcttttagcaggtgacggccttctgaacgaggcaatgaacataatgtttaagtattgtattggaaaaggtgaagaggctcttaaagcttgtttaatgatatctaaggcagcaagttcagatggaatgataggcggtcaagttgtggatatattaagtgaaggaaagaagataaatgaagatgagcttagatatatgcacaaaaaaaagacaggtgagcttataaaggcagctgtagtcagtggagcaatattagggggagctcctttgcatgatgtggagcttttatcgcaatatggtgataaattaggtcttgcttttcaaatagaagatgatatactcgatattattggagatacaaaaatcatgggaaagacatcgaaaagtgatttggaaaatgataaatgtacctatgttactttgtatggaatagataagtgtaagagtatttgcagagagttaacagatgaatgtttagatataataggcaaaatacaaggcaatacggaattgcttaaagaaataacagaacttttattaaagagaaatagataa

SEQ ID NO: 111407 - protein, 289 aa, Clostridium acetobutylicum ATCC 824
MNNKVIKKEVEEYLSRYFEGKDNYNKRVYESMNYSLNAGGKRVRPLLLLASYAIYNKDYKEVIDIAAAIEMIHTYSLIHDDLPCMDNDDLRRGRPTNHKIFGYSIALLAGDGLLNEAMNIMFKYCIGKGEEALKACLMISKAASSDGMIGGQVVDILSEGKKINEDELRYMHKKKTGELIKAAVVSGAILGGAPLHDVELLSQYGDKLGLAFQIEDDILDIIGDTKIMGKTSKSDLENDKCTYVTLYGIDKCKSICRELTDECLDIIGKIQGNTELLKEITELLLKRNR

SEQ ID NO: 111408 - DNA, 915 bp, Agrobacterium tumefaciens str. C58; identical to SEQ ID NO: 57299
  CDS (1)..(915): transl_table=11

SEQ ID NO: 111409 - protein, 304 aa, Agrobacterium tumefaciens str. C58; identical to SEQ ID NO: 57300

SEQ ID NO: 111410 - DNA, 915 bp, Sinorhizobium meliloti 1021; identical to SEQ ID NO: 57301
  CDS (1)..(915): transl_table=11

SEQ ID NO: 111411 - protein, 304 aa, Sinorhizobium meliloti 1021; identical to SEQ ID NO: 57302

SEQ ID NO: 111412 - DNA, 885 bp, Caulobacter crescentus CB15
  CDS (1)..(885): transl_table=11
atgagcgaccttgccaagcggatcgtccaagccgccgacatcgtcaccgtggcgctggacgagctgttgccgcgcgccgacggccccgagagccgcctgaccgaagccatgcgctatgcggccctggggcccggcaagcgcctgcggccgttcttcgcgcttgagaccggcaagatgttcgatctgcccgagcggccggtgctgcgcgcggcgtgcgcgctggagtgcatccacgcctacagcctggtgcatgacgacctgcccgcgatggacgatgacgacgtgcgtcgtggtcgcccgaccgtgcacaagcaatacgacgaggccacggccatcctggcgggcgacgccctgcagacggcggccttcgagatcatggcccacccggacacccacgacgacggccatgtccgctcggaactggtgcgcaagctggctatcgcctcgggcgcgcgcggaatgtgcggcggccagatgatcgatctcctgggcgttcgcgacgatctgggcgctgtggcgcgcatgcagcggctgaagaccggcgccctgatcgccttcgccttcgagatcccgctgatcatcgcccgcgccaaggagtccgagcgctcggccctgatggccttcgctcaggacctgggtctggcctaccagatcgtcgacgacatcctcgacgccgagggcgatgaggagaccctgggcaaggccgccggcggcaaggacgccgccaagggcaaggccaactacgtcactttgttggggctggatgcggccaaggagcgcgtgacccttttggccgagcagacgcgttcccatctcgaaatctttggcgaacgggccgaacatctccgcgcgagcgttgatttcgtgctggaccgccgcaactga

SEQ ID NO: 111413 - protein, 294 aa, Caulobacter crescentus CB15
MSDLAKRIVQAADIVTVALDELLPRADGPESRLTEAMRYAALGPGKRLRPFFALETGKMFDLPERPVLRAACALECIHAYSLVHDDLPAMDDDDVRRGRPTVHKQYDEATAILAGDALQTAAFEIMAHPDTHDDGHVRSELVRKLAIASGARGMCGGQMIDLLGVRDDLGAVARMQRLKTGALIAFAFEIPLIIARAKESERSALMAFAQDLGLAYQIVDDILDAEGDEETLGKAAGGKDAAKGKANYVTLLGLDAAKERVTLLAEQTRSHLEIFGERAEHLRASVDFVLDRRN

SEQ ID NO: 111414 - DNA, 909 bp, Synechocystis sp. PCC 6803
  CDS (1)..(909): transl_table=11
atggttgcccaacaaacacgaaccgactttgatttagcccaatacttacaagttaaaaaaggtgtggtcgaggcagccctggatagttccctggcgatcgcccggccggaaaagatttacgaagccatgcgttattctctgttggcggggggcaaacgattgcgaccgattttatgcattacggcctgcgaactgtgtggcggtgatgaagccctggccttgcccacggcctgtgccctggaaatgatccacaccatgtccctcatccatgatgatttgccctccatggataatgacgatttccgccggggtaaacccactaaccacaaagtgtacggggaagacattgccattttggccggggatggactgctagcctatgcgtttgagtatgtagttacccacaccccccaggctgatccccaagctttactccaagttattgcccgtttgggtcgcacggtgggggccgccggtttagtggggggacaagttctagacctggaatcggaggggcgcactgacatcaccccggaaaccctaacttttatccatacccataaaaccggggcattgctggaagcttccgtgctcacaggcgcaattttggccggggccactggggaacaacaacagagactggcccgctatgcccagaatattggcttagcttttcaagtggtggatgacatcctcgacatcaccgccacccaggaagagttgggtaaaaccgctggtaaagatgtcaaagcccaaaaagccacctatcccagtctcctcggtttggaagcttcccgggcccaggcccaaagtttgattgaccaggccattgtcgccctggaaccctttggcccctccgccgagcccctccaggcgatcgccgaatatattgttgccagaaaatattga

SEQ ID NO: 111415 - protein, 302 aa, Synechocystis sp. PCC 6803; identical to SEQ ID NO: 57236

SEQ ID NO: 111416 - DNA, 882 bp, Listeria monocytogenes EGD-e
  CDS (1)..(882): transl_table=11
ttgcaagatttaaccctttttttagaacaatataaaaaagtgattgatgagtcgctttttaaagaaataaacgagcgaaatatcgaacctagactaaaagagtccatgttatattctattcaagcaggcgggaaacggattcgtccaatgctagttttcgctacgcttcaagctttaaaagtaaatccgcttttaggtgtaaaaaccgcaacagcgttagaaatgattcacacatacagccttattcatgatgatctaccagcaatggataacgatgattatcgtcgaggcaagtggactaatcataaagtttttggcgatgcaactgcgattttggcaggagatgctttactaacgctcgctttttctattttagctgaagacgataatttatcttttgagacacgcattgctttgattaaccaaattagttttagtagcggtgcagaaggaatggttggtggtcaacttgcagacttggaagcggaaaacaaacaagtgacgctagaagagttatcatccattcatgcacgaaaaacgggtgaattattaatttatgctgtaacctctgcagcaaaaattgcggaagctgatccagaacaaacgaaacgcttacgaatttttgcagagaatattgggattggatttcaaattagcgacgatattttagatgtaattggtgatgaaacgaaaatgggtaaaaagacaggggccgacgcttttctgaataaaagtacctatcccggattactcacgcttgatggggcaaaaagggcattaaatgagcatgttacgattgcaaagtcagcgctttcagggcatgatttcgatgatgaaattctcttgaaacttgctgatttaatcgcacttagagaaaattaa

SEQ ID NO: 111417 - protein, 293 aa, Listeria monocytogenes EGD-e
MQDLTLFLEQYKKVIDESLFKEINERNIEPRLKESMLYSIQAGGKRIRPMLVFATLQALKVNPLLGVKTATALEMIHTYSLIHDDLPAMDNDDYRRGKWTNHKVFGDATAILAGDALLTLAFSILAEDDNLSFETRIALINQISFSSGAEGMVGGQLADLEAENKQVTLEELSSIHARKTGELLIYAVTSAAKIAEADPEQTKRLRIFAENIGIGFQISDDILDVIGDETKMGKKTGADAFLNKSTYPGLLTLDGAKRALNEHVTIAKSALSGHDFDDEILLKLADLIALREN

SEQ ID NO: 111418 - DNA, 882 bp, Listeria innocua Clip11262
  CDS (1)..(882): transl_table=11
ttgcaagatttgatgctttttctagatcattataaaaaagtacttgatgagtcgctttttaaagaaataaatatgcgcaatatcgaacctaagttgaaagaatcaatgttatattcagtgcaagctggcggaaaacgaattcgtccaatgcttgtttttgcaacgcttcaagccttaaatattgagccaatgcgcggtttaaaaacagctacggcacttgaaatgattcatacgtacagcttaattcacgatgatttaccagcaatggatgatgatgactatcgacgcgggaaatggacgaaccataaaatatacggtgatgcaacagcaattttagcaggagatgctttgttaacactcgctttttctattttagctgaagatgaaaatctatctttcgaaacgcgtattgctttaattaatcaaattagttatagcagtggagcagaaggcatggtaggtgggcaacaagccgatatggaagctgaaaataaacaagtcacattagaagaactagcatcaatccacgctcgcaaaactggtgaactattaattttcgcagtaacctcagccgcaaaaatcgctgaagcaactccagaacaaacaaaacgattacgaatttttgcagaaaatatcggcattggttttcaaattagcgacgatattttagatgtaattggcgatgaaacaaaaatgggtaaaaagacaggggtcgacgcttttctgaataaaagtacctatcccggattactcacactcgaaggtgctaaacgggcattaaatgagcatgtttcaattgcaaagtcagcgctttcaggacatgatttcgacgatgaaattctccttaaacttgctgatttaatcgcacttagagaaaattaa

SEQ ID NO: 111419 - protein, 293 aa, Listeria innocua Clip11262
MQDLMLFLDHYKKVLDESLFKEINMRNIEPKLKESMLYSVQAGGKRIRPMLVFATLQALNIEPMRGLKTATALEMIHTYSLIHDDLPAMDDDDYRRGKWTNHKIYGDATAILAGDALLTLAFSILAEDENLSFETRIALINQISYSSGAEGMVGGQQADMEAENKQVTLEELASIHARKTGELLIFAVTSAAKIAEATPEQTKRLRIFAENIGIGFQISDDILDVIGDETKMGKKTGVDAFLNKSTYPGLLTLEGAKRALNEHVSIAKSALSGHDFDDEILLKLADLIALREN

SEQ ID NO: 111420 - DNA, 930 bp, Nostoc sp. PCC 7120; identical to SEQ ID NO: 57303
  CDS (1)..(930): transl_table=11

SEQ ID NO: 111421 - protein, 309 aa, Nostoc sp. PCC 7120; identical to SEQ ID NO: 57304

SEQ ID NO: 111422 - DNA, 900 bp, Ralstonia solanacearum GMI1000; identical to SEQ ID NO: 57305
  CDS (1)..(900): transl_table=11

SEQ ID NO: 111423 - protein, 299 aa, Ralstonia solanacearum GMI1000; identical to SEQ ID NO: 57306

SEQ ID NO: 111424 - DNA, 1008 bp, Agrobacterium tumefaciens str. C58; identical to SEQ ID NO: 57307
  CDS (1)..(1008): transl_table=11

SEQ ID NO: 111425 - protein, 335 aa, Agrobacterium tumefaciens str. C58; identical to SEQ ID NO: 57308

SEQ ID NO: 111426 - DNA, 915 bp, Brucella melitensis 16M; identical to SEQ ID NO: 57309
  CDS (1)..(915): transl_table=11

SEQ ID NO: 111427 - protein, 304 aa, Brucella melitensis 16M; identical to SEQ ID NO: 57310

SEQ ID NO: 111428 - DNA, 906 bp, Clostridium perfringens str. 13
  CDS (1)..(906): transl_table=11
atgaaaaagaggaagactttggaggatacagcaatgaatattaatagcttaaaagaggaagttgatcaatctttaaaagcttattttaataaagatagagaatacaataaagttttatatgattcaatggcatatagcataaatgtagggggaaaaagaataagaccaatcttaatgcttttatcttactatatttataaaagtgattataaaaaaatattaacacctgcaatggccatagaaatgatacacacttattctttaatacatgatgatttaccatgtatggacaatgatgatttaagaagaggaaaacctacaaatcataaggtttttggagaagctattgctgttttagctggagatgcccttttaaatgaagctatgaaaattttagttgattattctttagaagaaggaaaaagtgcattaaaggcaactaaaataattgcagatgcagcaggatcagatggaatgattggtgggcaaattgttgatataataaatgaagataaggaagaaatttctttaaaagaattagattatatgcatttaaagaaaactggagaacttataaaagcttcaataatgtctggagcggttttagcagaagcttcagagggagatattaaaaaattagagggttttggatataagttaggcttagcatttcaaataaaagatgatatattagatgtagtgggaaatgcaaaagatttagggaagaatgttcacaaagaccaagaaagcaataaaaataattatataaccatttttggattagaagaatgtaagaaaaaatgcgtgaatataactgaggaatgtatagagatattaagttcaataaaaggaaatacagagcctctaaaagttttaaccatgaaacttttagagagaaaattttaa

SEQ ID NO: 111429 - protein, 301 aa, Clostridium perfringens str. 13
MKKRKTLEDTAMNINSLKEEVDQSLKAYFNKDREYNKVLYDSMAYSINVGGKRIRPILMLLSYYIYKSDYKKILTPAMAIEMIHTYSLIHDDLPCMDNDDLRRGKPTNHKVFGEAIAVLAGDALLNEAMKILVDYSLEEGKSALKATKIIADAAGSDGMIGGQIVDIINEDKEEISLKELDYMHLKKTGELIKASIMSGAVLAEASEGDIKKLEGFGYKLGLAFQIKDDILDVVGNAKDLGKNVHKDQESNKNNYITIFGLEECKKKCVNITEECIEILSSIKGNTEPLKVLTMKLLERKF

SEQ ID NO: 111430 - DNA, 894 bp, Fusobacterium nucleatum subsp. nucleatum ATCC 25586; identical to SEQ ID NO: 57311
  CDS (1)..(894): transl_table=11

SEQ ID NO: 111431 - protein, 297 aa, Fusobacterium nucleatum subsp. nucleatum ATCC 25586; identical to SEQ ID NO: 57312

SEQ ID NO: 111432 - DNA, 873 bp, Streptococcus pyogenes MGAS8232
  CDS (1)..(873): transl_table=11
atggacaaattagctagaattgacgaagccattcgtcgctactataagacgactagtaacggtgtatctgaagagttgattgatgctatcttgtattctgttgacagtggtggcaagcgcattcgcccacttatcttattagagatgattgagggatttggggtatcgttacagaatgctcattttgatttggctgcagcccttgaaatgattcatacaggaagtctgattcacgatgatttgccagccatggataatgatgattaccgacgtggtagactgaccaatcacaaacaatttggagaggctactgctattttggcgggagatagcttatttttagacccctttgggttaatagctcaagctgaattaaatagcgaggttaaagtagccttaatccaagaactttccctagcttcaggaacttttggcatggttggtggtcagatgctagatatgaaaggggaaaatcaagctttgagtctctctcagttgtcactgattcacctcaataaaaccggaaaattattaacttttccttttaaagcagcagctcttgtaacagaacaggctattactgttcgtcaacaactagagcaggcgggaatgctcatcgggcatgcctttcagattagggatgatattttagacgtgacagctagctttgaagatcttggaaaaacgcctaaaaaggacttattcgcagaaaaagctacttacccaagtttactggggttagaagcctcttaccaactgttgacagagagtttagatcaggctttgacgatttttcagacactagaaagcgatgtaggctttaagcctcaaataattacaaaactgatagaagggttacgacttaatgcctaa

SEQ ID NO: 111433 - protein, 290 aa, Streptococcus pyogenes MGAS8232
MDKLARIDEAIRRYYKTTSNGVSEELIDAILYSVDSGGKRIRPLILLEMIEGFGVSLQNAHFDLAAALEMIHTGSLIHDDLPAMDNDDYRRGRLTNHKQFGEATAILAGDSLFLDPFGLIAQAELNSEVKVALIQELSLASGTFGMVGGQMLDMKGENQALSLSQLSLIHLNKTGKLLTFPFKAAALVTEQAITVRQQLEQAGMLIGHAFQIRDDILDVTASFEDLGKTPKKDLFAEKATYPSLLGLEASYQLLTESLDQALTIFQTLESDVGFKPQIITKLIEGLRLNA

SEQ ID NO: 111434 - DNA, 975 bp, Methanopyrus kandleri AV19
  CDS (1)..(975): transl_table=11
atgcggagtgagatactgaaagagctgaaccgtgcacgcgagctcgtcgacgccaagattgaggaggtactacccagaggaggcccagaggacctctacgatgcgtgttggcacctaatcgaagcgggaggtaagcgaatccgacccctcctcgccatcaaatcgtgtctcatgttaggtggatcggaagaggacgtactccctgaagcggtcgcggtcgagctgattcatacgttcactctaattcacgacgacatcatggacgaagacgacgaacgacgcggagtcccggcggtacacgtgaagtggggagtaccggtagccatactggcgggagacaccctgttctccaaagccttcgaagtggcggcggaaggcggagacgtagaggcagtgaaagaactcgcccgcgcctgcacggagatctgtgagggccaagccatggacatcgggttcgagaacaggactgaagtcaccgaggatgagttcctcgaaatgatccggaagaaaacggcagcgctcatacggacatcgtgcgtcgtaggcgggcttaaagccggggcgaaccgcgagcaactggaagcgcttcgggagtacggcgagaacttggggatcgcgttccagatacaggacgacgtcctcgaccttgtcggagacgagtccgaactcggtaagcccgtgggcagcgacatcgtcgaggggaagaagacgctgatcgtgatcaagggcctggagctcgccgatgaggagcagcgggagcgcatactttcggtcctcgggaacgaggatgcttcacgcgaggacgttcgcgaggttattcagatactcgaagatctcggtgcgatagattacgctaaaaagcgggcccgagagtacgccgatcgcgctaaggctgcgctgcgcgagctccccgagaacgagcatcgggagttcctagaaaagttggcggatttcgttgtagagagggagttctga

SEQ ID NO: 111435 - protein, 324 aa, Methanopyrus kandleri AV19
MRSEILKELNRARELVDAKIEEVLPRGGPEDLYDACWHLIEAGGKRIRPLLAIKSCLMLGGSEEDVLPEAVAVELIHTFTLIHDDIMDEDDERRGVPAVHVKWGVPVAILAGDTLFSKAFEVAAEGGDVEAVKELARACTEICEGQAMDIGFENRTEVTEDEFLEMIRKKTAALIRTSCVVGGLKAGANREQLEALREYGENLGIAFQIQDDVLDLVGDESELGKPVGSDIVEGKKTLIVIKGLELADEEQRERILSVLGNEDASREDVREVIQILEDLGAIDYAKKRAREYADRAKAALRELPENEHREFLEKLADFVVEREF

SEQ ID NO: 111436 - DNA, 885 bp, Thermoanaerobacter tengcongensis MB4
  CDS (1)..(885): transl_table=11
atgtttaaagaaaaattcaaaaatttacaacagatggtggaggaagagcttcacaggatactggatgtacaggagaagccggagataatatacgaggcgatgagatacagcgtttttgcaggggggaaaagattgaggcctgttttgtgcctctctgcctgtgaacttttgggaggggatttaaaaaaagctttgccagtagcctgctctattgaactcatacacacttattctcttatccacgatgaccttcctgctatggataatgatgatttgagaagaggcaagcctacaaatcacaaggtatttggagaggccatagccattcttgccggggatggacttttaaacctgggatatgaggttttgataaggcatgctctggaaaatcccgaagattatgagaaaattttaaaagctgcgaatgaaatagctactgcttcaggttgtaagggaatcataggagggcaggtagaagatatactttctcaaaacacagaacttacctatgaagagctaaaatacatccacgaacacaagaccgcagctttgatagaggcttctgtctgtgcaggagcccatatggctggggctagtgaaaaagaagtggagcttttgagagaatacgctgggctaatagggctggcatttcagataaaagacgacatactggatgtaataggagatgaaaaaacgcttggcaaaaaagtggggagcgacagggaaaaaggcaagtttacttttgtcaacatattcggcgttgaaaaatcccaagaaatggtaaaggagcttacagatgaagctataaagattttggacacttttggcgaaagggcacagtttcttaaagacctctctaattatttgattgagagagtaaactga

SEQ ID NO: 111437 - protein, 294 aa, Thermoanaerobacter tengcongensis MB4
MFKEKFKNLQQMVEEELHRILDVQEKPEIIYEAMRYSVFAGGKRLRPVLCLSACELLGGDLKKALPVACSIELIHTYSLIHDDLPAMDNDDLRRGKPTNHKVFGEAIAILAGDGLLNLGYEVLIRHALENPEDYEKILKAANEIATASGCKGIIGGQVEDILSQNTELTYEELKYIHEHKTAALIEASVCAGAHMAGASEKEVELLREYAGLIGLAFQIKDDILDVIGDEKTLGKKVGSDREKGKFTFVNIFGVEKSQEMVKELTDEAIKILDTFGERAQFLKDLSNYLIERVN

SEQ ID NO: 111438 - DNA, 876 bp, Xanthomonas campestris pv. campestris str. ATCC 33913; identical to SEQ ID NO: 57315
  CDS (1)..(876): transl_table=11

SEQ ID NO: 111439 - protein, 291 aa, Xanthomonas campestris pv. campestris str. ATCC 33913; identical to SEQ ID NO: 57316

SEQ ID NO: 111440 - DNA, 876 bp, Xanthomonas axonopodis pv. citri str. 306
  CDS (1)..(876): transl_table=11
gtgagctcggcgttgttcgaccactggatcgcccgcaccgaacgcagcctggaggccggcttgccgagcgccacgcatgcgccgcagcgcctgcatgcagcgatgcgccacgccgtgctgggcgggggcaagcgcatgcggccgctgctggtctacgcaagcggcgcattgttcggtgccgctgaggatcaactcgacacgcccgcggtggcagtagagctgattcacgcttattcgctggtgcacgacgatttgccggcgatggacgacgacgcgctgcgacgcggccagcccaccgtgcatatcgccttcgacgaggccaccgcgattctggccggcgatgccttgcagacgcgcgcgttcgaattactcgccgctgcctctgccagcgccgaactgcgcgtgggctggatgcagagcctggccaccgcggcgggcgcggccggcatgtgcggcggccaggcgctggacatcgatgcgaccgggcaactgcaatcgctgcagcacctgcagcgcatgcatgcgctcaagaccggcgcgttgatccgcgcagcggtacggatgggcgcactgaccggaggcgcagcgttggccgaccagcagcgcctggacgaatttgccgacgcgctgggcctggccttccaggtgcgcgacgacatcctggatgtggaatcgagctcggcgcagctgggcaagaccgccggcaaggacgcggcgcaatccaaatccacctaccccgccctgctggggatggacggcgccaaggcgaagctggccgaactggccgcgcgcatgcatgacgtcctgcagccctacgggcaaccaggcgagacattagccaccttggcccggtttgcggtgaaccgcgcgcactag

SEQ ID NO: 111441 - protein, 291 aa, Xanthomonas axonopodis pv. citri str. 306
MSSALFDHWIARTERSLEAGLPSATHAPQRLHAAMRHAVLGGGKRMRPLLVYASGALFGAAEDQLDTPAVAVELIHAYSLVHDDLPAMDDDALRRGQPTVHIAFDEATAILAGDALQTRAFELLAAASASAELRVGWMQSLATAAGAAGMCGGQALDIDATGQLQSLQHLQRMHALKTGALIRAAVRMGALTGGAALADQQRLDEFADALGLAFQVRDDILDVESSSAQLGKTAGKDAAQSKSTYPALLGMDGAKAKLAELAARMHDVLQPYGQPGETLATLARFAVNRAH

SEQ ID NO: 111442 - DNA, 999 bp, Chlorobium tepidum TLS
  CDS (1)..(999): transl_table=11
atgtcctcaccgattacccaagcacaggttgaaagcaagtaccggcaataccatgcaaagatcaacgaagcgcttgccgcctgctttccgaaagagaagccggcaaccctttacgaccctgcgcgctacattctcgaaggaaagggtaagcgaatccgtccgttcctgactttgcttgccgccgaagcggtcagcggcaagtccgacaacgcgcttggcgttgccctcggtatcgaggtgctgcacaacttcaccctgatgcacgacgacatcatggaccaggccgatctgcgccatggccgtcccaccgtgcacaagcagtggaatgtcaacgcggcgattctttcgggtgacatgatgatcgcctacgcctacgagctggcactcaaggcgatcagttcgcgccacgccgaaataatccacatcttcaacgatgccaacatcacgatctgcgaagggcaggcgctcgacatggagctcgaacagcgcaaggatgtcaccatcgccgactacctcgacatgatctccaaaaagacggggcgactcatctcggcggcgctcgaagcgggcggcgttgcgggcgacggcacgccggagcagatcgcagcgttggtcaccttcggcgaaaagatcggacgagctttccagattcaggatgactatctcgacatcatggccggagacggcaagtcgggcaaggtgccgggcggcgacgtcatcaacggcaaaaagacctggctgctgctccgttcgctcgaactggccgaaggcgctgaccgcgagcttttacaatcgatcttcgacaacaacggcacctcgcccgacaacgtcccagcggtcaaggcgatcttcgagaagtgcggtgtgctcaacgagaccagggcgaaaatcaacgaggataccgaagcagcgctggcagcgctcgacgcccttccgttcgaggagggacgcggctatctgagaggctttgccaacattctcatgaagcgcgatttctga

SEQ ID NO: 111443 - protein, 332 aa, Chlorobium tepidum TLS
MSSPITQAQVESKYRQYHAKINEALAACFPKEKPATLYDPARYILEGKGKRIRPFLTLLAAEAVSGKSDNALGVALGIEVLHNFTLMHDDIMDQADLRHGRPTVHKQWNVNAAILSGDMMIAYAYELALKAISSRHAEIIHIFNDANITICEGQALDMELEQRKDVTIADYLDMISKKTGRLISAALEAGGVAGDGTPEQIAALVTFGEKIGRAFQIQDDYLDIMAGDGKSGKVPGGDVINGKKTWLLLRSLELAEGADRELLQSIFDNNGTSPDNVPAVKAIFEKCGVLNETRAKINEDTEAALAALDALPFEEGRGYLRGFANILMKRDF

SEQ ID NO: 111444 - DNA, 921 bp, Yersinia pestis KIM
  CDS (1)..(921): transl_table=11
atgtcggatacccatgcacctgttgattttaaacaacaacttgccgctcatcagcagcgagtcaatcaggctctgctggatttcattgctcccctgccgtttggcaacagcaatttaatcgaggccatgcgctatggtgcggtaatcgggggtaagcgtctccgcccctatctggtctatgccacagggcaaatgtttggtttgtcactcgccaacttagacgccccggcggcggcaattgaatgtattcatgcctattcattaatacatgatgatctgcccgccatggacgatgatgatttacgccgtgggcagccgacttgccacgttaagtttggcgaggcccacgctattttggccggtgatgcactgcaaacgctggccttttctattttggctgaagcccccatgcccgatgtcgctgataaagatcgcctatcgatgattatcgagttggctcaagccagtggggctgcggggatgtgtgcgggtcaggcgctagatctggaagcagaaactcgccctgttttattaggtgaccttgagcaaatccaccgtcataaaaccggtgcgttgattcgtgcggcagttcgccttggcgcccaggcagccggtgaagctggccgtaaaacattattgtcactcgatcgttacgccgaggccatcggtttagcctttcaagtccaggacgatattttagacgtcattggcgacacagctacaattggtaaacgtcaaggatcagaccaacaactaggcaaaagtacttatccggcgctacttggtctggattgtgcccaaacaaaagcgatggatctttatcaggaggcactagaggccttggatgaattggcaaaacagtcctataacacggattcattgcaggcattagctcgtttcattattgagcgtaataattaa

SEQ ID NO: 111445 - protein, 306 aa, Yersinia pestis KIM
MSDTHAPVDFKQQLAAHQQRVNQALLDFIAPLPFGNSNLIEAMRYGAVIGGKRLRPYLVYATGQMFGLSLANLDAPAAAIECIHAYSLIHDDLPAMDDDDLRRGQPTCHVKFGEAHAILAGDALQTLAFSILAEAPMPDVADKDRLSMIIELAQASGAAGMCAGQALDLEAETRPVLLGDLEQIHRHKTGALIRAAVRLGAQAAGEAGRKTLLSLDRYAEAIGLAFQVQDDILDVIGDTATIGKRQGSDQQLGKSTYPALLGLDCAQTKAMDLYQEALEALDELAKQSYNTDSLQALARFIIERNN

SEQ ID NO: 111446 - DNA, 924 bp, Thermosynechococcus elongatus BP-1; identical to SEQ ID NO: 57317
  CDS (1)..(924): transl_table=11

SEQ ID NO: 111447 - protein, 307 aa, Thermosynechococcus elongatus BP-1; identical to SEQ ID NO: 57318

SEQ ID NO: 111448 - DNA, 885 bp, Oceanobacillus iheyensis HTE831; identical to SEQ ID NO: 57319
  CDS (1)..(885): transl_table=11

SEQ ID NO: 111449 - protein, 294 aa, Oceanobacillus iheyensis HTE831; identical to SEQ ID NO: 57320

SEQ ID NO: 111450 - DNA, 915 bp, Brucella suis 1330
  CDS (1)..(915): transl_table=11
atggaaaagctgcctgtcgatttcaccactcttcttaaccgccgcgccatggaagtagaagctgcccttgccggtcttctggacgaacgcccgcgcaccggcgagattgcccgtccgcagcgtctcatcgccgccatgcgccatggcgtactgaacggcggcaagcgcctgcgcccgtttctcgtcctcgaaagtgctgcccttttcggacagtacggccaggcggtgctgcgcgtcgctgccgcgctggaatgtatccattgctattcgctggtccatgacgatctgccagccatggatgatgacgatctgcgccggggccagccaaccgtgcacaaggcctttgatgaggcagccgccattctggccggtgatagcctgctgacctacgccttcgacattatcgcatccgatgaaacggaactcgacgccaccacccgcataaagcttgtttgcgcgctcacgcgcgcttccggccttggcggcatggcaggcggacaggcgctcgacctgatggcggaaaccagaaaaccggacgaggcaagcatcatcacgcttcaagccatgaagaccggcgcgctgatccgctttgcctgcgaggcgggcgctatcatcgctggcgcatcgcaggaagaccgggagcgcatggcggaattcggctcggcaatcggcctggccttccagcttgccgacgatcttctggacgtgaccgccgacgctggcaccatgggcaaggcaaccggcaaggatgccgccgccggaaaagccacgctggtttcacttcacggcattgactggacccgccagcagctttcaggcctcgtcgcacaggccgaaagcctgctcgcaccctttggagaagacgccgaacccctcaagcaagcggcccgcttcatcgccgagcggcagaattaa

SEQ ID NO: 111451 - protein, 304 aa, Brucella suis 1330
MEKLPVDFTTLLNRRAMEVEAALAGLLDERPRTGEIARPQRLIAAMRHGVLNGGKRLRPFLVLESAALFGQYGQAVLRVAAALECIHCYSLVHDDLPAMDDDDLRRGQPTVHKAFDEAAAILAGDSLLTYAFDIIASDETELDATTRIKLVCALTRASGLGGMAGGQALDLMAETRKPDEASIITLQAMKTGALIRFACEAGAIIAGASQEDRERMAEFGSAIGLAFQLADDLLDVTADAGTMGKATGKDAAAGKATLVSLHGIDWTRQQLSGLVAQAESLLAPFGEDAEPLKQAARFIAERQN

SEQ ID NO: 111452 - DNA, 900 bp, Shigella flexneri 2a str. 301
  CDS (1)..(900): transl_table=11
atggactttccgcagcaactcgaagcctgcgttaagcaggccaaccaggcgctgagccgttttatcgccccactgccctttcagaacactcccgtggtcgaaaccatgcagtatggcgcattattaggtggtaagcgcctgcgacctttcctggtttatgccaccggtcatatgtttggcgttagcacaaacacgctggacgcacccgctgctgccgtagagtgtatccacgcttactcattaattcatgatgatttaccggcgatggatgatgacgatctgcgtcgcggtttgccgacctgccatgtgaagtttggcgaagcaaacgcgattctcgctggcgacgctttacaaacgctggcgttctcgattctaagcgatgccaatatgccggaagtgtcggatcgcgacagaatttcgatgatttctgaactggcgagcgccagcggtattgccggaatgtgcggtggtcaggcattagatttagacgcggaaggcaaacacgtacctctggacgcgcttgagcgtattcatcgtcataaaaccggcgcattgattcgcgccgccgttcgccttggtgcattaagcgccggagataaagggcgtcgtgctctgccagtactcgacaagtacgcagagagcatcggccttgccttccaggttcaggatgacatcctggatgtggtaggagatactgcaacgttgggaaaacgccagggtgccgaccagcaacttggtaaaagtacctaccctgcacttctgggtcttgagcaagcccggaagaaagcccgggatctgatcgacgatgcccgtcaggcgctgaaacaactggctgaacagtcactcgatacctcggcactggaagcgctagcggactacatcatccagcgtaataaataa

SEQ ID NO: 111453 - protein, 299 aa, Shigella flexneri 2a str. 301
MDFPQQLEACVKQANQALSRFIAPLPFQNTPVVETMQYGALLGGKRLRPFLVYATGHMFGVSTNTLDAPAAAVECIHAYSLIHDDLPAMDDDDLRRGLPTCHVKFGEANAILAGDALQTLAFSILSDANMPEVSDRDRISMISELASASGIAGMCGGQALDLDAEGKHVPLDALERIHRHKTGALIRAAVRLGALSAGDKGRRALPVLDKYAESIGLAFQVQDDILDVVGDTATLGKRQGADQQLGKSTYPALLGLEQARKKARDLIDDARQALKQLAEQSLDTSALEALADYIIQRNK

SEQ ID NO: 111454 - DNA, 870 bp, Streptococcus mutans UA159
  CDS (1)..(870): transl_table=11
gtgaaagataagattaaatccattaatcaggctattaagcattattatgcgcaaactcatgtgtctcaggatttgattgaagcggtcttgtattctgttgatgcaggcggtaaacggattcgtcctctcttactattggaaatcttgcaaggctttggtttggtacttacagaagctcactatcaggtggcagcaagtctagagatgattcataccggcagcctcgttcatgatgacctgcctgctatggataatgatgattataggcggggacagctgaccaatcataagaaatttggtgaagcgacagctatcttggcaggtgacagtctttttctagacccttttggtttgctagccaaggcggacttaagggctgatatcaagataaaattagtagcagaattgtcagatgctgcaggaagctatggtatggtcggtgggcaaatgttggatattaagggtgaacatgttcaactcaatttagaccaactagctcaaattcatgccaataagacaggaaaactcttgacttttccttttgtagccgcaggaataatagcagaattatcagaaaaagcccttgctcggctccgtcaggtgggtgaattagttggtttggcttttcaagtacgtgatgatattttagatgtgacagctagtttttcagaacttggtaagaccccacaaaaggatatcgaagctgataaatcaacctatcccagtcttttgggcttggacaagtcctatgccattttggaagattctctcaatcaagcgcaagctattttccaaaaattagctttagaggaacaatttaatgctactggaattgaaacaataatagaaaggttgcgtctccatgcctaa

SEQ ID NO: 111455 - protein, 289 aa, Streptococcus mutans UA159
MKDKIKSINQAIKHYYAQTHVSQDLIEAVLYSVDAGGKRIRPLLLLEILQGFGLVLTEAHYQVAASLEMIHTGSLVHDDLPAMDNDDYRRGQLTNHKKFGEATAILAGDSLFLDPFGLLAKADLRADIKIKLVAELSDAAGSYGMVGGQMLDIKGEHVQLNLDQLAQIHANKTGKLLTFPFVAAGIIAELSEKALARLRQVGELVGLAFQVRDDILDVTASFSELGKTPQKDIEADKSTYPSLLGLDKSYAILEDSLNQAQAIFQKLALEEQFNATGIETIIERLRLHA

SEQ ID NO: 111456 - DNA, 1311 bp, Drosophila melanogaster
  CDS (1)..(1311)
atggcctgcttgagcacttccggtcgcgtcgtgtgcggctcgcgtcgccagcaggcgcacaagctgctctatcagctcttcggatcccggccaggatatacagccccgtccgccgcaaccggattattcagtccgcccaaagttcaacagcaggccatgcgactctaccacggattaagcttcagcatgggcaaggattaccccgatctgctgcaaagtccccacaagtgcagccaatcgctgcagtactcgcaaagttccaaggcgaatctgaggcagcacagctcggtccacacacaacagccagcaggtcctgtgagggagttccagatcgatccctacatcatactcgatgacgacctcaagtacttctacgacgatgtgcgatatctgctgaaatcgggcacatcccagccagagttggacaccattgccagctattacttcgatggccagggcaaggctctgcgacccatggttaccatgctgatggccaaggcgataaactatcacctgaacaacgagtcacaccaattagtacacaaacagcgacagatcgccctcttttcggagatggtgcactcggccagtctggtccacgacgatgtcatcgatcagtcggacttccgacgcggcaagcccagcgtgaatgctctgtggaaccacaagaaggtcacaatggctggtgattacatcttatcgattgcctcgattatgatagctcgtctgcgcagcgatgatgtgacgatcgtgctgagtcagatcttgaccgatttggtccaaggcgagttcatgcagctgggctcaagggaaacggagaacgagcgcttcgcccattatctgaccaagacatacaggaagaccgcatcgctgatcgccaatgcactgaaggcgaccgccgtgattgcccaggccgacgacaacgtggccgaggtggccttccagtacggacgcaacatcggcttggcctttcagctggtcgacgacatgctggactttgtctcctccaccgagcagatgggcaagccgacggcggcggatttgaagctgggtctggccaccgctcccgtcctctttgcatgcgagaagtaccccgagctgaatcccatggtgatgcggcgcttcagcgagcccggcgacgtggagcgcgccttcgagctggtgcacaagtcgcacggtctggagcagacccggtttctggccaagaagcactgcaacgaggcgatacggctggcccaggagctcacggagtcgccctaccagaagggtctccaggtggtcgccgacttagtcatcaaccgcatgaagtag

SEQ ID NO: 111457 - protein, 436 aa, Drosophila melanogaster
MACLSTSGRVVCGSRRQQAHKLLYQLFGSRPGYTAPSAATGLFSPPKVQQQAMRLYHGLSFSMGKDYPDLLQSPHKCSQSLQYSQSSKANLRQHSSVHTQQPAGPVREFQIDPYIILDDDLKYFYDDVRYLLKSGTSQPELDTIASYYFDGQGKALRPMVTMLMAKAINYHLNNESHQLVHKQRQIALFSEMVHSASLVHDDVIDQSDFRRGKPSVNALWNHKKVTMAGDYILSIASIMIARLRSDDVTIVLSQILTDLVQGEFMQLGSRETENERFAHYLTKTYRKTASLIANALKATAVIAQADDNVAEVAFQYGRNIGLAFQLVDDMLDFVSSTEQMGKPTAADLKLGLATAPVLFACEKYPELNPMVMRRFSEPGDVERAFELVHKSHGLEQTRFLAKKHCNEAIRLAQELTESPYQKGLQVVADLVINRMK

SEQ ID NO: 111458 - DNA, 888 bp, Pseudomonas putida KT2440; identical to SEQ ID NO: 57323
  CDS (1)..(888): transl_table=11

SEQ ID NO: 111459 - protein, 295 aa, Pseudomonas putida KT2440; identical to SEQ ID NO: 57324

SEQ ID NO: 111460 - DNA, 900 bp, Escherichia coli CFT073; identical to SEQ ID NO: 57325
  CDS (1)..(900): transl_table=11

SEQ ID NO: 111461 - protein, 299 aa, Escherichia coli CFT073; identical to SEQ ID NO: 57326

SEQ ID NO: 111462 - DNA, 897 bp, Vibrio vulnificus CMCP6
  CDS (1)..(897): transl_table=11
atggataactctatgattgacgtccttgcgtcttttcagcagcgtaacaaccaacaactcaatctttggctcgataaactgccacaccaaaatcaagcgctgatccaagcgatgcgctatggattagtgttaggtggaaaacgtgctcgcccatttttggtgtatgccaccggtgagatgcttggttgcagccaagagcagctcgacacacctgcgtcagcgattgagtgtatccatgcttactctcttatccatgatgatctgccagccatggatgatgatgaactgcgccgtggccaaccgacctgccatgttaaatttgacgaagccaccgccattttaaccggtgatgctttacaaacgctcgcattcaccattctcgctgaaggtacattgtctgctgatggagaaacacaacgtgttgccatgatccaagcattggcgcaagcctctggagcgcaaggcatgtgcattggtcaggcgttggatttggctgcggaaaaccgcgcagtcacgctggaagagttagaagagattcaccgtaacaaaaccggcgctttgatccgttgtgcggtacgcttaggtgccttagcagcaggcgaaaaaggtttggcgattttgcctcagttggagaagtactccacggcgattgggttagcatttcaggtgcaagatgacattttggatatcattagcgataccgaaacgctcgggaagccacaaggttctgaccaagaactcaacaagagtacctacccatcgctgctgggtttagaaggcgcaatggagaaagctcacactctgttacatgaagcacttcaagctttggaagcaatcccatacaatacccaacacttagaagagttcgcccgatacgtcgtcgagcgcaagaactaa

SEQ ID NO: 111463 - protein, 298 aa, Vibrio vulnificus CMCP6
MDNSMIDVLASFQQRNNQQLNLWLDKLPHQNQALIQAMRYGLVLGGKRARPFLVYATGEMLGCSQEQLDTPASAIECIHAYSLIHDDLPAMDDDELRRGQPTCHVKFDEATAILTGDALQTLAFTILAEGTLSADGETQRVAMIQALAQASGAQGMCIGQALDLAAENRAVTLEELEEIHRNKTGALIRCAVRLGALAAGEKGLAILPQLEKYSTAIGLAFQVQDDILDIISDTETLGKPQGSDQELNKSTYPSLLGLEGAMEKAHTLLHEALQALEAIPYNTQHLEEFARYVVERKN

SEQ ID NO: 111464 - DNA, 924 bp, Bradyrhizobium japonicum USDA 110; identical to SEQ ID NO: 57327
  CDS (1)..(924): transl_table=11

SEQ ID NO: 111465 - protein, 307 aa, Bradyrhizobium japonicum USDA 110; identical to SEQ ID NO: 57328

SEQ ID NO: 111466 - DNA, 1008 bp, Bradyrhizobium japonicum USDA 110
  CDS (1)..(1008): transl_table=11
atgaacaacatgcagactggttccacgccacacgacgaccgagctggcgtttccgcgaacggcatattgggcgcgcaggcgcgcggcgcatccggcaggctgctgcccgagatctggatgcaggacggcgcaaagcgggtcgaagaggcgctggcgcgtcttctctgcgccgaagacgacggtgagaccgagctgatggcggcgatgcgctacgccaccttgcatggcggcaagcgcacccgcgccttgctctgtttggctgccggcgcactggccgacacgccggcgcacatgctcgatgacgtcggtgccgccatcgagatgatgcacgcctgtacgttggtccacgacgatctgcccgcgatggacgacgacgtgcttcgccgcggccttccgaccgtgcacgtcaagttcggcgaagccaccgcgatcctggtcggcgatgcgctgcaggcgcacgccttcctgaccctggcgagcctgaatgcgccgggcgacagccctatcgcgctcgtgcgcgaactggcgcaggcggtgtccgccgagggggccgcaggcgggcaggccatagatctgtcgctggttggaaagcacgtcgagctggacaggatcgtggcgatgcaccggatgaagagcggagcgctagtgcgcgcgtccgttcgcatgggcgcgctatgcgctgtcggcgtgaatgccgcgcacgctgcactttactgtgcgctggatcactacagcgcctgtttcggcctggcgttacaggtgatcgacgacattctcgacgtgacagcggataccgcggcgctgggcaagacccccggcaaggacgcggcggcgcagaagccgacctgcgcgtcgatcatgggactgcaggaagcacgccagttcgcgctggatctgttgcgcgatgccggcgaggccatcgcgccgctggggccgcgtgcggaacggttggcgcaactcatacagcgggccaacgcgtatctgttcaaacacgcgccacgcgcatga

SEQ ID NO: 111467 - protein, 335 aa, Bradyrhizobium japonicum USDA 110
MNNMQTGSTPHDDRAGVSANGILGAQARGASGRLLPEIWMQDGAKRVEEALARLLCAEDDGETELMAAMRYATLHGGKRTRALLCLAAGALADTPAHMLDDVGAAIEMMHACTLVHDDLPAMDDDVLRRGLPTVHVKFGEATAILVGDALQAHAFLTLASLNAPGDSPIALVRELAQAVSAEGAAGGQAIDLSLVGKHVELDRIVAMHRMKSGALVRASVRMGALCAVGVNAAHAALYCALDHYSACFGLALQVIDDILDVTADTAALGKTPGKDAAAQKPTCASIMGLQEARQFALDLLRDAGEAIAPLGPRAERLAQLIQRANAYLFKHAPRA

SEQ ID NO: 111468 - DNA, 876 bp, Xylella fastidiosa Temecula1
  CDS (1)..(876): transl_table=11
gtgagcaaagcgctgttcacgcgctggtgccaacgcaccgacagctacttagaacgaacgttatccatccccacccaagcaccacagcggctccaggccgcgatgcgatacaccgtactgagtggcggcaaacgcatccgtcccttactggtttacgctgccggccacctgtttcatgtcgatgaacccctactcgacgtaccggctgcggccgtggaactgatccatgcctattccctggtgcatgatgaccttcccgccatggatgacgacctcttacgccgagggcgtcccaccgtccatatcgccttcgacgaagccactgcaatcctcactggcgacgccttgcagaccctggcgtttgaatgcttagccgatgccccagccgacacctccctgcgtatcgcctggttacagacattgacacacgccgcaggagttgccggcatgtgtggcggccaggcactagatattgacgccactggccaatcccagacactcaaagcactggaagccatgcatgcgttgaagagcggcacattgatgcgagccgccgtgagaatgggtgccctggctggcgacccttccgcggaggatctgcactccctggacacctttgcggccacccttggattagcattccaagtgcgtgacgacatcctggatatcgagtctagttccgaacaacttggtaaaacggctggcaaagatgccatacagcagaaatccaccttccccgccctgctgagcgtagaaggtgccaaatgctatttacaagaattggcagaacgcctgtacacccaattgcatccttacggcgaacgtgctgcccccctgaccgcactggcacgcttggctgtagaacgtgctcactga

SEQ ID NO: 111469 - protein, 291 aa, Xylella fastidiosa Temecula1
MSKALFTRWCQRTDSYLERTLSIPTQAPQRLQAAMRYTVLSGGKRIRPLLVYAAGHLFHVDEPLLDVPAAAVELIHAYSLVHDDLPAMDDDLLRRGRPTVHIAFDEATAILTGDALQTLAFECLADAPADTSLRIAWLQTLTHAAGVAGMCGGQALDIDATGQSQTLKALEAMHALKSGTLMRAAVRMGALAGDPSAEDLHSLDTFAATLGLAFQVRDDILDIESSSEQLGKTAGKDAIQQKSTFPALLSVEGAKCYLQELAERLYTQLHPYGERAAPLTALARLAVERAH

SEQ ID NO: 111470 - DNA, 867 bp, Clostridium tetani E88
  CDS (1)..(867): transl_table=11
ttgaatttaaattcatataaagatgaagtagacacatggttaaaagaatactttaaagataagggaacttataataaaagtgtgtatgaagctatgtcctatagtgtaaatatagggggaaagagaatacgacctatattagcactaattacgtataaaatatacaataaaaactacaaagaagccctttcaatagcttgtgcaatagaaatgatacacacttattcattgatacatgatgacttaccatgtatggatgatgatttaagaagaggcaagccaactaatcataaagtttttggagatggattagcagttttagcaggagatggattattaaatgaggcatttaatattatattgaaaaacggttgccaaaaaggtatgacatgggttgaagctggatacgaaataggaaaagcttccggagttgagggaatgattggaggtcaagtggtagatgttttaaatacaaacaaaagtatagaaattgaagaacttgattatatccatgaaaaaaagactgcggctttaataacagcgtctataatgacaggggcaattcttggtgaagccaatgaaaaagatacaactattttaaaggaatttggtaaaaaattaggtttggcttttcaaataaaagatgatatcttagatattgaaagtgatacaagaaagctagggaaaaccataggaaaagataaagaacaaaataaaaatacttttgttaaattttatggattagaaaaatgcaaaaaaatgtgtaaagacttaacaagtagttgcatagaattattacaaaacatgaataaagacactaaagaattagaagaaatcactttatatttgttaaatagagatttttga

SEQ ID NO: 111471 - protein, 288 aa, Clostridium tetani E88
MNLNSYKDEVDTWLKEYFKDKGTYNKSVYEAMSYSVNIGGKRIRPILALITYKIYNKNYKEALSIACAIEMIHTYSLIHDDLPCMDDDLRRGKPTNHKVFGDGLAVLAGDGLLNEAFNIILKNGCQKGMTWVEAGYEIGKASGVEGMIGGQVVDVLNTNKSIEIEELDYIHEKKTAALITASIMTGAILGEANEKDTTILKEFGKKLGLAFQIKDDILDIESDTRKLGKTIGKDKEQNKNTFVKFYGLEKCKKMCKDLTSSCIELLQNMNKDTKELEEITLYLLNRDF

SEQ ID NO: 111472 - DNA, 891 bp, Lactobacillus plantarum WCFS1; identical to SEQ ID NO: 57329
  CDS (1)..(891): transl_table=11

SEQ ID NO: 111473 - protein, 296 aa, Lactobacillus plantarum WCFS1; identical to SEQ ID NO: 57330

SEQ ID NO: 111474 - DNA, 888 bp, Pseudomonas syringae pv. tomato str. DC3000
  CDS (1)..(888): transl_table=11
atgatcgcgagctatcaagcgcaaagccagactcgcgtcaatgcagcactcgaaggcttgtttcaggcaccgagccctgagctgagccgcctctacgaggccatgcgttacagcgtgatgaacggtggcaaacgtgtgcgcccgctgctggcctacgccgcctgtgaagcactgggcggcgtggccgaagatgccaatggcgcggcctgtgcggtcgagctgatccatgcttactcactggtgcacgacgatttgccggcgatggacgatgacgacctgcgtcgcggccagccgaccacccataaggcgttcgatgaggcctgcgcgatcctcgccggtgacggcctgcaaagcctcgctttcaccgccttgctcgccccgcacctgagctcgcgtaacgccgcaacccgattgcagatggtcagcacactggccgctgccgcaggtccggccggaatggtgggcggacaggccatcgatctgggttcggtaggactaaagctggatcaggctgcgctggaatacatgcaccgtcacaagaccggcgcgttgatcgaagccagtgttcggctcggagccctggccagcggtcaggccgatcaggcgcggctcgatgccctgcaggtctatgcacgtgcggtcggtctggcctttcaggttcaagacgacattctcgacgtcgaaagcgataccgcgaccctcggcaagcgccagggtgccgacatcgcccgcgacaaaccgacctaccccgcactgctgggcctggacgcggccaagggctatgccctggaattgcgcgatcaggcgctcgctgcgctgagtcttttcgacaccacggcagagccgttgcgcgagttggcgcggtacatcgtcgagcgccgtcactga

SEQ ID NO: 111475 - protein, 295 aa, Pseudomonas syringae pv. tomato str. DC3000
MIASYQAQSQTRVNAALEGLFQAPSPELSRLYEAMRYSVMNGGKRVRPLLAYAACEALGGVAEDANGAACAVELIHAYSLVHDDLPAMDDDDLRRGQPTTHKAFDEACAILAGDGLQSLAFTALLAPHLSSRNAATRLQMVSTLAAAAGPAGMVGGQAIDLGSVGLKLDQAALEYMHRHKTGALIEASVRLGALASGQADQARLDALQVYARAVGLAFQVQDDILDVESDTATLGKRQGADIARDKPTYPALLGLDAAKGYALELRDQALAALSLFDTTAEPLRELARYIVERRH

SEQ ID NO: 111476 - DNA, 885 bp, Vibrio parahaemolyticus RIMD 2210633
  CDS (1)..(885): transl_table=11
atgcaacagacattgacgtctttccaagaaagaaacaatcagcaattgaatttgtggctagaacagcttccatatcaagagcagccattgattcaagcaatgaaatacggccttttgttaggcggcaaacgcgttcgcccatttcttgtttacatcacaggtcaaatgctcggctgtaaacctgaagatctagacactccagcttcagccatcgagtgtattcatgcctactcgctcatccatgacgatcttcctgctatggatgatgatgatctgcgccgcggtcagccaacctgccatatcaaatttgatgaagcgaccgccattttaaccggtgatgccctacaaactcttgcttttaccatcattgctgacggtccgttgagcccaagcgcagaaaaccaacgtgtcaacatgatcaaagcgttagctcactcctctggtgcgaacggcatgtgtgtcggccaagcattggatttgggtgcggagaatcgccaagtttctcttgcagaaatggaagagatacaccgtaaaaaaaccggagctctgattgattgtgcggtaaaattaggtgctctggccgctggtgaaaaaggtatcgaggttttacctcatttagaacgctattcaaaagcaattggtttggcgtttcaggttcaagacgatattcttgatatcattagtgacacagaaacattgggtaaacctcaaggttcagaccaagaactgaacaaaagcacttacccatccctgctgggtttagagggagccattgagaaagctcacactctattacaggaagcacttcaagcattggaagctatcccatacaatactcagttactcgaagagttcgcccgatacgtcatcgagcgcaaaaactaa

SEQ ID NO: 111477 - protein, 294 aa, Vibrio parahaemolyticus RIMD 2210633
MQQTLTSFQERNNQQLNLWLEQLPYQEQPLIQAMKYGLLLGGKRVRPFLVYITGQMLGCKPEDLDTPASAIECIHAYSLIHDDLPAMDDDDLRRGQPTCHIKFDEATAILTGDALQTLAFTIIADGPLSPSAENQRVNMIKALAHSSGANGMCVGQALDLGAENRQVSLAEMEEIHRKKTGALIDCAVKLGALAAGEKGIEVLPHLERYSKAIGLAFQVQDDILDIISDTETLGKPQGSDQELNKSTYPSLLGLEGAIEKAHTLLQEALQALEAIPYNTQLLEEFARYVIERKN

SEQ ID NO: 111478 - DNA, 873 bp, Streptococcus pyogenes SSI-1; identical to SEQ ID NO: 57331
  CDS (1)..(873): transl_table=11

SEQ ID NO: 111479 - protein, 290 aa, Streptococcus pyogenes SSI-1; identical to SEQ ID NO: 57332

SEQ ID NO: 111480 - DNA, 900 bp, Salmonella enterica subsp. enterica serovar Typhi Ty2; identical to SEQ ID NO: 57333
  CDS (1)..(900): transl_table=11

SEQ ID NO: 111481 - protein, 299 aa, Salmonella enterica subsp. enterica serovar Typhi Ty2; identical to SEQ ID NO: 57334

SEQ ID NO: 111482 - DNA, 882 bp, Enterococcus faecalis V583; identical to SEQ ID NO: 57335
  CDS (1)..(882): transl_table=11

SEQ ID NO: 111483 - protein, 293 aa, Enterococcus faecalis V583; identical to SEQ ID NO: 57336

SEQ ID NO: 111484 - DNA, 882 bp, Chlamydophila caviae GPIC; identical to SEQ ID NO: 57337
  CDS (1)..(882): transl_table=11

SEQ ID NO: 111485 - protein, 293 aa, Chlamydophila caviae GPIC; identical to SEQ ID NO: 57338

SEQ ID NO: 111486 - DNA, 894 bp, Nitrosomonas europaea ATCC 19718
  CDS (1)..(894): transl_table=11
atgcatcctgatttccagtcatgggcaagcgaacagcttgctctggttgaaacctgtctggaaaaacatcttccggagaccaattgtgctccggcacgtttgcatgatgcaatgcgatattccgtgctgggcggaggtaaacgggtacgaccgctgctgtcgtttgcggccggagaattgagtggcgcagataaaacacacgccaccattgccggtgcggcagtggaactgattcatgtctactccctggtacatgatgatctgccctgcatggataacgatacactgcgacgcggcaaaccaacctgccatgtcagatatgatgaacctaccgccctgctggtgggtgacagcctgcaaagcctggcttttcagttattgacggaaactaatctgactgaagacccacatgtccaactcgaaatggttcgacatcttgcatttgcagccggatcccgaggtatggcgggcggacaggcaatagatctggacagcgtaggtaaaacactgagcctgccggaactcgaatttatgcatattcacaagaccggcgcgctgattcgggctgcagtcatactgggcgcccgctgtggcaacagactggatgagacacaattcaagctgctggatcattttgccaaatgcatggggcttgcgttccaggtaatagatgacatcctcgatacagaagccaccactgccgcgctgggtaaaacagctggaaaggatgcagaaaacaataaacccacctatgttagtatactgggcatcaaacaagcacgagaacttgcccacgagctccggcaggaggccaccggggtattgaatcagtttggatccgaggccctgcgtttgcagcaggtcactgatttcattgtacagcgtgagttttga

SEQ ID NO: 111487 - protein, 297 aa, Nitrosomonas europaea ATCC 19718
MHPDFQSWASEQLALVETCLEKHLPETNCAPARLHDAMRYSVLGGGKRVRPLLSFAAGELSGADKTHATIAGAAVELIHVYSLVHDDLPCMDNDTLRRGKPTCHVRYDEPTALLVGDSLQSLAFQLLTETNLTEDPHVQLEMVRHLAFAAGSRGMAGGQAIDLDSVGKTLSLPELEFMHIHKTGALIRAAVILGARCGNRLDETQFKLLDHFAKCMGLAFQVIDDILDTEATTAALGKTAGKDAENNKPTYVSILGIKQARELAHELRQEATGVLNQFGSEALRLQQVTDFIVQREF

SEQ ID NO: 111488 - DNA, 954 bp, Rhodopirellula baltica SH 1; identical to SEQ ID NO: 57341
  CDS (1)..(954): transl_table=11

SEQ ID NO: 111489 - protein, 317 aa, Rhodopirellula baltica SH 1; identical to SEQ ID NO: 57342

SEQ ID NO: 111490 - DNA, 903 bp, Wigglesworthia glossinidia endosymbiont of Glossina brevipalpis; identical to SEQ ID NO: 57343
  CDS (1)..(903): transl_table=11

SEQ ID NO: 111491 - protein, 300 aa, Wigglesworthia glossinidia endosymbiont of Glossina brevipalpis; identical to SEQ ID NO: 57344

SEQ ID NO: 111492 - DNA, 927 bp, Haemophilus ducreyi 35000HP
  CDS (1)..(927): transl_table=11
atgaacaagccgaacttgcagattacgaataatatgacttactcactcacaaccgatcttaatgctatccaacaacggatcaaccatttcctaagcaaccaactgccacaatcgccaaccgaacaaccaccgcttaatcaagcgatggcctatgccgtattactaggtggcaaacgcatacgcccttttctaatgtacaccaccggcaaaatgctaggcgtcccattaactacactcgaccactcagcggctgcaattgaagccattcacgcttactcactagtacacgacgatctccctgcaatggacaatgaccaactacgccgcggcaaaccgacttgccacatagcctttgacgaagccaccgccatcttagccggcaatgccttacaagcgctagcatttgagctaattgctaacgccccacacctaaccgactggcaaaaagtccaacaaatcagaacgctaagcaccgcagcaggcgctaaaggcatgtgtctcggccaaaatttagatctactcgccgaaaataaatcgctcaacttaaccgaattagaacaaattcaccgccacaaaaccggcgcattaatagtagcctccgtattaatggcagttaacttatctgatcacgcacaaaataatgcaataaaacaaccgcttgaacgctacgcacaagcaattgggctcgcctttcaagtgcaagacgatatcctagacgttatcggccaaaccgacaaaatcggcaaaacagtcggcgcagatcaacaactacacaaaagcacctaccccaaattacttgggctaacacaagcaaaacaaaaagcacaagacttacaccaaacagcactcaacgcactcgcagaactgccgtttaaaagcactgcattaaaagagttagccgactttattattcatcgcgaaaattaa

SEQ ID NO: 111493 - protein, 308 aa, Haemophilus ducreyi 35000HP
MNKPNLQITNNMTYSLTTDLNAIQQRINHFLSNQLPQSPTEQPPLNQAMAYAVLLGGKRIRPFLMYTTGKMLGVPLTTLDHSAAAIEAIHAYSLVHDDLPAMDNDQLRRGKPTCHIAFDEATAILAGNALQALAFELIANAPHLTDWQKVQQIRTLSTAAGAKGMCLGQNLDLLAENKSLNLTELEQIHRHKTGALIVASVLMAVNLSDHAQNNAIKQPLERYAQAIGLAFQVQDDILDVIGQTDKIGKTVGADQQLHKSTYPKLLGLTQAKQKAQDLHQTALNALAELPFKSTALKELADFIIHREN

SEQ ID NO: 111494 - DNA, 912 bp, Bordetella pertussis Tohama I; identical to SEQ ID NO: 57345
  CDS (1)..(912): transl_table=11

SEQ ID NO: 111495 - protein, 303 aa, Bordetella pertussis Tohama I; identical to SEQ ID NO: 57346

SEQ ID NO: 111496 - DNA, 912 bp, Bordetella parapertussis 12822; identical to SEQ ID NO: 57347
  CDS (1)..(912): transl_table=11

SEQ ID NO: 111497 - protein, 303 aa, Bordetella parapertussis 12822; identical to SEQ ID NO: 57348

SEQ ID NO: 111498 - DNA, 912 bp, Bordetella bronchiseptica RB50
  CDS (1)..(912): transl_table=11
atgaagcaaagtcatctcgcctgcgccgactggctgcgggaacgcgcgcagcatgtcgagcacgtgctcgacgaattgctgcctggcgccgatatcgctccctcgcggctgcacgaagccatgcgctatgcggtgctgggcggcggcaagcgggtgcgcgcggccctggtctacgcggccgggcaggcctgccccgtcaacggcagcacgctggccgtcggggcgtcgatggaccgcgccgccgcggccgtcgaactgatccacgcctattcgctggtgcacgacgacctgccgtgcatggacgacgacacgctgcgccgcggccggcccacggtgcatgtgcaattcgacgaggccacggccatgctggccggcgatgccctgcagccgctggccttcgaactgctggccggcatgccgatcgcgcccgcgctggtggtgcaggccgcccaggtcctggcgcgcgccgccggcagccagggcatggccggcgggcaggccatcgacctgcacagcgtgggccgcatgctcacgcgcgacgaactgcagaccatgcacagcatgaagaccggcgccatgctggcgtgcagcgtgacgctggggggcatcgtggccggcgccagctcgaccgcgcgccaggcgctcgacagctacgcgcaggcgatcggcctggcgttccaggtcgtcgacgatatcctcgatgtgacggccgacaccgccagcctgggcaagacggccggcaaggatgcggccgacaacaagccgacctatgtatccttgctgggcctggaccaggcccgcgcgctggcgcaggagttgcgccaggcggcccaccaggccctggcgccgctgggcgagtccggcgcgcggctgggccaactggcagatttcatcgtactcagagaccgctga

SEQ ID NO: 111499 - protein, 303 aa, Bordetella bronchiseptica RB50
MKQSHLACADWLRERAQHVEHVLDELLPGADIAPSRLHEAMRYAVLGGGKRVRAALVYAAGQACPVNGSTLAVGASMDRAAAAVELIHAYSLVHDDLPCMDDDTLRRGRPTVHVQFDEATAMLAGDALQPLAFELLAGMPIAPALVVQAAQVLARAAGSQGMAGGQAIDLHSVGRMLTRDELQTMHSMKTGAMLACSVTLGGIVAGASSTARQALDSYAQAIGLAFQVVDDILDVTADTASLGKTAGKDAADNKPTYVSLLGLDQARALAQELRQAAHQALAPLGESGARLGQLADFIVLRDR

SEQ ID NO: 111500 - DNA, 903 bp, Prochlorococcus marinus subsp. pastoris str. CCMP1986
  CDS (1)..(903): transl_table=11
atgacagaagttataaataatattccagattttgaaaaatatctaacagacacaaaaaaagtcgtcgaagaagctcttgatttctcattaggccccgagaacccagaaatccttagggaatcaatgagatattctctcctggctggaggaaaaaggatacgtccaattttatgtctagcttcttgttcactagcaggaggtgaaccctctctagcagttcctacagcagttgccatagaaatgattcataccatgtcattgattcatgatgatttacctgcgatggacaatgacggctttagaagaggaagacctactaatcataaagtttacggcgatgcaatagctattctggctggtgatgcattactaacgagagcctttgaaatggtctcattaagaagccctggcgttgattccaatagattattaaatgtagttggagaactttcccttgtagcaggagcacccggactagttggtggtcaagttgttgatttggaatgcgaaggtaaagaagttgacctcgaaacccttgaatatatacatcttcataagaccggtgcattattaaaagcctctgtcagaactggagcaatgattgcaggagctaatgaagaattattaaatgccctaactacttatgcagagggtattggtttagcattccaaataatagatgacatccttgatttaacttcaagtagtgagaaacttggtaaaacagcaggtaaagatcttttagcagataaaactacttatcccaaattacttgggatggaagaatcaaagaaaaaagctttcgatttagtggaccaagctaagaaagcaattgagccttggggtttaaatgcaaaatatttaatctccttagctgatttcattacaaatagagataggtaa

SEQ ID NO: 111501 - protein, 300 aa, Prochlorococcus marinus subsp. pastoris str. CCMP1986
MTEVINNIPDFEKYLTDTKKVVEEALDFSLGPENPEILRESMRYSLLAGGKRIRPILCLASCSLAGGEPSLAVPTAVAIEMIHTMSLIHDDLPAMDNDGFRRGRPTNHKVYGDAIAILAGDALLTRAFEMVSLRSPGVDSNRLLNVVGELSLVAGAPGLVGGQVVDLECEGKEVDLETLEYIHLHKTGALLKASVRTGAMIAGANEELLNALTTYAEGIGLAFQIIDDILDLTSSSEKLGKTAGKDLLADKTTYPKLLGMEESKKKAFDLVDQAKKAIEPWGLNAKYLISLADFITNRDR

SEQ ID NO: 111502 - DNA, 921 bp, Prochlorococcus marinus str. MIT 9313; identical to SEQ ID NO: 57349
  CDS (1)..(921): transl_table=11

SEQ ID NO: 111503 - protein, 306 aa, Prochlorococcus marinus str. MIT 9313; identical to SEQ ID NO: 57350

SEQ ID NO: 111504 - DNA, 930 bp, Synechococcus sp. WH 8102; identical to SEQ ID NO: 57243
  CDS (1)..(930): transl_table=11

SEQ ID NO: 111505 - protein, 309 aa, Synechococcus sp. WH 8102; identical to SEQ ID NO: 57244

SEQ ID NO: 111506 - DNA, 897 bp, Chromobacterium violaceum ATCC 12472; identical to SEQ ID NO: 57351
  CDS (1)..(897): transl_table=11

SEQ ID NO: 111507 - protein, 298 aa, Chromobacterium violaceum ATCC 12472; identical to SEQ ID NO: 57352

SEQ ID NO: 111508 - DNA, 861 bp, Wolinella succinogenes DSM 1740
  CDS (1)..(861): transl_table=11
atgaatttagaatcggtgatggagggctttgagcgcttcttggaggaagaggcgcctctttttgagggatttcacccccattacaatgagtatctttgggagatggtgagaaatggggggaagcgctttcgccctagactgcttttgggggtggtgagtgcattagctccgctacttgtgaagagtgcttatgcacccgccttagcgctagagattctccacacctattcgctcatccacgatgatcttcctgcgatggataatgctgccactaggcgggggcatcccacgcttcatgtcaagtatgatgaggcgagcgcggttttggctggagatgcactcaacacacacgccttttaccttctagcccaagcccccttggggagcgacaccaaggttgcgcttgtgcgagagctcgctagtgcaggcggagcgggaggaatggtgctagggcaggcgttagattgctactttgaacatcaaaagcttgagattgaaaagctccgattcattcacctccacaagacaggccgtctcatcgccgcttcacttaagatgggggcgatcatcgcggcgctttctaaagaggagcaggcgcgattagaggagattggcctgaagcttggacttctctttcaggtgcaagatgacattatcgatgcgacatggagcgaagaggaggcgggcaaaaccacccaaaacgatggagctaaaaacagctatgtcaatcttttgggcttggaaggagcgaggatggagcacgctagactcaaagaggaagtgcgcgtcttgcttggattcttccccgaagcactctctttgaccctgcttgagattttagaaaaacagtttaaatcataa

SEQ ID NO: 111509 - protein, 286 aa, Wolinella succinogenes DSM 1740
MNLESVMEGFERFLEEEAPLFEGFHPHYNEYLWEMVRNGGKRFRPRLLLGVVSALAPLLVKSAYAPALALEILHTYSLIHDDLPAMDNAATRRGHPTLHVKYDEASAVLAGDALNTHAFYLLAQAPLGSDTKVALVRELASAGGAGGMVLGQALDCYFEHQKLEIEKLRFIHLHKTGRLIAASLKMGAIIAALSKEEQARLEEIGLKLGLLFQVQDDIIDATWSEEEAGKTTQNDGAKNSYVNLLGLEGARMEHARLKEEVRVLLGFFPEALSLTLLEILEKQFKS

SEQ ID NO: 111510 - DNA, 888 bp, Gloeobacter violaceus PCC 7421; identical to SEQ ID NO: 57353
  CDS (1)..(888): transl_table=11

SEQ ID NO: 111511 - protein, 295 aa, Gloeobacter violaceus PCC 7421; identical to SEQ ID NO: 57354

SEQ ID NO: 111512 - DNA, 918 bp, Photorhabdus luminescens subsp. laumondii TTO1; identical to SEQ ID NO: 57355
  CDS (1)..(918): transl_table=11

SEQ ID NO: 111513 - protein, 305 aa, Photorhabdus luminescens subsp. laumondii TTO1; identical to SEQ ID NO: 57356

SEQ ID NO: 111514 - DNA, 897 bp, Vibrio vulnificus YJ016
  CDS (1)..(897): transl_table=11
atggataactctatgattgacgtccttgcgtcttttcagcagcgtaacaaccaacaactcaatctttggctcgataaactgccacaccaaaatcaagcgctgatccaagcgatgcgctatggattagtgctaggtggaaaacgtgctcgcccttttttagtgtatgccaccggtgagatgcttggttgcagccaagagcagctcgacacacctgcgtcagcgattgagtgtatccatgcttactctcttatccatgatgatctgccagccatggatgatgatgaactgcgccgtggccaaccgacctgccatgttaaatttgacgaagccaccgccattttaaccggtgatgctttacaaacgctcgcattcaccattctcgctgaaggtacattgtctcctgatggggaaacacagcgcgttgccatgatccaagcattggcgcaagcctctggagcgcaaggcatgtgcattggtcaggcgttggatttggctgcggaaaaccgcgcagtcacgctggaagagttagaagagattcaccgtaacaaaaccggcgctttgatccgttgtgcggtacgcttaggtgccttagcagcaggcgaaaaaggtttggcgattttgcctcagttggagaagttctccacggcgattgggttagcgttccaggtacaagatgacattttagatatcattagcgataccgaaacgctcgggaagccacaaggttctgaccaagaactcaacaagagtacctacccatcgctgctgggtttagaaggcgcaatggagaaagctcacactctgttacatgaagcacttcaagctttggaagcaatcccatacaatacccaacacttagaagagttcgcccgatacgtcgtcgagcgcaagaactaa

SEQ ID NO: 111515 - protein, 298 aa, Vibrio vulnificus YJ016
MDNSMIDVLASFQQRNNQQLNLWLDKLPHQNQALIQAMRYGLVLGGKRARPFLVYATGEMLGCSQEQLDTPASAIECIHAYSLIHDDLPAMDDDELRRGQPTCHVKFDEATAILTGDALQTLAFTILAEGTLSPDGETQRVAMIQALAQASGAQGMCIGQALDLAAENRAVTLEELEEIHRNKTGALIRCAVRLGALAAGEKGLAILPQLEKFSTAIGLAFQVQDDILDIISDTETLGKPQGSDQELNKSTYPSLLGLEGAMEKAHTLLHEALQALEAIPYNTQHLEEFARYVVERKN

SEQ ID NO: 111516 - DNA, 927 bp, Rhodopseudomonas palustris CGA009; identical to SEQ ID NO: 57357
  CDS (1)..(927): transl_table=11

SEQ ID NO: 111517 - protein, 308 aa, Rhodopseudomonas palustris CGA009; identical to SEQ ID NO: 57358

SEQ ID NO: 111518 - DNA, 894 bp, Geobacter sulfurreducens PCA
  CDS (1)..(894): transl_table=11
atggatctgaaaggttatcttaaagaacgctgtgccttggtggacgaggctctggagcgccatctgccggctgaagacgagctcccgtcttcggtgcaccgcgccatgcgttattcggtatttgccggtgggaaacgggtccgcccgatcctgatgctggcagcctgcgatgccgtgggcggcgatacggcgctggccctgccggcggcctgcgccatggagatgatccatacctactctctcatccacgatgacctgccggcaatggatgacgatgatttccgccgcgggcggccgacgaaccacaaggtattcggcgaagccattgccatccttgccggcgatgccctgcttaccgaggcgttcatcctcatcagctctccctcctatgctgccgcggttggaagcgatcgactcctgccggttattcacgagatcgccctctgtgccggttcgcggggaatggtcggcgggcaggtggtcgacatggagagcgaggggaacaaagagatcgatctggcaacagtccaatatatccacacccgcaagaccggtgcgctgatcaaggcctccatcaaggcgggagcagtactggggggagccaacgcggacgcggtcaaggccgtgacacgctacggcgaagccattggcctggcgttccagatcgccgacgatatcctcgatatcgagggaacaaccgagcagatcggcaaggacgcgggcagtgatgaagctcgggggaaagccacctatccggccgtgctgggcctggctgaatccaagcggcgcgcccaggaacttctcgatctcgccattgaggccctttcgccctttgaccaccgggctgacccccttcgggaaatcgcccggtacatcgtgtcacggaaatcatga

SEQ ID NO: 111519 - protein, 297 aa, Geobacter sulfurreducens PCA
MDLKGYLKERCALVDEALERHLPAEDELPSSVHRAMRYSVFAGGKRVRPILMLAACDAVGGDTALALPAACAMEMIHTYSLIHDDLPAMDDDDFRRGRPTNHKVFGEAIAILAGDALLTEAFILISSPSYAAAVGSDRLLPVIHEIALCAGSRGMVGGQVVDMESEGNKEIDLATVQYIHTRKTGALIKASIKAGAVLGGANADAVKAVTRYGEAIGLAFQIADDILDIEGTTEQIGKDAGSDEARGKATYPAVLGLAESKRRAQELLDLAIEALSPFDHRADPLREIARYIVSRKS

SEQ ID NO: 111520 - DNA, 867 bp, Lactobacillus johnsonii NCC 533
  CDS (1)..(867): transl_table=11
atgaagttaaaagattttcaagaaaaatatacacctcaaattgacaatttcttaaaagaacatctggttactgaaattgataatccaacttttagtaaaattatgtcttattcagtaatggcgggaggtaagcgactacgtcctttgcttttcttagcaactcttgagacactaaatcataaaattgaagagccagaattaagaattgcatgtggaattgaattaattcatacttattctctaattcatgatgatttacccgcgatggataatgatgattatcgtcgcggaaaacttacttctcataaaaaatggggagaagcagaagctatattagctggagatgggttgcttccgttgggaattcaatggatcaccgaggggagtaattcagctgcgttagcaattgttatttctcaagctgtaggaccaaatggaatggtcggtggtcaatatcttgatattgatacaactaataacgattcagctaaagaaaatgctaagatgattgatcagatggagtggttgaaaacaggctgcctaattgaagcaagtgttaaaatggctgcaatttatgctggtgcaactgattctgagcttaatagattagacaacttcagcaagcgttttggaagatcttatcaaatctatgatgatttggtagatgtagtggagacagcaactgaagcgggaaaagctactcataaggatgcaacagaaggtaaaaataatactttaactttgcttgggattgaagatagtcgtaaacaacttgtagaaatgattgaatcaggaagaaaagctatagaagtttttgaacaacctttattaggtgaattttttaatttgtatcagaaggtattatag

SEQ ID NO: 111521 - protein, 288 aa, Lactobacillus johnsonii NCC 533
MKLKDFQEKYTPQIDNFLKEHLVTEIDNPTFSKIMSYSVMAGGKRLRPLLFLATLETLNHKIEEPELRIACGIELIHTYSLIHDDLPAMDNDDYRRGKLTSHKKWGEAEAILAGDGLLPLGIQWITEGSNSAALAIVISQAVGPNGMVGGQYLDIDTTNNDSAKENAKMIDQMEWLKTGCLIEASVKMAAIYAGATDSELNRLDNFSKRFGRSYQIYDDLVDVVETATEAGKATHKDATEGKNNTLTLLGIEDSRKQLVEMIESGRKAIEVFEQPLLGEFFNLYQKVL

SEQ ID NO: 111522 - DNA, 870 bp, Bdellovibrio bacteriovorus HD100; identical to SEQ ID NO: 57359
  CDS (1)..(870): transl_table=11

SEQ ID NO: 111523 - protein, 289 aa, Bdellovibrio bacteriovorus HD100; identical to SEQ ID NO: 57360

SEQ ID NO: 111524 - DNA, 891 bp, Bacillus cereus ATCC 10987
  CDS (1)..(891): transl_table=11
gtgacaattgcttttgatacttttttgaaagaaagtaaaactttcgtagaagagaagcttgtaagctatgcaaatgaattacaatgtccaaatgtacttcgtgaagcgatggcatattctttggaagcgggtggaaagcgtctccgcccgttacttttatttgcaacattacaagcgtttggtaaagaaaaaaatcttggtgtaggtgcagcttgtgctcttgaaatgatacatacatactcgttagttcatgatgatttaccttgtatggatgatgatgatttaagaagagggaagcccacaaatcataaagtatttggtgaagcgatggcagttttagcaggagatggtttgttgacatatgcttttcaagttattatggcatatgagcaaaaggaaatctctgctgagaaaaaagtaagacttgttcttgagcttgcaaaggcggcagggccagagggaatggttggcggacaagtagcagatatggaagcggaagggaaacagcttacgattgatgagctagagtatattcataagcataagactgggaaactacttgaattcgctgtacttgcagggtcgatactttctaatgccacagaagaacaggaagaaaaattacttgagtttgcaaaatatatcggcctagctttccaaattcgagatgatattttagatgtggaaggaaccgaagaagagattggaaaaccgattggtagtgatgtttccaacgaaaagagcacatatacgacgttatttactgtagatagagcaaaggatattttagaagaaacgattgcaaaagcaaaagatgctattagttccttgcaattacaagatgaatatttactatctatttgcgatttgattgcaaaacgtaataactaa

SEQ ID NO: 111525 - protein, 296 aa, Bacillus cereus ATCC 10987
MTIAFDTFLKESKTFVEEKLVSYANELQCPNVLREAMAYSLEAGGKRLRPLLLFATLQAFGKEKNLGVGAACALEMIHTYSLVHDDLPCMDDDDLRRGKPTNHKVFGEAMAVLAGDGLLTYAFQVIMAYEQKEISAEKKVRLVLELAKAAGPEGMVGGQVADMEAEGKQLTIDELEYIHKHKTGKLLEFAVLAGSILSNATEEQEEKLLEFAKYIGLAFQIRDDILDVEGTEEEIGKPIGSDVSNEKSTYTTLFTVDRAKDILEETIAKAKDAISSLQLQDEYLLSICDLIAKRNN

SEQ ID NO: 111526 - DNA, 1281 bp, Nasonia vitripennis; identical to SEQ ID NO: 57361
  CDS (1)..(1281)

SEQ ID NO: 111527 - protein, 426 aa, Nasonia vitripennis; identical to SEQ ID NO: 57362

SEQ ID NO: 111528 - DNA, 1095 bp, Nasonia vitripennis
  CDS (1)..(1095)
atggatagagcgcggaacgagcgagccgtgcactcggtggcccagaccaactgggtggccagcagagacgaaagccgagagatgatggccctctggccggacgtcgttcgggacctcacggaagctggacggcatcttgacgtgcccgaggctaccaagtggctcgccaaagtgctgcagtacaacgtgccgagcggcaaaaagaaccgaggcctgtcgctggtctacgcgtacaggaagctcgcgccccccgatcagctgacagaggacaacgttaggttggccagaatactgggctggtgcgtcgaaatggtgcaagcgttcttcctcgtactggacgacgtgatggaccactcggaatcgcgaaggggccagccctgctggtaccggcacagcaacatcggcctggccgccatcaacgacggcattctcatcgagcaggctgtctaccaactgctcaggacgcactttcgaggaaagccctgctacgtcgatctcttcgagactctacaacagaacaccctgaagacgacgatgggccaaacgctggaccagctggcgacgaatttcagtaagaagccgaatttggatctctttaccatggaccggtacaactcgatcgtcaagtacaaaactggctactactcgttcgtcatgccggttcagctagccatgtacttcgctggcgtcaaggacccggaaatgcacagacaggccaaaaccattctcctggaaatgggccacttcttccaagtgcaagacgattatctcgactgcttcggcgatccgcaggttaccggaaaacaaggcacggatattcaagagggcaaatgctcctggctagtcgtcgtcgctctgcaacgcgccactccggcgcaacgtaaagttctcgaggagtgctatggtatcaatgatccggaaaaaattgccaaagtcaagcagttgtacaacgacttgggattgcaaatgacatattccatttacgaagaggaaagctacaacctcatgaatactcatattcaacagatttcacgtggactgcctcacgatttgttcttcaaattcctcgaaaagatttatcgcagagatgcctaa

SEQ ID NO: 111529 - protein, 364 aa, Nasonia vitripennis
MDRARNERAVHSVAQTNWVASRDESREMMALWPDVVRDLTEAGRHLDVPEATKWLAKVLQYNVPSGKKNRGLSLVYAYRKLAPPDQLTEDNVRLARILGWCVEMVQAFFLVLDDVMDHSESRRGQPCWYRHSNIGLAAINDGILIEQAVYQLLRTHFRGKPCYVDLFETLQQNTLKTTMGQTLDQLATNFSKKPNLDLFTMDRYNSIVKYKTGYYSFVMPVQLAMYFAGVKDPEMHRQAKTILLEMGHFFQVQDDYLDCFGDPQVTGKQGTDIQEGKCSWLVVVALQRATPAQRKVLEECYGINDPEKIAKVKQLYNDLGLQMTYSIYEEESYNLMNTHIQQISRGLPHDLFFKFLEKIYRRDA

SEQ ID NO: 111530 - DNA, 924 bp, Tribolium castaneum
  CDS (1)..(924)
atgggtgattcgaaaaaaacagccccttgtgtgtacagccgagacaacgacaagtgccaagatgagaaattgctacaaccgttcacttacatcatgcaaactccggggaagaacatccggtcgaaattagctcgagctttcaactattggttgaatatcagtgaagagaagctgaaggcgattgaggagatagttgaaatgatgcataacgctagtctccttttggatgatatccaggataattcaatactgagaagaggagtacctgtagctcactcaatttatggggttcctagcaccataaatgccgccaattatgtcatttttattgcattgcaaagagttttagaactgaatcaccctgaagcggtaagtgtctacacacaacaagttttggagctccacagaggtcaaggcatggaaatttattggcgagacagctacacctgtcccacggaagatgaatacaaacagatgacgattagaaaaactgggggcctttttatgttagcaattagattaatgcaactattcagtgaaaataaggctgattataccaaactaacggggattttgggactgtttttccaaattcgggacgattttctaaacctatattctaaagattatatgttacacaagagctattgcgaggacctaactgagggcaaatttagttttccgataattcacgcaattcacagccaaccaaatgataatcaagtaattcatattttaaggcaaagaactaaagacaatgaagtaaagaaatactgcgtttcgttgcttgagaaatacggaagttttgattacacgaagaaagtgttggcagaactgaagcaagaggcccaagatgaagttgataagttgggggaaaacccgtacatggccgaagtaatggagtatatttttaagttggaataa

SEQ ID NO: 111531 - protein, 307 aa, Tribolium castaneum
MGDSKKTAPCVYSRDNDKCQDEKLLQPFTYIMQTPGKNIRSKLARAFNYWLNISEEKLKAIEEIVEMMHNASLLLDDIQDNSILRRGVPVAHSIYGVPSTINAANYVIFIALQRVLELNHPEAVSVYTQQVLELHRGQGMEIYWRDSYTCPTEDEYKQMTIRKTGGLFMLAIRLMQLFSENKADYTKLTGILGLFFQIRDDFLNLYSKDYMLHKSYCEDLTEGKFSFPIIHAIHSQPNDNQVIHILRQRTKDNEVKKYCVSLLEKYGSFDYTKKVLAELKQEAQDEVDKLGENPYMAEVMEYIFKLE

SEQ ID NO: 111532 - DNA, 1341 bp, Tribolium castaneum; identical to SEQ ID NO: 57363
  CDS (1)..(1341)

SEQ ID NO: 111533 - protein, 446 aa, Tribolium castaneum; identical to SEQ ID NO: 57364

SEQ ID NO: 111534 - DNA, 999 bp, Leptospira interrogans serovar Copenhageni str. Fiocruz L1-130
  CDS (1)..(999): transl_table=11
ttggtttgtcggactttgctttacaattggaagttttctttcagttttggagttagagtgaattcatcttccttttccaaaatattccattcttacaaaagtacgtttgaaaattttttaaattctcaaactctttcgatactttctaaacaatctgctcctgaactttttgaagctatgaaatatagtctcgtggccggagggaagcgacttagacccgttttggctttggctgcttttggtggacttcaaaatgaaactcaaaacgttcttttacttggggcttctttggaatgtattcatacttattctttgattcacgacgatcttccaagtatggataacgacgattttagaagggggttgccgactcttcataaaaaattttccgaatctacggcgattttggccggagacgctttaaactctttcgcattttattttatttcttggatccgggttgaaaatggtgatcattttttacataggaatctattagaaattttgcatgcaggttgtggtgcgcctggaatggtttccggacaagtttatgatttacagatggaaagagaaaatgtgaaagaaaatgatttaacaaaccaatccgataagatagagatgcttcaattgactcaccgtttaaaaacgggagcgttgattaagtcagccttattgttagggaaccgtcttcgtaaagattggaaaaaaagagaaacgtctttatctcaatacggagaagatctaggtttactgtttcagattacagacgatattttagacgtggaaggaactcaggaatctttaggaaaaaccccaggtaaggatcaaaaatctggcaagatcacctatcctatgttattcggaatggatcgttgtaaaaagatggtagaagaacttcagaaaaatctaatttttacttcttctgattttgtttccacagaagaagaacaaacattctttcaggagcttccgatttacattggccagagaaaaaattag

SEQ ID NO: 111535 - protein, 332 aa, Leptospira interrogans serovar Copenhageni str. Fiocruz L1-130
MVCRTLLYNWKFSFSFGVRVNSSSFSKIFHSYKSTFENFLNSQTLSILSKQSAPELFEAMKYSLVAGGKRLRPVLALAAFGGLQNETQNVLLLGASLECIHTYSLIHDDLPSMDNDDFRRGLPTLHKKFSESTAILAGDALNSFAFYFISWIRVENGDHFLHRNLLEILHAGCGAPGMVSGQVYDLQMERENVKENDLTNQSDKIEMLQLTHRLKTGALIKSALLLGNRLRKDWKKRETSLSQYGEDLGLLFQITDDILDVEGTQESLGKTPGKDQKSGKITYPMLFGMDRCKKMVEELQKNLIFTSSDFVSTEEEQTFFQELPIYIGQRKN

SEQ ID NO: 111536 - DNA, 903 bp, Prochlorococcus marinus str. AS9601
  CDS (1)..(903): transl_table=11
atgactgaagttataaataatatttctgattttgaaaaatatcttaaaaacacaaaaaaggttgtagaagaagcacttgatttttccttgggtcctgagaatccagaaatattaagggaatcaatgagatattcccttttagctggagggaaaagaatacgtccaattttatgtttagcatcttgctcactggcaggaggagaaccctctcttgctgttcctactgcagtagcaatagaaatgatccatacaatgtccttgattcatgatgatctgcccgccatggataatgatgacttgaggagaggtaggccgacaaatcataaagtttatggagatgcaatagctattcttgcaggtgatgctttattgaccagggcctttgaaatggtctctttaagaagtccaggagttgatccaactagattattaaatgtagttggtgaactttctttagttgctggggcaccaggtttagtgggaggacaagtagttgatttagaatgcgaaggcaaggaggttgaccttaaaactctcgaatatattcatcttcataagactggggctttattaaaagcttgcgtaagaacaggcgcgatgatcgcaggcgcaaacgaaaaactattacatgctctgacaacatatgcagagggtattggattagccttccagataatagatgatattcttgatttaacttcaagtagtgaaaagcttggtaaaactgccgggaaagatcttttagctgacaaaactacttaccctaaattacttggaatggaggaatcaaagaaaagagcatttgatttagttgaaaaagcaaaaaaagcaattgaaccttgggggccagatgcaaagtatttaatatcattagccgatttcattacaaatagagatagataa

SEQ ID NO: 111537 - protein, 300 aa, Prochlorococcus marinus str. AS9601
MTEVINNISDFEKYLKNTKKVVEEALDFSLGPENPEILRESMRYSLLAGGKRIRPILCLASCSLAGGEPSLAVPTAVAIEMIHTMSLIHDDLPAMDNDDLRRGRPTNHKVYGDAIAILAGDALLTRAFEMVSLRSPGVDPTRLLNVVGELSLVAGAPGLVGGQVVDLECEGKEVDLKTLEYIHLHKTGALLKACVRTGAMIAGANEKLLHALTTYAEGIGLAFQIIDDILDLTSSSEKLGKTAGKDLLADKTTYPKLLGMEESKKRAFDLVEKAKKAIEPWGPDAKYLISLADFITNRDR

SEQ ID NO: 111538 - DNA, 903 bp, Prochlorococcus marinus str. MIT 9515
  CDS (1)..(903): transl_table=11
atgacagaagttatcgataatatttcagattttgataaatatctaaaagagacaaaaaaaatcgtagaagaagctcttgatttatccttaggtccagaaaatccagaaatacttagggaatcaatgagatattctctcttggctggaggtaaaagaatacgtccaattttatgtctagcgtcttgttctttagcaggaggagaaccatctctagctgtccctacagcagtggcaatagaaatgattcataccatgtcattaatacatgatgatttacccgctatggacaatgatgacttaagaagaggaagacctacaaatcataaagtttatggagatgcaatagctatacttgctggagatgcattattaacgagagcatttgaaatggtctcattaagaagccctggtgttgatccaaatagattattaaatgtaattggagaactttcccttgtagcaggagcgcctggacttgttggaggtcaagttgttgatctggaatgtgaaggaaaagaagttgacttagaaaccctcgagtatattcatcttcataagacgggtgccttactaaaagcttgcgtgagaactggtgcgatgattgcaggagctaatgatgaattattaaaagctctaaccacatatgcagagggaataggtttggcattccaaataatagatgacatacttgatttaacttcaagtagtgagaaactcggtaaaacagcgggtaaagatcttttagcagataaaactacctatccaaagttacttggaatggaagaatcaaagaagagagcttttgatttggttgataaagcaaaaaaagcaattgagccttggggtttagatgcacaatatttaatctccttagctgatttcattacaaatagagataggtaa

SEQ ID NO: 111539 - protein, 300 aa, Prochlorococcus marinus str. MIT 9515
MTEVIDNISDFDKYLKETKKIVEEALDLSLGPENPEILRESMRYSLLAGGKRIRPILCLASCSLAGGEPSLAVPTAVAIEMIHTMSLIHDDLPAMDNDDLRRGRPTNHKVYGDAIAILAGDALLTRAFEMVSLRSPGVDPNRLLNVIGELSLVAGAPGLVGGQVVDLECEGKEVDLETLEYIHLHKTGALLKACVRTGAMIAGANDELLKALTTYAEGIGLAFQIIDDILDLTSSSEKLGKTAGKDLLADKTTYPKLLGMEESKKRAFDLVDKAKKAIEPWGLDAQYLISLADFITNRDR

SEQ ID NO: 111540 - DNA, 888 bp, Clostridium thermocellum ATCC 27405; identical to SEQ ID NO: 57365
  CDS (1)..(888): transl_table=11

SEQ ID NO: 111541 - protein, 295 aa, Clostridium thermocellum ATCC 27405; identical to SEQ ID NO: 57366

SEQ ID NO: 111542 - DNA, 888 bp, Clostridium difficile 630; identical to SEQ ID NO: 57367
  CDS (1)..(888): transl_table=11

SEQ ID NO: 111543 - protein, 295 aa, Clostridium difficile 630; identical to SEQ ID NO: 57368

SEQ ID NO: 111544 - DNA, 900 bp, Prochlorococcus marinus str. MIT 9301
  CDS (1)..(900): transl_table=11
atgactaaagtaataaatagctatgattttgaaaaatatcttaaacaaacaaaaaaggttatagaagaagcacttgatttttccttgggccctgagaatccagaaatattaagagaatcaatgagatattcccttttggctggaggaaaaaggatacgtccaattttatgtttagcatcttgctcactggctggaggggagccctctcttgctgttcctactgcagtagcgatagaaatgattcatacaatgtccttgatacatgatgatcttcccgcgatggataatgatgacttaaggagaggaagaccaacgaatcataaagtatatggggatgcagtagctattcttgcaggcgatgctttattaactagggcctttgaaatggtctctttaagaagccctggagtagatccaaatagattattaaatgtaattggcgaattatccttagtcgcaggcgcaccaggcctagtcgggggacaagttgttgatttagaatgcgaaggcaaagaagtcgaccttgatactctcgaatatattcatcttcataagactggggctttattgaaggcttgtgtaagaacaggcgcgatgatcgcaggcgctaacgaaaaacttttacaagctcttacaacatatgcagagggaattggtttggccttccaaataattgatgatattcttgatttaacttcaagtagtgaaaagcttggtaaaactgctggtaaagatcttttagccgacaaaactacttaccctaaattacttggtatggaggagtcaaagaaaagagcatttgatttagttgaaaaagcaaaaaaagcaattgaaccttggggggcagatgcaaatcatttaatatcattagccgactttattacaaacagagatagataa

SEQ ID NO: 111545 - protein, 299 aa, Prochlorococcus marinus str. MIT 9301
MTKVINSYDFEKYLKQTKKVIEEALDFSLGPENPEILRESMRYSLLAGGKRIRPILCLASCSLAGGEPSLAVPTAVAIEMIHTMSLIHDDLPAMDNDDLRRGRPTNHKVYGDAVAILAGDALLTRAFEMVSLRSPGVDPNRLLNVIGELSLVAGAPGLVGGQVVDLECEGKEVDLDTLEYIHLHKTGALLKACVRTGAMIAGANEKLLQALTTYAEGIGLAFQIIDDILDLTSSSEKLGKTAGKDLLADKTTYPKLLGMEESKKRAFDLVEKAKKAIEPWGADANHLISLADFITNRDR

SEQ ID NO: 111546 - DNA, 885 bp, Herminiimonas arsenicoxydans; identical to SEQ ID NO: 57369
  CDS (1)..(885): transl_table=11

SEQ ID NO: 111547 - protein, 294 aa, Herminiimonas arsenicoxydans; identical to SEQ ID NO: 57370

SEQ ID NO: 111548 - DNA, 885 bp, Burkholderia vietnamiensis G4
  CDS (1)..(885): transl_table=11
atgacattcgaacaatggatgcggtccgtacttgaccgtgtcgaggacgcactcggccactatttgccggccgacaacgtggtgcccacgcaactccacgaggcgatgcgctacgcggtcctcggtgggggcaaacgcgttcgcccgctgctgtgccatgcagcgggtgagctgacgggcgcgaccgaagcggcgcgcaacgcggcggcggcggcgctggagatgatccacgtctactcgctggtgcacgacgacatgccgtgcatggacgacgacgcgctgcgtcgcggcaagccgaccgtgcacgtgcagtacgacgagccgacggcgctgctggtcggcgatgcgctgcagtcgcaggcattcgtcgcgctgacggatgccgacgcgctgtcgcccgtgcagcaggccgcgctggtgcgcgagctggcgctcgcgagcggctcgatcggcatggccggcgggcaggcgatcgatctggcgagcgtcggcctgaagctgacgcgcgagcagctcgagacgatgcaccggatgaagaccggcgcgctgttgcgcgccgctgtgcggatgggcgcgctggcaggcgagacgccgtcggcggatgcgatggccgcactcgatgtgtacgcgggggccgtgggcctggcgttccaggtcgtcgacgacattctcgacgtcacgaccgattcggcgacgctcggcaagacggctggcaaggatgcagcgaacgacaagccgacctacgtatcgatcctcggcctcgacgcatcgcgtgagctcgcagcgcagctgcgcgctgaagcgcacgatgcgctgaaaccgttcggcgcgcgcgcacagcgtctcgccgaacttgccgacctggtagtgaaccgggtcagctga

SEQ ID NO: 111549 - protein, 294 aa, Burkholderia vietnamiensis G4
MTFEQWMRSVLDRVEDALGHYLPADNVVPTQLHEAMRYAVLGGGKRVRPLLCHAAGELTGATEAARNAAAAALEMIHVYSLVHDDMPCMDDDALRRGKPTVHVQYDEPTALLVGDALQSQAFVALTDADALSPVQQAALVRELALASGSIGMAGGQAIDLASVGLKLTREQLETMHRMKTGALLRAAVRMGALAGETPSADAMAALDVYAGAVGLAFQVVDDILDVTTDSATLGKTAGKDAANDKPTYVSILGLDASRELAAQLRAEAHDALKPFGARAQRLAELADLVVNRVS

SEQ ID NO: 111550 - DNA, 843 bp, Dichelobacter nodosus VCS1703A; identical to SEQ ID NO: 57371
  CDS (1)..(843): transl_table=11

SEQ ID NO: 111551 - protein, 280 aa, Dichelobacter nodosus VCS1703A; identical to SEQ ID NO: 57372

SEQ ID NO: 111552 - DNA, 939 bp, Synechococcus sp. WH 7803
  CDS (1)..(939): transl_table=11
atgaccgccacggcgagcagccctgaaggtgtcacgccgtcgggtgaggatcaggctgaattcgatttcagttcctatctggccaagacccgggagctggtcgagcagtcgctggatgcggctctcggccctgagcggcccgagtctcttcgcgagtcgatgcgctactcactcctggctggaggcaagcggctcaggccgatcctctgcctggcagcttgtgagctggttggcggtgatgcctccctggcgatgccaacggccgtggctctggagatgatccacaccatgtcgctgatccacgacgatctgccggccatggacaacgacgatctgcggcgtggtcgccccaccaatcacaaggtgtacggcgatgccatggccattctcgccggcgatgccctgctcagccgagcctttgaaatggtggccgtgcgcagtgagggggtgccacccgaacgcttgctgaaggtggtggccgagctgtctcttgtgtctggagccccgggactggtgggtggccaggtggtggatctggaaagtgagggtcgtgaggttgatctggaaacactggaatacatccatctccacaagaccgcagctctgcttcgggcctgtgtcgtcaccggtgctttgatcggcggcgccgacgccagtcaggtcgatgccatgcgcacgtacgccaatggcatcggccttgctttccagatcgtggatgacatcctggacgtcaccgccagcagcgacgtgctcggtaaaacagccggcaaggacctgatcgctgataaaaccacctatccgaaacttctgggtctcgaaccgtctcgggctcgtgcccttgagttggtggcccaggccaaagcggtgctcgaaccgtggaaagacaaggcgcagccgctgctggcgctcgcggactacgtcgcgagccgggaccgttga

SEQ ID NO: 111553 - protein, 312 aa, Synechococcus sp. WH 7803
MTATASSPEGVTPSGEDQAEFDFSSYLAKTRELVEQSLDAALGPERPESLRESMRYSLLAGGKRLRPILCLAACELVGGDASLAMPTAVALEMIHTMSLIHDDLPAMDNDDLRRGRPTNHKVYGDAMAILAGDALLSRAFEMVAVRSEGVPPERLLKVVAELSLVSGAPGLVGGQVVDLESEGREVDLETLEYIHLHKTAALLRACVVTGALIGGADASQVDAMRTYANGIGLAFQIVDDILDVTASSDVLGKTAGKDLIADKTTYPKLLGLEPSRARALELVAQAKAVLEPWKDKAQPLLALADYVASRDR

SEQ ID NO: 111554 - DNA, 885 bp, Candidatus Protochlamydia amoebophila UWE25; identical to SEQ ID NO: 57373
  CDS (1)..(885): transl_table=11

SEQ ID NO: 111555 - protein, 294 aa, Candidatus Protochlamydia amoebophila UWE25; identical to SEQ ID NO: 57374

SEQ ID NO: 111556 - DNA, 810 bp, Candidatus Protochlamydia amoebophila UWE25
  CDS (1)..(810): transl_table=11
ttgggtgataaaacatcattaagagatgcttgtgaatatgcgttactaaatggtggaaaacgatttagacctgctctcgttttgatgattgctaaagcccttggttttcaagtcgatgtttcacaggctgctttatgtgtagaatactttcatactgcgtctttgattgcagatgatttgccttgtatggataacgatgatgaacggcgaaatgctcctaccttacataaaatttttggggaatcgacttctcttttggcgacctatactttgattgccgctggctacgcttgcttagctcggaataccgcgattttgaaagatagtgcacacccctacgttaatcaaaaagagcgtttatgtgtattggctttagaaaatgcaacgcaaaatacgggaattttaggggcaacggggggacaatatttagatttaaatcctcctaatctttctttaaagactttaaaagaagtgattgaaaagaaaacggttacgttatttgaaatttcttttgtcttagggtggatttttggaggaggggttttggaaaagttgtccctcgtgaaaaaatgtgcaggacactttggaatggctttccaaattgccgatgacttgggagacatgaagcaagactcctttcatgatcacacaatgaattttgcaaatgtttatggtaaaccagctgcgactcaattatttcatgacgaaattcatcaatttaatcaaacactaactgcgcttgattttcaatcagaagatcttcaagctttaacttgccttcttattgagcaagtacaacttctttcttga

SEQ ID NO: 111557 - protein, 269 aa, Candidatus Protochlamydia amoebophila UWE25
MGDKTSLRDACEYALLNGGKRFRPALVLMIAKALGFQVDVSQAALCVEYFHTASLIADDLPCMDNDDERRNAPTLHKIFGESTSLLATYTLIAAGYACLARNTAILKDSAHPYVNQKERLCVLALENATQNTGILGATGGQYLDLNPPNLSLKTLKEVIEKKTVTLFEISFVLGWIFGGGVLEKLSLVKKCAGHFGMAFQIADDLGDMKQDSFHDHTMNFANVYGKPAATQLFHDEIHQFNQTLTALDFQSEDLQALTCLLIEQVQLLS

SEQ ID NO: 111558 - DNA, 864 bp, Desulfovibrio vulgaris subsp. vulgaris str. Hildenborough
  CDS (1)..(864): transl_table=11
atgcaggcggcgcgcgtcgaaggctaccttgccacttgccttgcagggcggggtattccccctcgtctgcaaagtgccatggaatacagccttctagcgggtggcaaacgccttcggcctgtgctctgcctctcgacggctggcatgaccgggctcgaccccatgtcggtgatgccgttcgctgcagccatcgagctcatccacacctattcgctcatccatgacgacctgcctgccatggacgatgacgacctgcgcagaggtcgtccctccaaccatcgccagttcgatgaggcgaccgccatcctcgctggtgacggcctgctgaccgatgccttcgacctcatggcttcggtgggcgggggcatccccgcggggcacgtgctcgcagccttgcgcgaagtgtcgtctgccgcagggtcgtccggcatggttggcgggcaggctctcgacatggactataccggtcgggatgacatcgacctagccgccttgcgtaccatgcacgccatgaagaccggggctctcatccgctgttcgtgcgtcgcgggtgcgctgctcggtggcgcaccggcttccgccgtagagcaggtcgcggggtatggtgccgccatcggcgcggcgttccagatcgtcgacgacatcctcgacgagacgggcgacgaggcgcaactcggcaagcccgtgggcagcgacgtggagcagggcaaggtgacctatccttcgctgctcggcatcgaacgcagccgggccctggcgcaggaacaggcagacattgccgtgacgtgtctcgcagatttcgagggcgaggatgcagacttccttcgcgctctcgcccagtatattgttgatcgcgtctcttga

SEQ ID NO: 111559 - protein, 287 aa, Desulfovibrio vulgaris subsp. vulgaris str. Hildenborough
MQAARVEGYLATCLAGRGIPPRLQSAMEYSLLAGGKRLRPVLCLSTAGMTGLDPMSVMPFAAAIELIHTYSLIHDDLPAMDDDDLRRGRPSNHRQFDEATAILAGDGLLTDAFDLMASVGGGIPAGHVLAALREVSSAAGSSGMVGGQALDMDYTGRDDIDLAALRTMHAMKTGALIRCSCVAGALLGGAPASAVEQVAGYGAAIGAAFQIVDDILDETGDEAQLGKPVGSDVEQGKVTYPSLLGIERSRALAQEQADIAVTCLADFEGEDADFLRALAQYIVDRVS

SEQ ID NO: 111560 - DNA, 882 bp, Listeria monocytogenes str. 4b F2365
  CDS (1)..(882): transl_table=11
ttgcaagatttaaccctttttctagaacaatataaaaaagtgattgatgagtcgctttttaaagaaataagcgagcgaaatatcgaacctagactaaaagagtccatgttatattctgttcaagcaggtggaaaacggattcgtcccatgctagtttttgctacacttcaagccttaaaagtaaatccgcttttaggtgtgaaaacagcaacggcattagaaatgattcatacgtatagcctgatccatgatgatttaccagcaatggataacgatgactatcgtcgcggcaaatatactaatcataaagtttttggggatgcaactgcgattttggcaggagacgctttactaacgcttgctttttctattttagcggaagacgaaaatttatcttttgaaacacgcatagctttgattaatcaaattagttttagtagtggtgcagaaggaatggttggcggtcaacttgcagatatggaggcagaaaacaaacaagtgacattagaagaactatcatccatccatgcacggaaaacaggcgaattattaatttttgccgtaacttctgctgcgaaaattgcagaagctgacccagaacaaacgaaaagattacggatttttgcggaaaatattgggattggattccaaatcagtgacgatattttagatgttattggtgatgaaacaaaaatgggtaaaaagacaggggtcgacgcttttctgaacaaaagtacctatcccggattactcacgcttgatggtgccaaaagggcattaaatgagcatgttgcgattgcaaagtcagcgctttcagggcatgattttgatgatgaaattctcttgaaacttgctgatttaatcgcacttagagaaaattaa

SEQ ID NO: 111561 - protein, 293 aa, Listeria monocytogenes str. 4b F2365
MQDLTLFLEQYKKVIDESLFKEISERNIEPRLKESMLYSVQAGGKRIRPMLVFATLQALKVNPLLGVKTATALEMIHTYSLIHDDLPAMDNDDYRRGKYTNHKVFGDATAILAGDALLTLAFSILAEDENLSFETRIALINQISFSSGAEGMVGGQLADMEAENKQVTLEELSSIHARKTGELLIFAVTSAAKIAEADPEQTKRLRIFAENIGIGFQISDDILDVIGDETKMGKKTGVDAFLNKSTYPGLLTLDGAKRALNEHVAIAKSALSGHDFDDEILLKLADLIALREN

SEQ ID NO: 111562 - DNA, 906 bp, Bartonella quintana str. Toulouse; identical to SEQ ID NO: 57375
  CDS (1)..(906): transl_table=11

SEQ ID NO: 111563 - protein, 301 aa, Bartonella quintana str. Toulouse; identical to SEQ ID NO: 57376

SEQ ID NO: 111564 - DNA, 903 bp, Bartonella henselae str. Houston-1
  CDS (1)..(903): transl_table=11
atgcatgaatttataacccttcttgcaaaacacgcccacagtgttgaaaaacgacttgccacactgttaagtgatcaagtccaaaatggtgaaattgctcgtcctgaaattttactcaaagccatgcgttacggtgtgctcaatggtggaaaacggctacgtccttttcttgttattcaaagttgtgcactttttgacatccctatcgaatactctctcaacgttgcaagtgctttagaatgtatccattgttattctctgattcatgatgatcttcccgccatggataacgatacactccgacgcggacaacccaccgttcacatagcatttgatgaagccacagcaattctagccggcaacgcccttttgactttcgcttttgaaatcattgcccacaaaactagtgaactctcttttgaaaccagaatcaggctgatcaccgctcttgcacaagcgtcaggacttggtggcatgataggcggacaaatgcttgaccttgaagcagaaaaaaaaccacaagaaagcaaagatatcacgactctccaacacatgaaaacagcgactcttataagctttgcttgccaagcaggagcgatcatcggcaatgcttcccaagaattgaccgaaaaacttgctgcttttggaacatatcttggcttagcctttcaattaacagatgatcttcttgatgtcactgccagcactaaagttttaggcaaaaccgctggaaaagatgaaacagcgcacaaagccacttttattcgtctttatggtattgaagaaacacaaaaaaaacgagacgaactcatcgctcaagcagaagcgcttcttctcccttttggcgccaaagcaacaccactccaacaagccgctcgttttagtgcaacacgcaaaaattaa

SEQ ID NO: 111565 - protein, 300 aa, Bartonella henselae str. Houston-1
MHEFITLLAKHAHSVEKRLATLLSDQVQNGEIARPEILLKAMRYGVLNGGKRLRPFLVIQSCALFDIPIEYSLNVASALECIHCYSLIHDDLPAMDNDTLRRGQPTVHIAFDEATAILAGNALLTFAFEIIAHKTSELSFETRIRLITALAQASGLGGMIGGQMLDLEAEKKPQESKDITTLQHMKTATLISFACQAGAIIGNASQELTEKLAAFGTYLGLAFQLTDDLLDVTASTKVLGKTAGKDETAHKATFIRLYGIEETQKKRDELIAQAEALLLPFGAKATPLQQAARFSATRKN

SEQ ID NO: 111566 - DNA, 882 bp, Staphylococcus aureus subsp. aureus MRSA252
  CDS (1)..(882): transl_table=11
atgacgaatctaccgatgaataaattaatagatgaagtcaataatgaattatcggttgcgataaataaatcagtaatgaatactcagctagaagaaagtatgttgtattcattaaatgctggaggtaaacgcatccgaccagttctgttattactcactttagattcactaaataccgagtatgagttaggtatgaagagcgcaattgcactagaaatgattcatacatattcacttattcatgatgacctaccagcgatggataatgatgattatcgacgagggaaattaacgaatcataaagtatatggtgagtggacggcgatattagcaggtgatgctttattaactaaagcatttgaacttatttcaagtgatgatagattaactgatgaagtaaaaataaaagttctacaacggctgtcaatagcaagtggtcatgttggaatggtcggcggtcaaatgttagatatgcaaagcgaaggccaaccaattgatcttgaaactttggaaatgatacacaaaacaaaaacaggagcactattaacttttgcggttatgagtgcagcagatatcgctaatgtcgatgatgcaactaaagaacatttagaaagttatagttatcatttaggtatgatgtttcagattaaagatgatttattagactgctatggtgatgaagcgaagttaggtaaaaaagtgggcagcgatcttgaaaataataaaagtacgtacgtgagtttattaggaaaagatggcgcagaagataaattgacttatcatagagacgcagcagtggatgaactaatgcaaattgatgaacaattcaatacaaaacacttattagaaatcgttgatttattttatagcagggatcactaa

SEQ ID NO: 111567 - protein, 293 aa, Staphylococcus aureus subsp. aureus MRSA252
MTNLPMNKLIDEVNNELSVAINKSVMNTQLEESMLYSLNAGGKRIRPVLLLLTLDSLNTEYELGMKSAIALEMIHTYSLIHDDLPAMDNDDYRRGKLTNHKVYGEWTAILAGDALLTKAFELISSDDRLTDEVKIKVLQRLSIASGHVGMVGGQMLDMQSEGQPIDLETLEMIHKTKTGALLTFAVMSAADIANVDDATKEHLESYSYHLGMMFQIKDDLLDCYGDEAKLGKKVGSDLENNKSTYVSLLGKDGAEDKLTYHRDAAVDELMQIDEQFNTKHLLEIVDLFYSRDH

SEQ ID NO: 111568 - DNA, 909 bp, Acinetobacter sp. ADP1; identical to SEQ ID NO: 57377
  CDS (1)..(909): transl_table=11

SEQ ID NO: 111569 - protein, 302 aa, Acinetobacter sp. ADP1; identical to SEQ ID NO: 57378

SEQ ID NO: 111570 - DNA, 912 bp, Erwinia carotovora subsp. atroseptica SCRI1043; identical to SEQ ID NO: 57379
  CDS (1)..(912): transl_table=11

SEQ ID NO: 111571 - protein, 303 aa, Erwinia carotovora subsp. atroseptica SCRI1043; identical to SEQ ID NO: 57380

SEQ ID NO: 111572 - DNA, 897 bp, Desulfotalea psychrophila LSv54; identical to SEQ ID NO: 57381
  CDS (1)..(897): transl_table=11

SEQ ID NO: 111573 - protein, 298 aa, Desulfotalea psychrophila LSv54; identical to SEQ ID NO: 57382

SEQ ID NO: 111574 - DNA, 921 bp, Yersinia pseudotuberculosis IP 32953; identical to SEQ ID NO: 57383
  CDS (1)..(921): transl_table=11

SEQ ID NO: 111575 - protein, 306 aa, Yersinia pseudotuberculosis IP 32953; identical to SEQ ID NO: 57384

SEQ ID NO: 111576 - DNA, 894 bp, Symbiobacterium thermophilum IAM 14863; identical to SEQ ID NO: 57385
  CDS (1)..(894): transl_table=11

SEQ ID NO: 111577 - protein, 297 aa, Symbiobacterium thermophilum IAM 14863; identical to SEQ ID NO: 57386

SEQ ID NO: 111578 - DNA, 903 bp, Mannheimia succiniciproducens MBEL55E; identical to SEQ ID NO: 57387
  CDS (1)..(903): transl_table=11

SEQ ID NO: 111579 - protein, 300 aa, Mannheimia succiniciproducens MBEL55E; identical to SEQ ID NO: 57388

SEQ ID NO: 111580 - DNA, 891 bp, Bacillus licheniformis ATCC 14580; identical to SEQ ID NO: 57389
  CDS (1)..(891): transl_table=11

SEQ ID NO: 111581 - protein, 296 aa, Bacillus licheniformis ATCC 14580; identical to SEQ ID NO: 57390

SEQ ID NO: 111582 - DNA, 930 bp, Legionella pneumophila subsp. pneumophila str. Philadelphia 1
  CDS (1)..(930): transl_table=11
ctggtactgattccaacattgaactcgactcagatgaacaaacaagtgattgataagtatacccaaagacatgagctatatctcgagcaattgctcaatgaaataataataccagctccccaaattcgctccgcactccattacgctttattttcaggcggcaaaagaataagacccattttggtttatttggctggcgatttaattgatgttgaccagggagttctggatattattgcggcagcgcttgagttaacacattgctattccctgattcatgatgatcttccagcgatggacaatgacgatctgcgccgcggtaagccgagttgtcataaagcatttgatgaggcaaccgctattttagtcggcgatggcatgcaagctttagcgattgaagtcttactgatgagattatcgccccttctccccgcagcacaagtcgtagccattactcaagtattggtaaatgccagtggaataagtggaatggttagtggccaaagtcttgatttatcagaactggccaaatcatcggtaactgaggagcaattaagagaaattcatcttttgaaaactggaaaactgatcctggcgtgttttgaaatggttttagcagcacaacatgaggtatctgagcaaatcaaatccgcactaagaacttatgggaaacatatagggcttgtatttcaaatgcaagatgattacctggatctgtacgctccaactcaaatattgggaaaaggtcgctcctcggatcaggcaaaccaaaaaaccacttttgcaaccttatttaacaagcaacaattggaagaagaaatcgctgttcattaccaaattgcaatggattctctgcggttatttggtagtaaagcggctgcattaattgaattaacaaaacaattacaaaatcgtagcaatttgtcttga

SEQ ID NO: 111583 - protein, 309 aa, Legionella pneumophila subsp. pneumophila str. Philadelphia 1
MVLIPTLNSTQMNKQVIDKYTQRHELYLEQLLNEIIIPAPQIRSALHYALFSGGKRIRPILVYLAGDLIDVDQGVLDIIAAALELTHCYSLIHDDLPAMDNDDLRRGKPSCHKAFDEATAILVGDGMQALAIEVLLMRLSPLLPAAQVVAITQVLVNASGISGMVSGQSLDLSELAKSSVTEEQLREIHLLKTGKLILACFEMVLAAQHEVSEQIKSALRTYGKHIGLVFQMQDDYLDLYAPTQILGKGRSSDQANQKTTFATLFNKQQLEEEIAVHYQIAMDSLRLFGSKAAALIELTKQLQNRSNLS

SEQ ID NO: 111584 - DNA, 903 bp, Methylococcus capsulatus str. Bath; identical to SEQ ID NO: 57391
  CDS (1)..(903): transl_table=11

SEQ ID NO: 111585 - protein, 300 aa, Methylococcus capsulatus str. Bath; identical to SEQ ID NO: 57392

SEQ ID NO: 111586 - DNA, 897 bp, Azoarcus sp. EbN1
  CDS (1)..(897): transl_table=11
atgagccacatgaattttttggcctggatggaagccatccagcgacgctccgaaaccgcactggaaaaccttctccccgacgcgaacatcgctcccgcccggcttcacgaagcgatgcgctacgcggtactgggtggcggcaagcgcatcaggccgctgctcgtccatgcggcaggaggtctcgtcggggctgcccctgaacggctggacaaagttgcgtgcgccgtcgagctgatccacgcctattccctggtccatgacgacttgccgtgcatggacaacgatgtgctgcggcgcggcaaaccgacggtgcatgtcgaatacgatgacgccaccgcgttgctggtgggcgattccctgcaggcactcgccttccagtccctctccgagcacccgctgaccgaggacccgtcggaacagctgtcgatgatcacccagctcgcacgcgcgtccggctcacggggcatggcgggcggacaggcgatcgaccttgctgcggtaggcaaacagcttagccgcgaagagctcgaatacatgcatatccacaagaccggcgccttgatccgggcctcggtcctgctcggagctgcgtgcggcgcgagactcgactcagaccgcctggaacgcctcgatcactacgggaagctcgtgggcctgctgttccaggtcgtcgacgatatcctcgatacgcagtccgacacggcgacactcggaaaaacagccggcaaggatgccgacaacaacaaaccgacttacgtaaccctcctcggcatgacggaagcccgtgcgctcgccgaatcgctgcttgccgacgcccgtgaagccctcacgcctttcggaccccaggccgccagactcgacgaactcgccactttcatcgtccatcgaagattctga

SEQ ID NO: 111587 - protein, 298 aa, Azoarcus sp. EbN1
MSHMNFLAWMEAIQRRSETALENLLPDANIAPARLHEAMRYAVLGGGKRIRPLLVHAAGGLVGAAPERLDKVACAVELIHAYSLVHDDLPCMDNDVLRRGKPTVHVEYDDATALLVGDSLQALAFQSLSEHPLTEDPSEQLSMITQLARASGSRGMAGGQAIDLAAVGKQLSREELEYMHIHKTGALIRASVLLGAACGARLDSDRLERLDHYGKLVGLLFQVVDDILDTQSDTATLGKTAGKDADNNKPTYVTLLGMTEARALAESLLADAREALTPFGPQAARLDELATFIVHRRF

SEQ ID NO: 111588 - DNA, 867 bp, Silicibacter pomeroyi DSS-3
  CDS (1)..(867): transl_table=11
atgttccatgaaaggctggcgcaggacgccgcgctgatccagcgcagtttcgacactgtgctgggcgcgctggagccgctcgacatcacccgcgccatggcctggaccaccgagggcggcaagcgcctgcgcggctttctggtactggaaagcgcccggctgcatgatgtggacgaggcccgcgcaatctggcccgccaccgccatcgaggcgctgcatgcctacagcctggtgcatgacgacctgccctgcatggacgacgacgacctgcgccggggccgacccaccgcccatgtgaaatgggacgagggcaccgccgtgctggccggcgatgcgctgcattcgctggcgtttgagctctgcacccgccccgaggtcggaaccgccgagacccgcgccaccctggcgctgacgctggcgcaagccgcgggcgcacgcggcatggtgctgggtcaggcgctggatatcgccgctgaaaccgcgcccaaaccgctgacgctggaccagatcacccggttgcaagcgggcaagaccggcgcgctgatcgaatgggccgccgccgccggtgccgtgctggctggggccgatccggaccccttgcgccaatatgcccgcgcgctgggccttgctttccagatcgccgacgacatcttggatgtcgagggcgacgccgagaaggcgggcaaacggctgcaaaaggacgcgggcgcgggcaaggcgacctttgtctcgctgctgggtctggatgcggccaaggcgcgggcacgcgaccttgtcgatcagggctgtgccgctctggacggttacggtgagcgggccggaaccttgaaggaagccgcccgtttcgttattgcccgcgacaactga

SEQ ID NO: 111589 - protein, 288 aa, Silicibacter pomeroyi DSS-3
MFHERLAQDAALIQRSFDTVLGALEPLDITRAMAWTTEGGKRLRGFLVLESARLHDVDEARAIWPATAIEALHAYSLVHDDLPCMDDDDLRRGRPTAHVKWDEGTAVLAGDALHSLAFELCTRPEVGTAETRATLALTLAQAAGARGMVLGQALDIAAETAPKPLTLDQITRLQAGKTGALIEWAAAAGAVLAGADPDPLRQYARALGLAFQIADDILDVEGDAEKAGKRLQKDAGAGKATFVSLLGLDAAKARARDLVDQGCAALDGYGERAGTLKEAARFVIARDN

SEQ ID NO: 111590 - DNA, 888 bp, Bacillus clausii KSM-K16
  CDS (1)..(888): transl_table=11
gtgagcgcattgttccaaacgttcttagaagaggctaggcagcttgtcgacaaaaagttgcctgaatacgtgcgggagttagaggctgagcaccggttaaaggaagcgatgctttactcactcgaagcaggcggcaaacgagtgcgtcctgtgttgttgttggctgtgttggaggcatataaccaaccgattttacatggcctcgacacagcgtgcgcaattgaaatggtacatacctattctctcgttcacgacgatttgcctgcgatggatgacgatgacttacgccggggccagccaacgaatcataaagtattcggagaagcaacagcgattcttgccggcgacgctctattgacacaaagtttcgccttgattgccaatgccgacgctcccctttcggcaaaaacaaaagtttcgatcattgctgctctctctaaagcggctggcgctagcggcatggttggcgggcagcttgcggacatgtttgcggaaggaaaacagcttaccgttgaacagcttgccaacgttcataagcgcaaaacgggcgaattgttggctttttcaatcgaagcaggagcgcttattgccggggtgtcaaacgaggaacggagcaaattaaacgaatttggacaggagattgggttattattccaaattaaggacgacattcttgatgtagaaggcgattcaatcgccatcggtaagcctgttggcagtgacgctgtcaataataaaagcacgtatccagggcttcttggccttgatggagcgaaaacaatgcttcacactcattatgatcgggctttacaagtactcgatgagcttcatttgcgggggacgttgctcgaggatttggctaagtacatcgttacacgtgaccattaa

SEQ ID NO: 111591 - protein, 295 aa, Bacillus clausii KSM-K16
MSALFQTFLEEARQLVDKKLPEYVRELEAEHRLKEAMLYSLEAGGKRVRPVLLLAVLEAYNQPILHGLDTACAIEMVHTYSLVHDDLPAMDDDDLRRGQPTNHKVFGEATAILAGDALLTQSFALIANADAPLSAKTKVSIIAALSKAAGASGMVGGQLADMFAEGKQLTVEQLANVHKRKTGELLAFSIEAGALIAGVSNEERSKLNEFGQEIGLLFQIKDDILDVEGDSIAIGKPVGSDAVNNKSTYPGLLGLDGAKTMLHTHYDRALQVLDELHLRGTLLEDLAKYIVTRDH

SEQ ID NO: 111592 - DNA, 882 bp, Staphylococcus epidermidis RP62A; identical to SEQ ID NO: 57393
  CDS (1)..(882): transl_table=11

SEQ ID NO: 111593 - protein, 293 aa, Staphylococcus epidermidis RP62A; identical to SEQ ID NO: 57394

SEQ ID NO: 111594 - DNA, 831 bp, Ehrlichia ruminantium str. Welgevonden
  CDS (1)..(831): transl_table=11
ttgttttataatatatcacatttaatggaaaattacagtaggttatttactaaagaactgtacaatatcttacctaaagctgatcatgatgatatacttttagcatcaatgaaatattctcttttcactcctggaaaatatatacgtcctttcttagtcaacgcatctgcacaaatatttaatgtgaatatagacagaacattacctgttagcgttgcgattgaactcatacatgtttattctttaatacacgacgatttaccaggtatggacaatgaagatacacgtagaggacaattaagttctcacaaaaagtttactgaagcaattgcaatattaactggtgatgcactattaactttagcatttgaagtattatccacaataaatgaatcaccgtatatacgttgtcgtattatacaggtattaacacaggccataggataccaaggaatgattaaaggacaagtactcgacactgaaacaattgctaaggatattaatgatataaagactatgcatacactaaaaacagcatgtctattctctgcagcatgtgaagtaggaggaatacttggtggtgcttcagatacagaacttaattctctaaaaaattatggattaaatctaggatttgcctttcagattaaagatgatatagcagacatatgcaaagatatatctaaaaataatattctcaatatattaagcaaggaagatactgaaaattacataaggtcgatagtagataaatctatagaatatttagctattttctcaaataaagcaaatattttaaataacctagctgagtttataagaaatttataa

SEQ ID NO: 111595 - protein, 276 aa, Ehrlichia ruminantium str. Welgevonden
MFYNISHLMENYSRLFTKELYNILPKADHDDILLASMKYSLFTPGKYIRPFLVNASAQIFNVNIDRTLPVSVAIELIHVYSLIHDDLPGMDNEDTRRGQLSSHKKFTEAIAILTGDALLTLAFEVLSTINESPYIRCRIIQVLTQAIGYQGMIKGQVLDTETIAKDINDIKTMHTLKTACLFSAACEVGGILGGASDTELNSLKNYGLNLGFAFQIKDDIADICKDISKNNILNILSKEDTENYIRSIVDKSIEYLAIFSNKANILNNLAEFIRNL

SEQ ID NO: 111596 - DNA, 897 bp, Neisseria gonorrhoeae FA 1090; identical to SEQ ID NO: 57395
  CDS (1)..(897): transl_table=11

SEQ ID NO: 111597 - protein, 298 aa, Neisseria gonorrhoeae FA 1090; identical to SEQ ID NO: 57396

SEQ ID NO: 111598 - DNA, 888 bp, Pseudomonas syringae pv. syringae B728a
  CDS (1)..(888): transl_table=11
atgatcgcgagctatcaagcgcaaagccagactcgcgtcaacgcagcactcgacgggctgttcaaggctccgggccctgagctcgaacgcctctaccaagccatgcgctacagcgtgatgaacggcggcaagcgcgtgcgcccgctgctcgcgtatgccgcctgcgaagcactgggcggtgtagccgaggatgccaacggcgccgcctgtgccgttgaactgattcatgcctattcgctggtacatgacgatttgccggcaatggacgacgacgacctgcgtcgcggtcagccgaccacgcacaaggccttcgatgaagcctgcgcgatcctcgccggtgacggcctgcaaagcctggctttcacggccctgctcgcccctcacctgacgtcacgcgatgccgagacgcgtctgcagatggtcacggccctcgcgactgcggccggaccggcgggcatggtgggtggtcaggctatcgatctgggttcagtggggctgaagctcgatcaggccgcgctggaatacatgcatcgccacaagaccggcgcattgatcgaagccagcgttcggcttggcgcactggccagcggtcacgccgatcagccgcgcctcgatgctctgcaggtctacgcgcgggcaatcggcctggcgtttcaggttcaggacgacattctcgatgtcgaaagcgataccgcgacgctcggcaagcgccagggcgccgacatcgctcgcgacaagccgacctacccggcgctgctgggcctggaagcggccaagcactatgcactggaactgcgtgatcaggcgctgcaagcgctgagcccgttcgatgccgccgcagagccgttgcgccagctggcacgctacatcgtcgaacgtcgccactga

SEQ ID NO: 111599 - protein, 295 aa, Pseudomonas syringae pv. syringae B728a
MIASYQAQSQTRVNAALDGLFKAPGPELERLYQAMRYSVMNGGKRVRPLLAYAACEALGGVAEDANGAACAVELIHAYSLVHDDLPAMDDDDLRRGQPTTHKAFDEACAILAGDGLQSLAFTALLAPHLTSRDAETRLQMVTALATAAGPAGMVGGQAIDLGSVGLKLDQAALEYMHRHKTGALIEASVRLGALASGHADQPRLDALQVYARAIGLAFQVQDDILDVESDTATLGKRQGADIARDKPTYPALLGLEAAKHYALELRDQALQALSPFDAAAEPLRQLARYIVERRH

SEQ ID NO: 111600 - DNA, 891 bp, Haemophilus influenzae 86-028NP
  CDS (1)..(891): transl_table=11
atgggtcacttttctgaagaattacaacaggttcaaactcgtatcaatcgctttttagaagctcaatttgagggcattgaaagtcataatgcacttttgcttgaggcgatgaaatacgcattattacttggcggtaagcgagttcgccctttcttagtttacgcaacaggtcaaatgcttggtgcagagaaacaaaccttagattacgctgctgctgccattgaagccattcacgcctattccttaattcacgatgatttacctgcaatggatgatgacaatctacgtcgtggacatcctacttgtcatatccaatttgatgaagctacagctattcttgcgggcgatgcgctgcaaagtttcgcatttgaaatattaaccaaaacaccgaatatttctgctgaacaaaaactggctttaattcaaattttagcgcaaggcgctggcgtacaaggaatgtgcttagggcaaagtttagatcttatttctgagcataaacagattagtttaagcgaattagaattaatccatcgtaacaaaacgggtgcattgctaattgccgcattaaaattaggtttcatttgttctccacattttaccgacaaaaggttagaacaatccttaacacaatatgcggaagccattggtttagcctttcaagttcaagatgatattttagatattgaaggcgatagtgcagaaattggcaaacaggtgggtgccgatcttgatttagataaaagtacatatccaaaattacttggattaagtggcgcaaaacaaaaagcgcaagatctatatcaaagtgctttgtctgaattagaaaaaattccttttgatacaaccgcacttcgtgcattagctgaattcgttattaccagaaaaagttaa

SEQ ID NO: 111601 - protein, 296 aa, Haemophilus influenzae 86-028NP
MGHFSEELQQVQTRINRFLEAQFEGIESHNALLLEAMKYALLLGGKRVRPFLVYATGQMLGAEKQTLDYAAAAIEAIHAYSLIHDDLPAMDDDNLRRGHPTCHIQFDEATAILAGDALQSFAFEILTKTPNISAEQKLALIQILAQGAGVQGMCLGQSLDLISEHKQISLSELELIHRNKTGALLIAALKLGFICSPHFTDKRLEQSLTQYAEAIGLAFQVQDDILDIEGDSAEIGKQVGADLDLDKSTYPKLLGLSGAKQKAQDLYQSALSELEKIPFDTTALRALAEFVITRKS

SEQ ID NO: 111602 - DNA, 888 bp, Pseudomonas fluorescens Pf-5; identical to SEQ ID NO: 57397
  CDS (1)..(888): transl_table=11

SEQ ID NO: 111603 - protein, 295 aa, Pseudomonas fluorescens Pf-5; identical to SEQ ID NO: 57398

SEQ ID NO: 111604 - DNA, 903 bp, Colwellia psychrerythraea 34H; identical to SEQ ID NO: 57399
  CDS (1)..(903): transl_table=11

SEQ ID NO: 111605 - protein, 300 aa, Colwellia psychrerythraea 34H; identical to SEQ ID NO: 57400

SEQ ID NO: 111606 - DNA, 888 bp, Pseudomonas syringae pv. phaseolicola 1448A
  CDS (1)..(888): transl_table=11
atgatcgcgagctatcaagcgcaaagccagactcgcgtcaacgcagcactcgaaaaactgtttcaggcaccgagccctgagctgaaccggctttacgaagccatgcgctacagcgtgatgaacggcggcaagcgcgtgcgcccgctgctggcctacgcggcctgcgaagcgctgggcggcgtagccgaggatgccaacggtgcctcctgtgcggttgaactgattcacgcttactcgctggtgcacgacgatttaccggcgatggacgatgacgacctgcgtcgcggccagccgaccacgcacaaggctttcgatgaggcctgcgcgatcctcgcaggtgacggcctgcaaagcctggcgttcactgcactgctcgcgccgcacctgacctcacgcgatgccgaaacgcgtctgcagatggtcaataccctcgcagccgctgccggcccggcaggtatggtgggcgggcaggcgatcgatctgggctctgtggggctgaagcttgatcaggcggcgctggaatacatgcatcggcacaagaccggtgcgttgatcgaagccagcgtccggcttggcgcactggccagtggtcaagccgatcagccccgtcttgacgccttgcagatttatgcgcgcgcggtcggtctggcctttcaggttcaggacgacattctcgatgtcgaaagcgatactgcgaccctcggcaagcgtcagggtgccgatatcgcccgcgacaagccgacctaccctgcgttgctgggcctggaagcggccaagcgctatgcactggaactgcgtgatcaggcgctaacagcgctgagcacgttcgatgccgccgcagaaccgttgcgcgagctggcacgctatatcgtcgaacgtcgccactga

SEQ ID NO: 111607 - protein, 295 aa, Pseudomonas syringae pv. phaseolicola 1448A
MIASYQAQSQTRVNAALEKLFQAPSPELNRLYEAMRYSVMNGGKRVRPLLAYAACEALGGVAEDANGASCAVELIHAYSLVHDDLPAMDDDDLRRGQPTTHKAFDEACAILAGDGLQSLAFTALLAPHLTSRDAETRLQMVNTLAAAAGPAGMVGGQAIDLGSVGLKLDQAALEYMHRHKTGALIEASVRLGALASGQADQPRLDALQIYARAVGLAFQVQDDILDVESDTATLGKRQGADIARDKPTYPALLGLEAAKRYALELRDQALTALSTFDAAAEPLRELARYIVERRH

SEQ ID NO: 111608 - DNA, 894 bp, Dechloromonas aromatica RCB; identical to SEQ ID NO: 57401
  CDS (1)..(894): transl_table=11

SEQ ID NO: 111609 - protein, 297 aa, Dechloromonas aromatica RCB; identical to SEQ ID NO: 57402

SEQ ID NO: 111610 - DNA, 885 bp, Ralstonia eutropha JMP134; identical to SEQ ID NO: 57403
  CDS (1)..(885): transl_table=11

SEQ ID NO: 111611 - protein, 294 aa, Ralstonia eutropha JMP134; identical to SEQ ID NO: 57404

SEQ ID NO: 111612 - DNA, 891 bp, Thiobacillus denitrificans ATCC 25259; identical to SEQ ID NO: 57405
  CDS (1)..(891): transl_table=11

SEQ ID NO: 111613 - protein, 296 aa, Thiobacillus denitrificans ATCC 25259; identical to SEQ ID NO: 57406

SEQ ID NO: 111614 - DNA, 930 bp, Anabaena variabilis ATCC 29413; identical to SEQ ID NO: 57407
  CDS (1)..(930): transl_table=11

SEQ ID NO: 111615 - protein, 309 aa, Anabaena variabilis ATCC 29413; identical to SEQ ID NO: 57408

SEQ ID NO: 111616 - DNA, 888 bp, Pseudomonas fluorescens PfO-1
  CDS (1)..(888): transl_table=11
atgattgcagcgtattcggccaccagccaggcacgggtcaatgcggcactggaaaccctgttcaacgctccgctgccagaactggcgcgcctttatgaagccatgcgctacagcgtgatgaacggcggcaaacgcgtgcgcccattgctggcctacgcggcgtgcgaagcccttggcggcaaggccgaacaggccaacggcgcggcgtgtgcggttgagctgatccacgcgtattcgctggtgcacgacgatttgccggcgatggacgacgacgatctgcgtcgcggccagccgaccactcacaagaaattcgacgaagcctgcgcaatcctcgccggcgacggcttgcagagcctggcgttcagtgccctgctcgacccgcgcctgagcgacctgagcgcggacatccgcctgcagcaggtcacagcactggcgcacgcggcgggcccggctggcatggtcggcggtcaggccatcgacctcggttcggtcggcctcaagcttgatcagaaagcgctggaacagatgcaccgacacaagaccggcgcgctgatcgaagtcagcgtcaagctcggcgccctggccagcggctgtgccgagaaggatgaactcaagtccctgcagacttatgcacaggccatcggcctggcattccaggtccaggacgacattctcgacgtcgaaagcgataccgaaaccctcggcaaacgccagggcgccgacatcgcccgcgacaagccgacctacccggcactgctcggtctggacgccgccaaggcctatgcgctggaactgcgcgatcaggccctgcacgcgctgcgaccgtttgacgcggctgccgagccgttgcgcgatctggcccggtatatcgtcgaccggcgcaactga

SEQ ID NO: 111617 - protein, 295 aa, Pseudomonas fluorescens PfO-1
MIAAYSATSQARVNAALETLFNAPLPELARLYEAMRYSVMNGGKRVRPLLAYAACEALGGKAEQANGAACAVELIHAYSLVHDDLPAMDDDDLRRGQPTTHKKFDEACAILAGDGLQSLAFSALLDPRLSDLSADIRLQQVTALAHAAGPAGMVGGQAIDLGSVGLKLDQKALEQMHRHKTGALIEVSVKLGALASGCAEKDELKSLQTYAQAIGLAFQVQDDILDVESDTETLGKRQGADIARDKPTYPALLGLDAAKAYALELRDQALHALRPFDAAAEPLRDLARYIVDRRN

SEQ ID NO: 111618 - DNA, 870 bp, Rhodobacter sphaeroides 2.4.1
  CDS (1)..(870): transl_table=11
gtgagtttttccaaggctttgacggatgcggccgcgcgcgttcaggggcggctcgatgcggcgctggcggatcgcgaggatctgccggtcgtccatgccatgcgctatgcggtgcagggcggcaagcggctgcggggtttcctcgtgctcgaatccgcccggctgcacgggatcgcgcccgaggcggcggtgagtgctgcggcctctatcgaggcgctgcatgcctacagcctcgtgcatgacgacatgccctgcatggacgatgacgacctgcgccgcggcctgccgaccgtgcatcgcaagtgggacgaatgcaccgccgtgctggcgggcgacgcgctgcagactctcgccttcgagctcttggccgatccggcgctcggacccgccgcggtgcggatcgaactggtggcgagccttgcgaaagcctcgggcgccgagggcatggtgctgggccaggcactcgacatcgcggccgagacggctgccgtgcccctcacgctcgatcagatcacccaccttcaggccggcaagactggcgcgctgatccgctggtccgccgaagcgggggcgatcctcgggcaggcggaccgggtgccgctgcgccgatacgccacggccctcgggcttgcgttccagatcgcggacgacattctcgatgtcgagggcgatgcggagaaggcgggcaagcggctccagaaagatgccgaagccgggaaggccaccttcgtctcgcttctcgggctcgacggcgccaaggcgcgggcgcgggctctggtggaggatgccgaggcggcgcttgcgccctatgggccagaggcaggaacattgatcgaggcggcgcgcttcgtcatctcgcgtgaaagctga

SEQ ID NO: 111619 - protein, 289 aa, Rhodobacter sphaeroides 2.4.1
MSFSKALTDAAARVQGRLDAALADREDLPVVHAMRYAVQGGKRLRGFLVLESARLHGIAPEAAVSAAASIEALHAYSLVHDDMPCMDDDDLRRGLPTVHRKWDECTAVLAGDALQTLAFELLADPALGPAAVRIELVASLAKASGAEGMVLGQALDIAAETAAVPLTLDQITHLQAGKTGALIRWSAEAGAILGQADRVPLRRYATALGLAFQIADDILDVEGDAEKAGKRLQKDAEAGKATFVSLLGLDGAKARARALVEDAEAALAPYGPEAGTLIEAARFVISRES

SEQ ID NO: 111620 - DNA, 888 bp, Carboxydothermus hydrogenoformans Z-2901; identical to SEQ ID NO: 57409
  CDS (1)..(888): transl_table=11

SEQ ID NO: 111621 - protein, 295 aa, Carboxydothermus hydrogenoformans Z-2901; identical to SEQ ID NO: 57410

SEQ ID NO: 111622 - DNA, 885 bp, Burkholderia sp. 383
  CDS (1)..(885): transl_table=11
atgacattcgaacaatggatgcggtctgtgcttgaccgtgtcgaggacgcactcggccactatttgcccgctgaaaccgcggtgccggagaaactccacgaggcgatgcgctatgcagtcctcggcggcggcaaacgcgttcgcccgctgctgtgccatgcagcaggcgaactgaccggcgcgacggaagcagcgcgaaatgcagcggcagcggcgctggagatgatccacgtctactcgctcgtgcacgacgacatgccgtgcatggacgacgacgcgctgcgtcgcggcaagccgaccgtgcacgtgcagtacgacgagccgacggcactgctggtcggtgacgcgctgcagtcgcaggcattcgtcgcgctgaccgacgccgctgcgctgtcgccggtgcagcaggccgcgctcgtgcgcgagctggcgctggcaagcggctcgatcggcatggccggcgggcaggcgatcgacctggcgagcgtcggcctcaagctgacgcgcgagcagctcgagacgatgcaccggatgaagacgggcgcactgctgcgcgcggccgtgcggatgggcgcgctggccggcgagacgccgtccgcggaaacgatggctgcgctcgatgtgtacgcgggggccgtgggtctggccttccaggtcgtcgacgacattctcgacgtcacgaccgattcggcgacgctcggcaagacggccggcaaggatgcggcgaatgacaagccgacctatgtatcgatcctcggcctcgaggcgtcgcgcgagctcgcagcgcaactgcgcaccgaagcgcacgacgcgctgaaaccgttcggcgcacgcgcacagcgtctcgccgaacttgccgacctggtagtgaaccgggtcagctga

SEQ ID NO: 111623 - protein, 294 aa, Burkholderia sp. 383
MTFEQWMRSVLDRVEDALGHYLPAETAVPEKLHEAMRYAVLGGGKRVRPLLCHAAGELTGATEAARNAAAAALEMIHVYSLVHDDMPCMDDDALRRGKPTVHVQYDEPTALLVGDALQSQAFVALTDAAALSPVQQAALVRELALASGSIGMAGGQAIDLASVGLKLTREQLETMHRMKTGALLRAAVRMGALAGETPSAETMAALDVYAGAVGLAFQVVDDILDVTTDSATLGKTAGKDAANDKPTYVSILGLEASRELAAQLRTEAHDALKPFGARAQRLAELADLVVNRVS

SEQ ID NO: 111624 - DNA, 891 bp, Synechococcus sp. CC9605; identical to SEQ ID NO: 57411
  CDS (1)..(891): transl_table=11

SEQ ID NO: 111625 - protein, 296 aa, Synechococcus sp. CC9605; identical to SEQ ID NO: 57412

SEQ ID NO: 111626 - DNA, 894 bp, Geobacter metallireducens GS-15; identical to SEQ ID NO: 57413
  CDS (1)..(894): transl_table=11

SEQ ID NO: 111627 - protein, 297 aa, Geobacter metallireducens GS-15; identical to SEQ ID NO: 57414

SEQ ID NO: 111628 - DNA, 915 bp, Desulfovibrio desulfuricans G20; identical to SEQ ID NO: 57415
  CDS (1)..(915): transl_table=11

SEQ ID NO: 111629 - protein, 304 aa, Desulfovibrio desulfuricans G20; identical to SEQ ID NO: 57416

SEQ ID NO: 111630 - DNA, 903 bp, Prochlorococcus marinus str. MIT 9312
  CDS (1)..(903): transl_table=11
atgactgaagctataagcaacatttcagatttcgaagaatatcttaaaaacgcaaaaaaagttgtagaagaagcgcttgatttctccctaggccctgaaaatcctgaaatacttagagagtcaatgagatattctcttttagctggagggaaaagaatacgtccaattttatgtttagcctcttgttcgctggcaggaggagaaccttctttagctgttcctacggctgtagctatagaaatgattcatacaatgtctttaattcatgatgatttgcccgctatggacaatgatgacttaagaagaggtaggccaacaaaccataaagtatatggagatgcaatagctattctcgcaggcgatgctttattaactagagcctttgaaatggtctctttaagaagtccaggagttgatccaaccagattattaaatgtaattggtgaactttccttagtagcaggtgcaccgggtttagttggaggacaagttgttgatttagaatgtgaagggaaagaagttgaccttgaaaccttagagtatattcatcttcacaagactggggctttattgaaagcttgcgtaagaacaggcgcgatgatcgcaggagctaacgaagaaacattacaagctctgacaacatatgcagagggaattggattagccttccaaataatagatgatattcttgatttaacttcaagcagtgaaaagcttggcaaaactgccggcaaagatcttttagctgacaaaactacttaccctaaattacttggaatggaggagtcaaagaaaagagcatttgatttagtagaaaacgcaaaaaaagcaattaaaccttggggggcagatgcaaagtatttaatatcattagccgactttattacaaatagagacaggtaa

SEQ ID NO: 111631 - protein, 300 aa, Prochlorococcus marinus str. MIT 9312
MTEAISNISDFEEYLKNAKKVVEEALDFSLGPENPEILRESMRYSLLAGGKRIRPILCLASCSLAGGEPSLAVPTAVAIEMIHTMSLIHDDLPAMDNDDLRRGRPTNHKVYGDAIAILAGDALLTRAFEMVSLRSPGVDPTRLLNVIGELSLVAGAPGLVGGQVVDLECEGKEVDLETLEYIHLHKTGALLKACVRTGAMIAGANEETLQALTTYAEGIGLAFQIIDDILDLTSSSEKLGKTAGKDLLADKTTYPKLLGMEESKKRAFDLVENAKKAIKPWGADAKYLISLADFITNRDR

SEQ ID NO: 111632 - DNA, 906 bp, Synechococcus elongatus PCC 7942; identical to SEQ ID NO: 57417
  CDS (1)..(906): transl_table=11

SEQ ID NO: 111633 - protein, 301 aa, Synechococcus elongatus PCC 7942; identical to SEQ ID NO: 57418

SEQ ID NO: 111634 - DNA, 918 bp, Rhodospirillum rubrum ATCC 11170; identical to SEQ ID NO: 57419
  CDS (1)..(918): transl_table=11

SEQ ID NO: 111635 - protein, 305 aa, Rhodospirillum rubrum ATCC 11170; identical to SEQ ID NO: 57420

SEQ ID NO: 111636 - DNA, 894 bp, Moorella thermoacetica ATCC 39073; identical to SEQ ID NO: 57421
  CDS (1)..(894): transl_table=11

SEQ ID NO: 111637 - protein, 297 aa, Moorella thermoacetica ATCC 39073; identical to SEQ ID NO: 57422

SEQ ID NO: 111638 - DNA, 885 bp, Burkholderia thailandensis E264; identical to SEQ ID NO: 57423
  CDS (1)..(885): transl_table=11

SEQ ID NO: 111639 - protein, 294 aa, Burkholderia thailandensis E264; identical to SEQ ID NO: 57424

SEQ ID NO: 111640 - DNA, 927 bp, Syntrophus aciditrophicus SB; identical to SEQ ID NO: 57425
  CDS (1)..(927): transl_table=11

SEQ ID NO: 111641 - protein, 308 aa, Syntrophus aciditrophicus SB; identical to SEQ ID NO: 57426

SEQ ID NO: 111642 - DNA, 912 bp, Novosphingobium aromaticivorans DSM 12444
  CDS (1)..(912): transl_table=11
atgtcggctgacacgtcggaaggaccgggcctcctcaagccagcccttgcggctatcgccgaggacatcgaccgcagcttcgacctgctgctgccggtcccgggcgacccgcgcgaccggctggtcgaagccatgcgctatgcggccattggtggcggcaagcggctgcgcccgttgctggtctgcgcgaccggcgccctgcacggcgtttcgcgcgaggcggcggtgcgggtcggcacggcgatcgaggccatccacgtctattcgctgatccacgacgacctgccctgcatggacaatgacgggctgcgccatggcaagcccaccgtccacgtggcgttcgacgatgcaaccgcggtgctggccggcgatgccctgcacgacttcgctttcgaagtgttgtccgatcccgcgaccagcggcgaccctttcacgcggatcgaactgatccgcacgcttgccaccgcgagcggcatgaacggcatgtgcggcgggcagatgatggacatcgtcgccgagacttccagtttcgacctgcccaccgtgacccggctccagcagctcaagacgggcgcattgctgggcgcatctgtggaactgggcgcgatccttgggaaggtgccgcccgaagggcgcacccatctgcgtggctatgcgcgcgacatcggccttgccttccagatcgcggatgacctgctcgacgccgaaggcgacgaagccgccgccggcaaggcgctgcgcaaggacgccgcgcagggcaaggagaccttcctgtcgctgctgggcgccgatcgcgctcgtgaacaggcccgactgctggtgaaccaggcggtcgaacatcttgcaagctatggtcccgaagcggacctgctgcgcgaacttgcgcgcttcatcgtggagaggaaccactga

SEQ ID NO: 111643 - protein, 303 aa, Novosphingobium aromaticivorans DSM 12444
MSADTSEGPGLLKPALAAIAEDIDRSFDLLLPVPGDPRDRLVEAMRYAAIGGGKRLRPLLVCATGALHGVSREAAVRVGTAIEAIHVYSLIHDDLPCMDNDGLRHGKPTVHVAFDDATAVLAGDALHDFAFEVLSDPATSGDPFTRIELIRTLATASGMNGMCGGQMMDIVAETSSFDLPTVTRLQQLKTGALLGASVELGAILGKVPPEGRTHLRGYARDIGLAFQIADDLLDAEGDEAAAGKALRKDAAQGKETFLSLLGADRAREQARLLVNQAVEHLASYGPEADLLRELARFIVERNH

SEQ ID NO: 111644 - DNA, 882 bp, Staphylococcus aureus subsp. aureus NCTC 8325; identical to SEQ ID NO: 57427
  CDS (1)..(882): transl_table=11

SEQ ID NO: 111645 - protein, 293 aa, Staphylococcus aureus subsp. aureus NCTC 8325; identical to SEQ ID NO: 57428

SEQ ID NO: 111646 - DNA, 843 bp, Anaplasma phagocytophilum HZ
  CDS (1)..(843): transl_table=11
atgatgcgttgccacataaaggaacgcgtgaaagacttctctaatttggtaggaaaagagcttacaaaactcattgaaacgcaggtcactggagggcctgctgcaggcctggtagacgcaatcggctattgtatactccctccaggtaagtgtctgcgtgcttttcttgcaagttccgttgctcaaacctttggtgtaagcatagagagaactttgcccctgtgtcttgcaattgaggtgcttcactcttactcccttgtacatgatgacttaccatctatggataatgcgcctactaggaggggtaagaatagttgccatatagagcatggagaagcgttagcactcctcacaggggacgctttgctgacgttaacgtttgaattattgtcttccatggatgaaagttgcactgttaaatgcgctataatcagagttatttccgatgcctgtgggcaccgtggtatggttgcaggacaagcacttgatatgggaaatttagaaccctcactggaggctgtaaagcaaattcacaaattgaaaacagctcgattattctctgctgcatgtgaatctggagcaatactagctgaggtttctactgccaaccagcaagcattggcatcctatggtgagaccttggggtgcgcatttcaagctaaggacgatttatgtgatataaatgaagatgatagctgcctgaacattgctcgcatattaggtagggaaaagacgcttgaatacatagactatttgttacatcaaagcgaggagtatctagaaagaattgatgaagataccgcagtgttgaaggaacttgttgcgtttataagaaatttgtga

SEQ ID NO: 111647 - protein, 280 aa, Anaplasma phagocytophilum HZ
MMRCHIKERVKDFSNLVGKELTKLIETQVTGGPAAGLVDAIGYCILPPGKCLRAFLASSVAQTFGVSIERTLPLCLAIEVLHSYSLVHDDLPSMDNAPTRRGKNSCHIEHGEALALLTGDALLTLTFELLSSMDESCTVKCAIIRVISDACGHRGMVAGQALDMGNLEPSLEAVKQIHKLKTARLFSAACESGAILAEVSTANQQALASYGETLGCAFQAKDDLCDINEDDSCLNIARILGREKTLEYIDYLLHQSEEYLERIDEDTAVLKELVAFIRNL

SEQ ID NO: 111648 - DNA, 804 bp, Ehrlichia chaffeensis str. Arkansas
  CDS (1)..(804): transl_table=11
atgaaacatcatagtagcttactcgtcaaacaactagaaagtattctaccagaaaataatcaagatatattattaacatccatgaggtattctatgtttgcacctggcaagcatatacgtccttttctcgttaatgcttctgcccaaatattcaacgttaatgtagatagaattctacctgtcagtgcagctgtagaaattatacatgtttattcattaatacatgatgatttaccaggtatagataacgaaaacatacgtcgaggacaagcaagttcccacaaaaaatttaacgaagcaattgcaatattaactggtgacgcactattaactctagcatttgaaatattatcaacaattgatgaatcaccatttatacgttgctgtatgataaaagcattagctaaagctttaggttatcaaggcatgatacaaggacaaatacttgatacagaaactatagcaaaagacacaaatgatatacaagccatccacgtgttgaaaacagcccaatttttctctgtagcatgtgaattaggaggaatattagggaatgcatcaaatattgaattaaatgctctagctaactacggattaaaccttggacatgcttttcaagtaaaagatgacattgctgacgcaaatcaggataaatcaaaaaacaacatcctcaatatattaaataacgaagatgctcaaaactatcttaatagcttgatagacaaatctatcgaacatttaactattctttcacataaagcagatatcctacacagtttagctgagtttataagaaatttataa

SEQ ID NO: 111649 - protein, 267 aa, Ehrlichia chaffeensis str. Arkansas
MKHHSSLLVKQLESILPENNQDILLTSMRYSMFAPGKHIRPFLVNASAQIFNVNVDRILPVSAAVEIIHVYSLIHDDLPGIDNENIRRGQASSHKKFNEAIAILTGDALLTLAFEILSTIDESPFIRCCMIKALAKALGYQGMIQGQILDTETIAKDTNDIQAIHVLKTAQFFSVACELGGILGNASNIELNALANYGLNLGHAFQVKDDIADANQDKSKNNILNILNNEDAQNYLNSLIDKSIEHLTILSHKADILHSLAEFIRNL

SEQ ID NO: 111650 - DNA, 882 bp, Francisella tularensis subsp. holarctica
  CDS (1)..(882): transl_table=11
atgagtagtgaaaatataataaaagatttcgaaatttttgctgaaaaggtatttgatcaacttaactgtgtatccaaaactttactaagtgcaatgcactatagcttttttagtggtggcaaaagaataagagcacaatttgtttatgctattggtgaagctctagctatagataagtcaaactgtgataaaatcgcatttgcagtagagtctattcatacctactcactaatacatgatgatcttcctgctatggataacgatactctacgtaggggcaaaccaacttgtcatatcaaatttaatgaagctactgcaatcttagcgggcgatgctttacaagcattagcttttgaaatattacaagatatcaactactcagacatagataaactaaaaaaaataaataaactttttgctcaatactgtggtgctagtggtatggttggtggtcaacaactagatattgagggtgagaataaaaaacttaaaattgaagaattacaaatattacatatcaataaaactgcaaaaatgtttagagcatgtatagttttaccttatattctctcacaaaatcaaaatagccaaatagaagatttattagtaaggttatcagacttaataggcttatgttttcagatcaaagatgatatcttagatgtcactaagacaactaacgagctaggaaaaactagcgctaaagatatagatgccaataaatcaacctatgtatcattaatgggattaaaagacgcaaataaatatttactagataaaaaaaatgaaatcacacaaattatcactaagctaaaaaataataatttcagttcaactagtcttgaaaatctcattgatttagttattaatagaaactgttag

SEQ ID NO: 111651 - protein, 293 aa, Francisella tularensis subsp. holarctica
MSSENIIKDFEIFAEKVFDQLNCVSKTLLSAMHYSFFSGGKRIRAQFVYAIGEALAIDKSNCDKIAFAVESIHTYSLIHDDLPAMDNDTLRRGKPTCHIKFNEATAILAGDALQALAFEILQDINYSDIDKLKKINKLFAQYCGASGMVGGQQLDIEGENKKLKIEELQILHINKTAKMFRACIVLPYILSQNQNSQIEDLLVRLSDLIGLCFQIKDDILDVTKTTNELGKTSAKDIDANKSTYVSLMGLKDANKYLLDKKNEITQIITKLKNNNFSSTSLENLIDLVINRNC

SEQ ID NO: 111652 - DNA, 870 bp, Desulfitobacterium hafniense Y51; identical to SEQ ID NO: 57429
  CDS (1)..(870): transl_table=11

SEQ ID NO: 111653 - protein, 289 aa, Desulfitobacterium hafniense Y51; identical to SEQ ID NO: 57430

SEQ ID NO: 111654 - DNA, 888 bp, Saccharophagus degradans 2-40; identical to SEQ ID NO: 57431
  CDS (1)..(888): transl_table=11

SEQ ID NO: 111655 - protein, 295 aa, Saccharophagus degradans 2-40; identical to SEQ ID NO: 57432

SEQ ID NO: 111656 - DNA, 891 bp, Methylobacillus flagellatus KT; identical to SEQ ID NO: 57433
  CDS (1)..(891): transl_table=11

SEQ ID NO: 111657 - protein, 296 aa, Methylobacillus flagellatus KT; identical to SEQ ID NO: 57434

SEQ ID NO: 111658 - DNA, 885 bp, Ralstonia metallidurans CH34; identical to SEQ ID NO: 57437
  CDS (1)..(885): transl_table=11

SEQ ID NO: 111659 - protein, 294 aa, Ralstonia metallidurans CH34; identical to SEQ ID NO: 57438

SEQ ID NO: 111660 - DNA, 948 bp, Acidobacteria bacterium Ellin345; identical to SEQ ID NO: 57439
  CDS (1)..(948): transl_table=11

SEQ ID NO: 111661 - protein, 315 aa, Acidobacteria bacterium Ellin345; identical to SEQ ID NO: 57440

SEQ ID NO: 111662 - DNA, 864 bp, Silicibacter sp. TM1040
  CDS (1)..(864): transl_table=11
atgacagcagggtttaccgctgcgctcttgcaggcgcagacgcagatcttaaaccatatggaccgtcgcctgccgcaggcggacctgttgcatcaggcaatggattacgccttgcggggcggcaagatgcttcgggggttcctcgttctggagagcgcgcgtttgcatgacgtgcctgaaacggctgcgatcgaagcggcactcgcgattgagtgcattcatgcctactcgcttgtgcatgacgacctgcctgcgatggatgacgatgatctgcgccgaggccagccgacgctgcatcgcaaatgggacgaggccaccgccgtgcttgccggggacagcctgcaaacattggcgtttgaactgctcgctcgcgacagcgttggacccaatgcgctcagcctcatccgcacccttgcccaagcggcgggcaaggacggaatggtctctggtcagatgatggacatcgcggctgaaacggcagaaaccccgctgacgcttgatgaaatcacgaccctccaggcccgcaagacaggctgtttgatcgaatggtccgcatgtgccggagcgcggcttgccggggcagatccggcgccactgcgtcactatgcccaagcacttgggctggcttttcagatcgcggacgacatcttagatgtagaaggcgatgcagcgaccgtcggcaaagctgtgcgcaaagatgctgatgcgggcaaagccacattcgtgtcgcatcttgggcttgaaggcgcaaaacaccgcgctcgagagttggctgacctagcctgcgcagcccttgccccctatggcgcggcaggcgacaccttgaaggacgccgcccgcttcgttatctcgcgcgacagctaa

SEQ ID NO: 111663 - protein, 287 aa, Silicibacter sp. TM1040
MTAGFTAALLQAQTQILNHMDRRLPQADLLHQAMDYALRGGKMLRGFLVLESARLHDVPETAAIEAALAIECIHAYSLVHDDLPAMDDDDLRRGQPTLHRKWDEATAVLAGDSLQTLAFELLARDSVGPNALSLIRTLAQAAGKDGMVSGQMMDIAAETAETPLTLDEITTLQARKTGCLIEWSACAGARLAGADPAPLRHYAQALGLAFQIADDILDVEGDAATVGKAVRKDADAGKATFVSHLGLEGAKHRARELADLACAALAPYGAAGDTLKDAARFVISRDS

SEQ ID NO: 111664 - DNA, 894 bp, Myxococcus xanthus DK 1622; identical to SEQ ID NO: 57441
  CDS (1)..(894): transl_table=11

SEQ ID NO: 111665 - protein, 297 aa, Myxococcus xanthus DK 1622; identical to SEQ ID NO: 57442

SEQ ID NO: 111666 - DNA, 900 bp, Rubrobacter xylanophilus DSM 9941
  CDS (1)..(900): transl_table=11
atggagaacctggctagcgccgggcgctgggagcggcaccggaggatcttcgaggagtacctggaggggctgcgcttcaccgaagagcccgccctcgagcggctgcaggaggcgatgcgctactcgctgcttgccgggggaaagcgcgtgaggcccctcctctgcatggagagcgcccgcctcttcggcgctcccccggagagggtgctcccctccgccgccgccatagagctgatccacacctactccctcatccacgacgaccttcccgcgatggacaacgacgacttccgcaggggcaggcccaccagccacaagaagttcggggaggcgatggccatcctggcgggcgacgccttcttcggggaggcgctcacgctcatcaccgtcaggcaggagggcacctgcgagcagcggctcggggtggtgcaggagctcgcgagctccaccggcgtcaacggcatggtcggcgggcaggtgctcgacatggaccagaccggggcgggcgggagcgccgaccccgggatgctgttcatgatccaccgctacaagaccggcgcgctcataaggtccagcgcgcgggtgggcgccatcctggccggggcgggcgaggaggggctcgaggccatctcgcggtacgccacggagcttgggctgtgcttccagatagtggatgacgtgctggacgcggtgggcagcagcgagcggctgggcaagcgggccgggggggacgccgagcggggcaaggccacgtttgtgagcgtgtttgggctcgagggggccaggagggaggccgacgccgcctgcgagcgggcgctgcgggcgctcgggcgcctggaaggccgggacacctccgccctcggggagctcgcgctcttcgtccgccaccgggggagctag

SEQ ID NO: 111667 - protein, 299 aa, Rubrobacter xylanophilus DSM 9941
MENLASAGRWERHRRIFEEYLEGLRFTEEPALERLQEAMRYSLLAGGKRVRPLLCMESARLFGAPPERVLPSAAAIELIHTYSLIHDDLPAMDNDDFRRGRPTSHKKFGEAMAILAGDAFFGEALTLITVRQEGTCEQRLGVVQELASSTGVNGMVGGQVLDMDQTGAGGSADPGMLFMIHRYKTGALIRSSARVGAILAGAGEEGLEAISRYATELGLCFQIVDDVLDAVGSSERLGKRAGGDAERGKATFVSVFGLEGARREADAACERALRALGRLEGRDTSALGELALFVRHRGS

SEQ ID NO: 111668 - DNA, 900 bp, Rubrobacter xylanophilus DSM 9941; identical to SEQ ID NO: 57443
  CDS (1)..(900): transl_table=11

SEQ ID NO: 111669 - protein, 299 aa, Rubrobacter xylanophilus DSM 9941; identical to SEQ ID NO: 57444

SEQ ID NO: 111670 - DNA, 918 bp, Mesorhizobium sp. BNC1
  CDS (1)..(918): transl_table=11
atggaagagatgacaatccccaccttcgaaagcctgctggccttgaacgcgcaatcggtcgaggaccttctgcgccacctccttgacgagcgcgtgcgcgagggggaaattctgcgtcccagccacttgttggcggcgatgcgccatggcgtactgaacgggggcaagcggctccggccattccttgtactggaaagcgcggcgctcttcgaagcacaagggatggcctccctgcgcgtcgcggcagcgcttgaatgcgtgcactgctattcattgattcatgacgacctgccggcgatggacgatgatgacctccgccggggccagcccaccgtgcaccgcgccttcgatgaagcaacggccatcctcgcgggtgacagtctgctcacatacgcctttgacatcatcgccgacgcggaaacggatcttcggccggaaataagggcggatttggtggtgaaattggccacagcggcgggcatgggcggcatggcaggcgggcaggcacttgatctgctggccgagaaggtcccgcccgacgaagtcgggattgtgcagctccaggccatgaagacgggagcgctgtttcggttcgcttgcgaagcgggtgcaattgttgctgatgccagcagcgccgatcgcgagcggatgtcctctttcggcgcggcgatcggtctcgcatttcagctggccgacgatctgctggaccttacggcaagtgccgatgccgtgggcaaggcgaccgggaaggacgccgcagccggcaaggccactctcgctgccctgcacggtgaggagtgggtacgcgcgcagcttgtaggcttggtggcacaggcggaaggtctgcttgagccctatggagaaagagcggccgtgctgcgccacgccgcacgcttcgtagcccagcgaaaccgatga

SEQ ID NO: 111671 - protein, 305 aa, Mesorhizobium sp. BNC1
MEEMTIPTFESLLALNAQSVEDLLRHLLDERVREGEILRPSHLLAAMRHGVLNGGKRLRPFLVLESAALFEAQGMASLRVAAALECVHCYSLIHDDLPAMDDDDLRRGQPTVHRAFDEATAILAGDSLLTYAFDIIADAETDLRPEIRADLVVKLATAAGMGGMAGGQALDLLAEKVPPDEVGIVQLQAMKTGALFRFACEAGAIVADASSADRERMSSFGAAIGLAFQLADDLLDLTASADAVGKATGKDAAAGKATLAALHGEEWVRAQLVGLVAQAEGLLEPYGERAAVLRHAARFVAQRNR

SEQ ID NO: 111672 - DNA, 978 bp, Cytophaga hutchinsonii ATCC 33406
  CDS (1)..(978): transl_table=11
atgttacttactacggaacgattaaccaaagacatttcaaaagctatttcaaaagctgaatttggtaaagaacccacagaactatacgaaccgatccgatacattatggatttaggaggaaagcgcatgcgcccgctcctgaccattctgtctaattatatcttcaccgaagatacgaataacgttatgaatgctgccattgcggttgaagtgttccacaattttacgctcatgcacgatgatatcatggacaacgctcccttgcgcagaggaaaggcaaccgtgcatgcaaaatggaataccaacatcgcaatcctttccggtgatgtaatgctggttgaagcatacaaacaattgatgaccattgatgagaaatacctgaaacaggtgctggatcgttttaacgaaacagctgcaggtgtttgtgaaggacagcagtttgatatgaattttgaatcgctgcctactatttcggttgatgattatattaacatgatccgcctgaaaactgctgtgttattaggtttcagcatggagcttggcggtattcttggagatgcggacgaaaaaagctgtacgtatttaaacacggttggaatctctgccggcattgggtttcagttaaaagatgatctgctggatgtgtatggtgacgctgctacctttggtaaacaggttggcggtgatatccttgcaaacaaaaaaacgtttttactgatccgtgcgcttgaaaaagcagcaggcaaaacaaagaaagatctggaaaagctattgacggataaaaccatttcagacaaggctaagattgaaggtgtaaccaatatctacgatcagttaggcattaaagaagaaacggaagcattgattcagcagcattttaatacagctattgagtcactgggcaaagtaaaaggatctattttccgcaaacattatattaaagattacctgcttgcactcattggccgcgaacaataa

SEQ ID NO: 111673 - protein, 325 aa, Cytophaga hutchinsonii ATCC 33406
MLLTTERLTKDISKAISKAEFGKEPTELYEPIRYIMDLGGKRMRPLLTILSNYIFTEDTNNVMNAAIAVEVFHNFTLMHDDIMDNAPLRRGKATVHAKWNTNIAILSGDVMLVEAYKQLMTIDEKYLKQVLDRFNETAAGVCEGQQFDMNFESLPTISVDDYINMIRLKTAVLLGFSMELGGILGDADEKSCTYLNTVGISAGIGFQLKDDLLDVYGDAATFGKQVGGDILANKKTFLLIRALEKAAGKTKKDLEKLLTDKTISDKAKIEGVTNIYDQLGIKEETEALIQQHFNTAIESLGKVKGSIFRKHYIKDYLLALIGREQ

SEQ ID NO: 111674 - DNA, 873 bp, Clostridium perfringens ATCC 13124
  CDS (1)..(873): transl_table=11
atgaatattaatagcttaaaagaggaagttgatcaatctttaaaagcttattttaataaagatagagaatacaataaagttttatatgattcaatggcatatagcataaacgtaggaggaaaaagaataagaccaatcttaatgcttttatcttactatatttataaaagtgattataaaaaaatattaacacctgcaatggccatagaaatgatacacacttattctttaatacatgatgatttaccatgtatggacaatgatgatttaagaagaggaaaacctacaaatcataaggtttttggagaagctattgctgttttagctggagatgctcttttaaatgaagctatgaaaattttagttgattattctttagaagaaggaataagtgcattaaaggcaactaaaataattgcagatgcagcaggatcagatggaatgattggtggtcaaattgttgatataataaatgaagataaggaagaaatttctttaaaagaattagattatatgcatttaaagaaaactggagaacttataaaagcttcaataatgtctggagcggttttagcagaagcttcagagggagatattaaaaaattagaggattttggatataagttaggcttagcatttcaaataaaagatgatatattagatgtagtgggaaatgcaaaagatttagggaagaatgttcacaaagaccaagaaagcaataaaaataattatataaccatttttggattagaagagtgtaagaaaaaatgcgtgaatataactgaggaatgtatagagatattaagttcaatagaaggaaatacagagcctctaaaagttttaaccatgaaacttttagagagaaaattttaa

SEQ ID NO: 111675 - protein, 290 aa, Clostridium perfringens ATCC 13124
MNINSLKEEVDQSLKAYFNKDREYNKVLYDSMAYSINVGGKRIRPILMLLSYYIYKSDYKKILTPAMAIEMIHTYSLIHDDLPCMDNDDLRRGKPTNHKVFGEAIAVLAGDALLNEAMKILVDYSLEEGISALKATKIIADAAGSDGMIGGQIVDIINEDKEEISLKELDYMHLKKTGELIKASIMSGAVLAEASEGDIKKLEDFGYKLGLAFQIKDDILDVVGNAKDLGKNVHKDQESNKNNYITIFGLEECKKKCVNITEECIEILSSIEGNTEPLKVLTMKLLERKF

SEQ ID NO: 111676 - DNA, 891 bp, Haemophilus somnus 129PT
  CDS (1)..(891): transl_table=11
atgtatcaatttgctcaagatctccaagaatccaaacaacgaattaatttttttttagaaaaacaattcgagtgcattgatagttctccatctcctttagctgaggcgatgaaatatggattattgttaggtggaaaacgtattcgcccctttttagtttatgcaacaggaaaaatgctcggagcgaatttaattcaattagattatgcagcagcggctattgaagctattcatgcttactcactcattcatgatgatcttccggctatggataatgattcactccgtcgtggacacccaacttgccatattgcctttgatcatgctaccgctattcttgccggcgatgctttacaaccttttgcttttgagctgttaactcaaacacccgatttgtctgccgaacaaaaattagctttagttcaaactttagccaatgcttctggtgttaaaggtatgtgtttagggcaaagtttagatttaatctcagagaatcaacaaattaatttatccgcacttgaaaagatacatcgcaataaaacaggtgccttgttgtcagctgcggtgaagatggggtttatttgttctccgcactttgcaaatataaaattagaagaacaattaatgcactactcctctgctgtgggtttagcttttcaggtacaagatgatattttagatattgaaggtgaaagtatagtgattggaaaaactgccggatctgatctccttgccgataaaagtacttatccaaaacttataggtttagatggtgcaaaacagaaggcacgagaactttatcatcaagcactacaagaattggatgctttgccttttgacacttcagcattacatgcactcgctgagtttgtcgtaaatcgacaaagctaa

SEQ ID NO: 111677 - protein, 296 aa, Haemophilus somnus 129PT
MYQFAQDLQESKQRINFFLEKQFECIDSSPSPLAEAMKYGLLLGGKRIRPFLVYATGKMLGANLIQLDYAAAAIEAIHAYSLIHDDLPAMDNDSLRRGHPTCHIAFDHATAILAGDALQPFAFELLTQTPDLSAEQKLALVQTLANASGVKGMCLGQSLDLISENQQINLSALEKIHRNKTGALLSAAVKMGFICSPHFANIKLEEQLMHYSSAVGLAFQVQDDILDIEGESIVIGKTAGSDLLADKSTYPKLIGLDGAKQKARELYHQALQELDALPFDTSALHALAEFVVNRQS

SEQ ID NO: 111678 - DNA, 951 bp, Trichodesmium erythraeum IMS101; identical to SEQ ID NO: 57445
  CDS (1)..(951): transl_table=11

SEQ ID NO: 111679 - protein, 316 aa, Trichodesmium erythraeum IMS101; identical to SEQ ID NO: 57446

SEQ ID NO: 111680 - DNA, 939 bp, Synechococcus sp. CC9311; identical to SEQ ID NO: 57447
  CDS (1)..(939): transl_table=11

SEQ ID NO: 111681 - protein, 312 aa, Synechococcus sp. CC9311; identical to SEQ ID NO: 57448

SEQ ID NO: 111682 - DNA, 882 bp, Shewanella sp. MR-4
  CDS (1)..(882): transl_table=11
gtgttagtcaatgcaataaaagaatatcaactacgggttgatgaccaattaaaacaacgtttcagcacactcgaagacactgcgccacaattaaaggccgccatgagccacggcgcactgttaggtggcaagcgtattcgtccctttttggtttacagtgtggggcaaatgtttggcgtgccgctcgaaaagctcgatgcctgcgccgccgccattgaatgtattcatgcttattcgttaatccatgacgatttacccgccatggacgatgacgaccttcgtcgtggtcagcccacagtgcatatcgccttcgatgaggcgaccgccatccttgctggggatgctctgcaaaccttagcctttgaaattgttaccgaagcagtaactgggatcagcagcgagcaacatatcgctatggtgagagcgctggccaaagcctcgggttaccgtggtatgtgtggcggccaagcgattgacttagcctcaaccgataagctcattgaccttaaggccctaactcaactccacaatatgaaaacgggcgcccttatcagctgcgccgttgagttagccttgattgccgctaatgcgccaaaagatgaatatcagactatgatagaatttgcccatgcggtaggacttgccttccaagtgcaagacgatattctggacatcattgccaccacggaagaactcggcaaaccccaaggctcagacgccgagtccaataagagtacttttccgcaactacttggactgcaaggcgccaaagataccgccgcgcaactgatccaagaggcactatcagcgctggctaaattgccatacaatagccagttaatcgcagacttcgcccgctatatcattgagcgaagaatataa

SEQ ID NO: 111683 - protein, 293 aa, Shewanella sp. MR-4
MLVNAIKEYQLRVDDQLKQRFSTLEDTAPQLKAAMSHGALLGGKRIRPFLVYSVGQMFGVPLEKLDACAAAIECIHAYSLIHDDLPAMDDDDLRRGQPTVHIAFDEATAILAGDALQTLAFEIVTEAVTGISSEQHIAMVRALAKASGYRGMCGGQAIDLASTDKLIDLKALTQLHNMKTGALISCAVELALIAANAPKDEYQTMIEFAHAVGLAFQVQDDILDIIATTEELGKPQGSDAESNKSTFPQLLGLQGAKDTAAQLIQEALSALAKLPYNSQLIADFARYIIERRI

SEQ ID NO: 111684 - DNA, 882 bp, Shewanella sp. MR-7
  CDS (1)..(882): transl_table=11
gtgttagtcaatgcaataaaagaatatcaactacgggttgatgaccaattaaaacaacgtttcagcacactcgaagacactgcggcacaattaaaggccgccatgacccacggcgcgctgttaggcggtaagcgtattcgtcccttcttggtttacagtgtggggcaaatgtttggcgtgtcgcttgaaaagctcgacgcctgcgccgccgccattgagtgtattcatgcttattcgttaatccatgacgatttacccgccatggacgatgacgaccttcgtcgtggtcaacccacagtgcatatcgccttcgatgaggcgaccgcgattctcgctggggatgccctgcaaaccttagcctttgaaattgttaccgaagctgtaccagggatcagcagcgagcagcatatcgctatggtgagagcgctggcgaaagcctcgggttaccgtggtatgtgtggcggccaagcgattgacttagcctcaaccgataagctcatcgaccttaaggccctaactcaactccacaatatgaaaacgggcgcccttatcagctgcgccgttgagttagccctgattgccgctaatgcgccaaaagatgaatatcagactatgatggaatttgcccatgcggtaggacttgccttccaagtgcaagacgatattctggacatcattgccaccacggaagaactcggcaaaccccaaggctctgacgccgagtccaataagagtacttttccgcaactacttggactgcaaggcgccaaagataccgccgcgcaactgatccaagaggcactatcagcgctggctaaattgccatacaatagccagttaatcgcagacttcgcccgctatatcattgagcgaagaatataa

SEQ ID NO: 111685 - protein, 293 aa, Shewanella sp. MR-7
MLVNAIKEYQLRVDDQLKQRFSTLEDTAAQLKAAMTHGALLGGKRIRPFLVYSVGQMFGVSLEKLDACAAAIECIHAYSLIHDDLPAMDDDDLRRGQPTVHIAFDEATAILAGDALQTLAFEIVTEAVPGISSEQHIAMVRALAKASGYRGMCGGQAIDLASTDKLIDLKALTQLHNMKTGALISCAVELALIAANAPKDEYQTMMEFAHAVGLAFQVQDDILDIIATTEELGKPQGSDAESNKSTFPQLLGLQGAKDTAAQLIQEALSALAKLPYNSQLIADFARYIIERRI

SEQ ID NO: 111686 - DNA, 921 bp, Alkalilimnicola ehrlichei MLHE-1; identical to SEQ ID NO: 57449
  CDS (1)..(921): transl_table=11

SEQ ID NO: 111687 - protein, 306 aa, Alkalilimnicola ehrlichei MLHE-1; identical to SEQ ID NO: 57450

SEQ ID NO: 111688 - DNA, 888 bp, Hyphomonas neptunium ATCC 15444
  CDS (1)..(888): transl_table=11
gtgacgaacttcgagcagcgcctcacggaagttgccgacaaggtgaccgtggcgctcgatcagttgatcccgcctgccagtgggcctgaagccaatctcatgcgcgccatgcgccatgccgcgttggccaatggcaaacggatgcggcctttctttgtgctggaaacgggcgccatgtttggcgcgtcagagaagagcctgttgcggacggcagcggcgctggaatgcattcactgctattccctggtacacgatgatctgccctgcatggacgatgatgatttccggcgggggcaacccacggttcacaaggcgtttgatgaggcgacggctgttctggccggggacgcgctgctgacgctggcgttcaagatactggcgtcgagcgagacgcatgatgacccggcggtgcgagtgttgctgattgaacggctggcggacgcggcgggcgcgcggggtatggtgggcggccagatgatcgacatgctggaagaggaaagcccccgcgatctcaacacgatcacccgtatgcagcggctgaagaccggggctctgatttcgtatgcgctggaagctgggggcatcatcgggcatgcccgagaagccgagcgcaatgcgctggcgggctttgccaatgatctggggctggcctaccagattgccgatgacatcctggatgccgagggcgacgaaagcatcgtcgggaaggctgtttccaaggacaaagacgccgggaaggcgaattttgtgacccttctcggggtggacggggcgcggcagagggtgcggctgctcgccgcgcaagccaaggaacatttggcaattttccgtgacaaggcccacatcctgctgcattccgttgattatgtgctgaacagaccccgttaa

SEQ ID NO: 111689 - protein, 295 aa, Hyphomonas neptunium ATCC 15444
MTNFEQRLTEVADKVTVALDQLIPPASGPEANLMRAMRHAALANGKRMRPFFVLETGAMFGASEKSLLRTAAALECIHCYSLVHDDLPCMDDDDFRRGQPTVHKAFDEATAVLAGDALLTLAFKILASSETHDDPAVRVLLIERLADAAGARGMVGGQMIDMLEEESPRDLNTITRMQRLKTGALISYALEAGGIIGHAREAERNALAGFANDLGLAYQIADDILDAEGDESIVGKAVSKDKDAGKANFVTLLGVDGARQRVRLLAAQAKEHLAIFRDKAHILLHSVDYVLNRPR

SEQ ID NO: 111690 - DNA, 915 bp, Rhizobium leguminosarum bv. viciae 3841; identical to SEQ ID NO: 57451
  CDS (1)..(915): transl_table=11

SEQ ID NO: 111691 - protein, 304 aa, Rhizobium leguminosarum bv. viciae 3841; identical to SEQ ID NO: 57452

SEQ ID NO: 111692 - DNA, 888 bp, Pseudomonas aeruginosa UCBPP-PA14
  CDS (1)..(888): transl_table=11
atgatcgcggcctaccaggcgcgctgccaggcgcgcgtcgatgccgccctggacgccctgttcgtcgctccccgcgaagaactgcaacgcctctacgaggccatgcgctacagcgtgatgaacggtggcaagcgagttcgcccgctgctcgcctacgccgcctgcgaggccctcggcggtgcgccgcagcgcgccgacgccgcggcctgcgcagtggagctgatccatgcctactcgctggtccacgacgacctgccggcgatggacgacgacgacctgcgccgtggccagccgaccacccaccgggccttcgacgaagccaccgcgatcctcgccgccgacggcttgcaggcgctagccttcgaagtgctcgccgacacccggcgcaatccacaggaacatgccgtctgtctggaaatgctcacccgcctggcgcgcgccgcaggctccgccggcatggtcggcggccaggcgatcgacctcggctcggtcggcgtggccctcgaccaggcggccctggaagtcatgcaccggcacaagaccggcgcgctgatcgaagccagcgtgcgcctcggcgccctcgccagcggtcgcgccgagcccgccgcgctggccgccctggaacgctacgccgaagcgatcggcctggccttccaggtgcaggacgacatcctcgacgtggaaagcgacaccgccaccctcggcaagacccagggcaaggaccaggcgcacaacaagccgacctatcccgccctgctcggcctggaggccgccaaaggctatgccctggagctgcgcgacctggccctggccgccctcgacggttttccgccgagcgccgacccgctgcgccaactggcccgctacatcgtcgagcgacgcaactga

SEQ ID NO: 111693 - protein, 295 aa, Pseudomonas aeruginosa UCBPP-PA14
MIAAYQARCQARVDAALDALFVAPREELQRLYEAMRYSVMNGGKRVRPLLAYAACEALGGAPQRADAAACAVELIHAYSLVHDDLPAMDDDDLRRGQPTTHRAFDEATAILAADGLQALAFEVLADTRRNPQEHAVCLEMLTRLARAAGSAGMVGGQAIDLGSVGVALDQAALEVMHRHKTGALIEASVRLGALASGRAEPAALAALERYAEAIGLAFQVQDDILDVESDTATLGKTQGKDQAHNKPTYPALLGLEAAKGYALELRDLALAALDGFPPSADPLRQLARYIVERRN

SEQ ID NO: 111694 - DNA, 891 bp, Pediococcus pentosaceus ATCC 25745
  CDS (1)..(891): transl_table=11
atgaatagtaattttgatgactttgtcaaacaaaacgtagaattacttgatcagcacatcgatgaattgtttgatagtgattcaacattgaataccgatttaaaaatgatgatgaagtattcaattgacgctggtggcaagcgagttcgtccgttagttttattggcaattttgaaagcattcggaaagacccctaattacgatatcctaacagtcgcagcagctctcgaagctgtacatacatactcgttgattcatgatgatttacccgcaatggataacgatgatttacggcgtggacgaccaaccagccataagaagtttggtgaggcagaggctatcttggctggtgatgcacttttaacggtggcctttcaatggattagctcaaccaatttaaaggatcggattaaaagtgaattggtgttatccttggcaagtgatgctggggcttcagggatgattgctggccaattattggatattcaaggaaatcagcgacattattccttagctgaactcaaacatttacatcatcttaaaaccggcaaaatgctattattcccagcggaagcggcgttgataatgaagccaagcaaacttcaagttgccgaattggttaaagattttatggcaaactttggtttagcctttcaaatccatgacgatataattgatgtaacagaaagtacagcgatccttggtaaaacggctggaaaagatgtagatttaaataaaaatacgtacgttaacttactcgggttaagtggagcaaaagaagaattaaatcaggttcttcaaaaatgtgaacaagacttaacctccttaggtgaattacagccagaaatggatttgatgattttagaaggttttttaacgtatttaaaataa

SEQ ID NO: 111695 - protein, 296 aa, Pediococcus pentosaceus ATCC 25745
MNSNFDDFVKQNVELLDQHIDELFDSDSTLNTDLKMMMKYSIDAGGKRVRPLVLLAILKAFGKTPNYDILTVAAALEAVHTYSLIHDDLPAMDNDDLRRGRPTSHKKFGEAEAILAGDALLTVAFQWISSTNLKDRIKSELVLSLASDAGASGMIAGQLLDIQGNQRHYSLAELKHLHHLKTGKMLLFPAEAALIMKPSKLQVAELVKDFMANFGLAFQIHDDIIDVTESTAILGKTAGKDVDLNKNTYVNLLGLSGAKEELNQVLQKCEQDLTSLGELQPEMDLMILEGFLTYLK

SEQ ID NO: 111696 - DNA, 828 bp, Oenococcus oeni PSU-1
  CDS (1)..(828): transl_table=11
atgaagtttaaagatttttcaaatcgttaccttccggaaattaataatgatttaagtaattattttgctgatcgtgatgatgatattttcaggatgattacgtacgctttgaattcaaccggcaaacgtttacggccacttttaaccttggcaacttttgcagctgctggaaatgtaattaatgacagcacaattgaggcggcgacggctgttgagtttgtgcatgcctattcattggttcatgatgatttaccggaaatggatgacgataccaaacgtcgcaatcagtccagcacttggaaaaaatttggggttgggaatgctgttttggttggggatggcttactgacagaggcttttaaaaaaatatccaatctttcattacccgagtctattcgtctaagattaatatataatctcgctttggcagctggacctgataacatggttcgcggacagcaatatgatttattttctcaggataaagttgaatcgatcgatgatttggaatttatccacttaatgaaaaccggtgctttaatgacttatgcggcaactgctggtggtattttagccggattgtcggatgataaactgcgtgctttaaatatttatggtgcaaatcttggaattgcttttcaaataaaagatgatttgagagatataaaacaggatgaggaagaaaacaaaaaaagttttccaagacttattggtgttcagaaaagtcagacggaattggaagaacatttaaaaatttctgctaacgcaattaaagaaattccggattttcaaaatacagttttacttgatttattggatagaatatga

SEQ ID NO: 111697 - protein, 275 aa, Oenococcus oeni PSU-1
MKFKDFSNRYLPEINNDLSNYFADRDDDIFRMITYALNSTGKRLRPLLTLATFAAAGNVINDSTIEAATAVEFVHAYSLVHDDLPEMDDDTKRRNQSSTWKKFGVGNAVLVGDGLLTEAFKKISNLSLPESIRLRLIYNLALAAGPDNMVRGQQYDLFSQDKVESIDDLEFIHLMKTGALMTYAATAGGILAGLSDDKLRALNIYGANLGIAFQIKDDLRDIKQDEEENKKSFPRLIGVQKSQTELEEHLKISANAIKEIPDFQNTVLLDLLDRI

SEQ ID NO: 111698 - DNA, 897 bp, Solibacter usitatus Ellin6076; identical to SEQ ID NO: 57453
  CDS (1)..(897): transl_table=11

SEQ ID NO: 111699 - protein, 298 aa, Solibacter usitatus Ellin6076; identical to SEQ ID NO: 57454

SEQ ID NO: 111700 - DNA, 885 bp, Magnetococcus sp. MC-1; identical to SEQ ID NO: 57455
  CDS (1)..(885): transl_table=11

SEQ ID NO: 111701 - protein, 294 aa, Magnetococcus sp. MC-1; identical to SEQ ID NO: 57456

SEQ ID NO: 111702 - DNA, 882 bp, Shewanella sp. ANA-3
  CDS (1)..(882): transl_table=11
gtgttagtcaatgcaataaaagaatatcaactacgggttgatgaccaattaaaacaacgtttcagcacactcgaagacactgcgccgcagttaaaggccgccatgacccacggcgcgctattaggcggtaagcgtattcgtcccttcttggtttacagcgtggggcaaatgtttggcgtgccgcttgaaaagctcgacgccagcgccgccgccattgagtgtattcatgcttattcgttaatccatgacgatttacccgccatggacgatgacgaccttcgtcgtggtcagcccacagtgcatatcgccttcgatgaggcgaccgccatccttgctggggatgcactgcaaaccttagcctttgaaattgtgaccgaagccgtacctgggatcagcagcgagcaacatatcgctatggtgagggcgctggcgaaagcctcgggttaccgtggtatgtgtggcggccaagcgattgacttagcctcaaccgataagctcatcgaccttaaagccttaactcaactgcataatatgaaaacgggcgcccttatcagctgcgccgttgagttagccctgatcgccgctaatgcgccaaaagatgaatatcagactatgatggaatttgcccatgcggtaggacttgccttccaagtgcaagacgatattctggacatcattgccaccacggaagaactcggcaaaccccaaggctctgacgccgagtccaataagagtacttttccgcaactacttggactgcaaggcgccaaagataccgccgcgcaactgatccaagaggcactatcagcgctggctaaattgccatacaatagccagttaatcgcagacttcgcccgctatatcattgagcgaagaatataa

SEQ ID NO: 111703 - protein, 293 aa, Shewanella sp. ANA-3
MLVNAIKEYQLRVDDQLKQRFSTLEDTAPQLKAAMTHGALLGGKRIRPFLVYSVGQMFGVPLEKLDASAAAIECIHAYSLIHDDLPAMDDDDLRRGQPTVHIAFDEATAILAGDALQTLAFEIVTEAVPGISSEQHIAMVRALAKASGYRGMCGGQAIDLASTDKLIDLKALTQLHNMKTGALISCAVELALIAANAPKDEYQTMMEFAHAVGLAFQVQDDILDIIATTEELGKPQGSDAESNKSTFPQLLGLQGAKDTAAQLIQEALSALAKLPYNSQLIADFARYIIERRI

SEQ ID NO: 111704 - DNA, 903 bp, Azoarcus sp. BH72; identical to SEQ ID NO: 57457
  CDS (1)..(903): transl_table=11

SEQ ID NO: 111705 - protein, 300 aa, Azoarcus sp. BH72; identical to SEQ ID NO: 57458

SEQ ID NO: 111706 - DNA, 897 bp, Neisseria meningitidis FAM18
  CDS (1)..(897): transl_table=11
ttgaatccgacgaatgatttgaaagcgtggcaacagagggcgcaggcacagacagagctgctgctggaacgctttttgccgtctgaaaacgaaatcccgcacacgctgcacgaagcgatgcgctatgcggctttggacggcggcaagcgtctgcgtccgatgctggttctggcagcttcggaattaggcgaagccgtgcatgaagcagtagaacaggcaatggcggcaatcgaaatgatccacgtctattctttggttcacgacgatatgccggcgatggacaacgacagcctgcgccggggcaaaccgacctgccacatcaaatatggcgaagcaaacgcactgctgaccggcgatgctttgcaaacccaagccttcgacgtgttaagtcgtccgacagaactgcccgccgcacgccagttggcaatgttgtcggtgttggcgaaagcgggcggcagcaggggtatggcgggcggtcaggcaatcgatttggcgaatgtcggcaaacaaatggttcaagccgatttggaacagatgcacagcctgaaaacgggtgcgctaatccgtgcggcggttttattgggggcgacggcgtgtcctgatctgtcagatgcggaactttccgtattggacgcttacgcggcaaaactggggctggcgttccaagtcattgacgatgtgttggattgtgaagcggacacggcgactttgggcaaaacggcgggcaaagacgcagacaacgacaagccgacttatgtgaaactgatgggcttggaagcggcgcgctcatacgcacacaaactggttgccgaagcggtcgcgctgctcgaacccttcggcgacaaagccctgcgcctgcggcagttggcagaatttgcagtcgcccgcaaatattaa

SEQ ID NO: 111707 - protein, 298 aa, Neisseria meningitidis FAM18
MNPTNDLKAWQQRAQAQTELLLERFLPSENEIPHTLHEAMRYAALDGGKRLRPMLVLAASELGEAVHEAVEQAMAAIEMIHVYSLVHDDMPAMDNDSLRRGKPTCHIKYGEANALLTGDALQTQAFDVLSRPTELPAARQLAMLSVLAKAGGSRGMAGGQAIDLANVGKQMVQADLEQMHSLKTGALIRAAVLLGATACPDLSDAELSVLDAYAAKLGLAFQVIDDVLDCEADTATLGKTAGKDADNDKPTYVKLMGLEAARSYAHKLVAEAVALLEPFGDKALRLRQLAEFAVARKY

SEQ ID NO: 111708 - DNA, 936 bp, Acidovorax sp. JS42; identical to SEQ ID NO: 57459
  CDS (1)..(936): transl_table=11

SEQ ID NO: 111709 - protein, 311 aa, Acidovorax sp. JS42; identical to SEQ ID NO: 57460

SEQ ID NO: 111710 - DNA, 933 bp, Nostoc punctiforme PCC 73102; identical to SEQ ID NO: 57461
  CDS (1)..(933): transl_table=11

SEQ ID NO: 111711 - protein, 310 aa, Nostoc punctiforme PCC 73102; identical to SEQ ID NO: 57462

SEQ ID NO: 111712 - DNA, 891 bp, Haemophilus somnus 2336; identical to SEQ ID NO: 57463
  CDS (1)..(891): transl_table=11

SEQ ID NO: 111713 - protein, 296 aa, Haemophilus somnus 2336; identical to SEQ ID NO: 57464

SEQ ID NO: 111714 - DNA, 894 bp, Fusobacterium nucleatum subsp. vincentii ATCC 49256
  CDS (1)..(894): transl_table=11
atgaatgatttccaagtttatttaaaagaaaaaactgatttttttgaaactgaattgaaaagagaactaaaagagctttcttatcctgaaactattgctaagggtatggaatatgcaaccttaaatggtggaaagaggttaagaccttttttactttttgcaacattggaattattaaatgagaatataaaaaaaggtgtaaaatctgcaatagcattagagatgatacattcatattctcttgttcatgatgatttgccagctcttgacaatgatgattacagaagaggtaaattaacaacacataaagtttttggtgaagcagagggaatacttattggagattcacttttaacttatgctttttatgttctttctcaaaaaaatttagagttattatcttctgaacagattgtgaatatcatttcaaaaacttctgaatatgcaggaataaatggaatgataggtggacagatgatagatattgaaagtgaaaataaaaaaataggtttggaaactttaaaatatatccatagccataaaacaggaaaacttattaaactacctattgaaatagcttgtatcattgctgatttggaaaaagataaaagaaaagttttagaagaatatgcagatttaattggtttagcttttcaagttaaagatgatattttagatgttgaaggaacttttgaagaattaggaaaacctgtgggtagtgatgttgatttacataaagctacttatccaagtattttaggaatggaagaaagtaaaaaaattctaaatgatactgttgaaaaagctaaggagattattaaaaataaatttagagatgaaaaaggaaaagttttaatttctcttgcagattttataaaagatagaaataaataa

SEQ ID NO: 111715 - protein, 297 aa, Fusobacterium nucleatum subsp. vincentii ATCC 49256
MNDFQVYLKEKTDFFETELKRELKELSYPETIAKGMEYATLNGGKRLRPFLLFATLELLNENIKKGVKSAIALEMIHSYSLVHDDLPALDNDDYRRGKLTTHKVFGEAEGILIGDSLLTYAFYVLSQKNLELLSSEQIVNIISKTSEYAGINGMIGGQMIDIESENKKIGLETLKYIHSHKTGKLIKLPIEIACIIADLEKDKRKVLEEYADLIGLAFQVKDDILDVEGTFEELGKPVGSDVDLHKATYPSILGMEESKKILNDTVEKAKEIIKNKFRDEKGKVLISLADFIKDRNK

SEQ ID NO: 111716 - DNA, 891 bp, Haemophilus influenzae R2846
  CDS (1)..(891): transl_table=11
atgggtcacttttctgaagaattacaacaggttcaaaatcgtattaatcactttttagaagctcaatttgagggcattgaaagtcataatgcacctttgcttgacgcgatgaaatacgcattattacttggtggtaaacgagttagaccttttttggtttacgcaacaggtcaaatgcttggtgcagagaaacaatccttagattacgtcgctgctgccattgaagccattcacgcctattccttaattcacgatgatttacctgcgatggacgatgacaatctacgtcgtggacatcctacttgtcatatccaatttgatgaagctacagctattcttgcgggcgatgcactacaaagtttcgcatttgaaatattaaccaaaactccgaatatttctgctgaacaaaaactggctttagttcaaattttagctcaaggctcaggcgtacaaggaatgtgcttagggcaaagtttagatcttatttctgaacataaacaaattagtttaagcgaattagaattaatccatcgtaacaaaacgggcgcgttgctaattgccgcattgaaattaggtttcatttgttctccgcattttaccgacaaaaagttagaacaatccttaacgcaatatgcggaagccattggcttagcctttcaagttcaagatgatattttagatattgaaggcgatagtgcagaaattggcaaacaagtcggcgccgatcttgatttagataaaagtacatatccaaaattacttgggttaagtggcgcaaaacaaaaagcacaagatctatatcaaagtgctttgtctgaattagaaaaaattccttttaatacgaccgcacttcgtgcattagctgaattcgttattaccagaaaaagttaa

SEQ ID NO: 111717 - protein, 296 aa, Haemophilus influenzae R2846
MGHFSEELQQVQNRINHFLEAQFEGIESHNAPLLDAMKYALLLGGKRVRPFLVYATGQMLGAEKQSLDYVAAAIEAIHAYSLIHDDLPAMDDDNLRRGHPTCHIQFDEATAILAGDALQSFAFEILTKTPNISAEQKLALVQILAQGSGVQGMCLGQSLDLISEHKQISLSELELIHRNKTGALLIAALKLGFICSPHFTDKKLEQSLTQYAEAIGLAFQVQDDILDIEGDSAEIGKQVGADLDLDKSTYPKLLGLSGAKQKAQDLYQSALSELEKIPFNTTALRALAEFVITRKS

SEQ ID NO: 111718 - DNA, 891 bp, Haemophilus influenzae R2866
  CDS (1)..(891): transl_table=11
atgggtcacttttctgaagaattacaacaggttcaaaatcgtattaatcactttttagaagctcaatttgagggcattgaaagtcataatgcacctttgcttgacgcgatgaaatacgcattattacttggtggtaagcgagttagaccttttttggtttacgcaactggtcaaatgcttggtgcagagaaacaaaccttagattacgtcgctgctgccattgaagccattcacgcctattccttaattcacgatgatttacctgcgatggacgatgacaatctacgtcgtggacatcctacttgtcatatccaatttgatgaagctacagctattcttgcgggcgatgcactacaaagtttcgcatttgaaatattaaccaaaactccgaatatttctgctgaacaaaaactggctttagttcaaattttagctcaaggctcaggcgtacaaggaatgtgcttagggcaaagtttagatcttatttctgaacataaacaaattagtttaagcgaattagaattaattcatcgtaacaaaacgggtgcattgctaattgccgcattgaaattaggtttcatttgttctccgcattttaccgacaaaaggttagaacaatccttaacacaatatgcggaagccattggtttagcctttcaagttcaagatgatattttagatattgaaggcgatagtgcagaaattggcaaacaggtgggcgccgatcttgatttagataaaagtacatatccaaaattacttggattaagtggtgcaaaacaaaaagcgcaagatctatatcaaagtgctttgtctgaattagaaaaaattccttttgatacaaccgcacttcgtgcattagctgaattcattattaccagaaaaagttaa

SEQ ID NO: 111719 - protein, 296 aa, Haemophilus influenzae R2866
MGHFSEELQQVQNRINHFLEAQFEGIESHNAPLLDAMKYALLLGGKRVRPFLVYATGQMLGAEKQTLDYVAAAIEAIHAYSLIHDDLPAMDDDNLRRGHPTCHIQFDEATAILAGDALQSFAFEILTKTPNISAEQKLALVQILAQGSGVQGMCLGQSLDLISEHKQISLSELELIHRNKTGALLIAALKLGFICSPHFTDKRLEQSLTQYAEAIGLAFQVQDDILDIEGDSAEIGKQVGADLDLDKSTYPKLLGLSGAKQKAQDLYQSALSELEKIPFDTTALRALAEFIITRKS

SEQ ID NO: 111720 - DNA, 882 bp, Listeria monocytogenes str. 1/2a F6854; identical to SEQ ID NO: 57465
  CDS (1)..(882): transl_table=11

SEQ ID NO: 111721 - protein, 293 aa, Listeria monocytogenes str. 1/2a F6854; identical to SEQ ID NO: 57466

SEQ ID NO: 111722 - DNA, 891 bp, Bacillus cereus G9241; identical to SEQ ID NO: 57467
  CDS (1)..(891): transl_table=11

SEQ ID NO: 111723 - protein, 296 aa, Bacillus cereus G9241; identical to SEQ ID NO: 57468

SEQ ID NO: 111724 - DNA, 930 bp, Crocosphaera watsonii WH 8501; identical to SEQ ID NO: 57469
  CDS (1)..(930): transl_table=11

SEQ ID NO: 111725 - protein, 309 aa, Crocosphaera watsonii WH 8501; identical to SEQ ID NO: 57470

SEQ ID NO: 111726 - DNA, 870 bp, Exiguobacterium sibiricum 255-15; identical to SEQ ID NO: 57471
  CDS (1)..(870): transl_table=11

SEQ ID NO: 111727 - protein, 289 aa, Exiguobacterium sibiricum 255-15; identical to SEQ ID NO: 57472

SEQ ID NO: 111728 - DNA, 939 bp, Sulfitobacter sp. EE-36
  CDS (1)..(939): transl_table=11
atggcgacggcaaccctgtcggagtggctcctgttggcggggtttgacatctcgcttgagacagagctgacgcgcaaaccgtttcatgcggccatgccccatgctgcggatctggcgattggccagattctgcacgggcttgacgggttggacggcaccgtggccgaggcgatgcgctatgccgtgacaggcggcaagggcctgcgggcctttctggtgatcgaaagtgcgcggctgcacggggtgatggacgcgcaggccgcccccgccgccggcgcgatcgaggcgctgcacgcctattcgctggtgcatgatgacatgccttgcatggatgatgacgccctgcgtcggggtcaacccacggtacatgtgaaatgggacgaggcgacggcggttctggcgggcgatgcgctgcagacattggcgtttgaactggtcgcggcaacgggctgcggcgacgctgaacgggttgcgctggtcacggggctggcgcgggctgccggagtgcgcggcatggtgggcgggcaggcgatggacatcgccgccgaaaccgcgcgccagccgctgacgctggaccagatcacaacgcttcaggccggcaagaccggtgcgctgatcgaatgggccgcgacggcggggccggtgatggcgggcgatgatgccgccgcgctgcgcagctatgcgcgcaacctcgggctggcgttccagattgcggatgacattcttgacgtcgaaggcgatgccgccacggtgggcaaggccgtgggcaaggatgccgatgcgggcaaggcgacctttgtgtcgctgctggggctggaccccgcccgcgcccgcgcccgtgatcttgtcgatgctgcctgtgatgccctgtccccctacggcagtgacgccgaaaccttgcgagacgcggcccgcttcgttatttcccgcaaaagctga

SEQ ID NO: 111729 - protein, 312 aa, Sulfitobacter sp. EE-36
MATATLSEWLLLAGFDISLETELTRKPFHAAMPHAADLAIGQILHGLDGLDGTVAEAMRYAVTGGKGLRAFLVIESARLHGVMDAQAAPAAGAIEALHAYSLVHDDMPCMDDDALRRGQPTVHVKWDEATAVLAGDALQTLAFELVAATGCGDAERVALVTGLARAAGVRGMVGGQAMDIAAETARQPLTLDQITTLQAGKTGALIEWAATAGPVMAGDDAAALRSYARNLGLAFQIADDILDVEGDAATVGKAVGKDADAGKATFVSLLGLDPARARARDLVDAACDALSPYGSDAETLRDAARFVISRKS

SEQ ID NO: 111730 - DNA, 864 bp, Roseovarius nubinhibens ISM
  CDS (1)..(864): transl_table=11
atgcaagagcgtctggcggaggtggcagccggggttgccgcccatctcgatcatgttctggcgccatttggcacgggcgagctggcgcaggcgatgcgctatgccaccgagggcggcaagcgtctgcgggcctatctggtgatcgagggcgcgcggctgcatggggtgccggcggaacaggcgatctggcccgccaccgcgatcgaggcgctgcacgcctatagcctcgtgcatgacgacatgccttgcatggatgacgacgatctgcgccggggccgtccgacggtgcatcgcaaatgggatgaggcgaccgccgttctggtgggcgatgcgctgcaatcgctggcctttgaatgcgtggccgatccgcgtgcgggcagtggcgaggtgcgggccgagctctgcctcgggctggcacgcgctgcgggcgggcaggggatggtgctgggccaggcgctcgatatcgcggctgagaccgccggcacgccgctcagcctcgacgagatcaccacgctgcaggccggcaagaccggtgcgctcatcatctggtcgggcattgccggggcggtgatggcgggggcagatcccgcgccgctcacccgctatgcgcaggccgtcggtttggcttttcagatcgccgatgacatattggatgttgagggctgtgccgaagaaaccggcaaggcggtgggcaaggatgccgcggcgggcaaggcgacctttgtgtcgcatctcgggctggccggggcgaaatcccgcgcaagcgccctcatcgacgaggcgattgccgcgctcgatatatatggtgaggatggcgatgacttgcgggctctggcgcgcttcgttatcgcaaggtccagttga

SEQ ID NO: 111731 - protein, 287 aa, Roseovarius nubinhibens ISM
MQERLAEVAAGVAAHLDHVLAPFGTGELAQAMRYATEGGKRLRAYLVIEGARLHGVPAEQAIWPATAIEALHAYSLVHDDMPCMDDDDLRRGRPTVHRKWDEATAVLVGDALQSLAFECVADPRAGSGEVRAELCLGLARAAGGQGMVLGQALDIAAETAGTPLSLDEITTLQAGKTGALIIWSGIAGAVMAGADPAPLTRYAQAVGLAFQIADDILDVEGCAEETGKAVGKDAAAGKATFVSHLGLAGAKSRASALIDEAIAALDIYGEDGDDLRALARFVIARSS

SEQ ID NO: 111732 - DNA, 861 bp, Oceanicola batsensis HTCC2597
  CDS (1)..(861): transl_table=11
atgttcgaccgccggatcgcggaggtcgccgcgacggtgtcggggcggctggaccttgccctgagagacatgcccggagaggtcggggaggcgatgcgtcacgcgaccagcggcggcaagcgcctgcgggcgttcctggtctgcgagggggccgcgctgcacggggtcgcgccggggccggctctggacgccgccgccgccatcgaggcaatgcacgcctattcgctggtgcatgacgatcttccggcgatggacgacgacgacctgcgccgggggcagccgacggtccatgtgaagtggaacgaggcgacggcgatccttgtcggagacgcgctgcagtccctggccttcgacctgctgtcccatgccgcgctgccggccgaccgcgtggtgacgctgaccgcgggcatggcgcgggcggcgggcggcatgggcatggtgcacgggcaggcgctggacatcgcggccgagaccgcgcccgaaccgctgagcctgccccagatcaccgagttgcaggcccgcaagaccggggcgcttatcgaatggtcggcgcaggccgggccgatcatggcggatgcggatcccggccccatgggcgcctacgcccgggcgctcggcctggcctttcaaatcgcggacgacatcctagatgtagagggtgacgaagccgagacaggcaagcggctgcgcaaggatacggccgcgggcaaggcgaccttcgtgtcgctgatggggctggacggcgccaaggccgaggcgggacgcctggtggaaaccgcttgtgaagctctctcggtctatggtgagcgggcggacggcttgcgggaggccgcgcgcttcgttatctcgcggcaaagctga

SEQ ID NO: 111733 - protein, 286 aa, Oceanicola batsensis HTCC2597
MFDRRIAEVAATVSGRLDLALRDMPGEVGEAMRHATSGGKRLRAFLVCEGAALHGVAPGPALDAAAAIEAMHAYSLVHDDLPAMDDDDLRRGQPTVHVKWNEATAILVGDALQSLAFDLLSHAALPADRVVTLTAGMARAAGGMGMVHGQALDIAAETAPEPLSLPQITELQARKTGALIEWSAQAGPIMADADPGPMGAYARALGLAFQIADDILDVEGDEAETGKRLRKDTAAGKATFVSLMGLDGAKAEAGRLVETACEALSVYGERADGLREAARFVISRQS

SEQ ID NO: 111734 - DNA, 903 bp, Prochlorococcus marinus str. MIT 9211
  CDS (1)..(903): transl_table=11
atgtcagaagcggtcatttcatcttttgactttgccgcttatctggctaaggagaagattcgtgtggaagcagctctagatgcttctcttggtccagagcgtccaaagcaattaagggaagcaatgaggtattcccttctggcaggagggaaaaggttaagacctattctttgtttggcagcgtgtgaacttatagcaggcgaatctgaaacggctttacctacagcagtagctatagaaatgattcacacaatgtctcttattcatgatgatttgccatctatggataacgatgatttaagaagaggacggccgactaatcacaaagtatatggggacgctttagcaattcttgccggggacgctttgttaacacgcgcttttgagatggtttcactaagaagtcctgggatatctgcagaaagacttattaaagttgttggtgaactctcattagttgctggagcgcctggcttagtgggaggccaggtggcagatcttgagtgtgagggtaaggatgttgatatagatactcttgaatatattcacatccataaaactggagcgcttctaaaggcatcagttgtttgcggagctcttattgggggtgcaaaagatgatttgcttgatgctcttagaacttatgctgaagccataggcttggcatttcaaattattgatgacatcttagatgtgacttcaagtagtgaagttctcggcaaaacagctggtaaggatttaattgcagacaaaactacttatcccaagttgttaggtgtagacgaatctcgtcagagagcgaaagtgcttatagaaaaagctaagagtgtcttggaaccctgggaagatgatgcaacccctttgcttgccttggctgactacattattagtagagatagatga

SEQ ID NO: 111735 - protein, 300 aa, Prochlorococcus marinus str. MIT 9211
MSEAVISSFDFAAYLAKEKIRVEAALDASLGPERPKQLREAMRYSLLAGGKRLRPILCLAACELIAGESETALPTAVAIEMIHTMSLIHDDLPSMDNDDLRRGRPTNHKVYGDALAILAGDALLTRAFEMVSLRSPGISAERLIKVVGELSLVAGAPGLVGGQVADLECEGKDVDIDTLEYIHIHKTGALLKASVVCGALIGGAKDDLLDALRTYAEAIGLAFQIIDDILDVTSSSEVLGKTAGKDLIADKTTYPKLLGVDESRQRAKVLIEKAKSVLEPWEDDATPLLALADYIISRDR

SEQ ID NO: 111736 - DNA, 915 bp, Erythrobacter sp. NAP1; identical to SEQ ID NO: 57475
  CDS (1)..(915): transl_table=11

SEQ ID NO: 111737 - protein, 304 aa, Erythrobacter sp. NAP1; identical to SEQ ID NO: 57476

SEQ ID NO: 111738 - DNA, 948 bp, Synechococcus sp. RS9917; identical to SEQ ID NO: 57477
  CDS (1)..(948): transl_table=11

SEQ ID NO: 111739 - protein, 315 aa, Synechococcus sp. RS9917; identical to SEQ ID NO: 57478

SEQ ID NO: 111740 - DNA, 903 bp, Synechococcus sp. WH 5701; identical to SEQ ID NO: 57479
  CDS (1)..(903): transl_table=11

SEQ ID NO: 111741 - protein, 300 aa, Synechococcus sp. WH 5701; identical to SEQ ID NO: 57480

SEQ ID NO: 111742 - DNA, 948 bp, Synechococcus sp. WH 7805
  CDS (1)..(948): transl_table=11
atgtttttcatgaccgccacggcgagaagtcctgaaggtctcatgccgtcgggtgaaaatcaggctgattttgacttcagtgcctatttggccaagacgcgcaacctcgtggagggagcccttgatgcagctttaggtcctgagcgacctgagtcccttcgcgagtcgatgcgctactccctcctggccggaggcaagcggctcagaccgattctttgcctcgcagcctgtgagcttgtgggcggtgatgcctccctggcaatgccgacggcagtggccttggaaatgatccacaccatgtcgctgatccatgacgatctaccggcaatggacaacgatgatttgcgtcgtggccgccccaccaatcacaaggtctatggcgatgccatggccattctcgccggtgatgctttgctcagcagagccttcgaaatggtgtcacttcgtagtccaggggttccccccgagaggttgctgaaagtggtggctgagctcgcactcgtgtctggagctccggggttggtgggaggccaggtggtcgatctggaaagtgagggtcgcgaggttgatctggaaacacttgaatacattcatctccacaagaccgcagctctgctccgggcctgtgtcgttacaggcgctctgatcggaggtgccgatgcgaatcaggtcgaagcgatgcgtacttacgccaacggcatcggtctcgctttccagatcgtggacgacatccttgatgtcacggccagcagtgaagtcctcggtaaaacagcaggaaaagatctgattgccgataaaaccacttatccgaaacttcttggtctggagccttcgcgggctcgcgctcttgagttggttgctcaggccaagtcggctctcgagccgtggacatccaaagctcagccgcttctggctctcgctgactacgtcgcgagccgagaccgttga

SEQ ID NO: 111743 - protein, 315 aa, Synechococcus sp. WH 7805
MFFMTATARSPEGLMPSGENQADFDFSAYLAKTRNLVEGALDAALGPERPESLRESMRYSLLAGGKRLRPILCLAACELVGGDASLAMPTAVALEMIHTMSLIHDDLPAMDNDDLRRGRPTNHKVYGDAMAILAGDALLSRAFEMVSLRSPGVPPERLLKVVAELALVSGAPGLVGGQVVDLESEGREVDLETLEYIHLHKTAALLRACVVTGALIGGADANQVEAMRTYANGIGLAFQIVDDILDVTASSEVLGKTAGKDLIADKTTYPKLLGLEPSRARALELVAQAKSALEPWTSKAQPLLALADYVASRDR

SEQ ID NO: 111744 - DNA, 891 bp, Pseudoalteromonas tunicata D2; identical to SEQ ID NO: 57481
  CDS (1)..(891): transl_table=11

SEQ ID NO: 111745 - protein, 296 aa, Pseudoalteromonas tunicata D2; identical to SEQ ID NO: 57482

SEQ ID NO: 111746 - DNA, 903 bp, Photobacterium sp. SKA34
  CDS (1)..(903): transl_table=11
atgaccaatagttcttctttatcgctatcccttaagtgctatcaacaacgtagtaatgacgtattggcatactggttatcaactcaaccatttgcagataaagccctacttaaagccatgcagtacggaacactgctaggtggcaagcgtgcgcgcccttttctaacctatgtaacaggtgagatgttagggttaactcaagatgatcttgacaccccagccgctgcggttgagtgtattcatgcttactcattaatccatgatgatttacccgcgatggatgatgacgcatttcgtcgtggtcaacctacctgtcatattgcgtttgatgaagcaatggccattcttgctggtgacgcactacaaacactggcttttgacattttagcgagtggtcaattgagccaagatggcaacacccaacgtattgctatggtaagtgaacttgcaaaagcatcaggagctgcaggaatgtgtctagggcaagccttagatcttgatgctgaaggtaaacatgttggattagagcaactagaattaatccatagacacaaaactggggctttgattcgctgtgccgtccgcttaggagcattagctgctggtgataaaggcgtagcaattttgccgcaacttgataaatactcagaagctattggccttgcgttccaagtgcaagatgatattttagatgtgatcagcgataccgaaaccttaggtaaaccacaaggttctgatcttgctttggataaaagtacctatccagcattgcttggcttagatggtgcacaagaaaaagcacaacaactttatcaagaagcactacaagcattagcggctataccctacaatacatcccaattagaagtttttgcccgatatattatcgaacgcaacaactaa

SEQ ID NO: 111747 - protein, 300 aa, Photobacterium sp. SKA34
MTNSSSLSLSLKCYQQRSNDVLAYWLSTQPFADKALLKAMQYGTLLGGKRARPFLTYVTGEMLGLTQDDLDTPAAAVECIHAYSLIHDDLPAMDDDAFRRGQPTCHIAFDEAMAILAGDALQTLAFDILASGQLSQDGNTQRIAMVSELAKASGAAGMCLGQALDLDAEGKHVGLEQLELIHRHKTGALIRCAVRLGALAAGDKGVAILPQLDKYSEAIGLAFQVQDDILDVISDTETLGKPQGSDLALDKSTYPALLGLDGAQEKAQQLYQEALQALAAIPYNTSQLEVFARYIIERNN

SEQ ID NO: 111748 - DNA, 882 bp, Oceanospirillum sp. MED92; identical to SEQ ID NO: 57483
  CDS (1)..(882): transl_table=11

SEQ ID NO: 111749 - protein, 293 aa, Oceanospirillum sp. MED92; identical to SEQ ID NO: 57484

SEQ ID NO: 111750 - DNA, 888 bp, marine gamma proteobacterium HTCC2207
  CDS (1)..(888): transl_table=11
atgtcatctatcaaagatatcattagtcactacagcgctcaggttgatgcccagctggaagctatgttgccagcggcaactggtccggctgagccgctttttgcggcgatgcgctactcggtatttaacggcggcaagcgtctccgtccggcgctgtgttttgcagcggccgatgcggtggcaggcagtgatgcaaataccgccaaggtggctgcggcactggaaatgatacatgcctattcgctgatccacgatgatctgccggcaatggacgatgacgatctgcgccgcggcaagcccacttgccatatccaatttgatgaggccaccgccattcttgccggcgatggcctgcagtctctggcctttcaacaactctgtgaactctctgagctggatcccactattgtggttgagctggtctcaacactctcacgattgggtggctgcagcggtatggtcgcaggtcaagcaattgatctggcagcgaccggttcggtgctggagttggatgctctgaaggttatgcatgcgcacaagaccggcgcactgatcgaagccagtgtattgatgggcgctctggccacaggtcaggccagtcaagaacagctcggcgcgctcaaagactttgccagagccataggtctggcgtttcagattcaggacgatattctcgatgtggagagttccactgaacagttaggcaagcaacagggatctgatgctaccaatctgaagtcgacctacacctcaatcttaggacttgagcgggcgcgcagtgaggcggcgaaactctttgatcagagcatggaaatattagaaaactttggcgaaaaagctgatccgctgcgagcgattgccgcgtttattgttaagcgcaatcactag

SEQ ID NO: 111751 - protein, 295 aa, marine gamma proteobacterium HTCC2207
MSSIKDIISHYSAQVDAQLEAMLPAATGPAEPLFAAMRYSVFNGGKRLRPALCFAAADAVAGSDANTAKVAAALEMIHAYSLIHDDLPAMDDDDLRRGKPTCHIQFDEATAILAGDGLQSLAFQQLCELSELDPTIVVELVSTLSRLGGCSGMVAGQAIDLAATGSVLELDALKVMHAHKTGALIEASVLMGALATGQASQEQLGALKDFARAIGLAFQIQDDILDVESSTEQLGKQQGSDATNLKSTYTSILGLERARSEAAKLFDQSMEILENFGEKADPLRAIAAFIVKRNH

SEQ ID NO: 111752 - DNA, 948 bp, delta proteobacterium MLMS-1; identical to SEQ ID NO: 57487
  CDS (1)..(948): transl_table=11

SEQ ID NO: 111753 - protein, 315 aa, delta proteobacterium MLMS-1; identical to SEQ ID NO: 57488

SEQ ID NO: 111754 - DNA, 885 bp, Oceanobacter sp. RED65; identical to SEQ ID NO: 57491
  CDS (1)..(885): transl_table=11

SEQ ID NO: 111755 - protein, 294 aa, Oceanobacter sp. RED65; identical to SEQ ID NO: 57492

SEQ ID NO: 111756 - DNA, 870 bp, Desulfitobacterium hafniense DCB-2
  CDS (1)..(870): transl_table=11
atgtttcaaaaggaattagaagattatgctcgcttagtggattcgtatttggcacaatttccttggccaaccggcacccttgctgaaagcatgaactattctctttccgcagggggtaaacgcatccgccctgttctggctctggccgcggcccatgctgtgggaggggactgtgaagacatccttccggcggtctgtgctttggagctgatacatacctattcattgatccatgatgatcttcccgccatggacaatgatgattatcgacggggacgtttggccaatcataaagtttttggcgaagggcaggccattcttgccggtgacgcccttttaacctatgcttttgaactgcttgctcagcccatgagtggggtagattctcaacgtcagttgcgggctgtcagggaagttgcccaagcagcggggccggagggaatggtcggcggtcagatgctggatttggaagctgaagaaaagcagttaaaccttgctgagctggagcaggtccatcgtctgaaaaccggagcgatattggtggttgccgcccgtttaggagcaattctcgccggaggaacggaagagaagatcgaagcgttgaccagctatgctcaagccatcggtctggctttccagattaaggacgatattcttgatctggaaagcgatagcgagaccttaggcaagcctgtacatagcgatctccgccagcataaatccacttatccctctttaatgggtttggcaggcgctaagctggaattgaagataaagaccgatgaagctcatgccgccttggcggttttaggagagcgggcgggtttcctgcatgaattggctgattatatagctcaacggaagtattga

SEQ ID NO: 111757 - protein, 289 aa, Desulfitobacterium hafniense DCB-2
MFQKELEDYARLVDSYLAQFPWPTGTLAESMNYSLSAGGKRIRPVLALAAAHAVGGDCEDILPAVCALELIHTYSLIHDDLPAMDNDDYRRGRLANHKVFGEGQAILAGDALLTYAFELLAQPMSGVDSQRQLRAVREVAQAAGPEGMVGGQMLDLEAEEKQLNLAELEQVHRLKTGAILVVAARLGAILAGGTEEKIEALTSYAQAIGLAFQIKDDILDLESDSETLGKPVHSDLRQHKSTYPSLMGLAGAKLELKIKTDEAHAALAVLGERAGFLHELADYIAQRKY

SEQ ID NO: 111758 - DNA, 954 bp, Synechococcus sp. RS9916
  CDS (1)..(954): transl_table=11
atgaccgccgcggcgaccagttccgagagcgcccggtcagggggtgatcagcaagcctttgatttcaaggcctacctgggctctcagaagcagctggtcgaggccgcgttagacgactcccttggtcccgagcgtccggagtccttgcgagaagcgatgcgctactccctgctggcagggggcaagcgactgcgaccgatcctctgcctggcggcctgtgaactggcgggtggggatccagctctggccatgcccaccgctgtggctctggagatgatccacaccatgtcgctgatccacgatgatctgccggccatggacaacgacgacctgcgccgtggtcgtcccaccaatcacaaggtgtacggcgacgctgtggcgatcctggcgggcgatgccctgctcacccgcgcctttgagatggtgtcgctgcgcagcccaggggtgcctgccgagcgtttgctcaaggtggtggccgagctgtcgctggtggcgggagcccccggcttggtgggcggccaggtggtcgacctggaatgcgagggcaaggatgtcgatctcgacaccctcgaatacatccacctgcacaaaaccggtgcgctgctcaaggcctgcgtgatcaccggtgccctgatcggcggtgccgatgaggcccaactggattccttgcgcacctatgcccgcgggatcggcttggccttccagattgttgacgacatccttgatgtcacggccagcagcgatgtgctcggtaaaaccgccggtaaggatttgatcgctgacaaaaccacctatcccaaattgctgggtcttgaggaatcccgtctgcgggccaagggcttgattcaggaggccaagacctcgttggatgctttcaagccagttggaggtggttcggtgcaggccgcaccgctcctggccctggcggattacgtgatcgggcgtgattgctga

SEQ ID NO: 111759 - protein, 317 aa, Synechococcus sp. RS9916
MTAAATSSESARSGGDQQAFDFKAYLGSQKQLVEAALDDSLGPERPESLREAMRYSLLAGGKRLRPILCLAACELAGGDPALAMPTAVALEMIHTMSLIHDDLPAMDNDDLRRGRPTNHKVYGDAVAILAGDALLTRAFEMVSLRSPGVPAERLLKVVAELSLVAGAPGLVGGQVVDLECEGKDVDLDTLEYIHLHKTGALLKACVITGALIGGADEAQLDSLRTYARGIGLAFQIVDDILDVTASSDVLGKTAGKDLIADKTTYPKLLGLEESRLRAKGLIQEAKTSLDAFKPVGGGSVQAAPLLALADYVIGRDC

SEQ ID NO: 111760 - DNA, 888 bp, Alteromonadales bacterium TW-7; identical to SEQ ID NO: 57493
  CDS (1)..(888): transl_table=11

SEQ ID NO: 111761 - protein, 295 aa, Alteromonadales bacterium TW-7; identical to SEQ ID NO: 57494

SEQ ID NO: 111762 - DNA, 930 bp, marine gamma proteobacterium HTCC2143; identical to SEQ ID NO: 57495
  CDS (1)..(930): transl_table=11

SEQ ID NO: 111763 - protein, 309 aa, marine gamma proteobacterium HTCC2143; identical to SEQ ID NO: 57496

SEQ ID NO: 111764 - DNA, 843 bp, marine gamma proteobacterium HTCC2080
  CDS (1)..(843): transl_table=11
atgagtgatgtgaaccaacccgaagccccgctgcattgtgatgatccgcgcctggctgcggcattgcagtatgtactagaaaatagcggtaaaaagctacgggctcgtttggtcatggctagttatcatatgctttgtgagggcgcggatgatgctgccgcctcagcagccaccgccatagaatggcttcatacctattcgctggttcatgacgatctgccagcaatggacgacgatgccctgcgccgaggaaagcctaccgtccatacggtctacgacgaggcaacggcgattcttatcggtgatgggcttcaggccgcagccttttccttaatctcggaagacgaacggctagccagtggcacgcgcctgaaactgatcacactcatagcaaatgccgtgggctttaacggcatggttggagggcaggccttggacatggcggcacagggtaaggcgtctacattcgaacagctccgccttatccatgagcagaagaccggcgccctcttcagagccgcagtactttcaggtgcggtatgcgccaatgccaccgagcaagacatacagcgtcttgatcaatttgcgagcactattggtctggcctttcaggtcgccgatgacatactggacgtgaccgaaaatagtgccaccctaggaaaaactgctggcaaagatattgccgtagaaaaatcgacttacgtgagttgtcttggactcgaagaggctcaaaatgaagccgaaaggttattggatgaggcgatgacctgcctaaacccctacggcgaccgcgcacaacccttagtagatctcgcaatagccatggttcggcgcaaacattaa

SEQ ID NO: 111765 - protein, 280 aa, marine gamma proteobacterium HTCC2080
MSDVNQPEAPLHCDDPRLAAALQYVLENSGKKLRARLVMASYHMLCEGADDAAASAATAIEWLHTYSLVHDDLPAMDDDALRRGKPTVHTVYDEATAILIGDGLQAAAFSLISEDERLASGTRLKLITLIANAVGFNGMVGGQALDMAAQGKASTFEQLRLIHEQKTGALFRAAVLSGAVCANATEQDIQRLDQFASTIGLAFQVADDILDVTENSATLGKTAGKDIAVEKSTYVSCLGLEEAQNEAERLLDEAMTCLNPYGDRAQPLVDLAIAMVRRKH

SEQ ID NO: 111766 - DNA, 888 bp, Candidatus Desulfococcus oleovorans Hxd3; identical to SEQ ID NO: 57497
  CDS (1)..(888): transl_table=11

SEQ ID NO: 111767 - protein, 295 aa, Candidatus Desulfococcus oleovorans Hxd3; identical to SEQ ID NO: 57498

SEQ ID NO: 111768 - DNA, 900 bp, Escherichia coli B; identical to SEQ ID NO: 57499
  CDS (1)..(900): transl_table=11

SEQ ID NO: 111769 - protein, 299 aa, Escherichia coli B; identical to SEQ ID NO: 57500

SEQ ID NO: 111770 - DNA, 900 bp, Marinobacter sp. ELB17; identical to SEQ ID NO: 57503
  CDS (1)..(900): transl_table=11

SEQ ID NO: 111771 - protein, 299 aa, Marinobacter sp. ELB17; identical to SEQ ID NO: 57504

SEQ ID NO: 111772 - DNA, 1017 bp, Drosophila melanogaster
  CDS (1)..(1017)
atggaagaactgaacatcatattacagaagaccaaagataaatcaacgcaaaaggagcaggatgagattctgctgcagccctttacatacatacaacagattcctggcaagcaattccgctctgagttggccttggccttcaatcactggttgctcataccgggcgaaaagttggcgcagatcggagacattgtgcagatgctgcacaattccagtttgctcattgatgatattgaagacaattcgatccttcgcagaggtgtgcccgtggcgcattccatctacggcgtggccagcaccataaatgcggccaactatgcactctttctggcgctggagaaggtgcagcagctggatcatccggaggctaccaaggtgtacaccgaacaattgctggagctgcaccgtggacagggcatggagatctattggcgcgacagcttcacgtgtccatccgagtcggattacaagctgatgactgtgcgcaaaactggcggcctctttatgctggccattcgccttatgcagctgttcagctccaacaaggaggactattcgaagttgacggctatattgggcctgtactttcagatacgcgacgactattgcaatctgagtctgaaagagtacacggagaacaagagcttcgccgaggacttgacggagggcaagttcggcttcccggtaatccatgcggttcgcacccaaaagcaggataaacaggttctacacatattacgccagcgcacgcacgacattgaggtcaagaagtactgcatcaccttgttggaaaagctgggcagctttcagtatacacgcaaggttctggagtcgctcgacgcagaggctcggtcggaggtggctcgtctgggtagcaatccgtacatggaccgcctgctcaacaagctgctgtcgtggaagacgagcgatagcgccagcatcacgcagtcgaaccagatcaatcacaacaacgtctcacgcagcagccccaaccagaacacgttcaattgcaattag

SEQ ID NO: 111773 - protein, 338 aa, Drosophila melanogaster
MEELNIILQKTKDKSTQKEQDEILLQPFTYIQQIPGKQFRSELALAFNHWLLIPGEKLAQIGDIVQMLHNSSLLIDDIEDNSILRRGVPVAHSIYGVASTINAANYALFLALEKVQQLDHPEATKVYTEQLLELHRGQGMEIYWRDSFTCPSESDYKLMTVRKTGGLFMLAIRLMQLFSSNKEDYSKLTAILGLYFQIRDDYCNLSLKEYTENKSFAEDLTEGKFGFPVIHAVRTQKQDKQVLHILRQRTHDIEVKKYCITLLEKLGSFQYTRKVLESLDAEARSEVARLGSNPYMDRLLNKLLSWKTSDSASITQSNQINHNNVSRSSPNQNTFNCN

SEQ ID NO: 111774 - DNA, 888 bp, Flavobacterium sp
  CDS (1)..(888): transl_table=11
atgacgcccaagcagcaattccccctacgcgatctggtcgagatcaggctggcgcagatctcgggccagttcggcgtggtctcggccccgctcggcgcggccatgagcgatgccgccctgtcccccggcaaacgctttcgcgccgtgctgatgctgatggtcgccgaaagctcgggcggggtctgcgatgcgatggtcgatgccgcctgcgcggtcgagatggtccatgccgcatcgctgatcttcgacgacatgccctgcatggacgatgccaggacccgtcgcggtcagcccgccacccatgtcgcccatggcgaggggcgcgcggtgcttgcgggcatcgccctgatcaccgaggccatgcggattttgggcgaggcgcgcggcgcgacgccggatcagcgcgcaaggctggtcgcatccatgtcgcgcgcgatgggaccggtggggctgtgcgcagggcaggatctggacctgcacgcccccaaggacgccgccgggatcgaacgtgaacaggacctcaagaccggcgtgctgttcgtcgcgggcctcgagatgctgtccattattaagggtctggacaaggccgagaccgagcagctcatggccttcgggcgtcagcttggtcgggtcttccagtcctatgacgacctgctggacgtgatcggcgacaaggccagcaccggcaaggatacggcgcgcgacaccgccgcccccggcccaaagggcggcctgatggcggtcggacagatgggcgacgtggcgcagcattaccgcgccagccgcgcgcaactggacgagctgatgcgcacccggctgttccgcggggggcagatcgcggacctgctggcccgcgtgctgccgcatgacatccgccgcagcgcctag

SEQ ID NO: 111775 - protein, 295 aa, Flavobacterium sp
MTPKQQFPLRDLVEIRLAQISGQFGVVSAPLGAAMSDAALSPGKRFRAVLMLMVAESSGGVCDAMVDAACAVEMVHAASLIFDDMPCMDDARTRRGQPATHVAHGEGRAVLAGIALITEAMRILGEARGATPDQRARLVASMSRAMGPVGLCAGQDLDLHAPKDAAGIEREQDLKTGVLFVAGLEMLSIIKGLDKAETEQLMAFGRQLGRVFQSYDDLLDVIGDKASTGKDTARDTAAPGPKGGLMAVGQMGDVAQHYRASRAQLDELMRTRLFRGGQIADLLARVLPHDIRRSA

SEQ ID NO: 111776 - DNA, 897 bp, Brevundimonas vesicularis
  CDS (1)..(897): transl_table=11
atggcgatcgtcggcatccggcgccaaacgcccctggtgggcgcatcctgcgcccccgacgatctgcgcctgcaggttcaggcgcgcctggccgaggtggcgccggcgcacgacggcctgctgtccacagcggctcgcgaggccttgctgggacggggaaaacgcgtccggcccgtgctggccatgctggcggcggcgcatgtcggcggcgatcccgaagacgccttggaatatgcctgcgcgctggaaatggtccatgccgcgtcgctggttctggacgatctgccgtgcatggacgacgcctcgctgcgtcggggccagccgaccctgcatcatcgccacggcgaggatacggcggttctggcggccgtggccctgttgaaccaggcgacgcgtctggtgctgcagactgcggcgccggcggaaacgcgtctggcggccctggaccttttgacgcaggcgatcggcttcgacggcctgtccgagggtcagatgcgcgacctgcgcgacgacgcgcgggatcgcgacgaaagcgccctgcgtcagatcaacgatctgaaaaccggcgccctgtttgtcgccaccgtgcgcggcggcggtctgctcggcggcggcgatgcgcaggatttggcgcggctgtcgatcttcggcgaggcgatcggcttcgccttccagctttgcgacgatctgctggatgtctgttcgaccgtggacgccgctggcaaggacgtgggtcaagacgacgacaccaccaccttcgttgatctgtggggcgaatgccggacccgcgcggcggttcggcaatcgttgggcaaggcggtcgaggccgttggccatgacagccccctggctgtctatgtcctggaccttttccagcaggccgaacttggggtgtga

SEQ ID NO: 111777 - protein, 298 aa, Brevundimonas vesicularis
MAIVGIRRQTPLVGASCAPDDLRLQVQARLAEVAPAHDGLLSTAAREALLGRGKRVRPVLAMLAAAHVGGDPEDALEYACALEMVHAASLVLDDLPCMDDASLRRGQPTLHHRHGEDTAVLAAVALLNQATRLVLQTAAPAETRLAALDLLTQAIGFDGLSEGQMRDLRDDARDRDESALRQINDLKTGALFVATVRGGGLLGGGDAQDLARLSIFGEAIGFAFQLCDDLLDVCSTVDAAGKDVGQDDDTTTFVDLWGECRTRAAVRQSLGKAVEAVGHDSPLAVYVLDLFQQAELGV

SEQ ID NO: 111778 - DNA, 906 bp, Enterobacter sakazakii
  CDS (1)..(906): transl_table=11
atgaacgctaacgccgtgaaatcttcagggcaggaaatcgaattgcaggcgctgcgcgacgcgctgcaaacccgccttgacgagcttctgccgccgggccaggagcgcgatctggtctgcgccgcgatgcgcgaaggcgcgctgacgcccggtaagcgggtgcgcccgctgctgctcattcttgccgcgcgcgatctcggctgcgacgccagccagcctgcgttgatggatctcgcctgcgccgtggagatggtgcacgccgcgtcgctgatgctcgacgatattccgtgcatggataacgccctgctgcgccgcggcaagcccaccattcaccgccagtatggcgaaagcgtggcgatcctcgcggcggtggcgctgctgagccgggcattcggcgtggtggcgcaggcaaatccgctctccgatagctgcaaaactcaggcggtgagcgagctttccagcgccgtcgggttgcaggggctggtgcaggggcagtttcgcgatctcagcgaaggcaaccaggcccgcagcgccgaggcgatactcgccactaacgatctcaaaaccagcgtgctgtttgacgccacgctgcaaatcgccgccatcgccgctggcgcttccgcctcggtgcgccataaacttcgcgagttctcgcgccatctcggccaggcgttccagctgcttgacgatctggcggatggcctgaaccataccggtaaagacattaataaagacgccgggaaatcgacgctggtggcgatgcttggcccggaagcggtgcatcagcgcctgcgcgatcacctgctgcgcgccgatgagcatctcaccggtgcctgttcacgcggcgcatccacccgccgttttatgtacgcctggtttgataaacagctggctatgtttggctga

SEQ ID NO: 111779 - protein, 301 aa, Enterobacter sakazakii
MNANAVKSSGQEIELQALRDALQTRLDELLPPGQERDLVCAAMREGALTPGKRVRPLLLILAARDLGCDASQPALMDLACAVEMVHAASLMLDDIPCMDNALLRRGKPTIHRQYGESVAILAAVALLSRAFGVVAQANPLSDSCKTQAVSELSSAVGLQGLVQGQFRDLSEGNQARSAEAILATNDLKTSVLFDATLQIAAIAAGASASVRHKLREFSRHLGQAFQLLDDLADGLNHTGKDINKDAGKSTLVAMLGPEAVHQRLRDHLLRADEHLTGACSRGASTRRFMYAWFDKQLAMFG

SEQ ID NO: 111780 - DNA, 1092 bp, Solanum lycopersicum
  CDS (1)..(1092)
atgagatctatgaaccttgttgattcatggggtcaagcttgtctagttatcaatcaatctttaccttacaattcgtttaatggattgatgaaaatcaattcgaaaaatcgaaaaattttgaaacagagtttatcttatagaacattttcatctctaactgtttcagctattgctaccaatgagaaagttgttatggaaaaagaagaatttaatttcaaggtttacgtagctgaaaaggcgatttgtgtaaataaagctttggatgaggctataatggtaaaagacccacctaagatccatgaagcaatgcgttattcgcttctcgccggcgggaagagagtccggccgatgctctgtcttgctgcctgtgaacttgttgggggaaaccaaggaaatgccatggcggctgcttgtgctgttgagatgatacatactatgtctctaattcatgatgatttgccttgtatggatgacgacgatctccgccgtggaaagccgacgaatcataaagtgtacggtgaggatgtggcggtcctcgccggagatgcgctacttgctttcgcattcgagtacctcgctaccgctacaaccggagttcctccgtcgaggatcctcgttgctgtcgccgaattggcgaaatctgttggaacggaagggttagtagctggacaagtagcggatttagcttgtactggtaaccctaatgtgggattagaaatgcttgaattcattcacatacacaaaacggcggcgttgctagaagcttccgttgtaatcggagcaatcctcggcggcggagctgatgaagaagtggataagttaaggagatttgcccaatgcatcggtttattgtttcaggtagttgatgatatccttgacgtgacaaagtcatcgtcggagctcggaaaaaccgccggaaaagatttggcggttgataaaacgacgtatccgaagctgctgggattggaaaaggctaaggaatttgcggcggagctcaacggcgaagctaaacaacagctggcggcgtttgattcacacaaagctgctccattgattgctttagcagattacattgctaatcgtcaaaattaa

SEQ ID NO: 111781 - protein, 363 aa, Solanum lycopersicum; identical to SEQ ID NO: 57518

SEQ ID NO: 111782 - DNA, 1098 bp, Solanum lycopersicum
  CDS (1)..(1098)
atggcatttttagctaccatttctggccttgacaatctgttcctttctaataccccaaacaataactttgctttcagtagaaaactcccaccaagccaatcttacagtttccttcacaagaaaatacacgctagcgatgttgcgaactcgttccaaacttttcaagtcaaggaacgagatgtttcatccaaggcagagaaattcatcttgcctgagtttgagtttcaagaatacatggtaacgaaggcaatcaaggtaaacaaagcactagatgaagcaataccaatgcaagagcctataaaagttcatgaagccatgaggtactcacttctagctggaggaaaacgtgtccggccgatcctctgcatggcttcttgtgaagttgtaggaggggatgaatccttagctatacctgcagcttgcgcagttgagatgatccataccatgtcactcgtccatgatgatcttccctgcatggacaacgatgatctacgtcgtggcaagcccacgaaccataagatttttggagaaaacactgcagttcttgcaggggatgcacttttatctttggcctttgaacatgtggctaccaagactcagaatgtgccaccccaaagagtggtccaagccattggggaattgggttcagctgttggctcagaagggctcgtggcagggcagattgtggacttggcgagtgaaggaaaacaagttagcctaactgaactggagtacattcaccaccataagacgtcgaagcttttggaggctgctgtggtttgtggggcaataatggggggaggaaatgaggttgatgtggagcgaatgaggagctatgctaggtgcattggactcttatttcaagtggtagatgatattcttgatgttaccaagtcatcagatgagctgggaaagacagcgggtaaggacctaataacagataaggctacatatcctaagttgatggggctagaaaaggctcgacaatatgccggtgagctgatggctaaggccatgaatgagctaagctacttcgactatgcaaaggcagcacctctttatcatattgctagttatattgcaaatcgacagaattga

SEQ ID NO: 111783 - protein, 365 aa, Solanum lycopersicum; identical to SEQ ID NO: 57520

SEQ ID NO: 111784 - DNA, 1225 bp, Stevia rebaudiana; identical to SEQ ID NO: 57523
  CDS (30)..(1115)

SEQ ID NO: 111785 - protein, 361 aa, Stevia rebaudiana; identical to SEQ ID NO: 57524

SEQ ID NO: 111786 - DNA, 1038 bp, Chrysanthemum x morifolium
  CDS (1)..(1038)
  misc_feature (348)..(348): y is t or c
atgattcttattaatcccacatctttgttctatggagcctcacttaaacccagatctacaagcttcatttaccagacccgaaaatcacaatccgtttcaatttcagcacttttgaccaaagaacagcaatcaaaacatacccaattggaatctgaatttgatttcaagtcttacatggtacagaaagcaaatacggtaaaccaagccttagacgacgccgtaccaataagagagccgaaaaaaattcatgaatctatgcgctactcgcttttagcaggcggaaaacgtgtccgaccaatattatgtctcgcttcatgcgaacttgtcgggggagaccaaatatcagcyatgccagccgcatgtgctgttgagatgatacatactatgtcattaatgcacgatgatcttccttgtatggataacgatgatttccgtagagggaagcctactaaccatatagtttatggtgaggaaatagctgtattagcaggtgatgctttgttgtcatttgctttcgagcatgtggctactgctactaaagatgtttcagctgagagaattgtccgtgctattggcgaattagccaaatgtatcggctctgaagggcttgttgctggacaagttgtggatatttgttctgaaggtgctgatgtcggtttggagcatttggagtttattcatttacataagactgctgctttgcttgagggttctgttgtgctaggtgcgattatgggtggtgggtcggatgttgaggttgaaaggctaagaaagtttgttagatcaattgggttgttgtttcaggttgttgatgacatacttgatgtgacgaaatcttctgaggagttggggaaaactgctggtaaagatctggtggctgataagacgacgtatcccaagttgttggggattgagaaatcgcgcgaatttgctgagaaattgaataaggaagcacaggaacagttgaaggagtttgatattcgaaaagctgcgccgttaattgctcttgctaattatattgcatatagggacaattga

SEQ ID NO: 111787 - protein, 345 aa, Chrysanthemum x morifolium; identical to SEQ ID NO: 57526

SEQ ID NO: 111788 - DNA, 1098 bp, Daucus carota subsp
  CDS (1)..(1098)
atggcaagtgttatgaatctaagcataacccatttttgtagctcccatcttaagcagaaatcacctagtaacaaacttgtttttcatggcctaaactcaaaccctttcttaaaatcgaaaccaccacaaaatgttatcccatattcatcaatgtccatatcttcgttccataccactaaaatagctatggattcatcgcccaaacctcccacatttgatttcaagtcatacatgctcgaaaaggccatttctgtcaacaaagccctagacgcttcagtctcactccaagagcctgtcaaaatacacgagtcaatgcgttactcccttctcgcagggggcaagcgtgtccgtcctattcttagtattgctgcctgcgaattatttggagggcacgaggccgtagccatgccctccgcttgtgctgtggagatgatccacacgatgtctctcatgcacgacgatctcccttttatggacaatgatgatctacgacgaggcaaacctactaaccacaaagtctatggtgaaagcgttgctgttcttgctggagacgcgatgttagccctagctttccaccttgtagctactgagaccagcggagtctcgtcgagtcaagtggtgagagtgatcgttgagctggctaaggcaataggcgcagaagggctggttgcaggacagattgtggatgtgtgttctgaaggtgatcctaatctcggattaaaagatttggagtttattcatcgaagcaaaactgcagcattattggaaggttcggttgttatgggggcaattttgggaggtgcaaatgatgaagaagttgagaaagtgagaaagtatgctaggtgcattggattgttgtttcaagtagttgatgatattcttgatgtcacaaagtcttcgaaggaattaggaaaaacggctgggaaagatttggtggctgataagacgacgtatcctaaacttattgggattgagaaatcaagagagttttctgatgagttgaaaagggaagctgtagatcagcttgctggatttaattcagataaggctgcgcctttgattgctatggctaattacattgcaaatcgagacaactga

SEQ ID NO: 111789 - protein, 365 aa, Daucus carota subsp
MASVMNLSITHFCSSHLKQKSPSNKLVFHGLNSNPFLKSKPPQNVIPYSSMSISSFHTTKIAMDSSPKPPTFDFKSYMLEKAISVNKALDASVSLQEPVKIHESMRYSLLAGGKRVRPILSIAACELFGGHEAVAMPSACAVEMIHTMSLMHDDLPFMDNDDLRRGKPTNHKVYGESVAVLAGDAMLALAFHLVATETSGVSSSQVVRVIVELAKAIGAEGLVAGQIVDVCSEGDPNLGLKDLEFIHRSKTAALLEGSVVMGAILGGANDEEVEKVRKYARCIGLLFQVVDDILDVTKSSKELGKTAGKDLVADKTTYPKLIGIEKSREFSDELKREAVDQLAGFNSDKAAPLIAMANYIANRDN

SEQ ID NO: 111790 - DNA, 951 bp, Lupinus albus
  CDS (1)..(951)
atgctcactaaagaagataccgttaaagacaaagaagaagaagaagaagaagaagagaaacccagattcaatttcaacttgtacatggttgagaaatcacgttcagtgaaccaagctttaaacgacgccgtttcgttacgtgagccacataaaattcacgaagctatgcggtattctctactcgccggcgggaagcgcgtgaggccggtgttatgcattgcagcctgtgaagttgtcggcggcaatgaatctacggcgatggccgccgcatgttcaattgagatgatacacactatgtcccttattcatgatgatctcccctgcatggacaacgacgatcttcgccgagggaaacccacaaaccacaaggttttcggcgaaaatatcgctgtccttgcaggggatgcattattggcatttgcctttgagcatatcgccgtttcaacctccggtgtgtcaccggagagaattatcggcgcaatcggggagcttgcgaaatcgatcggaactgaaggccttgttgcaggacaagtagtggatattaattcagaagggttatgtgatattgggttagagaaattggaatttattcatcttcataaaacagcagcacttctagaaggttctgttgttgttggagcaattcttggtggtgggtgtaatgaagaggttgaaaagttaaggatgtttgctaggtacataggattgatgtttcaggttgttgatgatgttcttgatgttactaagtcttcaaaggaattgggaaaaactgcagggaaggatttggtggctgataaggttacttaccctaagcttttagggattgagaaatctaatgagtttgctcagaaattgaatagggatgcacaagaacagctttctggttttgatccagttaaggttgctcctttgattgcattagctaattacattgcttatagcccaaattaa

SEQ ID NO: 111791 - protein, 316 aa, Lupinus albus; identical to SEQ ID NO: 57528

SEQ ID NO: 111792 - DNA, 1083 bp, Arabidopsis thaliana; identical to SEQ ID NO: 57533
  CDS (1)..(1083)

SEQ ID NO: 111793 - protein, 360 aa, Arabidopsis thaliana; identical to SEQ ID NO: 57534

SEQ ID NO: 111794 - DNA, 1302 bp, Ips pini; identical to SEQ ID NO: 57535
  CDS (1)..(1302)

SEQ ID NO: 111795 - protein, 433 aa, Ips pini; identical to SEQ ID NO: 57536

SEQ ID NO: 111796 - DNA, 819 bp, Thermotoga sp; identical to SEQ ID NO: 57537
  CDS (1)..(819): transl_table=11

SEQ ID NO: 111797 - protein, 272 aa, Thermotoga sp; identical to SEQ ID NO: 57538

SEQ ID NO: 111798 - DNA, 1116 bp, Picrorhiza kurrooa
  CDS (1)..(1116)
atgagccttgtaaattctattacatggtcacaaacaagctccatactcaacattcaaagcaacatatcaaaaaaactcacacccttctctattctcccacatccactaacaaacaatcttccaatctcccttttcccaaacccaaaatcaaacatatccaattccaacactcccctctcagcaattctcaccaaagaccagaaaccccaaaatcctccaaccacacccacattcgatttcaagtcctacatgctccaaaaagcggattccgtaaacaaagccttagacgactcaatccccctaacagagccgttaaaaatccaagaatcaatgcgatattcccttctcgccggcgggaaaagaatccggccaatgctctgcatcgccgcctgtgaactcgtaggcggcgacgagtccaccgccatgccggcagcgtgcgcagtcgagatggtccacaccatgtccttgatgcacgacgacttgccatgcatggataacgacgatttacgcagggggaaaccgacgaatcacaaggtcttcaccgaagatgttgcggttttggcgggagacgcgatgctggcattttcgttcgaacacgtggcgagtttgacgaaaggggtttgttcagaaaggattgtgagagtgatttatgagcttgccaagtgtgttgggtgtgaagggcttgtcgcagggcaagtggtagatatatgttctgagggaatggatgaggtgggattggagcatttggagtttatacatttgaataaaaccgcggctttattggagggatcggtggttttgggcgcgattttgggtggtgggagtgatgaggaggttgagaagttgaggaatttcgctaggtgtattgggcttttgtttcaggttgtggacgatattcttgatgttaccaagtcgtccaaagaattggggaagacggccgggaaggatttggtggcggataagacgacttatccgaagctgatcgggattgagaaatccaaggagtttgctgagaggttgaatagggaagctaaggagcaccttgctgggtttgatcagaacaaggcggctcctttgattgctctggctgattacattgcgtacagggataattga

SEQ ID NO: 111799 - protein, 371 aa, Picrorhiza kurrooa; identical to SEQ ID NO: 57540

SEQ ID NO: 111800 - DNA, 1657 bp, Ginkgo biloba; identical to SEQ ID NO: 57543
  CDS (225)..(1400)

SEQ ID NO: 111801 - protein, 391 aa, Ginkgo biloba; identical to SEQ ID NO: 57544

SEQ ID NO: 111802 - DNA, 1119 bp, Antirrhinum majus
  CDS (1)..(1119)
atgagcctggtaaatcccattacaacctggtcaacaacaacaacctcaaaatccccaaaaaatgtccaaaccaccaccagatccagatccatcattctccctcacaaaatctcccttttcccatcaaaccccaaatcaaaatcaaaaacccacctcagattctcaatatcatcaatcctgacgaagaacccacaagaatcaagccaaaaaacctccaaagatccaacctttaccctcgatttcaaaacctacatgctagaaaaagccagctctgttaacaaagccttagaacaagctgttttactcaaagagcccttaaaaatccacgaatcgatgaggtactcgcttctagccgggggcaaaagggtcagaccaatgctctgcatcgccgcttgtgagctagttggtgggctggaatccactgcgatgccctcagcttgtgctgttgaaatgatccataccatgtctttgatccacgatgatttgccctgtatggataacgacgatttacgacgtggaaagcccacaaaccacaagatttatggcgaagacgtggcggttttagccggggatgccctgttagcgttctcgttcgagcacgtggcaaaatcgacgaaaggggtgtcgtcggataggattgttagggtgattggtgaattggctaagtgtattggctctgagggtttagttgcaggccaagtggttgatataagttctgaaggaatgactgaagttggattggagcatttggagtttatccacgtgcacaagaccgcggcgttgttggaggcttcggtggttttgggcgcgattgtgggtggtgcggatgatgaggatgttgagaagttgaggaaattcgcgaggtgtatcgggcttttgtttcaagtggttgatgatattttggatgttactaagtcttcgcaagaattggggaagacggcgggtaaagacttggttgcggataagactacgtatccgaagctgcttgggattgagaagtcgagggagtttgcggagaagttgaatagggaggcgcaggagcagctcgaggggttcgattcggttaaggctgcgccgttgatcgcgttggctaactacatcgcttatagagataattga

SEQ ID NO: 111803 - protein, 372 aa, Antirrhinum majus; identical to SEQ ID NO: 57546

SEQ ID NO: 111804 - DNA, 960 bp, Bacillus stearothermophilus
  CDS (1)..(960): transl_table=11
gtggcgcagctttcagttgaacagtttctcaacgagcaaaaacaggcggtggaaacagcgctctcccgttatatagagcgcttagaagggccggcgaagctgaaaaaggcgatggcgtactcattggaggccggcggcaaacgaatccgtccgttgctgcttctgtccaccgttcgggcgctcggcaaagacccggcggtcggattgcccgtcgcctgcgcgattgaaatgatccatacgtactctttgatccatgatgatttgccgagcatggacaacgatgatttgcggcgcggcaagccgacgaaccataaagtgttcggcgaggcgatggccatcttggcgggggacgggttgttgacgtacgcgtttcaattgatcgtcgaaatcgacgatgagcgcatccctccttccgtccggcttcggctcatcgaacggctggcgaaagcggccggtccggaagggatggtcgccggtcaggcagccgatatggaaggagaggggaaaacgctgacgctttcggagctcgaatacatccatcggcataaaaccgggaaaatgctgcaatacagcgtgcacgccggcgccttgatcggcggcgctgatgcccggcaaacgcgggagcttgacgaattcgccgcccatctaggccttgcctttcaaattcgcgatgatattctcgatattgaaggggcagaagaaaaaatcggcaagccggtcggcagcgaccaaagcaacaacaaagcgacgtatccagcgttgctgtcgcttgccggcgcgaaggaaaagttggcgttccatatcgaggcggcgcagcgccatttacggcacgccgacgttgacggcgccgcgctcgcctatatttgcgaactgtcgccgcccgcgaccattaaaagcggaacggccgcccttgcttcggagcaagggcggctgtgttgcttttttgcttccgccccatga

SEQ ID NO: 111805 - protein, 319 aa, Bacillus stearothermophilus
MAQLSVEQFLNEQKQAVETALSRYIERLEGPAKLKKAMAYSLEAGGKRIRPLLLLSTVRALGKDPAVGLPVACAIEMIHTYSLIHDDLPSMDNDDLRRGKPTNHKVFGEAMAILAGDGLLTYAFQLIVEIDDERIPPSVRLRLIERLAKAAGPEGMVAGQAADMEGEGKTLTLSELEYIHRHKTGKMLQYSVHAGALIGGADARQTRELDEFAAHLGLAFQIRDDILDIEGAEEKIGKPVGSDQSNNKATYPALLSLAGAKEKLAFHIEAAQRHLRHADVDGAALAYICELSPPATIKSGTAALASEQGRLCCFFASAP

SEQ ID NO: 111806 - DNA, 933 bp, Rhodocyclus gelatinosus
  CDS (1)..(933): transl_table=11
atgaacacgatgactcgcatcgaacaggcgctggaggcggctctcgtcgccaacgaaggcgccggttgccccccgaagctggccgcggcgatccgccacgccgtcttccccggcggtgcccgcatccggccgcagctgtgcatcgccgtcgcgatggccaacggcgacaccgacccggccctggccgacgccgccgcgtcggcgatcgaactgatccactgcgcttcgctggtgcacgacgacctgccgtgtttcgacgacgcgccgacgcgccgcggccagccctcggtgcacaaggcctacggcgaacgcctggccgtgctggccggcgacgcgctgatcgtcaccgccttccagactctcggcgccgcaggtggccgccaccccgagcgcatggcgcacgtgctgcagaccgtggcacgcggcgtcggcacgccgctgggcatcatcgccggccaggcctgggagtgcgaaccgcgcgtcgcgctgtccgactaccagcgtgccaagaccggggcgctgttcgccgcggccacggccgccggcgcgcaggcctcgggcggcgacggcgagacctggcgtgcgctcggcgactggctgggcgaagcctatcaagtggccgacgacgtgcgtgacgcgctcgccgaccccgaacaactcggcaagccggtcggccgcgacgtcgcgcttggccgcccgagcgcggcgatccagcacggcctggtcggcgccgtcgaacatttcgaacgcctggtgcagggcgcgatcgacgccatcccggactgcaagggtgccggcatgctgcgccagatcgtgcgcatggaggccgagcgcctcgtgcccaaggcctggtgcgccaacatcgaagcgctcgccgagcgcgccgcggttcgtgccgccgagcggtccgccgctccgacccagaccgcttga

SEQ ID NO: 111807 - protein, 310 aa, Rhodocyclus gelatinosus
MNTMTRIEQALEAALVANEGAGCPPKLAAAIRHAVFPGGARIRPQLCIAVAMANGDTDPALADAAASAIELIHCASLVHDDLPCFDDAPTRRGQPSVHKAYGERLAVLAGDALIVTAFQTLGAAGGRHPERMAHVLQTVARGVGTPLGIIAGQAWECEPRVALSDYQRAKTGALFAAATAAGAQASGGDGETWRALGDWLGEAYQVADDVRDALADPEQLGKPVGRDVALGRPSAAIQHGLVGAVEHFERLVQGAIDAIPDCKGAGMLRQIVRMEAERLVPKAWCANIEALAERAAVRAAERSAAPTQTA

SEQ ID NO: 111808 - DNA, 912 bp, Pantoea stewartii
  CDS (1)..(912): transl_table=11
atgatggtctgcgcaaaaaaacacgttcaccttactggcatttcggctgagcagttgctggctgatatcgatagccgccttgatcagttactgccggttcagggtgagcgggattgtgtgggtgccgcgatgcgtgaaggcacgctggcaccgggcaaacgtattcgtccgatgctgctgttattaacagcgcgcgatcttggctgtgcgatcagtcacgggggattactggatttagcctgcgcggttgaaatggtgcatgctgcctcgctgattctggatgatatgccctgcatggacgatgcgcagatgcgtcgggggcgtcccaccattcacacgcagtacggtgaacatgtggcgattctggcggcggtcgctttactcagcaaagcgtttggggtgattgccgaggctgaaggtctgacgccgatagccaaaactcgcgcggtgtcggagctgtccactgcgattggcatgcagggtctggttcagggccagtttaaggacctctcggaaggcgataaaccccgcagcgccgatgccatactgctaaccaatcagtttaaaaccagcacgctgttttgcgcgtcaacgcaaatggcgtccattgcggccaacgcgtcctgcgaagcgcgtgagaacctgcatcgtttctcgctcgatctcggccaggcctttcagttgcttgacgatcttaccgatggcatgaccgataccggcaaagacatcaatcaggatgcaggtaaatcaacgctggtcaatttattaggctcaggcgcggtcgaagaacgcctgcgacagcatttgcgcctggccagtgaacacctttccgcggcatgccaaaacggccattccaccacccaactttttattcaggcctggtttgacaaaaaactcgctgccgtcagttaa

SEQ ID NO: 111809 - protein, 303 aa, Pantoea stewartii
MMVCAKKHVHLTGISAEQLLADIDSRLDQLLPVQGERDCVGAAMREGTLAPGKRIRPMLLLLTARDLGCAISHGGLLDLACAVEMVHAASLILDDMPCMDDAQMRRGRPTIHTQYGEHVAILAAVALLSKAFGVIAEAEGLTPIAKTRAVSELSTAIGMQGLVQGQFKDLSEGDKPRSADAILLTNQFKTSTLFCASTQMASIAANASCEARENLHRFSLDLGQAFQLLDDLTDGMTDTGKDINQDAGKSTLVNLLGSGAVEERLRQHLRLASEHLSAACQNGHSTTQLFIQAWFDKKLAAVS

SEQ ID NO: 111810 - DNA, 975 bp, Rhizobium loti
  CDS (1)..(975): transl_table=11
atgaacgacatgcagaccgattccacgctacacgacgacgcgcaggcgcgtggcgcatccggcaggctgccgccggagatctggatgcaggacggcgcaaggcgggtcgaacaggcgctggcgcgtcttctctgcgccgaagacgacggtgagaccgagctgatggcggcgatgcgctacgccaccttgcatggcggaaagcgcactcgcgccttgctctgtctggctaccggcgcactggccgacacgccggcgcccatgctcgacgatgtcggcgccgccatcgagatgatgcacgcctgtaccctggtccacgacgacctgcccgcaatggacgatgacgtgcttcgccgcggccttccgaccgtgcacgtcaagttcggcgaagccactgcgatcctggtcggcgatgcgctgcaggcgcacgccttcctgaccctggcgagcctggatgcgccgggcgacaaccgtatcgcgctcgtgcgcgaactggcgcaggcggtgtccgccgagggtgccgcaggcgggcaggccatggatctgtcgctggtaggaaagcacgtcgagctggacaggatcgtggcgatgcaccggatgaagagcggagcactagtgcgcgcgtccgttcgcatgggcgcgctatgcgccatcgcggaggatgccgcccacgctgcgctgtactgtgcgctcgatcgctactccgcctgtttcggcctggcgttacaggtggtcgacgacattctcgacgcgacagcggataccgcgacgttgggcaagacccccggcaaggacgcggcggcgcagaagccgacctgtgcgtcgatcatggggctgcaggcagcgcgccagttggcgctggatctgttgcgcgacgccggggaggccatcgccccgctgggaacgcgtgcggaacggttggcgcagatgctgcagcgggccaacgcgtatctgttcaagcacgcgccatgcgcatga

SEQ ID NO: 111811 - protein, 324 aa, Rhizobium loti
MNDMQTDSTLHDDAQARGASGRLPPEIWMQDGARRVEQALARLLCAEDDGETELMAAMRYATLHGGKRTRALLCLATGALADTPAPMLDDVGAAIEMMHACTLVHDDLPAMDDDVLRRGLPTVHVKFGEATAILVGDALQAHAFLTLASLDAPGDNRIALVRELAQAVSAEGAAGGQAMDLSLVGKHVELDRIVAMHRMKSGALVRASVRMGALCAIAEDAAHAALYCALDRYSACFGLALQVVDDILDATADTATLGKTPGKDAAAQKPTCASIMGLQAARQLALDLLRDAGEAIAPLGTRAERLAQMLQRANAYLFKHAPCA

SEQ ID NO: 111812 - DNA, 864 bp, Paracoccus zeaxanthinifaciens
  CDS (1)..(864): transl_table=11
atgcaggcccgcctggccgagatccggcccctggtcgaggccgagctgaacgccgccatcgacgcgctgcccgcgggcgatctgtcggatgcgatgcgctatgccgtgcagggcggcaagcggctgcgcgcgttcctggtgatggagtcggcgcgcctgcacgggctggacgacgacgcatcgctgcccgtcgccgccgcggtcgaggcgctgcacgcctacagcttggtccatgacgacctgcccgcgatggatgacgacgacctgcggcgcggtcagcccaccgtccacgtcaaatggaccgaggcgaccgcgatccttgcgggcgatgcgctgcagacgctggccttccagctgctggccgatccgcgcgtgggcgacgatgcggcgcggatgcggctggtcggttcgctggcgcaggcatcgggggctgcgggcatggtctggggccaggcgctggacatcgcggccgagacctcgggcgtgccgctggatctggacgcgatcatccgcctgcagggtggcaagaccggcgcgctgatccgctttgccgcgaccgccgggccgctgatggcgggggcggaccctgccgcgctggacgattatgcgcaggccgtcgggctggccttccagatcgcggacgacatcctggacgtcgagggctgcgaggccgcgaccggcaagcgcgtcggcaaggatgcggatgccaacaaggcgaccttcgtctcgctgctgggcctcgagggggcgcggtccgaggcgcgtcgcctggccgatgcggggcaggacgcgctggcgggttacggcgatgctgcggggaaccttcgggacctggcgcgcttcgtgatcgaacgcgacagctga

SEQ ID NO: 111813 - protein, 287 aa, Paracoccus zeaxanthinifaciens; identical to SEQ ID NO: 57550

SEQ ID NO: 111814 - DNA, 1412 bp, Arabidopsis thaliana
  CDS (140)..(1255)
gttacttcctaggttctcactaatggccaatccaattctccattcataattttgactccactttccaaaacaaacaaaaaaaaataaatactaatataaaaaattctcaaatctaaaatttcagatttcagaaatcgccatggcttcagtgactctaggttcatggattgttgttcaccaccacaatcatcatcatccatcttcaatccttaccaaatccagatccagatcttgtcctataactcttactaaacccatctcctttcgatcaaaacgcaccgtttcatcatcttcttcaatcgtttcttcttccgttgttacaaaagaagacaatctacgccaatctgaaccatcctctttcgatttcatgtcgtacatcatcaccaaagccgaattagtcaacaaagctttagattcagctgttcctctccgtgagccactcaagatccacgaagcgatgcgttactctcttctcgccggtggcaaaagagttagaccagttctctgcatcgctgcttgtgaactcgtcggaggtgaagaatcaaccgctatgccagcagcttgcgccgtcgagatgattcacaccatgtcgttgatccacgacgatctcccttgtatggataacgacgatctccgccgtggaaaaccgaccaaccacaaagtgtttggtgaagacgtcgctgttttagccggagacgcgcttctctctttcgctttcgagcatttagcttcggcgacgagttctgatgttgtttctccggtgagagtggttcgagccgttggagaattggctaaagcgataggaacagaagggttagtggcgggtcaagtcgtggatattagtagtgaagggttagatttaaacgacgtcggtttagagcatttggagtttatccatttgcataaaacggcggcgttgcttgaagcttctgctgttttgagagctattgttggtggaggaagtgatgatgagattgagaggttaagaaagtttgcgagatgtattggtttgttgtttcaggtggttgatgatatcttgtatgtgacgaaatcgtcgaaagagttagggaaaactgctgggaaagatttgattgctgataagttgacgtatcctaagattatgggtttggagaaatcgagagagtttgctgagaaattgaatagagaggctcgtgatcagcttttagggtttgattctgataaggttgctcctttgttggctttggctaattacattgcctatagacagaactgatttgtgttcgattccttttgtcgggaatcattattagattggaattgtagaaatctcggacaggttctctagagtttgttggtgtaatcatctctatgttttcatgtactaaaaaatttggatagtaatggatgaaatatgaagaggttcatgtgcc

SEQ ID NO: 111815 - protein, 371 aa, Arabidopsis thaliana; identical to SEQ ID NO: 57552

SEQ ID NO: 111816 - DNA, 1289 bp, Abies grandis; identical to SEQ ID NO: 57553
  CDS (83)..(1234)

SEQ ID NO: 111817 - protein, 383 aa, Abies grandis; identical to SEQ ID NO: 57554

SEQ ID NO: 111818 - DNA, 1110 bp, Cistus creticus
  CDS (1)..(1110)
atgagtactgtgaatgtgaatctgggttcatggagtcagcctacctgctttgtatttaaccagaaaactagatccagaatccctaattttagttccttcaagggattcatggcttcttcgtcgaatttccgttctgtttcttcttcttcttcttcctcctcctcctttattgcctcagttctttctgggaaagatactatgaagggagaagaagaaaattccggttttgatttccagtcttatatggatcagatggcggattccgttaatcaagcgctggaatcagcggtttcgctccgggaaccgttgaagatccatgaagcaatgcggtactcgcttttggccggagggaaaagggtgaggccgcttttgtgtattgccgcgtgtgagctcgtcggcggggatgtttccgtggcgatgcccgcggcttgcgccgtggaaatgattcacaccatgtcgttaatccacgatgacctcccatgtatggataacgacgatctccgccgcggaaaaccgacgaatcacaaggcattcggcgaggatatcgccgtattagccggggacgcgctgctgtccttcgcattcgaacacgtggcggtgtccacggtgggggcctcgccggataaaattgtccgggcggtgggggaattagcaaaagcagttgggaaagaagggttagtagccggacaagtagtggatataaccagtgagggactaaacgacgtcggattggatcatttggagtacatccatgtccacaagaccgccgtattactcgaggccgcggtggtgctcggggcgattttgggcggaggaacggatgaggaagtggagaggttgaggaaatttgcgatatgcattggtctattgtttcaagtggtggatgatatcttggatgtgacgaaatcttccgtggaattggggaaaaccgccggaaaagatttagtcgcggataaggtgacgtatccgaagctaatggggctggagaagtcgagggagttcgccgagaagctgagggatgatgcggtggagcagttgcgggtgtttgatcaggtgaaggcggcgccgttgattgctttagcacattacattgcttataggcaaaactag

SEQ ID NO: 111819 - protein, 369 aa, Cistus creticus; identical to SEQ ID NO: 57556

SEQ ID NO: 111820 - DNA, 1095 bp, Cistus creticus
  CDS (1)..(1095)
atgactactgttagcatcagttcgtgggttcaaacctactgtgtctttaaccaggcaaccagatccagatccagatccagatccccttctttcaatagattcaatctcccgataattccggtctcaaaaccgttccgcttcttccgcccctctaatcgcctcggtactcaccagagaaggcgaatcgaacaagatcccccaaaatgggccttcgatttaaagtcctacatgattcagaaggcgaattccgtgaatcaagccctagaaaccgccgtttcgctccgggagccgctgaagatccacgaggcgatgaggtactcggttttggccggcgggaagcgagttcggccggtgctgtgcatcgccgcatgcgagctcgtcggcggtgaggaatccatggcgatgcccgcggcttgcgccgtggaaatgattcacaccatgtcgctcatccacgacgaccctccctgtatggataacgacgatctccgccgcggaaaaccaacaaaccacaaggtattcggcgaggatatcgcggtgttagccggggacgcgcttctcgctttctcattcgagcacatgacggggtccacagttggcgtatcccccgcccgaattgtgcgggcggttggggaattagcgaaatcgattggttcggaaggattggtagctggccaagttgtggatatctgcagtgagggccttacagatgtaggcttggaacatttagagttcatccatgtgcataaaacggcggccttactcgaaggctcggtggttctgggagcaattcttgggggcggatcggatgaggaagtggagaaattgaggaaatttgcgaggtgcattggattattgtttcaggtagtggatgatattctggatgtgacgaaatcttcaacagaattggggaaaacggctgggaaagatctggtggcggataaggtgacatatccgaagctaatggggatcgagaaatcgagggagtttgcggaggagctgaagaatgatgcggtggagcagttgagagggtttgatcaggagaaggcggcgcctttgattgctttggctaattacattgcttataggcagaattag

SEQ ID NO: 111821 - protein, 364 aa, Cistus creticus; identical to SEQ ID NO: 57558

SEQ ID NO: 111822 - DNA, 1152 bp, Abies grandis
  CDS (1)..(1152)
atggcttatagcggtatggcgactagctaccatggcctgcattttatgaatattgctactcaagaatgtaatttgaagagactttctatcccatcgagacgttttcatggagtttcaccatcattgtgggcttctaatggcttccaaggccatttaaagagggagttatccgcaaattcatttctggtatcatcatctagatactcaaacacaattgctaagtttactaatctgcctgaaaaagtaaaggagaaggtcattgaatttgacttcaaggagtatctacgttccaaggcaatggcagtgaatgaggcactggatagggctgtaccacttcgttatcctgaaagaatacatgaagctatgaggtattctcttctagcaggagggaagagggttcgtcctgttctgtgcatttcagcatgtgagcttgtgggagggaccgaggaagtcgccatgccaactgcctgtgcaatggagatgatccacacaatgtctttaattcatgatgacttgccttgcatggacaatgatgattttcgcagaggtaagcctacaaaccacaaggtcttcggggaaggcactgctattcttgcaggggatgcactgctttcatttgcatttgaacacattgcagtatccacaagcaaatctgtggggactgataggattttgagggtggtatctgaattgggtagaacaataggctcccaagggcttgtgggtgggcaggttgctgatattacgagtgagggcgatgcttctgttgaccttgacactctggaatggattcacattcataagactgcagtgctattggagtgctcagttatgtgtggggcgatcattagtggtgcttcagacaatgagattgagagaattcaaagatatgcccgtagcgtggggcttctgtttcaggttgttgacgacatactcgacgtcacgaaatcatcaaaagagttgggcaaaactgcaggaaaggatttgatcagtgataaggccacttatccgaagctgatgggtttagagaaagcaaaacaatttgcttcggatttgttgatcagagctaaggaggatttatcttgcttcgacccaatgaaggctgcaccattgttgggtcttgcagattacattgcattcagacaaaactga

SEQ ID NO: 111823 - protein, 383 aa, Abies grandis; identical to SEQ ID NO: 57560

SEQ ID NO: 111824 - DNA, 1104 bp, Gentiana lutea
  CDS (1)..(1104)
atggtggattcatgggtggttcaaagccactctgtatttcatacccctatatccctttttagatcttttcttggatttctgtgcaaacccatgaattacaacaaaattggatcgaatttgatagagaaaaagaagctcatttcatcgttttcagtagcatctttgattactaaagaagaagaagccatgggaggtccaaaagcttccaattatttcgattttaaggcctatttgattgaaaaagctaataaagtaaatgaagctttggatcaagcggtttctgtgaagaacccaccgatgattcatgaagcaatgcgctattccttgttagccggcggcaaaagagttcgtccaatactttgtatcgcagcgtgtgagctcgtcggaggtgaagaatcaaattctgttccggcagcttgtgcggtggagatgatacacaccatgtcgttaattcacgacgatttgccgtgttatggacaacgagatctccgacgaggaaaagcccacgaaaccacaaagtcttcgtgcgaggacgtagcggtcctcgccggcgattcccttctagcattctcattcgaatacatcgccaccgccactaaaaacgtctctccggcgaagaattttagccgcagtaggcgaattagcaaatcaattgggacagaaggcttagtagctggccaagtagctgattttgtcattaatggggaaaaccagatgtttggattagaccaattggagttcatccacatccacaaaacggcagctttactggaagcagcggtggtgctcggcgcaatcctgggcggcggaaacccagaagaggttgagaaattgagacgttttgctaggtgtattgggctattgtttcaagtggttgatgacattcttgatgtaacgaaatcatctgaagaattggggaaaactgcagggaaaagatcttgtggcggaaaaactacttatccgaaattaatgggtttagatggagctagagagtttgctgataaattgaacaaagatgcgaaaaatcagttgtcggaatttgatcgtgaaaaggccgctcctttgcttgctttggcggattatattgcgtataggcagaattag

SEQ ID NO: 111825 - protein, 367 aa, Gentiana lutea; identical to SEQ ID NO: 57562

SEQ ID NO: 111826 - DNA, 1176 bp, Tagetes erecta; identical to SEQ ID NO: 57571
  CDS (50)..(1135)

SEQ ID NO: 111827 - protein, 361 aa, Tagetes erecta; identical to SEQ ID NO: 57572

SEQ ID NO: 111828 - DNA, 1569 bp, Rhodovulum sulfidophilum
  CDS (181)..(1050): transl_table=11
cgcgctcgaacgcggcgaggtgcgctggaagagtcgattgcgctctcggaacgcgcgatgaagcttgcggcagcattgcgaagccaagctgcgggatgccgaggccaagatcgaggcgatgacgcttgacggcgcgggcaaccccaccgggacgaaaccggccgaaggtctttgacagcgatgttccagtccagcctgaaatccgccgccgagcggatcgagacgcgtttgaccgaggctttggccggcgccgccgaccagcccgtcacgcaggcgatgcgctatgccgtctcgggcggcaagcggctgcgcgggttcctggtgctcgagtcggccgcgctttacgacatcgcgcccgaggcggcggtcgatgccgcggccgcggtcgaggcgctgcatgcctacagccttgttcatgacgacatgccctgcatggatgatgacgacctgcgccgcgggcagccgaccgtgcatgtgaaatgggatgacggcaccgcgctgttgaccggcgacgcgctgcagacgctggccttcgagctgctgtccgcgcccgcctgccatcccgacccggcggtgcggatcgatctggtggcctctctggcccgggcctcgggcatcgacggcatggtgctgggccaggcccaggacatcgccgccgagaccgccggccggtcgctgacgctcgatgagatcaccgagctgcaggccaacaagaccggtgcgctgatccgctggtcggccgaggcgggcgcgcgtctggcccgcgccgatatcgcgccgctcaccgcctattccaccgcgctgggccttgccttccagatcgccgacgacattctcgacgtcgagggcgatgccgccaagaccggcaagcgggtccacaaggatgccgaggccggcaaggcgaccttcgtgtcgcttctggggctcgacggcgcccgcgcccgggccctggccctggtcgaagaggccgaggccgcgctggatccctttggcgggcgggccgatccgttgaaggccgccgcccgtttcgtcatttcccgagagtcgtaatcaggtaacgcccaaggagggctgccccagtgaataaacgcccgaataccccgcttctcgacgggatcgtcagcccttcggatctcaaggcgctctcggatgcccagcttgggcaggtcgcgcaggaactccggcaggaggtgatctcggcggtctcggaaaccggcgggcatctgggcgcggggctgggcgtggtcgagctgacggtggcgctgcatgcggtcttcgacacgccgcgcgacaagctgatctgggatgtcagccatcagtgctatccgcacaagatcctgaccggcgccgcgaccgatccggacctgcgccagcaggcggctgtcggctctgcagcgctcgaagcgatacaccgttcgcgcggcacagctcgacctcgatctcgcgcgctggcttgcgtcgccgcgacctggcacggcccagcgggtggcatgcatcgcgcgatcgcgacggtcgttcgccgcatggctatgagctgacatgcgcatgcagcgtgacggatctgacgac

SEQ ID NO: 111829 - protein, 289 aa, Rhodovulum sulfidophilum
MFQSSLKSAAERIETRLTEALAGAADQPVTQAMRYAVSGGKRLRGFLVLESAALYDIAPEAAVDAAAAVEALHAYSLVHDDMPCMDDDDLRRGQPTVHVKWDDGTALLTGDALQTLAFELLSAPACHPDPAVRIDLVASLARASGIDGMVLGQAQDIAAETAGRSLTLDEITELQANKTGALIRWSAEAGARLARADIAPLTAYSTALGLAFQIADDILDVEGDAAKTGKRVHKDAEAGKATFVSLLGLDGARARALALVEEAEAALDPFGGRADPLKAAARFVISRES

SEQ ID NO: 111830 - DNA, 1441 bp, Rhodobacter capsulatus; identical to SEQ ID NO: 57573
  CDS (213)..(1079): transl_table=11

SEQ ID NO: 111831 - protein, 288 aa, Rhodobacter capsulatus; identical to SEQ ID NO: 57574

SEQ ID NO: 111832 - DNA, 771 bp, Rhodobacter sphaeroides
  CDS (1)..(771): transl_table=11
atgcgctatgcggtgcagggcggcaagcggctgcggggtttcctcgtgctcgaatccgcccggctgcacgggatcgcgcccgaggcggcggtgagtgctgcggcctctatcgaggcgctgcatgcctacagcctcgtgcatgacgacatgccctgcatggacgatgacgacctgcgccgcggcctgccgaccgtgcatcgcaagtgggacgaatgcaccgccgtgctggcgggcgacgcgctgcagactctcgccttcgagctcttggccgatccggcgctcggacccgccgcggtgcggatcgaactggtggcgagccttgcgaaagcctcgggcgccgagggcatggtgctgggccaggcactcgacatcgcggccgagacggctgccgtgcccctcacgctcgatcagatcacccaccttcaggccggcaagactggcgcgctgatccgctggtccgccgaagcgggggcgatcctcgggcaggcggaccgggtgccgctgcgccgatacgccacggccctcgggcttgcgttccagatcgcggacgacattctcgatgtcgagggcgatgcggagaaggcgggcaagcggctccagaaagatgccgaagccgggaaggccaccttcgtctcgcttctcgggctcgacggcgccaaggcgcgggcgcgggctctggtggaggatgccgaggcggcgcttgcgccctatgggccagaggcaggaacattgatcgaggcggcgcgcttcgtcatctcgcgtgaaagctga

SEQ ID NO: 111833 - protein, 256 aa, Rhodobacter sphaeroides
MRYAVQGGKRLRGFLVLESARLHGIAPEAAVSAAASIEALHAYSLVHDDMPCMDDDDLRRGLPTVHRKWDECTAVLAGDALQTLAFELLADPALGPAAVRIELVASLAKASGAEGMVLGQALDIAAETAAVPLTLDQITHLQAGKTGALIRWSAEAGAILGQADRVPLRRYATALGLAFQIADDILDVEGDAEKAGKRLQKDAEAGKATFVSLLGLDGAKARARALVEDAEAALAPYGPEAGTLIEAARFVISRES

SEQ ID NO: 111834 - DNA, 921 bp, Arabidopsis thaliana; identical to SEQ ID NO: 57575
  CDS (1)..(921)

SEQ ID NO: 111835 - protein, 306 aa, Arabidopsis thaliana; identical to SEQ ID NO: 57576

SEQ ID NO: 111836 - DNA, 897 bp, Zymomonas mobilis; identical to SEQ ID NO: 57579
  CDS (1)..(897): transl_table=11

SEQ ID NO: 111837 - protein, 298 aa, Zymomonas mobilis; identical to SEQ ID NO: 57580

SEQ ID NO: 111838 - DNA, 903 bp, Synechococcus elongatus
  CDS (1)..(903): transl_table=11
atgcccggaacgaacagcgatttccagtcctgggcgcgcagccgccaagccctggtggaagaggccttgaaccgactgttgccgccggcggaggtggcgccccagcggctgcaccaggcgatgcgttacgcggttctgggaggcggcaagcgggtgcggccactgctgtgctacgccgcgggcgaggtgagcggcgctgagctggagcgactgagcaccgctgcagccgccctggagctgatccacgtctattcgctggtgcacgacgacctgccctgcatggacgacgatgtcctgcgccgaggaaaacccacctgtcacgtggaatacgacgaggccaccgccctcctcgctggcgatagcctgcagagcctggcgttccagctgctggccgagtatcgggtggccgactccccccagacccagctgcgcatgctggagcatctggcccgagcggccggctcccgaggcatggcgggcggccaggcgatcgacctggaagccaccggcaagaccctaacgcttccggagctggaattcatgcacatccacaagaccggcgcgctgatccgtgcctccgtgatcctaggggcaaactgcggccgagcgcttgcgtccaaggacatggaccggctggaccacttcgccaagcgcatcggtctcgcctttcaagtggtcgacgacgtgctcgatgcccagtccaccaccgccaccctgggcaaaaccgccggcaaggacgcacgccagggcaaacccacttacgtgtccacggtgggggtggaggcggcccgggccatggcccaagagttgaagcgggaagcggtggaaagcctcgcccccttcggcgaacgggcccggcggctgcgggagctcgccgagtacatcgtgagccgcgagttttga

SEQ ID NO: 111839 - protein, 300 aa, Synechococcus elongatus
MPGTNSDFQSWARSRQALVEEALNRLLPPAEVAPQRLHQAMRYAVLGGGKRVRPLLCYAAGEVSGAELERLSTAAAALELIHVYSLVHDDLPCMDDDVLRRGKPTCHVEYDEATALLAGDSLQSLAFQLLAEYRVADSPQTQLRMLEHLARAAGSRGMAGGQAIDLEATGKTLTLPELEFMHIHKTGALIRASVILGANCGRALASKDMDRLDHFAKRIGLAFQVVDDVLDAQSTTATLGKTAGKDARQGKPTYVSTVGVEAARAMAQELKREAVESLAPFGERARRLRELAEYIVSREF

SEQ ID NO: 111840 - DNA, 924 bp, Synechococcus elongatus
  CDS (1)..(924): transl_table=11
atgatttccgctgatcccccccaagtccatcccgccggcacatttgatgtcaaggcctacctcaaagaacgccaagcccttgtggaagctgcccttgaagcctcgattccggtggcctatccggagaaaatttacgatgcgatgcgctattcactgatggcggggggcaagcggctgcgcccgattctctgtttggccacctgtgaactgatggggggcaccgtggaaatggccatgccgactgcctgtgccttggagatgatccatacgatgtcgctcatccacgatgatctaccggccatggacaatgacgactaccgtcgcggcaagcccaccaatcacaaggtctatggtgaagatattgccattctggcgggggatggcttactggcctatgcctttgagtatgtggtggaacaaaccaagaatgtacccgcggagtatctgttgaaaattgtggcgcggttggggcatgcggtggcagcaacgggcttagtcggtggtcaagtggtggacttagagtgtgaaggacagcccgacattggtctggaaacgctgcattttatccactcccacaaaacgggggccctactggaggcctctgtggtgtctggggcattgctgacgggggcgcatgaatctgacgtggcacgcctgtcccgttatgcggcaaatattggcttggcattccagattgtggatgacattttggatattacttcgacccgcgatgtcctcggtaaaaccgttggtaaagatgtggctgcccaaaaaatgacctacccgcgcctgtggggtctggaaaaatctcgccaagaggctgagcgcttggtggcggaggcgaaggcagagttggctgtatatggggcggccgctgttcctttgcaggcgatcgccgactacattaccagccgtagtcattaa

SEQ ID NO: 111841 - protein, 307 aa, Synechococcus elongatus; identical to SEQ ID NO: 57582

SEQ ID NO: 111842 - DNA, 1134 bp, Mentha piperita
  CDS (1)..(1134)
atgagtgctcttgttaatcctgtggcgaaatggcctcagacgatcggcgttaaagatgttcacggcggccggaggcggagatccagatccactctctttcaatcccatccacttcgcactgaaatgcctttctctctctacttctcatcccccctcaaagctcccgccactttttccgtttctgcagtttataccaaagagggcagcgaaattagggataaagatccggcgccttcgacttcgccggcgttcgatttcgacggatacatgctccggaaggcgaaatccgtcaacaaggcgttggaagcggcggtgcagatgaaggagccgctgaagatccacgagtccatgcggtactcccttctcgccggcggcaagagagtgcgtcctatgctgtgcatcgcggcctgcgagctcgtcggcggcgacgagtccacggcgatgccggcggcctgcgccgtcgagatgatccacacgatgtcgctgatgcacgacgacctcccatgcatggacaacgacgacctccgccgcggcaagccgacgaaccacatggctttcggcgagagcgtggcggtcctcgccggcgacgccctcctctccttcgcgttcgagcacgtggcggcggcgaccaaaggcgcgccgccggagcggatcgtgagggtcctcggcgagctggctgtctcgatcgggtcggaggggctggtggcggggcaggtggtggacgtctgctcggaggggatggcggaggtcgggctggaccacctcgagttcatccaccaccacaagacggcggcgctgctgcaggggtcggtggttctgggggcgattttgggcggcggaaaggaggaggaggtggcgaagctgagaaaattcgcgaattgcatcggattgctgtttcaggtggtggacgatatcctagatgtgacgaaatcgtccaaggaattggggaagacggcggggaaggatctggtggcggataaaaccacatatccgaagctaataggcgtggagaaatccaaggaattcgcggatcggttgaacagggaggcgcaggagcagctcctccattttcatcctcatagggcagctccattgattgctctcgccaattatattgcttatagggacaattga

SEQ ID NO: 111843 - protein, 377 aa, Mentha piperita; identical to SEQ ID NO: 57584

SEQ ID NO: 111844 - DNA, 1056 bp, Scoparia dulcis
  CDS (1)..(1056)
atgagccttgtaaaccccgtctccacatggccaaaccccacccggagctccgtattccgacccaaacccgccatcctcaacacgacccacttacccatctccttcctattcgccggaaaacccatctccgccgtcctcaccaaagagtacagccaccaaacctcctccaccttcgacttcaagaagtacatgctcgagaaagcctcctccgtcaacaaagccttagaatccgcagtctccctcaaagaacccctcaagatccacgaatctatgcgctactctcttctcgcggggggcaaaagggtccgccccatgctctgcctcgccgcctgcgagctcgtcggcggccacccctccaccgccatgcctgccgcctgctccatcgagatgatccacaccatgtccctcatgcacgacgacctcccctgcatggacaacgaccatctccgccgcggccatcccactaaccacatcgtcttcggagaggacgtcgctgtcctcgccggcgacgctcttcttgcctattccttcgaatacttagccaccgcgacagagggagtccttcctgaacggatagtcagagtgatcgccgagttggcgaaatgtatccgctcagaaggccttctggcggggcaggtggtggatatatgctctgaaggcgtgagcgagatcgggttggagcatttggagtacatacatttgcacaagacggcggcgttgctcgagggctcggtcgtcttgggcgcgattttgggtggcgggaatgatgaagaggttgaaaggttgaggaagtttgccaggtgtattgggctgttgtttcaggtggtggatgatattcttgatgttactaaaacgtcggtggagctggggaagacggccgggaaagatttggtggcggataagaccacgtatccgaagctgattgggattgagaagtcgagggagtttgcggagaagttgaaccgggaggcgcaggaacagcttgtagggtttgattcggataaggccgcgccgttgattgcgctcgcgaattatattgcgtatagggagaattga

SEQ ID NO: 111845 - protein, 351 aa, Scoparia dulcis; identical to SEQ ID NO: 57588

SEQ ID NO: 111846 - DNA, 1107 bp, Croton sublyratus; identical to SEQ ID NO: 57589
  CDS (1)..(1107)

SEQ ID NO: 111847 - protein, 368 aa, Croton sublyratus; identical to SEQ ID NO: 57590

SEQ ID NO: 111848 - DNA, 1316 bp, Daucus carota
  CDS (17)..(1120)
atcactaatacaaatcatggcgtttattcaaaccaatacagcccatgaaaactcactcttgtccaagaatttactgttcgatcatctcaaaaacactggtaaaaccccatcaagctactgcactagacatcatcctatgaagattcaaggcgcaaatgctgtgaattcaactcttgtccaatcagttaacgtccaagaactcctgacaaatccccgtgttacgcctggtccagagtttcattttgaaggttacatgaaaacctcaggtaaaaagataaacaaagcgctggacgaggctgttccagtgcaaaaaccagctatcatccacgaagcgatgcggtattcgcttctggccgggggcaaacgcgtccggccagtgctgtgcatcgcttcgtgtgagttggtaggagggctggagtcatgggctatgcccatggcctgcgccctcgaaatgatccacaccatgtctctaatccatgacgacctcccgtgcatggataacgacgacttgagacgtggcaaaccgacgaatcacaaggtttatggcgaagaaaccgcgattcttgcaggtgatgccttgctctccctagcattcgagcatgtagcggacgcaaccgatatggtgaccccgggtcgggtggttcgggctattgcggagctaggttcggctgtgggctcacaagggctcgtggcgggtcagataatggacatatgtaaccaaggaaaagacgtggatttgaacgacttggagtatattcatgtccacaaaacatcgaagcttctagaagcttcggtggtttgtggagctatattgggaggtgggaatgttattgaggtggagaggttgagaaaatatgcgaggtgtattggattgttgtttcaagtggttgatgatattttagatgttaccaaatcatctgcggagctcgggaagacagccgggaaagatttagtcaccgataagacgacgtatccgaagctaatgggattggagagggctaagagattcgcgacggagctggtggctcaggcggaggaggaactcagttattttggatcgtcagcaagggtggccccgttgtaccatctggctaagtatattgcttatagacaaaactgaggactactagattaatattattgtaccaactaccaagtagtactatgttatgtatgttgcttgttctgctgtatctcttgttggtttcttctccagatgaacattagaagcaaaagtaaaatatatatgtcatattgaattgctacgaactatgaagagcatgcaccaacagttgacaaaaaaaaaaaaaaaaaaa

SEQ ID NO: 111849 - protein, 367 aa, Daucus carota; identical to SEQ ID NO: 57594

SEQ ID NO: 111850 - DNA, 954 bp, Archaeoglobus fulgidus
  CDS (1)..(954): transl_table=11
atgctgaaggaggaaatagcgaaaagggccgaaataatcaacaaagccattgaagagcttctgcccgaaagggagccgattggactctacaaagccgcaaggcatctgatcaaagcaggtggcaagaggctaaggcctgtaataagcctcttagcagtcgaagcccttgggaaagactacagaaagattatcccggctgctgtcagcattgaaacaatccacaacttcaccctcgtgcatgacgacataatggacagggacgagatgaggaggggagttccgacggtacacagggtttatggggaagcgacggccattttagcaggcgacacactctttgctgaagccttcaagctgctgacaaagtgcgatgttgagagcgagggaatcagaaaagctacagaaatgctttcggacgtttgcataaaaatatgcgaggggcagtactacgacatgagctttgagaaaaaggagagcgtttccgaggaggagtatctcaggatggtcgagctgaagaccggagtgctgattgcagcttctgcagcattacctgcggtgctttttggggagagcgaggaaattgtaaaggcgctgtgggactacggagttcttagcggtattggcttccagatccaggacgacctgcttgacctgactgaggagaccggaaaggactggggaagcgacctgcttaaagggaagaaaaccctgattgtcataaaggcgttcgaaaagggagtgaagctaaagacgtttggaaaggaaaaggcggacgtctctgagattagagatgatatcgaaaagttaagagagtgtggtgcgattgattacgctgccagcatggcaagaaagatggctgaagaggcgaaaagaaagctcgaagttctgcctgaaagcaaagccaaggaaacactgctggaacttaccgacttcttggttacaagaaaaaagtga

SEQ ID NO: 111851 - protein, 317 aa, Archaeoglobus fulgidus
MLKEEIAKRAEIINKAIEELLPEREPIGLYKAARHLIKAGGKRLRPVISLLAVEALGKDYRKIIPAAVSIETIHNFTLVHDDIMDRDEMRRGVPTVHRVYGEATAILAGDTLFAEAFKLLTKCDVESEGIRKATEMLSDVCIKICEGQYYDMSFEKKESVSEEEYLRMVELKTGVLIAASAALPAVLFGESEEIVKALWDYGVLSGIGFQIQDDLLDLTEETGKDWGSDLLKGKKTLIVIKAFEKGVKLKTFGKEKADVSEIRDDIEKLRECGAIDYAASMARKMAEEAKRKLEVLPESKAKETLLELTDFLVTRKK

SEQ ID NO: 111852 - DNA, 1182 bp, Taxus canadensis
  CDS (1)..(1182)
atggcttacacggcaatggcagcagggacccaaagcttgcaactccgcactgttgcttcctatcaagaatgcaatagtatgaggagttgttttaaattgacaccttttaaaagttttcatggagtgaatttcaatgttccctcactgggtgctgctaattgtgagattatgggtcacctgaaacttgggtcattgccatataaacaatgttcggtgtcatctaaatccacaaaaacaatggcccagttggttgatttggctgaaacagagaaggcggagggaaaggatattgaatttgatttcaacgagtatatgaagtccaaggctgtggcagtggatgcggcactggataaggcaatcccacttgaatatcctgaaaaaatacatgaatcaatgaggtattcacttctagcaggaggtaagcgcgtcaggcctgctctgtgcattgcagcatgtgagcttgtaggagggagtcaggaccttgccatgccaactgcctgtgcaatggagatgattcataccatgtctctgattcatgatgacttgccgtgcatggataatgatgatttcagaagagggaagccaacaaatcacaaggtctttggagaggacactgctgttcttgcaggggacgccctgctttcatttgcatttgagcatattgctgtggctacaagcaagactgtgcctagtgataggactttaagggtgatatctgaattgggtaagacaataggctctcaagggcttgtaggggggcaggtggttgatattacatccgagggggatgctaatgtggacctgaaaaccctggaatggattcatatacacaagactgctgtgctcttggaatgttcagttgtgagtggagggatccttggtggtgctacagaggacgagattgcgagaattcggcggtacgcccggtgtgtggggcttctgtttcaggttgtggatgacatacttgatgtcactaaatcttctgaagaattgggaaagactgcaggaaaggatttgcttactgataaggctacttatcccaagttgatgggcctggagaaagcaaaagaatttgccgctgaattggcgacgagagccaaggaagagctgtcatcctttgatcagataaaggctgcacctttgttgggtcttgcagattacattgcattcaggcaaaactga

SEQ ID NO: 111853 - protein, 393 aa, Taxus canadensis; identical to SEQ ID NO: 57598

SEQ ID NO: 111854 - DNA, 867 bp, Rhodobacter sphaeroides
  CDS (1)..(867): transl_table=11
atggcgtttgaacagcggattgaagcggcaatggcagcggcgatcgcgcggggccagggctccgaggcgccctcgaagctggcgacggcgctcgactatgcggtgacgcccggcggcgcgcgcatccggcccacgcttctgctcagcgtggccacggcctgcggcgacgaccgcccggctctgtcggacgcggcggcggtggcgcttgagctgatccattgcgcgagcctcgtgcatgacgatctgccctgcttcgacgatgccgagatccggcgcggcaagcccacggtgcatcgcgcctattccgagccgctggcgatcctcaccggcgacagcctgatcgtgatgggcttcgaggtgctggcccgcgccgcggccgaccagccgcagcgggcgctgcagctggtgacggcgctggcggtgcggacggggatgccgatgggcatctgcgcggggcagggctgggagagcgagagccagatcaatctctcggcctatcatcgggccaagaccggcgcgctcttcatcgccgcgacccagatgggcgccattgccgcgggctacgaggccgagccctgggaagagctgggagcccgcatcggcgaggccttccaggtggccgacgacctgcgcgacgcgctctgcgatgccgagacgctgggcaagcccgcggggcaggacgagatccacgcccgcccgaacgcggtgcgcgaatatggcgtcgagggcgcggcgaagcggctgaaggacatcctcggcggcgccatcgcctcgatcccctcctgcccgggcgaggcgatgctggccgagatggtccgccgctatgccgagaagatcgtgccggcgcaggtcgcggcccgcgtctga

SEQ ID NO: 111855 - protein, 288 aa, Rhodobacter sphaeroides
MAFEQRIEAAMAAAIARGQGSEAPSKLATALDYAVTPGGARIRPTLLLSVATACGDDRPALSDAAAVALELIHCASLVHDDLPCFDDAEIRRGKPTVHRAYSEPLAILTGDSLIVMGFEVLARAAADQPQRALQLVTALAVRTGMPMGICAGQGWESESQINLSAYHRAKTGALFIAATQMGAIAAGYEAEPWEELGARIGEAFQVADDLRDALCDAETLGKPAGQDEIHARPNAVREYGVEGAAKRLKDILGGAIASIPSCPGEAMLAEMVRRYAEKIVPAQVAARV

SEQ ID NO: 111856 - DNA, 1116 bp, Arabidopsis thaliana; identical to SEQ ID NO: 57603
  CDS (1)..(1116)

SEQ ID NO: 111857 - protein, 371 aa, Arabidopsis thaliana; identical to SEQ ID NO: 57604

SEQ ID NO: 111858 - DNA, 1131 bp, Arabidopsis thaliana; identical to SEQ ID NO: 57605
  CDS (1)..(1131)

SEQ ID NO: 111859 - protein, 376 aa, Arabidopsis thaliana; identical to SEQ ID NO: 57606

SEQ ID NO: 111860 - DNA, 1083 bp, Arabidopsis thaliana
  CDS (1)..(1083)
atggctactactgttcatctcagctcattctccctcttcatccaatccagaggaagaagagacaactccatatcttccgtcaagagtctcaaaaaacgcacaggtttgtctccctcttctgccctcacctcacaaggtggcagagacatgattccaccagagggaaaatgcaatgatcacaactctgcttttgatttcaagttgtatatgatccgcaaagccgaatctgtaaatgcggctctcgacgtttctgtaccgctccgagaacccctcactgtccaggaagccgtgcggtactcattgctagcgggcggaaaacgtgtgaggcctctgctctgcattgccgtctgcgagcttgtgggaggcgacgaggctactgccatgtcagctgcttgcgcggttgagatgatccacacaagctctcttattcatgacgatcttccgtgcatggacaatgccgacctccgcagaggcaagcccaccaaccacaaggtatatggagaagacatggcggttttggcaggtgatgcactccttgcattggcgtttgagcacatgacggttgtgtcgagtgggttggtcgctcccgagaggatgattcgcgcggtggttgagctggccagggccatagggactacagggctagttgctggacaaatgatagacctagccagcgaaagactgaatccagacaaggttggattggagcatctagagttcatccatctccacaaaacggcggcattgttggaggcagcggcggttttaggggttataatgggaggtggaacagaggaagagatcgaaaagcttagaaagtatgctaggtgtattggactactgtttcaggtggttgatgacattctcgacgtaacaaaatctactgaggaattgggaaagactgcaggaaaagacgtaatggctggaaagctgacgtatccaaggctgataggtttggagagatcaaaggaagttgcagagaaactgaggagagaagcagaggaacaacttctagggtttgatccaagtaaggcggcgcctctggtggctcttgctagctacatcgcttgcagacacaactga

SEQ ID NO: 111861 - protein, 360 aa, Arabidopsis thaliana; identical to SEQ ID NO: 57608

SEQ ID NO: 111862 - DNA, 1011 bp, Arabidopsis thaliana; identical to SEQ ID NO: 57611
  CDS (1)..(1011)

SEQ ID NO: 111863 - protein, 336 aa, Arabidopsis thaliana; identical to SEQ ID NO: 57612

SEQ ID NO: 111864 - DNA, 1110 bp, Capsicum annuum
  CDS (1)..(1110)
atgagatctatgaaccttgttgatttatgggctcaacaagcttgtttagttttcaatcaaactttgtcttataaatccttcaatggattcatgaaaatccctttgaaaaattccaaaattaatcctaagttaaataagaaaagaccattttctcctctaacagtttcagcaattgctactaccaaagaagatgaaagaattgaagcagcacagacggaggaaccattcaatttcaagatttacgtaacggaaaaggctatttctgtaaacaaggcattagatgaggctattattgtaaaagaaccccatgttatccatgaagcaatgcgttattcccttctcgccggcggcaaacgggtccggccaatgctttgtctggccgcctgtgaactcgtcggcggcaaccaggaaaacgccatggccgccgcttgcgccgtcgagatgatccacactatgtcactcattcacgatgatttaccttgtatggacaacgacgacctccgccgcggaaaacctaccaaccacaaaatctacggcgaggacgtcgccgtcctcgcgggagactccctcctcgccttcgccttcgaacacattgtcaactccacggccggagtcaccccgtccagaatcgtaggcgctgttgcggagttagctaagtccatcggaaccgaaggactggtcgccggacaagtagcagacataaaatgcaccggcaacgctagcgtctctctagaaacgctggaattcatccacgtacacaaaacggcagctctcctagaatcctccgtcgtactcggcgcaatactcggcggcggcacgaatgtcgaggtggagaagctacggaggtttgccagatgcatcggattactatttcaagtagttgatgacatacttgacgtgacgaagtcgtcagaggagctcggaaaaactgctgggaaagatttggttgtcgataagacgacgtatccaaaattgttgggattagaaaaggctaaggaatttgcggcggagcttaatcgggaagcgaagcaacagctggaagggtttgattcgcgcaaagctgctccgttgattgcattggctgattatattgcttatcgtgataattag

SEQ ID NO: 111865 - protein, 369 aa, Capsicum annuum; identical to SEQ ID NO: 57614

SEQ ID NO: 111866 - DNA, 1074 bp, Catharanthus roseus
  CDS (1)..(1074)
atgcgctctaatctttgtcaccctctcaaaaatcaacttcccatttctttttttctttcgggcacaatccgaaagcccattttcagttgttctcgtctctcaatttctgccattataacgaaagaacaaacccaagaagagagcgaaagcaaaagcaagaaagaggtagccttttcttcctcatcttcatttgatttcaaggcatatatgattggaaaggccaattctgttaataaggcattggaagatgcagtcttggttagggaacctttgaaaattcatgaatctatgaggtactcacttctagctggtggtaaaagagttcgtcctatgctctgtattgctgcttgtgaactttttggtggaacagaatctgttgccatgccttctgcttgtgctgttgagatgattcatactatgtctctgatgcacgatgaccttccctgtatggataatgatgatttgagaagagggaagccgacaaatcataaggtttttggggaggatgttgctgttttagctggggatgcccttcttgcatttgcctttgaacatatagcaactgctaccaaaggtgtctcttccgaaagaattgtgagagtagttggggaattggctaagtgtattggttcagaagggctggtggctggacaggttgttgatgtgtgctctgagggcattgctgatgtagggcttgagcatttagagttcatccatattcacaagactgcagctttattagaagggtctgtggttttaggggcaattgtgggtggtgctaatgatgaacaaatttccaaattgaggaaatttgctaggtgtattgggttgttgtttcaggttgtagatgatattcttgatgttactaaatcttctcaagaattaggaaaaactgcagggaaagacttggtggcagataaggtcacttatcctaaacttcttggtattgataagtccagagaatttgctgagaagttgaatagagaagctcaagaacaacttgctgagtttgatcctgaaaaggctgctccattaattgctctagcaaattacatagcctacagagataactaa

SEQ ID NO: 111867 - protein, 357 aa, Catharanthus roseus; identical to SEQ ID NO: 57616

SEQ ID NO: 111868 - DNA, 1450 bp, Hevea brasiliensis; identical to SEQ ID NO: 57617
  CDS (140)..(1252)

SEQ ID NO: 111869 - protein, 370 aa, Hevea brasiliensis; identical to SEQ ID NO: 57618

SEQ ID NO: 111870 - DNA, 1101 bp, Sinapis alba; identical to SEQ ID NO: 57619
  CDS (1)..(1101)

SEQ ID NO: 111871 - protein, 366 aa, Sinapis alba; identical to SEQ ID NO: 57620

SEQ ID NO: 111872 - DNA, 978 bp, Methanobacterium thermoautotrophicum
  CDS (1)..(978): transl_table=11
atgatggaagtaatggatattctaaggaagtactctgaaatggctgatgagaggataagggagtccatcagtgacataacacccgagacgttactcagagcatcagaacacctcatcacagcaggcggtaagaagataagaccatcactggccctcttaagctctgaggctgttggcggagaccccggggatgctgcgggtgttgcagcggcaatagaactgatccacacattctcactcatccacgatgatataatggatgacgatgagatcaggagaggcgaacctgccgtccatgtcctctggggggaacccatggccatactcgccggtgatgttctcttctcaaaggccttcgaggcggttatcaggaacggtgactctgaaatggtgaaggaagctcttgcagttgtcgttgactcctgcgtcaagatatgtgagggccaggcccttgacatgggattcgaggagaggctggacgtcacagaggaggaatacatggagatgatctacaagaagacagcagccctcatcgcagcagcaacaaaggccggggcgataatgggtggtggttcaccccaggagatcgccgccctcgaggactatggcagatgcattggtctcgcattccagatacacgacgactacctcgacgtggtcagtgacgaggaatcccttggcaaaccagtgggcagtgacatagcagagggaaagatgaccctcatggttgtgaaggcacttgagagggcatcagagaaggacagggagaggctgatatccatcctgggctccggggacgagaaacttgtggcagaggccatagagatatttgaacgatacggggcaacagaatatgcccatgctgtggccctggaccatgtgaggatggcaaaggaacgcctcgaggtacttgaggaatcggatgcaagggaagccctcgccatgatagccgacttcgtccttgaaagggaacactag

SEQ ID NO: 111873 - protein, 325 aa, Methanobacterium thermoautotrophicum
MMEVMDILRKYSEMADERIRESISDITPETLLRASEHLITAGGKKIRPSLALLSSEAVGGDPGDAAGVAAAIELIHTFSLIHDDIMDDDEIRRGEPAVHVLWGEPMAILAGDVLFSKAFEAVIRNGDSEMVKEALAVVVDSCVKICEGQALDMGFEERLDVTEEEYMEMIYKKTAALIAAATKAGAIMGGGSPQEIAALEDYGRCIGLAFQIHDDYLDVVSDEESLGKPVGSDIAEGKMTLMVVKALERASEKDRERLISILGSGDEKLVAEAIEIFERYGATEYAHAVALDHVRMAKERLEVLEESDAREALAMIADFVLEREH

SEQ ID NO: 111874 - DNA, 789 bp, Aquifex aeolicus; identical to SEQ ID NO: 57625
  CDS (1)..(789): transl_table=11

SEQ ID NO: 111875 - protein, 262 aa, Aquifex aeolicus; identical to SEQ ID NO: 57626

SEQ ID NO: 111876 - DNA, 894 bp, Bacillus stearothermophilus; identical to SEQ ID NO: 57627
  CDS (1)..(894): transl_table=11

SEQ ID NO: 111877 - protein, 297 aa, Bacillus stearothermophilus [sequence omitted]

SEQ ID NO: 111878 - DNA, 999 bp, Bradyrhizobium japonicum; identical to SEQ ID NO: 57631
  CDS (1)..(999): transl_table=11

SEQ ID NO: 111879 - protein, 332 aa, Bradyrhizobium japonicum; identical to SEQ ID NO: 57632

SEQ ID NO: 111880 - DNA, 849 bp, Buchnera aphidicola subsp
  CDS (1)..(849): transl_table=11
atgcatttttttcatctatatgagagatacaaacatcgtattaatcaaaaattattttatacattaaatcagttgccttttcaaaaatcaagtcttttaaaagcaatgaaatatagtgtattttcaggtagtaaaagattgcgttcatctttaatatattcaactggagatgtttttaaagttaatattactacattagatgttatatctactgccatcgaatttattcattcatactctttaatacatgatgacttaccctgtatggataatgataattttagaagaggaaagatatcttgtcatgtaaaatacggtgaaagtacttctttacttgctggtgatgctttgcaaagtcttgcgtttaatattctatcaaacagttttatgccaaatgtatctaatttaaaacgtataaaaatgatttctgaattatcttattccattggttcatctgggatgtgcatgggtcaaaatttagatttagaagcagaaaaaaaagatgtaaatttatctgaattagaaataattaatttatataaaacttcttttttaatgcgttctgctgtacgtttagtatatttttcttctaataatttttctaaatctatattatcaatattagatcttttttcgatttctattggtttggcatttcaaattcaggatgatattttagattttaaaaaagatagtgtaaaaacagacaataaaaaaattattaaaaaacatacttatccattaataataggtttagatgaatcaagaaaaaaaataaaacaattacataagaaatcatttttagcattaaatagtttaaaaaaaaaaatttcaataccaacatactag

SEQ ID NO: 111881 - protein, 282 aa, Buchnera aphidicola subsp
MHFFHLYERYKHRINQKLFYTLNQLPFQKSSLLKAMKYSVFSGSKRLRSSLIYSTGDVFKVNITTLDVISTAIEFIHSYSLIHDDLPCMDNDNFRRGKISCHVKYGESTSLLAGDALQSLAFNILSNSFMPNVSNLKRIKMISELSYSIGSSGMCMGQNLDLEAEKKDVNLSELEIINLYKTSFLMRSAVRLVYFSSNNFSKSILSILDLFSISIGLAFQIQDDILDFKKDSVKTDNKKIIKKHTYPLIIGLDESRKKIKQLHKKSFLALNSLKKKISIPTY

SEQ ID NO: 111882 - DNA, 1080 bp, Micrococcus luteus; identical to SEQ ID NO: 57637
  CDS (105)..(980): transl_table=11

SEQ ID NO: 111883 - protein, 291 aa, Micrococcus luteus; identical to SEQ ID NO: 57638

SEQ ID NO: 111884 - DNA, 999 bp, Rhizobium sp
  CDS (1)..(999): transl_table=11
atgcagaccggttccacgctacacgacgaccgaactagcgtttccgccctcggcggattgggcgcgcgggcgcgcggcgcatccggcaggctgctgccggagatctggatgcagaacggcgcaaagcgggtcgaacaggcgctagcgcgtcttctctgcgccgaagaccacggtgagaccgagcttatggcggcgatgcgctacgccaccttgcatggcgggaagcgcacccgcgccctgctctgtctggctgctggagcactggccgacacgccggcgcacatactcgacgacgtcggcgccgccatcgagatgatgcacgcttgtaccctggtccacgacgacctgcccgcaatggacgacgacgtgcttcgccgcggccttccgaccgtgcatgtcaagttcggcgaagccactgcgatcctggtcggcgatgcgctgcaggcacacgccttcctgaccctggcaagcctggatgcgccgggcgacaaccgtatcgcgctcgtgcgcgaactggcgcaggcggtgtctgccgagggtgccgcaggcgggcaggccatggatctgtcgctggtcggaaagcacgtcgagctggacaggatcgtagcgatgcaccggatgaagtgcggagcgctagtgcgtgcgtccgttcgcatgggcgccctatgcgccatcgcggaggatgccgcggacgctacgctgtactgtgcgctcgatcactacagcgcctgtttcggcctggcgttgcaggtggtcgacgacattctcgacgcgacagcggataccgcgacgctgggcaagacccccggcaaggacgcggcggcgcagaaaccgacctgcgcgtcgatcatggggctgcaggcagcgcgccagttcgcgctggatctgttgtgtgaggccggggaggccattgccccgctggggccgcgtgcggaacggttggcgcagatgctgcagcgggccagtgcgtacctgttcaagcacgcgccatccgcatga

SEQ ID NO: 111885 - protein, 332 aa, Rhizobium sp
MQTGSTLHDDRTSVSALGGLGARARGASGRLLPEIWMQNGAKRVEQALARLLCAEDHGETELMAAMRYATLHGGKRTRALLCLAAGALADTPAHILDDVGAAIEMMHACTLVHDDLPAMDDDVLRRGLPTVHVKFGEATAILVGDALQAHAFLTLASLDAPGDNRIALVRELAQAVSAEGAAGGQAMDLSLVGKHVELDRIVAMHRMKCGALVRASVRMGALCAIAEDAADATLYCALDHYSACFGLALQVVDDILDATADTATLGKTPGKDAAAQKPTCASIMGLQAARQFALDLLCEAGEAIAPLGPRAERLAQMLQRASAYLFKHAPSA

SEQ ID NO: 111886 - DNA, 945 bp, Oryza sativa; identical to SEQ ID NO: 57639
  CDS (1)..(945)

SEQ ID NO: 111887 - protein, 314 aa, Oryza sativa; identical to SEQ ID NO: 57640

SEQ ID NO: 111888 - DNA, 969 bp, Brassica napus; identical to SEQ ID NO: 57641
  CDS (1)..(969)

SEQ ID NO: 111889 - protein, 322 aa, Brassica napus; identical to SEQ ID NO: 57642

SEQ ID NO: 111890 - DNA, 1281 bp, Glycine max; identical to SEQ ID NO: 57643
  CDS (1)..(1281)

SEQ ID NO: 111891 - protein, 426 aa, Glycine max; identical to SEQ ID NO: 57644

SEQ ID NO: 111892 - DNA, 1110 bp, Brassica napus; identical to SEQ ID NO: 57645
  CDS (1)..(1110)

SEQ ID NO: 111893 - protein, 369 aa, Brassica napus; identical to SEQ ID NO: 57646

SEQ ID NO: 111894 - DNA, 966 bp, Brassica napus; identical to SEQ ID NO: 57649
  CDS (1)..(966)

SEQ ID NO: 111895 - protein, 321 aa, Brassica napus; identical to SEQ ID NO: 57650

SEQ ID NO: 111896 - DNA, 1053 bp, Glycine max; identical to SEQ ID NO: 57651
  CDS (1)..(1053)

SEQ ID NO: 111897 - protein, 350 aa, Glycine max; identical to SEQ ID NO: 57652

SEQ ID NO: 111898 - DNA, 1029 bp, Glycine max
  CDS (1)..(1029)
atggctccttttgcttttgcaacattgccctcttctcacatctgccgcctcccaaagcccacaaacttgaagtttcgagttcgctgctctactgccgcgtcttctccttcttcggtttccactagatcaaaagctgctggctttgatttgaagacatactgggccaacctaatggtgcagatcaatcagaagctggacgaagctatcccggttcagtttcctccgcagatatatgaagctatgaggtattcagtccttgccaaaggtgccaagcgagccccacctgttatgtgcatctctgcctgtgaactctttggtggcagccgccttgccgcctttcccactgcctgtgcccttgaaatggttcatgcagcttcattgatacacgatgatcttccctgcatggatgactccccctcacgccgtggtcagccttcaaaccataccatctatggtgttgacatggcaattcttgcgggcgatgcactctttccccttggatttcgacacattgtttcacaaactccatcagaccttgtgcctgagtcgcacctccttcgtgtgattgccgagatagcccgctctgtaggatccactggaatggctgcagggcagttcctggaccttgaaggaggacccaatgcagttggatttatacaagaaaaaaagtttggtgaaatgggggagtcttctgcagtgtgtggaggattcttggctggagctgaagatgatgagatagagagactgaggaggtatgggagagctgttggggtattgtatgcagttgtggatgatattatagaagagagattgaaagttgagggagatggtgacaggaaaaacaagggtaagagttatgcagaggtttatggagttgaaaaggcaatagaaaaagctgaagagctcagagcaaaggctaaagaagaattggatggatttgagaagcatggggaacgggtctttcctctctacagttttgtggattatgcttttgatagaagtttcagtgttgatgatgccagtggataa

SEQ ID NO: 111899 - protein, 342 aa, Glycine max; identical to SEQ ID NO: 57256

SEQ ID NO: 111900 - DNA, 1287 bp, Zea mays; identical to SEQ ID NO: 57653
  CDS (1)..(1287)

SEQ ID NO: 111901 - protein, 428 aa, Zea mays; identical to SEQ ID NO: 57654

SEQ ID NO: 111902 - DNA, 22 bp, Artificial sequence
  primer
atggactttccgcagcaactcg

SEQ ID NO: 111903 - DNA, 27 bp, Artificial sequence
  primer
ttatttattacgctggatgatgtagtc

SEQ ID NO: 111904 - protein, 372 aa, Artificial sequence
  consensus sequence
  Variant (2)..(7): Xaa in position 2 to 7 is any amino acid
  Variant (8)..(27): Xaa in position 8 to 27 is any or no amino acid
  Variant (29)..(29): Xaa in position 29 is any amino acid
  Variant (31)..(34): Xaa in position 31 to 34 is any amino acid
  Variant (35)..(35): Xaa in position 35 is any or no amino acid
  Variant (40)..(40): Xaa in position 40 is any amino acid
  Variant (43)..(43): Xaa in position 43 is any amino acid
  Variant (45)..(61): Xaa in position 45 to 61 is any amino acid
  Variant (62)..(79): Xaa in position 62 to 79 is any or no amino acid
  Variant (81)..(81): Xaa in position 81 is any amino acid
  Variant (83)..(83): Xaa in position 83 is any amino acid
  Variant (85)..(86): Xaa in position 85 to 86 is any amino acid
  Variant (88)..(89): Xaa in position 88 to 89 is any amino acid
  Variant (92)..(92): Xaa in position 92 is any amino acid
  Variant (98)..(98): Xaa in position 98 is any amino acid
  Variant (101)..(101): Xaa in position 101 is any amino acid
  Variant (103)..(104): Xaa in position 103 to 104 is any amino acid
  Variant (108)..(108): Xaa in position 108 is any amino acid
  Variant (111)..(111): Xaa in position 111 is any amino acid
  Variant (112)..(112): Xaa in position 112 is any or no amino acid
  Variant (114)..(117): Xaa in position 114 to 117 is any amino acid
  Variant (119)..(120): Xaa in position 119 to 120 is any amino acid
  Variant (122)..(122): Xaa in position 122 is any amino acid
  Variant (127)..(127): Xaa in position 127 is any amino acid
  Variant (129)..(131): Xaa in position 129 to 131 is any amino acid
  Variant (134)..(144): Xaa in position 134 to 144 is any amino acid
  Variant (145)..(163): Xaa in position 145 to 163 is any or no amino acid
  Variant (165)..(165): Xaa in position 165 is any amino acid
  Variant (166)..(168): Xaa in position 166 to 168 is any or no amino acid
  Variant (170)..(170): Xaa in position 170 is any amino acid
  Variant (171)..(172): Xaa in position 171 to 172 is any or no amino acid
  Variant (174)..(176): Xaa in position 174 to 176 is any amino acid
  Variant (179)..(180): Xaa in position 179 to 180 is any amino acid
  Variant (182)..(194): Xaa in position 182 to 194 is any amino acid
  Variant (195)..(210): Xaa in position 195 to 210 is any or no amino acid
  Variant (213)..(214): Xaa in position 213 to 214 is any amino acid
  Variant (216)..(222): Xaa in position 216 to 222 is any amino acid
  Variant (224)..(232): Xaa in position 224 to 232 is any amino acid
  Variant (233)..(240): Xaa in position 233 to 240 is any or no amino acid
  Variant (242)..(247): Xaa in position 242 to 247 is any amino acid
  Variant (248)..(248): Xaa in position 248 is any or no amino acid
  Variant (251)..(251): Xaa in position 251 is any amino acid
  Variant (254)..(255): Xaa in position 254 to 255 is any amino acid
  Variant (258)..(258): Xaa in position 258 is any amino acid
  Variant (261)..(261): Xaa in position 261 is any amino acid
  Variant (262)..(268): Xaa in position 262 to 268 is any or no amino acid
  Variant (271)..(272): Xaa in position 271 to 272 is any amino acid
  Variant (274)..(274): Xaa in position 274 is any amino acid
  Variant (275)..(275): Xaa in position 275 is any or no amino acid
  Variant (277)..(278): Xaa in position 277 to 278 is any amino acid
  Variant (279)..(280): Xaa in position 279 to 280 is any or no amino acid
  Variant (282)..(282): Xaa in position 282 is any amino acid
  Variant (284)..(285): Xaa in position 284 to 285 is any amino acid
  Variant (286)..(288): Xaa in position 286 to 288 is any or no amino acid
  Variant (290)..(298): Xaa in position 290 to 298 is any amino acid
  Variant (299)..(339): Xaa in position 299 to 339 is any or no amino acid
  Variant (341)..(343): Xaa in position 341 to 343 is any amino acid
  Variant (345)..(350): Xaa in position 345 to 350 is any amino acid
  Variant (351)..(361): Xaa in position 351 to 361 is any or no amino acid
  Variant (363)..(368): Xaa in position 363 to 368 is any amino acid
  Variant (369)..(371): Xaa in position 369 to 371 is any or no amino acid
LXXXXXXXXXXXXXXXXXXXXXXXXXXMXYXXXXXGGKRXRPXLXXXXXXXXXXXXXXXXXXXXXXXXXXXXXXXXXXXAXAXEXXHXXSLXHDDLPXMDXDXXRRGXPTXXHXXXXEXXAXLAGDXLXXXAFXXXXXXXXXXXXXXXXXXXXXXXXXXXXXXLXXXXGXXXGXXXGQXXDXXXXXXXXXXXXXXXXXXXXXXXXXXXXXKTXXLXXXXXXXGXXXXXXXXXXXXXXXXXLXXXXXXXGLXFQXXDDXLDXXXXXXXXGKXXGXXDXXXXKXTXXXXXGXXXXXXXXXXXXXXXXXXXXXXXXXXXXXXXXXXXXXXXXXXXXXXXXXXAXXXLXXXXXXXXXXXXXXXXXLXXXXXXXXXR

SEQ ID NO: 111905 - protein, 13 aa, Artificial sequence
  protein pattern
  Variant (2)..(2): Xaa in position 2 is any amino acid
  Variant (3)..(3): Xaa in position 3 is Phe, Ile, Leu, Met or Val
  Variant (5)..(5): Xaa in position 5 is Ala, Cys, Asn, Ser, Thr or Val
  Variant (6)..(6): Xaa in position 6 is any amino acid
  Variant (9)..(9): Xaa in position 9 is any amino acid
EXXHXXSLXHDDL

SEQ ID NO: 111906 - protein, 20 aa, Artificial sequence
  protein pattern
  Variant (3)..(3): Xaa in position 3 is any amino acid
  Variant (4)..(4): Xaa in position 4 is Leu or Pro
  Variant (5)..(5): Xaa in position 5 is Ser or Thr
  Variant (6)..(6): Xaa in position 6 is any amino acid
  Variant (8)..(9): Xaa in position 8 to 9 is any amino acid
  Variant (10)..(10): Xaa in position 10 is Phe, Trp or Tyr
  Variant (11)..(11): Xaa in position 11 is Asp, Gly, Ser or Thr
  Variant (12)..(14): Xaa in position 12 to 14 is any amino acid
  Variant (16)..(16): Xaa in position 16 is Ile, Leu, Met or Val
  Variant (18)..(18): Xaa in position 18 is any amino acid
RGXXXXHXXXXXXXAXLXGD

SEQ ID NO: 111907 - protein, 12 aa, Artificial sequence
  protein pattern
  Variant (2)..(2): Xaa in position 2 is Ile or Leu
  Variant (3)..(3): Xaa in position 3 is any amino acid
  Variant (6)..(6): Xaa in position 6 is Ile, Leu or Val
  Variant (7)..(7): Xaa in position 7 is any amino acid
  Variant (10)..(10): Xaa in position 10 is any amino acid
GXXFQXXDDXLD

SEQ ID NO: 111908 - protein, 9 aa, Artificial sequence
  protein pattern
  Variant (5)..(5): Xaa in position 5 is any amino acid
  Variant (7)..(7): Xaa in position 7 is Ala or Pro
  Variant (8)..(8): Xaa in position 8 is any amino acid
GGKRXRXXL

SEQ ID NO: 111909 - protein, 13 aa, Artificial sequence
  protein pattern
  Variant (2)..(3): Xaa in position 2 to 3 is any amino acid
  Variant (5)..(5): Xaa in position 5 is Leu or Met
  Variant (6)..(7): Xaa in position 6 to 7 is any amino acid
  Variant (10)..(11): Xaa in position 10 to 11 is any amino acid
  Variant (13)..(13): Xaa in position 13 is Ile, Leu, Met or Val
GXXGXXXGQXXDX

SEQ ID NO: 111910 - DNA, 420 bp, Escherichia coli
  CDS (1)..(420): transl_table=11
atgttgtttatcaagcctgcggatctccgcgaaattgtgacttttccgctatttagcgatcttgttcagtgtggctttccttcaccggcagcagattacgttgaacagcgcatcgatctgaatcaactgttgatccagcatcccagcgcgacttacttcgtcaaagcaagtggtgattctatgattgatggtggaattagtgacggtgatttactgattgtcgatagcgctattaccgccagccatggtgatattgtcatcgctgctgttgacggcgagtttacggtgaaaaaattgcaactacgcccgacggtacagcttattcccatgaacagcgcgtactcgcccattaccatcagtagtgaagatacgctggatgtctttggtgtggtgatccacgtcgttaaggcgatgcgctaa

SEQ ID NO: 111911 - protein, 139 aa, Escherichia coli
MLFIKPADLREIVTFPLFSDLVQCGFPSPAADYVEQRIDLNQLLIQHPSATYFVKASGDSMIDGGISDGDLLIVDSAITASHGDIVIAAVDGEFTVKKLQLRPTVQLIPMNSAYSPITISSEDTLDVFGVVIHVVKAMR

SEQ ID NO: 111912 - DNA, 417 bp, Legionella pneumophila
  CDS (1)..(417): transl_table=11
atgaaatatcttcaaggagaaaaggagttcccagcgattcctttatataccagttctgtaagagctggttttccttctccgggtgatgactatattgaatccatgctggatttgaatgagtacctgatcaagcatcctgcatccacattttttgtgcgagcttctggagaatccatgataaatgccggcatttactccggtgatattttaatcgttgatcgtggcatagaggctactcatggaaaaattgtaatcgttgccctgaatggcgaattgacagtaaaacgtttatcccgtcaacatgggcaagttaagttgctggctgaaaaccctgattttcctcccatagatattacagaggaatacgatatggtgatttggggagtcgtcactcatgttattcatacggtattgtga

SEQ ID NO: 111913 - protein, 138 aa, Legionella pneumophila
MKYLQGEKEFPAIPLYTSSVRAGFPSPGDDYIESMLDLNEYLIKHPASTFFVRASGESMINAGIYSGDILIVDRGIEATHGKIVIVALNGELTVKRLSRQHGQVKLLAENPDFPPIDITEEYDMVIWGVVTHVIHTVL

SEQ ID NO: 111914 - DNA, 507 bp, Fluoribacter dumoffii
  CDS (1)..(507): transl_table=11
atgtcaccacgaggcggaaaaagggcaggggcagggcgtcctagaggtgagccgaccaaagcagttcgtcttccggtagccacgcttgccgaattagaacaattaaagaatcgcgcagcgaaccaattaccaatatttgcaagtaaagtgcaagcaggattcccatctcctgcggacgattacattgaaggatatctcgatttaaataccaaattcattaaacatccttcctccacgtttgttttgcaagccacaggagattcgatggtggaggctggtattttttcaggtgattggctgttagtcgacagaagcatagagccctctgatggacgtattgtaattgcagctgtgaatggcgaactcacggtgaaacgcctttcaaaaaagggcagtcaggtgcaattacttcctgccaatcccaaatttaaacccattgatattacccaagagtgtgagatggtgatttggggtgtggtcactttagtccttcatgagcttgtctaa

SEQ ID NO: 111915 - protein, 168 aa, Fluoribacter dumoffii
MSPRGGKRAGAGRPRGEPTKAVRLPVATLAELEQLKNRAANQLPIFASKVQAGFPSPADDYIEGYLDLNTKFIKHPSSTFVLQATGDSMVEAGIFSGDWLLVDRSIEPSDGRIVIAAVNGELTVKRLSKKGSQVQLLPANPKFKPIDITQECEMVIWGVVTLVLHELV

SEQ ID NO: 111916 - DNA, 462 bp, Prochlorococcus marinus str. MIT 9211
  CDS (1)..(462): transl_table=11
atgtttcttgtgaatttccctcaagtaccagtacctcctcatgtcaaacctatacaactatttcttcctttagcaaatgaatgcgtggcagcaggttttccctctcctgctgatgactacattgatgcggggattgatctgaatgaacatctaattctccacccagcaagcacctttttcctgaaagtaaagggtttctccatgactaatgcaggcattcagaacggagaccttttaatagtagatcgcagcctagatgctcagccgggatgcatagtagtggcaatactagatgggtgctttacgctaaaaaggctgactcgtcataaagaaacactttacctagaagcagagcaccctaactacccagcaattgacatgcgtcattatgacaatgttcaaatttggggggtcgccatatattccattcacaagctcacacgtactactcagtcgttataa

SEQ ID NO: 111917 - protein, 153 aa, Prochlorococcus marinus str. MIT 9211
MFLVNFPQVPVPPHVKPIQLFLPLANECVAAGFPSPADDYIDAGIDLNEHLILHPASTFFLKVKGFSMTNAGIQNGDLLIVDRSLDAQPGCIVVAILDGCFTLKRLTRHKETLYLEAEHPNYPAIDMRHYDNVQIWGVAIYSIHKLTRTTQSL

SEQ ID NO: 111918 - DNA, 435 bp, Salmonella enterica subsp. enterica serovar Choleraesuis
  CDS (1)..(435): transl_table=11
atgtctgtattccctgaacgttttgcatcccctcctcgtgatacaaccccttttttcagtgacctactgagttgcggggtgatgagtccgtgcgccggacacgaagacaatgagctgaatttacatgattttgtggttcgtaatcgccccgcgactttctttgtcagggcctcaggtctcagcatggtagacgccggaataaacgacggcgccatactggttgtggatcggtcactgactgcggagcacggctcaatcgtcgttgcgctggttgacggcgagtttaccgtgaagattttgcagaccttcccgaaactgatgttgatgccctccaaccccgccttcaagccgatacctgttaacccggacactcttgaaatctggggcgttgtcacctttgcgttgaatcagtttcctcatgtacatgcacgttga

SEQ ID NO: 111919 - protein, 144 aa, Salmonella enterica subsp. enterica serovar Choleraesuis
MSVFPERFASPPRDTTPFFSDLLSCGVMSPCAGHEDNELNLHDFVVRNRPATFFVRASGLSMVDAGINDGAILVVDRSLTAEHGSIVVALVDGEFTVKILQTFPKLMLMPSNPAFKPIPVNPDTLEIWGVVTFALNQFPHVHAR

SEQ ID NO: 111920 - DNA, 498 bp, Salmonella typhi
  CDS (1)..(498): transl_table=11
ttgatcttttctctttatctggtgatactggttaaatatccagtattgaatccgagtgtgctcatgtctgtattccctgaacgttttgcatcccctcctcgtgatacaaccccttttttcagtgacctactgagttgcggggtgatgagtccgtgcgccggacacgaagacaatgagctgaatttacatgattttgtggttcgtaatcgccccgcgactttctttgtcagggcctcaggtctcagcatggtagacgccggaataaacgacggcgccatactggttgtggatcggtcactgactgcggagcacggctcaatcgtcgttgcgctggttgacggcgagtttaccgtgaagattttgcagaccttcccgaaactgatgttgatgccctccaaccccgccttcaagccgatacctgttaacccggacactcttgaaatctggggcgttgtcacctttgcgttgaatcagtttcctcatgtacatgcacgttga

SEQ ID NO: 111921 - protein, 165 aa, Salmonella typhi
MIFSLYLVILVKYPVLNPSVLMSVFPERFASPPRDTTPFFSDLLSCGVMSPCAGHEDNELNLHDFVVRNRPATFFVRASGLSMVDAGINDGAILVVDRSLTAEHGSIVVALVDGEFTVKILQTFPKLMLMPSNPAFKPIPVNPDTLEIWGVVTFALNQFPHVHAR

SEQ ID NO: 111922 - DNA, 432 bp, Pseudomonas putida
  CDS (1)..(432): transl_table=11
atgaacgttgtatcaatccagccgctccgagactcccgccaggtactcgctgtcctcgccggatcagctgcaggagggtttccaagccccgctgcggactattacgagccaccgatctccctggatgagttgttgaacatccgagcggcgcacgtcttcatcgtgcgcgtggaaggcgagagcatgcgtgacgccgggatcttcgacggcggggtgctgatcgtagatcgctcaatcaccccttgctctggccagatcgtgctggcgtatgtcgataaccagcctctcgttaagcggctggccaaggcgcctggtgatggttggcttcttgagtcggccaaccctgcctacaagaccatcacccccgacgaatacgcatcggtcgacgtatttggcgtggtcacgtgggacttgaccaagcatgtgttctaa

SEQ ID NO: 111923 - protein, 143 aa, Pseudomonas putida
MNVVSIQPLRDSRQVLAVLAGSAAGGFPSPAADYYEPPISLDELLNIRAAHVFIVRVEGESMRDAGIFDGGVLIVDRSITPCSGQIVLAYVDNQPLVKRLAKAPGDGWLLESANPAYKTITPDEYASVDVFGVVTWDLTKHVF

SEQ ID NO: 111924 - DNA, 438 bp, Proteus vulgaris
  CDS (1)..(438): transl_table=11
atgtcactaaaacctatgaaatcagcccctgacaccaaagaaactatccctttctttggcgagctcgtacccgcaggtttccctagccctgctgctgggtgggaagaggctgaacttaatcttcatacgctggtggttactcatccagccagcacgtacttcttgcgcgtgacaggtgactccatgcaggatgctcggatacattctggtgacgtgctggtggttgatcgctcagaaactccagagcagggtagtattgttgttgccagcatcgacaacgaatttacagtcaagaaactcatcttgcggccacgttcatgccttatgccgatgaacccggcatacccacctatctattttgaccctgaaagtaacgacgttgaaatttggggtgtggtgacttactcattaatgaagcacaaaaaatgtatggcctga

SEQ ID NO: 111925 - protein, 145 aa, Proteus vulgaris
MSLKPMKSAPDTKETIPFFGELVPAGFPSPAAGWEEAELNLHTLVVTHPASTYFLRVTGDSMQDARIHSGDVLVVDRSETPEQGSIVVASIDNEFTVKKLILRPRSCLMPMNPAYPPIYFDPESNDVEIWGVVTYSLMKHKKCMA

SEQ ID NO: 111926 - DNA, 417 bp, Proteus vulgaris
  CDS (1)..(417): transl_table=11
atgcatttttcattatgtgaattaccagcgggcataaaactgccttttttcgaggctctaatccccgcaggattcccgtccccagcctcggattattcaaaaaataacatagacttaaatgaattattaataacacatccggcaggaacctatttcttgagagtgtctggtacatccatgattgatgccaacatcagtgatggagatatcgttatcgtcgatagcagtcttcaggccaatgatggaaatattgtcatcgcttctattgatggtgaatttacagtgaaacaactccaaaaaacaccatttccagcactcattccgatgaaccctgacttttcaccgatcccaatcccgtccggttcagagtttaatctttttggtgtagtgacgtacataattcacaaggcattgtga

SEQ ID NO: 111927 - protein, 138 aa, Proteus vulgaris
MHFSLCELPAGIKLPFFEALIPAGFPSPASDYSKNNIDLNELLITHPAGTYFLRVSGTSMIDANISDGDIVIVDSSLQANDGNIVIASIDGEFTVKQLQKTPFPALIPMNPDFSPIPIPSGSEFNLFGVVTYIIHKAL

SEQ ID NO: 111928 - DNA, 414 bp, Vibrio vulnificus CMCP6
  CDS (1)..(414): transl_table=11
atgaaagttatccctatcttagcaagcgctggtattacaggctttgaaagccctgctgctgaatacagacaactaggaatgagccttgatgaactgctagttgagcatccaagtgctacattcatcggacaagcaatgggggaatctatgcaagaaattggcatttttgatggtgacttgttgattgtagatcgtcacgttgccgtccaaaaccttgatgtaatcgtggccaattataatggtgagttcgtttgtaaaatgctagatatgacacgtcgatcactcttatctgcaaatgaaacaatgatgcctatttgtattcatgctcaagatacattttcgattgaaggtgtagtgattcgatctatccgttgtcaccgcccaagctatttactctcatctcgtagaaaataa

SEQ ID NO: 111929 - protein, 137 aa, Vibrio vulnificus CMCP6
MKVIPILASAGITGFESPAAEYRQLGMSLDELLVEHPSATFIGQAMGESMQEIGIFDGDLLIVDRHVAVQNLDVIVANYNGEFVCKMLDMTRRSLLSANETMMPICIHAQDTFSIEGVVIRSIRCHRPSYLLSSRRK

SEQ ID NO: 111930 - DNA, 435 bp, Citrobacter freundii
  CDS (1)..(435): transl_table=11
atggcgctggatctcgtttatccccggccttcagtggaaggcgccgcacttcctttttttgccgaacccgttgcggccggctttcccagtccggccgcaggctatgaggcaaatgaacttaacctgcatgattactgcgtgcggcgtccggccgcaacgtacttcttgcgtgtgtccggagattctatgcgtgatgcccgcattcatgatggcgatgtgctggtcgtcgatcgggcagaagagccccggcacggcagcatcgtgattgccagcatcgataatgaatttacggtcaagcagctgcagctccgcccttacccctgcctgatgccgctgaatccggcttttccgccaatcaggtttgatccggaggcgctgcagatatggggtgtggttacgttcactgttatgagtcaccgcccgtgtacgccttaa

SEQ ID NO: 111931 - protein, 144 aa, Citrobacter freundii
MALDLVYPRPSVEGAALPFFAEPVAAGFPSPAAGYEANELNLHDYCVRRPAATYFLRVSGDSMRDARIHDGDVLVVDRAEEPRHGSIVIASIDNEFTVKQLQLRPYPCLMPLNPAFPPIRFDPEALQIWGVVTFTVMSHRPCTP

SEQ ID NO: 111932 - DNA, 426 bp, Pseudomonas syringae pv. tomato str. DC3000
  CDS (1)..(426): transl_table=11
atgaacgtcaaaatactcggtcggttgtgcgaatccggtaaggtcatacccttctacactttcaaaatccctgccggttttcctaatcctgcagcggaccacatcgagcaagacttctcattcgaccggctgatggatttgcgcgcccctcacatttacgtggccaagatcgatggcgacagcatggagggtgcaaagatctttcatgacagcttggtggttgtagatcgctctcgaaagccgtcgagtggcagcatcgtgatcgcggcactgaataatgagcctctgtgcaaaatcctcatcctgcagggcgaccatgtggtgctgaagtcagccaaccctgcctatccgcctcggcatatcctggaaggtgaagagctgtcgatatggggcgttgtgcgacatggcgttacgagctttgagtaa

SEQ ID NO: 111933 - protein, 141 aa, Pseudomonas syringae pv. tomato str. DC3000
MNVKILGRLCESGKVIPFYTFKIPAGFPNPAADHIEQDFSFDRLMDLRAPHIYVAKIDGDSMEGAKIFHDSLVVVDRSRKPSSGSIVIAALNNEPLCKILILQGDHVVLKSANPAYPPRHILEGEELSIWGVVRHGVTSFE

SEQ ID NO: 111934 - DNA, 432 bp, Prochlorococcus marinus subsp. marinus str. CCMP1375
  CDS (1)..(432): transl_table=11
ttgcgtttacatggtgctcatcccaatccttcaaatctactgctgcctttgccgagtgaatccgtaacagcaggtttcccctctcctgctgataactatgtggaagataacattgacctaaatgaagagttaatacatcgcccggcaagcactttttttctacgtgtaaaaggggactctatgagcaatgcaggaatactagacggagacttactaattgttgaccgtagcctagacgcaaaaccaggcaatatcgttgtcgccatacttgatggggccttcactttaaaaaaattaacttaccgtaaaaacattccttatttagaagcagcgaatcacaactacccaataatcgatctacgtcgatatggagccgtacaaatctggggggtcgcaatatattcaattcatacgctaccccgtagaaaataa

SEQ ID NO: 111935 - protein, 143 aa, Prochlorococcus marinus subsp. marinus str. CCMP1375
MRLHGAHPNPSNLLLPLPSESVTAGFPSPADNYVEDNIDLNEELIHRPASTFFLRVKGDSMSNAGILDGDLLIVDRSLDAKPGNIVVAILDGAFTLKKLTYRKNIPYLEAANHNYPIIDLRRYGAVQIWGVAIYSIHTLPRRK

SEQ ID NO: 111936 - DNA, 387 bp, Prochlorococcus marinus subsp. pastoris str. CCMP1986
  CDS (1)..(387): transl_table=11
atgaagattccattattaagtgattcggtctcagcaggttttccctctcctgcagatgactatgctgaagaaaatattgatttgaacgagcatttaatatctaatccttttagtactttttttcttagagtcaaaggcgactcaatgatcaattcaggaattaaagataaagatttaataatagtagataagagtctaactgctaaaccaggaaatattattattgcgatgatagatggagaatttactataaaaagattatccataaaaaataatgaattatatttaaaagcagaaaatcataaatatccagacttcagttttagaaatcatattgatatacaaatttggggagttgtaatctattcaatacatagttacttatga

SEQ ID NO: 111937 - protein, 128 aa, Prochlorococcus marinus subsp. pastoris str. CCMP1986
MKIPLLSDSVSAGFPSPADDYAEENIDLNEHLISNPFSTFFLRVKGDSMINSGIKDKDLIIVDKSLTAKPGNIIIAMIDGEFTIKRLSIKNNELYLKAENHKYPDFSFRNHIDIQIWGVVIYSIHSYL

SEQ ID NO: 111938 - DNA, 432 bp, Synechococcus sp. WH 8102
  CDS (1)..(432): transl_table=11
atggacgtccgccaccagccacttccgctgcagccccggcgaacccgcctgagtcttcccctggccggtgaacgggtggccgccggcttcccctcgccggccgatgactacgtggaggtggggatcgacctcaacgaccagctgatccgccatcccaccagcacattctttctgcgcgtcagcggcgaatccatgctcggagccggcatccacgacggtgatctgctggtggtggatcgcagcctggatccacggccggggcgggtggtggtggcggtgctggacggggaattcaccctcaaacgcctggtccagcaccatggccgcctgcgcttggaggccgccaatcccgcttacccacccctggagctgcatcgatgcggtgacgtgcagatctggggggtggccatccacgtgatccatccgctctga

SEQ ID NO: 111939 - protein, 143 aa, Synechococcus sp. WH 8102
MDVRHQPLPLQPRRTRLSLPLAGERVAAGFPSPADDYVEVGIDLNDQLIRHPTSTFFLRVSGESMLGAGIHDGDLLVVDRSLDPRPGRVVVAVLDGEFTLKRLVQHHGRLRLEAANPAYPPLELHRCGDVQIWGVAIHVIHPL

SEQ ID NO: 111940 - DNA, 597 bp, Chromobacterium violaceum ATCC 12472
  CDS (1)..(597): transl_table=11
atggataccgacaagcccaaacagcatggcggcaaacgctcaggtgccggccgcaaatccgtcttcggaggcgacaagaccgtcgccgtacgcgttccggagccgctcaaacccatcctgcagcaatggttggacgactaccgcagctggcgcaccgccaacagcgcgcaggccttcgacttccgcacattgggcgcccaactgagcgaactgtcgctgccgctgttcgccggcagcgtgccggccggctctcctgtgccggctgacgacctgaaagaaaccgatatcgacctcaacacccatctggtcagccgccccggcgacaccttcatggtcaaggtcaagggcgattccatgcagggcgccggcatacacgacggcgatctgctgctggtggagcgcagccgggagccgcgcagcggcaaggtggtggtggcggcgctgaatggcgagctgaccgtgaagcgcctggaacgcggccccgccggcgtgcggctgctgccggaaaacccggcctaccagccgatagacgtgccggaagactcgtcgtttcacatttggggcgtggtgaccagtgtcatccacaaagtggattag

SEQ ID NO: 111941 - protein, 198 aa, Chromobacterium violaceum ATCC 12472
MDTDKPKQHGGKRSGAGRKSVFGGDKTVAVRVPEPLKPILQQWLDDYRSWRTANSAQAFDFRTLGAQLSELSLPLFAGSVPAGSPVPADDLKETDIDLNTHLVSRPGDTFMVKVKGDSMQGAGIHDGDLLLVERSREPRSGKVVVAALNGELTVKRLERGPAGVRLLPENPAYQPIDVPEDSSFHIWGVVTSVIHKVD

SEQ ID NO: 111942 - DNA, 426 bp, Porphyromonas gingivalis W83
  CDS (1)..(426): transl_table=11
atgatagatttatttcagatcgatacaggatcttctctgcttctaccattcgcagatgaaggtattcgcgcgggatttccctctcctgcacaggactatatggatattgccattgacctgaatcatgagttgataactcacccatacagcacgttctacggaagggtaaagggcaattcaatggaagacgcccatgtgttcgacggcgatattcttgttatagacaagtcccttgaagcgcgggatggcgatatggctgtctgctttttggatggagaatttaccctgaaaacaatccgcatcaaatcggaagagattctactcgaaccggccaaccccgactatcctaccatacatgtatcggcagacaacgatttcgtcatctgggggatcgtaacctattgtattcataaaataagaagatga

SEQ ID NO: 111943 - protein, 141 aa, Porphyromonas gingivalis W83
MIDLFQIDTGSSLLLPFADEGIRAGFPSPAQDYMDIAIDLNHELITHPYSTFYGRVKGNSMEDAHVFDGDILVIDKSLEARDGDMAVCFLDGEFTLKTIRIKSEEILLEPANPDYPTIHVSADNDFVIWGIVTYCIHKIRR

SEQ ID NO: 111944 - DNA, 576 bp, Gloeobacter violaceus PCC 7421
  CDS (1)..(576): transl_table=11
atgattacgctccgccagaaagaatttctgcagcaactgatcgaaacctacggctcgacgccgctgcccccaattcgcaccctcgcccaagagcttgaccagcaccgcaccacggtctaccgctggttgcagttgctcgaacagatgggttatctcaaggcccagggcaatcgctactacatcgaccccgacctgttgggaattccactcctcgaaaaccgggttcctgccggttcgccggtgaccgtcgaagaggacttgctcaacagccgcatgtccctcgacgaatacctggtcgaagagcgcaccggcacttttttgctgcgggtcaagggcgactcgatgatagaagcgggcatcttcgagggcgacatcgtcgtggtcaaccagaaccggcgggcggccgacggcgatgtggtcatcgcccgggtcgacggcgagatgaccctcaaaaccttgcgccgccgcaaccagcagacctggctggagcccgccaacagccgctactcccccatccacccggccagcggcctggaggtgttgggggtagtcgtcggcctggtgcgcaagtactaa

SEQ ID NO: 111945 - protein, 191 aa, Gloeobacter violaceus PCC 7421
MITLRQKEFLQQLIETYGSTPLPPIRTLAQELDQHRTTVYRWLQLLEQMGYLKAQGNRYYIDPDLLGIPLLENRVPAGSPVTVEEDLLNSRMSLDEYLVEERTGTFLLRVKGDSMIEAGIFEGDIVVVNQNRRAADGDVVIARVDGEMTLKTLRRRNQQTWLEPANSRYSPIHPASGLEVLGVVVGLVRKY

SEQ ID NO: 111946 - DNA, 435 bp, Serratia marcescens
  CDS (1)..(435): transl_table=11
atgtctgttatccttgagcacattagcaacaagccttacgaaatggcaccttttttcagtgatttactaagctgtggagtgatgagtccgtgcgccgggcatgaagataatgaattaaatttgcatgaatatgtagtccgcaaccgcccctcaaccttctttgtcagggcggcgggcctcagtatgatcaatgccggtatcaatgatggagcaatactggttgtggatcggtctttaacagcacgacacggctctatcgtcgttgcgctggtggatggagagtttacggtaaagatcttacacacgtatcctgagctgcttttgatgccttctaatccagcctataagccgatacgtgtaaatcctgaatcccttgagatatggggcgtcgtcacctttgcactgaatcagttcagccatgtacatgcacgttga

SEQ ID NO: 111947 - protein, 144 aa, Serratia marcescens
MSVILEHISNKPYEMAPFFSDLLSCGVMSPCAGHEDNELNLHEYVVRNRPSTFFVRAAGLSMINAGINDGAILVVDRSLTARHGSIVVALVDGEFTVKILHTYPELLLMPSNPAYKPIRVNPESLEIWGVVTFALNQFSHVHAR

SEQ ID NO: 111948 - DNA, 435 bp, Synechocystis sp. PCC 6803
  CDS (1)..(435): transl_table=11
atgcctgccaacgtgctaccagaaatttaccgccccagtcggcgaacggtttatgagttgcccctttacgcctgtccggtatcagccggttttccctctccggcggaggactatttagagggcaagttagacctcaatcaatatctgatcaaacatcctgccgccaccttctttgtgcgagtgactggggattcaatgattggagccgggattcatgccggggatattttgattgtggatcgttccctggagccacgggatggcaaggtggtgatcgctgtggtcaatggggaactgttggttaaacggttgaggatggaaaagcaaaaaatttatctggcttctgaaaattctgactatccgcccctggtcatcaccgatttaatggactttgaagtatggggcgtggtcaccaatgtgattcatcccctatga

SEQ ID NO: 111949 - protein, 144 aa, Synechocystis sp. PCC 6803
MPANVLPEIYRPSRRTVYELPLYACPVSAGFPSPAEDYLEGKLDLNQYLIKHPAATFFVRVTGDSMIGAGIHAGDILIVDRSLEPRDGKVVIAVVNGELLVKRLRMEKQKIYLASENSDYPPLVITDLMDFEVWGVVTNVIHPL

SEQ ID NO: 111950 - DNA, 435 bp, Erwinia amylovora
  CDS (1)..(435): transl_table=11
atggcgctggatctcgtttatccccggccttcagtggaaggcgccgcacttcctttttttgccgaacccgttgctgccggctttcccagcccggcagcaggctatgaggccaatgaacttaacctgcatgattactgtgtgcggcgtccggccgcgacgtacttcttgcgtgtgtccggcgattccatgcgtgatgcgcgcattcatgatggcgatgtgctggtcgtcgatcgggcagaagaaccccggcacggcagcatcgtgattgccagcatcgataatgaatttacggtcaagcagctgcagctccgcccttacccctgcctgatgccgctgaatccggcttttccgccaatcaggtttgatccggaggcgctgcagatatggggtgtggttacgttcactgtcatgagacaccgcccgtgtacgccttaa

SEQ ID NO: 111951 - protein, 144 aa, Erwinia amylovora
MALDLVYPRPSVEGAALPFFAEPVAAGFPSPAAGYEANELNLHDYCVRRPAATYFLRVSGDSMRDARIHDGDVLVVDRAEEPRHGSIVIASIDNEFTVKQLQLRPYPCLMPLNPAFPPIRFDPEALQIWGVVTFTVMRHRPCTP

SEQ ID NO: 111952 - DNA, 417 bp, Prochlorococcus marinus str. AS9601
  CDS (1)..(417): transl_table=11
ttggattcttttggctcgactactaagaaatttaaaatccccttattaactgattcggtatcagcagggtttccttctcctgcagatgactatacagaagaaaatattgatttaaacgaacatttaatatctaatccgtttagcactttttttcttagagttaaaggtgactcaatgataaatgcaggaattaaagataaagatttaataatagtagacaagagcttaacagccaggccagggaatatcatcattgcaatgatagacggagaatttacaataaaaagattatctataaaaaataatgaattatatttaaaagcagaaaatcataattatcctgattttagatttaaaaaccatattgatgtacagatatggggagttgttatttattcaatacatagctatttatga

SEQ ID NO: 111953 - protein, 138 aa, Prochlorococcus marinus str. AS9601
MDSFGSTTKKFKIPLLTDSVSAGFPSPADDYTEENIDLNEHLISNPFSTFFLRVKGDSMINAGIKDKDLIIVDKSLTARPGNIIIAMIDGEFTIKRLSIKNNELYLKAENHNYPDFRFKNHIDVQIWGVVIYSIHSYL

SEQ ID NO: 111954 - DNA, 432 bp, Prochlorococcus marinus str. MIT 9515
  CDS (1)..(432): transl_table=11
atgtactatataaaaatgcattcttctgatttgacttttaaaaaggtgaaaattccattattaagtgattcggtctcagcaggtttcccatctcctgcagatgactatactgaggaaaatattgatttgaatgagcatttaatatctaatccttttagtactttttttcttagagttaaaggtgactcaatgataaattcaggaattaaagataaagatttaataatagtagataagagtttaactgctaaaccagggaatatcatcattgcgatgatagatggagaatttacaataaaaagattatctataagaaataatgaattatatttaaaagcagaaaatcataattacccggacttcagttttaggaatcatgttgatatacagatttggggagttgtaatttattcaatacatagttacttatga

SEQ ID NO: 111955 - protein, 143 aa, Prochlorococcus marinus str. MIT 9515
MYYIKMHSSDLTFKKVKIPLLSDSVSAGFPSPADDYTEENIDLNEHLISNPFSTFFLRVKGDSMINSGIKDKDLIIVDKSLTAKPGNIIIAMIDGEFTIKRLSIRNNELYLKAENHNYPDFSFRNHVDIQIWGVVIYSIHSYL

SEQ ID NO: 111956 - DNA, 477 bp, Prochlorococcus marinus str. MIT 9303
  CDS (1)..(477): transl_table=11
atggagttcagcgagcctcttcttcatttgcgctccgagcggaagcagcagatcctgccattagcgagtgagcacgtggcggcaggcttcccctcccctgctgaggactatatcgagatcggcatcgacctcaacgaacaattgattcgtcatccagctagcaccttcttcctgcgtgttagcggtcactcaatgacaggtgttggcatccacaatggcgacctcttagttgtcgaccgcagcctagatgcacgccccggtcacatcgtggtggcgattcttgatggtgccttcactctcaaacaacttgtccgccaccgtggcgtactgcgtctagaggccgcccattccaattacccaccgctggatctggctcgcttcggtgacgtgcaaatctggggtgtggcagtgcattccattcatagcctcaatcctgcgcagcaaacatcccactcaacacaacgcctagatgaatag

SEQ ID NO: 111957 - protein, 158 aa, Prochlorococcus marinus str. MIT 9303
MEFSEPLLHLRSERKQQILPLASEHVAAGFPSPAEDYIEIGIDLNEQLIRHPASTFFLRVSGHSMTGVGIHNGDLLVVDRSLDARPGHIVVAILDGAFTLKQLVRHRGVLRLEAAHSNYPPLDLARFGDVQIWGVAVHSIHSLNPAQQTSHSTQRLDE

SEQ ID NO: 111958 - DNA, 417 bp, Prochlorococcus marinus str. MIT 9301
  CDS (1)..(417): transl_table=11
ttggattattttgattcaactactaaaaaatttaaaatccccttattaactgattcggtatcagcagggtttccttctcctgcagatgactatgaagaagaaaatattgatttaaacgaacatttaatatctaatccgtttagcactttttttcttagagttaaaggtgactcaatggtaaatgcaggaattaaagataaagatttaataatagtagacaagagcttaacagccaggccagggaatatcatcattgcaatgatagacggagaatttacaataaaaagattatctataaaaaataatgaattatatttaaaagcagaaaatcataattatcctgattttagatttaaaaaccatattgatgtacagatatggggagttgttatttattcaatacatagctatttatga

SEQ ID NO: 111959 - protein, 138 aa, Prochlorococcus marinus str. MIT 9301
MDYFDSTTKKFKIPLLTDSVSAGFPSPADDYEEENIDLNEHLISNPFSTFFLRVKGDSMVNAGIKDKDLIIVDKSLTARPGNIIIAMIDGEFTIKRLSIKNNELYLKAENHNYPDFRFKNHIDVQIWGVVIYSIHSYL

SEQ ID NO: 111960 - DNA, 432 bp, Pseudomonas fluorescens SBW25
  CDS (1)..(432): transl_table=11
atgatcattactagcctgcgccaactcacagcttccgaagtccctggcctgatttgtgttctgtcaggcaggttctccggtgggttcccgagccctgccgcggaccactacgagccgcctatttcccttgacgagcttgtggatctgcgagcaccccatgtatggcttggtgaggcagagggtgtgtcgatgctgccgtgcggcattgtttctggcagccggttgataattgatagagctaggacaccaaaaattggcgatgtcgtggttgcttatatttgcaatcagcctgtagtgaagcggctggacaaatctcaaaatggatcgtgggttctgagttctgacaatccagaatacccaccaatcgaaggttccgaggagatagaggtttttggagttgtaacatggagcctgacccatcatgcgccatga

SEQ ID NO: 111961 - protein, 143 aa, Pseudomonas fluorescens SBW25
MIITSLRQLTASEVPGLICVLSGRFSGGFPSPAADHYEPPISLDELVDLRAPHVWLGEAEGVSMLPCGIVSGSRLIIDRARTPKIGDVVVAYICNQPVVKRLDKSQNGSWVLSSDNPEYPPIEGSEEIEVFGVVTWSLTHHAP

SEQ ID NO: 111962 - DNA, 432 bp, Arthrobacter nitroguajacolicus
  CDS (1)..(432): transl_table=11
atgggcgtgatagttggcccccgtgtgatagatgcgggactctctctggtggctgtgctgatggcaccggtggcagtggcagcaggctacccgtcgcctgcccaggactactttgacggccgaatagacctcaacgaatatctaatcaaagacgtgaccagcaccttcatcgtgagggttaccggacagtcaatggaacaagccggcatcagcgacggcgacgagctgatcgtcaaccgtgccctggagcccaaggacggatccgtagttatcgcggtgctggatggtgaactgaccatcaaacggctcagaatcaccgcatccggcgtggtcctgcaggctgacaacccaggctttcccgacatcaaagttccggcgctctcagagctgacgatctggggcgtggccaccaggtgccttcaccatgtgtag

SEQ ID NO: 111963 - protein, 143 aa, Arthrobacter nitroguajacolicus
MGVIVGPRVIDAGLSLVAVLMAPVAVAAGYPSPAQDYFDGRIDLNEYLIKDVTSTFIVRVTGQSMEQAGISDGDELIVNRALEPKDGSVVIAVLDGELTIKRLRITASGVVLQADNPGFPDIKVPALSELTIWGVATRCLHHV

SEQ ID NO: 111964 - DNA, 444 bp, Synechococcus sp. WH 7803
  CDS (1)..(444): transl_table=11
atggcgatcgatcactccttcagcccagtcccgctgcccctgcgctgccagcgccctccgcttcacctgcccttggccggcgagcgcgtggccgcaggctttccctcccccgcggacgattacgtggaggtgggaattgatctcaacgaccagctgatccgccatcccaccagcacgttctttctacgcgtgagcggcgattccatgaccggtgccgggattcacgacggcgacctgctggtggtggaccgcagcctcgaccccaggccgggtcgggtcgtggtggccgtgctggatggcggtttcacactcaaacgcctggcacgccatcgcggccagctgcgactggaggccgccaatcccgactatccacccctcgatctgcaccgctgcggtgatgtgcagatctggggggtggcgatccatgtgattcaccccctctaa

SEQ ID NO: 111965 - protein, 147 aa, Synechococcus sp. WH 7803
MAIDHSFSPVPLPLRCQRPPLHLPLAGERVAAGFPSPADDYVEVGIDLNDQLIRHPTSTFFLRVSGDSMTGAGIHDGDLLVVDRSLDPRPGRVVVAVLDGGFTLKRLARHRGQLRLEAANPDYPPLDLHRCGDVQIWGVAIHVIHPL

SEQ ID NO: 111966 - DNA, 420 bp, Klebsiella pneumoniae subsp. pneumoniae MGH 78578
  CDS (1)..(420): transl_table=11
atgaacgtttacacgccggttgagctacgtcagattgtctcctttcccttttttgccgacctggtgcagtgcggctttcccagcccggctcaggactatgttgagaagcgaatcgacctcaacgagctgctggtgcagcatcccagcgcgacctattttgtcaaagccgctggcgacagcatgatcgatgccggcattgacgaaggcgatttgctggtggtggacagcgcgcgtaaagcggagcatggcgatatcgtgattgccgccgtcggcggcgagtttacggtaaagaagctgcagcttctgccgcgggtgcagcttaacccgatgaacccggcctattcgcccatcgtggtcggccgcgaggagacgctcgatattttcggcgtcgtaacctacatcatcaaggcggcgggctga

SEQ ID NO: 111967 - protein, 139 aa, Klebsiella pneumoniae subsp. pneumoniae MGH 78578
MNVYTPVELRQIVSFPFFADLVQCGFPSPAQDYVEKRIDLNELLVQHPSATYFVKAAGDSMIDAGIDEGDLLVVDSARKAEHGDIVIAAVGGEFTVKKLQLLPRVQLNPMNPAYSPIVVGREETLDIFGVVTYIIKAAG

SEQ ID NO: 111968 - DNA, 420 bp, Klebsiella pneumoniae subsp. pneumoniae MGH 78578
  CDS (1)..(420): transl_table=11
atgcagttctacactcccgttgagttacgtcagatcatgctgctcccgttgtacagcgaccttgtgcaatgtggttttccaagtcctgcgcaggactacgttgagcaacgtatcgatctgaacgagttgctcgttaaccaccccagtgcgacgtattttgtcaaagccgccggcgacagcatgaaggatgccggcataggggaaggtgatcttcttgttgtggatagctcaaggacagcagttcatggcgatatcgttatcgctgcagtggatggggaattcaccgttaagaagctgcagctgcatccgcgggttcagcttaacccaatgaaccctgcatattcgccgatagtcgtgggtagcgaggatactctcgatgtgttcggggtcgtaacttacatcatcaaatcggctggctga

SEQ ID NO: 111969 - protein, 139 aa, Klebsiella pneumoniae subsp. pneumoniae MGH 78578
MQFYTPVELRQIMLLPLYSDLVQCGFPSPAQDYVEQRIDLNELLVNHPSATYFVKAAGDSMKDAGIGEGDLLVVDSSRTAVHGDIVIAAVDGEFTVKKLQLHPRVQLNPMNPAYSPIVVGSEDTLDVFGVVTYIIKSAG

SEQ ID NO: 111970 - DNA, 426 bp, Klebsiella pneumoniae subsp. pneumoniae MGH 78578
  CDS (1)..(426): transl_table=11
atgaagttcattcctgcagtatcagaagccagcatagtaaaaattcctttgttcacagagcgatgccctgcgggttttccgtcaccggcatcagactacactgagtctgaactggatctgaatgagtactgcattcaccggcgccactccacctattttgtcagggcgattggcaactcaatgactgatattggcctctattccggcgatctgttggtcgtggataaagcagaacagccgcggcacggggatattgttatcgcggaaattgagggtgaatttacggtaaaacgcctgcttctgacgccgcggccagccctgcaggcgatgaacccggacttcccttccctgtacccggatccggaaacgctgcaaattttcggcgtggtgacagccttcattcataaaacccggagggcagactga

SEQ ID NO: 111971 - protein, 141 aa, Klebsiella pneumoniae subsp. pneumoniae MGH 78578
MKFIPAVSEASIVKIPLFTERCPAGFPSPASDYTESELDLNEYCIHRRHSTYFVRAIGNSMTDIGLYSGDLLVVDKAEQPRHGDIVIAEIEGEFTVKRLLLTPRPALQAMNPDFPSLYPDPETLQIFGVVTAFIHKTRRAD

SEQ ID NO: 111972 - DNA, 432 bp, Klebsiella pneumoniae subsp. pneumoniae MGH 78578
  CDS (1)..(432): transl_table=11
atgaaactgcagcttttcagcaccgggaaagaactcccgccacaggcccatccgttgtttgcagacctggccagctgcggttttcccagccctgcagctgactacgtcgagtctgacctggatctccatgattactgcatacggcatccgagcgcgacttactaccttcgcgccagcggtgacagtatgtccgacggcagcctttacaatggcgatctgctggttgtggactgtgccgagaagccccggcatggcgatattgttgtggccagcgtgcagggggagtttacggtcaaacggttgctgctgacgccacgactgacgctgcagcccatgaacgccgcctggtcgccgatttatcccgacccggacgatctggatatctttggcgtcgtcacgcacatcatccaccgcccgagggagatgtactga

SEQ ID NO: 111973 - protein, 143 aa, Klebsiella pneumoniae subsp. pneumoniae MGH 78578
MKLQLFSTGKELPPQAHPLFADLASCGFPSPAADYVESDLDLHDYCIRHPSATYYLRASGDSMSDGSLYNGDLLVVDCAEKPRHGDIVVASVQGEFTVKRLLLTPRLTLQPMNAAWSPIYPDPDDLDIFGVVTHIIHRPREMY

SEQ ID NO: 111974 - DNA, 432 bp, Klebsiella pneumoniae subsp. pneumoniae MGH 78578
  CDS (1)..(432): transl_table=11
atgaaactacaacttttcagcaccgggaaagaactcccgccacaggcccatccattgtttgccgatctggccagctgcggttttcccagccctgctgctgactatgtcgagtccgatctggatctccatgattactgcatacggcatccgagcgcgacgtactacctgcgtgccagcggagacagcatggccgacggcagtctgtacaatggcgatctgctggttgtggacagtgctgaaaagccgcggcacggcgatatcgttgtcgccagcgtacagggggagtttacggtgaaacggcttctgctgacgccgcggctgacgctgcagcccatgaatgcctcctggtcgccgatttatcctgatcccgacgagctggatatctttggcgtcgtcacgcatatcatccaccgcccgagggagatgtactga

SEQ ID NO: 111975 - protein, 143 aa, Klebsiella pneumoniae subsp. pneumoniae MGH 78578
MKLQLFSTGKELPPQAHPLFADLASCGFPSPAADYVESDLDLHDYCIRHPSATYYLRASGDSMADGSLYNGDLLVVDSAEKPRHGDIVVASVQGEFTVKRLLLTPRLTLQPMNASWSPIYPDPDELDIFGVVTHIIHRPREMY

SEQ ID NO: 111976 - DNA, 432 bp, Candidatus Protochlamydia amoebophila UWE25
  CDS (1)..(432)
atgacgttgatttttttagaaaatatttcttctgctgaaaaacaattttatcatttacccttttaccagcagacgatttcggcaggttttccatctccagctgaaaatgagatggcagatcgcattgatttgaatgctttgttaattaagcacccttccgcgacttttttccttaaggtgtctggttcttcgatgattaatgcagggattcatcatcaagatattttagttgtcgaccgaagtttgcctgcagtggatggcaaagtggttattgcgtctgttgatggagaattaacggtaaaaagattaaaaatagcatttaaaaaagtgcagttgatagctgaaaatgatcaatatccttctatcgaaatttccgaagagatgaatctgcatatttggggggttgtgactcatgtcattcatgctgtctaa

SEQ ID NO: 111977 - protein, 143 aa, Candidatus Protochlamydia amoebophila UWE25
MTLIFLENISSAEKQFYHLPFYQQTISAGFPSPAENEMADRIDLNALLIKHPSATFFLKVSGSSMINAGIHHQDILVVDRSLPAVDGKVVIASVDGELTVKRLKIAFKKVQLIAENDQYPSIEISEEMNLHIWGVVTHVIHAV

SEQ ID NO: 111978 - DNA, 495 bp, Desulfovibrio vulgaris subsp. vulgaris str. Hildenborough
  CDS (1)..(495): transl_table=11
atgaagcgccatacagtccccgacgactcaccgacttccaaccgtggacagggtcatgcggccacagaccgcgtggtgccctgcgccgtgcctgtgaaagacccgccgcgcctgtcgcgtcctctcatgctttcgcgggtggctgcgggtttcccgtctcccgccgacgactatatcgaccgcagcctcgacctcaacgaccatatcgtgaagcatcctgcggccaccttctatgtcagggcatcgggcgaatccatgctgggcgcgggtgtccatgacggcgacctgctggtggtggacagggccctcgacccccgtcccggaagggtggtgatcgcggcagtcgacggtgaacttaccgtgaagcgactggtgcgcgaggggggcaggctgctgctggcccccgagaatgcggcgtatccgcctctggacatcaccggtcgcgaggatgtcgaggtgtggggggtggtgacgcatgtcgtccatgccctttga

SEQ ID NO: 111979 - protein, 164 aa, Desulfovibrio vulgaris subsp. vulgaris str. Hildenborough
MKRHTVPDDSPTSNRGQGHAATDRVVPCAVPVKDPPRLSRPLMLSRVAAGFPSPADDYIDRSLDLNDHIVKHPAATFYVRASGESMLGAGVHDGDLLVVDRALDPRPGRVVIAAVDGELTVKRLVREGGRLLLAPENAAYPPLDITGREDVEVWGVVTHVVHAL

SEQ ID NO: 111980 - DNA, 555 bp, Legionella pneumophila subsp. pneumophila str. Philadelphia 1
  CDS (1)..(555): transl_table=11
ttgattctaaattcaagtttaggggagtatatgtctcatggtggtgcacgagcaggcgctgggcgccctcgtgggcaaggtaaatatggagaatcaaccaaatcagtccgtatacctgaatctcgtatacaggatgtgatgaaatatcttcaaggagaaaaggagttcccagcgattcctttatataccagttctgtaagagctggttttccttctccgggtgatgactatattgaatccatgctggatttgaatgagtacctgatcaagcatcctgcatccacattttttgtacgagcttctggagaatccatgataaatgccggtatttactccggtgatattttaatcgttgatcgtggcatagaggctactcatggaaaaattgtaatcgttgccctgaatggcgaattgacagtaaaacgtttatcccgtcaacatgggcaagttaagttgctggctgaaaaccctgattttcctcccatagatattacagaggaatacgatatggtgatttggggagtcgtcactcatgttattcatacggtattgtga

SEQ ID NO: 111981 - protein, 184 aa, Legionella pneumophila subsp. pneumophila str. Philadelphia 1
MILNSSLGEYMSHGGARAGAGRPRGQGKYGESTKSVRIPESRIQDVMKYLQGEKEFPAIPLYTSSVRAGFPSPGDDYIESMLDLNEYLIKHPASTFFVRASGESMINAGIYSGDILIVDRGIEATHGKIVIVALNGELTVKRLSRQHGQVKLLAENPDFPPIDITEEYDMVIWGVVTHVIHTVL

SEQ ID NO: 111982 - DNA, 477 bp, Azoarcus sp. EbN1
  CDS (1)..(477): transl_table=11
atgattatgaccctgctcactcccctttcggacttgtcccctgccgcggttgccggtctccgctatccgtcgccgacccgggggtgcctggcaatcccgcttgggctcgctcccgtatcggctggcttcccatcgccggccgaggactatgaagacaaaaagctcgacatcaacgattacttggtgcgcaacccggtctcgactttctacttccccgtcaagggcgactccatgcagggagcgcaggtcttcgacggcgacattctggtggtcgaccgcagcgttatgccggctcacgggcatgtcgtcatcgccttcgtgaatggcgaacgcttggtgaagcgctttcaccgtcgcggcgaccggatcgcactcctggcggaaaaccccggctatccgccactcgaattgaccgaaggcagcgagctggtgatctggggcgtggtgatcggcaagttcagccgaatccccacatga

SEQ ID NO: 111983 - protein, 158 aa, Azoarcus sp. EbN1
MIMTLLTPLSDLSPAAVAGLRYPSPTRGCLAIPLGLAPVSAGFPSPAEDYEDKKLDINDYLVRNPVSTFYFPVKGDSMQGAQVFDGDILVVDRSVMPAHGHVVIAFVNGERLVKRFHRRGDRIALLAENPGYPPLELTEGSELVIWGVVIGKFSRIPT

SEQ ID NO: 111984 - DNA, 438 bp, Bacteroides fragilis NCTC 9343
  CDS (1)..(438): transl_table=11
atgaagagaattgaaatacataagattgacgtatccagcagtttgccgatcccatacgccgatgaaggtatacgggccggtttcccgtcaccggcacaagactatatggagcaagccatagatctgaataaagagctaatcaaacatccggccagtacattctttggacgtgtagtaggcgattcgatgcgggatgaaggcatagaagaaggagacattctggtcatcgacaaatcactggaattacaggatgacgaccttgccgtgtgttttattgatggagattttactgtaaagcgggtacgaattgaacctaatgccgtctggttaataccggcgaatccgaaatactccttgattaaagtaacaaaggagaatgaatttatcgtctggggaatagtgacctataccatcaaaaagaacaggagaaaaagataa

SEQ ID NO: 111985 - protein, 145 aa, Bacteroides fragilis NCTC 9343
MKRIEIHKIDVSSSLPIPYADEGIRAGFPSPAQDYMEQAIDLNKELIKHPASTFFGRVVGDSMRDEGIEEGDILVIDKSLELQDDDLAVCFIDGDFTVKRVRIEPNAVWLIPANPKYSLIKVTKENEFIVWGIVTYTIKKNRRKR

SEQ ID NO: 111986 - DNA, 435 bp, Pseudomonas syringae pv. syringae B728a
  CDS (1)..(435): transl_table=11
atgagcgtagtcattcttggtccgttgtctgaagggggtatcaagctaccgctctactcatttcaggtgccagctgggtttgcttctcccgctgtcgattacatcgagaagcacgtgtccctagacgaactggccgaggtacgggcaccgcatgtctacctggcgaaaattctcggagacagcatgattggggcaggtatttttgataaggatttgatcgtcgttgatcgcagtcgcactgccgagcatggagagatcgttgtggcagcgcttaataattcggaaccgatttgcaagcggctgttcatgatggatggggttgtcaaacttcaatccgaaaatagtgcctacccgtccaagcacatcctggagggtgacaacctcgtcatctggggcgtagtgaactacagcatgcgccgtcatggaaaagcgtga

SEQ ID NO: 111987 - protein, 144 aa, Pseudomonas syringae pv. syringae B728a
MSVVILGPLSEGGIKLPLYSFQVPAGFASPAVDYIEKHVSLDELAEVRAPHVYLAKILGDSMIGAGIFDKDLIVVDRSRTAEHGEIVVAALNNSEPICKRLFMMDGVVKLQSENSAYPSKHILEGDNLVIWGVVNYSMRRHGKA

SEQ ID NO: 111988 - DNA, 432 bp, Pseudomonas syringae pv. syringae B728a
  CDS (1)..(432): transl_table=11
atgaatgtcacttacctcggcaccctggcagaagagggggcgaagctcccatggttctcatctttggtatcagcagggttcccctcgccggcagcagaccacatcgagaagcatatatcgctcgatgagcttttcagcattcgggcgccgcatgtttacctggttactgtcttgggtgagagcatgcagggggcaggcatccatagtggtgatcttgcgatcgtagatcgaagccttgaggccgagcatggtgatatcgtcgttgctgcgctcaacgccgaggccgtttgcaagcggctgcacatgcgtaatgacgtcgttatccttcagtcagaaaatccgcatttcgcacctcgacacatcatggaaggcgatgaactgtccatcttgggagtcgttcgttacagcgtgcgcgatcatggccggtcatga

SEQ ID NO: 111989 - protein, 143 aa, Pseudomonas syringae pv. syringae B728a
MNVTYLGTLAEEGAKLPWFSSLVSAGFPSPAADHIEKHISLDELFSIRAPHVYLVTVLGESMQGAGIHSGDLAIVDRSLEAEHGDIVVAALNAEAVCKRLHMRNDVVILQSENPHFAPRHIMEGDELSILGVVRYSVRDHGRS

SEQ ID NO: 111990 - DNA, 453 bp, Pseudomonas fluorescens Pf-5
  CDS (1)..(453): transl_table=11
ttgtacagtatctggaagtcgtgcgtcatgagtttttcaattctaggccctattgctgagggcggtcggaagctaccactgtgcctgtttcgcgttccggctggctttccttctcctgcagctgaccatatcgaacagcaaatctcgctggaccaggtgctgaatattcgcgctcctcacgtctaccttgtctccatctcgggcgagagcatgcagggagctggaatcttcgatggtgacctagcgatcgttgaccgctcgattgaagcaatgcatggccatatcgtcatcgcgctgcttaacaatgaccctgtatgcaaacgagtatgccttcggggaaaagatatagttctactttcagagaaccccaagtacccgccgcgctacgtccttgaaggagacgagctcacaatctggggtgtcgtcaccagcagcgtgcgcagccatgtctga

SEQ ID NO: 111991 - protein, 150 aa, Pseudomonas fluorescens Pf-5
MYSIWKSCVMSFSILGPIAEGGRKLPLCLFRVPAGFPSPAADHIEQQISLDQVLNIRAPHVYLVSISGESMQGAGIFDGDLAIVDRSIEAMHGHIVIALLNNDPVCKRVCLRGKDIVLLSENPKYPPRYVLEGDELTIWGVVTSSVRSHV

SEQ ID NO: 111992 - DNA, 414 bp, Colwellia psychrerythraea 34H
  CDS (1)..(414): transl_table=11
atgaaagttattccaatatatgccgaagctggtatttcaggctttgaatctccagcagcagaatataaagaattaggcttatcgcttgatcaattaatcataaaacatcccaatgctaccttcattgggcaggcttctggccaatcaatgaaaggggtaggaatatttgatggcgatattcttattgtcgacagatcattaaccgctagaaatggtgatgttattgtggctaattacaacggttgtttcgtctgtaaattgatcgacaaggtgcaagctaggctattatcagcctctgctgattttgcgcctgtctcaattacccctgaagatgaattttcactagagggcgttgttactcgctctattcgtctacatcataaatctccagagttagcggcatgtatgctttag

SEQ ID NO: 111993 - protein, 137 aa, Colwellia psychrerythraea 34H
MKVIPIYAEAGISGFESPAAEYKELGLSLDQLIIKHPNATFIGQASGQSMKGVGIFDGDILIVDRSLTARNGDVIVANYNGCFVCKLIDKVQARLLSASADFAPVSITPEDEFSLEGVVTRSIRLHHKSPELAACML

SEQ ID NO: 111994 - DNA, 423 bp, Salmonella enterica
  CDS (1)..(423): transl_table=11
atgttactgcttgtagcacccgaacaggagccggtacagtccactgccccgctgttcaccgaacgttgcccggcggggtttccgtcgccggccgccgattacacggaggagaaactggatctgaatgcctactgtatacggcgtccggctgcaacattcttcgtcagggctatcggggattcgatgaaagaaatgggtctgcattccggcgatttaatggttgtcgacaaagctgagaaacccatgcagggggatattgtcatcgcggaaacagatggcgagttcaccgttaagcgcctgcagttgaagccccgtatcgccctgctgccgattaatccggcctaccccacgctttatccggaagaactgcagattttcggggtggtgacggcttttatacacaaaacccggagcacagactga

SEQ ID NO: 111995 - protein, 140 aa, Salmonella enterica
MLLLVAPEQEPVQSTAPLFTERCPAGFPSPAADYTEEKLDLNAYCIRRPAATFFVRAIGDSMKEMGLHSGDLMVVDKAEKPMQGDIVIAETDGEFTVKRLQLKPRIALLPINPAYPTLYPEELQIFGVVTAFIHKTRSTD

SEQ ID NO: 111996 - DNA, 426 bp, Pseudomonas syringae pv. phaseolicola 1448A
  CDS (1)..(426): transl_table=11
atgaacgtcaaaatactcggtcggttgtgcgcgtccggaaaagtcataccctgctacaccttcaaaatccctgccggctttcccaatccagcagcggatcacatcgagcaggacttttcattcgaccggctgatggacttgcgtgcgccccacatctacgtggccaagatcgatggcgacagcatggaaggtgcgaagatttttcatgacagcctggttgtggtggatcgatcccgaaagccgtccagtggcagcatcgtgattgcggcgctgaacaatgagccgctgtgtaagattctcatcctgcagggtgatcatgtcgtgctgaagtcagccaaccccgcctatccacctcggcatgtcctggaaggcgaagaactgtcgatatggggcgttgtgagacacggcgtgacgagttttgaataa

SEQ ID NO: 111997 - protein, 141 aa, Pseudomonas syringae pv. phaseolicola 1448A
MNVKILGRLCASGKVIPCYTFKIPAGFPNPAADHIEQDFSFDRLMDLRAPHIYVAKIDGDSMEGAKIFHDSLVVVDRSRKPSSGSIVIAALNNEPLCKILILQGDHVVLKSANPAYPPRHVLEGEELSIWGVVRHGVTSFE

SEQ ID NO: 111998 - DNA, 438 bp, Escherichia coli
  CDS (1)..(438): transl_table=11
atgagtcccgtttatcaccgtccggctgacccttcaggcgatgacagttacgtgcgaccgttgtttgccgatcgttgccaggccggttttccttcgcctgccacggattatgctgagcaggaactggatctgaacagctattgcatcagcagacctgcagccaccttctttctgcgcgccagcggtgaatcgatgaaccaggctggcgtgcagaatggtgatctgctggtagtggacagggccgaaaaaccacaacacggggacatcgttatcgctgagatcgacggtgagttcaccgtcaaacgactgcggttgcgcccacgcccggcactggagccggtttcagacagcccggagttccgcacactgtatccggaaaacatctgtatttttggtgttgtcactcacgtgatacacaggacgcgggagttacgctga

SEQ ID NO: 111999 - protein, 145 aa, Escherichia coli
MSPVYHRPADPSGDDSYVRPLFADRCQAGFPSPATDYAEQELDLNSYCISRPAATFFLRASGESMNQAGVQNGDLLVVDRAEKPQHGDIVIAEIDGEFTVKRLRLRPRPALEPVSDSPEFRTLYPENICIFGVVTHVIHRTRELR

SEQ ID NO: 112000 - DNA, 432 bp, Synechococcus sp. CC9605
  CDS (1)..(432): transl_table=11
atggagctccaacacagaccgcttcccctgcagcccaagcgcagtcggctcacgctgcccctggctggggaacgcgtcgccgctggcttcccgtccccagccgatgactacgtcgacgtggggatcgacctcaatgaacagctgatccggcatcccaccagcacctttttcctgcatgtgagcggcgaatcgatgaccgacgccggcatccacgacggcgatcttctggtggtcgatcgcagcctcgacccgcgcccgggccaggtggttgtggctgtgctcgacggtgccttcaccctcaaacgcctgatgcatcatcgcggccggttgcgcctggaagccgcccatccggactatccgccactggagcttcaccgctgcggcgaagtgcagatctggggcgtcgccatccacgtgatccatccgctctga

SEQ ID NO: 112001 - protein, 143 aa, Synechococcus sp. CC9605
MELQHRPLPLQPKRSRLTLPLAGERVAAGFPSPADDYVDVGIDLNEQLIRHPTSTFFLHVSGESMTDAGIHDGDLLVVDRSLDPRPGQVVVAVLDGAFTLKRLMHHRGRLRLEAAHPDYPPLELHRCGEVQIWGVAIHVIHPL

SEQ ID NO: 112002 - DNA, 627 bp, Desulfovibrio desulfuricans G20
  CDS (1)..(627): transl_table=11
atgctgttgtgccgaagcacgcaaataccggaggatgacatgtcgtaccacagcggactgccccaacagccttacggggtcaagctttttgcggaaaagataccggcggcgcatgcattgcggccttcccgcacccgtgacgccgttccggcacatgcgcacaccggcggtgctgacggtctgcatatgctggcgggtgcggtaccgcagcatgagggggcggagaaaatccgtcatgccgcagcggacagaccgcttatgctgtcctgcgtggcggccggttttccttcaccggcagacgattacatagacaggcggctggacctgaacgaatatctggtgcgtaaccccgaatcgacattttatgtgcgcgtccacggtgaatccatgcgcgatgccggtatctgggccggagatattctggtggtggaccgtgccgtgcagcctgccaccggccgggtggtgatagccgtgctggacggggaactgaccgtaaagcggcttaaaaaagaaggagaccgtctgctgctggttccggaaaatccggattacagtcccgttgatgtcagcgggcgcgaagatttttccgtctggggggtggtaacctgtgtgttgcacagggtgtga

SEQ ID NO: 112003 - protein, 208 aa, Desulfovibrio desulfuricans G20
MLLCRSTQIPEDDMSYHSGLPQQPYGVKLFAEKIPAAHALRPSRTRDAVPAHAHTGGADGLHMLAGAVPQHEGAEKIRHAAADRPLMLSCVAAGFPSPADDYIDRRLDLNEYLVRNPESTFYVRVHGESMRDAGIWAGDILVVDRAVQPATGRVVIAVLDGELTVKRLKKEGDRLLLVPENPDYSPVDVSGREDFSVWGVVTCVLHRV

SEQ ID NO: 112004 - DNA, 561 bp, Synechococcus elongatus PCC 7942
  CDS (1)..(561): transl_table=11
atgaagggtggggctagggcaggagcgggtcgcccaaaaggtagcggcaagtatggcgaaccgaccaaagccgttcgtctacccctgagtgtgattgagcaaattccccagatcctagaacagagatcgtccagaaccactctgagcgaggtctatcgcccgcaacgcggtgcggttctagaactgccgctctaccaaatgccagtctcagcaggtttcccttcccctgccgatgactatattgagcaacgactagacctgaaccggcatctgattaagaaccccgccgccaccttcatggcacgggtttcgggcgattcgatgattggggtagggatccacgacggggacgtgattatcgtggaccgttccctcgaaccccgcgatgggcagattgtgattgcagtcttaaacggtgagttaaccgtgaagcgtctacggcaagagcggcaacgactgtttctgcaagccgagaacccaaattaccccgaccttgagattacggatgccagtgcctttcaaatctggggtgtggtcaccaatgtcattcacgccctttga

SEQ ID NO: 112005 - protein, 186 aa, Synechococcus elongatus PCC 7942
MKGGARAGAGRPKGSGKYGEPTKAVRLPLSVIEQIPQILEQRSSRTTLSEVYRPQRGAVLELPLYQMPVSAGFPSPADDYIEQRLDLNRHLIKNPAATFMARVSGDSMIGVGIHDGDVIIVDRSLEPRDGQIVIAVLNGELTVKRLRQERQRLFLQAENPNYPDLEITDASAFQIWGVVTNVIHAL

SEQ ID NO: 112006 - DNA, 429 bp, Pseudomonas putida
  CDS (1)..(429): transl_table=11
atgaaagtcgtcgcaatccagcctctcttgggatctggcatcccgcttcaactgttgtcctgcaccgctgccggtggctttcccagcccagcggctgattattacgaaccgcccatttcgctcgacgaactgttgaacattcgcgcaccacatatttggattgtgaaagtcgaaggcgagagcatgcgtgatgccggaattttcaccggaacccggttgatcatcgaccggacagtgacggcgtgttccggacacattgtgatggcgtatgtcgacaaccaacccgttgtaaagcggctggccaagtcagctgcagggtggacactcgaatcagcaaacccgacatacaaagccgtcactcccgacgaatacagcaccgtcgaagtgttcggcgtcgtgacttggagtctgtcgcctcatgaactttga

SEQ ID NO: 112007 - protein, 142 aa, Pseudomonas putida
MKVVAIQPLLGSGIPLQLLSCTAAGGFPSPAADYYEPPISLDELLNIRAPHIWIVKVEGESMRDAGIFTGTRLIIDRTVTACSGHIVMAYVDNQPVVKRLAKSAAGWTLESANPTYKAVTPDEYSTVEVFGVVTWSLSPHEL

SEQ ID NO: 112008 - DNA, 429 bp, Cytophaga hutchinsonii ATCC 33406
  CDS (1)..(429): transl_table=11
atgattgagctgtatcaaattgattcttctactgctacactgattccatttatttcagataagctggtttgtggtttcccttcgccagctacagattaccttgatctatccattgatttaaatagagagcttattactaatccgaatgctactttttgcggaagggtaaaaggaaacagcatgattgatgccggaattgaggaaggagatgtattgatcattgatcgttcaaaagagcttaccgataacagcatagcggtttgttttttagatggcgagtttaccgttaagcgggtgaaggtttataagtctaaaaaagaaattcatttgatgccttctaataaaaatttcaaacccattattgttactcccgataatgaatttacaatatggggtattgtagtatacacaattaaaaaaaattattga

SEQ ID NO: 112009 - protein, 142 aa, Cytophaga hutchinsonii ATCC 33406
MIELYQIDSSTATLIPFISDKLVCGFPSPATDYLDLSIDLNRELITNPNATFCGRVKGNSMIDAGIEEGDVLIIDRSKELTDNSIAVCFLDGEFTVKRVKVYKSKKEIHLMPSNKNFKPIIVTPDNEFTIWGIVVYTIKKNY

SEQ ID NO: 112010 - DNA, 420 bp, Cytophaga hutchinsonii ATCC 33406
  CDS (1)..(420): transl_table=11
atgcagatctacaacagcttatcccaagccatacacccgccaattccattggcaaatggtgcagttgcagccggtttcccaagtccggcgggcgactacttagacagcaggatcgatatttacgaatatcttatccagcacccgacagcaaccttttatgtacgtgtaaaaggaaattctatgatcaacgcagctattcacgatggtgatctgctggtggtcgaccgctcggttgaacctaaaaacaatcagattgtagtagctattattgatggtgaatttactgtcaaacgcatcagcaaatacaacaacaaactctacctcattcccgagaacgaaaaattcaaacccattgagatcactgaaaccatggactttgacgtatggggcgtagtaacatatgtgattcataaaccataa

SEQ ID NO: 112011 - protein, 139 aa, Cytophaga hutchinsonii ATCC 33406
MQIYNSLSQAIHPPIPLANGAVAAGFPSPAGDYLDSRIDIYEYLIQHPTATFYVRVKGNSMINAAIHDGDLLVVDRSVEPKNNQIVVAIIDGEFTVKRISKYNNKLYLIPENEKFKPIEITETMDFDVWGVVTYVIHKP

SEQ ID NO: 112012 - DNA, 438 bp, Escherichia coli
  CDS (1)..(438): transl_table=11
atgagtaccgtttatcaccgtccggctgacccttcaggcgatgacagttacgtgcgaccgttgtttgccgatcgttgccaggccggttttccttcgcctgccactgattatgctgagcaggaactggatctgaacagctattgcatcagcagacctgcagccaccttctttctgcgcgccagcggtgaatcgatgaaccaggctggcgtgcagaatggtgatctgctggtagtggacagggccgaaaaaccacaacacggggacatcgttatcgctgagatcgacggtgagttcaccgtcaaacgactgctgttgcgcccacgcccggcactggagccggtttcagacagcccggagctccgcacactgtatccggaaaacatctgtatttttggtattgtcactcacgtgatacacaggacgcgggagttacgctga

SEQ ID NO: 112013 - protein, 145 aa, Escherichia coli
MSTVYHRPADPSGDDSYVRPLFADRCQAGFPSPATDYAEQELDLNSYCISRPAATFFLRASGESMNQAGVQNGDLLVVDRAEKPQHGDIVIAEIDGEFTVKRLLLRPRPALEPVSDSPELRTLYPENICIFGIVTHVIHRTRELR

SEQ ID NO: 112014 - DNA, 399 bp, Magnetococcus sp. MC-1
  CDS (1)..(399): transl_table=11
atgacgctccccattcccttcttcacatcattggtcccggcaggttttccatccccggcagatgactaccttgaaggccacttggatctcaatgaactgttgatcaagcggcctgctgccacattctttgtacgggttactggcgactccatgattggagctgggattcactccggtgacatcctggtggtggatcgatcattggagccgatcaatggatccatcgtgatcgctgtggtaagtggcgaactgacggttaaacggctcaaaaaggacggcgggcgtgtttggcttatgccggagaacaaagattttcaaccgatggagatcagtgaagagcaggagatgaccgtctggggggtggtgcgtagtgccatccaccaatttggtgtcggttga

SEQ ID NO: 112015 - protein, 132 aa, Magnetococcus sp. MC-1
MTLPIPFFTSLVPAGFPSPADDYLEGHLDLNELLIKRPAATFFVRVTGDSMIGAGIHSGDILVVDRSLEPINGSIVIAVVSGELTVKRLKKDGGRVWLMPENKDFQPMEISEEQEMTVWGVVRSAIHQFGVG

SEQ ID NO: 112016 - DNA, 696 bp, Magnetococcus sp. MC-1
  CDS (1)..(696): transl_table=11
atgaccgacagaaaagagcacaaaatgaaaccaggacggagacccacagaagggatgacgccgtctcaagagcgcatcatgcaggtgatccggaatgccattgatcgggatgggttacccccgacagtgaaagagatcgccgaggcgttgggcatgaaaacgcccagtgcccatgaacaggtgcagaaactggtaaagaaggggtttatacggcgcacaccccgtaaggcgcgttccattgaaattgtggaacagtctcctgaagaagagcctgttgagaaaaagccggatgtggccaggctggtcccggtacctatcatcggtgaggtggcagcaggcatccccattctggcagtggaaaaccatattggggagcttctgatggactcccgtacagccagggggccctgctttgctcttaaggttaaaggggacagtatgatcgatgccgagatcttcgagggggattatgtggtagtgcgccatcaggcccttgcggagaacggagatattgtggtggccatcctggacggagaggccacagttaaacgcttgtacatatcagaagagaccattgagcttcgaccggagaaccggtcctaccagcccatagtcgtgcccccgggtggtgatatccgaattttgggcaaggtgctggcagtacgcggccacggggccgccaacaataatgaataa

SEQ ID NO: 112017 - protein, 231 aa, Magnetococcus sp. MC-1
MTDRKEHKMKPGRRPTEGMTPSQERIMQVIRNAIDRDGLPPTVKEIAEALGMKTPSAHEQVQKLVKKGFIRRTPRKARSIEIVEQSPEEEPVEKKPDVARLVPVPIIGEVAAGIPILAVENHIGELLMDSRTARGPCFALKVKGDSMIDAEIFEGDYVVVRHQALAENGDIVVAILDGEATVKRLYISEETIELRPENRSYQPIVVPPGGDIRILGKVLAVRGHGAANNNE

SEQ ID NO: 112018 - DNA, 717 bp, Magnetococcus sp. MC-1
  CDS (1)..(717): transl_table=11
atgtctcgcccccctttaagccctgctcaattacgcctgtggcaaaccctgtgcgcccacataaccacccatgggctgccccccaccgtcgccgaactgtcggcacagctgggcatcaaaccccccagcgtacacgcacagttgcaggctttggcacgcaagggttggctgcgacacaccccccacaaagcacgcagtctcacccctctggatgaggccggccaacccctcttacaccccaaggagagcacacccatggagagccgcccaatcatgtcagccccccccagagtgacccaacggtttcgcccggctgagcaggcccgctttaccattcccctggcagggtcgcgggtggcggcgggatttccctcacctgcggatgattttgtggaggcccaattagaccttaaccaacatttggtcaaacaccccgccgcgaccttttttgtgcgggtggcgggagagtccatgatcgaagcgggcattcaccctggggatattctcgtggttgaccgctctctacagccagagagcggccagattgtcattgcggtgctggatggcgaattgaccgttaaacggttggaaaaacgggctggcaagctgtttcttatgcccgccaaccgcaacttcacccccattgaagtcggcgcagaggccgacctgctcatctggggggtcgtgaccagcacagtgcatcaatttggccgctga

SEQ ID NO: 112019 - protein, 238 aa, Magnetococcus sp. MC-1
MSRPPLSPAQLRLWQTLCAHITTHGLPPTVAELSAQLGIKPPSVHAQLQALARKGWLRHTPHKARSLTPLDEAGQPLLHPKESTPMESRPIMSAPPRVTQRFRPAEQARFTIPLAGSRVAAGFPSPADDFVEAQLDLNQHLVKHPAATFFVRVAGESMIEAGIHPGDILVVDRSLQPESGQIVIAVLDGELTVKRLEKRAGKLFLMPANRNFTPIEVGAEADLLIWGVVTSTVHQFGR

SEQ ID NO: 112020 - DNA, 522 bp, Prosthecochloris aestuarii DSM 271
  CDS (1)..(522): transl_table=11
atgctttgttcaaggaggttgctgcaaccgggatttcaggcgtgcaggtcgccgattttaaaaaaaaatatgaagcttacgagaatacatacagcgccttcgctggatttctatgcatcggatctgacgatggtgcttgaacttcctgtggccggaacaggggttgccgcagggtttccatctcctgcggaagatgacgaggagttgtcgctcgatctgaataaggccctgataaagcatcctgccgcaaccttctatgccagggtgaaaggttcttctatgagggatgccggtattgtcgatggtgatcttctgatcgtcgacaagtcgcttgaggccaaagacggcgatatcgcggtatgctttctcgatggcgagtttactgtcaagaggattgccctgcggcaggacgctctgttccttatgccggcaaatgacgaatttcagcctatccgcattactgaagagagcgattttcttgtttggggtatcgtgacctttattgtgcataaaccgagatag

SEQ ID NO: 112021 - protein, 173 aa, Prosthecochloris aestuarii DSM 271
MLCSRRLLQPGFQACRSPILKKNMKLTRIHTAPSLDFYASDLTMVLELPVAGTGVAAGFPSPAEDDEELSLDLNKALIKHPAATFYARVKGSSMRDAGIVDGDLLIVDKSLEAKDGDIAVCFLDGEFTVKRIALRQDALFLMPANDEFQPIRITEESDFLVWGIVTFIVHKPR

SEQ ID NO: 112022 - DNA, 444 bp, Synechococcus sp. RS9917
  CDS (1)..(444): transl_table=11
atggcggtcgatcgctgctctcttcaggccgcgctgcccctgcgggcccagcgccagcccctgctgctgcctctggcgggcgaacgtgtcgcggcggggttcccctcacccgccgacgactacgtggaggtggggatcgacctcaatgagcagctgatccgccatcccctcagcaccttcttcctgcgggtgagcggtgagtcgatgctcggcgccggcatccacgacggcgacctgctggtggtggaccgcagcctcgaacccagacccggccgggtggtggtggccgtgctcgatggcgccttcacccttaaacgcctggcccgccatcgcggccagctgcgtctggaagcggcccatcccgactatccgccactggagctgcaccgctgcggtgatgtgcagatctggggcgtggcgatccatgtgattcacccgctctga

SEQ ID NO: 112023 - protein, 147 aa, Synechococcus sp. RS9917
MAVDRCSLQAALPLRAQRQPLLLPLAGERVAAGFPSPADDYVEVGIDLNEQLIRHPLSTFFLRVSGESMLGAGIHDGDLLVVDRSLEPRPGRVVVAVLDGAFTLKRLARHRGQLRLEAAHPDYPPLELHRCGDVQIWGVAIHVIHPL

SEQ ID NO: 112024 - DNA, 462 bp, Synechococcus sp. WH 5701
  CDS (1)..(462): transl_table=11
atgaccaccgacccggcgctcaccggagggttcagcgaaccgttcacgcccctgcccctgcgtgagcggcgccgggccctgctgctgcccctggccggcgacagcgtggcggccggcttccccagccccgccgacgactacgtcgaaaccggcatcgacctcaacgaacagctgatccgccatcccagcagcactttcttcctgcgcgtcagcggcgattcgatgatcggcgccggcatccaccacggcgacctgctgatcgtcgaccgcagcgtcgagccccgccacggccgggtggtggtggcggcggtggagggggccttcacgctcaagcgcctggtgcggcaccagggccggctgcggctggaggccgcccatcccgcctatccgcccctggagctgagcgatgccgacgacacccgtctctggggggtcgccatccacgtgatccacccgctctga

SEQ ID NO: 112025 - protein, 153 aa, Synechococcus sp. WH 5701
MTTDPALTGGFSEPFTPLPLRERRRALLLPLAGDSVAAGFPSPADDYVETGIDLNEQLIRHPSSTFFLRVSGDSMIGAGIHHGDLLIVDRSVEPRHGRVVVAAVEGAFTLKRLVRHQGRLRLEAAHPAYPPLELSDADDTRLWGVAIHVIHPL

SEQ ID NO: 112026 - DNA, 444 bp, Synechococcus sp. WH 7805
  CDS (1)..(444): transl_table=11
atggcgttcgatcgctccttcggccagttgccacagcccctgtgttcccagcggcgtccgctccacctgcccctggcctgcgaacgggtggctgcgggctttccctcccccgcggacgattacgtggaggtgggaatcgatctcaacgaccagctgatccgccatcccagcagcacattttttctgagagtgagcggtgattccatgaccggcgccggcattcatgacggcgatctgttggtggtggaccgcagcctcgaccccaggccgggtcgagtggtcgtggcggtgctcgatggcggtttcacactcaagcgactggcacgccatcgcggtcgactacggctggaggccgccaatcccgactatccccccctggaactggaggactgcggcgacatgcagatctggggcgtcgccatccatgtgattcaccccctctaa

SEQ ID NO: 112027 - protein, 147 aa, Synechococcus sp. WH 7805
MAFDRSFGQLPQPLCSQRRPLHLPLACERVAAGFPSPADDYVEVGIDLNDQLIRHPSSTFFLRVSGDSMTGAGIHDGDLLVVDRSLDPRPGRVVVAVLDGGFTLKRLARHRGRLRLEAANPDYPPLELEDCGDMQIWGVAIHVIHPL

SEQ ID NO: 112028 - DNA, 381 bp, Photobacterium sp. SKA34
  CDS (1)..(381): transl_table=11
atgacagcatatccgttttttattgaatcagtggcgtgtggttttccatctccggctgatggacatcaagagagtttagatcttgatgaatttttgatccgccacccgaatgctactttctttttacgtgcatccggtgagtctatgattggtgctggaatttttgatggtgatctgcttgtggttgatcgagctgaaaaagtgattcctgggcgaattgttattgcgcgtatatatgatgagtttacctgtaaacgcttagttcgtattaatgatgcttggtggctaaaagcagaaaatccagccatgaaatcatttcctttacctcaagatgctgaaatttttggtgttgttacccgtaatattcacaatttactttaa

SEQ ID NO: 112029 - protein, 126 aa, Photobacterium sp. SKA34
MTAYPFFIESVACGFPSPADGHQESLDLDEFLIRHPNATFFLRASGESMIGAGIFDGDLLVVDRAEKVIPGRIVIARIYDEFTCKRLVRINDAWWLKAENPAMKSFPLPQDAEIFGVVTRNIHNLL

SEQ ID NO: 112030 - DNA, 426 bp, Oceanospirillum sp. MED92
  CDS (1)..(426): transl_table=11
atgtctgtggttatgctcgggcagagtgggcttcgctctgcatttaagatccccttattcctctcttctgtttcggccggcttccccagcccggcgcaggattatgtggaaaagaccctggatctcaatgagctgctgattcaaaggccggcggcaacctattttgtccgtgccgaaggtgactcaatgatcggcgctggcatccatagtggcgatattctgatagtggaccgttccctgaccgcgaaagagggcgatattgtgattgcggcggttgagggggagctgacagttaaacagctgcagttgaagccggtatgtcgcctgctgccgcgtaataatgcctatcgacctatcaccattgctgaaggctccgatctggagctgttcggtgtggtgactaatgttatccacggcttgcgctag

SEQ ID NO: 112031 - protein, 141 aa, Oceanospirillum sp. MED92
MSVVMLGQSGLRSAFKIPLFLSSVSAGFPSPAQDYVEKTLDLNELLIQRPAATYFVRAEGDSMIGAGIHSGDILIVDRSLTAKEGDIVIAAVEGELTVKQLQLKPVCRLLPRNNAYRPITIAEGSDLELFGVVTNVIHGLR

SEQ ID NO: 112032 - DNA, 603 bp, Oceanospirillum sp. MED92
  CDS (1)..(603): transl_table=11
atgaaactaacaaaacgacaaacggaagttcttgattgcattaaacggcacatcggagaaacgggttacccccctacacgtgctgatatagctcgtgatcttggattcaaatctgccaacgctgcagaagaacaccttaaagcgctcgccaaaaaaggtgccattgaaattatcccagggacatctcgtggtattcgtgtgccagaactggaagaagagactggactgccgattgttggtcaagtggcagcaggatcaccgattctagcccaggaacatgttgaagatcattgcaccatttcctctgacttctttcacccaaaagccgattatcttctgagagtgaagggaacaagcatgaaagacattggcattatggatggcgaccttctggccgttcatcagtgccagcaagcccgcgatggtgaaatcgttgtcgccaggcttgacgatgaagtcactgtaaagcgctttaagcaggaaggtaatatcgtttatctgatcgcagaaaacgaagaattcgagccgattgttgtcgacctgtccgaacaggagatcgcaattgaaggtttaggtgttggagttattcgcagaggtaactaa

SEQ ID NO: 112033 - protein, 200 aa, Oceanospirillum sp. MED92
MKLTKRQTEVLDCIKRHIGETGYPPTRADIARDLGFKSANAAEEHLKALAKKGAIEIIPGTSRGIRVPELEEETGLPIVGQVAAGSPILAQEHVEDHCTISSDFFHPKADYLLRVKGTSMKDIGIMDGDLLAVHQCQQARDGEIVVARLDDEVTVKRFKQEGNIVYLIAENEEFEPIVVDLSEQEIAIEGLGVGVIRRGN

SEQ ID NO: 112034 - DNA, 438 bp, delta proteobacterium MLMS-1
  CDS (1)..(438): transl_table=11
atgaaaatctcacagaccatagcggctgtttacggcttcgatcgccagagtgatctgaaacgcccactgttctcctgcggggtctcggcgggttttccttctccggctgaggactacgtagagggtcagcttgatcttaatcagcttatggtggcccatcctgccgcgaccttctttgtgcgggtggccggggactcaatgatcggggccggtattcaccacgacgacattctggtggtggaccgctcactggagccgacgagcggccgggtggtgatcgcggtgatcaacggcgaactaacggtgaagaggctctttcgccacaacggcacggcccggctgctggccgaaaaccccaactacccgcccatcgaattgactgaagaggccgcctgcgaggtatggggggtcgtcacctttgtcatccactccctgtaa

SEQ ID NO: 112035 - protein, 145 aa, delta proteobacterium MLMS-1
MKISQTIAAVYGFDRQSDLKRPLFSCGVSAGFPSPAEDYVEGQLDLNQLMVAHPAATFFVRVAGDSMIGAGIHHDDILVVDRSLEPTSGRVVIAVINGELTVKRLFRHNGTARLLAENPNYPPIELTEEAACEVWGVVTFVIHSL

SEQ ID NO: 112036 - DNA, 438 bp, delta proteobacterium MLMS-1
  CDS (1)..(438): transl_table=11
atggataccactcccaccatctccgccgtttaccacagcgagcatcagggcgacttgccgtgccccatgttcacctgcggggtttccgccggcttcccgtccccggcggaggattacctggaaggccagctcgatctcaaccagcttatggtggcgcacccggccgccacctttttcgtgcgggtggccggggactcaatgatcaacgccggcattcatcacaacgacatcctggtggtggaccgctccctggagccgacaaacggcagggtggtgatcgcggtgctcaacggcgagctgacggtcaaaaggctggtccaaaaaaacgggacggcgcggctgatggccgagaatcccaattacccgcccatcgaactgaccgaggagaacgcctgccagatatggggcgtggtcacctttgtcatccattccctgtag

SEQ ID NO: 112037 - protein, 145 aa, delta proteobacterium MLMS-1
MDTTPTISAVYHSEHQGDLPCPMFTCGVSAGFPSPAEDYLEGQLDLNQLMVAHPAATFFVRVAGDSMINAGIHHNDILVVDRSLEPTNGRVVIAVLNGELTVKRLVQKNGTARLMAENPNYPPIELTEENACQIWGVVTFVIHSL

SEQ ID NO: 112038 - DNA, 438 bp, delta proteobacterium MLMS-1
  CDS (1)..(438): transl_table=11
atgaaaatctcacagaccatagcggctgtttacggcttcgatcgtcagagtgatctaaaacgcccactgttctcctgcggggtctcggcgggttttccttctccggctgaggactacgtagagggtcagcttgatcttaatcagcttatggtggcccatccggccgcgaccttctttgtgcgggtggtcggggactcaatgatcggggccggtattcaccacgacgacattctggtggtggaccgctcactggagccggtgagcggccgggtggtgatcgcggtgatcaacggcgaacttacggtgaagaggctctttcgccacaacggcacggcccggctgctggccgaaaaccccaactacccgcccatcgaattgactgaagaggccgcctgcgaggtatggggggtcgtcacctttgtcatccactccctgtag

SEQ ID NO: 112039 - protein, 145 aa, delta proteobacterium MLMS-1
MKISQTIAAVYGFDRQSDLKRPLFSCGVSAGFPSPAEDYVEGQLDLNQLMVAHPAATFFVRVVGDSMIGAGIHHDDILVVDRSLEPVSGRVVIAVINGELTVKRLFRHNGTARLLAENPNYPPIELTEEAACEVWGVVTFVIHSL

SEQ ID NO: 112040 - DNA, 384 bp, Synechococcus sp. RS9916
  CDS (1)..(384): transl_table=11
ttggccattcccctggccggggagcgcgtggcggccggtttcccgtcacctgccgacgactacgtggatgtcggcatcgacctcaatgagcaactgatccgccaccccagcagcaccttttttctgcgcgtcagcggtgactccatgatcggtgccggcatccatgacggcgacctgctggtggtcgaccgcagcctcaatccccggcccggacgcatcgtggtggcgatcctcgacggggccttcacgctcaagcggttgatgcgcgatcaacgcgggctgcacctggaagccgccaatcccgcttacccctgtctggatctgcatcactgcaccgatgtgcagatctggggcgtggctgtgcacgtgattcatccactctga

SEQ ID NO: 112041 - protein, 127 aa, Synechococcus sp. RS9916
MAIPLAGERVAAGFPSPADDYVDVGIDLNEQLIRHPSSTFFLRVSGDSMIGAGIHDGDLLVVDRSLNPRPGRIVVAILDGAFTLKRLMRDQRGLHLEAANPAYPCLDLHHCTDVQIWGVAVHVIHPL

SEQ ID NO: 112042 - DNA, 408 bp, Moritella sp. PE36
  CDS (1)..(408): transl_table=11
atgaacatcattccaattttggcgagtgcaggtattactggctttgaaagtccggcggctgaatatagtcagcttggctgtaatttagatgaactactggtcgagcatcccagtgctacttttattggtaaagcctgtggcgattcaatgcaaggggtggggatctttgatggtgatctattgattgtcgacaggcatgtcacgcccacgcatcaggatgtgattgtcgccaatttcaacggtgaattcgtgtgtaagttacttgatattaaaaggcgactgttgctctctgccaatgaaaaaatccagcctgtggtgattaatgattttgatacctttagtatcgaaggcgtggtgatccgctcgattcggtgtcaccgtcccagcccgttattgagtaataaatag

SEQ ID NO: 112043 - protein, 135 aa, Moritella sp. PE36
MNIIPILASAGITGFESPAAEYSQLGCNLDELLVEHPSATFIGKACGDSMQGVGIFDGDLLIVDRHVTPTHQDVIVANFNGEFVCKLLDIKRRLLLSANEKIQPVVINDFDTFSIEGVVIRSIRCHRPSPLLSNK

SEQ ID NO: 112044 - DNA, 441 bp, Escherichia coli
  CDS (1)..(441): transl_table=11
atggcgaccgtgggcttcagtctggtttcaaataccaccggaccggacgcatcggtcaggccgttgtttgccgatcgttgccaggccggttttccttcgcctgccactgattatgctgagcaggaactggatctgaacagctattgcatcagcagacctgcagccaccttctttctgcgcgccagcggtaaatcgatgaaccaggctggcgtgcagaatggtgatctgctggtagtggacagggccgaaaaaccacaacacggggacatcgttatcgctgagatcgacggtgagttcaccgtcaaacgactgctgttgcgcccacgcccggcactggagccggtttcagacagcccggagttccgcacactgtatccggaaaacatctgtatttttggtgttatcactcacgtgatacacaggacgcgggagttacgctga

SEQ ID NO: 112045 - protein, 146 aa, Escherichia coli
MATVGFSLVSNTTGPDASVRPLFADRCQAGFPSPATDYAEQELDLNSYCISRPAATFFLRASGKSMNQAGVQNGDLLVVDRAEKPQHGDIVIAEIDGEFTVKRLLLRPRPALEPVSDSPEFRTLYPENICIFGVITHVIHRTRELR

SEQ ID NO: 112046 - DNA, 429 bp, Acinetobacter baumannii
  CDS (1)..(429): transl_table=11
atgattttaagccctgtttcagttgcctatgaaggccaaaccgttattttatcctcaattgtcgttcctgctggtttcccatcaccggccagtgatgatttagaggatgaaattgaccctattgcttggatcgtaccgcatccgagcgccacattttggtggcgtgtttccggtgatagccttgtcgatgaaggtattcacgatggagatttaattgccgtggatcgttccggtaaagcgcgggtaggccgcattgttttagctgtggttgacggttcaatcacactgaagaaattagccaagcgagacggtcaatattggctcgatcctaaatctaagggcaataattatcagccaatcaggattacagaccaaacagagatttggggcgtaatcgccggatcagtccgccgctattcggtggattga

SEQ ID NO: 112047 - protein, 142 aa, Acinetobacter baumannii
MILSPVSVAYEGQTVILSSIVVPAGFPSPASDDLEDEIDPIAWIVPHPSATFWWRVSGDSLVDEGIHDGDLIAVDRSGKARVGRIVLAVVDGSITLKKLAKRDGQYWLDPKSKGNNYQPIRITDQTEIWGVIAGSVRRYSVD

SEQ ID NO: 112048 - DNA, 432 bp, Pseudomonas aeruginosa
  CDS (1)..(432): transl_table=11
atgcccgttactatcctcggcccagtcgctgggtctggggcttccttgcgcctgtattccagcaaggtgtcggccggcttcccaagtccggcgcaggatcacctggagcgggagatctcgcttgatgagattctgcagattcgagcgcctcacacgtacctggtacgcgccggcggcgacagcatgattcgcgctggcattcatgacggcgacctcatggtggtggatcgatcccgagaagctgagccaggagacatcgtgattgcagcggtgaacggcgagcctaccgtgaaacgcttggcgaaggatgggagccaggtggtgctgcgcgccgagaatcctcggtacgcgcccaggtacatcctggaaggggatgagttgctggtttggggcgtggtgcgctacagcgtgaggtgtcatgagcatggctga

SEQ ID NO: 112049 - protein, 143 aa, Pseudomonas aeruginosa
MPVTILGPVAGSGASLRLYSSKVSAGFPSPAQDHLEREISLDEILQIRAPHTYLVRAGGDSMIRAGIHDGDLMVVDRSREAEPGDIVIAAVNGEPTVKRLAKDGSQVVLRAENPRYAPRYILEGDELLVWGVVRYSVRCHEHG

SEQ ID NO: 112050 - DNA, 432 bp, Klebsiella pneumoniae
  CDS (1)..(432): transl_table=11
atgaaactacaacttttcagcaccgggaaagaactcccgccacaggcccatccattgtttgccgatctggccagctgcggttttcccagccctgctgctgactatgtcgagtccgatctggatctccatgattactgcatacggcatccgagcgcgacgtactacctgcgtgccagcggagacagcatggccgacggcagtctgtacaatggcgatctgctggttgtggacagtgctgaaaagccgcggcacggcgatatcgttgtcgccagcatgcagggggagtttacggtgaaacggcttctgctgacgccgcgactgacgctgcagcccatgaatgcctcctggtcgccgatttatcctgatcccgacgagctggatatctttggcgtcgtcacgcatatcatccaccgcccgagggagatgtactga

SEQ ID NO: 112051 - protein, 143 aa, Klebsiella pneumoniae
MKLQLFSTGKELPPQAHPLFADLASCGFPSPAADYVESDLDLHDYCIRHPSATYYLRASGDSMADGSLYNGDLLVVDSAEKPRHGDIVVASMQGEFTVKRLLLTPRLTLQPMNASWSPIYPDPDELDIFGVVTHIIHRPREMY

SEQ ID NO: 112052 - DNA, 450 bp, Vibrio cholerae
  CDS (1)..(450): transl_table=11
atgagtgtctcgctgataggccgtagcggcgcacttgccttcatcaaagccaagcgccttcgtattccattgttcatggaacgtgtttctgctggttttccctcaccagcgcaggattatgttgagcaaacgctcgacctcaacgagctgtgcatcaagcgaccggctgcaacgttctttgtgcgtgttgaaggtgattcaatgattgatgccgggattcacccagatgatattttggtggttgatcgctctgtccaagccgaacacggtgacattgtcatcgcaggtatccatggtgaactcacggtaaaggagcttcaactaaggccgtgcgtcatgctgatcccaagaaaccaggcgtatgagcccattcatattcctgaagggacagagttagagatatttggtgtggtcaccaatgtggtgcgaaacatgcgccgtaagtcgtga

SEQ ID NO: 112053 - protein, 149 aa, Vibrio cholerae
MSVSLIGRSGALAFIKAKRLRIPLFMERVSAGFPSPAQDYVEQTLDLNELCIKRPAATFFVRVEGDSMIDAGIHPDDILVVDRSVQAEHGDIVIAGIHGELTVKELQLRPCVMLIPRNQAYEPIHIPEGTELEIFGVVTNVVRNMRRKS

SEQ ID NO: 112054 - DNA, 612 bp, Acinetobacter sp
  CDS (1)..(612): transl_table=11
atgtcacaacaaaataaaaatgagcatggtggtgcccgcaccaatgctggacgtaaggccaaataccaagagccaactaaagtcattcgagtgccagaatctcaggttgcttttattaagcgttggcttttagataacgtgaaaaccgacaatcttattgattttaattcggcactgaaagtccaggcgatacagcccaatccaacaaagatctaccagattccgttagcaacagaacgtgttgctgctggtttgccatcacctgcacaggagcatgtcgagcagagtctggatctgaatgaatatttggttcgtaatgaaaatgcgacgtttattgtaaaggccaattcgttatctatgctggatgcaggcattgatattgatgatccattgattgtagatcgaagtattacggccaaagcaggtgatatcgtgattgcgatggttgacaatgagtttacggtaaaacgtctgatgatcgatcatcattttcatccgcctaaagtctggttaaaagcagaaaatcctgattttcagaatatttatatcgatgaaggtcaagaactcgtgatctggggtgtagtaacttacaatctgaaacctatgcgttag

SEQ ID NO: 112055 - protein, 203 aa, Acinetobacter sp
MSQQNKNEHGGARTNAGRKAKYQEPTKVIRVPESQVAFIKRWLLDNVKTDNLIDFNSALKVQAIQPNPTKIYQIPLATERVAAGLPSPAQEHVEQSLDLNEYLVRNENATFIVKANSLSMLDAGIDIDDPLIVDRSITAKAGDIVIAMVDNEFTVKRLMIDHHFHPPKVWLKAENPDFQNIYIDEGQELVIWGVVTYNLKPMR

SEQ ID NO: 112056 - DNA, 441 bp, Bacteroides coprosuis
  CDS (1)..(441): transl_table=11
atgaataaaacaaacctcaaaatacatccatccgtccaaagcctaaaactctctttgccctatgctgatggaggaatcaaggctgggtttcctagtccagcgcaggactatatggaaagtgctatcgacttgaataaggagttgataaagcatcctgcatccactttctatggacgcgtaaaaggtgatagcatgatagatgccaatgtacacgatggtgatatccttgtgattgacaaatcgctagagcctcaaaatggagatatggctgtttgctttattgatggtgagttcactatcaaatacatcagactagaaaaggatgtaatttggctagaaccagccaacgagaattatgagccaataaaagtaacaatcgaaaatgatttcttaatttggggaattgtaacatattgtattcaaaataagaggaggagatga

SEQ ID NO: 112057 - protein, 146 aa, Bacteroides coprosuis
MNKTNLKIHPSVQSLKLSLPYADGGIKAGFPSPAQDYMESAIDLNKELIKHPASTFYGRVKGDSMIDANVHDGDILVIDKSLEPQNGDMAVCFIDGEFTIKYIRLEKDVIWLEPANENYEPIKVTIENDFLIWGIVTYCIQNKRRR

SEQ ID NO: 112058 - DNA, 504 bp, Salmonella typhimurium
  CDS (1)..(504): transl_table=11
atgaagcaggctaacgaatggatcgagtggtatgtgacaacattccgcgatgtatcaacgcaggaaggggagacgtacctttcagctgttcaatccaaacggaggactatagccatgggcttcccttcacctgccagtgattacgttgaaacaaggatctccctcgatcagcagctaatcagccagcccgcagcgacttatttcatgcgggcatcgcgttcacatttcagggaagggataatccagggggcgctacttgttgtggacgcgtcgctttcagcctgtgatggctcgctgctgatatgcgcgatagatggggaattcaggatcaagcgataccgaactcaccctcagccccacctgataaatctggagaacgggagaaaggaagcgctgccagaagatggtgatggctacaattcttcacacgcaatatttggagttatcacgtacatcattaatgatgccaggaacgcggagtttgatgactgcccggtgatgtga

SEQ ID NO: 112059 - protein, 167 aa, Salmonella typhimurium
MKQANEWIEWYVTTFRDVSTQEGETYLSAVQSKRRTIAMGFPSPASDYVETRISLDQQLISQPAATYFMRASRSHFREGIIQGALLVVDASLSACDGSLLICAIDGEFRIKRYRTHPQPHLINLENGRKEALPEDGDGYNSSHAIFGVITYIINDARNAEFDDCPVM

SEQ ID NO: 112060 - DNA, 438 bp, Escherichia coli
  CDS (1)..(438): transl_table=11
atgagtaccgtttatcaccgtccggctgacccttcaggcgatgacagttacgtgcgaccgttgtttgccgatcgttgccaggccggttttccttcgcctgccactgattatgctgagcaggaactggatctgaacagctattgcatcagcagacctgcagccaccttctttctgcgcgccagcggtgaatcgatgaaccaggctggcgtgcagaatggtgatctgctggtagtggacagggccgaaaaaccacaacacggggacatcgttatcgctgagatcgacggtgagttcaccgtcaaacgactgctgttgcgcccacgcccggcactggagccggtttcagacagcccggagttccgcacactgtatccggaaaacatctgtatttttggtgttgtcactcacgtgatacacaggacgcgggagttacgctga

SEQ ID NO: 112061 - protein, 145 aa, Escherichia coli
MSTVYHRPADPSGDDSYVRPLFADRCQAGFPSPATDYAEQELDLNSYCISRPAATFFLRASGESMNQAGVQNGDLLVVDRAEKPQHGDIVIAEIDGEFTVKRLLLRPRPALEPVSDSPEFRTLYPENICIFGVVTHVIHRTRELR

SEQ ID NO: 112062 - DNA, 441 bp, Escherichia coli
  CDS (1)..(441): transl_table=11
atgaaggtcgatatttttgaaagctccggcgccagccgggtacacagcatccctttttatctgcaaagaatttctgcggggttccccagcccggcccagggctatgaaaagcaggagttaaacctgcatgagtattgtgttcgtcacccttcagcaacttacttcctgcgggtttctggctcgtcaatggaagatggccgcatccatgatggtgacgtactggttgtggatcgctcgctgacggccagccacggctcaatcgtagtcgcctgcatccataatgaatttaccgtgaagcgactactgctgaggcccagaccctgcctgatgccgatgaacaaagattttcctgtgtactacattgacccggataatgagagcgttgaaatctggggagtggttacgcattcccttatcgagcatccggtatgtttgcgctga

SEQ ID NO: 112063 - protein, 146 aa, Escherichia coli
MKVDIFESSGASRVHSIPFYLQRISAGFPSPAQGYEKQELNLHEYCVRHPSATYFLRVSGSSMEDGRIHDGDVLVVDRSLTASHGSIVVACIHNEFTVKRLLLRPRPCLMPMNKDFPVYYIDPDNESVEIWGVVTHSLIEHPVCLR

SEQ ID NO: 112064 - DNA, 423 bp, Salmonella typhimurium
  CDS (1)..(423): transl_table=11
atgttactgcttgtagcacccgaacaggagccggtacagtccactgccccgctgttcaccgaacgttgcccggcggggtttccgtcgccggccgccgattacacagaggaggaactggatctgaatgcctactgtatacggcgtccggctgcaacattcttcgtcagggctatcggggattcgatgaaagaaatgggtctgcattccggcgatttaatggttgtcgacaaagctgagaaacccatgcagggggatattgtcatcgcggaaacagatggcgagttcaccgttaagcgcctgcagttgaagccccgtatcgccctgctgccgattaatccggcctaccccacgctttatccggaagaactgcagattttcggggtggtgacggcttttatacacaaaacccggagcacagactga

SEQ ID NO: 112065 - protein, 140 aa, Salmonella typhimurium
MLLLVAPEQEPVQSTAPLFTERCPAGFPSPAADYTEEELDLNAYCIRRPAATFFVRAIGDSMKEMGLHSGDLMVVDKAEKPMQGDIVIAETDGEFTVKRLQLKPRIALLPINPAYPTLYPEELQIFGVVTAFIHKTRSTD

SEQ ID NO: 112066 - DNA, 420 bp, Salmonella typhimurium
  CDS (1)..(420): transl_table=11
atggaatttttcagacctacagagttgcgcgaaattattcctctcccatttttcagttacttagtgccgtgtggattccccagccccgcggcggactacattgagcagcgtatcgatcttaatgagttgctcgtttctcatcccagctcaacatattttgtcaaagcctcgggggattcaatgattgaagcaggcatcagcgacggtgacctgctggtggtggatagctcacggaacgctgaccacggtgacattgtaattgcggcaattgaaggagagttcaccgtaaaacggttgcagttgcgcccgacagtgcagttaatccccatgaacggcgcctatcgacctatacctgtcggcagtgaagacacgctcgacatattcggggtggtgacctttatcattaaagcggtcagttga

SEQ ID NO: 112067 - protein, 139 aa, Salmonella typhimurium
MEFFRPTELREIIPLPFFSYLVPCGFPSPAADYIEQRIDLNELLVSHPSSTYFVKASGDSMIEAGISDGDLLVVDSSRNADHGDIVIAAIEGEFTVKRLQLRPTVQLIPMNGAYRPIPVGSEDTLDIFGVVTFIIKAVS

SEQ ID NO: 112068 - DNA, 24 bp, Artificial sequence
  primer
atgttgtttatcaagcctgcggat

SEQ ID NO: 112069 - DNA, 24 bp, Artificial sequence
  primer
ttagcgcatcgccttaacgacgtg

SEQ ID NO: 112070 - protein, 150 aa, Artificial sequence
  consensus sequence
  Variant (2)..(9): Xaa in position 2 to 9 is any amino acid
  Variant (10)..(32): Xaa in position 10 to 32 is any or no amino acid
  Variant (39)..(46): Xaa in position 39 to 46 is any amino acid
  Variant (47)..(47): Xaa in position 47 is any or no amino acid
  Variant (49)..(57): Xaa in position 49 to 57 is any amino acid
  Variant (58)..(59): Xaa in position 58 to 59 is any or no amino acid
  Variant (61)..(66): Xaa in position 61 to 66 is any amino acid
  Variant (68)..(68): Xaa in position 68 is any amino acid
  Variant (71)..(73): Xaa in position 71 to 73 is any amino acid
  Variant (76)..(77): Xaa in position 76 to 77 is any amino acid
  Variant (80)..(82): Xaa in position 80 to 82 is any amino acid
  Variant (85)..(91): Xaa in position 85 to 91 is any amino acid
  Variant (93)..(94): Xaa in position 93 to 94 is any amino acid
  Variant (96)..(96): Xaa in position 96 is any amino acid
  Variant (98)..(100): Xaa in position 98 to 100 is any amino acid
  Variant (101)..(101): Xaa in position 101 is any or no amino acid
  Variant (103)..(104): Xaa in position 103 to 104 is any amino acid
  Variant (106)..(106): Xaa in position 106 is any amino acid
  Variant (108)..(108): Xaa in position 108 is any amino acid
  Variant (110)..(115): Xaa in position 110 to 115 is any amino acid
  Variant (116)..(121): Xaa in position 116 to 121 is any or no amino acid
  Variant (123)..(125): Xaa in position 123 to 125 is any amino acid
  Variant (127)..(140): Xaa in position 127 to 140 is any amino acid
  Variant (141)..(147): Xaa in position 141 to 147 is any or no amino acid
PXXXXXXXXXXXXXXXXXXXXXXXXXXXXXXXGFPSPAXXXXXXXXXLXXXXXXXXXXXTXXXXXXGXSMXXXGIXXGDXXXVDXXXXXXXGXXVXAXXXXGXXTXKXLXXXXXXXXXXXXLXXXNXXXXXXXXXXXXXXXXXXXXXGVV

SEQ ID NO: 112071 - protein, 40 aa, Artificial sequence
  protein pattern
  Variant (2)..(2): Xaa in position 2 is any amino acid
  Variant (5)..(8): Xaa in position 5 to 8 is any amino acid
  Variant (9)..(9): Xaa in position 9 is Ile, Leu or Val
  Variant (10)..(11): Xaa in position 10 to 11 is any amino acid
  Variant (13)..(13): Xaa in position 13 is Ala, Asp, Gly, Ser or Thr
  Variant (14)..(15): Xaa in position 14 to 15 is any amino acid
  Variant (16)..(16): Xaa in position 16 is Ala, Ile, Leu or Val
  Variant (17)..(17): Xaa in position 17 is Ile or Val
  Variant (18)..(22): Xaa in position 18 to 22 is any amino acid
  Variant (23)..(23): Xaa in position 23 is Ala, Leu, Pro or Val
  Variant (24)..(27): Xaa in position 24 to 27 is any amino acid
  Variant (28)..(28): Xaa in position 28 is Ile, Leu, Met or Val
  Variant (29)..(29): Xaa in position 29 is Ala, Ile or Val
  Variant (30)..(30): Xaa in position 30 is Ile, Leu, Met or Val
  Variant (31)..(31): Xaa in position 31 is Ala, Cys or Val
  Variant (32)..(34): Xaa in position 32 to 34 is any amino acid
  Variant (35)..(35): Xaa in position 35 is Ala, Asp, Gly or Asn
  Variant (36)..(39): Xaa in position 36 to 39 is any amino acid
GXSMXXXXXXXGXXXXXXXXXXXXXXXXXXXXXXXXXXXK

SEQ ID NO: 112072 - DNA, 354 bp, Escherichia coli
  CDS (1)..(354): transl_table=11
atgcaaaaaatcgtgatcgttgccaatggcgcaccttacgggagcgaatccttgtttaacagcttgcggctggccattgcgttacgagagcaggagagcaatctggatctgcgtctgttcctcatgtctgatgcggtcacagccgggttgcgcgggcaaaaaccaggggaaggctacaacattcagcaaatgctggagatccttaccgctcagaatgtaccggtgaaattgtgcaaaacctgtaccgacgggcgcgggattagtacacttcctctgattgatggggtggaaatcggtactcttgtggaactggcgcaatggacgctgtcagccgataaagtgctcacattttaa

SEQ ID NO: 112073 - protein, 117 aa, Escherichia coli
MQKIVIVANGAPYGSESLFNSLRLAIALREQESNLDLRLFLMSDAVTAGLRGQKPGEGYNIQQMLEILTAQNVPVKLCKTCTDGRGISTLPLIDGVEIGTLVELAQWTLSADKVLTF

SEQ ID NO: 112074 - DNA, 357 bp, Thermotoga maritima MSB8
  CDS (1)..(357): transl_table=11
atgaagataggaatacaggtgatggttccaccctatacatatgaagatctggataccgctataaagatcgctgaagccgcaatggaaaaaggtcatgaagtaacactctttctcttcgcggattccgtcatttgtactaacaagaacataaagccaatcaaaatcgacagaaacattccacagaaacttgtagaactgatgcaaaaaggaaacttcgaggttcacatatgtggaatatgtatggactacagagggataaccacagacatgataatagagggttcgaaaccgagcggtcttccagaactcgcaaacctgattgccacctgcgacagattcataaatctgatggcttga

SEQ ID NO: 112075 - protein, 118 aa, Thermotoga maritima MSB8
MKIGIQVMVPPYTYEDLDTAIKIAEAAMEKGHEVTLFLFADSVICTNKNIKPIKIDRNIPQKLVELMQKGNFEVHICGICMDYRGITTDMIIEGSKPSGLPELANLIATCDRFINLMA

SEQ ID NO: 112076 - DNA, 360 bp, Pasteurella multocida subsp. multocida str. Pm70
  CDS (1)..(360): transl_table=11
atgatgaaaaaattcctttttattattagtgctgccccttatggcaatgaaaatttttttagtgccttacgtttagccttacagttacaagagcaacacaaaagtgcggttgagattaaattatttttaatgtccgatgcggtaactggaggtctggcaaaacaaaatccagcagaaggctaccatttacaacaagcgttggaaattctcacagcacaaggtgcacaagtgaagttgtgtaaaacttgtactaatgcgagggggatcacggaactccctttagccgaaggagtagaaattggtaccttatctgagcttgctgattggacctttgcggcggataacgtcttaaacttttaa

SEQ ID NO: 112077 - protein, 119 aa, Pasteurella multocida subsp. multocida str. Pm70
MMKKFLFIISAAPYGNENFFSALRLALQLQEQHKSAVEIKLFLMSDAVTGGLAKQNPAEGYHLQQALEILTAQGAQVKLCKTCTNARGITELPLAEGVEIGTLSELADWTFAADNVLNF

SEQ ID NO: 112078 - DNA, 360 bp, Shewanella oneidensis MR-1
  CDS (1)..(360): transl_table=11
atgcaaaaaattcttattgttgcccatgccagtccttacggtacagagaaactgtttaacagcctacgtattgccttagcactcaaggatcaaactgaccaagctgttgatctaaaaatatttttaatgtctgatgccgtatttggtgcgcttaaacatcaaacaactcctgatttaagctataacttgcaacaaatgtttgagatcctaagtgcccaacaagtccctgttttactatgcaaaacctgcgctcaagcaaggggcgtcagtaccgcaatgcttattgaaggcactcaaattggtactttgcaggatcttacccgctggacacttgatgccgataaggtgatgcatatttaa

SEQ ID NO: 112079 - protein, 119 aa, Shewanella oneidensis MR-1
MQKILIVAHASPYGTEKLFNSLRIALALKDQTDQAVDLKIFLMSDAVFGALKHQTTPDLSYNLQQMFEILSAQQVPVLLCKTCAQARGVSTAMLIEGTQIGTLQDLTRWTLDADKVMHI

SEQ ID NO: 112080 - DNA, 345 bp, Methanococcus maripaludis S2
  CDS (1)..(345): transl_table=11
ttgaaatttacagttataataggagatgcaccttacggaaaagaaagagcttactctgctttaagatttgcactaactgcccttttagaggggattgacgttaatatatttttactcgaagatggggtttatgttggtaaaaaagaccagaacccagcaggagttcctaaatattcagaacttttagaaaacgcaattgaagcaggagcagtagtaaaagcatgcggtccatgcggaaaagcaagaggaatttctgaagaagaacttcttgacggaattgcttttggaacaatgcacgatttaatagctttcgtaaaagaagcagataaaacaattaacttttaa

SEQ ID NO: 112081 - protein, 114 aa, Methanococcus maripaludis S2
MKFTVIIGDAPYGKERAYSALRFALTALLEGIDVNIFLLEDGVYVGKKDQNPAGVPKYSELLENAIEAGAVVKACGPCGKARGISEEELLDGIAFGTMHDLIAFVKEADKTINF

SEQ ID NO: 112082 - DNA, 354 bp, Yersinia pseudotuberculosis IP 32953
  CDS (1)..(354): transl_table=11
atgcattcgctggtcattattgctaatggtgccgcttatggccatgagtcattatttaatgccttacgcctatcgattgcgttgaaagagcaacaaactgatttggatctacgcctgttcctaatgtctgatgcggtaatcgccggtctcaacggccagcaacctcgtgaagggtataatttgcaacagatgctggaaatcctcaccgcacaaaatgtccccataaaactctgtaaaacttgcgcagatgcgcgtggtattgcgggtctgacacttgttgatggggtggagattgggacgctagtggagttagctcaatggactctggccgcggaaaaagtcctgacgttctga

SEQ ID NO: 112083 - protein, 117 aa, Yersinia pseudotuberculosis IP 32953
MHSLVIIANGAAYGHESLFNALRLSIALKEQQTDLDLRLFLMSDAVIAGLNGQQPREGYNLQQMLEILTAQNVPIKLCKTCADARGIAGLTLVDGVEIGTLVELAQWTLAAEKVLTF

SEQ ID NO: 112084 - DNA, 357 bp, Mannheimia succiniciproducens MBEL55E
  CDS (1)..(357): transl_table=11
atgcaaaaattactttttattttaaacgaatcgccttatggaacggaaaaaacctttaacgggctgcgtcatgcggtgaacttattagaggaacacggcaaagaagtcgaagtgaaagtattctgtttttcagatgccgtacttgccgggttgagcggtcaaaatccgaatgacggtccgaatgttcagcaaaccttagaagtgctggcgggcttaggtgcggaggtgaaactttgtacaagttgtacgaaagcgcgcggcattacgcaattaccgttagttaaaggcgttagcttaggcacgttggatgatgtgtcggactggaccttatgggcggataaagttatcaatttctaa

SEQ ID NO: 112085 - protein, 118 aa, Mannheimia succiniciproducens MBEL55E
MQKLLFILNESPYGTEKTFNGLRHAVNLLEEHGKEVEVKVFCFSDAVLAGLSGQNPNDGPNVQQTLEVLAGLGAEVKLCTSCTKARGITQLPLVKGVSLGTLDDVSDWTLWADKVINF

SEQ ID NO: 112086 - DNA, 354 bp, Dechloromonas aromatica RCB
  CDS (1)..(354): transl_table=11
gtgcaatccatcctgatcatcatccatgcccctccctacggcagcgaacgttgcctgtccgcactgcgtctggcaaccgcgctggctggtcgggacgacaagccagaactgagcattttcctgatgtccgatgccactgtcgtcggcctgcccaatcaggtggacggtgcgggcaatggtctgcagggtatggtcgaacaactggttgccgccggcgtcacgatcaagctctgccggacctgtgcgctggcccgtggtctgggcgagttgccgctgatccccggcaccagtatcggcaccctgatcgaactggcggaatacacggtgcgggcagacaaggtcatcaccttctga

SEQ ID NO: 112087 - protein, 117 aa, Dechloromonas aromatica RCB
MQSILIIIHAPPYGSERCLSALRLATALAGRDDKPELSIFLMSDATVVGLPNQVDGAGNGLQGMVEQLVAAGVTIKLCRTCALARGLGELPLIPGTSIGTLIELAEYTVRADKVITF

SEQ ID NO: 112088 - DNA, 354 bp, Moorella thermoacetica ATCC 39073
  CDS (1)..(354): transl_table=11
atggcacagctttgcctggtagtccagaccggcccctatacctaccagaatttagatacggcctatggcctggcccgggcggccctggccaaagggcatggcgtcagcctttttttgtacatcgacggggtagtggccgccaataaaaatatcgacgcccccggtgagcgcaatattgccgctatgctccaggaactggccgccgccggtgtccgcatcgcttcctgcggtgcctgttccaagttccggggcattaccgacgagatgtacatcgacggggcggaaatgggtagcctggttgatatggctgatatgatccaggaggccgatgtcttgattaactttggattttaa

SEQ ID NO: 112089 - protein, 117 aa, Moorella thermoacetica ATCC 39073
MAQLCLVVQTGPYTYQNLDTAYGLARAALAKGHGVSLFLYIDGVVAANKNIDAPGERNIAAMLQELAAAGVRIASCGACSKFRGITDEMYIDGAEMGSLVDMADMIQEADVLINFGF

SEQ ID NO: 112090 - DNA, 360 bp, Shewanella sp. MR-4
  CDS (1)..(360): transl_table=11
atgcaaaacattctgatcgttgcccacgccagcccctatggcacagaaaaactcttcaatagcctacgtatcgctttggcgctgaaggatcaaacagagcaacaggttgatttaaaaatctttttaatgtcggatgcggtatttggcgcccttaaacatcaaacgactccagacctcagttacaacctacaacagatgtttgagatcctaagcgctcagcaagtccccattttactctgtaaaacctgcgcccaagcgcggggcgttaaccccgaaatgctgctcgaaggcgcacaaataggcactctgcaggatctgacccgctggacgctggccgccgataaggtgatgcatatttaa

SEQ ID NO: 112091 - protein, 119 aa, Shewanella sp. MR-4
MQNILIVAHASPYGTEKLFNSLRIALALKDQTEQQVDLKIFLMSDAVFGALKHQTTPDLSYNLQQMFEILSAQQVPILLCKTCAQARGVNPEMLLEGAQIGTLQDLTRWTLAADKVMHI

SEQ ID NO: 112092 - DNA, 357 bp, Alkalilimnicola ehrlichei MLHE-1
  CDS (1)..(357): transl_table=11
atgcactacctcatcctgatcaacgatcccccttatggcactgagcgcgtcttcaacggcctgcgtctggcccacgcgctgctcaaaaaggccgacgacaaccgggtcgacgtcttcctgatggccgatgccgtggtgggtgccaacgccggccagaagacaccggacggcttctacaatgtcgagcgtatgctgcgtcgggtgcttgccggcgatcgcggccgtgtcctgctgtgcggcacctgcatggatgcccgcggcatgtccgacgacgacaccatggacgggccacgccgcagcaccatggacgaattggcgcagatcaccgctgacgcggacaaggtcattgttttctga

SEQ ID NO: 112093 - protein, 118 aa, Alkalilimnicola ehrlichei MLHE-1
MHYLILINDPPYGTERVFNGLRLAHALLKKADDNRVDVFLMADAVVGANAGQKTPDGFYNVERMLRRVLAGDRGRVLLCGTCMDARGMSDDDTMDGPRRSTMDELAQITADADKVIVF

SEQ ID NO: 112094 - DNA, 357 bp, Magnetococcus sp. MC-1
  CDS (1)..(357): transl_table=11
atgaccatcctaatcctcttcaatcaagagccttataatggatccgacctcacctggaatggcttacgtttggccgccagcctgctggatgcagagcaagaggtacgcatttttatcatgaatgacgctgtggatatggctcgggatgcctgcaaacctgccgaaggttacgatcaggacgttgtcgctctactcaaaaagttgattgccagaggcgtagcggttaaagtgtgcgggacctgtatgacgcgctgtggcattcacaaaaatcaaccctattttgatggcgcggagcagtcaactatggcggctctggcccagtgggttgtcagcagcgaccgggtcatcaccttctaa

SEQ ID NO: 112095 - protein, 118 aa, Magnetococcus sp. MC-1
MTILILFNQEPYNGSDLTWNGLRLAASLLDAEQEVRIFIMNDAVDMARDACKPAEGYDQDVVALLKKLIARGVAVKVCGTCMTRCGIHKNQPYFDGAEQSTMAALAQWVVSSDRVITF

SEQ ID NO: 112096 - DNA, 351 bp, Actinobacillus pleuropneumoniae serovar 1 str. 4074
  CDS (1)..(351): transl_table=11
atgcaaaaacttctctttatttttaattcggcgccgtacggcaacgaatctttctttagcggtttacgtttagcattacagattcaagaacagcataaagcgcaacttaaactgttcttaatgtccgattccgttactgcggcattaagaaagcataatccgtcggaaggatataatttacagcaaatgttggaaattctgaccgcacaaggggcaacgattaaactttgcaaaacttgtatcaatgcacgaggtatgagcgcgttaccgcttgcggacggtgtggaaatcggtacgttaatcgagcttgccgattggacgatggaagcggataaggtcttaaacttctaa

SEQ ID NO: 112097 - protein, 116 aa, Actinobacillus pleuropneumoniae serovar 1 str. 4074
MQKLLFIFNSAPYGNESFFSGLRLALQIQEQHKAQLKLFLMSDSVTAALRKHNPSEGYNLQQMLEILTAQGATIKLCKTCINARGMSALPLADGVEIGTLIELADWTMEADKVLNF

SEQ ID NO: 112098 - DNA, 357 bp, Photobacterium sp. SKA34
  CDS (1)..(357): transl_table=11
atgcaaactattttaatcgttatcaatgacgctccttatggctctgagcgtccttttaatgctttacgcttagcaattaaacttaatgagcaggaagaacaacctgtgagtctcaaattgtttttaatgtccgatgctgtgatgtgtgcaatgaagcagcaaaatccggtagaaggttatgatattcaacaaatgcttgaaattcttattgcacaagggagcgaggtgaaattgtgtaaaacctgttgttgtgcgcgcggattgtcagagtcattactcattgaagactgtgaaataggaacgttagacgatttggcaagttggacgctaaatgcagaaaaagtattaacgttttaa

SEQ ID NO: 112099 - protein, 118 aa, Photobacterium sp. SKA34
MQTILIVINDAPYGSERPFNALRLAIKLNEQEEQPVSLKLFLMSDAVMCAMKQQNPVEGYDIQQMLEILIAQGSEVKLCKTCCCARGLSESLLIEDCEIGTLDDLASWTLNAEKVLTF

SEQ ID NO: 112100 - DNA, 369 bp, Pasteurella haemolytica
  CDS (1)..(369): transl_table=11
atgtctaattcagttcaaaaacttctttttatcatcaattctgctccttacggcaatgaaacgtttttcagtgcgttgcgtttggcattacaaattcaagaacaacataaagccaatacggaaattaaacttttcttaatgtcggatgcagtcaccgcagggctggcaaagcaaaatccggcagagggttatcatattcagcaaatgctggaaattttaaccgcccaaggggcaaacgtaaaattatgcaaaacctgtactaatgctcgagggattacagatttgcctttagccgatggggtagagattggcacattaattgaactggcagattggacaattcaagcagataaggtactgaatttttaa

SEQ ID NO: 112101 - protein, 122 aa, Pasteurella haemolytica
MSNSVQKLLFIINSAPYGNETFFSALRLALQIQEQHKANTEIKLFLMSDAVTAGLAKQNPAEGYHIQQMLEILTAQGANVKLCKTCTNARGITDLPLADGVEIGTLIELADWTIQADKVLNF

SEQ ID NO: 112102 - DNA, 354 bp, Klebsiella pneumoniae
  CDS (1)..(354): transl_table=11
atgcaacgtattgtgattatcgcgaacggtgccgcctacggcagcgaatccctgtttaatagcctgcgtctggcgatcgccctgtgcgagcagcagtcggacctcgaactgaagctgtttttaatgtccgatgcggtgaccgccggcctgcgcggccagaagcctgcggaaggctacaacattcagcagatgctggagatcctcaccgcgcaaaacgtgccggtgaggctgtgtaaaacctgcgccgatggccgggggatcggcgcgctgccgctgattgacggcgtggagattggtaccctcgtcgagctggcgcagtggacgctggcggcggataaagttctgaccttctaa

SEQ ID NO: 112103 - protein, 117 aa, Klebsiella pneumoniae
MQRIVIIANGAAYGSESLFNSLRLAIALCEQQSDLELKLFLMSDAVTAGLRGQKPAEGYNIQQMLEILTAQNVPVRLCKTCADGRGIGALPLIDGVEIGTLVELAQWTLAADKVLTF

SEQ ID NO: 112104 - DNA, 366 bp, Methanopyrus kandleri
  CDS (1)..(366): transl_table=11
atggggacacccgaggggatagacgtgattacagtggtaatctccgaggctccatacggtcaagaacgtgcatacactgcgctgagattcgctctcactgcccttgtcgagggggaagaagtcaagatattcctaatcgaagacggggtgttcttagggaagaaaggccaaaatcctgacgaggttcccaactacttggagctcctggaacagtgcatcgagcagggcgctgaagtgaaggcctgcggaccctgctccaaagcccgcgggctgagcgaggaagacttcatcgagggcgtcgagctggccaccatgcacgacttggtgaattgggtgaaggagtccgataacgtcatcttcttctga

SEQ ID NO: 112105 - protein, 121 aa, Methanopyrus kandleri
MGTPEGIDVITVVISEAPYGQERAYTALRFALTALVEGEEVKIFLIEDGVFLGKKGQNPDEVPNYLELLEQCIEQGAEVKACGPCSKARGLSEEDFIEGVELATMHDLVNWVKESDNVIFF

SEQ ID NO: 112106 - DNA, 24 bp, Artificial sequence
  primer
atgcaaaaaatcgtgatcgttgcc

SEQ ID NO: 112107 - DNA, 25 bp, Artificial sequence
  primer
ttaaaatgtgagcactttatcggct

SEQ ID NO: 112108 - protein, 112 aa, Artificial sequence
  consensus sequence
  Variant (3)..(3): Xaa in position 3 is any amino acid
  Variant (5)..(5): Xaa in position 5 is any amino acid
  Variant (7)..(11): Xaa in position 7 to 11 is any amino acid
  Variant (14)..(14): Xaa in position 14 is any amino acid
  Variant (16)..(27): Xaa in position 16 to 27 is any amino acid
  Variant (28)..(30): Xaa in position 28 to 30 is any or no amino acid
  Variant (33)..(34): Xaa in position 33 to 34 is any amino acid
  Variant (36)..(36): Xaa in position 36 is any amino acid
  Variant (38)..(45): Xaa in position 38 to 45 is any amino acid
  Variant (46)..(46): Xaa in position 46 is any or no amino acid
  Variant (48)..(55): Xaa in position 48 to 55 is any amino acid
  Variant (56)..(57): Xaa in position 56 to 57 is any or no amino acid
  Variant (59)..(60): Xaa in position 59 to 60 is any amino acid
  Variant (62)..(70): Xaa in position 62 to 70 is any amino acid
  Variant (71)..(71): Xaa in position 71 is any or no amino acid
  Variant (73)..(74): Xaa in position 73 to 74 is any amino acid
  Variant (76)..(78): Xaa in position 76 to 78 is any amino acid
  Variant (81)..(88): Xaa in position 81 to 88 is any amino acid
  Variant (89)..(89): Xaa in position 89 is any or no amino acid
  Variant (91)..(94): Xaa in position 91 to 94 is any amino acid
  Variant (96)..(98): Xaa in position 96 to 98 is any amino acid
  Variant (100)..(105): Xaa in position 100 to 105 is any amino acid
  Variant (108)..(108): Xaa in position 108 is any amino acid
  Variant (110)..(111): Xaa in position 110 to 111 is any amino acid
PYXGXEXXXXXLRXAXXXXXXXXXXXXXXXFLXXDXVXXXXXXXXXPXXXXXXXXXXLXXLXXXXXXXXXXCXXCXXXRGXXXXXXXXXGXXXXTXXXLXXXXXXADXVXXF

SEQ ID NO: 112109 - protein, 23 aa, Artificial sequence
  protein pattern
  Variant (2)..(5): Xaa in position 2 to 5 is any or no amino acid
  Variant (7)..(7): Xaa in position 7 is Leu or Met
  Variant (8)..(8): Xaa in position 8 is any amino acid
  Variant (9)..(9): Xaa in position 9 is Ala, Asp or Glu
  Variant (11)..(13): Xaa in position 11 to 13 is any amino acid
  Variant (14)..(14): Xaa in position 14 is Thr or Val
  Variant (15)..(16): Xaa in position 15 to 16 is any amino acid
  Variant (17)..(17): Xaa in position 17 is Ala or Ser
  Variant (18)..(18): Xaa in position 18 is Asp or Glu
  Variant (19)..(19): Xaa in position 19 is any amino acid
  Variant (20)..(20): Xaa in position 20 is Thr or Val
  Variant (21)..(21): Xaa in position 21 is Ile, Leu or Met
  Variant (22)..(22): Xaa in position 22 is any amino acid
  Variant (23)..(23): Xaa in position 23 is Phe or Ile
GXXXXTXXXLXXXXXXXXXXXXX

SEQ ID NO: 112110 - protein, 13 aa, Artificial sequence
  protein pattern
  Variant (3)..(3): Xaa in position 3 is any amino acid
  Variant (5)..(7): Xaa in position 5 to 7 is any amino acid
  Variant (8)..(8): Xaa in position 8 is Asn, Ser or Thr
  Variant (9)..(9): Xaa in position 9 is Ala, Gly or Ser
  Variant (12)..(12): Xaa in position 12 is any amino acid
  Variant (13)..(13): Xaa in position 13 is Ala or Ser
YGXEXXXXXLRXX

SEQ ID NO: 112111 - DNA, 945 bp, Escherichia coli
  CDS (1)..(945): transl_table=11
atggctacgattgcattccaggggaatcttgcgggaataatgagaaagataaaaatagggctggcgctgggatctggcgcggcgagaggttggtcgcatattggcgttattaatgcgctaaaaaaagtgggtattgaaattgatatcgttgcaggatgttcaattggttcgctggtgggcgctgcctatgcatgcgatcgattatctgcgctggaagattgggtgacctctttcagttattgggatgttttacgcctgatggatctctcctggcagcgcggtgggttactgcgcggcgagcgtgtcttcaatcaataccgcgaaataatgccggaaacagagatcgaaaattgttcccgtcgctttgcggctgttgccaccaatttaagtacgggacgtgaattatggtttactgaaggcgatctccatcttgctattcgcgcatcatgcagtattccaggactcatggcacctgttgcacataacggctactggctggttgatggagcagtcgttaacccaattcctatttccctcacgcgtgcattgggggctgatattgtgatagcggttgacctgcagcacgatgctcatttgatgcaacaagatttgctctcctttaatgtcagtgaagaaaatagcgagaatggtgattctctgccgtggcatgcgcgtctgaaagaaaggttaggcagcataacgacacgtcgggcggtgacagcgccaacggcaacagagattatgaccacttctatccaggtgctggagaaccgccttaaaaggaaccgcatggcaggtgatccgcccgatattctgattcaacctgtttgcccgcaaatatctacgcttgatttccatcgcgcgcacgctgccattgcggccggacagctggcagtggaaaggaaaatggacgaacttttgccgttggtacgcaccaacatttaa

SEQ ID NO: 112112 - protein, 314 aa, Escherichia coli
MATIAFQGNLAGIMRKIKIGLALGSGAARGWSHIGVINALKKVGIEIDIVAGCSIGSLVGAAYACDRLSALEDWVTSFSYWDVLRLMDLSWQRGGLLRGERVFNQYREIMPETEIENCSRRFAAVATNLSTGRELWFTEGDLHLAIRASCSIPGLMAPVAHNGYWLVDGAVVNPIPISLTRALGADIVIAVDLQHDAHLMQQDLLSFNVSEENSENGDSLPWHARLKERLGSITTRRAVTAPTATEIMTTSIQVLENRLKRNRMAGDPPDILIQPVCPQISTLDFHRAHAAIAAGQLAVERKMDELLPLVRTNI

SEQ ID NO: 112113 - DNA, 975 bp, Mesorhizobium loti MAFF303099
  CDS (1)..(975): transl_table=11
atgatgctcgagtgggcgtcattgcggaacagaccagatgtcagggaggccaacggcctgacctcttccggcggcacgtccgaaacgaaatctcccaagaagacaggcatttcgctcgctttgggcggcggttgcgccaggggctgggctcatatcggcgtgcttcgcgcgctcgacgaggccggcatcgaagtttcgatgatcgccggcacctcgatcggcgcgctggtcggcggctgttatctcgccggcaaactggatgagctggaagagttcgcccgcagcctcaccaagcggcgcatttttggcctgctcgatctcaatctgcgcggcagcggcctgttcggcggcatgaaactcgatgcccgtctgcgcgagcatgtggcgggcgtccgtttcgaggacctgccaaaacccttcgtcagcgtcgcatcggaaatccgcaccggccacgagatctggctgtcgaacggctcgctgatcacagccatgcgcgcgtcctacgcattgcctggcgtgttcgagccggtgaactgcaacggccgcatgctggtcgacggcgcgctggtcaatccggttccggtgtccgtctgccgcgcctacgagcagccgctcgtcgtggcggtcaaccttcattacgacctgttcggccgcgcggccgtgatcaaacacagcgccggcgaactggttgtcgaaaaggatgcgccgcgccccggccatgttggcgccgagtaccagtcacatcagacacgcctcggcatcaccggcgtcatggtcgaggccttcaacatcatccaggaccgcatctcgcgcgccaggcttgccggcgatccgcccgacatgtcgctgcagcccaaactcagccatatcggcctcaccgagttccatcgcgccgacgaggcgatccagatcggttaccaggcaacgacggcgcagatcggcgaactgacccggctgcagaccgttctcgcctga

SEQ ID NO: 112114 - protein, 324 aa, Mesorhizobium loti MAFF303099
MMLEWASLRNRPDVREANGLTSSGGTSETKSPKKTGISLALGGGCARGWAHIGVLRALDEAGIEVSMIAGTSIGALVGGCYLAGKLDELEEFARSLTKRRIFGLLDLNLRGSGLFGGMKLDARLREHVAGVRFEDLPKPFVSVASEIRTGHEIWLSNGSLITAMRASYALPGVFEPVNCNGRMLVDGALVNPVPVSVCRAYEQPLVVAVNLHYDLFGRAAVIKHSAGELVVEKDAPRPGHVGAEYQSHQTRLGITGVMVEAFNIIQDRISRARLAGDPPDMSLQPKLSHIGLTEFHRADEAIQIGYQATTAQIGELTRLQTVLA

SEQ ID NO: 112115 - DNA, 948 bp, Agrobacterium tumefaciens str. C58
  CDS (1)..(948): transl_table=11
gtgcgacaaatgttgggatggggaaatcgtcacaatcagcttgcggctagaaatcccgaaaccaccggcaatgagccgcccgtcacccagatcgttgacaagcaccgcatcgcgcttgcgcttggcggcggggcggcccgcggctgggcccatatcggcgtgcttcgggcgctggatgaagcaggcgtgaagatcggcatgatcgccggcacctcgatcggcgcactggtcggcggttgttatctcgccggcaagctcgacgagctggaggaattcgcacgatcgctgacgatgcgccgcattgccggcctgctcgacctgacgatcggcggcggcggcctcttcggcggcatgcggctgaccaagcgcatgcaggagcatctggaaggcctgcgcgtcgaaaacctcgagcaccccttcatcgctgtcgccacggaactgcgaaccggccacgaggtctggatccatcaaggtgatctcgtcaccgcgctgcgctcctcctacgcgctgcccggcatcttcgagcccgtgcaatgcaatggccgcaccctgatcgacggcgcgctcgtcaatcccgtgcccgtttccgtctgccgggcctatgagcaggcgctggtcgttgcggtaaacctcaattacgatcttttcggccgttccgccgtggtcaagcacgcggcctcaccacagggcggcggcacaccgcccgcggaaacggcgccgcgtcccggcctgccgggcgtcatggtgcaggccttcaacatcattcaggacagaatttcgcgctcgcgcctggcgggcgatccgcccgacctcatgctgcatccgcgcatcaacgatatcggcctgtcggaattccatcgcgccagcgaagccatcgaccgcggatatcaggaaacgcgcgcgcgtattcccgaactcgagcgcatgcagcaggcattccggcgctga

SEQ ID NO: 112116 - protein, 315 aa, Agrobacterium tumefaciens str. C58
MRQMLGWGNRHNQLAARNPETTGNEPPVTQIVDKHRIALALGGGAARGWAHIGVLRALDEAGVKIGMIAGTSIGALVGGCYLAGKLDELEEFARSLTMRRIAGLLDLTIGGGGLFGGMRLTKRMQEHLEGLRVENLEHPFIAVATELRTGHEVWIHQGDLVTALRSSYALPGIFEPVQCNGRTLIDGALVNPVPVSVCRAYEQALVVAVNLNYDLFGRSAVVKHAASPQGGGTPPAETAPRPGLPGVMVQAFNIIQDRISRSRLAGDPPDLMLHPRINDIGLSEFHRASEAIDRGYQETRARIPELERMQQAFRR

SEQ ID NO: 112117 - DNA, 966 bp, Sinorhizobium meliloti 1021
  CDS (1)..(966): transl_table=11
atgctgaactggacattcacgcgtaacagtcagattgccgatctttccggcgcgaacgggtcgtcgatcacgaccactcctccagcactacccatttctcaatccgtgaaacccaggattgcgctggcgctcggcggcggtgctgcgcggggctgggcccatatcggtgtcctgaaagccctcgacgaggagggtatcgaagtcggaatgattgcgggcacatcgatcggtgcgctggtgggcggctgttacctcgccggcaagctcgatgaattggaggctttcgcccgctcgcttaccgtgcgccgcattgccggcttgctcgatttcgcgatcggcggcggtggcctcttcggcggtctgcggctcaccaagcggatgcaggaacatctgcagaacctcagtatcgaggatctcgaccggcccttcgtggccgtcgccacggaggtctacagcggtcacgaggtatggatcgagaaaggatcccttattaccgccattcgcgcatcttacgccttgcctggcattttcgagcccgtcaacgccaatggccggactctcatcgacggcgcgctggtcaaccccgttcccgtttcggtctgccgcgcacatgagcagttgcacgtcgtcgccgtcaacctgaactacgatgtctacgggcgctcggcggtggtcaagcacagcgccggcatggaaacgcccgatgcgccggcaacggaggcaaaccgcttttcagcacggctcggcatgaccagcgtcatggtccaggccttcaacatcattcaggaccgcatttcgcgcgcccggctggctggcgatccgccggatctgtctctccacccgaagctgaacgatatcggactttcggaattccaccgcgcgggcgaagcaatcgagcgcggctatcaggaagccaagatcaagctttcggaaatccggcgcatgcaggaaccgctgtcccgttga

SEQ ID NO: 112118 - protein, 321 aa, Sinorhizobium meliloti 1021
MLNWTFTRNSQIADLSGANGSSITTTPPALPISQSVKPRIALALGGGAARGWAHIGVLKALDEEGIEVGMIAGTSIGALVGGCYLAGKLDELEAFARSLTVRRIAGLLDFAIGGGGLFGGLRLTKRMQEHLQNLSIEDLDRPFVAVATEVYSGHEVWIEKGSLITAIRASYALPGIFEPVNANGRTLIDGALVNPVPVSVCRAHEQLHVVAVNLNYDVYGRSAVVKHSAGMETPDAPATEANRFSARLGMTSVMVQAFNIIQDRISRARLAGDPPDLSLHPKLNDIGLSEFHRAGEAIERGYQEAKIKLSEIRRMQEPLSR

SEQ ID NO: 112119 - DNA, 939 bp, Agrobacterium tumefaciens str. C58
  CDS (1)..(939): transl_table=11
atgttgggatggggaaatcgtcacaatcagcttgcggctagaaatcccgaaaccaccggcaatgagccgcccgtcacccagatcgttgacaagcaccgcatcgcgcttgcgcttggcggcggggcggcccgcggctgggcccatatcggcgtgcttcgggcgctggatgaagcaggcgtgaagatcggcatgatcgccggcacctcgatcggcgcactggtcggcggttgttatctcgccggcaagctcgacgagctggaggaattcgcacgatcgctgacgatgcgccgcattgccggcctgctcgacctgacgatcggcggcggcggcctcttcggcggcatgcggctgaccaagcgcatgcaggagcatctggaaggcctgcgcgtcgaaaacctcgagcaccccttcatcgctgtcgccacggaactgcgaaccggccacgaggtctggatccatcaaggtgatctcgtcaccgcgctgcgctcctcctacgcgctgcccggcatcttcgagcccgtgcaatgcaatggccgcaccctgatcgacggcgcgctcgtcaatcccgtgcccgtttccgtctgccgggcctatgagcaggcgctggtcgttgcggtaaacctcaattacgatcttttcggccgttccgccgtggtcaagcacgcggcctcaccacagggcggcggcacaccgcccgcggaaacggcgccgcgtcccggcctgccgggcgtcatggtgcaggccttcaacatcattcaggacagaatttcgcgctcgcgcctggcgggcgatccgcccgacctcatgctgcatccgcgcatcaacgatatcggcctgtcggaattccatcgcgccagcgaagccatcgaccgcggatatcaggaaacgcgcgcgcgtattcccgaactcgagcgcatgcagcaggcattccggcgctga

SEQ ID NO: 112120 - protein, 312 aa, Agrobacterium tumefaciens str. C58
MLGWGNRHNQLAARNPETTGNEPPVTQIVDKHRIALALGGGAARGWAHIGVLRALDEAGVKIGMIAGTSIGALVGGCYLAGKLDELEEFARSLTMRRIAGLLDLTIGGGGLFGGMRLTKRMQEHLEGLRVENLEHPFIAVATELRTGHEVWIHQGDLVTALRSSYALPGIFEPVQCNGRTLIDGALVNPVPVSVCRAYEQALVVAVNLNYDLFGRSAVVKHAASPQGGGTPPAETAPRPGLPGVMVQAFNIIQDRISRSRLAGDPPDLMLHPRINDIGLSEFHRASEAIDRGYQETRARIPELERMQQAFRR

SEQ ID NO: 112121 - DNA, 948 bp, Shewanella oneidensis MR-1
  CDS (1)..(948): transl_table=11
atgggcaaggggactaatccgacaatcggcatcgcattaggcagtggcgctgcaaaaggttgggcgcatattggtgtgctaaacggacttgcggcgatgggaattaaacctgataaggtggcaggttgctctgtcggtgctttggtgggcgctgcttatgctcataatcatttagccgagcttgaagagtgggtgcgcagtttctccagttgggatgtattggggctgatggatattcgttggcgtaaaggtggactgattggcggtgaaaaagtgttcgatgtactgcagtcgcgcattggtgatgtcaatattgaggatttagaatatccctttgctgcaattgccactgatctttattccggacaggaaatctggttccgtcatggtgacttacgccaagctgttcgggcttcttgctctatgccaggaatattagcgccagttcgccaaggtgaacgttggttagttgatggcgcagtggttaaccctgttcccgtttcagtgagccgagcaatgggtgttgatattgtgattgctgttgatttgcatggttttcactctggtcgattacaggttttacctgtcaatatgaccagccaccgggcaacaaaagaagacacggagatgcccgcgcgccaagaaaccggctttatggatttattcgcccgagggcgggaatatgtcagtaacttaaccgacaagttttccctcgggaccaaatctaacccaggcatgattgcggtaatgtcacagtcgatggggattttagaacagcggcataaacgtgcgcgtttaatgggggatccgcctgatatctgcattgtacctgaagtcgcgaatatcggcacaatggaatttcaccgagctgacgaagccatcgcagcaggagaggccgccgtggcaaaagtggcacatttgattgaagccgcgatttggaaagattaa

SEQ ID NO: 112122 - protein, 315 aa, Shewanella oneidensis MR-1
MGKGTNPTIGIALGSGAAKGWAHIGVLNGLAAMGIKPDKVAGCSVGALVGAAYAHNHLAELEEWVRSFSSWDVLGLMDIRWRKGGLIGGEKVFDVLQSRIGDVNIEDLEYPFAAIATDLYSGQEIWFRHGDLRQAVRASCSMPGILAPVRQGERWLVDGAVVNPVPVSVSRAMGVDIVIAVDLHGFHSGRLQVLPVNMTSHRATKEDTEMPARQETGFMDLFARGREYVSNLTDKFSLGTKSNPGMIAVMSQSMGILEQRHKRARLMGDPPDICIVPEVANIGTMEFHRADEAIAAGEAAVAKVAHLIEAAIWKD

SEQ ID NO: 112123 - DNA, 1047 bp, Pseudomonas putida KT2440
  CDS (1)..(1047): transl_table=11
atgttcatgagtaaacgtgtggcactggtactgggatcgggcggagcccgagggtatgcgcacatcggcgtgatcgaggaaatcgagcgccgcggctacgacatagcctgcgtcgcggggtgttccatgggcgcggtgattggcggtatctatgccgccggcaagctcgacgactatcgcaactggatcgaaagcctcgactacctcgatgtgctgcgcctggtcgacgtcagctttcgcctcggtgcgattcgcggcgacaaggtgttcgggcagatccgcaagatcgtcggcgagatgaacatcgagcaactgcgcataccctacaccgcagtggccgccgaccttaccaaccagcaggaaatctggttccaggaaggttgcctgcatcaggccatgcgcgcctcggcggccattcccagcctgttcacgccggtgatgcaaggcaaccgcatgctggtcgacggtggcatcctcaacccgctgccaatcgtgccggtggtgtccagccattgcgacctgatcatcgcggtcaacctcaacgccaccaaccagaagcagtaccagttgccggtgatcgagcgcccggcggcgttcaagatgcgctttgacgccttgttgagctcgctgggttcacgtttgccattccgacgcaaaccggcggaagagctgatccgcatcgaaaaggaaatcgtcgccgaggggttggcaccgccaagcccgtggcttgccgacagcgccgacccggaaagccagcaaccggcagcggccccggagcgcgagggcgcgccgaagtcggccaccggctctttcatcatcgacaacgtggggccagcctcgctgctggatttgatcaaccagagcttcgaggtcatgcagacttcgttggcacagtacaagattgccggctatccaccggatgtgctgatcaacgtacccaagcgggtgtgccggtttttcgagttctacaaggcgccggagctcatcgccctggggcgagagattgcacgcgatacgctggacagttatgaaggggtgaagcggtag

SEQ ID NO: 112124 - protein, 348 aa, Pseudomonas putida KT2440
MFMSKRVALVLGSGGARGYAHIGVIEEIERRGYDIACVAGCSMGAVIGGIYAAGKLDDYRNWIESLDYLDVLRLVDVSFRLGAIRGDKVFGQIRKIVGEMNIEQLRIPYTAVAADLTNQQEIWFQEGCLHQAMRASAAIPSLFTPVMQGNRMLVDGGILNPLPIVPVVSSHCDLIIAVNLNATNQKQYQLPVIERPAAFKMRFDALLSSLGSRLPFRRKPAEELIRIEKEIVAEGLAPPSPWLADSADPESQQPAAAPEREGAPKSATGSFIIDNVGPASLLDLINQSFEVMQTSLAQYKIAGYPPDVLINVPKRVCRFFEFYKAPELIALGREIARDTLDSYEGVKR

SEQ ID NO: 112125 - DNA, 1179 bp, Bradyrhizobium japonicum USDA 110
  CDS (1)..(1179): transl_table=11
gtgattagacaggaggcaaccgcccctcgccatactcctgcccagcgccctttccaaagcggcataaaccatgcttcgccccggttctggcgcacagcaggtgctatgcctagtctggtggtgcggctggccacgcgtaggagagttttggtgctggacagattgaagggccgcggcgcgaatggctcgaacagcgagaagatcggcctcggcagcatccgccggccggtcattggccttgcccttggcggcggcgcagcgcgcggcttcgcccacatcggcatcatcaggaccctgctcgccaacggtatcgtgcccgatgtcgtggtcggcacctcgattggcgccgtggtcggcggcctctacgcgtccggcaagctcgatacgctggaggagtggggccgcggtctgcaaggcatgcgcaacatccttggttatctggacatccgcctcaacggctccggtctgatcggcggcgagaagctggcgacccggctcgaggcagcgtgcggccagaccttgatcgaggaccttccgatcaagttcgccgccgtcgcgaccgaggttcgcaccggccacgagatctggctgacacgcggccgcgtggtcgacgcgatgcgcgcctcctacgccctgcccggcatcttctcacccgtgctgatcggcgatcgctggctggtcgacggcgcgctggtgaatccggtgccggtctccgccgcccgcgcgctcggcgctgaaatcgtcatcgctgcaaatctttccagcgacatcttcacctattcgacgacggtctattcgcacggcgcggcacccggaccggccgcacctgcggccgaagagacgacgccaaaacggcgcttcccgagattcttctcgcctgagaagacggtgaagcgcgagttcttcggcggcggggaccggcccggcctctcctcggtgatggtcgatgccttcaacatcatgcaggaccgcatcacccgcgcccgcctcgccggcgatcctccggacctgctgatcacgccgcgggtcggccagttcggctggttcgacttccaccgcaccgacgacctcatcgcattgggcacccgcgccgccgagcgtgcgctggactcgatccaggaggcgatccacgcgctggcgccgccgcccgagggcgcggcgcccaaagccggcgagtga

SEQ ID NO: 112126 - protein, 392 aa, Bradyrhizobium japonicum USDA 110
MIRQEATAPRHTPAQRPFQSGINHASPRFWRTAGAMPSLVVRLATRRRVLVLDRLKGRGANGSNSEKIGLGSIRRPVIGLALGGGAARGFAHIGIIRTLLANGIVPDVVVGTSIGAVVGGLYASGKLDTLEEWGRGLQGMRNILGYLDIRLNGSGLIGGEKLATRLEAACGQTLIEDLPIKFAAVATEVRTGHEIWLTRGRVVDAMRASYALPGIFSPVLIGDRWLVDGALVNPVPVSAARALGAEIVIAANLSSDIFTYSTTVYSHGAAPGPAAPAAEETTPKRRFPRFFSPEKTVKREFFGGGDRPGLSSVMVDAFNIMQDRITRARLAGDPPDLLITPRVGQFGWFDFHRTDDLIALGTRAAERALDSIQEAIHALAPPPEGAAPKAGE

SEQ ID NO: 112127 - DNA, 906 bp, Salmonella enterica subsp. enterica serovar Typhi Ty2
  CDS (1)..(906): transl_table=11
atgagaaaaatgaaaatagggctggcgctgggatctggcgcagcgagaggatggtctcatattggggtcatcaaagccctcaagcaaacaggcattgatattgatatcgttgcaggatgctcaataggttcactggtcggcgccgcgtatgcctgtaataaattatcggcgcttgaacagtgggtatgttcattccgctactgggatgttttacgcctgatggatgtatcctggggcagaggagggttgcttcgcggcaaacgcgtatttaatcactatcgggatattatgcccgtcacggattttgaccactgttcaagacgttttggcgcggtcgcgacgaatcttagcacgggacgagagctatggtttactgaaggcgatctacaccttgccgtacgcgcgtcgtgcagtatgccagggctgatgtctccggttgaacataacggttactggctggtagatggcgcagtcgttaatccggtacctgtttcgttaaccagggcgctgggggctgatatcgttattgcggtagacctgcaacatgatgcccacctcatgcagcaagatttgctctctgtaaatgtcgggaatatcaatgaagagagcgatgatgcgctgccctggcataagcgtttaaaagaacgtttcagtagcctgacttcacgccgtggcgtgagttcgtctggggcaatggaaatcatgacaacctccatccaggtgttggaaaatcgtcttaaacgtaaccgtatggctggcgatccgcctgatattctcattcaaccattctgtccgcaaatctctacgctggattttcatcgcgcccatgccgctattgcggcgggtcagttagccgtagagaaaaagatggacgaacttatacccttggtgcgtaccgacgtttaa

SEQ ID NO: 112128 - protein, 301 aa, Salmonella enterica subsp. enterica serovar Typhi Ty2
MRKMKIGLALGSGAARGWSHIGVIKALKQTGIDIDIVAGCSIGSLVGAAYACNKLSALEQWVCSFRYWDVLRLMDVSWGRGGLLRGKRVFNHYRDIMPVTDFDHCSRRFGAVATNLSTGRELWFTEGDLHLAVRASCSMPGLMSPVEHNGYWLVDGAVVNPVPVSLTRALGADIVIAVDLQHDAHLMQQDLLSVNVGNINEESDDALPWHKRLKERFSSLTSRRGVSSSGAMEIMTTSIQVLENRLKRNRMAGDPPDILIQPFCPQISTLDFHRAHAAIAAGQLAVEKKMDELIPLVRTDV

SEQ ID NO: 112129 - DNA, 1032 bp, Rhodopseudomonas palustris CGA009
  CDS (1)..(1032): transl_table=11
gtgctggagaatctgatcggacgcgggcaagcgcacccgccggcagcggacaaggtcggcctcgacaccattcgccggccggtgatcggcttggcgctcggcggcggcgcggcgcgcggctttgcgcatatcggtatcctgcgcaccctgctggcgcacggcattacgcccgacgtcgtggtcggcacctcgatcggggcggtggtcggcggagcctacgtgtccggtcatctcgacacgctggaggagtgggcgcggcgactgcagccccgcaacatcttcggctatctggatattcggctcaatggctccggcctgatcggcggcagcaaactcgccgcgcagctcgacgcaacgctcggccagatcctgatccaggatctcacccagaaattcgccagcgtcgccaccgaggtggcgacgggccacgagatctggctgacccatggacggatcgtcgacgcggtccgcgcctcctacgccctgcccggcatcttctcgccggtgctgatcggcgaccgctggctggtcgacggtgcgctcgtcaatccggtgccggtgtcagccgcgcgggcgctcggcgccgagatcgtgatcgccgccaacgtctccagcgacgtgttcggccacggcaccacgatcttctcgcatggcagcgccgctgcggcggcaatggaacccgaagccgaggaaccgccggcgcagaagcgcggcttcacgcggttcttctcgcctgagagattcgtcaaacaggagctgttcggcagcccggaacgccccggcatctccaaggtgatgaccgacgccttcaacatcatgcaggaccgcatcacccgggcgcggctcgcaggcgatcccccggacctgctgatttcgccgcgggtcggccggatcggctggttcgacttccaccgcgccgacgagatcatcgcccatggtgcacgggccgccgagcgcgcgatcgactcgatccgtgaagcgatcgaagaagtcgcgccgcagcccaaggccacggttccggtcgagacctga

SEQ ID NO: 112130 - protein, 343 aa, Rhodopseudomonas palustris CGA009
MLENLIGRGQAHPPAADKVGLDTIRRPVIGLALGGGAARGFAHIGILRTLLAHGITPDVVVGTSIGAVVGGAYVSGHLDTLEEWARRLQPRNIFGYLDIRLNGSGLIGGSKLAAQLDATLGQILIQDLTQKFASVATEVATGHEIWLTHGRIVDAVRASYALPGIFSPVLIGDRWLVDGALVNPVPVSAARALGAEIVIAANVSSDVFGHGTTIFSHGSAAAAAMEPEAEEPPAQKRGFTRFFSPERFVKQELFGSPERPGISKVMTDAFNIMQDRITRARLAGDPPDLLISPRVGRIGWFDFHRADEIIAHGARAAERAIDSIREAIEEVAPQPKATVPVET

SEQ ID NO: 112131 - DNA, 906 bp, Erwinia carotovora subsp. atroseptica SCRI1043
  CDS (1)..(906): transl_table=11
atgcaacggaaaaaaattggagtagccttggggtccggggccgcgaaaggatgggcgcatattggtgtattgaatgcgttaactgaaatggggatcgaggtcgatgttgtagccggttgttctatcggcgcgttggttggtgcagcgtatgccacaaacaatttatcctcaatggatcgctgggtgagaagttttggttactgggatgtgattcgactgatggatctctcttggcagcgcggcagtttattgcgtggcgatcgcgtctttaacagtgtgaaacatttgttacatacaacacagattgaagactgtgatatcaagtatggcgtggtgacgacaaatcttagtacaggtcgtgaactctggctgacagaaggcgatttacatcaggctatgcgagcgtcttgcagtatgcctggtctgctatccccggttagatttaacgattactggctggtggatggggcggtggttaaccccgttcccgtttctctggcgcgggcaatgggagctgacatcgtgattgcggttgatctccagcacgacgcgagccttaatcatcaggatttgctgtcgatcaaaccgacggcgtcggacattgatgcggagaatgttccacaagattggcgtagtaggattcgggaacgtttactgcgtggtcgacgtcatccagcagaaagttcgccaacggcaatggagataatgagcacatcgatccagattcttgaaaatcgattgaagatgacgcggatggcgggcgatccgcccgacgtactgctgcaaccgcattgtccccagattgctacgttagattttcatcgggcgcaggaggcgatcgatgcgggctataaggcggtggaaaagatgcgtgatgaattgttgccgctagcgaaagaggcatag

SEQ ID NO: 112132 - protein, 301 aa, Erwinia carotovora subsp. atroseptica SCRI1043
MQRKKIGVALGSGAAKGWAHIGVLNALTEMGIEVDVVAGCSIGALVGAAYATNNLSSMDRWVRSFGYWDVIRLMDLSWQRGSLLRGDRVFNSVKHLLHTTQIEDCDIKYGVVTTNLSTGRELWLTEGDLHQAMRASCSMPGLLSPVRFNDYWLVDGAVVNPVPVSLARAMGADIVIAVDLQHDASLNHQDLLSIKPTASDIDAENVPQDWRSRIRERLLRGRRHPAESSPTAMEIMSTSIQILENRLKMTRMAGDPPDVLLQPHCPQIATLDFHRAQEAIDAGYKAVEKMRDELLPLAKEA

SEQ ID NO: 112133 - DNA, 879 bp, Legionella pneumophila subsp. pneumophila str. Philadelphia 1
  CDS (1)..(879): transl_table=11
ttgacaaatcaataccctaaaattggtttggctttaggtagcggatcagcgcgcggctgggctcatatcggggtaattcaatcaatcaaacgattgggtgtaaggattgattgtgtcgctggatgttccataggcgcattggttggcgccatttatgcctgtggcaccctggatctgtttgaacaatgggtgttaaagcttaataaaagagaaatggctaaactcattgatgtgaattttttaggtggcggggttctctctggtagtaaattgatgacctttttcaaggattttggtcttgaaaaaaatattgaagagctttctctaccttttagttcagttgctactgatttgagtactggacgtgagatatggctaagtaaagggtctcttgagcttgctattcgctcatccatgtctttaccagggttatttaccccgcagcgttataaggattgctggttagtcgatggtggtttggttaatcccgttcctattacattgtgtcgagctatgggagcagaggttgtaattgctgtcaatttaaatcatgacttgttaagagtacctccgagcacgatagaacacccggggtttttttcagttctctcaggccaatttgataaaatgataaaaagaataatgggtatcagtgatggacctggatattatgatgtcttgaccagaagcatcaaaataatgcaggaccggataacccgggcaagagcggcaggtgatcctgctgatttgactttggttcctcaattaggaaacatcatgctttatgattttcataaagcaaaagaggcgattcatgagggtgaaaattgtgttttgcgagaaaaaaataatattttacaactagttggtctagaatag

SEQ ID NO: 112134 - protein, 292 aa, Legionella pneumophila subsp. pneumophila str. Philadelphia 1
MTNQYPKIGLALGSGSARGWAHIGVIQSIKRLGVRIDCVAGCSIGALVGAIYACGTLDLFEQWVLKLNKREMAKLIDVNFLGGGVLSGSKLMTFFKDFGLEKNIEELSLPFSSVATDLSTGREIWLSKGSLELAIRSSMSLPGLFTPQRYKDCWLVDGGLVNPVPITLCRAMGAEVVIAVNLNHDLLRVPPSTIEHPGFFSVLSGQFDKMIKRIMGISDGPGYYDVLTRSIKIMQDRITRARAAGDPADLTLVPQLGNIMLYDFHKAKEAIHEGENCVLREKNNILQLVGLE

SEQ ID NO: 112135 - DNA, 945 bp, Azoarcus sp. EbN1
  CDS (1)..(945): transl_table=11
atgtacgaaacggcgctcccgtgcgtgcccggcagcagtccggtcatcggtctggctctgggcagcggtgcggcgcgaggctgggcccacctgggcgtcctgcaggcgctggctcgcgaaggaatcgagccgcaggtgatctgcggatgttcgatcggagcgttcgtcggcgccgcgatggcagcgggagatctcacgaagctcgccgaatgggcacagtcgctgaaatggcaggatgtcgtttcgctgctcgacgtcagcctcaggggcgggctgatccgcggacagaaactcatccagtttttcgaacgcaatttcgtcgatcgggatttttccgaactccagcgctcctttgcgtgcgtcgccaccgaactggaaaccgggcgggagatctggctgcgggaaggaagcgtttcggccgctgtgcgcgcctcgatcgcgcttcccgggctgttcacaccggtcatccataatggccgccttctcgtggacggtggtctcgtcaacccggtgccggtttccctgtgccgcgcgatgggagccgatgtcgtgatcgcggtcgatctggggtcggacatgatcggaaaatcctggcgtccggtgccggccgaagccgaaaccggtatcggctggacggagcgcctgttcggacgcctgggctttttcgccagcggcgggaacggtgagccgggaaacggtcagaatccgttgcgtgaggcaaacctgccttcgcttctgaccgttctcacgagcagcatcaacatcatgcaggttcgtatcgcgcgcagccggcttgccggcgagccggccgatgtgcagatttctccgcgcctgggccacttggggccgatggattttcatcgggccgcggaggccattgccgaaggagaggcggccgtcgaacggatgctgcccacgttgcgatactgcctggggcatggttga

SEQ ID NO: 112136 - protein, 314 aa, Azoarcus sp. EbN1
MYETALPCVPGSSPVIGLALGSGAARGWAHLGVLQALAREGIEPQVICGCSIGAFVGAAMAAGDLTKLAEWAQSLKWQDVVSLLDVSLRGGLIRGQKLIQFFERNFVDRDFSELQRSFACVATELETGREIWLREGSVSAAVRASIALPGLFTPVIHNGRLLVDGGLVNPVPVSLCRAMGADVVIAVDLGSDMIGKSWRPVPAEAETGIGWTERLFGRLGFFASGGNGEPGNGQNPLREANLPSLLTVLTSSINIMQVRIARSRLAGEPADVQISPRLGHLGPMDFHRAAEAIAEGEAAVERMLPTLRYCLGHG

SEQ ID NO: 112137 - DNA, 1035 bp, Pseudomonas fluorescens Pf-5
  CDS (1)..(1035): transl_table=11
atgagcaaacgtgtcgcattggtccttgggtcggggggcgctcgcggttacgcccatatcggcgtcatcgaggaaatcgaaaaacgcggttatgacatcgcctgcattgccggctgctcgatgggcgcggtggtcggcggcatctacgccgcaggtaagctcgccgagtaccgggaatggatcgaaagcctggactacctcgacgtgctgcgcctggtggacgtgagctttcggctgggggcgattcgcggcgagaaagtcttcggccagatccgcaagatcgtcggcgaagtgaacatcgaagacctgcgcatcccctataccgccgtcgccaccgacctgaccaaccagcaggaaatctggttccaggaaggctgcctgcatcaggccatgcgtgcttccgccgcgatccccagcctgttcaccccggtcatgcagggcaaccgcatgctggtggacggcggcctgctcaacccgctgcccatcgttccggtggtttccagccactgcgacctgatcattgcggtgaacctcaactccaccaaccagcgccactaccagttaccggtaatccagcgcccacccgcgttcaagagccgctttgacagcctgatcaactccctgggctcacacctgccgtttcgccgcaagcaggccgaacaactgctactgctcgagcaggaagccttcaagagcgaagccgcggagatcaatccatgggtcgagggcgccgaaccggaagcccagcaaccggccgccgcgccgcaaaccgacggcgcgccgaaatccgccagcggctccttcatcatcgacaacgtcggcccggcgtcattgctggacctggtcaaccagagcttcgaggtcatgcagacctccctggcgcagtacaagatcgccggttacccgccggatatcctcatcaacgtgcccaagcgcgtctgccgcttcttcgagttctacaaggcgccggagctgatcgccctgggccgtgagattgccagcgataccctggaccgctacgagcaggaccagtag

SEQ ID NO: 112138 - protein, 344 aa, Pseudomonas fluorescens Pf-5
MSKRVALVLGSGGARGYAHIGVIEEIEKRGYDIACIAGCSMGAVVGGIYAAGKLAEYREWIESLDYLDVLRLVDVSFRLGAIRGEKVFGQIRKIVGEVNIEDLRIPYTAVATDLTNQQEIWFQEGCLHQAMRASAAIPSLFTPVMQGNRMLVDGGLLNPLPIVPVVSSHCDLIIAVNLNSTNQRHYQLPVIQRPPAFKSRFDSLINSLGSHLPFRRKQAEQLLLLEQEAFKSEAAEINPWVEGAEPEAQQPAAAPQTDGAPKSASGSFIIDNVGPASLLDLVNQSFEVMQTSLAQYKIAGYPPDILINVPKRVCRFFEFYKAPELIALGREIASDTLDRYEQDQ

SEQ ID NO: 112139 - DNA, 933 bp, Thiobacillus denitrificans ATCC 25259
  CDS (1)..(933): transl_table=11
gtgaggccgactgaagccttggtgagcgcgccgcgcatcggcctcgcgctcggcagcggctcggcccgcggctgggcgcatatcggcgtgctgcgcgcgctggccgaggccggggtcgagcccgacatcgtctgcggtacctcgatcggcgcgctcgtcggcgcggcctacgcgggcggcgagctggaccggctcgaagcctgggtgcgcgagctgcgcctgcagtcggtcgtgagcttcctcgatttttcgctgagcggcggcctgatcaagggcgaaaggctgctcgatttttttcgcagccatttcgtcgaccgcgacatcggcgcgctcgagcggcggttcggcgccgtcgccaccgatctgcgcagcgggcgcgaagtctggctcagggaggggctcgtttccgcggcggtgcgcgcgtcgatcgcgctgcccggcctgttcacgccagcccggcacggcgacacctggctcgtcgacggcggcctggtcaacccggtcccggtctcgctatgccgcgcgatgggcgccgatatcgtgatcgcggtcgacctcaacgccgatctgctcggtcgtcatctcaggcgcccggtcgcgccggtcgcgccgaccgtcgagccggcgacagcgcacacgctcttcgaaagaatccaggccggcgcgtcgcaattcgcgctgacgcggccgaacggctcgcggccgccgccggttctcgacgtgctcgcgagcagcatcaacatcatgcaggtgctgatcacgcgcagccggctcgccggagagcccgccgacgtcctcgtcatgccgctgctggcggacgtcgggctcatggaatttcatcgcgccgccgtcgcgatcgacgcgggacgcgccgccgtggcggcagtgctccagcagttgcaactgcgcgtgaaccacagcgcagcgcgctga

SEQ ID NO: 112140 - protein, 310 aa, Thiobacillus denitrificans ATCC 25259
MRPTEALVSAPRIGLALGSGSARGWAHIGVLRALAEAGVEPDIVCGTSIGALVGAAYAGGELDRLEAWVRELRLQSVVSFLDFSLSGGLIKGERLLDFFRSHFVDRDIGALERRFGAVATDLRSGREVWLREGLVSAAVRASIALPGLFTPARHGDTWLVDGGLVNPVPVSLCRAMGADIVIAVDLNADLLGRHLRRPVAPVAPTVEPATAHTLFERIQAGASQFALTRPNGSRPPPVLDVLASSINIMQVLITRSRLAGEPADVLVMPLLADVGLMEFHRAAVAIDAGRAAVAAVLQQLQLRVNHSAAR

SEQ ID NO: 112141 - DNA, 1008 bp, Desulfovibrio desulfuricans G20
  CDS (1)..(1008): transl_table=11
atgtcggacgatagctcaggttttccgaaaaatatcggcctggctctgggtagcggctccgcacggggatggtctcatatcggtgtattgcaggcactagctgaggcaggaatagaaatcaggtacgtcgccggcaccagcattggttcgttggtaggggccgcatgtgcccttggcaaaatggatgtgctggaaaattttgcccgtcagctcgactggaaacagattgtttccttcctggatgtaacttttccgaggtcgggactcattgatggaaagaagatcagcgatttctttcgttctcatgttcgagaaatgaacattgaagaattacctctccgctattgcgcggttgccaccgacctggccacgggtcgtgaggtcgtgttgaacaaaggggacctcatagaggcaatccgcgcgagcatctcggttccgggcattttcacgccggtcaggaaaaacggcggctttctggtggatggagggctggtcaaccccgtgccggtgagcgctgtcaggaaaatgggagcggattacgtcatcgctgttgatttgaaccatgacattatcgacaaaaggagtaccgccggcatcgctccggttgattcatcggtggcaggtatggttgttcagccccagcccgcagaatggagaatcgcgcaggatctgaccaacaggctcagcgaattcggttcgcccgcgttatcgcaagtgcgccagtggctgcaaagggaccccgtgccaaatatctttgatgtgttgacgactgcaatcaatattatggaagtgcagatcaccgcaacaagattggcaaccgatccgcccgatctgctgattcggccgaagctgggggatgttcgttttctcgaattccatcgggccgaggaggccattgccgaggggtaccgagaagccatggtgcagctcaaagaaagatggaagtgtgccgccaaaagagatttgccaggaggttttttaccggggaggacggaagatgggaattaa

SEQ ID NO: 112142 - protein, 335 aa, Desulfovibrio desulfuricans G20
MSDDSSGFPKNIGLALGSGSARGWSHIGVLQALAEAGIEIRYVAGTSIGSLVGAACALGKMDVLENFARQLDWKQIVSFLDVTFPRSGLIDGKKISDFFRSHVREMNIEELPLRYCAVATDLATGREVVLNKGDLIEAIRASISVPGIFTPVRKNGGFLVDGGLVNPVPVSAVRKMGADYVIAVDLNHDIIDKRSTAGIAPVDSSVAGMVVQPQPAEWRIAQDLTNRLSEFGSPALSQVRQWLQRDPVPNIFDVLTTAINIMEVQITATRLATDPPDLLIRPKLGDVRFLEFHRAEEAIAEGYREAMVQLKERWKCAAKRDLPGGFLPGRTEDGN

SEQ ID NO: 112143 - DNA, 954 bp, Burkholderia xenovorans LB400
  CDS (1)..(954): transl_table=11
atgatacgtcgacgtcgatacagccggatcgggctggtgttggggggcggcgccgcgcgcggctgggcgcatatcggcgcgattcgcgcgctgcacgatgcgggcatccggcccgacgtggtctgcggcacgtcgatcggcgcactggtgggcgcggtttacgcgaacggcgacctggactggctcgaagagtgggtctcgcggctcacgtggcagacggtcgtgcgcctgctcgatctgcgcctctcgggcggcctgctcggcgggcgcaaggtgatccagctgttcgccgacaagttcaacggccgttcgatcgcccagttgaacatgccgttcgcggcggtcgccaccgaactcgattcgggccgtgaaagctggttgcaggacggcagcgtggtcgaggcggtgcgcgcttcgatcgcgattcccggcattttcacgccggtgtggcacaacggcgtctggctcgtggacggcggcctgagcaacccggtgccggtttcggtggctcgcggcatgcgcgcggactgcgtgatcgccgtggatctgaacaacgacattctgaatggccgcgatttcggcggcgcggtggtcgatacgccggccatcgatccggccgtgccgcaggcaatcgcgctgcgccgcaacggcaagccctggccgcgctggctcgcgcccgccgaagggcgcgccaccgacgacgtgcgcgtgccgcccgcgccgagcgcacgcgtgccgtccatgctcagttcgatcgcgcagagtatcgacatcatgcaggtgcggatcacgcgcagccgtctggcgggcgaaccggcggacatcctgatccagccgcgcctgggcggcatgggaattttcgactttcaccgcgcggcgccagccatcgaggaagggcgcgcggcggtggagcagatgctgccggccattcgggcacgcctgggcatcgattag

SEQ ID NO: 112144 - protein, 317 aa, Burkholderia xenovorans LB400
MIRRRRYSRIGLVLGGGAARGWAHIGAIRALHDAGIRPDVVCGTSIGALVGAVYANGDLDWLEEWVSRLTWQTVVRLLDLRLSGGLLGGRKVIQLFADKFNGRSIAQLNMPFAAVATELDSGRESWLQDGSVVEAVRASIAIPGIFTPVWHNGVWLVDGGLSNPVPVSVARGMRADCVIAVDLNNDILNGRDFGGAVVDTPAIDPAVPQAIALRRNGKPWPRWLAPAEGRATDDVRVPPAPSARVPSMLSSIAQSIDIMQVRITRSRLAGEPADILIQPRLGGMGIFDFHRAAPAIEEGRAAVEQMLPAIRARLGID

SEQ ID NO: 112145 - DNA, 948 bp, Shewanella sp. MR-4
  CDS (1)..(948): transl_table=11
atgagcaaagggacaaaaccgacaataggtattgccttaggaagcggagccgccaagggctgggcacatattggcgtacttaatgggctcgccaatatggggataaaacccgataaggtggccggttgctcagtaggagccttagtgggcgcagcctatgctcataatcatttagccgagcttgaagagtgggtacgcagcttttcgagttgggatgtcctcggactgatggacattcgctggcgtaaagggggattgatcggcggtgagaaagtcttcgatgtactgcaatcgcgtatcggcgatatcaatattgaggatttggaccgaccctttgcggcgattgcgacggacttatattcagggcaagaaatctggtttcgccatggtgatttacgccaagccgtgcgcgcctcgtgctcaatgccgggaatattagcccccgtacgacaaggggagcgttggctcgtcgatggcgccgttgttaatcctgtgcccgtgtctgtgagccgtgctatgggcgtcgatatagtgattgccgttgatttgcatgggtttcattctgggcggctgcaggtattgcccgtcaacatgaccagccataaggcgccaaaggaagaaaatgaaatgcccgctcgccaagaaactggctttatggatttgtttgcgagagggcgggaatatgtcagcagcttaaccgacaagttttccctcggcactaaatctaaccctggcatgattgcggtaatgtcacagtcgatggggattttagagcagcgtcataagcgggcgcgtttgatgggtgatcctcccgatattctggtcgtgcctgaagtcgctaatatcggcactatggagtttcaccgcgccgacgaggcaattgccgcaggagaagcggctgtcgctaaggcggcgcacttgattgaagcggcaatttggaaaggttaa

SEQ ID NO: 112146 - protein, 315 aa, Shewanella sp. MR-4
MSKGTKPTIGIALGSGAAKGWAHIGVLNGLANMGIKPDKVAGCSVGALVGAAYAHNHLAELEEWVRSFSSWDVLGLMDIRWRKGGLIGGEKVFDVLQSRIGDINIEDLDRPFAAIATDLYSGQEIWFRHGDLRQAVRASCSMPGILAPVRQGERWLVDGAVVNPVPVSVSRAMGVDIVIAVDLHGFHSGRLQVLPVNMTSHKAPKEENEMPARQETGFMDLFARGREYVSSLTDKFSLGTKSNPGMIAVMSQSMGILEQRHKRARLMGDPPDILVVPEVANIGTMEFHRADEAIAAGEAAVAKAAHLIEAAIWKG

SEQ ID NO: 112147 - DNA, 972 bp, Alkalilimnicola ehrlichei MLHE-1
  CDS (1)..(972): transl_table=11
gtgagcgggcggcggcatgaacccacggtgggcctggccctgggcagcggtgcggcccgggggtgggcgcatatcggggtgatccgcgccctggaggagctggggatccggccgcaggtggtggccggcacctccattggcgccattgtcggggccttctatgccggggggcgccttgcccccttccacgactgggtccagcagctcggccggcgcgagatcatgagcctggtggacatcaccgttggcagtgggctggtggaggggcgcaagctcgaggccttctatgccgactggttgcaggaggcccgcatcgaggacctggacatcccctttgcggcgcttgccaccgaggtggacaacggcaccgaagtctggctccaggaagggccggtggcccccgcccttcgcgcctcttcagccgtacccggcctgctggcgccggtgctcatgggtgatcgctggctggtcgacggtggcctggtcaatccggtgccggtctccgtttgccgggcgctgggcgccgaccgcattatcgctgtcaacctcaacggcgacttgctgagccgccacggccgtcacaccggcgacagtctccataccgggacgccctccaagggaccccgccagcgtgggccctccggttggatcaagtacctccctgacggtgtcgccgaaaaggccacggcgctgcttaagcagtggctgccggcgcgcgcggtgccgcagaaggatccggatccggaacggccgggcatgctggacgtagccgcctccgcgatcaacgtcatgcaggaccgcatcacccgaagccgaatggccggcgatccccccgacgtgatcatcagcccccggctcggccacctgggcctgctggagttcgatcggggggcagaggccatcgagcagggttatcaggctacaatggacttccgggccgccttgcaaggcctgttgccaacaaggggataa

SEQ ID NO: 112148 - protein, 323 aa, Alkalilimnicola ehrlichei MLHE-1
MSGRRHEPTVGLALGSGAARGWAHIGVIRALEELGIRPQVVAGTSIGAIVGAFYAGGRLAPFHDWVQQLGRREIMSLVDITVGSGLVEGRKLEAFYADWLQEARIEDLDIPFAALATEVDNGTEVWLQEGPVAPALRASSAVPGLLAPVLMGDRWLVDGGLVNPVPVSVCRALGADRIIAVNLNGDLLSRHGRHTGDSLHTGTPSKGPRQRGPSGWIKYLPDGVAEKATALLKQWLPARAVPQKDPDPERPGMLDVAASAINVMQDRITRSRMAGDPPDVIISPRLGHLGLLEFDRGAEAIEQGYQATMDFRAALQGLLPTRG

SEQ ID NO: 112149 - DNA, 963 bp, Rhizobium leguminosarum bv. viciae 3841
  CDS (1)..(963): transl_table=11
atgctgagctggagtctgcatcgtcaaagctctgaaggcgagggttccgattccggcatgtctaccacgctcgatatgctcccgcctgctgcgcctcaaaagaaaatcaagatcgcgctggcactcggcggcggcgccgcccgcggctgggctcatatcggcgtgttgcgcgccctcgacgaggcaaaggtcgagatcggcatgattgccggcacctcgatcggcgcactggtcggcggctgctatctcgccggcaaactcgatgaactcgagagcttcgcgcgctcgctgacgatgcgccgcatcgcaagtctccttgatctcaccatcggcggcagcggcctgttcggcggcatgcggctgaccaagcgcatgcaggaacatctcgaaggcttgaacgtcgaggatctcgaccggccgttcgtcgcggtcgcggccgaggtcaataccggtcatgaggtctggatcgccaatggttcgctgatcacggcgctgcgcgcctcctatgccctgcccggcattttcgagccggtccgcagcaatcaccgcacgctggtcgacggcgcgctggtcaatcctgtccccgtctccgtctgccgcgcctacgagcagccgctcgtcgtcgccgtcaatctcaattacgatctctacggccgctcggccgtcgtccggcacaatgccagcctctctccgcaggaggtgcacaagcaggaagaggcgccctatgcgcgcctcggcatgaccggcgtcatggtgcaggccttcaacatcatccaggacaggatcgcccgcgcccgccttgccggcgacccgcctgatatttcgctgcagccgcgcctcagctatatcggcctttccgagttccaccgggctggcgaggcgatcgaacgcggttacgaggaagccagagcccggctccccgagatcaagcgcatgcaggaagtctacgcaagcaacccctga

SEQ ID NO: 112150 - protein, 320 aa, Rhizobium leguminosarum bv. viciae 3841
MLSWSLHRQSSEGEGSDSGMSTTLDMLPPAAPQKKIKIALALGGGAARGWAHIGVLRALDEAKVEIGMIAGTSIGALVGGCYLAGKLDELESFARSLTMRRIASLLDLTIGGSGLFGGMRLTKRMQEHLEGLNVEDLDRPFVAVAAEVNTGHEVWIANGSLITALRASYALPGIFEPVRSNHRTLVDGALVNPVPVSVCRAYEQPLVVAVNLNYDLYGRSAVVRHNASLSPQEVHKQEEAPYARLGMTGVMVQAFNIIQDRIARARLAGDPPDISLQPRLSYIGLSEFHRAGEAIERGYEEARARLPEIKRMQEVYASNP

SEQ ID NO: 112151 - DNA, 1038 bp, Pseudomonas aeruginosa UCBPP-PA14
  CDS (1)..(1038): transl_table=11
atgagcaaacaggtcgccctggtattgggctccggcggtgcgcgcggctacgcgcacatcggcgtgatcgaggaactcgaggcgcgcggctatgagatcacctgcatcgccggttgttccatgggctcggtgatcggcggcatctacgccgccggcaagctgcgcgagtaccgcgagtgggtggaaagcctggattacctcgacgtgctgcgcctgctcgacgtcagcttccgcctcggcgcgatccgcggcgagcgggtgttcggcaagatccacgagatcctcggggaggtgaacatcgaggacctgtcgatcccctacacggcggttgccaccgacctcaccaaccagcaggaaatctggttccaggaaggctgcctgcaccaggccatgcgcgcctcggcggcgatccccagcctgttcaccccggtcatgcagggcagccgcatgctggtcgacggcggcctgctcaacccgttgccgatcgtgccggtggtgtcggcccacagcgacctgatcatcgcggtcaacctcaacgccaccaaccagaagcaataccacctgccggtgatcgagcgtccggccgcgctcaaggggcgcttcgacagcatgatcgagagcctcggccacaaactctcgttcttccgccgccacggcgacgacaataccccgccggagctgagcgccgacgccctgctccatccggttccggcggaatccgaggagcccgccgagccgcaactgcaacagccggccgcggcgccgcaaggcaaggactcgccgaagtcggccagcggcaccacggtggtggaaagcagcggtccggcatcgctgctggaactggtcaaccagagcttcgaggtgatgcagacctcgttggcgcagtacaagatcgccggctacccgccggacatcctgatcaacgtgccgaagcgggtctgccgcttcttcgagttctacaaggcgccggagctgatcgccctcggccggcagatcgccagcgacaccctggaccgctacgaggaagacaacgcctga

SEQ ID NO: 112152 - protein, 345 aa, Pseudomonas aeruginosa UCBPP-PA14
MSKQVALVLGSGGARGYAHIGVIEELEARGYEITCIAGCSMGSVIGGIYAAGKLREYREWVESLDYLDVLRLLDVSFRLGAIRGERVFGKIHEILGEVNIEDLSIPYTAVATDLTNQQEIWFQEGCLHQAMRASAAIPSLFTPVMQGSRMLVDGGLLNPLPIVPVVSAHSDLIIAVNLNATNQKQYHLPVIERPAALKGRFDSMIESLGHKLSFFRRHGDDNTPPELSADALLHPVPAESEEPAEPQLQQPAAAPQGKDSPKSASGTTVVESSGPASLLELVNQSFEVMQTSLAQYKIAGYPPDILINVPKRVCRFFEFYKAPELIALGRQIASDTLDRYEEDNA

SEQ ID NO: 112153 - DNA, 1038 bp, Mycobacterium avium 104
  CDS (1)..(1038): transl_table=11
gtggcactcgcgctcggcagcggtggcgcccgcggctacgcccacatcggggtgatcgaggcgctgcaagcccgcggctacgacatcgtcggcgtcgccggctcgtcgatgggcgcgctggtcggcggcctgcaagcggccggacggctggacgagttcgccgagtgggccaagtcgctgacccagcgcaccatcctgcggctgctggacccgtccatcagcgcggccggggtgatgcgggcgggcaagatcctggacgcggtgcgcgacatcctggggccggtggccatcgaggacctgcgcatcccctacaccgcggtggccaccgacctgctggccggcaagtcggtgtggtttcagcgcgggccgctggacgaggcgatccgcgcgtccatcgcgatcccgggggtgatcgccccgcacaccctcgacggccggctgctggccgacggcggcatcctcgacccgctgccgatggccccgctctcggccgtcaacgccgatctgaccatcgcggtgaacctgtccggcagcgaggcgatcacccgtcgcgaggccgaaccggccgccaccgccgagtggttgacccgcatgatgcgcagcacctcggcgctgttcgacacggccgccgcccgctcgctgctcgatcggcccaccgcgcgggcggtgctgagccggctgggcgggccgagcggcgacgccgacgcctggccggacaatcccgaggaacccgaccagccggtgctcgccgatgacgacgacgaggccgtcgaattgcccggcgcggcaacggatgtgcccaaactgggcagcttcgaggtgatgaaccgcaccatcgacatcgcccaggcggcgctggcgcggcacacgctggccgtctacccgcccgacctgctcatcgaggtcccccgctcgatctgccggggcctggaattccaccgggcggtggaggtgatcgacgcggggcgggcgttggccgaccaagccctcgacgccctcgaggacggcgacgacgaccgccccgcggtcgagcgctga

SEQ ID NO: 112154 - protein, 345 aa, Mycobacterium avium 104
MALALGSGGARGYAHIGVIEALQARGYDIVGVAGSSMGALVGGLQAAGRLDEFAEWAKSLTQRTILRLLDPSISAAGVMRAGKILDAVRDILGPVAIEDLRIPYTAVATDLLAGKSVWFQRGPLDEAIRASIAIPGVIAPHTLDGRLLADGGILDPLPMAPLSAVNADLTIAVNLSGSEAITRREAEPAATAEWLTRMMRSTSALFDTAAARSLLDRPTARAVLSRLGGPSGDADAWPDNPEEPDQPVLADDDDEAVELPGAATDVPKLGSFEVMNRTIDIAQAALARHTLAVYPPDLLIEVPRSICRGLEFHRAVEVIDAGRALADQALDALEDGDDDRPAVER

SEQ ID NO: 112155 - DNA, 1011 bp, Synechococcus sp. WH 5701
  CDS (1)..(1011): transl_table=11
atgaaaagcattgggctggccctgggcagcggtggagccagaggctgggcccatatcggcgtggtgcgtgccctgcaggaagccgggatcagaatcgattacatctccggggccagcatcggagctctggtgggggccatctactgcgccgaggaactggatgaactggaagacttcatcagggacctgagctggagagacatgctcttgtacttcgacatggtcttccccaccagtggtctgctggatggcaacaaggtctatgagctgctctcggagcacatgcaggggatgaagattgaggagtccccgattcccttctgctgtgtggccactgatctcatcaagggcgaggaagtgcacctcagctccgggtccatggtggacgccgtgcgggccagcatctccgtgcctggaatctttacgcccttctgccatggggatctcttcctcggagatggcggcatcgtcaatcccgttccggtggatgtggtcagggcgatgggagcggacgtcgtgatcgcggtgaacctcaaccgcaaccacgtcaccggtggcctggcggactccgccccgcccgatttccagagccggaggagcccgattcccggttccggggattcggccggccccggcgacgacctggaggaagggcaggacgacccgccccccaggacacccagtgaatcctcgaagcgccgcagggagtcgtttctgaagagcctcagggatcggtatcagagtctgcagggcaccctgcaggacaaggtggatcagtggttccccgagacggaccccggtccgaacatcttcgacgtgatcggcacctccctgaacgtgatggagcagcaggtcacccgcagccgactggaaacccacgctcccgacctgctggtggagccgcccctgaacgacttcgccatcttcgatttccacaaggccggcaggatcattcgcatgggccacaccgccatgacgcagcagctgccggccctgagggagttgctctga

SEQ ID NO: 112156 - protein, 336 aa, Synechococcus sp. WH 5701
MKSIGLALGSGGARGWAHIGVVRALQEAGIRIDYISGASIGALVGAIYCAEELDELEDFIRDLSWRDMLLYFDMVFPTSGLLDGNKVYELLSEHMQGMKIEESPIPFCCVATDLIKGEEVHLSSGSMVDAVRASISVPGIFTPFCHGDLFLGDGGIVNPVPVDVVRAMGADVVIAVNLNRNHVTGGLADSAPPDFQSRRSPIPGSGDSAGPGDDLEEGQDDPPPRTPSESSKRRRESFLKSLRDRYQSLQGTLQDKVDQWFPETDPGPNIFDVIGTSLNVMEQQVTRSRLETHAPDLLVEPPLNDFAIFDFHKAGRIIRMGHTAMTQQLPALRELL

SEQ ID NO: 112157 - DNA, 894 bp, Oceanospirillum sp. MED92
  CDS (1)..(894): transl_table=11
atggcaacagtatctctagtgttaggaagtggtggcgcgagagggtatgcacatataggtgcaattgaagagattcagcgacgtggctatgagattgtttctgtatcaggtagctcgatgggtgctttggtcggaggactttatgccgcaggtaagctggatgcatacaaagaatgggtttcttcactgaactggatgggggtcgtcagacttctggattttaccttgtctaaaggcgctatccgcggtgacaaggtatttgtaaaacttgctgaaatcctgggtacacctgacatcgagagcctgccaatcgattttacagcggtttcagccgatattgctcaccaaaaagaagtttggttccagaaaggctctctactcgaagcgattcgcgcttctgtcgctgtacctggcttgtttacgccggtgattaaagagggaagggtgctggttgatggtggtgttcttaaccctttacccattatcccggctgtagcggctcaggcggatcttattattgcgattgacctgaataccggagattcatcacatagtcatttgaagctgccaacgaataagtatctgaagcgtagtggtatgagtgatgaatggcatatgcctgaagtcgaccgtaagccctcgggtacaaatgtggagcagaaaagtgattcaattggtgggcggatggatatcttgctgaattcggttgaggttatgcaggcgagcctggccgaatataagattgctggttatccaccagatctgattgtgcgtatccccaaagacctttgtagcttctatgacttccatcgcgctgctgaaaccattgaatacggccgcctggcaacacgtgataagctagaagccctcgagcagggagagcctattaattag

SEQ ID NO: 112158 - protein, 297 aa, Oceanospirillum sp. MED92
MATVSLVLGSGGARGYAHIGAIEEIQRRGYEIVSVSGSSMGALVGGLYAAGKLDAYKEWVSSLNWMGVVRLLDFTLSKGAIRGDKVFVKLAEILGTPDIESLPIDFTAVSADIAHQKEVWFQKGSLLEAIRASVAVPGLFTPVIKEGRVLVDGGVLNPLPIIPAVAAQADLIIAIDLNTGDSSHSHLKLPTNKYLKRSGMSDEWHMPEVDRKPSGTNVEQKSDSIGGRMDILLNSVEVMQASLAEYKIAGYPPDLIVRIPKDLCSFYDFHRAAETIEYGRLATRDKLEALEQGEPIN

SEQ ID NO: 112159 - DNA, 1122 bp, Xanthobacter autotrophicus Py2
  CDS (1)..(1122): transl_table=11
atgttccagtccctccactggcgctcgaccccggcggtcgctcccgaagcggccagcccggaagccgtagcaccgacgcgcgctgctcccggctcccccccttcccttcccaggacgccgggcggcgccgacgatggcgcgcctcccgatttcgacacccccgcccaccggccggtgcgcgaccggggccgccccgccatcggcatcgcgctgggcggcggagcggcgcgcggctttgcccatatcggcgtgttgaaggtgctgcggcaggcgggcatccaccccgccgtggtggccggcacctccatcggcgcggtggtggggggcatcgccgccgccggaaagctcgacgagctggaagagtgggcgatcagcctcaccaagcgcaatgtgctggggctgctggatttcgccctgggcggggcgggcctcatcgggggccggcggctggtggagctgatgcgccggaacgtgggcgaggtctccatcgagaacctgccggtggtgttcgccgccatcgccaccgagcttggcacgggccatgaaatctggctcacccgcggcgatttcgtggaggcgatccgtgcctcctacgccctgcccggcatcttcaccccggtgaagatcggcgggcggtggctgatggacggggcgctggtcaatcctgtcccggtctcggccgcccgcgccatgggcgcgcgcatggtcatcgcggtgaacctcaatgccgacgtgttcggccacggcacggtcatccaggaccatggcggcgtggtggagcgggtggccgaggcggcgctgggagagaagaaggaaggcatcgccgccatgctgagcccggagcggctgaagcggcagttcttcgccggccacggcagccatgccagcgacggtccgcgcggcctctcgaccgtgatgatcgacgccttcaacatcacccaggatcgcatcgcccgctcgcggctggccggcgatccccccgacatcatgctctcgcccaagctcgggaaaatcggcctgttcgagtttccgcgcgcacgggaagccatcgccgccggggccgaggcggcggagcgcgcgctccccgacatccaggatgccatggtggcgctgggcgcctga

SEQ ID NO: 112160 - protein, 373 aa, Xanthobacter autotrophicus Py2
MFQSLHWRSTPAVAPEAASPEAVAPTRAAPGSPPSLPRTPGGADDGAPPDFDTPAHRPVRDRGRPAIGIALGGGAARGFAHIGVLKVLRQAGIHPAVVAGTSIGAVVGGIAAAGKLDELEEWAISLTKRNVLGLLDFALGGAGLIGGRRLVELMRRNVGEVSIENLPVVFAAIATELGTGHEIWLTRGDFVEAIRASYALPGIFTPVKIGGRWLMDGALVNPVPVSAARAMGARMVIAVNLNADVFGHGTVIQDHGGVVERVAEAALGEKKEGIAAMLSPERLKRQFFAGHGSHASDGPRGLSTVMIDAFNITQDRIARSRLAGDPPDIMLSPKLGKIGLFEFPRAREAIAAGAEAAERALPDIQDAMVALGA

SEQ ID NO: 112161 - DNA, 915 bp, Erwinia chrysanthemi
  CDS (1)..(915): transl_table=11
atgagtaccatgcggaaggtaactatcggtctggcattggggtccggtgcggctaaaggatgggcgcacatcggcgtgctgaaggcgctggaggatctggggattgtgcctgacgtggtggcggggtgttcggtgggggcgctggtcggcgccgcttacgccacacatcgtctggacagtatggcgcactgggtgagcggctttcgctactgggatgtcattcgtctgatggacttttcctggcggcgcggcggattattgcggggcgatcgcgttttcaaccatgtaaagcatttgctacgtacgcaacatattgaagagtgtgctatcaaatatggagcagtggcaactaatctgagcacgggaagggaactttggctgacgcaaggggacttacatttagctattcgcgcctcctgcagtatgccggggttattgtctccggtgcaattcaatggttactggctggtggatggggccgtcgttaatccgattccggtctcattgactcgcgcgatgggcgcggatgtggtgattgcggtggatttgcagcacgatgccagcctgctgccgcataatctgttgtctaccaggccggcggttcaggcggaggagattgccgcgccgcacggctggcgtcagcgtcttcggtctcgtctgtctcaccgttttcgtcggcagacggaagcgacgcccaccgcgatggagatcatgagcacttctatacagatattggagaatcgcctgaaaatgaatcgtatggcgggcgatcctccggatgtattgattcaaccttattgcccgcaaatcgccacgctggattttcatcgagcggaagaggctattgagtccggcaggctggcggtggagaaacagctggagctgctgttgccgctggtgaaccatggtgtatag

SEQ ID NO: 112162 - protein, 304 aa, Erwinia chrysanthemi
MSTMRKVTIGLALGSGAAKGWAHIGVLKALEDLGIVPDVVAGCSVGALVGAAYATHRLDSMAHWVSGFRYWDVIRLMDFSWRRGGLLRGDRVFNHVKHLLRTQHIEECAIKYGAVATNLSTGRELWLTQGDLHLAIRASCSMPGLLSPVQFNGYWLVDGAVVNPIPVSLTRAMGADVVIAVDLQHDASLLPHNLLSTRPAVQAEEIAAPHGWRQRLRSRLSHRFRRQTEATPTAMEIMSTSIQILENRLKMNRMAGDPPDVLIQPYCPQIATLDFHRAEEAIESGRLAVEKQLELLLPLVNHGV

SEQ ID NO: 112163 - DNA, 23 bp, Artificial sequence
  primer
atggctacgattgcattccaggg

SEQ ID NO: 112164 - DNA, 25 bp, Artificial sequence
  primer
ttaaatgttggtgcgtaccaacggc

SEQ ID NO: 112165 - protein, 326 aa, Artificial sequence
  consensus sequence
  Variant (5)..(5): Xaa in position 5 is any amino acid
  Variant (7)..(7): Xaa in position 7 is any amino acid
  Variant (11)..(11): Xaa in position 11 is any amino acid
  Variant (17)..(19): Xaa in position 17 to 19 is any amino acid
  Variant (21)..(23): Xaa in position 21 to 23 is any amino acid
  Variant (25)..(31): Xaa in position 25 to 31 is any amino acid
  Variant (33)..(33): Xaa in position 33 is any amino acid
  Variant (35)..(35): Xaa in position 35 is any amino acid
  Variant (38)..(38): Xaa in position 38 is any amino acid
  Variant (41)..(42): Xaa in position 41 to 42 is any amino acid
  Variant (44)..(47): Xaa in position 44 to 47 is any amino acid
  Variant (49)..(65): Xaa in position 49 to 65 is any amino acid
  Variant (66)..(66): Xaa in position 66 is any or no amino acid
  Variant (68)..(68): Xaa in position 68 is any amino acid
  Variant (70)..(74): Xaa in position 70 to 74 is any amino acid
  Variant (75)..(75): Xaa in position 75 is any or no amino acid
  Variant (77)..(79): Xaa in position 77 to 79 is any amino acid
  Variant (81)..(96): Xaa in position 81 to 96 is any amino acid
  Variant (98)..(98): Xaa in position 98 is any amino acid
  Variant (100)..(105): Xaa in position 100 to 105 is any amino acid
  Variant (109)..(112): Xaa in position 109 to 112 is any amino acid
  Variant (114)..(114): Xaa in position 114 is any amino acid
  Variant (116)..(116): Xaa in position 116 is any amino acid
  Variant (118)..(120): Xaa in position 118 to 120 is any amino acid
  Variant (122)..(125): Xaa in position 122 to 125 is any amino acid
  Variant (127)..(127): Xaa in position 127 is any amino acid
  Variant (131)..(133): Xaa in position 131 to 133 is any amino acid
  Variant (136)..(138): Xaa in position 136 to 138 is any amino acid
  Variant (141)..(146): Xaa in position 141 to 146 is any amino acid
  Variant (148)..(148): Xaa in position 148 is any amino acid
  Variant (151)..(153): Xaa in position 151 to 153 is any amino acid
  Variant (156)..(156): Xaa in position 156 is any amino acid
  Variant (158)..(161): Xaa in position 158 to 161 is any amino acid
  Variant (164)..(169): Xaa in position 164 to 169 is any amino acid
  Variant (173)..(173): Xaa in position 173 is any amino acid
  Variant (175)..(225): Xaa in position 175 to 225 is any amino acid
  Variant (226)..(293): Xaa in position 226 to 293 is any or no amino acid
  Variant (295)..(295): Xaa in position 295 is any amino acid
  Variant (298)..(298): Xaa in position 298 is any amino acid
  Variant (302)..(305): Xaa in position 302 to 305 is any amino acid
  Variant (307)..(315): Xaa in position 307 to 315 is any amino acid
  Variant (320)..(322): Xaa in position 320 to 322 is any amino acid
  Variant (324)..(325): Xaa in position 324 to 325 is any amino acid
LALGXGXARGXAHIGVXXXLXXXGXXXXXXXGXSXGAXVGXXYXXXXLXXXXXXXXXXXXXXXXXXLXDXXXXXXGXXXGXXXXXXXXXXXXXXXXEXLXXXXXXVATXXXXGXEXWXXXGXXXXAXRASXXXPGXXXPVXXXXXXLXDGXXXNPXPXXXXRAXXXXXXIAVXLXXXXXXXXXXXXXXXXXXXXXXXXXXXXXXXXXXXXXXXXXXXXXXXXXXXXXXXXXXXXXXXXXXXXXXXXXXXXXXXXXXXXXXXXXXXXXXXXXXXXXXXXXXXXXXXXXXXXXXXRXAGXPPDXXXXPXXXXXXXXXFHRAXXXIXXG

SEQ ID NO: 112166 - protein, 55 aa, Artificial sequence
  protein pattern
  Variant (2)..(5): Xaa in position 2 to 5 is any or no amino acid
  Variant (7)..(7): Xaa in position 7 is any amino acid
  Variant (9)..(10): Xaa in position 9 to 10 is any amino acid
  Variant (11)..(11): Xaa in position 11 is Phe, Ile or Leu
  Variant (12)..(13): Xaa in position 12 to 13 is any amino acid
  Variant (15)..(15): Xaa in position 15 is any amino acid
  Variant (16)..(16): Xaa in position 16 is Phe, Ile, Leu, Met or Val
  Variant (17)..(18): Xaa in position 17 to 18 is any amino acid
  Variant (20)..(20): Xaa in position 20 is Ile, Leu, Met or Val
  Variant (22)..(22): Xaa in position 22 is Ala or Ser
  Variant (24)..(24): Xaa in position 24 is any amino acid
  Variant (25)..(25): Xaa in position 25 is Ala or Ser
  Variant (26)..(26): Xaa in position 26 is Ile, Leu, Met or Val
  Variant (29)..(29): Xaa in position 29 is Ile, Leu or Val
  Variant (30)..(30): Xaa in position 30 is Phe, Leu or Met
  Variant (31)..(31): Xaa in position 31 is Ala, Glu, Ser or Thr
  Variant (33)..(39): Xaa in position 33 to 39 is any amino acid
  Variant (41)..(41): Xaa in position 41 is any amino acid
  Variant (44)..(44): Xaa in position 44 is Ala or Gly
  Variant (45)..(45): Xaa in position 45 is Ile, Leu or Val
  Variant (46)..(46): Xaa in position 46 is Ser or Val
  Variant (49)..(49): Xaa in position 49 is Ile or Val
  Variant (51)..(51): Xaa in position 51 is Ile or Val
  Variant (52)..(52): Xaa in position 52 is Asp, Ser or Thr
  Variant (53)..(53): Xaa in position 53 is Ala, Leu or Val
  Variant (54)..(54): Xaa in position 54 is Ala, Cys, Ser, Thr or Val
TXXXXGXEXXXXXGXXXXAXRXSXXXPGXXXPXXXXXXXLXDGXXXNPXPXXXXR

SEQ ID NO: 112167 - protein, 59 aa, Artificial sequence
  protein pattern
  Variant (2)..(2): Xaa in position 2 is any amino acid
  Variant (5)..(5): Xaa in position 5 is Gly or Ser
  Variant (7)..(7): Xaa in position 7 is any or no amino acid
  Variant (9)..(9): Xaa in position 9 is any or no amino acid
  Variant (12)..(12): Xaa in position 12 is Phe, Trp or Tyr
  Variant (13)..(13): Xaa in position 13 is Ala or Ser
  Variant (15)..(15): Xaa in position 15 is Ile or Leu
  Variant (17)..(17): Xaa in position 17 is Ala, Ile or Val
  Variant (18)..(18): Xaa in position 18 is Ile, Leu or Val
  Variant (19)..(19): Xaa in position 19 is any amino acid
  Variant (20)..(20): Xaa in position 20 is Ala, Glu, Ser or Thr
  Variant (21)..(21): Xaa in position 21 is Ile or Leu
  Variant (22)..(27): Xaa in position 22 to 27 is any amino acid
  Variant (28)..(28): Xaa in position 28 is Ile, Pro or Val
  Variant (29)..(30): Xaa in position 29 to 30 is any amino acid
  Variant (31)..(31): Xaa in position 31 is Ile or Val
  Variant (32)..(32): Xaa in position 32 is Ala, Cys, Ser or Val
  Variant (34)..(34): Xaa in position 34 is Ala, Cys, Ser or Thr
  Variant (36)..(36): Xaa in position 36 is Ile or Met
  Variant (38)..(38): Xaa in position 38 is Ala or Ser
  Variant (39)..(39): Xaa in position 39 is Phe, Ile, Leu or Val
  Variant (40)..(40): Xaa in position 40 is Ile or Val
  Variant (42)..(42): Xaa in position 42 is Ala or Gly
  Variant (43)..(46): Xaa in position 43 to 46 is any amino acid
  Variant (47)..(47): Xaa in position 47 is Asp, Glu, Gly or Asn
  Variant (48)..(48): Xaa in position 48 is any amino acid
  Variant (49)..(49): Xaa in position 49 is Leu or Met
  Variant (50)..(53): Xaa in position 50 to 53 is any amino acid
  Variant (54)..(54): Xaa in position 54 is Ala, Asp, Glu, Asn, Gln or Ser
  Variant (55)..(55): Xaa in position 55 is Phe or Trp
  Variant (56)..(56): Xaa in position 56 is Ala, Gly, Ile or Val
  Variant (57)..(58): Xaa in position 57 to 58 is any amino acid
  Variant (59)..(59): Xaa in position 59 is Phe or Leu
LXLGXGXAXRGXXHXGXXXXXXXXXXXXXXXXGXSXGXXXGXXXXXXXXXXXXXXXXXX

SEQ ID NO: 112168 - protein, 21 aa, Artificial sequence
  protein pattern
  Variant (2)..(9): Xaa in position 2 to 9 is any amino acid
  Variant (10)..(12): Xaa in position 10 to 12 is any or no amino acid
  Variant (15)..(15): Xaa in position 15 is any amino acid
  Variant (17)..(17): Xaa in position 17 is Ala or Pro
  Variant (19)..(19): Xaa in position 19 is Ile, Leu, Met or Val
  Variant (20)..(20): Xaa in position 20 is any amino acid
  Variant (21)..(21): Xaa in position 21 is Ile, Leu or Val
QXXXXXXXXXXXAGXPXDXXX

SEQ ID NO: 112169 - DNA, 588 bp, Escherichia coli
  CDS (1)..(588): transl_table=11
atgccgcactttaactttgactaccaggagttcttaatgatggtgcagcacctgaaaagacggccattaagccgctatcttaaagactttaaacacagccagacccattgcgcgcattgccgtaaattactcgatcgcattaccttagttcgcgacggcaaaatagtgaataaaatcgagatttcccgcctggacacgctgcttgatgaaaatggctggcaaacggaacaaaaatcatgggcggcattgtgccgattttgcggtgatttacattgcaaaacgcagagtgattttttcgatattatcggctttaagcaatttctttttgagcaaactgaaatgagcccaggtacggtgcgtgaatatgtcgttcgtttgcgccgtttggggaatcatctacacgagcaaaatatttccctcgatcagctgcaggacggtttccttgatgaaatcctcgccccgtggctgcccaccaccagcaccaacaattaccgcatcgcgttacggaagtatcaacactatcagcgccaaacctgtaccagacttgtgcagaaatcctccagcctgccttcttctgatatatattaa

SEQ ID NO: 112170 - protein, 195 aa, Escherichia coli
MPHFNFDYQEFLMMVQHLKRRPLSRYLKDFKHSQTHCAHCRKLLDRITLVRDGKIVNKIEISRLDTLLDENGWQTEQKSWAALCRFCGDLHCKTQSDFFDIIGFKQFLFEQTEMSPGTVREYVVRLRRLGNHLHEQNISLDQLQDGFLDEILAPWLPTTSTNNYRIALRKYQHYQRQTCTRLVQKSSSLPSSDIY

SEQ ID NO: 112171 - DNA, 588 bp, Shigella flexneri 2a str. 301
  CDS (1)..(588): transl_table=11
atgccgcactttaactttgactaccaggagttcttaatgatggtgcagcacctgaaaagacggccattaagccgctatcttaaagactttaaacacagccagacccattgcgcgcattgccgtaaattactcgatcgcattaccttagttcgcgacggcaaaatagtgaataaaatcgagatttcccgcctggacacgctgcttgatgaaaaaggctggcaaacggaacaacaatcatgggcggcattgtgccgattttgcggtgatttacattgcaaaacgcagagtgattttttcgatattatcggctttaagaaatttctttttgagcaaactgaaatgagcccaggtacggtgcgtgaatatgtcgttcgtctgcgccgtttgggtaatcatctacatgagcaaaatatttccctcgatcagctgcaggacggtttccttgatgaaatcctcgccccgtggctgcccaccaccagcaccaacaattaccgcatcgcattacggaagtatcaacactatcagcgccaaacctgtaccggacttgtgcagaaatcctccagcctgcctgcttctgatatatattaa

SEQ ID NO: 112172 - protein, 195 aa, Shigella flexneri 2a str. 301
MPHFNFDYQEFLMMVQHLKRRPLSRYLKDFKHSQTHCAHCRKLLDRITLVRDGKIVNKIEISRLDTLLDEKGWQTEQQSWAALCRFCGDLHCKTQSDFFDIIGFKKFLFEQTEMSPGTVREYVVRLRRLGNHLHEQNISLDQLQDGFLDEILAPWLPTTSTNNYRIALRKYQHYQRQTCTGLVQKSSSLPASDIY

SEQ ID NO: 112173 - DNA, 588 bp, Escherichia coli CFT073
  CDS (1)..(588): transl_table=11
atgccgcactttaattttgactaccaggagttcttaatgatggtgcagcacctgaaaagacggccattaagccgctatcttaaagactttaaacacagccagacccattgcgcgcattgccgtaaattactcgatcgcattaccctcgttcgcgacggcaaaatagtgaataaaatcgagatttcccgcctggacacgctgcttgatgaaaatggctggcaagtggaacaacaatcatgggcggcattgtgccgattttgcggtgatttacattgcaaaacgcagagtgattttttcgatattatcggctttaagcaatttctttttgagcaaactgaaatgagccctggtacggtgcgtgaatatgtcgttcgtttgcgccgtttggggaatcatctacacgagcaaaatatttccctcgatcagctgcaggacggtttccttgatgaaatcctcgccccgtggctgccctccaccagcaccaacaattaccgcatcgcgttacggaagtatcaacactatcagcgccaaacctgtaccggacttgtgcagaaatcctccagcctgcctgcttctgatatatattaa

SEQ ID NO: 112174 - protein, 195 aa, Escherichia coli CFT073
MPHFNFDYQEFLMMVQHLKRRPLSRYLKDFKHSQTHCAHCRKLLDRITLVRDGKIVNKIEISRLDTLLDENGWQVEQQSWAALCRFCGDLHCKTQSDFFDIIGFKQFLFEQTEMSPGTVREYVVRLRRLGNHLHEQNISLDQLQDGFLDEILAPWLPSTSTNNYRIALRKYQHYQRQTCTGLVQKSSSLPASDIY

SEQ ID NO: 112175 - DNA, 513 bp, Photorhabdus luminescens subsp. laumondii TTO1
  CDS (1)..(513): transl_table=11
atgtctgttacaacacaaaagaaacggccgctcagccgttacattaaagactacaaacatagtcaaactcattgcttgcattgtcacaaagctcttgaccgtatctctttggtttttaatggccaagtgatcaacaaagagtccatctccgagatgacggagttgattgatgacaagacttgggatgagctgcaagataaatttgtcgcgttatgtcgtttttgcagtgagatttattgcaatagcgagacagattattttgacatcatgtctttcaaacagtacctgtttgaacagactgaaatgagtcatagtactgttcgtgagtatgtggttcgtttacgacgtttggatgaattgctcacttcaagcaattaccctgtaaaagagttcacaacagagaaaattcaggaaaaactgagtgaaaagctgtcacagtcagcattcagtaactacaacattgctttgcgcaagtatgaacagtatttgagctggcaacagggcggtcactaa

SEQ ID NO: 112176 - protein, 170 aa, Photorhabdus luminescens subsp. laumondii TTO1
MSVTTQKKRPLSRYIKDYKHSQTHCLHCHKALDRISLVFNGQVINKESISEMTELIDDKTWDELQDKFVALCRFCSEIYCNSETDYFDIMSFKQYLFEQTEMSHSTVREYVVRLRRLDELLTSSNYPVKEFTTEKIQEKLSEKLSQSAFSNYNIALRKYEQYLSWQQGGH

SEQ ID NO: 112177 - DNA, 516 bp, Erwinia carotovora subsp. atroseptica SCRI1043
  CDS (1)..(516): transl_table=11
atgcacccatcaattaggaagaaacagctgctaagccgttatctgaaagactttaaacatagacagaccaactgttcccagtgtgataaagagctcgaccgcgtttcactggtgtttcgcaaccagcttataaataaaaaatcgattggcagcatcgacagacttatcgatgacgaaatatggtctggtctccagaaggaattaatcccactttgccgcttttgtagcgaaatattatgcaataccactgctagctatttcgatattaaagctttcacacaatatctgatcgagcaaaccgaagttcgtcatagcacgatgcgcgagtatgtcattcgtctgcggcggttggatgaactgctggtcgcaaataattatcctgcagaaaccttttccgggcaccgtggtggggtacagcagcgggtatgcgattaccttcctgacattgaacaaaatatctaccgcagcgccttacgaaaatacgatcaatatttggactggcagcgacatttctga

SEQ ID NO: 112178 - protein, 171 aa, Erwinia carotovora subsp. atroseptica SCRI1043
MHPSIRKKQLLSRYLKDFKHRQTNCSQCDKELDRVSLVFRNQLINKKSIGSIDRLIDDEIWSGLQKELIPLCRFCSEILCNTTASYFDIKAFTQYLIEQTEVRHSTMREYVIRLRRLDELLVANNYPAETFSGHRGGVQQRVCDYLPDIEQNIYRSALRKYDQYLDWQRHF

SEQ ID NO: 112179 - DNA, 510 bp, Yersinia pseudotuberculosis IP 32953
  CDS (1)..(510): transl_table=11
atgtcaggactccagttaaaaaagcggccgctgagccgttatttaaaagattataaacacagccaaacgcattgctcacattgtcagaaacagcttgatcgcatggtgttagtttttcgcgggcaaatcatcaataaagagaccatcgccggcatggaccaacctatcgacgatccgctttggttaaaacttcaggaagaactgacggcgctgtgccgcttttgtagtgagatatactgtaataattcgctcggctatttcgatatcatgccgtttaaacaatatttatttgagcaaaccgagatgagtcacagcactgttcgtgaatatgttgtgcgtttgcgccgtttagatgaaatgcttgtcgcgactaattatcctgcagaaaagtttgccactgaagcattgtaccagcgcattattgatgatattcccaatgcggctcataataactaccgcattgctttgcgtaaatatgatcagtatttggcatggcaaaagaactattga

SEQ ID NO: 112180 - protein, 169 aa, Yersinia pseudotuberculosis IP 32953
MSGLQLKKRPLSRYLKDYKHSQTHCSHCQKQLDRMVLVFRGQIINKETIAGMDQPIDDPLWLKLQEELTALCRFCSEIYCNNSLGYFDIMPFKQYLFEQTEMSHSTVREYVVRLRRLDEMLVATNYPAEKFATEALYQRIIDDIPNAAHNNYRIALRKYDQYLAWQKNY

SEQ ID NO: 112181 - DNA, 531 bp, Proteus mirabilis
  CDS (1)..(531): transl_table=11
atgtctgtttcaacacaaaagaaacggccgctaagccgttacattaaagactataaacacagccaaactcattgtttgcattgccataaggcgcttgatcggatttctctcgtattcaatcgccaagttatcaataaagaagccatttctgaaatgacagatttaattgatgatgaaacatgggaaaccttgcaaggaaagttttctgcgctgtgccgtttttgtagtgagatttactgtaatagtgaaactgattactttgacattatgtcttttaagcagtatttgttcgaacaaacggagatgagccacagtactgttcgtgagtatgtggttcgtttacgtcgactcgatgaattgctgacttccactaattttcctcgtcaagaatttacgacagagaaaattcagtcagacttgagtaaaaagctcactccctccgcatttagtaactacaacattgccctacgtaagtatgagcaatatcttgattggtgccaagcgccaacctcgatgagtagtggtcactaa

SEQ ID NO: 112182 - protein, 176 aa, Proteus mirabilis
MSVSTQKKRPLSRYIKDYKHSQTHCLHCHKALDRISLVFNRQVINKEAISEMTDLIDDETWETLQGKFSALCRFCSEIYCNSETDYFDIMSFKQYLFEQTEMSHSTVREYVVRLRRLDELLTSTNFPRQEFTTEKIQSDLSKKLTPSAFSNYNIALRKYEQYLDWCQAPTSMSSGH

SEQ ID NO: 112183 - DNA, 513 bp, Xenorhabdus nematophilus
  CDS (1)..(513): transl_table=11
atgtctgttacaacacaaaagaaacggcctctcagccgttatatcaaggactataaacatagtcagacttattgtttgcactgccataaaacacttgatcgtatttctcttgtttttaacggtcaggtcatcaacaaagaagcaatttctgagatgactgaattggtggatgacaaaacctggagtgaattacaaggtaaatttgtggccttgtgccgcttttgtagtgaaatttattgtaatagccagactgattattttgacattatgtcatttaagcagtatctgtttgaacaaactgagatgagtcatagtactgtgcgtgagtatgtggttcgtttaagacgtctggatgaattactgacttcaagtaattatccggctgatgaatttacaccggaaaaaattcaggaacaactcagcgaaacattatctcagtcagctttcagtaattataatattgcgctgcgtaaatatgagcagtatctgagctggcaacagagcagtcattga

SEQ ID NO: 112184 - protein, 170 aa, Xenorhabdus nematophilus
MSVTTQKKRPLSRYIKDYKHSQTYCLHCHKTLDRISLVFNGQVINKEAISEMTELVDDKTWSELQGKFVALCRFCSEIYCNSQTDYFDIMSFKQYLFEQTEMSHSTVREYVVRLRRLDELLTSSNYPADEFTPEKIQEQLSETLSQSAFSNYNIALRKYEQYLSWQQSSH

SEQ ID NO: 112185 - DNA, 552 bp, Escherichia coli
  CDS (1)..(552): transl_table=11
atgatggtgcagcacctgaaaagacggccattaagccgctatcttaaagactttaaacacagccagacccattgcgcgcattgccgtaaattactcgatcgcattaccttagttcgcgacggcaaaatagtgaataaaatcgagatttcccgcctggacacgctgcttgatgaaaatggctggcaaacggaacaaaaatcatgggcggcattgtgccgattttgcggtgatttacattgcaaaacgcagagtgattttttcgatattatcggctttaagcaatttctttttgagcaaactgaaatgagcccaggtacggtgcgtgaatatgtcgttcgtttgcgccgtttggggaatcatctacacgagcaaaatatttccctcgatcagctgcaggacggtttccttgatgaaatcctcgccccgtggctgcccaccaccagcaccaacaattaccgcatcgcgttacggaagtatcaacactatcagcgccaaacctgtaccagacttgtgcagaaatcctccagcctgccttcttctgatatatattaa

SEQ ID NO: 112186 - protein, 183 aa, Escherichia coli
MMVQHLKRRPLSRYLKDFKHSQTHCAHCRKLLDRITLVRDGKIVNKIEISRLDTLLDENGWQTEQKSWAALCRFCGDLHCKTQSDFFDIIGFKQFLFEQTEMSPGTVREYVVRLRRLGNHLHEQNISLDQLQDGFLDEILAPWLPTTSTNNYRIALRKYQHYQRQTCTRLVQKSSSLPSSDIY

SEQ ID NO: 112187 - DNA, 24 bp, Artificial sequence
  primer
atgccgcactttaactttgactac

SEQ ID NO: 112188 - DNA, 26 bp, Artificial sequence
  primer
ttaatatatatcagaagaaggcaggc

SEQ ID NO: 112189 - protein, 164 aa, Artificial sequence
  consensus sequence
  Variant (2)..(6): Xaa in position 2 to 6 is any amino acid
  Variant (8)..(8): Xaa in position 8 is any amino acid
  Variant (15)..(15): Xaa in position 15 is any amino acid
  Variant (18)..(18): Xaa in position 18 is any amino acid
  Variant (24)..(24): Xaa in position 24 is any amino acid
  Variant (26)..(26): Xaa in position 26 is any amino acid
  Variant (29)..(29): Xaa in position 29 is any amino acid
  Variant (31)..(31): Xaa in position 31 is any amino acid
  Variant (35)..(36): Xaa in position 35 to 36 is any amino acid
  Variant (39)..(44): Xaa in position 39 to 44 is any amino acid
  Variant (47)..(48): Xaa in position 47 to 48 is any amino acid
  Variant (50)..(54): Xaa in position 50 to 54 is any amino acid
  Variant (56)..(56): Xaa in position 56 is any amino acid
  Variant (58)..(60): Xaa in position 58 to 60 is any amino acid
  Variant (62)..(64): Xaa in position 62 to 64 is any amino acid
  Variant (66)..(69): Xaa in position 66 to 69 is any amino acid
  Variant (76)..(79): Xaa in position 76 to 79 is any amino acid
  Variant (81)..(86): Xaa in position 81 to 86 is any amino acid
  Variant (90)..(91): Xaa in position 90 to 91 is any amino acid
  Variant (95)..(95): Xaa in position 95 is any amino acid
  Variant (104)..(105): Xaa in position 104 to 105 is any amino acid
  Variant (118)..(120): Xaa in position 118 to 120 is any amino acid
  Variant (122)..(124): Xaa in position 122 to 124 is any amino acid
  Variant (126)..(143): Xaa in position 126 to 143 is any amino acid
  Variant (144)..(145): Xaa in position 144 to 145 is any or no amino acid
  Variant (147)..(152): Xaa in position 147 to 152 is any amino acid
  Variant (155)..(155): Xaa in position 155 is any amino acid
  Variant (162)..(163): Xaa in position 162 to 163 is any amino acid
MXXXXXKXRPLSRYXKDXKHSQTXCXHCXKXLDRXXLVXXXXXXNKXXIXXXXXLXDXXXWXXXQXXXXALCRFCXXXXCXXXXXXFDIXXFKQXLFEQTEMSXXTVREYVVRLRRLXXXLXXXNXXXXXXXXXXXXXXXXXXXXLXXXXXXNYXIALRKYXXY

SEQ ID NO: 112190 - protein, 60 aa, Artificial sequence
  protein pattern
  Variant (2)..(4): Xaa in position 2 to 4 is any or no amino acid
  Variant (9)..(9): Xaa in position 9 is Gly or Ser
  Variant (10)..(10): Xaa in position 10 is Asp or Glu
  Variant (11)..(11): Xaa in position 11 is Ile or Leu
  Variant (12)..(12): Xaa in position 12 is His or Tyr
  Variant (14)..(14): Xaa in position 14 is any amino acid
  Variant (15)..(15): Xaa in position 15 is Asn, Ser or Thr
  Variant (16)..(16): Xaa in position 16 is Glu, Gln or Ser
  Variant (17)..(17): Xaa in position 17 is any amino acid
  Variant (18)..(18): Xaa in position 18 is Asp or Gly
  Variant (19)..(19): Xaa in position 19 is Phe or Tyr
  Variant (23)..(23): Xaa in position 23 is Ile or Met
  Variant (24)..(24): Xaa in position 24 is Gly, Pro or Ser
  Variant (27)..(27): Xaa in position 27 is any amino acid
  Variant (28)..(28): Xaa in position 28 is Phe or Tyr
  Variant (37)..(37): Xaa in position 37 is any amino acid
  Variant (38)..(38): Xaa in position 38 is Gly or Ser
  Variant (51)..(51): Xaa in position 51 is Asp or Gly
  Variant (52)..(52): Xaa in position 52 is Glu or Asn
  Variant (53)..(53): Xaa in position 53 is any amino acid
  Variant (55)..(55): Xaa in position 55 is any amino acid
  Variant (56)..(56): Xaa in position 56 is Ala, Glu or Ser
  Variant (57)..(57): Xaa in position 57 is Gln, Ser or Thr
  Variant (59)..(59): Xaa in position 59 is any amino acid
  Variant (60)..(60): Xaa in position 60 is Pro or Ser
LXXXCRFCXXXXCXXXXXXFDIXXFKXXLFEQTEMSXXTVREYVVRLRRLXXXLXXXNXX

SEQ ID NO: 112191 - protein, 56 aa, Artificial sequence
  protein pattern
  Variant (2)..(2): Xaa in position 2 is any or no amino acid
  Variant (4)..(4): Xaa in position 4 is any or no amino acid
  Variant (10)..(10): Xaa in position 10 is Ile or Leu
  Variant (13)..(13): Xaa in position 13 is Phe or Tyr
  Variant (19)..(19): Xaa in position 19 is His or Tyr
  Variant (21)..(21): Xaa in position 21 is any amino acid
  Variant (24)..(24): Xaa in position 24 is any amino acid
  Variant (26)..(26): Xaa in position 26 is any amino acid
  Variant (30)..(30): Xaa in position 30 is Ile or Met
  Variant (31)..(31): Xaa in position 31 is Ser, Thr or Val
  Variant (34)..(34): Xaa in position 34 is any amino acid
  Variant (35)..(35): Xaa in position 35 is Asp, Asn or Arg
  Variant (36)..(37): Xaa in position 36 to 37 is any amino acid
  Variant (38)..(39): Xaa in position 38 to 39 is Ile or Val
  Variant (42)..(42): Xaa in position 42 is any amino acid
  Variant (43)..(43): Xaa in position 43 is Ala, Glu, Ser or Thr
  Variant (45)..(45): Xaa in position 45 is Ala or Ser
  Variant (46)..(46): Xaa in position 46 is any amino acid
  Variant (47)..(47): Xaa in position 47 is Leu or Met
  Variant (48)..(48): Xaa in position 48 is Asp or Thr
  Variant (49)..(49): Xaa in position 49 is Asp, Glu, Gln or Thr
  Variant (50)..(50): Xaa in position 50 is Leu or Pro
  Variant (51)..(51): Xaa in position 51 is Ile, Leu or Val
  Variant (53)..(53): Xaa in position 53 is Asp or Glu
  Variant (54)..(55): Xaa in position 54 to 55 is any amino acid
KXRXPLSRYXKDXKHSQTXCXHCXKXLDRXXLVXXXXXXNKXXIXXXXXXXDXXXW

SEQ ID NO: 112192 - protein, 31 aa, Artificial sequence
  protein pattern
  Variant (2)..(7): Xaa in position 2 to 7 is any amino acid
  Variant (8)..(12): Xaa in position 8 to 12 is any or no amino acid
  Variant (14)..(14): Xaa in position 14 is Pro, Ser or Thr
  Variant (15)..(15): Xaa in position 15 is Asp, Pro, Gln, Ser or Thr
  Variant (16)..(16): Xaa in position 16 is any amino acid
  Variant (17)..(17): Xaa in position 17 is Ala, Glu or Ser
  Variant (18)..(18): Xaa in position 18 is any amino acid
  Variant (19)..(19): Xaa in position 19 is Asn or Ser
  Variant (20)..(20): Xaa in position 20 is any amino acid
  Variant (22)..(22): Xaa in position 22 is Asn or Arg
  Variant (23)..(23): Xaa in position 23 is any amino acid
  Variant (29)..(29): Xaa in position 29 is Asp, Glu or Gln
  Variant (30)..(30): Xaa in position 30 is any amino acid
QXXXXXXXXXXXLXXXXXXXYXXALRKYXXY

SEQ ID NO: 112193 - DNA, 1395 bp, Escherichia coli
  CDS (1)..(1395): transl_table=11
atgccatttaaaaaactctcccgacgcacgttcctgacggcaagctcggcgcttgccttcctccatacccctttcgcccgcgcgcttcccgcccgacaaagcgttaacattaacgactacaacccacacgactggatcgcctcatttaaacaagccttcagcgaagggcaaacagtcgtcgtgcctgccggattggtttgtgacaatatcaacaccggcatctttatccctcccggtaaaacgttacacattcttggaagcttgcgcggcaacggcagagggcgatttgtcttacaggacggcagccaggtgacaggggaggatggcggcagtatgcataacatcaccctggatgtgcgtggttctgactgcaccatcaaagggctgactatgagcggctttggcccggtgacgcagatttatatcggcggcaaaaacaaacgggtcatgcgcaacctgatcatcgataacctgaccgttagccacgctaattacgccatcttacgccagggatttcataaccagattatcggtgccaacatcaccaattgtaagttcagcgacttacaaggcgacgccattgaatggaacgtggcaattaacgaccgtgatattttgatatctgaccatgtcatcgagcgcatcaactgtaccaacggcaaaatcaactggggcatcggcataggccttgcgggaagcacttatgataacaactacccggaagaccaggcagtgaaaaactttgtcgtggcgaatatcacgggatcggattgtcggcagttgatacatgttgaaaatggtaaacattttgttattcgtaatatcaaagcccgcaatatcacgccggatttcagtaagaaagcgggcattgataacgcgacagtcgctatttacggttgtgacaatttcgtgattgataatattgaaatgattaatagcgccgggatgttaatcggctatggggtaattaaaggcaaatatctctcgataccgcaaaatttccgggtgaatgatattcaactggataatactcatcttgcttataaattgcgcggcattcaaatctccgccgggaatgctgtttcctttgtggcgctaactaacattgagatgaagcgtgcgtcgctggagttacacaacaaaccgcaacatttttttatgcgaaatatcaatgtgatgcaggaatcctcagttggacccgcattgagcatgaactttgacatgcgcaaagacgttcgtggtgtttttatggcgaaaaaagaaacactgctgtctcttgcaaatgttcatgcggtgaatgaaaaaggacaaagctccgtcgatatcgacaggattaatcaccatattgttaatgtggagaagattaactttagattgccggaactgagggagtaa

SEQ ID NO: 112194 - protein, 464 aa, Escherichia coli
MPFKKLSRRTFLTASSALAFLHTPFARALPARQSVNINDYNPHDWIASFKQAFSEGQTVVVPAGLVCDNINTGIFIPPGKTLHILGSLRGNGRGRFVLQDGSQVTGEDGGSMHNITLDVRGSDCTIKGLTMSGFGPVTQIYIGGKNKRVMRNLIIDNLTVSHANYAILRQGFHNQIIGANITNCKFSDLQGDAIEWNVAINDRDILISDHVIERINCTNGKINWGIGIGLAGSTYDNNYPEDQAVKNFVVANITGSDCRQLIHVENGKHFVIRNIKARNITPDFSKKAGIDNATVAIYGCDNFVIDNIEMINSAGMLIGYGVIKGKYLSIPQNFRVNDIQLDNTHLAYKLRGIQISAGNAVSFVALTNIEMKRASLELHNKPQHFFMRNINVMQESSVGPALSMNFDMRKDVRGVFMAKKETLLSLANVHAVNEKGQSSVDIDRINHHIVNVEKINFRLPELRE

SEQ ID NO: 112195 - DNA, 1395 bp, Escherichia coli O157:H7 EDL933
  CDS (1)..(1395): transl_table=11
  misc_feature (132)..(132): n is a, g, c or t
atgccatttaaaaaactctcccgacgcaccttcctgacggcaagctcggcgcttgccttccttcatacccctttcgctcgcgcacttcccgcccgacaaagcgttaatatcaacgactacaaccctcacgantggatcgcctcatttaaacaagccttcagcgaagggcaaacggttgtcgtgcctgctggattcgtttgtgacaatatcaacaccggcatcttcattcctcctggcaaaacgttacacatccttggaagcctgcgcggcaacggcagagggcgatttgtcttacaggacggcagccaggtgacaggggaggagggcggcagtatgcataacatcaccctggatgtgcgtggttctgactgcaccatcaaagggctggcgatgagcggctttggtccggtaacgcagatttatatcggcggcaaaaacaaacgggtcatgcgcaacctgaccatcgataacctgaccattagccacgctaattacgccatcttacgccagggatttcataaccagattatcggtgccaacatcaccaattgtaagttcagcgacttacagggcgatgccattgaatggaacgtggcgattaacgaccgcgatattttgatctccgaccatgtcatcgagcgcatcaactgtactaacggcaaaatcaactggggcattggcataggccttgcgggaagcacttacgataataattacccggaagatcaggcagtgaaaaactttgtcgtggcgaatatcacgggatcggattgtcggcagttgatacatgttgaaaatggtaaacattttgttattcgtaatatcaaagcccgcaatatcacgcaggatttcagtaagaaagcaggtattgataacgccacagtcgctatttacggttgtgacaatttcgtgattgataatattgaaatgattaatagcgccgggatgttaatcggctatggggtaattaaaggcaattatctctcgattccgcaaaatttccgagtgaataatattcaactggataacacccatcttgcttataaattgcgcggcctccaaatctctgccgggaatgccgtctcctttgtggcactaactaacattgagatgaagcgtgcgtcgctggagttacacaacaaaccgcaacatctttttctgcgtaatatcaaagtgatgcaggaatcctctgttggacccgcattgattatgaacttcgacatgcgcaaagacgttcgaggcgtctttatggcgaaagaagaaacactgctgtctcttgcaaatgttcatgcggtgaatgagaaaggacaaagctccgtcgatatcgacaggattaatcaccatattgttaatgtggaaaagattaactttagattgccggaacggagagagtag

SEQ ID NO: 112196 - protein, 464 aa, Escherichia coli O157:H7 EDL933
  misc_feature (44)..(44): The Xaa at location 44 stands for Asp, or Glu.
MPFKKLSRRTFLTASSALAFLHTPFARALPARQSVNINDYNPHXWIASFKQAFSEGQTVVVPAGFVCDNINTGIFIPPGKTLHILGSLRGNGRGRFVLQDGSQVTGEEGGSMHNITLDVRGSDCTIKGLAMSGFGPVTQIYIGGKNKRVMRNLTIDNLTISHANYAILRQGFHNQIIGANITNCKFSDLQGDAIEWNVAINDRDILISDHVIERINCTNGKINWGIGIGLAGSTYDNNYPEDQAVKNFVVANITGSDCRQLIHVENGKHFVIRNIKARNITQDFSKKAGIDNATVAIYGCDNFVIDNIEMINSAGMLIGYGVIKGNYLSIPQNFRVNNIQLDNTHLAYKLRGLQISAGNAVSFVALTNIEMKRASLELHNKPQHLFLRNIKVMQESSVGPALIMNFDMRKDVRGVFMAKEETLLSLANVHAVNEKGQSSVDIDRINHHIVNVEKINFRLPERRE

SEQ ID NO: 112197 - DNA, 1404 bp, Salmonella enterica subsp. enterica serovar Typhi Ty2
  CDS (1)..(1404): transl_table=11
atgcccgcgactaaattctcccgacgtaccctcctgacggcaggttccgcgcttgctgttcttccttttctgcgcgccttgccggtacaggcgcgtgaacctcgccagaccgtcgatattaaggattatccggcggatgacggtatcgcctcgttcaaacaggccttcgccgacgggcagactgtggtcgtgccgtcaggatgggtgtgtgaaaatatcaatgcggcgataacgattccggcgggaaaaacgctgcggatacagggcgcggtgcgtgggaatggccggggacggtttattttgctggacgggtgtcaggtggtgggggagcagggcggcagtctgcacaatgtgacgctggatgttcgcgggtcggactgtgtgattaaaggcgtgacgatgagcggctttggccccgtcgcgcaaattttcatcggcggtaaggaaccgcaggtgatgcgtaatctcattatcgatgacatcaccgttacccacgccaactacgccattctccgccagggatttcataaccaaatggacggcgcgcggattacgcatagtcgctttagcgatttgcagggggacgccattgagtggaatgtcgcgattcatgaccgcgacatcctgatttccgatcatgtcatcgaacgcattgattgtaccaatggcaaaatcaactgggggatcggcatcgggctggcgggtagcgcctatgacaatagttatcctgaagaccaggcagtaaaaaactttgtggtggccaatattaccggatctgattgccgacaactggtacacgtagaaaatggcaaacatttcgtcattcgcaatgtcaaagccaaaaacatcacgcccgatttcagtaaaaatgcgggtattgataacgcaacgatcgccatttatggctgtgataatttcgtcattgataatattgatatgacgaatagtgccgggatgctcatcggctatggcgtcgttaaaggaaaatacctgtcaattccgcaaaactttaaattaaacgctattcggttggataatcgccaggttgcttataaattacgcggcattcaaatttcctccggtaacgccccctcatttgttgccatcaccaatgtacggatgacgcgtgctacgctggaactgcataatcaaccgcagcacctctttttgcgtaatatcaacgtgatgcaaacttcagcgattggcccggcgttaaaaatgcattttgatttgcgtaaagatgtccgtggtcaatttatggcccgccaggacacgctgctttccctcgctaatgttcatgccatcaatgaaaacgggcagagttccgtggatatcgacaggattaatcaccaaaccgtgaatgtcgaagcagtgaatttttcgctgccgaagcggggagggtaa

SEQ ID NO: 112198 - protein, 467 aa, Salmonella enterica subsp. enterica serovar Typhi Ty2
MPATKFSRRTLLTAGSALAVLPFLRALPVQAREPRQTVDIKDYPADDGIASFKQAFADGQTVVVPSGWVCENINAAITIPAGKTLRIQGAVRGNGRGRFILLDGCQVVGEQGGSLHNVTLDVRGSDCVIKGVTMSGFGPVAQIFIGGKEPQVMRNLIIDDITVTHANYAILRQGFHNQMDGARITHSRFSDLQGDAIEWNVAIHDRDILISDHVIERIDCTNGKINWGIGIGLAGSAYDNSYPEDQAVKNFVVANITGSDCRQLVHVENGKHFVIRNVKAKNITPDFSKNAGIDNATIAIYGCDNFVIDNIDMTNSAGMLIGYGVVKGKYLSIPQNFKLNAIRLDNRQVAYKLRGIQISSGNAPSFVAITNVRMTRATLELHNQPQHLFLRNINVMQTSAIGPALKMHFDLRKDVRGQFMARQDTLLSLANVHAINENGQSSVDIDRINHQTVNVEAVNFSLPKRGG

SEQ ID NO: 112199 - DNA, 1404 bp, Salmonella typhimurium
  CDS (1)..(1404): transl_table=11
atgcccgcgactaaattctcccgacgtaccctcctgacggcaggttctgcgcttgctgttcttccttttctgcgcgccttgccggtacaggcgcgtgaacctcgcgagaccgtcgatattaaggattatccggcggatgacggtatcgcctcgttcaaacaggccttcgccgacggacagaccgtggtcgtaccgccaggatgggtgtgtgaaaatatcaatgcggcgataacgattccggcgggaaaaacgctgcgggtacagggcgcggtgcgtgggaatggccggggacggtttattttgcaggacgggtgtcaggtggtgggggagcagggcggcagtctgcacaatgtgacgctggatgttcgcgggtcggactgtgtgattaaaggcgtggcgatgagcggctttggccccgtcgcgcaaattttcatcggtggtaaggaaccgcaggtgatgcgtaatctcattatcgatgacatcaccgttacccacgccaactacgccattctccgccagggatttcataaccaaatggatggcgcgcggattacgcatagccgctttagcgatttacagggggacgccattgagtggaatgtcgcgattcacgaccgcgacatcctgatttccgatcatgtcatcgaacgcattaattgtaccaatggcaaaatcaactgggggatcggcatcgggctggcgggtagcacctatgacaacagttatcctgaagaccaggcagtaaaaaactttgtggtggccaatattaccggatctgattgccgacagcttgtgcacgtagaaaatggcaaacatttcgtcattcgcaatgtcaaagccaaaaacatcacgcccggtttcagtaaaaatgcgggtattgataacgcaacgatcgcaatttatggctgtgataatttcgtcattgataatattgatatgacgaatagtgccgggatgctcatcggctatggcgtcgttaaaggaaaatacctgtcaattccgcaaaactttaaattaaacgctattcggttggataatcgccaggttgcttataaattacgcggcattcaaatttcctccggcaacaccccctcttttgtcgccatcaccaatgtacggatgacgcgtgctacgctggaactgcataatcaaccgcagcacctctttctgcgcaatatcaacgtgatgcaaacttcagcgattggcccggcgttaaaaatgcatttcgatttgcgtaaagatgtacgtggtcaatttatggcccgccaggacacgctgctttccctcgctaatgttcatgccatcaatgaaaacgggcagagttccgtggatatcgacaggattaatcaccaaaccgtgaatgtcgaagcagtgaatttttcgctgccgaagcggggagggtaa

SEQ ID NO: 112200 - protein, 467 aa, Salmonella typhimurium
MPATKFSRRTLLTAGSALAVLPFLRALPVQAREPRETVDIKDYPADDGIASFKQAFADGQTVVVPPGWVCENINAAITIPAGKTLRVQGAVRGNGRGRFILQDGCQVVGEQGGSLHNVTLDVRGSDCVIKGVAMSGFGPVAQIFIGGKEPQVMRNLIIDDITVTHANYAILRQGFHNQMDGARITHSRFSDLQGDAIEWNVAIHDRDILISDHVIERINCTNGKINWGIGIGLAGSTYDNSYPEDQAVKNFVVANITGSDCRQLVHVENGKHFVIRNVKAKNITPGFSKNAGIDNATIAIYGCDNFVIDNIDMTNSAGMLIGYGVVKGKYLSIPQNFKLNAIRLDNRQVAYKLRGIQISSGNTPSFVAITNVRMTRATLELHNQPQHLFLRNINVMQTSAIGPALKMHFDLRKDVRGQFMARQDTLLSLANVHAINENGQSSVDIDRINHQTVNVEAVNFSLPKRGG

SEQ ID NO: 112201 - DNA, 1395 bp, Shigella flexneri
  CDS (1)..(1395): transl_table=11
atgccatttaaaacactctcccgacgcaccttcctgacggcaagctcggcgcttgccttcctccatacccctttcgctcgcgcacttcccgcccgacaaagcgttaacattaacgactacaacccacatgactggatcgcctcatttaaacaagccttcagcgaagggcaaacggtcgtcgtgcctgccggattcgtttgtgacaatatcaacaccggcatcttcatccctcccggcaaaacgttacacatccttggaagcctgcgcggcaacggcagagggcgatttgtcttacaggacggcagccaggtgacagggggagagggcggcggtatgcataacattaccctggatgtgcgtggttctgactgcaccatcaaagggctggcgatgagcggctttggcccggtaatgcagatttatattggcggcaaaaacaaacgggtcatgcgcaacctgaccatcgataacctcactgtcagccacgctaattacgccatcttacgccagggatttcataaccagattatcggtgccaacattaccaactgtaagttcagcgacttacagggcgacgccattgaatggaacgtggcaattaacgacagtgatattttgatatctgaccatgtcatcgagcgtatcaactgtaccaacggcaaaatcaactggggcatcggcataggccttgcgggaagcacttatgataacaactacccggaagaccaggcagtgaaaaactttgtcgtggcgaatatcacgggatcggattgtcggcagttgatccatgttgaaaatggtaaacattttgttattcgtaatatcaatgcccgcaatatcacgccggatttcagtaagaaagcgggcattgataacgcgacagtcgctatttacggttgtgacaatttcgtgattgataatattgaaatgattaatagcgccgggatgttaatcggctatggggtaattaaaggcaaatatctctcgataccgcaaaatttccgagtgaataatattcaactggataatacccatcttgcttataaattgcgcggcatccaaatctccgccgggaatgccgtctcctttgtgtcgctaactaacattgagatgaagcgtgcctcgctggagttacacaacaagccgcaacatctttttatgcgaaatatcaatgtgatgcaggaatcctcagttggaccagcattgagcatgaacttcgacatgcgcaaagacgttcgcggcgtctttatggcgaaaaaagaaacactgctgtctcttgcaaatgttcatgcggtgaatgaaagagggcaaagctccgtcgatatcgacaggattaatcaccatattgttaatgtggaaaagattaactttagattgccggaacggagggagtag

SEQ ID NO: 112202 - protein, 464 aa, Shigella flexneri
MPFKTLSRRTFLTASSALAFLHTPFARALPARQSVNINDYNPHDWIASFKQAFSEGQTVVVPAGFVCDNINTGIFIPPGKTLHILGSLRGNGRGRFVLQDGSQVTGGEGGGMHNITLDVRGSDCTIKGLAMSGFGPVMQIYIGGKNKRVMRNLTIDNLTVSHANYAILRQGFHNQIIGANITNCKFSDLQGDAIEWNVAINDSDILISDHVIERINCTNGKINWGIGIGLAGSTYDNNYPEDQAVKNFVVANITGSDCRQLIHVENGKHFVIRNINARNITPDFSKKAGIDNATVAIYGCDNFVIDNIEMINSAGMLIGYGVIKGKYLSIPQNFRVNNIQLDNTHLAYKLRGIQISAGNAVSFVSLTNIEMKRASLELHNKPQHLFMRNINVMQESSVGPALSMNFDMRKDVRGVFMAKKETLLSLANVHAVNERGQSSVDIDRINHHIVNVEKINFRLPERRE

SEQ ID NO: 112203 - DNA, 23 bp, Artificial sequence
  primer
atgccatttaaaaaactctcccg

SEQ ID NO: 112204 - DNA, 23 bp, Artificial sequence
  primer
ttactccctcagttccggcaatc

SEQ ID NO: 112205 - protein, 467 aa, Artificial sequence
  consensus sequence
  Variant (3)..(4): Xaa in position 3 to 4 is any amino acid
  Variant (6)..(6): Xaa in position 6 is any amino acid
  Variant (11)..(11): Xaa in position 11 is any amino acid
  Variant (15)..(15): Xaa in position 15 is any amino acid
  Variant (20)..(20): Xaa in position 20 is any amino acid
  Variant (22)..(23): Xaa in position 22 to 23 is any amino acid
  Variant (26)..(26): Xaa in position 26 is any amino acid
  Variant (31)..(31): Xaa in position 31 is any amino acid
  Variant (32)..(36): Xaa in position 32 to 36 is any or no amino acid
  Variant (39)..(39): Xaa in position 39 is any amino acid
  Variant (41)..(41): Xaa in position 41 is any amino acid
  Variant (43)..(43): Xaa in position 43 is any amino acid
  Variant (46)..(48): Xaa in position 46 to 48 is any amino acid
  Variant (50)..(50): Xaa in position 50 is any amino acid
  Variant (59)..(60): Xaa in position 59 to 60 is any amino acid
  Variant (68)..(68): Xaa in position 68 is any amino acid
  Variant (70)..(70): Xaa in position 70 is any amino acid
  Variant (73)..(73): Xaa in position 73 is any amino acid
  Variant (77)..(78): Xaa in position 77 to 78 is any amino acid
  Variant (80)..(80): Xaa in position 80 is any amino acid
  Variant (83)..(83): Xaa in position 83 is any amino acid
  Variant (88)..(88): Xaa in position 88 is any amino acid
  Variant (90)..(90): Xaa in position 90 is any amino acid
  Variant (92)..(93): Xaa in position 92 to 93 is any amino acid
  Variant (102)..(102): Xaa in position 102 is any amino acid
  Variant (107)..(107): Xaa in position 107 is any amino acid
  Variant (110)..(110): Xaa in position 110 is any amino acid
  Variant (113)..(113): Xaa in position 113 is any amino acid
  Variant (117)..(117): Xaa in position 117 is any amino acid
  Variant (120)..(120): Xaa in position 120 is any amino acid
  Variant (130)..(130): Xaa in position 130 is any amino acid
  Variant (134)..(135): Xaa in position 134 to 135 is any amino acid
  Variant (143)..(143): Xaa in position 143 is any amino acid
  Variant (146)..(146): Xaa in position 146 is any amino acid
  Variant (151)..(153): Xaa in position 151 to 153 is any amino acid
  Variant (159)..(159): Xaa in position 159 is any amino acid
  Variant (162)..(163): Xaa in position 162 to 163 is any amino acid
  Variant (166)..(166): Xaa in position 166 is any amino acid
  Variant (181)..(182): Xaa in position 181 to 182 is any amino acid
  Variant (185)..(185): Xaa in position 185 is any amino acid
  Variant (188)..(190): Xaa in position 188 to 190 is any amino acid
  Variant (206)..(206): Xaa in position 206 is any amino acid
  Variant (243)..(243): Xaa in position 243 is any amino acid
  Variant (267)..(267): Xaa in position 267 is any amino acid
  Variant (280)..(280): Xaa in position 280 is any amino acid
  Variant (283)..(283): Xaa in position 283 is any amino acid
  Variant (292)..(292): Xaa in position 292 is any amino acid
  Variant (300)..(300): Xaa in position 300 is any amino acid
  Variant (314)..(314): Xaa in position 314 is any amino acid
  Variant (316)..(316): Xaa in position 316 is any amino acid
  Variant (328)..(328): Xaa in position 328 is any amino acid
  Variant (340)..(341): Xaa in position 340 to 341 is any amino acid
  Variant (343)..(343): Xaa in position 343 is any amino acid
  Variant (345)..(345): Xaa in position 345 is any amino acid
  Variant (349)..(351): Xaa in position 349 to 351 is any amino acid
  Variant (362)..(362): Xaa in position 362 is any amino acid
  Variant (366)..(366): Xaa in position 366 is any amino acid
  Variant (371)..(371): Xaa in position 371 is any amino acid
  Variant (374)..(375): Xaa in position 374 to 375 is any amino acid
  Variant (377)..(377): Xaa in position 377 is any amino acid
  Variant (380)..(380): Xaa in position 380 is any amino acid
  Variant (386)..(386): Xaa in position 386 is any amino acid
  Variant (392)..(392): Xaa in position 392 is any amino acid
  Variant (400)..(400): Xaa in position 400 is any amino acid
  Variant (402)..(403): Xaa in position 402 to 403 is any amino acid
  Variant (408)..(408): Xaa in position 408 is any amino acid
  Variant (410)..(410): Xaa in position 410 is any amino acid
  Variant (413)..(413): Xaa in position 413 is any amino acid
  Variant (420)..(420): Xaa in position 420 is any amino acid
  Variant (424)..(426): Xaa in position 424 to 426 is any amino acid
  Variant (437)..(437): Xaa in position 437 is any amino acid
  Variant (440)..(440): Xaa in position 440 is any amino acid
  Variant (453)..(454): Xaa in position 453 to 454 is any amino acid
  Variant (459)..(460): Xaa in position 459 to 460 is any amino acid
  Variant (463)..(463): Xaa in position 463 is any amino acid
  Variant (466)..(466): Xaa in position 466 is any amino acid
MPXXKXSRRTXLTAXSALAXLXXPFXRALPXXXXXXRQXVXIXDYXXXDXIASFKQAFXXGQTVVVPXGXVCXNINXXIXIPXGKTLXIXGXXRGNGRGRFXLQDGXQVXGEXGGSXHNXTLDVRGSDCXIKGXXMSGFGPVXQIXIGGKXXXVMRNLXIDXXTVXHANYAILRQGFHNQXXGAXITXXXFSDLQGDAIEWNVAIXDRDILISDHVIERINCTNGKINWGIGIGLAGSTYDNXYPEDQAVKNFVVANITGSDCRQLXHVENGKHFVIRNXKAXNITPDFSKXAGIDNATXAIYGCDNFVIDNIXMXNSAGMLIGYGVXKGKYLSIPQNFXXNXIXLDNXXXAYKLRGIQISXGNAXSFVAXTNXXMXRAXLELHNXPQHLFXRNINVMQXSXXGPALXMXFDXRKDVRGXFMAXXXTLLSLANVHAXNEXGQSSVDIDRINHXXVNVEXXNFXLPXR

SEQ ID NO: 112206 - protein, 59 aa, Artificial sequence
  protein pattern
  Variant (28)..(28): Xaa in position 28 is Asn or Ser
  Variant (52)..(52): Xaa in position 52 is Ile or Val
VIERINCTNGKINWGIGIGLAGSTYDNXYPEDQAVKNFVVANITGSDCRQLXHVENGKH

SEQ ID NO: 112207 - protein, 60 aa, Artificial sequence
  protein pattern
  Variant (3)..(3): Xaa in position 3 is Lys or Arg
  Variant (7)..(7): Xaa in position 7 is Pro or Gln
  Variant (8)..(8): Xaa in position 8 is Asp or Gly
  Variant (12)..(12): Xaa in position 12 is any amino acid
  Variant (20)..(20): Xaa in position 20 is Ile or Val
  Variant (34)..(34): Xaa in position 34 is Asp or Glu
  Variant (36)..(36): Xaa in position 36 is any amino acid
  Variant (48)..(48): Xaa in position 48 is Ile or Val
  Variant (51)..(51): Xaa in position 51 is any amino acid
  Variant (60)..(60): Xaa in position 60 is Lys or Arg
KAXNITXXFSKXAGIDNATXAIYGCDNFVIDNIXMXNSAGMLIGYGVXKGXYLSIPQNFX

SEQ ID NO: 112208 - protein, 60 aa, Artificial sequence
  protein pattern
  Variant (10)..(10): Xaa in position 10 is Thr or Val
  Variant (14)..(14): Xaa in position 14 is Leu or Val
  Variant (15)..(15): Xaa in position 15 is Ala or Thr
  Variant (23)..(23): Xaa in position 23 is Ala or Thr
  Variant (26)..(26): Xaa in position 26 is Phe or Tyr
  Variant (31)..(31): Xaa in position 31 is Glu or Asn
  Variant (32)..(32): Xaa in position 32 is any amino acid
  Variant (33)..(33): Xaa in position 33 is Gln or Arg
  Variant (39)..(39): Xaa in position 39 is any or no amino acid
  Variant (42)..(42): Xaa in position 42 is Asp or Asn
  Variant (43)..(43): Xaa in position 43 is Ile or Leu
  Variant (45)..(45): Xaa in position 45 is Ile or Val
  Variant (46)..(46): Xaa in position 46 is Ser or Thr
TLDVRGSDCXIKGXXMSGFGPVXQIXIGGKXXXVMRNLXIDXXTXXHANYAILRQGFHNQ

SEQ ID NO: 112209 - protein, 59 aa, Artificial sequence
  protein pattern
  Variant (2)..(3): Xaa in position 2 to 3 is any amino acid
  Variant (9)..(9): Xaa in position 9 is Ala or Ser
  Variant (10)..(10): Xaa in position 10 is Asp or Glu
  Variant (18)..(18): Xaa in position 18 is Ala or Ser
  Variant (20)..(20): Xaa in position 20 is any amino acid
  Variant (23)..(23): Xaa in position 23 is Asp or Glu
  Variant (27)..(27): Xaa in position 27 is Ala or Thr
  Variant (28)..(28): Xaa in position 28 is Ala or Gly
  Variant (30)..(30): Xaa in position 30 is any amino acid
  Variant (33)..(33): Xaa in position 33 is Ala or Pro
  Variant (38)..(38): Xaa in position 38 is His or Arg
  Variant (40)..(40): Xaa in position 40 is any amino acid
  Variant (42)..(42): Xaa in position 42 is Ala or Ser
  Variant (43)..(43): Xaa in position 43 is Leu or Val
  Variant (52)..(52): Xaa in position 52 is Ile or Val
  Variant (54)..(54): Xaa in position 54 is any amino acid
  Variant (57)..(57): Xaa in position 57 is Cys or Ser
IXXFKQAFXXGQTVVVPXGXVCXNINXXIXIPXGKTLXIXGXXRGNGRGRFXLXDGXQV

SEQ ID NO: 112210 - protein, 29 aa, Artificial sequence
  protein pattern
  Variant (3)..(3): Xaa in position 3 is any amino acid
  Variant (4)..(4): Xaa in position 4 is Cys or Ser
  Variant (5)..(5): Xaa in position 5 is Lys or Arg
  Variant (21)..(21): Xaa in position 21 is any amino acid
ITXXXFSDLQGDAIEWNVAIXDRDILISD

SEQ ID NO: 112211 - protein, 29 aa, Artificial sequence
  protein pattern
  Variant (3)..(3): Xaa in position 3 is any amino acid
  Variant (16)..(17): Xaa in position 16 to 17 is any amino acid
  Variant (22)..(22): Xaa in position 22 is any amino acid
  Variant (23)..(23): Xaa in position 23 is Ile or Val
  Variant (26)..(26): Xaa in position 26 is Arg or Ser
  Variant (29)..(29): Xaa in position 29 is Glu or Lys
NEXGQSSVDIDRINHXXVNVEXXNFXLPX

SEQ ID NO: 112212 - protein, 21 aa, Artificial sequence
  protein pattern
  Variant (3)..(4): Xaa in position 3 to 4 is any amino acid
  Variant (6)..(6): Xaa in position 6 is Phe or Leu
  Variant (11)..(11): Xaa in position 11 is Phe or Leu
  Variant (15)..(15): Xaa in position 15 is any or no amino acid
  Variant (17)..(17): Xaa in position 17 is any amino acid
  Variant (18)..(18): Xaa in position 18 is any or no amino acid
  Variant (20)..(20): Xaa in position 20 is any or no amino acid
MPXXKXSRRTXLTAXSXXAXL

SEQ ID NO: 112213 - protein, 28 aa, Artificial sequence
  protein pattern
  Variant (4)..(5): Xaa in position 4 to 5 is any amino acid
  Variant (6)..(6): Xaa in position 6 is Leu or Val
  Variant (13)..(13): Xaa in position 13 is Ile or Leu
  Variant (17)..(19): Xaa in position 17 to 19 is any or no amino acid
  Variant (21)..(21): Xaa in position 21 is Gly, Pro or Val
  Variant (25)..(25): Xaa in position 25 is Ala or Ser
  Variant (26)..(26): Xaa in position 26 is Ile or Leu
LDNXXXAYKLRGXQISXXXAXSFVXXTN

SEQ ID NO: 112214 - protein, 21 aa, Artificial sequence
  protein pattern
  Variant (2)..(2): Xaa in position 2 is any amino acid
  Variant (3)..(3): Xaa in position 3 is any or no amino acid
  Variant (6)..(6): Xaa in position 6 is any amino acid
  Variant (7)..(7): Xaa in position 7 is any or no amino acid
  Variant (9)..(9): Xaa in position 9 is any or no amino acid
  Variant (12)..(12): Xaa in position 12 is Ser or Thr
  Variant (14)..(14): Xaa in position 14 is Asp or Asn
  Variant (16)..(16): Xaa in position 16 is any amino acid
  Variant (19)..(19): Xaa in position 19 is Asn or Pro
  Variant (20)..(20): Xaa in position 20 is Ala or Pro
  Variant (21)..(21): Xaa in position 21 is Asp or His
PXXARXXPXRQXVXIXDYXXX

SEQ ID NO: 112215 - protein, 9 aa, Artificial sequence
  protein pattern
  Variant (3)..(3): Xaa in position 3 is Asp, Glu or Gln
  Variant (7)..(7): Xaa in position 7 is Leu or Met
GEXGGSXHN

SEQ ID NO: 112216 - DNA, 405 bp, Escherichia coli
  CDS (1)..(405): transl_table=11
atgaaaactaaagtcattcttagccagcaaatggcgagtgcaattattgccgcaggtcaggaagaggcgcagaaaaataactggtctgtttccattgctgttgccgatgacggcggtcatctgctggcgttaagtcgcatggacgattgcgcgccgattgcggcttatatctcccaggagaaagcgcgtaccgccgcgctggggcgtcgtgaaactaagggctatgaagagatggtgaacaacggacgtaccgcgttcgtgactgcgccgttattaacgtcgctggaaggcggcgtaccggttgttgtggatgggcaaattattggtgccgtgggcgtttctggtttaaccggagcacaggatgcgcaggtcgcgaaagcggcagcagcggtgttggcgaaataa

SEQ ID NO: 112217 - protein, 134 aa, Escherichia coli
MKTKVILSQQMASAIIAAGQEEAQKNNWSVSIAVADDGGHLLALSRMDDCAPIAAYISQEKARTAALGRRETKGYEEMVNNGRTAFVTAPLLTSLEGGVPVVVDGQIIGAVGVSGLTGAQDAQVAKAAAAVLAK

SEQ ID NO: 112218 - DNA, 432 bp, Novosphingobium aromaticivorans
  CDS (1)..(432): transl_table=11
atggacggggtggtttcggtccggacggtaggccacgaactggcgctcaaggcagcggctgccgccgttgccacgggtgcggcggcgggctgtccggtcgttgccgcggtggtcggcgccgggggagatctggtcgcgttcgtccgcgccagcggctccccttcgccatccgcaaagatcgcgcaagataaggcttacagcgccgccagcttccgcgtcccgacgccggatctctatgcgatggtttccggcaatccggccctgcgcgacggaatcgtcgcgcagccgggattagcaatgttcggcggcggcctgccgatcgaaatcgccggtgtattcgtcggtgcgatcggtgtttccggcgggagcgaagcgatggacgtcgaatacgccaacgccggtctcgctgcgatcggcgcaaggcaattctga

SEQ ID NO: 112219 - protein, 143 aa, Novosphingobium aromaticivorans
MDGVVSVRTVGHELALKAAAAAVATGAAAGCPVVAAVVGAGGDLVAFVRASGSPSPSAKIAQDKAYSAASFRVPTPDLYAMVSGNPALRDGIVAQPGLAMFGGGLPIEIAGVFVGAIGVSGGSEAMDVEYANAGLAAIGARQF

SEQ ID NO: 112220 - DNA, 432 bp, Mesorhizobium loti MAFF303099
  CDS (1)..(432): transl_table=11
atgaccaaactgacattggaagtcgccaattccatcattaatcgggcgtgctctacagcaagcggaaaaggtctcaagcccttgagcgtcgcggtgttggatgctggtggccacttggtcgcgttccagaagcaggacggggcttcgatgctccgctttgaaattgcattcggcaaggcatacggagctttggccgtcggtttcggttcacgctggctcgacaaagcatcagccgaccgccctcactttgtagccggactcacctctatatcaggtggcaagattgtgcccgtccccgggggcgtcctggtgagagaccaggccggtcggttgcttggtgcggtagggattactggagatacatccgacaacgatgaagcagtggccgtggaggccatcgagattggcggtttgaatgctcaagcggcctga

SEQ ID NO: 112221 - protein, 143 aa, Mesorhizobium loti MAFF303099
MTKLTLEVANSIINRACSTASGKGLKPLSVAVLDAGGHLVAFQKQDGASMLRFEIAFGKAYGALAVGFGSRWLDKASADRPHFVAGLTSISGGKIVPVPGGVLVRDQAGRLLGAVGITGDTSDNDEAVAVEAIEIGGLNAQAA

SEQ ID NO: 112222 - DNA, 420 bp, Sulfolobus solfataricus P2
  CDS (1)..(420): transl_table=11
atgaacatattaaataagttaggcatatcagatgaattagcggatatgttaataaatgaggcagtaaggaaggctaaagagttaggagtaaacgtttcaatagcaatagtagatgaaggaggagaattgaaggcttttaagaggatggacggtgcaccaatcttgaccatacaaatagccatagataaatcgtggactgctgtaagttttggtataccgacccatgaatggtacaatatacttaaagacaacccctcgctggcaatgggatttcctaaaatacctaggttaataatctttggtggaggatttcctataatctataaagagcaagtaataggaggaataggagtatctggtgcgtctgcagaacaagatatggaaattgccaagagtgcgcttaaaagattggaatcataa

SEQ ID NO: 112223 - protein, 139 aa, Sulfolobus solfataricus P2
MNILNKLGISDELADMLINEAVRKAKELGVNVSIAIVDEGGELKAFKRMDGAPILTIQIAIDKSWTAVSFGIPTHEWYNILKDNPSLAMGFPKIPRLIIFGGGFPIIYKEQVIGGIGVSGASAEQDMEIAKSALKRLES

SEQ ID NO: 112224 - DNA, 492 bp, Caulobacter crescentus CB15
  CDS (1)..(492): transl_table=11
atgaacaagacgcttgccctgatcgccgccgccctgaccctgtccggcggatacgccttcgcccagactgcgccggcgccggcgcccgctccggcctattctagccgcgtggtcaccctggccgaggcgaaatcgatcgtcgccgccgccgaggccgaagcgcgcaagaacggctggaccatgaccttcgtcgtggtcgagtccaacggccagccggtgctgctcgaaaagatggacggcacccagtacggctccaccgaagtggcgatgaagaaggcccagaccgccgccaacttccgccgcccgaccctggtgttccaggacgccgtgaagagcggcacgctgaacgcgatcttcaccggcgccatggccgtggaaggcggcgagctgctgctggccgacggcaagatcgtcggcgccatcggcgtctcgggcggcacgtcggctcaggacggcgtggtggcgcgcgcgggtcaggcggcgatcaagtag

SEQ ID NO: 112225 - protein, 163 aa, Caulobacter crescentus CB15
MNKTLALIAAALTLSGGYAFAQTAPAPAPAPAYSSRVVTLAEAKSIVAAAEAEARKNGWTMTFVVVESNGQPVLLEKMDGTQYGSTEVAMKKAQTAANFRRPTLVFQDAVKSGTLNAIFTGAMAVEGGELLLADGKIVGAIGVSGGTSAQDGVVARAGQAAIK

SEQ ID NO: 112226 - DNA, 1011 bp, Salmonella typhimurium LT2
  CDS (1)..(1011): transl_table=11
atggcgatttatacccgaacaggtgacgctggcaccacatcactgtttaccggccagcgggtgagcaaaacccacccgcgggttgaagcctacggcacgctggatgagctgaacgccgcgctgagcctgtgcgcctgcgccgctgcggatgaaaaccaccgcaccttactcgaggccatccagcagcaacttttttggtttagcgcagagctggccagcgacagcgagcagccatcgcccaaacagcgctacatcagcagcgaagagatttcggccctggaagccgctatcgatcgggcgatggcccgcgtcgaaccgctgcacagctttattttacccggacgctgcgaagccgcgagccgcttacattttgcccgcacgctggcgcgccgcgccgaacgccgtctggttgaactggcaactgaagtcaacgtacgtcaggtgctgatgcgctatatcaaccgcttatcggactgcctgtacgccctggcccgcgcggaagatagcgatgcgcaccaggccaacatcatccgtgaagttagcaagcgctatctggctgcctgccagccgccccacagcaaggagacgacgccagtggccctctcattccacgatctgcaccagctcacccgcgccgccgttgaacgcgcgcagcaactgcaggttccggtagtcgtcagcatcgttgacgcgcacggcacggaaactgtgacctggcggatgccggacgccctgctggtcagcagcgagctggcgccgaaaaaggcctggaccgcagtggcgatgaaaacggcgacccatgagctgagcgatgtcgttcagccgggcgccgcgctttacggtctggaaagtcatttacagggaaaagtggtcacctttggcggcggttacgccctgtggcgcgacggcatattaattgggggtcttggcatcagcggcggcagcgttgagcaggacatggacatagcacagaccgccatcgcggctattaacgtgggaactcatcaatga

SEQ ID NO: 112227 - protein, 336 aa, Salmonella typhimurium LT2
MAIYTRTGDAGTTSLFTGQRVSKTHPRVEAYGTLDELNAALSLCACAAADENHRTLLEAIQQQLFWFSAELASDSEQPSPKQRYISSEEISALEAAIDRAMARVEPLHSFILPGRCEAASRLHFARTLARRAERRLVELATEVNVRQVLMRYINRLSDCLYALARAEDSDAHQANIIREVSKRYLAACQPPHSKETTPVALSFHDLHQLTRAAVERAQQLQVPVVVSIVDAHGTETVTWRMPDALLVSSELAPKKAWTAVAMKTATHELSDVVQPGAALYGLESHLQGKVVTFGGGYALWRDGILIGGLGISGGSVEQDMDIAQTAIAAINVGTHQ

SEQ ID NO: 112228 - DNA, 414 bp, Ralstonia solanacearum GMI1000
  CDS (1)..(414): transl_table=11
atgaaaaccaagccctgtctgacccaggaagacgtcaacaagatcctggatgccgcagagaaggaagcgcgcgcgcatcaatgggccgtgacgatcgccgtggtcgatgacggtggccatccgctgggcctgcgccgcatggacggctgtgcgtccatctcggcctacatcgcgccggagaaggcgcgcacggccgcgctgggccgtcgtgaatcgaagatctacgaagacatcatcaacaatggccggacttcgttcctgtcggtgccgctgctgcacggcatgctggagggcggcgtgcctattctggtggagggcgtgtgcgccggtgcagtgggcgtgtcgggcgtgaagtcggcggaggatgtgcagatcgccaaggcgggcatcgccgccgtgcacgtgatctgctga

SEQ ID NO: 112229 - protein, 137 aa, Ralstonia solanacearum GMI1000
MKTKPCLTQEDVNKILDAAEKEARAHQWAVTIAVVDDGGHPLGLRRMDGCASISAYIAPEKARTAALGRRESKIYEDIINNGRTSFLSVPLLHGMLEGGVPILVEGVCAGAVGVSGVKSAEDVQIAKAGIAAVHVIC

SEQ ID NO: 112230 - DNA, 381 bp, Pyrobaculum aerophilum str. IM2
  CDS (1)..(381): transl_table=11
atgaaggtattccaagccatcgcctccggcgtggccaaggcggagcagttaggggtgagggtggccatcgccctagtggacgaggcgggggaggtagtggccttgtacaaaatgcccggcgcctatcccttctccccaaaaatagccctcctaaaggcgaggactgcggctattttcaaaaggcccacggccgagcttatggagagggcggcgcagaacctccccttttacatcgggctgactgtacacgccggcttaatattcggaaaggggggtatttacgtggcaaagcgggagttctccggcggggtgggagtcagcggcggcactggcgaccaggacgaggaggtggcaagggcggtcgcccaagcgttagattaa

SEQ ID NO: 112231 - protein, 126 aa, Pyrobaculum aerophilum str. IM2
MKVFQAIASGVAKAEQLGVRVAIALVDEAGEVVALYKMPGAYPFSPKIALLKARTAAIFKRPTAELMERAAQNLPFYIGLTVHAGLIFGKGGIYVAKREFSGGVGVSGGTGDQDEEVARAVAQALD

SEQ ID NO: 112232 - DNA, 420 bp, Streptomyces coelicolor A3(2)
  CDS (1)..(420): transl_table=11
atgagcaccaccgctgtcaccccgctgacgacccaggacgccgaagcgctcgtcaccgcggcccaccacgccgccgaggcggccggtgtcacggtcagcgtcaccgtcctcgacgccggcggccatctgctcgccttccggcgcgacgaccgggccgtgctgatctccggtgagaccagcacgcgcaaggcctacacggcactccagctgaacgctcccaccgccgacctggtcgacgcggtgcagcccggaggccttttccacaccctgcccaccgccctcgaccggccgctcctgttcctcgcgggcggcgtgcccgtgcaccgcgagggccggctgatcggagcgatcggggtgggcggtggcgcgcccgaccaggaccacgggttcgcctcggccgccgtgcgggcgctcgcctga

SEQ ID NO: 112233 - protein, 139 aa, Streptomyces coelicolor A3(2)
MSTTAVTPLTTQDAEALVTAAHHAAEAAGVTVSVTVLDAGGHLLAFRRDDRAVLISGETSTRKAYTALQLNAPTADLVDAVQPGGLFHTLPTALDRPLLFLAGGVPVHREGRLIGAIGVGGGAPDQDHGFASAAVRALA

SEQ ID NO: 112234 - DNA, 570 bp, Streptomyces coelicolor A3(2)
  CDS (1)..(570): transl_table=11
atgaagaagaccctctcccgccgtgcccgcatcgccaccggcggtgccgtgctcgccgccgtcgccgccggcaccttcggcacggtggccgcgaacgcctccgcccccgaagcggcccaggactccgcggtctcggccgccccggccgccgcggccggcaagcgcgacaccaccacctccacccatctgacgatcgacgccgccaccgaggccgcgcaggccgcgctgaaggccgccaagaaggagggccagcggatcacggtcgcggtcgtcgaccgcaacggcaacacgatcctcaccatgcgcggcgacggcgccggtccgcagtcctacgcgtcggccgagaagaaggcgtacacggccgtctcctggaacgccccgaccagcgagctggagggccgcctggagaacgccccgaacctgaaggacatcccgggcacgctgtttctgggcggcggcgtcccggtcaccgcggacaaggcgccgatcgccggtatcggagtcgcgggcgccccgtccggcaccctggacgagaagttcgcccgggccggggcggcggcgctgcgctag

SEQ ID NO: 112235 - protein, 189 aa, Streptomyces coelicolor A3(2)
MKKTLSRRARIATGGAVLAAVAAGTFGTVAANASAPEAAQDSAVSAAPAAAAGKRDTTTSTHLTIDAATEAAQAALKAAKKEGQRITVAVVDRNGNTILTMRGDGAGPQSYASAEKKAYTAVSWNAPTSELEGRLENAPNLKDIPGTLFLGGGVPVTADKAPIAGIGVAGAPSGTLDEKFARAGAAALR

SEQ ID NO: 112236 - DNA, 405 bp, Shigella flexneri 2a str. 301
  CDS (1)..(405): transl_table=11
atgaaaactaaagtcattcttagccagcaaatggcgagtgcaattattgccgcaggtcaggaagaggcgcagaaaaataactggtctgtttccattgctgttgccgatgacggcggtcatctgctggcgttaagtcgcatggacgattgcgcgccgattgcggcttacatctcccaggagaaagcgcgtaccgccgcgctggggcgtcgtgaaactaagggctatgaagagatggtgaacaacggacgtaccgcgttcgtgactgcgccgttactgacgtcgctggaaggcggcgtaccggttgttgttgatgggcaaattattggtgccgtgggcgtttctggtttaaccggagcacaggatgcgcaggtcgcgaaagtggcagcagcggtgttggcgaaataa

SEQ ID NO: 112237 - protein, 134 aa, Shigella flexneri 2a str. 301
MKTKVILSQQMASAIIAAGQEEAQKNNWSVSIAVADDGGHLLALSRMDDCAPIAAYISQEKARTAALGRRETKGYEEMVNNGRTAFVTAPLLTSLEGGVPVVVDGQIIGAVGVSGLTGAQDAQVAKVAAAVLAK

SEQ ID NO: 112238 - DNA, 489 bp, Leptospira interrogans serovar Lai str. 56601
  CDS (1)..(489): transl_table=11
atgtatcagaagttatggatcataacgatttgtttttttgtgacgtttcctactatgagtcaaaatcaacccaattttcctgattatggaaatccgattcatttagaagtcgcaaaaaaaattgctctcaaagctcaatcagaagcgaagaagaacggatggaaaatggtgatttctatcgtagattctggaggaaatttagtgttattggaaaaaatggatggggctcaatttgcttctattgatatttcccaaggaaaagctaaatgtgcgaacaactttcgtagatctactaagataatggaagaaaccgttgcggctggtggaattggacttagaattttagctttgccgaatgtttatcctcttgaagggggagaattgattttgatcgacggaaaaattgcgggtgcaatcggagtttcaggtggaacgtctgttcaggatgggcaagttgctagaagtggtttggaagttctcaaggaatga

SEQ ID NO: 112239 - protein, 162 aa, Leptospira interrogans serovar Lai str. 56601
MYQKLWIITICFFVTFPTMSQNQPNFPDYGNPIHLEVAKKIALKAQSEAKKNGWKMVISIVDSGGNLVLLEKMDGAQFASIDISQGKAKCANNFRRSTKIMEETVAAGGIGLRILALPNVYPLEGGELILIDGKIAGAIGVSGGTSVQDGQVARSGLEVLKE

SEQ ID NO: 112240 - DNA, 399 bp, Pseudomonas putida KT2440
  CDS (1)..(399): transl_table=11
atgcttagcaagttcgttatcggccagaccgaaatcgcccgcgtactgaccgccgcccgccaggaagcccaggcccgacaatggagcgtgaccatcgccgtggtcgacgacggcggccacccactggccctggaacgcctggacggctgcgcgccggccagtgcctacatcgcgctggaaaaggcccgcaccgccgcactggggcgcaaagagacgcgggattatgaagagatggtcaatggtggccgtacggcattcgtgaccgcccccctgctgaccagccttgaaggtggcgtgccgctgcgggtggaaggccaggtggtgggcgccattggtgtatccggcgtcaaatccgaacaggatgcccaggtggccaaggcgggggctgctgccttgtag

SEQ ID NO: 112241 - protein, 132 aa, Pseudomonas putida KT2440
MLSKFVIGQTEIARVLTAARQEAQARQWSVTIAVVDDGGHPLALERLDGCAPASAYIALEKARTAALGRKETRDYEEMVNGGRTAFVTAPLLTSLEGGVPLRVEGQVVGAIGVSGVKSEQDAQVAKAGAAAL

SEQ ID NO: 112242 - DNA, 441 bp, Pseudomonas putida KT2440
  CDS (1)..(441): transl_table=11
atgaacgttcttaacctgaaagtcgccgtcagcctggtgaatgccgcactggtggcgggccgcaagatcaatgccgcgccgctgaccgtggcggtgctggatgccggcgggcacctgctggcgctgcagcgcgaggatggcgctagcctgattcggcctgaagtggccactggcaaagcctggggtgcgattgccctgggcaagggctcgcgcttgctggcgctggatgcgcagcagcggccggctttttttgccgcgttgaacgggatgggtgagcggccggtggtgccggcgccgggtggggtgctgattcgtgatcaggacggcaaggtgctgggtgccgtggggatcagcggcgatacgtcggatatcgacgagcagtgtgcgatcagtgcgatcgaggaggtggggctgcgggcagatgccggggtagcggcctaa

SEQ ID NO: 112243 - protein, 146 aa, Pseudomonas putida KT2440
MNVLNLKVAVSLVNAALVAGRKINAAPLTVAVLDAGGHLLALQREDGASLIRPEVATGKAWGAIALGKGSRLLALDAQQRPAFFAALNGMGERPVVPAPGGVLIRDQDGKVLGAVGISGDTSDIDEQCAISAIEEVGLRADAGVAA

SEQ ID NO: 112244 - DNA, 408 bp, Pseudomonas syringae pv. tomato str. DC3000
  CDS (1)..(408): transl_table=11
atgaaaatcaaagccgtccttacccagaccgaagtcagcctgatgctcggtgccgcgcgcgacgaggctcaggccaacggctgggcagtggccatcgctgtcgtggatgacggcggccacctgctggcattcgagcgcctggacgacgcctcgccgatcagcagttacatctcgattgaaaaggcccgcacctcggcactcggcaaacgcgagtccaagggctatgaagagatggtcaacggcgggcgcacggcatttctcagcgccccgttgctgacctcgctggagggcggcgtgccggtcatcgtcgacggtcaggtgatcggcgcagtcggcgtttccggcgttaaggccgatcaggacgcgcaagtggccaaggctggcgtcgctgcactgaatgcggactga

SEQ ID NO: 112245 - protein, 135 aa, Pseudomonas syringae pv. tomato str. DC3000
MKIKAVLTQTEVSLMLGAARDEAQANGWAVAIAVVDDGGHLLAFERLDDASPISSYISIEKARTSALGKRESKGYEEMVNGGRTAFLSAPLLTSLEGGVPVIVDGQVIGAVGVSGVKADQDAQVAKAGVAALNAD

SEQ ID NO: 112246 - DNA, 420 bp, Streptomyces avermitilis MA-4680
  CDS (1)..(420): transl_table=11
atgagcaccaccgctgtcaccccgctctccaccgaggacgcggaggtcctcgtctccgccgcccgccgggcagccgaggccgccggggtcacggtcagcatcaccgtcctcgacgcgggcgggcatctgcttgccttccgccgggatgaccgggccgtgctgatctcgggcgagaccagcacccgcaaggcgtacaccgcgctccagctgaacgcgtccaccgccgacctcgtcgaggcggtccagcccggcggcctcttccacaccctgcccaccgcgctcgaccggccgctgctcttcatcgcgggcggagtgccggtccaccgcgacggacgcctgatcggagcgctcggggtcggcggtggcgcaccggagcaggaccacggcttcgccgccgcggccgtgaaggcgctttcctga

SEQ ID NO: 112247 - protein, 139 aa, Streptomyces avermitilis MA-4680
MSTTAVTPLSTEDAEVLVSAARRAAEAAGVTVSITVLDAGGHLLAFRRDDRAVLISGETSTRKAYTALQLNASTADLVEAVQPGGLFHTLPTALDRPLLFIAGGVPVHRDGRLIGALGVGGGAPEQDHGFAAAAVKALS

SEQ ID NO: 112248 - DNA, 480 bp, Bordetella pertussis Tohama I
  CDS (1)..(480): transl_table=11
atgaaacagatctatcgattggaattggaagaagcacgcgtcatgatccaggccgcgatcgccaagtcggaggaaatcggcgtgctggaatcgatctgcatcgtcgatgacggcggctatcccatcgcgctggagcgcatgaatggcgcgcgcatcaccggtccgcagattgcctggaacaaggcgttcaccaccgccggccacaagcgctcgacgcaccttttcaacacgccgcccaacggcccggccttgccgggcaacgaagccttcggcatccagtggagcttcgagggcaagttcgccgtgttcgtgggcgggtttcccatcgtggtcgatgacgaggtcatcggcggcgtcggcctgagcggcggcaacggcgagcaggacaccaaggctggcgtggcggcgctgcaggcgctggccgacatgctggccgagcgcggcatgaaggtgatggtcgccgccgacatcaagaagtag

SEQ ID NO: 112249 - protein, 159 aa, Bordetella pertussis Tohama I
MKQIYRLELEEARVMIQAAIAKSEEIGVLESICIVDDGGYPIALERMNGARITGPQIAWNKAFTTAGHKRSTHLFNTPPNGPALPGNEAFGIQWSFEGKFAVFVGGFPIVVDDEVIGGVGLSGGNGEQDTKAGVAALQALADMLAERGMKVMVAADIKK

SEQ ID NO: 112250 - DNA, 408 bp, Bordetella bronchiseptica RB50
  CDS (1)..(408): transl_table=11
atgaaaaccaaacccgtgctggtcgccgacgatgtgaagaaaatcctggcggcggccgaagcgcatgcgctggccaacaagtgggcggtcaccatcgccgtcgtcgatgatggcggccacctgctgggtcaattgcggctcgacggcgcggcaccgatttccgcgcacatcgcgccggccaaggccggcacggccgcgctgggccgccgtgaatcgcgcgtctacgaggagatcatcaacaacggccgccaggctttcctgtcggcgccgctgctcgaagggatgctcgaaggcggcgtgcccgtgacggtggacggcgaagtcgtgggcgcggtgggcgtgtcgggcgtgaagtccagcgaggacgccgagatcgcccgcgccggcatcgccgcgctgggcctgtga

SEQ ID NO: 112251 - protein, 135 aa, Bordetella bronchiseptica RB50
MKTKPVLVADDVKKILAAAEAHALANKWAVTIAVVDDGGHLLGQLRLDGAAPISAHIAPAKAGTAALGRRESRVYEEIINNGRQAFLSAPLLEGMLEGGVPVTVDGEVVGAVGVSGVKSSEDAEIARAGIAALGL

SEQ ID NO: 112252 - DNA, 480 bp, Bordetella bronchiseptica RB50
  CDS (1)..(480): transl_table=11
atgaaacagatctatcgattggaattggaagaagcacgcgtcatgatccaggccgcgatcgccaagtcggaggaaatcggcgtgctggaatcgatctgcatcgtcgatgacggcggctatcccatcgcgctggagcgcatgaatggcgcgcgcatcaccggtccgcagattgcctggaacaaggcgttcaccgccgccggccacaagcgctcgacgcaccttttcaacacgccgcccaacggcccggccttgccgggcaacgaagccttcggcatccagtggagcttcgaaggcaagttcgccgtgttcgtgggcgggtttcccatcgtggtcgatgacgaggtcatcggcggcgtcggcctgagcggcggcaacggcgagcaggacaccaaggctggcgtggcggcgctgcaggcgctggccgacatgctggccgagcgcggcatgaaggtgatggtcgccgcggacatcaagaagtag

SEQ ID NO: 112253 - protein, 159 aa, Bordetella bronchiseptica RB50
MKQIYRLELEEARVMIQAAIAKSEEIGVLESICIVDDGGYPIALERMNGARITGPQIAWNKAFTAAGHKRSTHLFNTPPNGPALPGNEAFGIQWSFEGKFAVFVGGFPIVVDDEVIGGVGLSGGNGEQDTKAGVAALQALADMLAERGMKVMVAADIKK

SEQ ID NO: 112254 - DNA, 489 bp, Leptospira interrogans serovar Copenhageni str. Fiocruz L1-130
  CDS (1)..(489): transl_table=11
atgtatcagaagttatggatcataacgatttgtttttttgtgacgtttcctactatgagtcaaaatcaacccaattttcctgattatggaaatccgattcatttagaagtcgcaaaaaaaattgctctcaaagctcaatcagaagcgaagaagaacggatggaaaatggtgatttctatcgtagattctggaggaaatttagtgttattggaaaaaatggatggggctcaatttgcttctattgatatttcccaaggaaaagctaaatgtgcgaacaactttcgtagatctactaagataatggaagaaaccgttgcggctggtggaattggacttagaattttagctttgccgaacgtttatcctcttgaagggggagaattgattttgatcgacggaaaaattgcgggtgcaatcggagtttcaggtggaacgtctgttcaggatgggcaagttgctaaaagtggtttggaaattctcaaggaatga

SEQ ID NO: 112255 - protein, 162 aa, Leptospira interrogans serovar Copenhageni str. Fiocruz L1-130
MYQKLWIITICFFVTFPTMSQNQPNFPDYGNPIHLEVAKKIALKAQSEAKKNGWKMVISIVDSGGNLVLLEKMDGAQFASIDISQGKAKCANNFRRSTKIMEETVAAGGIGLRILALPNVYPLEGGELILIDGKIAGAIGVSGGTSVQDGQVAKSGLEILKE

SEQ ID NO: 112256 - DNA, 417 bp, Acinetobacter sp. ADP1
  CDS (1)..(417): transl_table=11
atgaaaaccaaacattatttaacactagcagatgctgaaattcttatgaatcgtgctgttgagctttctgcgcagcgtagtttcaatatgagtatttcgattgtagatgaagcaggcgctttgttgttaatgaagcgtatggatggtgcaacgccattaacagcacacctcagtcttgaaaaagccaaatgttctgcaatgagccgccgaccctctaaattttatgaagatattattcgtaatggtcaaatgggttttcttacccttgaaagtgttacaggaatgcttgaaggtggagagccaatcatgtatgaaggtcagttaattggagcgatgggcgtttcaggtgccaaagcatttgaagatgcggagattgcgcaaaaagccattcatgatttttttcagcaaatatcataa

SEQ ID NO: 112257 - protein, 138 aa, Acinetobacter sp. ADP1
MKTKHYLTLADAEILMNRAVELSAQRSFNMSISIVDEAGALLLMKRMDGATPLTAHLSLEKAKCSAMSRRPSKFYEDIIRNGQMGFLTLESVTGMLEGGEPIMYEGQLIGAMGVSGAKAFEDAEIAQKAIHDFFQQIS

SEQ ID NO: 112258 - DNA, 432 bp, Aeromonas punctata
  CDS (1)..(432): transl_table=11
atgacgaaatccattgccaccgcctcgatcaaccgcgaaaccgccgtcgccctcatcgacgcggcgatcgccgcggcacgtacaatcggcatcccggctgcggtcgccgtcgtcgacgccaccggtaacctgcgcgcgttcgagcgcactgatgacgcgccgtttctcaccgtcgatgttgccatcgacaaggcttggagttccgcctcgtttgggtaccccacccatgtctggaacgactatgtttcgaacgatccaaaagtggcgccgctggcctatcgcccccggatggtcgctgtcggcggaggctatccgatcctggaagacgggaagttgatcggcgggatcggcatctccggaggcaactatcagcaggatcaggatgcgtgcgtcgaggcactcacgaaaatcgggttcgagctgccagcctga

SEQ ID NO: 112259 - protein, 143 aa, Aeromonas punctata
MTKSIATASINRETAVALIDAAIAAARTIGIPAAVAVVDATGNLRAFERTDDAPFLTVDVAIDKAWSSASFGYPTHVWNDYVSNDPKVAPLAYRPRMVAVGGGYPILEDGKLIGGIGISGGNYQQDQDACVEALTKIGFELPA

SEQ ID NO: 112260 - DNA, 450 bp, Burkholderia mallei ATCC 23344
  CDS (1)..(450): transl_table=11
atgtcccccgaactcacgctcgagcgcgcgctgcgcatcgtcgaagcgggcgttgcgcacgccgcgcgcctgagcgccgcgggcgcggccgtcgcgatcgccgtggtcgacgcgggcgcgcatctcgccgcgttcgcgcggatggacgacgcgttcatcggcgcgatcgatctcgcgacgcgcaaggccggcacggccgcgcgcttccggatgccgagcgcgtcgctcggcgcgctgtcgggcgcgggcgggccggtccgctcgatcgagcacagcaacggcgggctcgtcacgttcggcggcggcctgccgctcgtcgacgcgcacgggcgctgcgtgggcgcggtcggcgtgtcgggcggcacggtcgacgacgacgcggcgatcgcgcaggtgtgcgtcgacgctttcatcactcttctgaacgcagtacaaggagcaaggacatga

SEQ ID NO: 112261 - protein, 149 aa, Burkholderia mallei ATCC 23344
MSPELTLERALRIVEAGVAHAARLSAAGAAVAIAVVDAGAHLAAFARMDDAFIGAIDLATRKAGTAARFRMPSASLGALSGAGGPVRSIEHSNGGLVTFGGGLPLVDAHGRCVGAVGVSGGTVDDDAAIAQVCVDAFITLLNAVQGART

SEQ ID NO: 112262 - DNA, 411 bp, Burkholderia pseudomallei K96243
  CDS (1)..(411): transl_table=11
atgagaaccaaacccgttctgacgagcgacgacgtgaacaagatggcggccgccgccgaggcgttcgcggccgcgaatcagtgggccgtgacggtcgcgatcttcgacgacggcgcgcatctgctgcatcttcaccggatggacggcgccgcgccgagcaccgtcgagatggcgatcggcaagggccgtacggccgcgctcggccgtcgcgagagcaaggtctacgaagacatcgtgctgcaggggcgcatatcgttcctgagcgtgcctctcgtcggcctggtcgagggcggcgtgccgatcgtcgtcgacggcgagacggtgggggcgatcggcgtgtcgggcgtgaagtccgagcaggatgcggccgtcgcccgcgcggggatcgccgcgttgaccgacgccggctga

SEQ ID NO: 112263 - protein, 136 aa, Burkholderia pseudomallei K96243
MRTKPVLTSDDVNKMAAAAEAFAAANQWAVTVAIFDDGAHLLHLHRMDGAAPSTVEMAIGKGRTAALGRRESKVYEDIVLQGRISFLSVPLVGLVEGGVPIVVDGETVGAIGVSGVKSEQDAAVARAGIAALTDAG

SEQ ID NO: 112264 - DNA, 447 bp, Azoarcus sp. EbN1
  CDS (1)..(447): transl_table=11
atgaaggacatcaaggcactgacgctcgacgacgtcaaacgtatcgccgcggcggccgaagccgaagccgtcgcgaacggctgggcggtgagcatcgccgtgtgcgacgcgggcggtcatccgctgtggctgcagcgcatggacgccgcgccgctgatgagcgccgtcgtcgctcccgaaaaagcccgcacctgcgtgatgaccggcaagccgagcaaagctttcgaagacatggtcaacagcggccgctacgccgcgctcgcgatgccggtcgtgccgctcgaaggcggcgagccgatcgtcatcgacggcaacgtgatcggcgcagtcggggtgtccggcgtcaaggccggcgaggacgcgcaagtcgcccgcgcggggcttgcggcgatcgccgcggatctcgcggagccggcacgcggcgcagtgcgggtgcaaaaggcgtga

SEQ ID NO: 112265 - protein, 148 aa, Azoarcus sp. EbN1
MKDIKALTLDDVKRIAAAAEAEAVANGWAVSIAVCDAGGHPLWLQRMDAAPLMSAVVAPEKARTCVMTGKPSKAFEDMVNSGRYAALAMPVVPLEGGEPIVIDGNVIGAVGVSGVKAGEDAQVARAGLAAIAADLAEPARGAVRVQKA

SEQ ID NO: 112266 - DNA, 426 bp, Silicibacter pomeroyi DSS-3
  CDS (1)..(426): transl_table=11
atggaaaacacgatcaagacccgggctttgacgcacaagggcactatgaaaatgctcgaggctgccattgccgaggccgaaaagatcggccagccgcagtgcatcgtcattgtcgatgcaagcggcgaactgctggccgaggtgcgcatgtccggcgccaagttcctcagccggaaatcggcgcggagcaaggcgctgacggcttcctcgattggcgcgccgaccacaaacattcccgaagcggtccgccccttcatcgcaagcgcgacgggaggcgatgtcaccgggttgcctggcgggcttccgattatcagcgagtcaaccttgctgggcggcatcggcgtcggctctggcagtggcaatcaggatatcgccgttgccaaggcggcattggctgcaatcggggcggaaacggacttcgcctaa

SEQ ID NO: 112267 - protein, 141 aa, Silicibacter pomeroyi DSS-3
MENTIKTRALTHKGTMKMLEAAIAEAEKIGQPQCIVIVDASGELLAEVRMSGAKFLSRKSARSKALTASSIGAPTTNIPEAVRPFIASATGGDVTGLPGGLPIISESTLLGGIGVGSGSGNQDIAVAKAALAAIGAETDFA

SEQ ID NO: 112268 - DNA, 426 bp, Silicibacter pomeroyi DSS-3
  CDS (1)..(426): transl_table=11
atggcaatcagtttgcggcgtgcgcggatgatcatccgcaaggctctggagaaggggcgcgagatgcagctcaagccgctgtcggtggtggtgctggatgcgggggggcatgtaatcgcgttcgagcgcgaggatggggcggcgccgggtcgcttcggtatcgcgcagggcaaggcttatggatcggtcatgctgggcatggcggggaccgcgcaaatggcgcgggccgaggcgcaggcctatttcatggcggcggtcaacggtgtctatggcggcaaggtgatcccggtgccgggcggcgtgctggtgcgggacaagaagggcgcggtgatcggggcggtgggcgtgacgggcgacacctcggacaacgatgcgattgcggcaatgtccgggatcgacgccgccgggcttgccggtgaaatctga

SEQ ID NO: 112269 - protein, 141 aa, Silicibacter pomeroyi DSS-3
MAISLRRARMIIRKALEKGREMQLKPLSVVVLDAGGHVIAFEREDGAAPGRFGIAQGKAYGSVMLGMAGTAQMARAEAQAYFMAAVNGVYGGKVIPVPGGVLVRDKKGAVIGAVGVTGDTSDNDAIAAMSGIDAAGLAGEI

SEQ ID NO: 112270 - DNA, 408 bp, Pseudomonas syringae pv. syringae B728a
  CDS (1)..(408): transl_table=11
atgaagatcaaagccgtcctgacccagaccgaagtcagcctgatgctcggcaccgcacgcgaagaggcgcaggccaatggctgggccgtgtccatcgccgtcgttgatgacggcggccatttgctggcattcgagagactggacgacgccgccgccatcagcagctacatcgcgattgaaaaggcgcgcacctcggcactcggcaaacgtgaatccaaggggtacgaagagatggtcaatggcgggcgcactgcattcctgagtgctccgctgctgacgtcgctggaaggcggtgtgccggtcatcgtcgacggccaggtcatcggtgcgctgggggtttcaggcgtgaaggccgaacaggatgctcagatcgccagggccggtgtcgcagcgcttgacgccgactga

SEQ ID NO: 112271 - protein, 135 aa, Pseudomonas syringae pv. syringae B728a
MKIKAVLTQTEVSLMLGTAREEAQANGWAVSIAVVDDGGHLLAFERLDDAAAISSYIAIEKARTSALGKRESKGYEEMVNGGRTAFLSAPLLTSLEGGVPVIVDGQVIGALGVSGVKAEQDAQIARAGVAALDAD

SEQ ID NO: 112272 - DNA, 408 bp, Pseudomonas fluorescens Pf-5
  CDS (1)..(408): transl_table=11
atgcagcacaaagccgtactgggtcaagacgaagcccgccgcatcctcgccgccgcccgcgccgaggcccagcgccaccggtgggcggtgagcatcgccgtggtcgacgacggcggccatcccctggccctggaacgcctcgacggctgcgcgccgatcagtgcctatatcgccaccgaaaaggcccgcaccgcggccctcggccggcgcgaaaccaaggcctacgaggacatggtcaatggcgggcgcagcgcctttctctcggcgccgctgctcacctccctggaaggcggcgtgccgatccgcgtcggcggccaggtggtcggcgcggtgggggtttccggggtcaagtccggtgaagacgcccaggtggcactggctggcgccgcgtgcctggagggcgattga

SEQ ID NO: 112273 - protein, 135 aa, Pseudomonas fluorescens Pf-5
MQHKAVLGQDEARRILAAARAEAQRHRWAVSIAVVDDGGHPLALERLDGCAPISAYIATEKARTAALGRRETKAYEDMVNGGRSAFLSAPLLTSLEGGVPIRVGGQVVGAVGVSGVKSGEDAQVALAGAACLEGD

SEQ ID NO: 112274 - DNA, 498 bp, Pseudomonas fluorescens Pf-5
  CDS (1)..(498): transl_table=11
atgcgcgtcaaacccctgtttctggcaatgatcacctgctgcgtgctgcagaccgcggccgccgaggacagccaacccgtcattgcccacaaggcaatccttaccctggacaacgcccagcgcctgctcagggccgcccagcaaaccgcccaggccaagggctggccctgcgccgtggcaatcgtcgacgacggcggctggccgatactgggcgcgcgcatggacggcgccccagtggtggccggagtcgagctggcccagggcaaggcacgcacctcggcattgttcaagcggccctccggggatctggaaaacgccgtcaatggcggccgccccgccgccctcagcgccggcctggtgatgatgaaaggcgcccagccgatcatcgtcgacggccaggtgatcggcgccatcggggtcagtgccgacaccccggcccacgacgatgaaatcgccctggccgccctcgccaccctcagtcggcaggccacgcaatga

SEQ ID NO: 112275 - protein, 165 aa, Pseudomonas fluorescens Pf-5
MRVKPLFLAMITCCVLQTAAAEDSQPVIAHKAILTLDNAQRLLRAAQQTAQAKGWPCAVAIVDDGGWPILGARMDGAPVVAGVELAQGKARTSALFKRPSGDLENAVNGGRPAALSAGLVMMKGAQPIIVDGQVIGAIGVSADTPAHDDEIALAALATLSRQATQ

SEQ ID NO: 112276 - DNA, 432 bp, Colwellia psychrerythraea 34H
  CDS (1)..(432): transl_table=11
atgttaacaataaatagactaaaccaaacggaagcaaaaacgataattgacggcgcggtgaataaagccaatgaacttggcgtgcctatgtgcattgccgtggtagatgagtcaggtaatttaattgcctttgaacgcatggatggcggtaaagtacacagtattaccatttcacaagataaagcttttaccgcggcatcagcgcgtaagggtacccatgaatttaataaggcctgcattccaggacataaaaataatttatttggcattcataccgctctaggtggccgtatgtgcattgttggcggtggtttgcccatcacctttaatggcagcgttgttggtggtattggcgtgagttcaggttcacccgagcaagatttaggctgcgcgcaagcaggtgttgatagttttagtaaaacctatggctaa

SEQ ID NO: 112277 - protein, 143 aa, Colwellia psychrerythraea 34H
MLTINRLNQTEAKTIIDGAVNKANELGVPMCIAVVDESGNLIAFERMDGGKVHSITISQDKAFTAASARKGTHEFNKACIPGHKNNLFGIHTALGGRMCIVGGGLPITFNGSVVGGIGVSSGSPEQDLGCAQAGVDSFSKTYG

SEQ ID NO: 112278 - DNA, 444 bp, Dechloromonas aromatica RCB
  CDS (1)..(444): transl_table=11
gtgagttccaagaagggagggctttgtgtcatgcagggcaatattacgcaacgcgcggctcagctcatcgcagtgggggccattgacgaggcggagcgtattggtgtcagtatcaatgtcgctgtcgttgatcgtgctggcaccctgatggcttttctgagaatgccagaagcgtctcttcattcgatggatacggcgatcgacaaagcttataccgccgcaagttttcgatttccaactgcccagtgggacgaagtgcttgcaggattctcggagaacgttcagcgaggaattttgcagcgcccgcgcttggttgcatttggcggtggcttgccgatccaggtcgatgggcaggttatcggtgcaatcggtgtttccggtgcgaatgtcgaacaggatgagcgctgtgccttggccgggttgagtgtggtcgaggtcttttga

SEQ ID NO: 112279 - protein, 147 aa, Dechloromonas aromatica RCB
MSSKKGGLCVMQGNITQRAAQLIAVGAIDEAERIGVSINVAVVDRAGTLMAFLRMPEASLHSMDTAIDKAYTAASFRFPTAQWDEVLAGFSENVQRGILQRPRLVAFGGGLPIQVDGQVIGAIGVSGANVEQDERCALAGLSVVEVF

SEQ ID NO: 112280 - DNA, 429 bp, Dechloromonas aromatica RCB
  CDS (1)..(429): transl_table=11
atgcaagtcgccgtcagcacgccggggatcactgccgaggcagcctccgcagcttgtgcggcggcggttgctttcgcggcggccaagggatggaagatcaacgtcgcggtcgtcgaccgcggcggcaacctgatggccttcctgcgtcagccgggggcgttcatccactcgatcaatatcgccatcgacaaggcctacacctcggccagcttcggcttcccgaccaaggcctggatgggggcgattggccacgacgacgggatgaaattcggcttctccaaccagccgcgcctgatcgttttcggcggcggcctgccggtgcccggcgagggcagcgagtggatcggcggtatcggtgtttccggcgcctcggagtccgaggacgaagagtgtgccaaggctgggctggcggccatcgggctggcctga

SEQ ID NO: 112281 - protein, 142 aa, Dechloromonas aromatica RCB
MQVAVSTPGITAEAASAACAAAVAFAAAKGWKINVAVVDRGGNLMAFLRQPGAFIHSINIAIDKAYTSASFGFPTKAWMGAIGHDDGMKFGFSNQPRLIVFGGGLPVPGEGSEWIGGIGVSGASESEDEECAKAGLAAIGLA

SEQ ID NO: 112282 - DNA, 399 bp, Thermobifida fusca YX
  CDS (1)..(399): transl_table=11
gtgagtgtgacgttggcggaggcccgccgggtcatcgaagctggcgaggccaaggcagccgagatcgggcagccgatgaacatcgcggtcgtggacgcgggcggcaacctggtggcgcatgtccggatggacggcgcgtggatcggcagtatcgacatttcgatcaacaaggcgtacacgtcgcgagcgttcgacatctccaccaaggagctggccgagcactctcagagcggagggcagttcttcggcatccacgcctccaacgggggccgcgtgatgatcttcgcgggcggggtcccgctgcggcgcaacggcacggtcgtgggtgcggtcggggtgagcggcggaaccggggagcaggaccaggcggtggcggaggccgccgcagccgcgttctga

SEQ ID NO: 112283 - protein, 132 aa, Thermobifida fusca YX
MSVTLAEARRVIEAGEAKAAEIGQPMNIAVVDAGGNLVAHVRMDGAWIGSIDISINKAYTSRAFDISTKELAEHSQSGGQFFGIHASNGGRVMIFAGGVPLRRNGTVVGAVGVSGGTGEQDQAVAEAAAAAF

SEQ ID NO: 112284 - DNA, 408 bp, Ralstonia eutropha JMP134
  CDS (1)..(408): transl_table=11
atgcagcaaaagaccgtgctgacggcagaagacgtgaagaagatcatggccgcagcagaggccgaggcaaagacccatcagtgggctgtctcgatcgtggtggtggatgatggtggccatatgctggccatgcagcgcctggatggcgccgcgccgatctcggcctacatcgccacggaaaaggcccgcacgtcgtcgctgggccgccgcgagtcgaaggtctacgaagacatgatcaacaacggccgctattcgttcatgactgccccgacgctgcagggcatgctggagggcggcgtgcctatcgtccacaacgaccaggttgttggcgcagtgggcgtctccggtgtcaagtcgacggaagacgcgcagatcgcccgtgccggcattgctgcgctgggtctctga

SEQ ID NO: 112285 - protein, 135 aa, Ralstonia eutropha JMP134
MQQKTVLTAEDVKKIMAAAEAEAKTHQWAVSIVVVDDGGHMLAMQRLDGAAPISAYIATEKARTSSLGRRESKVYEDMINNGRYSFMTAPTLQGMLEGGVPIVHNDQVVGAVGVSGVKSTEDAQIARAGIAALGL

SEQ ID NO: 112286 - DNA, 480 bp, Ralstonia eutropha JMP134
  CDS (1)..(480): transl_table=11
atgaagaaagccatcaagctggaactgcgcgaagcgcgccacatggttgccgcagccattcgccgttccgaagaaatcggcgtgctcgagtcgatctgcgtggttgacgagggcggctatccgctcgtgctggagcgcatggacggcgcgcgtatcaccgggccgcagattgcgtggaacaaggcgttcaccgccgcgggccacaagcgttcgacacacctgttcaccacgccgccgaatgggccggcattgcccggcaacgaggcgttcggcatccagtggagtttcgaaggcaagttcgccgcgttcgtgggcggcttcccgatcgttgtgaatgatgaagtgatcggcggcatcggcctgtccggcggcaacggggagcaggacacgcaggccggcgtggcggcgctgcaggcgctggcggaactgctggcgccgcaggacctgaaggtcctggtgcaggccgatatcaagaagtaa

SEQ ID NO: 112287 - protein, 159 aa, Ralstonia eutropha JMP134
MKKAIKLELREARHMVAAAIRRSEEIGVLESICVVDEGGYPLVLERMDGARITGPQIAWNKAFTAAGHKRSTHLFTTPPNGPALPGNEAFGIQWSFEGKFAAFVGGFPIVVNDEVIGGIGLSGGNGEQDTQAGVAALQALAELLAPQDLKVLVQADIKK

SEQ ID NO: 112288 - DNA, 450 bp, Ralstonia eutropha JMP134
  CDS (1)..(450): transl_table=11
atgtccctgaccgcttccgacgcgctctgtgtgagcgaacctcgtccccatatcacgctgcctgccgcacaggccgcggtgacggccgcggtggcggcggcagcggagcagggcctgcgcatcaacgtggccgtggtggatggcggtggcgcgctggtggcctttgcgcgcatgacgggtgccttcctgcactcgatcgacattgccatcgacaaggcgcgcacgtcggccagcttcggctttcccactgcgcagtggggcgagttgcttgccggtgacgagccgttgcgtcttggcctggcgactcgcccgggactggtgatcttcggcgggggtctgccgatgcgcgagaagggcgaggtgatcggcggcatcggcgtgtccggcggctcggccgcacaggacgaagcttgtgcacgcgccggcctgcacgccatcggcctgcaatga

SEQ ID NO: 112289 - protein, 149 aa, Ralstonia eutropha JMP134
MSLTASDALCVSEPRPHITLPAAQAAVTAAVAAAAEQGLRINVAVVDGGGALVAFARMTGAFLHSIDIAIDKARTSASFGFPTAQWGELLAGDEPLRLGLATRPGLVIFGGGLPMREKGEVIGGIGVSGGSAAQDEACARAGLHAIGLQ

SEQ ID NO: 112290 - DNA, 405 bp, Burkholderia sp. 383
  CDS (1)..(405): transl_table=11
atgcagacgaaacccgaactcgaactcgccgatgccgaccgcatgctcgccgccgcccgcgcggaagcggaacgccacggctgggccgtatcgatcgccgtcgtcgacgacggcggccacctgctcgcgttcgcgcggctgaacggcgcatcgccggccagcacctatatcgcgcaggacaaggcgcgcgcggcggcgctcggccggcgcgagacgaaggcgtatgaggatatgatcaacggtggccgcaccgcgtttctcagcgtgccgctgacggggttgctcgaaggcggcgtgccggtcacggtgggcggccggatcgcgggcgcgatcggcgtgtctggcgtaaagtccgaacaggacgcgcagatcgcccgcgccggcacacaaagcgtcgcggtataa

SEQ ID NO: 112291 - protein, 134 aa, Burkholderia sp. 383
MQTKPELELADADRMLAAARAEAERHGWAVSIAVVDDGGHLLAFARLNGASPASTYIAQDKARAAALGRRETKAYEDMINGGRTAFLSVPLTGLLEGGVPVTVGGRIAGAIGVSGVKSEQDAQIARAGTQSVAV

SEQ ID NO: 112292 - DNA, 435 bp, Saccharophagus degradans 2-40
  CDS (1)..(435): transl_table=11
atgagagggttaagtttgcggcaggcgctaacggcaatagattgtgcattgggttatgcgcagcaacaatcattaccaccactaacaatagtggtattggatgcaggcgcgcatgtaaaagccagtgccagtgccgatggctcgggtacacaacgctatgaaattgctttgggtaaagcatctgctgctttaggtatggggtttggtacacgaacgtttagcgaattagtaaaaaagggaacactacctgcagaatttagtagcgcgattaatggcgcgacccatgggcgatttataccgctacctggaggcgtattaatattcgaacaagggcaggttgtgggcgcggtaggtatttctggggcgagttccaatgccgatgaacaggtggcaattgctgctatagagcagtgtggtttaaccgcaggtctgtaa

SEQ ID NO: 112293 - protein, 144 aa, Saccharophagus degradans 2-40
MRGLSLRQALTAIDCALGYAQQQSLPPLTIVVLDAGAHVKASASADGSGTQRYEIALGKASAALGMGFGTRTFSELVKKGTLPAEFSSAINGATHGRFIPLPGGVLIFEQGQVVGAVGISGASSNADEQVAIAAIEQCGLTAGL

SEQ ID NO: 112294 - DNA, 435 bp, Methylobacillus flagellatus KT
  CDS (1)..(435): transl_table=11
atgcatgtcaccatcgagcaagcgaacatcatcatagaacaggccacgcgcaaggccgaggccatcggcgtgaaaagctgtattgccgtgctggactcgggcgccaacctcaaggcgttctcccgcatggacgacgcctgggtgggcagcatagacgtcgccatcaagaaggccaagactgcctgctttttcgccatgccttcgggggatatcggccaattgtcgcagccgaaccagcccttgtatgggattgagcattccaatgaaggactcatcacctttccgggcggcctgcctatcgtggacgacgaaggcgtgttggtgggcgcgataggcgtcagcggcgacacggtggaaaacgaccatatcgtggccaaggccggcgccgaggcggcaggcagttgcgacctgcccaagcatccttggcgcacataa

SEQ ID NO: 112295 - protein, 144 aa, Methylobacillus flagellatus KT
MHVTIEQANIIIEQATRKAEAIGVKSCIAVLDSGANLKAFSRMDDAWVGSIDVAIKKAKTACFFAMPSGDIGQLSQPNQPLYGIEHSNEGLITFPGGLPIVDDEGVLVGAIGVSGDTVENDHIVAKAGAEAAGSCDLPKHPWRT

SEQ ID NO: 112296 - DNA, 435 bp, Burkholderia xenovorans LB400
  CDS (1)..(435): transl_table=11
atgcttgaaatccaacgactttcggtcgccgaagcggccatcctgctcgaaggcgcgcgcctgaaagccactgaacttgccattccgatgtgcaccgctgtgaccgacgaatcgggccacctcatcacgttcgagcggatggacggcggcaagatcagcagtatcagcatcgcgatcgacaaagcgttcacgggcgctgtcgcgcgcaagggcacgcacgtctacaaccagctctgcgtgccgggcaagggcacgttcggtatccacgtcacgaacggcgggcacttcagcatcatcggcggcggtctgccggtgacggtgaacggcgcgatcgtcggcggcgtgggtgtgagttcaggaaccgcggacgaagacctgatcgtggccgaagcggccgtggcctggttccgcgaacggaccggcttcgcggagtaa

SEQ ID NO: 112297 - protein, 144 aa, Burkholderia xenovorans LB400
MLEIQRLSVAEAAILLEGARLKATELAIPMCTAVTDESGHLITFERMDGGKISSISIAIDKAFTGAVARKGTHVYNQLCVPGKGTFGIHVTNGGHFSIIGGGLPVTVNGAIVGGVGVSSGTADEDLIVAEAAVAWFRERTGFAE

SEQ ID NO: 112298 - DNA, 405 bp, Burkholderia xenovorans LB400
  CDS (1)..(405): transl_table=11
atgctgagcaaacctgtgttgacccttgccgaaacgacccgcattctcgaagccgcccgcgcggaagccgagaagaaccagtgggccgtcgccatcgtggtggtcgacgacggcggtcacccgctcggactgctgcgtctggacggcagcgcgccggccagctcgtacatcgcgaccgaaaaggcccgcacttcggcgatcggccgccgtgagaccaagctatacgaagacatgatcaacaacggccgcaccgcgttcctgagcgcaccgctgcaaggcacgctggaaggcggcgtgccggtgatcgtcgagggccaggtggtcggcgcggtcggtgtgtcgggcgtcaagtcggatcaggacgcgcagatcgccaaggcggggattcaggctatcgccgcttga

SEQ ID NO: 112299 - protein, 134 aa, Burkholderia xenovorans LB400
MLSKPVLTLAETTRILEAARAEAEKNQWAVAIVVVDDGGHPLGLLRLDGSAPASSYIATEKARTSAIGRRETKLYEDMINNGRTAFLSAPLQGTLEGGVPVIVEGQVVGAVGVSGVKSDQDAQIAKAGIQAIAA

SEQ ID NO: 112300 - DNA, 480 bp, Burkholderia xenovorans LB400
  CDS (1)..(480): transl_table=11
atgaagagttttttcaagcttgagctgtccgaggcgcgcgcgatggcgcgcgccgccctggagaaagcgaaagcgatcaacgtggccgagtcggtctgcatcgtcgatgacggcgggtatccgatcgtgctggagcgggccgacgacgcgcgcatcaccggaccccagatcgcgtggaacaaggcgttcacggcggcgggccataagcgctcgacccatctctttaccaaggcgcctcacgggcccgcattgccgggcaacgaggcgtttggcattcagctgagtttcgaggggcgctttgccgcgtttgtcggaggctttccgatcgtggtcgacgatcaggtgattggcggcgtgggtctgagcggcggcaacggcgagcaggacacgcagtgcggacttgcggcgctgcaggccttgcacgatctgctttcggccagcggacgtcgcgtcctcgtggaagccgacatcaagaagtaa

SEQ ID NO: 112301 - protein, 159 aa, Burkholderia xenovorans LB400
MKSFFKLELSEARAMARAALEKAKAINVAESVCIVDDGGYPIVLERADDARITGPQIAWNKAFTAAGHKRSTHLFTKAPHGPALPGNEAFGIQLSFEGRFAAFVGGFPIVVDDQVIGGVGLSGGNGEQDTQCGLAALQALHDLLSASGRRVLVEADIKK

SEQ ID NO: 112302 - DNA, 450 bp, Ralstonia metallidurans CH34
  CDS (1)..(450): transl_table=11
atgactcaggctgactcacttcatagcgtcgaggcgcggctgatcaactggcctgcggctaaccgcgtcgtcgaggcagctgcgctgcacgcgcagcgcctcggcgtatgcgtgaacatcgcggtggtcgatgtggcggggaatcttgccgcgtttctgcgcatgcctggagcgccgttgcactccatcgagatcgccatcgacaaggcatacacggcagccagtttcggcttaccgaccagtcggtggagtgaggccttgctgagtcattccgaagcggtccgccaaggcatcgtgcgaaggccccgcttcatcgccttcggcggtggtttgccgattgttgaaagtggccatcgcatcgggggtattggcgtgtctggcggtaccgaagagcaggacgagcactgtgcgcaagccggattgagcctgctaggtctaactcaaacctga

SEQ ID NO: 112303 - protein, 149 aa, Ralstonia metallidurans CH34
MTQADSLHSVEARLINWPAANRVVEAAALHAQRLGVCVNIAVVDVAGNLAAFLRMPGAPLHSIEIAIDKAYTAASFGLPTSRWSEALLSHSEAVRQGIVRRPRFIAFGGGLPIVESGHRIGGIGVSGGTEEQDEHCAQAGLSLLGLTQT

SEQ ID NO: 112304 - DNA, 408 bp, Ralstonia metallidurans CH34
  CDS (1)..(408): transl_table=11
atgcagcaaaaaaccgtactgacggcagatgacgtgaagaaggtgatggccgctgccgaggccgaagccctggccaacaactgggccgtcacgattgtggtcgtcgatgacggtggtcatccgctggcaatgcagcgtttggatggcgtagcgccgatctcggcctacatcgccacggagaaggcgcgcaccgcatcgctgggtcgccgtgaatccaaaatctacgaagacatgatcaacaatggccgctactcgttcatgactgccccggtactgaacggcatgctggagggcggtgtgcctatcgtcgccaatggccaggtagtgggcgcggttggtgtgtcgggcgtgaagtcgaccgaagacgcacagatcgcacgcgctggtattgcttcgctgggcctctga

SEQ ID NO: 112305 - protein, 135 aa, Ralstonia metallidurans CH34
MQQKTVLTADDVKKVMAAAEAEALANNWAVTIVVVDDGGHPLAMQRLDGVAPISAYIATEKARTASLGRRESKIYEDMINNGRYSFMTAPVLNGMLEGGVPIVANGQVVGAVGVSGVKSTEDAQIARAGIASLGL

SEQ ID NO: 112306 - DNA, 480 bp, Ralstonia metallidurans CH34
  CDS (1)..(480): transl_table=11
atgaagaaagccatcaagctcgagttgaaggaagcccgccacatggtggccgcggccattcgcaaggccgaggaaatcggcgtgctggaatccatctgcatcgtcgacgacggcggctacccactgctgctagaacgcatggacggcgcccgcatcaccggaccgcagatcgcctggaacaaggccttcacggccgccggccacaagcgttcgacccacctgttcaatacgccgcccaacggccccgcgctgcccggcaatgaggccttcggcatccagtggagcttcgacggcaagtttgccgtgttcgtgggcggctacccgatcgtggtcaatggcgaggtgatcggcggcgtgggcctgtccggcggtaacggcgagcaagacaccgcgtgcggcgtggccgcgctcgaagcgttgcgcgacctgctggcggcggaagacctgaccgtgctggcccaggccgatatcaagaagtaa

SEQ ID NO: 112307 - protein, 159 aa, Ralstonia metallidurans CH34
MKKAIKLELKEARHMVAAAIRKAEEIGVLESICIVDDGGYPLLLERMDGARITGPQIAWNKAFTAAGHKRSTHLFNTPPNGPALPGNEAFGIQWSFDGKFAVFVGGYPIVVNGEVIGGVGLSGGNGEQDTACGVAALEALRDLLAAEDLTVLAQADIKK

SEQ ID NO: 112308 - DNA, 402 bp, Acidobacteria bacterium Ellin345
  CDS (1)..(402): transl_table=11
atgtccgcagtgaaattagaggatgctcgccgagtgatcggcgcggcggagaagaaggccaaagaaattggccaaccgatgaatattgcagtggcagacgagggcggcaacatcgtggcgcatgtgcgcatggacaacgcgtggatcggcagcatcgatatctcgatgaagaaggcctatacgtcgcgcgcgttcgatatcgagacgaaagacctggcaacacattcgcagtccggcgggcagttcttcggaattcacgcgtcgaacgacgggaaaatcatgatcttcgccggcggcattccgctgaagcgcgatggaaaagtggtaggcgcgattggcgtgagcggtggatcgggtgaccaggaccacgcagtggcgatggccggtgcagcagcgtactga

SEQ ID NO: 112309 - protein, 133 aa, Acidobacteria bacterium Ellin345
MSAVKLEDARRVIGAAEKKAKEIGQPMNIAVADEGGNIVAHVRMDNAWIGSIDISMKKAYTSRAFDIETKDLATHSQSGGQFFGIHASNDGKIMIFAGGIPLKRDGKVVGAIGVSGGSGDQDHAVAMAGAAAY

SEQ ID NO: 112310 - DNA, 498 bp, Acidobacteria bacterium Ellin345
  CDS (1)..(498): transl_table=11
atggctagcaatgaatcggcaaccgttatggaagcacaaccctcgacgaatccgctcgatgctatccccgaccaaatccccttcgatattccgtacggcagcccgatatcgcttgaccgagcgctggcagtgattaacgctgccgtcgcagaagcgaagaagcggaattggaaaatgaatatcgccgtagtcgattccggcggaaatctcgtcgcgtttcaacgcatggatggagcgatgctggcttcaattcaaattgccgaacacaaagcacgagccggtgcgactttccgccgtgaaacaaaggtgtttgaggacggcatccagttgatgcacctcaactacctgctcgcatttgacggagtgattgcgtctcgcggcggcattccactggtcgagcatggtgcgatcatcggcgccatcggcagttccggcggcacggattcccaggatgaagttgtcagcaaagcaggagcggcggtaatcaaccgaacctag

SEQ ID NO: 112311 - protein, 165 aa, Acidobacteria bacterium Ellin345
MASNESATVMEAQPSTNPLDAIPDQIPFDIPYGSPISLDRALAVINAAVAEAKKRNWKMNIAVVDSGGNLVAFQRMDGAMLASIQIAEHKARAGATFRRETKVFEDGIQLMHLNYLLAFDGVIASRGGIPLVEHGAIIGAIGSSGGTDSQDEVVSKAGAAVINRT

SEQ ID NO: 112312 - DNA, 447 bp, Myxococcus xanthus DK 1622
  CDS (1)..(447): transl_table=11
ttgggtggcggaggcgtcctgcgcgtcgccaacctcactcaggagtgttccatggtccgtctggaagacgcgcgtcccctcatcgccgcagccgagaagaaggctcaggaactggggcagcccatgaacatcgctgtcgcggacgaaggcggcaatctcgtcgcgcacgtgcgcatggatggggcgtggctgggcagcatcgacatctccatcaagaaggcattcacttcgcgtgccttcgatatcaccacgcaggaactggcaaagaacgcccaacccggtgggcagttctacggcatccacgcgtccaacgacggaagggtgatgatcttcgcgggcggcatcccgctgaagaagaatggcaaggtcgtgggggctgtcggcgtcagcgaaggctctggcgaccagaaccatgcggacgccaccgcgggcgcgtccgctttctag

SEQ ID NO: 112313 - protein, 148 aa, Myxococcus xanthus DK 1622
MGGGGVLRVANLTQECSMVRLEDARPLIAAAEKKAQELGQPMNIAVADEGGNLVAHVRMDGAWLGSIDISIKKAFTSRAFDITTQELAKNAQPGGQFYGIHASNDGRVMIFAGGIPLKKNGKVVGAVGVSEGSGDQNHADATAGASAF

SEQ ID NO: 112314 - DNA, 414 bp, Rhodococcus sp. RHA1
  CDS (1)..(414): transl_table=11
atgacagtgaaccagacctcggtgtccctcgacgatgcgcagcgggtgatcgccgccgggcaggccaaagctgacgagatcgagtcgccgtcgaacattgcggttgtcgatgccggcggcaacctcgtggcccacgtgcggatggacggtgcctggatcgccagcatcgacatctcgatcagcaaggcgttcaccgcgcgggcgctggacatctcgaccgaggacctcgcggccaacgcgggtccgggcgggcagttctacgggatacacgtgtccaacggtgggcgcaccatgatcttcaccggcggtgtgccgctgcggcacaacggccaggtcgtcggggcggtcggcgtcagcggcggcaccggggagcaggacaagaccgtcgccgaggcggccgcagcggcgctgtga

SEQ ID NO: 112315 - protein, 137 aa, Rhodococcus sp. RHA1
MTVNQTSVSLDDAQRVIAAGQAKADEIESPSNIAVVDAGGNLVAHVRMDGAWIASIDISISKAFTARALDISTEDLAANAGPGGQFYGIHVSNGGRTMIFTGGVPLRHNGQVVGAVGVSGGTGEQDKTVAEAAAAAL

SEQ ID NO: 112316 - DNA, 447 bp, Rhodococcus sp. RHA1
  CDS (1)..(447): transl_table=11
atgcatcaggttcaccgaatcaccctcgacgacgcactcccactgctcgccgcggggcgcgcgaaggccgaggaaatcggcgtcaagcagaccctgtgcgtctgcgacgacggcggcaacgtactggccctgcaccgactgccgggagcgcgcctcaccggcgtcgacatcgcgatcgccaaagcgttcaccgctgccggccacgagcgggcaacacacctgttcaacgaggctcccgacggtccggcgttgcccgggaacgaggcattcggcatcagccagatgctgccgggcaagttcgcggtgttcgtcggcggatttcccctcgtcttcgacggccagatcgtcggcggcataggcatcagcggcggaaacggcaagcaggacaaagccgtcggagctgcgatgctggccgagttcgaagccctcgccgcagtacccagctga

SEQ ID NO: 112317 - protein, 148 aa, Rhodococcus sp. RHA1
MHQVHRITLDDALPLLAAGRAKAEEIGVKQTLCVCDDGGNVLALHRLPGARLTGVDIAIAKAFTAAGHERATHLFNEAPDGPALPGNEAFGISQMLPGKFAVFVGGFPLVFDGQIVGGIGISGGNGKQDKAVGAAMLAEFEALAAVPS

SEQ ID NO: 112318 - DNA, 426 bp, Rhodococcus sp. RHA1
  CDS (1)..(426): transl_table=11
atgcaaaacgtcaccatcaccaagcagagcatcagtgccgacgcggcgaagcgtgcgatcgaggcgggagaagcggaagctgcgcggcttggtttggcagcgtcgatcgcgatcctcgacgagagcggaatcctgaaagctctctctcgtatggacaattcccttctctccggcattcaggtgtcgcaggacaaggcttactcgagcgtcgccacccagctcccgacaagcgcgtggatcggggtgaccagtgcgagtaaggattttgagctcggtctgttcagcatcgacaggatctgcccgatctccggtggcgttcctattgtgctcgagggccgggtgatcggcgcggtgggtgtcagtgggggtatgcccgaccaggatgagcagatcgcgaacgccgccgccgcagtgttggcctcctga

SEQ ID NO: 112319 - protein, 141 aa, Rhodococcus sp. RHA1
MQNVTITKQSISADAAKRAIEAGEAEAARLGLAASIAILDESGILKALSRMDNSLLSGIQVSQDKAYSSVATQLPTSAWIGVTSASKDFELGLFSIDRICPISGGVPIVLEGRVIGAVGVSGGMPDQDEQIANAAAAVLAS

SEQ ID NO: 112320 - DNA, 465 bp, Alkalilimnicola ehrlichei MLHE-1
  CDS (1)..(465): transl_table=11
atgcctgcagacgtttatcgcttgaaggtcagcctgccgctggagcaggcccgtaagatcatcgccggggcactggccaagggccgggaactggccctgcagccgctgacggtggtggtgctggatgccggtgggcacgtggtggcggcggagcgagaggatggctccggcaacgtgcgctttgaggtggcgcggggcaaggccggcgcggcgctgggcattggcatcggcagcggcacggtgggggcgcgcaaccaggggcgggacgcctttctggcggcggtggccaccgcctccgggggccaggcggtgccggtcccggggggtgtgctggtgctggacgaccaggcgcagatcatcggtgcggtgggggtgagcggtgatgcctcgccggaggatgagaaggccgccatcgcgggtatcgaggccgcgggtctggccccggggattgatccggccgcctga

SEQ ID NO: 112321 - protein, 154 aa, Alkalilimnicola ehrlichei MLHE-1
MPADVYRLKVSLPLEQARKIIAGALAKGRELALQPLTVVVLDAGGHVVAAEREDGSGNVRFEVARGKAGAALGIGIGSGTVGARNQGRDAFLAAVATASGGQAVPVPGGVLVLDDQAQIIGAVGVSGDASPEDEKAAIAGIEAAGLAPGIDPAA

SEQ ID NO: 112322 - DNA, 432 bp, Rhizobium leguminosarum bv. viciae 3841
  CDS (1)..(432): transl_table=11
atgcctcgcacgctcaacacactgacgctgtcggatgcgaagcagatgctgcaggccggcgaggccaaggcagccaacctcggcatcccctacaatatcgcggtggtcgatgccggaggcgcgctgatcgcattcacccgccaggacggtgcgctcgccgggagcatcgatcttgccatcggtaaggcgaagacagcgcgcttgttcgacaagacgacggaatatcttgccgagctcgctcagcccggcgcaccgctgttcgggatcgaacagagcaatggcggcaatgtcgtgatcttcggcggcggtctgccggtaaagtacgacaaccagatcatcggcgcggtcggcaccagcgccggttcggtcgagcaggacatcgcggtcgccgtggcggcagcagaagcaatttcaccaaacgcgaaaccgtag

SEQ ID NO: 112323 - protein, 143 aa, Rhizobium leguminosarum bv. viciae 3841
MPRTLNTLTLSDAKQMLQAGEAKAANLGIPYNIAVVDAGGALIAFTRQDGALAGSIDLAIGKAKTARLFDKTTEYLAELAQPGAPLFGIEQSNGGNVVIFGGGLPVKYDNQIIGAVGTSAGSVEQDIAVAVAAAEAISPNAKP

SEQ ID NO: 112324 - DNA, 432 bp, Pseudomonas aeruginosa UCBPP-PA14
  CDS (1)..(432): transl_table=11
atgaggacgccggccatgtctacccacctgtctctgcaacatgcccaacgctgcatcgcggcggccattgccgaagcgcagcggcagcgcctggcggtctgcgtcgcggtggtcgacgcccatgccaacctgctggcgttcgtacggatggacgacagcgttcccggtgccatcgacctggcccagcgcaaggcgcgcagcgccgcgctgttccgcctgcccagcggcgagctgggccgactcgccgggccgggccagccgttgtggagcatcgagcagagcaacggcgggctggcctgcttcgccggcggcatgccgctgggcgatgccggcggttcctgcctgggtggcgtcggcgtctccggcgccagcgcggcccaggaccaatccatcgccgaggccgccgtggccatggcaacaatccagaggtaa

SEQ ID NO: 112325 - protein, 143 aa, Pseudomonas aeruginosa UCBPP-PA14
MRTPAMSTHLSLQHAQRCIAAAIAEAQRQRLAVCVAVVDAHANLLAFVRMDDSVPGAIDLAQRKARSAALFRLPSGELGRLAGPGQPLWSIEQSNGGLACFAGGMPLGDAGGSCLGGVGVSGASAAQDQSIAEAAVAMATIQR

SEQ ID NO: 112326 - DNA, 402 bp, Pseudomonas aeruginosa UCBPP-PA14
  CDS (1)..(402): transl_table=11
atgcacagcaagccggtactcggccgcgaggaggtcgcccgcgtccttggcgcggcccgcgaggaggcacagcgccaaggctgggcggtgagcatcgcggtggtcgacgacggcggccacccgctggcgctggagcgcctcgacggctgcgcgccgatcggtgcctacatcgcgacggaaaaggcccgcagcgccgccctcgggcgccgggaaacgaagcgctacgaggacatgatcaacggcggacgcagtgccttcctctcggtgccgctgctgcaggccaccctggagggcggcgtgccgatcctggtggacggacaggtggtcggcgcggtcggggtttccggcgtacgcgccgaagaggacgcccgggtggcgcggatcggagccgaggggctgtga

SEQ ID NO: 112327 - protein, 133 aa, Pseudomonas aeruginosa UCBPP-PA14
MHSKPVLGREEVARVLGAAREEAQRQGWAVSIAVVDDGGHPLALERLDGCAPIGAYIATEKARSAALGRRETKRYEDMINGGRSAFLSVPLLQATLEGGVPILVDGQVVGAVGVSGVRAEEDARVARIGAEGL

SEQ ID NO: 112328 - DNA, 474 bp, Solibacter usitatus Ellin6076
  CDS (1)..(474): transl_table=11
atgttgcgcatgtcgaagctgattgtgttgttactctgtgccgtgttcatggctgccgcggcggacctaccctcgcgcaaattcctgaaccttgcggcgatcaagacgatggtggcggccgcggaaaccgaggcccagaagcgcggcgtcaacgtgaccatctgcatcatggatgagagcggcaatcttctgttcctccagaaggccgataaggcgacgctgaacacgattcagttcgcgcagaagaaggcaaagtacgcggcgatctacggccgcccctccgctgtggcggagaagtcactcaaggacggaaacctcgcaatgctggtgtttcccgacggattccccaatcgcggcgggctgccgatcaaggtggacgaccagaccatcggcgcgatcgcctgcagcggcgccgccagcgaggtggacgaggcgatttcgcaggcggcgatcgacgcgctgctgaagcagtag

SEQ ID NO: 112329 - protein, 157 aa, Solibacter usitatus Ellin6076
MLRMSKLIVLLLCAVFMAAAADLPSRKFLNLAAIKTMVAAAETEAQKRGVNVTICIMDESGNLLFLQKADKATLNTIQFAQKKAKYAAIYGRPSAVAEKSLKDGNLAMLVFPDGFPNRGGLPIKVDDQTIGAIACSGAASEVDEAISQAAIDALLKQ

SEQ ID NO: 112330 - DNA, 396 bp, Solibacter usitatus Ellin6076
  CDS (1)..(396): transl_table=11
atgatcacactcgcagatgcaaaacgcgttcttgccgctgccgaacgaaaagcggaagaaatcggacagcccatgaatatcgccgtagtcgacgccggcggcaatctggtcgcgcatgtccgcatggacaaggcttggatcggaagcgtcgatatcgccattaacaaagcttggacgtcacgcgcttttgacatttcaaccaaggagctcgcggagctttcacagtccggcgaccagttttttggaattcacgcttcgaaccatgggcgagtcatgatcttcgcgggcggcattccgctgaagcgaggcgatcaggtgttgggcgcggtcggcgtcagcggcgggatgggtaaacaggaccaggcagtggcagaagccggggcggaggccttttag

SEQ ID NO: 112331 - protein, 131 aa, Solibacter usitatus Ellin6076
MITLADAKRVLAAAERKAEEIGQPMNIAVVDAGGNLVAHVRMDKAWIGSVDIAINKAWTSRAFDISTKELAELSQSGDQFFGIHASNHGRVMIFAGGIPLKRGDQVLGAVGVSGGMGKQDQAVAEAGAEAF

SEQ ID NO: 112332 - DNA, 408 bp, Shewanella sp. ANA-3
  CDS (1)..(408): transl_table=11
atgtcgctattcctaagcgaagccactatccaaagtgtcatagaacgtgccctggtgatcgcacgcgaacagggtttcgccatcaacatcgccgtcgtgaacgatgctggtctgctacagggcttcctgagcatggatggcgcggttcccggtgctatagacgtctccatcaagaaagctcgtacagcagcgctattccgtaccgacagcctagagcttggtgcggccgcccagccgggcggggcgatctacacgctggaggcaaccaatggcggcctgatcagctttggcggcggcgttgtgcttcatgacgagctcggccgcacgattggtgccgtcggcgtggcgggggccacggtcgaagcagatcagattattgccttgcaagcggcgggaaggagcttatga

SEQ ID NO: 112333 - protein, 135 aa, Shewanella sp. ANA-3
MSLFLSEATIQSVIERALVIAREQGFAINIAVVNDAGLLQGFLSMDGAVPGAIDVSIKKARTAALFRTDSLELGAAAQPGGAIYTLEATNGGLISFGGGVVLHDELGRTIGAVGVAGATVEADQIIALQAAGRSL

SEQ ID NO: 112334 - DNA, 447 bp, Mycobacterium smegmatis str. MC2 155
  CDS (1)..(447): transl_table=11
atgcacagaattcaccgcatcaccctcgacgacgcgttgccattgctggccgcgggccgtgccaaagccgaggagatcggggtcaagcagaccctgtgcatagtggacgacggcggcaatgtcattgcgctgcaccggttgccgggagcccgtctgaccggtgtggacatcgcgatcgcgaaggccttcaccgccgcaggccacgaacgtgccacccacctgttcaacgaaccgcccaacgggcccgcattgcccggcaacgaggcgttcggcatcagccacatgctgcccggcaagttcgcgatcttcgtcggcgggttcccgttggtctacgacgggcagatcgtcgggggagtgggcatcagcggcggcaacggcgagcaggacaaggctgtgggggcggcgatcctcgccgagttcgaggcgctcaccgccgcccaggtgtga

SEQ ID NO: 112335 - protein, 148 aa, Mycobacterium smegmatis str. MC2 155
MHRIHRITLDDALPLLAAGRAKAEEIGVKQTLCIVDDGGNVIALHRLPGARLTGVDIAIAKAFTAAGHERATHLFNEPPNGPALPGNEAFGISHMLPGKFAIFVGGFPLVYDGQIVGGVGISGGNGEQDKAVGAAILAEFEALTAAQV

SEQ ID NO: 112336 - DNA, 453 bp, Nocardioides sp. JS614
  CDS (1)..(453): transl_table=11
atgcacaagatcttcaggatcaccctcgacgacgcccttcccgtgctggcggcagcccgggcgaaggccgaggagatcggggtgcggcagacgatctgcgtggtcgacgagagcggccaggtgatcgcgctgcaccggctgcccggcgcccggctgaccggcgtggacatcgcgatcgcgaaggccttcaccgccgccggccacgagcgcgccacccacaagttcaacgagccgccgaacgggccggccctcccgggcaacgaggccttcggcatcagccacatgctgcccgggaagttcgcgatcttcgtcggaggcttcccgatcgagtacgacggccagatcgtcggcgcggtcggggtctccggcggcaacggcgagcaggacaaggcggtcggcgcggccgcgctggaggcgttcgcgcagcacgtcgctgcgcacccgccgcagtag

SEQ ID NO: 112337 - protein, 150 aa, Nocardioides sp. JS614
MHKIFRITLDDALPVLAAARAKAEEIGVRQTICVVDESGQVIALHRLPGARLTGVDIAIAKAFTAAGHERATHKFNEPPNGPALPGNEAFGISHMLPGKFAIFVGGFPIEYDGQIVGAVGVSGGNGEQDKAVGAAALEAFAQHVAAHPPQ

SEQ ID NO: 112338 - DNA, 393 bp, Magnetospirillum magnetotacticum MS-1
  CDS (1)..(393): transl_table=11
atgaccgaggaacaggccctggccgccgttcaggccgccatcgccaaggcgcgcgccatgggcgtcaaggtcaccgccgtggcggtggatgcgggcggccatctcaaagccttgatccgcatggacggagccccctttcacggcgtcaccatctccaccgacaaggcccgcaccgcagccggattcggcaagcccaccgcgcagtggaaggaccgcatcgggggccgccctcatgtgctggagggcctttcggggcgggatggtttcattcccatcggtgggggcgtgccggtgctcaaagacggcgcggtcacaggcgccatcggcatatcgggcgccaccgaggatgaggattgcgagatcgccgctgccgggctgatggcgatcagctga

SEQ ID NO: 112339 - protein, 130 aa, Magnetospirillum magnetotacticum MS-1
MTEEQALAAVQAAIAKARAMGVKVTAVAVDAGGHLKALIRMDGAPFHGVTISTDKARTAAGFGKPTAQWKDRIGGRPHVLEGLSGRDGFIPIGGGVPVLKDGAVTGAIGISGATEDEDCEIAAAGLMAIS

SEQ ID NO: 112340 - DNA, 405 bp, Burkholderia vietnamiensis G4
  CDS (1)..(405): transl_table=11
atgcaggttaagtctgtgctcacagtagaagaaacgacgcgagtcattgaggccgcgcgcaccgaggcggaaatgaatatgtgggccgtcgcgatttcggtcgttgatgacggcgggcatccgctcgcgctcattcgcctcgataactgcgcgccgatcggcggctatatcgcaaccgaaaaagcccgtacagcggctctgggtcgtcgcgaatccaagcaatacgaggacatgatcaacaacggccgcactgcgtttctgaacgctccgctgtcaggtactttggaaggcggtgtgccaattttcatcgatggccaggttgttggcgctatcggcgtgtccggcgtcaaggctgaccaggacgcacaagttgcgaaagctggcgcagcgatcttcggaaagtga

SEQ ID NO: 112341 - protein, 134 aa, Burkholderia vietnamiensis G4
MQVKSVLTVEETTRVIEAARTEAEMNMWAVAISVVDDGGHPLALIRLDNCAPIGGYIATEKARTAALGRRESKQYEDMINNGRTAFLNAPLSGTLEGGVPIFIDGQVVGAIGVSGVKADQDAQVAKAGAAIFGK

SEQ ID NO: 112342 - DNA, 396 bp, Crocosphaera watsonii WH 8501
  CDS (1)..(396): transl_table=11
atggttacattagaagatgccagaagagtaattagtgcggccgaaaaaaaagcgatcgaaattggtcaacccatgaatatagcagtagtggatgggggaggaaatttggtagcccatgtacgaatggatggagcttggatcggaagtatcgatatctcaatcaaaaaagcttacacttctagggcgtttgatctggccactaaagatttagccgaacagagtcaatcaggaggacaattttttgggattcatgcctctaataatggcaaaatcatgatttttgctggaggaatacccctttctagtgagggacaagtagtggggggaattggagttagtggtgggtcaggagagcaagaccatgccgtagccgaagctggagcagccgcattttaa

SEQ ID NO: 112343 - protein, 131 aa, Crocosphaera watsonii WH 8501
MVTLEDARRVISAAEKKAIEIGQPMNIAVVDGGGNLVAHVRMDGAWIGSIDISIKKAYTSRAFDLATKDLAEQSQSGGQFFGIHASNNGKIMIFAGGIPLSSEGQVVGGIGVSGGSGEQDHAVAEAGAAAF

SEQ ID NO: 112344 - DNA, 423 bp, Oceanicola batsensis HTCC2597
  CDS (1)..(423): transl_table=11
atgatcactgtacaaagactggatctcgccgatgcgcgggtgatgctggacgcggcgaaggcccgggccgacaagatcggcgtgcccatgtgcatcgccatcaccgacgacgccggcaatctcgtcgcgttcgaacggatggacggcggcaaggtgacctcgaccaccatcgccatcgacaagagctatacggcctccggcgcgaagagggcgacgcatgagtatggcgaggccagccagcccggaaagccggcctacggcatcgcctcggccatcggcgggcggctgatggtggtgggcggcggcctgccggtcatggtcgacgggacctgtgtcggcgggatcggcgtcagttcggggacgccggcgcaggacatcgaggtcgcgcaggccggtctcgacgccttcatggcggcactctga

SEQ ID NO: 112345 - protein, 140 aa, Oceanicola batsensis HTCC2597
MITVQRLDLADARVMLDAAKARADKIGVPMCIAITDDAGNLVAFERMDGGKVTSTTIAIDKSYTASGAKRATHEYGEASQPGKPAYGIASAIGGRLMVVGGGLPVMVDGTCVGGIGVSSGTPAQDIEVAQAGLDAFMAAL

SEQ ID NO: 112346 - DNA, 441 bp, Synechococcus sp. RS9917
  CDS (1)..(441): transl_table=11
atgcatcagcgcctctggatggatctcgccgatgcggacgctgtgctggcgtcagcctttgccgccgccgagcaggctgcggctcgggtctcgattgcggtggtggatggggcgggccagttggtctgtttccgccgtcgcgatggcgcctcgcctgccagtgtggaaacggccatggccaaggcgcgcaccgccgccctgacgggtgctgacagcgctgcagccgagcaggcgatcgccggcgggcgggtggcgctgctctccttgcagggggtgatgcaccagccctgtgccctgatggccggtgggctggtgctgcgctgcgatcaagcgctggtgggggcgatcggagtgtccggcatgacgccggatgtggatgcagcggtcgctcgtgccggtgtggaggcgttcgcgctcagagcccggggctgctcatcatga

SEQ ID NO: 112347 - protein, 146 aa, Synechococcus sp. RS9917
MHQRLWMDLADADAVLASAFAAAEQAAARVSIAVVDGAGQLVCFRRRDGASPASVETAMAKARTAALTGADSAAAEQAIAGGRVALLSLQGVMHQPCALMAGGLVLRCDQALVGAIGVSGMTPDVDAAVARAGVEAFALRARGCSS

SEQ ID NO: 112348 - DNA, 426 bp, Oceanospirillum sp. MED92
  CDS (1)..(426): transl_table=11
atgctggtaaatgacagttcactcggctgggaaaccgctaactcaatcgctaaagcggcctgccaatatgctgcagataataatctgcgtatctgcacctgggtattggaccgccacggcaacccgctggcaatgcagcgcattaacaatgctcccatgccttcaacagagatcgctcgcggcaaagcttatactgcggtgagcttcggctttggtacgcatctttggcaggaacgcctggcgacaaagccccacctgctagccggcttaaatgttcaggaaggcgtcgtgatgtttggcggcggtctgccgataaaacatgaaggtgtgattgttggcgctatcggtgtttctggagccagcgaagcacaggatcaggaatgtgctgaagcgggtattgccgccattactcagctcagcaactag

SEQ ID NO: 112349 - protein, 141 aa, Oceanospirillum sp. MED92
MLVNDSSLGWETANSIAKAACQYAADNNLRICTWVLDRHGNPLAMQRINNAPMPSTEIARGKAYTAVSFGFGTHLWQERLATKPHLLAGLNVQEGVVMFGGGLPIKHEGVIVGAIGVSGASEAQDQECAEAGIAAITQLSN

SEQ ID NO: 112350 - DNA, 432 bp, Xanthobacter autotrophicus Py2
  CDS (1)..(432): transl_table=11
atgtcgacagagaaagccgccttcacccgtccggccgcccgccttacccatgccggcgcgctggtcgcgctcactgcggcggtggcgaaggcggaggccatgggcgtgccgcagaacatctccatcgtggacgagggcggcaatctcctcgccttcgtgcgcatggacggggccaagctgctgtcgcgggagacctccctgtcgaaggccatcagcgccgcctcccaccgccagcccaccagccggctcgatcccgctctggagctgaagctcgccatcgccgccggcgggcgcctgaccaacctggagggtggcttccccatcattctcgacggggtgtgcgtgggcggcatcggcgtcggctcgggcaaggggtcggaggacgtggaggtggcgaaggcggctttggcggccatcggggcggaagtttag

SEQ ID NO: 112351 - protein, 143 aa, Xanthobacter autotrophicus Py2
MSTEKAAFTRPAARLTHAGALVALTAAVAKAEAMGVPQNISIVDEGGNLLAFVRMDGAKLLSRETSLSKAISAASHRQPTSRLDPALELKLAIAAGGRLTNLEGGFPIILDGVCVGGIGVGSGKGSEDVEVAKAALAAIGAEV

SEQ ID NO: 112352 - DNA, 441 bp, Pseudomonas putida GB-1
  CDS (1)..(441): transl_table=11
atgaacgctttgaacctgaaagtcgctgtcagcctggtgaatgccgcgttggcggcgggccgcaagatcaatgccgcgccactgaccgtggcggtgctggatgccggcgggcacctgctggcgctgcagcgtgaagatggcgccagcctgattaggcctgaagtggccgctggcaaagcctggggcgcaattgccctgggcaagggctcgcggttgctggcgctggatgcacagcaacggccggcgttttttgccgcgctgaacgggatgggggagcggccggtggtgccagcgccgggaggcgtgctgattcgtgatcaggacggcaaggtgctgggtgcggtagggatcagcggcgatacgtcggatatcgacgagcagtgcgcgatcagtgcgatcgaggaggtggggttgcgggcggatgccggggtagcggcgtaa

SEQ ID NO: 112353 - protein, 146 aa, Pseudomonas putida GB-1
MNALNLKVAVSLVNAALAAGRKINAAPLTVAVLDAGGHLLALQREDGASLIRPEVAAGKAWGAIALGKGSRLLALDAQQRPAFFAALNGMGERPVVPAPGGVLIRDQDGKVLGAVGISGDTSDIDEQCAISAIEEVGLRADAGVAA

SEQ ID NO: 112354 - DNA, 399 bp, Pseudomonas putida GB-1
  CDS (1)..(399): transl_table=11
atgcatagcaagttcgtgatcggccaggccgaaattgcccgcgtactgagcgccgcgcgccaggaagcccaggcgcagcaatggaacgtgaccatcgccgtggtcgacgacggcggccatccgctggccctggagcgcctggacggctgcgcgcccgccagtgcttacatcgcaatggaaaaggcgcgcactgccgcattggggcgcaaggagacgcgggattatgaagagatggtcaatagcggccgtactgctttcgtgaccgcgccgctgctgaccagcctggaaggcggcgtgccgctgcgggtggaaggccaggtggtaggcgcgattggcgtgtccggggtcaagtccgagcaggatgcccaggtggccaaggctggggccgccgcgctctga

SEQ ID NO: 112355 - protein, 132 aa, Pseudomonas putida GB-1
MHSKFVIGQAEIARVLSAARQEAQAQQWNVTIAVVDDGGHPLALERLDGCAPASAYIAMEKARTAALGRKETRDYEEMVNSGRTAFVTAPLLTSLEGGVPLRVEGQVVGAIGVSGVKSEQDAQVAKAGAAAL

SEQ ID NO: 112356 - DNA, 408 bp, Herbaspirillum seropedicae
  CDS (1)..(408): transl_table=11
atgcaaaccaaaccgtttctgacgctggacgacgtgaagaagatcgccgccggcgccgaagccgaagcccgtgccaacaactggaatgtggtcatttccgtggtcgacgatggcggccacctgctgtggctgcaacgcatggacggcgctgctccgatctcctcgcagatcgccccggccaaggcccgcaccgctgcgctgggtcgccgtgaaagcaagatctatgaagacatgatcaacaacggccgtgtctccttcctcagcgcccccggcctggatggcctgctcgaaggcggcgtgcctgtcgtggtcgacggccactacgtgggcgccgtgggcgtctcgggcgtgaagtcctcggaagacgtgcagatcgccaaggccggtatcgctgccctgggcctgtaa

SEQ ID NO: 112357 - protein, 135 aa, Herbaspirillum seropedicae
MQTKPFLTLDDVKKIAAGAEAEARANNWNVVISVVDDGGHLLWLQRMDGAAPISSQIAPAKARTAALGRRESKIYEDMINNGRVSFLSAPGLDGLLEGGVPVVVDGHYVGAVGVSGVKSSEDVQIAKAGIAALGL

SEQ ID NO: 112358 - DNA, 1059 bp, Heliobacillus mobilis
  CDS (1)..(1059): transl_table=11
atgctgcgatcgttggaatcatcgactcgatggaaatggatgaacgattactcgcctgcgacgattaaccggcgaggggtaatgagaatgaaagtatatacaaaaacaggagaccggggcgttaccagcctatacagcggccagagggtgccgaaagatcatgcccgggtcgacgtttatggaacgatggatgaagcctccgctgcgatgggcttggctaaatcactcacaaacaatgaaacagccctgtcactcatacaccggctgcaacaagaaatatttgatgtgaacgctgattttgccacagagccaaaggcagacgtcaaggggggcgaacctcggtatcgtatcaacgatggacatctgcaggctttagagcagatcatcgatgatttggaggcaaagcgtatcccccaaaagggctttgtcatccctggtgcttctcaggctggagctgccctcgatttggctcggacgattgtcaggagagccgaacgagctgccgtatcgctggcaaagttttccgatgtgcatccgcccgtcatgatctatctcaaccggttatcagacttgctttttgtactggctcgttatgtcgaccaagaagaaatggtatcgcgggtaacgagagaagtggtaaaggcgatgcaaggccaggaggatggaactatgttggaaaaagccaaaaagatgattgcagcggctgaagcgaaagccgatgctattggagttcccatggtcatcacggtcgtcgatgaagggggaaacttggtggcccagcaccggatggacggcgctttgctcgcaagcattgctatctcccgggataaggcttatacatcagtcgccttgaagatgactacagaaacagcctccaaattggcccaacctggcgagatgctttatggattaaacacaactgatgggagccgtctggtcgtctttggaggcggtttgccgatcgtggataacggacggattatcggtgccatcggtgtaagcggtggctcagtagaacaagacgtgtctgttgccgaggctggtcttgcagcctggtaa

SEQ ID NO: 112359 - protein, 352 aa, Heliobacillus mobilis
MLRSLESSTRWKWMNDYSPATINRRGVMRMKVYTKTGDRGVTSLYSGQRVPKDHARVDVYGTMDEASAAMGLAKSLTNNETALSLIHRLQQEIFDVNADFATEPKADVKGGEPRYRINDGHLQALEQIIDDLEAKRIPQKGFVIPGASQAGAALDLARTIVRRAERAAVSLAKFSDVHPPVMIYLNRLSDLLFVLARYVDQEEMVSRVTREVVKAMQGQEDGTMLEKAKKMIAAAEAKADAIGVPMVITVVDEGGNLVAQHRMDGALLASIAISRDKAYTSVALKMTTETASKLAQPGEMLYGLNTTDGSRLVVFGGGLPIVDNGRIIGAIGVSGGSVEQDVSVAEAGLAAW

SEQ ID NO: 112360 - DNA, 471 bp, Aspergillus oryzae
  CDS (1)..(471)
atgatctttggctgcatggcggcggccttctcaaccgctacatccacgaaactccttcaagaacagaatgttccactcagtctcgccctcgaaatcgcccaggatgcagttcaggactgcgccaagaagcaatacagcgtatcggctgctgtagttgaccgtgagggcgttctgcgcgcgctccttcgggctgacaatgcagctatccacacccccgaggcggcgcgccggaaggcgtatacagctgcatcgtcgcgtaccgcgaccagtactatggtcaagaacattcaaaatcctggcgctgcccaacttgccgccgttgatgatttcctaattctcgctggtggcgtgccaatcaaagtcggaaatgagacaatcggcgctgtcggtgttggtggtgcgcccagtggggatttcgatgaggcttgtgcgatggtcgcactccaacaggtagcagacaagctgctgtag

SEQ ID NO: 112361 - protein, 156 aa, Aspergillus oryzae
MIFGCMAAAFSTATSTKLLQEQNVPLSLALEIAQDAVQDCAKKQYSVSAAVVDREGVLRALLRADNAAIHTPEAARRKAYTAASSRTATSTMVKNIQNPGAAQLAAVDDFLILAGGVPIKVGNETIGAVGVGGAPSGDFDEACAMVALQQVADKLL

SEQ ID NO: 112362 - DNA, 429 bp, Escherichia blattae
  CDS (1)..(429): transl_table=11
atgaataagagtcttccccgcgccagtatcagcctggccatggcaaaaaaaatggcccaggccgcagaagataaagccataaaaatcaatgttccggtggttatttccgttgtcgactgcggggccaacaccctgctgatacaacgtatggataatgcttttgttaccagtgttgatatttctcttaacaaagcctggagcgcctgctgcctgaaacagcccacccacgaaataaccgacgtggtgcagccagggcagtcactgtacgggttacagcttactaatcagcagcggattgttatttttggcggcggattcccgattattgaaaatggtcaggttattggtgccgttggcgtaagcggcggcaccgtagagcaggatatggaaatagcccgctcggcgcttgattgttttaatgcagaatag

SEQ ID NO: 112363 - protein, 142 aa, Escherichia blattae
MNKSLPRASISLAMAKKMAQAAEDKAIKINVPVVISVVDCGANTLLIQRMDNAFVTSVDISLNKAWSACCLKQPTHEITDVVQPGQSLYGLQLTNQQRIVIFGGGFPIIENGQVIGAVGVSGGTVEQDMEIARSALDCFNAE

SEQ ID NO: 112364 - DNA, 432 bp, Klebsiella pneumoniae
  CDS (1)..(432): transl_table=11
atgatgaacaagagccaacaagttcagacaatcaccctggccgccgcccagcaaatggcggcggcggtggaaaaaaaagccactgagatcaacgtggcggtggtgttttccgtagttgaccgcggaggcaacacgctgcttatccagcggatggacgaggccttcgtctccagctgcgatatttccctgaataaagcctggagcgcctgcagcctgaagcaaggtacccatgaaattacgtcagcggtccagccaggacaatctctgtacggtctgcagctaaccaaccaacagcgaattattatttttggcggcggcctgccagttatttttaatgagcaggtaattggcgccgtcggcgttagcggcggtacggtcgagcaggatcaattattagcccagtgcgccctggattgtttttccgcattataa

SEQ ID NO: 112365 - protein, 143 aa, Klebsiella pneumoniae
MMNKSQQVQTITLAAAQQMAAAVEKKATEINVAVVFSVVDRGGNTLLIQRMDEAFVSSCDISLNKAWSACSLKQGTHEITSAVQPGQSLYGLQLTNQQRIIIFGGGLPVIFNEQVIGAVGVSGGTVEQDQLLAQCALDCFSAL

SEQ ID NO: 112366 - DNA, 441 bp, Pseudomonas putida
  CDS (1)..(441): transl_table=11
atgagaacaacgaatcaacgctcgctgcactgggaagccgcctatgccgccacccgtgcggccgtggcacatgcagagaagctaggcgtgcgcattaacgtctgtgtggttgaccactccggcctgccgttggcctatctgcgcatgaacggcgcctttctacattcacgggaaattgccgaagacaaggcgtacaccgccgtgagcttcggcttccccacccgcgactggctcgacgtgctgggtgacaacccgcgcctgcgcatcggcctgccgagacgcgagcggctggtggtgttcggcgggggcctgccgatcctactcgatggtgaatgcatcggcggcatcggcgtctctggggccgacgaggggcaggacgaagcctgcgcggcagcaggcttggcggccatagggcatcatgaggcatccagtttggggtag

SEQ ID NO: 112367 - protein, 146 aa, Pseudomonas putida
MRTTNQRSLHWEAAYAATRAAVAHAEKLGVRINVCVVDHSGLPLAYLRMNGAFLHSREIAEDKAYTAVSFGFPTRDWLDVLGDNPRLRIGLPRRERLVVFGGGLPILLDGECIGGIGVSGADEGQDEACAAAGLAAIGHHEASSLG

SEQ ID NO: 112368 - DNA, 402 bp, Saccharopolyspora spinosa
  CDS (1)..(402): transl_table=11
atggcaaggctcacggccgagctcgcgcagaagattctggtcgcagctgccgagaaggcaacggaaatcggctcgccctccagcatttccatcctcgacagcggaagggaaccggtggctttcctgcgccaggatggcgctctcctcgcatcaccggagatctcgtccaacaaggcctacacctcggcgtccatgaagatgccgaccggtgacctcaatgagctggtccaacctggtgggccgttcttcggcctgcagactgcccaggcccggccgttcgtgaccttcgcgggcggcgttccgatcctggtcgatggtgaggtcgtcggcgcgattggcgttgccggcggaaccggcgaacaggacgaggaagtcgcgaaggctggcgctgcggtcgcctga

SEQ ID NO: 112369 - protein, 133 aa, Saccharopolyspora spinosa
MARLTAELAQKILVAAAEKATEIGSPSSISILDSGREPVAFLRQDGALLASPEISSNKAYTSASMKMPTGDLNELVQPGGPFFGLQTAQARPFVTFAGGVPILVDGEVVGAIGVAGGTGEQDEEVAKAGAAVA

SEQ ID NO: 112370 - DNA, 432 bp, Klebsiella pneumoniae
  CDS (1)..(432): transl_table=11
atgatgaacaagagccaacaagttcagacaatcaccctggccgccgcccagcaaatggcggcggcggtggaaaaaaaagccactgagatcaacgtggcggtggtgttttccgtggttgaccgcggaggcaacacgctgcttatccagcggatggacgaggccttcgtctccagctgcgatatttccctgaataaagcctggagcgcctgcagcctgaagcaaggtacccatgaaattacgccagcggtccagccaggacaatctctgtacggtctgcagcttaccaaccaacagcgaattattatttttggcggcggcctgccagttatttttaatgagcaggtaattggcgccgtcggcgttagcggcggtacggtcgagcaggatcaattattagcccagtgcgccctggattgtttttccgcattataa

SEQ ID NO: 112371 - protein, 143 aa, Klebsiella pneumoniae
MMNKSQQVQTITLAAAQQMAAAVEKKATEINVAVVFSVVDRGGNTLLIQRMDEAFVSSCDISLNKAWSACSLKQGTHEITPAVQPGQSLYGLQLTNQQRIIIFGGGLPVIFNEQVIGAVGVSGGTVEQDQLLAQCALDCFSAL

SEQ ID NO: 112372 - DNA, 495 bp, Lactobacillus collinoides
  CDS (1)..(495): transl_table=11
atgaacaaagaacaaattagtcaaatcatcagtgaagttttagctgacaacggcgttcaagccccgaaagaggacaagaccaacgtctttgataagcacaagatggaacgtgctatcgatgccggaatcgccaaggctaatgaacttaaggttggtgtgacatttgcaatcatggattgcaaacaagttgttcaaatgtcatatcatatgccaaacggaaatttggttggtacatttttagcacctaaaaaggcttggtccgctattgcaatgaaggaaccaacgaaggatatcagtaaagacatccaacctggtggtcctttatatgaaatggaaactatgctggatggcaaattagtgtcattcccaggcggtattccattaacttgtgacggtgagatcttcggcgccgttggcgttagcggtgggctgattgaagaagatcacgccatttgcgaagccggcgtaagcgaatttctaaaggagagtaactga

SEQ ID NO: 112373 - protein, 164 aa, Lactobacillus collinoides
MNKEQISQIISEVLADNGVQAPKEDKTNVFDKHKMERAIDAGIAKANELKVGVTFAIMDCKQVVQMSYHMPNGNLVGTFLAPKKAWSAIAMKEPTKDISKDIQPGGPLYEMETMLDGKLVSFPGGIPLTCDGEIFGAVGVSGGLIEEDHAICEAGVSEFLKESN

SEQ ID NO: 112374 - DNA, 567 bp, Streptomyces reticuli
  CDS (1)..(567): transl_table=11
atgtccagccgcaagaagccgtcccgccgtacccgcgtcctcgtcggcggcgccgccctggccgttctcggtgccggtgtcgtcggcacggtcgccgccaacgccgccgacaccacggaggccacgcccgccgccgcccccgtcgcggcccggggcggcgagctgacccagagcacccatctgaccctggaggcggccacgaaggcggcgcgcgccgcggtggaggcggccgagaaggacggccggcacgtgtcggtggccgtcgtcgaccgcaacggcaacaccctggtcaccctgcgcggggacggggcgggcccgcagtcgtacgagtccgcggagcgcaaggcgttcaccgcggtgtcctggaacgcgccgacgtcggagctggccaagcggctggcgcaggcgccgaccctgaaggacatcccgggcacgctgttcctcgcgggcggcacgccggtgaccgccaagggcgctccggtcgcgggcatcggcgtcgcgggtgctccgtcgggcgacctggacgagcagtacgcacgggcgggcgcggccgtgctcggccactga

SEQ ID NO: 112375 - protein, 188 aa, Streptomyces reticuli
MSSRKKPSRRTRVLVGGAALAVLGAGVVGTVAANAADTTEATPAAAPVAARGGELTQSTHLTLEAATKAARAAVEAAEKDGRHVSVAVVDRNGNTLVTLRGDGAGPQSYESAERKAFTAVSWNAPTSELAKRLAQAPTLKDIPGTLFLAGGTPVTAKGAPVAGIGVAGAPSGDLDEQYARAGAAVLGH

SEQ ID NO: 112376 - DNA, 26 bp, Artificial sequence
  primer
atgaaaactaaagtcattcttagcca

SEQ ID NO: 112377 - DNA, 23 bp, Artificial sequence
  primer
ttatttcgccaacaccgctgctg

SEQ ID NO: 112378 - protein, 121 aa, Artificial sequence
  consensus sequence
  Variant (2)..(4): Xaa in position 2 to 4 is any amino acid
  Variant (6)..(17): Xaa in position 6 to 17 is any amino acid
  Variant (18)..(20): Xaa in position 18 to 20 is any or no amino acid
  Variant (22)..(23): Xaa in position 22 to 23 is any amino acid
  Variant (25)..(30): Xaa in position 25 to 30 is any amino acid
  Variant (32)..(45): Xaa in position 32 to 45 is any amino acid
  Variant (46)..(46): Xaa in position 46 is any or no amino acid
  Variant (49)..(81): Xaa in position 49 to 81 is any amino acid
  Variant (82)..(90): Xaa in position 82 to 90 is any or no amino acid
  Variant (93)..(93): Xaa in position 93 is any amino acid
  Variant (95)..(101): Xaa in position 95 to 101 is any amino acid
  Variant (102)..(103): Xaa in position 102 to 103 is any or no amino acid
  Variant (105)..(106): Xaa in position 105 to 106 is any amino acid
  Variant (108)..(108): Xaa in position 108 is any amino acid
  Variant (111)..(115): Xaa in position 111 to 115 is any amino acid
  Variant (116)..(116): Xaa in position 116 is any or no amino acid
  Variant (118)..(120): Xaa in position 118 to 120 is any amino acid
AXXXAXXXXXXXXXXXXXXXDXXGXXXXXXRXXXXXXXXXXXXXXXKAXXXXXXXXXXXXXXXXXXXXXXXXXXXXXXXXXXXXXXXXXXGGXPXXXXXXXXXGXXGXSGXXXXXXDXXXA

SEQ ID NO: 112379 - protein, 30 aa, Artificial sequence
  protein pattern
  Variant (2)..(2): Xaa in position 2 is Gly, Leu or Val
  Variant (3)..(3): Xaa in position 3 is any amino acid
  Variant (4)..(4): Xaa in position 4 is Ala, Ile, Leu, Pro or Val
  Variant (5)..(8): Xaa in position 5 to 8 is any amino acid
  Variant (9)..(9): Xaa in position 9 is Ala, Asp, Glu, Gly, Asn, Gln or Ser
  Variant (10)..(12): Xaa in position 10 to 12 is any amino acid
  Variant (14)..(14): Xaa in position 14 is Ala or Gly
  Variant (15)..(15): Xaa in position 15 is Ile, Leu, Met or Val
  Variant (17)..(17): Xaa in position 17 is any amino acid
  Variant (19)..(19): Xaa in position 19 is any or no amino acid
  Variant (21)..(24): Xaa in position 21 to 24 is any amino acid
  Variant (25)..(25): Xaa in position 25 is any or no amino acid
  Variant (27)..(29): Xaa in position 27 to 29 is any amino acid
  Variant (30)..(30): Xaa in position 30 is Ala, Cys, Gly or Ser
GXXXXXXXXXXXGXXGXSXGXXXXXDXXXX

SEQ ID NO: 112380 - DNA, 783 bp, Escherichia coli
  CDS (1)..(783): transl_table=11
atgctgttaaatgcgctggcgtcgctcggacataaagggattaaaaccctgagaacgttcgggcgggccgggttaatgttattcaatgcgctggtcggcaaaccggaatttcgcaaacatgcgccgctgctggtgcgccagctctataatgtcggcgtcctgtcgatgctgattattgtggtttctggcgtgttcatcggaatggtgttggggctgcaaggttatctggttctgaccacttatagtgcggaaaccagtctgggtatgctggtggcgttatcgctactgcgtgaactggggccggtggttgccgcgttgttgtttgccgggcgtgctggttcggcgctaaccgcagaaatcggcctgatgcgcgctacagagcaactctccagtatggagatgatggcggtggatccgctgcgtcgggttatttctccccgtttctgggctggggttatttcattaccactgttgacggttattttcgtcgccgtggggatctggggcggatctctggtcggcgtcagttggaaaggcattgatagcgggttcttctggtcggcaatgcaaaatgccgtcgactggcgtatggatctggtcaactgtctgattaagagcgtggtgttcgccatcacggtgacgtggatttcgttgtttaacggctacgacgccatcccgacgtctgccgggattagccgggcaaccactcgcaccgttgtccactcgtctctggctgttctggggctggattttgtgctgaccgcattgatgtttgggaattaa

SEQ ID NO: 112381 - protein, 260 aa, Escherichia coli
MLLNALASLGHKGIKTLRTFGRAGLMLFNALVGKPEFRKHAPLLVRQLYNVGVLSMLIIVVSGVFIGMVLGLQGYLVLTTYSAETSLGMLVALSLLRELGPVVAALLFAGRAGSALTAEIGLMRATEQLSSMEMMAVDPLRRVISPRFWAGVISLPLLTVIFVAVGIWGGSLVGVSWKGIDSGFFWSAMQNAVDWRMDLVNCLIKSVVFAITVTWISLFNGYDAIPTSAGISRATTRTVVHSSLAVLGLDFVLTALMFGN

SEQ ID NO: 112382 - DNA, 1038 bp, Oryza sativa (japonica cultivar-group); identical to SEQ ID NO: 17639
  CDS (1)..(1038)

SEQ ID NO: 112383 - protein, 345 aa, Oryza sativa (japonica cultivar-group); identical to SEQ ID NO: 17640

SEQ ID NO: 112384 - DNA, 1134 bp, Helicobacter pylori 26695
  CDS (1)..(1134): transl_table=11
atgaagacagagaaacaaaaatttttagagatgcgtaaagatggggcgaactctgtgctgattttaagaggggattgggattttaaaacgagcgtgtttcgtttagatgagttgaaaaaaaatttattagatcatcaagggcctttaaaaatggatttttcagggtgccaaaaagtggattttgtttttggcatgtttttatttgatttagttaaggagcgttctttaaacattgaattgtgtaacgtgagtgagaataacgcatgcgctttgaaagtggttaaagactggcttgaaaaagaagaggatttagagtctaaaaaagcgggcaaacactacgaacttttgatcactaaattgggtaagagtatcgtagagacttataatacctttttaaacgcattcaatttttgcggcatgattttattctacttcattaaaagcgttttcaaccccaaacgcttttgtatcactcctttgctctatcatatcaatgaatccgggtttaaggttttgccagtgagtattttaacggtgtttatcgtggggtttgccgttgctttacaaggggctttacaattacaagacatgggcgcgcctttaatgtcggtggaaatgacggctaaactcgctttaagagaaatcggcccttttattttaacccttgtggtggccgggaggagcgcgagcagttttaccgcgcaaattggggtgatgaagatcactgaggaattagacgcgatgaaaaccatgggctttaacccttttgaatttttagtgttgcctagggtgttagccttagtgattgttttgcctttattggtgtttattgccgatgcgttcgccattcttgggggcatgtttgcgattaaataccaattggatttaggcttcccgagctatattgacagattccatgacacagtgggttggaaccattttttggtagggattgtcaaagcccctttttgggggtttgcgattgcgatggtagggtgcatgcgcgggtttgaagtcaagggggatactgagagcattgggcgcttgaccactattagcgtcgtgaacgctttgttttggatcattttcttagacgctattttttctatcatcttttctaagttgaacatataa

SEQ ID NO: 112385 - protein, 377 aa, Helicobacter pylori 26695
MKTEKQKFLEMRKDGANSVLILRGDWDFKTSVFRLDELKKNLLDHQGPLKMDFSGCQKVDFVFGMFLFDLVKERSLNIELCNVSENNACALKVVKDWLEKEEDLESKKAGKHYELLITKLGKSIVETYNTFLNAFNFCGMILFYFIKSVFNPKRFCITPLLYHINESGFKVLPVSILTVFIVGFAVALQGALQLQDMGAPLMSVEMTAKLALREIGPFILTLVVAGRSASSFTAQIGVMKITEELDAMKTMGFNPFEFLVLPRVLALVIVLPLLVFIADAFAILGGMFAIKYQLDLGFPSYIDRFHDTVGWNHFLVGIVKAPFWGFAIAMVGCMRGFEVKGDTESIGRLTTISVVNALFWIIFLDAIFSIIFSKLNI

SEQ ID NO: 112386 - DNA, 738 bp, Aquifex aeolicus VF5
  CDS (1)..(738): transl_table=11
atgacgaaatttctggaagaagtcggaagggccacgcttttgaccctgtggtccatcttctttttattcaaaaaaccgccccgcttaaaacacttcatctcccagctcacttacgttgcggctgaaaccacccccgtggtgcttgtgacttctctcttcaccggaggagttattgccttacagacctactctacctttcacaggtttaacgcggaatacctgataggtgcggtggttgccatatccatgggaagggaactaggaccggttctcacctctctcatggtggtggcaagggttgggtcggcgatgaccgcgagtataggaactatgagaattacacagcagatagatgccctggaagttatggctataaacccaataagttttttagtaacgccaaggattttcgcaacaacgttcggagtacctttacttaccgtactttcggatgttgcggggatattcggcgggtggttcgtggcaactaaactcttcggagttaacgaatacctttactggcagaagatggttgatttaacggagtttcacgacatcgtggggggactgtacaaggctacctttttcggttttataatcggagcggtaagttgttactacgggttttacactaaaggtggaactgcgggtgtgggaaaggctaccacaaactccgtcgtgacttcttcaatgttaatcctgatttccgactacttcctgaccgctgttatattctaa

SEQ ID NO: 112387 - protein, 245 aa, Aquifex aeolicus VF5
MTKFLEEVGRATLLTLWSIFFLFKKPPRLKHFISQLTYVAAETTPVVLVTSLFTGGVIALQTYSTFHRFNAEYLIGAVVAISMGRELGPVLTSLMVVARVGSAMTASIGTMRITQQIDALEVMAINPISFLVTPRIFATTFGVPLLTVLSDVAGIFGGWFVATKLFGVNEYLYWQKMVDLTEFHDIVGGLYKATFFGFIIGAVSCYYGFYTKGGTAGVGKATTNSVVTSSMLILISDYFLTAVIF

SEQ ID NO: 112388 - DNA, 1134 bp, Helicobacter pylori J99
  CDS (1)..(1134): transl_table=11
atgaagacagagaaacaaaaatttttagagatgcgtaaagatggggctaactctgtgctgattttaagaggggattgggattttagaacgagcgtgtttcgtttagatgagttgaaaaaaaatttattagatcatcaagggtctttaaaaatggatttttcagggtgtcaaaaaatagattttgtttttggcatgtttttatttgatttagttaaggagcgttctttaaacattgaattgtgtaacgtgagcgagaataacgcttgcgctttgaaagtggttaaagactggcttgaaaaagaagacgatttggaatctaaaaaagcgggcaaaaaatacgaactcatgatcactaaattgggtaagagtcttgtagagacttacaacacctttttaaacgcgttcaatttttgcggcatgattttattttacttcattaaaagcgttttcaaccccaaacgcttttgcatcattcctttgctctatcatattaatgaatccgggtttaaggttttgccggtgagtattttaacggtgtttatcgtggggtttgccgttgctttacaaggggctttacaactacaagacttgggcgcgcctttgatgtcggtggaaatgacggccaaactcgctttaagagagatcggccctttcattttaacccttgtggtggccgggaggagcgcgagcagttttaccgcccaaattggggtgatgaagatcactgaagaattggatgcgatgaaaaccatgggctttaacccttttgaatttttagtgttgcctagggtgttagccttagtgattgttttgcctttattggtgtttatcgctgatgcgttcgccattcttgggggtatgtttgcgattaaataccaattggatctaggctttccaagctatatagacagactgcatgacacagtgggttggaatcattttttggtagggattgtcaaagcccctttttgggggtttgcgattgcgatggtggggtgcatgcgcgggtttgaagtcaagggggataccgagagcattgggcgcttgaccactattagcgtcgtgaatgcgttattttggatcattttcttagacgctattttttctattctcttttctaagttgaacatataa

SEQ ID NO: 112389 - protein, 377 aa, Helicobacter pylori J99
MKTEKQKFLEMRKDGANSVLILRGDWDFRTSVFRLDELKKNLLDHQGSLKMDFSGCQKIDFVFGMFLFDLVKERSLNIELCNVSENNACALKVVKDWLEKEDDLESKKAGKKYELMITKLGKSLVETYNTFLNAFNFCGMILFYFIKSVFNPKRFCIIPLLYHINESGFKVLPVSILTVFIVGFAVALQGALQLQDLGAPLMSVEMTAKLALREIGPFILTLVVAGRSASSFTAQIGVMKITEELDAMKTMGFNPFEFLVLPRVLALVIVLPLLVFIADAFAILGGMFAIKYQLDLGFPSYIDRLHDTVGWNHFLVGIVKAPFWGFAIAMVGCMRGFEVKGDTESIGRLTTISVVNALFWIIFLDAIFSILFSKLNI

SEQ ID NO: 112390 - DNA, 777 bp, Vibrio cholerae O1 biovar eltor str. N16961
  CDS (1)..(777): transl_table=11
atgcgatgggtcagctctgttgggcaacgcacgctggcggtcagtgaaacttttggccgcgcaagcttaatgctgtttggtgcgctggtagggcgtccgcagccgattcgccattttccgctcctcgttcgccagttatacagcattggtgtgcagtcactggcgatcattatcgtctctgggctctttattggcatggtgctcagcttacaaggctatgtgattttggtcgattacggcgcagaaaccagcctaggccagatggtggcgttatcattgctgcgtgaattaggcccagtggtcacggcactgctgtttgctggacgagcgggctctgccttaaccgccgaaattggcttgatgaaagccaccgagcagctgtctagccttgaaatgatggcggtcgatccactgaaacgcgttattgcgccacgcttttgggcgggagtcatctccatgccgctgctggcgatgattttcatggcggtcggcatttggggcggccaattggttggagtggattggaaaggcattgatcacggcagtttctggtcagccatgcaagcttcggttgaattgggccaggatatcggtaacagcaccatcaaatgtgtggtgtttgcgtttaccgtgacttggattgctctgtttaacggttatgacgcgatcccgacttcagaagggatcagccgagcgaccactcgcaccgtagtgcactcatcactggccgtacttgggctggattttgttctaaccgcattgatgtttgggaactga

SEQ ID NO: 112391 - protein, 258 aa, Vibrio cholerae O1 biovar eltor str. N16961
MRWVSSVGQRTLAVSETFGRASLMLFGALVGRPQPIRHFPLLVRQLYSIGVQSLAIIIVSGLFIGMVLSLQGYVILVDYGAETSLGQMVALSLLRELGPVVTALLFAGRAGSALTAEIGLMKATEQLSSLEMMAVDPLKRVIAPRFWAGVISMPLLAMIFMAVGIWGGQLVGVDWKGIDHGSFWSAMQASVELGQDIGNSTIKCVVFAFTVTWIALFNGYDAIPTSEGISRATTRTVVHSSLAVLGLDFVLTALMFGN

SEQ ID NO: 112392 - DNA, 786 bp, Pasteurella multocida subsp. multocida str. Pm70
  CDS (1)..(786): transl_table=11
atgatccagtttatttcagagttaggtcatcacgcgatcagttcatgtcgtgccattgggcgtgcgggctttatgttatttggggctttaattggtaaaccgcaatggcgcaagcatactccgttattaattaagcaactgcatgtgcttggcgtgcaatcattattgattatcatgttgtcagggcttttcattggcatggtattgggattacaaggatatgttgtgttagtggatttttccgcggaaaccagtttaggtcaactcgtcgcgttatccttactacgtgaattaggaccagtagtcacggctcttctttttgcggggcgtgctggttctgcactgacggcagaaattggcttaatgaaagcgacagaacaattatccagtttagagatgatggcggtggatcccctccgtcgtgttattgctccgcgcttttgggcgggcgtgatcgcgatgccgattttagcgattatttttaccgctattggcatttggggtggttcattagtcggggttgactggaaaggtgttgacgcagggagtttttggtcggtgatgcaaaatgcggtgacatgggaaaaagatttgcttaatggctttatcaagagcctgtgtttcgctatcgctgtagtatggattgcgttatttaacggttatgactgtattccgacttcggaagggattagtaaagcgaccacaagaactgtggtccatgcctcactggttgtgttgggattagattttgtattaacggcactgatgtttggtgcgagtgtatag

SEQ ID NO: 112393 - protein, 261 aa, Pasteurella multocida subsp. multocida str. Pm70
MIQFISELGHHAISSCRAIGRAGFMLFGALIGKPQWRKHTPLLIKQLHVLGVQSLLIIMLSGLFIGMVLGLQGYVVLVDFSAETSLGQLVALSLLRELGPVVTALLFAGRAGSALTAEIGLMKATEQLSSLEMMAVDPLRRVIAPRFWAGVIAMPILAIIFTAIGIWGGSLVGVDWKGVDAGSFWSVMQNAVTWEKDLLNGFIKSLCFAIAVVWIALFNGYDCIPTSEGISKATTRTVVHASLVVLGLDFVLTALMFGASV

SEQ ID NO: 112394 - DNA, 1146 bp, Pseudomonas aeruginosa PAO1
  CDS (1)..(1146): transl_table=11
atgacgacacagccgcaacccggccacgtgagcctggatagctccacccagcccgcccgcgtcagagccataggtgattggacgctcgcccactacacggctctggagcgcgaggtgacgcgcctgcgcagcgaagtggcggccaacgtcagcttcgacctgagccaactgggcgccctggataccgccggcgccgccctgctcgccgaattgctcggcgccgagcgcctggccgacctcgccgagctggagcccggcctgccgcgcgagcgccaggccctgctgaagaccgtcggccacgccctgcacgacttctgcgagccggagaaacccaagccgccaaccaccgccatcgaactgctggctcgcatcggttgtgccatggagaccttctggctgcacctcaaggcactcctcggcttcatcggcctgaccctggagaccctgttccgcagcctggtccgcccggccagttggcgggtcacgccgctggtggcgaacatcgagaagagcggcctggacgcggtgccgatcatcgccctgctgaccttcctggtcggcgcggtgatcgcctttctcggcgccacggtgctggccaacttcggcgcgaccatctacacggtcaacctggtggtgttctccttcctccgcgagttcgccgtgctgctcaccgcgatcctcatggccggccgcaccgccagcgccttcaccgcgcagatcggctcgatgaaggccaacgaggagatcgacgcgatccgcgccctcggcctcaaccccatcgagctgctggtgctgccgcgggtgctggcgctgctggtatcgctaccgatgctgaccttcgtcggcatgctctgcggcatcgtcggcggcatgaccgtctgcgcctggaccctggacatcccgccggcgatgttcctgtcgatcatggaggacggaatcggcgtacagcatttcctggtcggtatcagcaaggccccgctgttcgccttcctgatcgccgtgatcggctgcctggaaggcttcaaggtcagcggcagcgcccagtcggtgggcgagcacaccaccaccagcgtggtccactcgatcttcgtggtgatcctgctcgacgccctcgccgcgctgctcttcatggagatgggctggtga

SEQ ID NO: 112395 - protein, 381 aa, Pseudomonas aeruginosa PAO1
MTTQPQPGHVSLDSSTQPARVRAIGDWTLAHYTALEREVTRLRSEVAANVSFDLSQLGALDTAGAALLAELLGAERLADLAELEPGLPRERQALLKTVGHALHDFCEPEKPKPPTTAIELLARIGCAMETFWLHLKALLGFIGLTLETLFRSLVRPASWRVTPLVANIEKSGLDAVPIIALLTFLVGAVIAFLGATVLANFGATIYTVNLVVFSFLREFAVLLTAILMAGRTASAFTAQIGSMKANEEIDAIRALGLNPIELLVLPRVLALLVSLPMLTFVGMLCGIVGGMTVCAWTLDIPPAMFLSIMEDGIGVQHFLVGISKAPLFAFLIAVIGCLEGFKVSGSAQSVGEHTTTSVVHSIFVVILLDALAALLFMEMGW

SEQ ID NO: 112396 - DNA, 777 bp, Neisseria meningitidis MC58
  CDS (1)..(777): transl_table=11
atgaactttatccgttccgtcggggcgaaaaccctcggccttattcaatccctcggcagtatcacgctgtttctgctgaacattctggcgaagtccggtacggctttcgtccgtccgcgcctgagcgtgcgccaagtgtatttcgccggtgtgctgtcggtgttgattgttgccgtttcggggctgtttgtcggcatggtcttgggtttacagggctatacgcagttgtcgaaattcaaatccgccgatattttgggctatatggtcgcggcttcgctattgcgcgagctgggtccggtattggcagcgattttgtttgccagcagcgcgggcggtgcgatgaccagcgaaatcggtctgatgaaaacgaccgaacagctcgaagcgatgaatgtgatggcggtaaaccctgtcgcccgcgtggttgcgccgcgcttttgggcgggcgtgttttccatgccgcttttggcttcgattttcaacgtggcgggcattttcggtgcgtatttggttggtgtaacctggctgggcttggacagcggtattttctggtcgcaaatgcagaacaacatcacgatacattacgatgtaatcaacggtctgatcaaatccgccgcgttcggcgtggcggtaacgctgattgccgtgcatcagggcttccattgcgtcccgacttcggaaggcattttgcgcgccagcacgcgcacggtggtttcgtccgccctgacgattttggcggtcgattttatattgaccgcgtggatgtttacagattga

SEQ ID NO: 112397 - protein, 258 aa, Neisseria meningitidis MC58
MNFIRSVGAKTLGLIQSLGSITLFLLNILAKSGTAFVRPRLSVRQVYFAGVLSVLIVAVSGLFVGMVLGLQGYTQLSKFKSADILGYMVAASLLRELGPVLAAILFASSAGGAMTSEIGLMKTTEQLEAMNVMAVNPVARVVAPRFWAGVFSMPLLASIFNVAGIFGAYLVGVTWLGLDSGIFWSQMQNNITIHYDVINGLIKSAAFGVAVTLIAVHQGFHCVPTSEGILRASTRTVVSSALTILAVDFILTAWMFTD

SEQ ID NO: 112398 - DNA, 810 bp, Caulobacter crescentus CB15
  CDS (1)..(810): transl_table=11
atgaccgcggccgaggcggcccggcgggtcgccacccatcccatccaggccctggggcgctcgaccctggccaccgtgcgcatggtcggcgcggtcggcgtcttcgccgtgcgcggggtcatcgcggccctcacgccgatctggttcctcagccagctgcgccggcagatcgtcgcgatcggcttcttttcgctgccggtcgtgggccttaccgccgtattcaccggcgcggccctggcgctgaacatcttcaccggcgggggccggttcaacgccgagcaggtcatgccccagatcgtcgcgctgggcatcacgcgcgaactgggccccgtgctcgcagcgctgatgctggccggccgggtttcggcggccatcgccgccgagatcggggccatgcgcgcgaccgagcagatcgacgccatgcgcaccctgtcgaccgaccccttccgctatctggtcgcgccccgcctgctggcggcggtgctgacgctgccgctgctcaccgccgtggccgacatcatcggcatcgccggcggctggctggtggccacgcgggtgctggagttcaatccgaccgtctatatccgcaacaccatcgacttccttgagagctgggacatcatctcgggcctgatcaaggcggcggtgttcggcttcatcgtggccctgatgggctgctatcacggctacaacgcctcgggcggcgcgcgcggcgtcggccgggccacgacccacgcggtggtctcctcggcgatactgatcttcgccacggactatctcctgaccacccttttcacgcacatgtcatga

SEQ ID NO: 112399 - protein, 269 aa, Caulobacter crescentus CB15
MTAAEAARRVATHPIQALGRSTLATVRMVGAVGVFAVRGVIAALTPIWFLSQLRRQIVAIGFFSLPVVGLTAVFTGAALALNIFTGGGRFNAEQVMPQIVALGITRELGPVLAALMLAGRVSAAIAAEIGAMRATEQIDAMRTLSTDPFRYLVAPRLLAAVLTLPLLTAVADIIGIAGGWLVATRVLEFNPTVYIRNTIDFLESWDIISGLIKAAVFGFIVALMGCYHGYNASGGARGVGRATTHAVVSSAILIFATDYLLTTLFTHMS

SEQ ID NO: 112400 - DNA, 852 bp, Synechocystis sp. PCC 6803; identical to SEQ ID NO: 17641
  CDS (1)..(852): transl_table=11

SEQ ID NO: 112401 - protein, 283 aa, Synechocystis sp. PCC 6803; identical to SEQ ID NO: 17642

SEQ ID NO: 112402 - DNA, 792 bp, Nostoc sp. PCC 7120; identical to SEQ ID NO: 17643
  CDS (1)..(792): transl_table=11

SEQ ID NO: 112403 - protein, 263 aa, Nostoc sp. PCC 7120; identical to SEQ ID NO: 17644

SEQ ID NO: 112404 - DNA, 768 bp, Ralstonia solanacearum GMI1000
  CDS (1)..(768): transl_table=11
atgatttcgtcgatcggcttcctggttcgcatcctgatcagccgcctcggctacgcgacacgcatgctgttggcgctgatcggcgccggccgcgacgtgctgcgccgcccgcgcctgctggtcgagcagttgcgtttcatcggcaacgactcgttcatcatcatcgcggtatcgggcctgttcgtcggcttcgtgctgggcctgcagggctactacacgctcaaccgctacggctcggagcaggcgctgggcctgctggtggcgctgtcgctggtgcgcgagctggggccggtggtgacggcgctgctgttcgccggccgcgccggcacttcgctgaccgccgagatcggcctgatgaaggccaacgaagagctgatcgccatggaaatgatggcggtcgatcctcttgcccgcgtgctggcgccgcgcttctggggcggcttcatcgccatgccgttgctggccgccatcttcagcgcggtgggcattctgggcggatacttcgtcggcgtgggcctgatcggcgtggatgccggcgcattctggtcgcagatgcaggccggcgtggacgtggtgaaagacgtgctcaacggcgtcatcaagagcgtggtgttcggcgtggcggtcaccttcgtcgcgctgtaccagggctatgaggccaaggccacgcccgagggcgtgtcgcgtgcgaccacccgcaccgtggtgattgcgtcgctggccgtgctggcgttggacttcgtgctgaccgcgctgatgttcagttga

SEQ ID NO: 112405 - protein, 255 aa, Ralstonia solanacearum GMI1000
MISSIGFLVRILISRLGYATRMLLALIGAGRDVLRRPRLLVEQLRFIGNDSFIIIAVSGLFVGFVLGLQGYYTLNRYGSEQALGLLVALSLVRELGPVVTALLFAGRAGTSLTAEIGLMKANEELIAMEMMAVDPLARVLAPRFWGGFIAMPLLAAIFSAVGILGGYFVGVGLIGVDAGAFWSQMQAGVDVVKDVLNGVIKSVVFGVAVTFVALYQGYEAKATPEGVSRATTRTVVIASLAVLALDFVLTALMFS

SEQ ID NO: 112406 - DNA, 765 bp, Streptomyces coelicolor A3(2)
  CDS (1)..(765): transl_table=11
gtgatcaccggcgccctgcggcagaccgggcggctcttcgcgctcgcggcggaagtcgtccgggccgtgttccgaagacccttccagttccgcgagttcgtcgagcagttctggttcgtcgccagcgtgaccatcctgcccgccgccctggtctcgatccccttcggagccgtcatcgcgctccaggtcggctccctgaccgagcagctcggcgcccagtcgttcaccggcggcgccagcgtcctcgccgtcgtccagcaggccagcccgctcatcgtcgcgctgctcatcgccggcgccggcggctcggccatctgcgccgacctcggctcccgcaggatccgggaggaactcgacgccatggaggtcatgggcgtctccccggtgcagcgcctggtcgtgccccgggtgctggccgcgatgggcgtcgcggtcctgctcaacggcctggtctccgtcgtcggcatcctcggcggctacttcttcaacgtcatcatgcagggcggcacccccggcgcctacctctccagcttctccgccctcgcccagctgcccgacctctacgtcagcgaactcaaggcgctggtcttcgggttcatcgcgggcatcgtcgccgcctaccggggactcaacccgcgcggcggccccaagggcgtcggcgacgccgtcaaccagtccgtcgtcatcaccttcctcctgctcttcttcgtcaacatggtgatgacggccgtctacctccagatcgtcccgccgaagggaggctga

SEQ ID NO: 112407 - protein, 254 aa, Streptomyces coelicolor A3(2)
MITGALRQTGRLFALAAEVVRAVFRRPFQFREFVEQFWFVASVTILPAALVSIPFGAVIALQVGSLTEQLGAQSFTGGASVLAVVQQASPLIVALLIAGAGGSAICADLGSRRIREELDAMEVMGVSPVQRLVVPRVLAAMGVAVLLNGLVSVVGILGGYFFNVIMQGGTPGAYLSSFSALAQLPDLYVSELKALVFGFIAGIVAAYRGLNPRGGPKGVGDAVNQSVVITFLLLFFVNMVMTAVYLQIVPPKGG

SEQ ID NO: 112408 - DNA, 750 bp, Xanthomonas axonopodis pv. citri str. 306
  CDS (1)..(750): transl_table=11
atggccttcgccgattccattcgcgccttcggccgcgccggcctgttttcgctgacggtgctgcgcggctcgctgcccacgcgcgatttcattgccgaactggtccgcgagatctacaaggtcggcgcgcgctcgttgccgatcattgcggtgggcggcgccttcgtcggcctggtgctgaccttgcagggctatcgcacgctcaccacctacggtgcatcggatgcgttgtccacgctgttgggcctgtcgctgtatcgcgaactggcgccggtgctgaccgccttgttgttcatcggccgtgccggcagttcgatcgccgccgagctcggtctgatgcgcgccaccgaccagatcaaggcgctggaactgatggccatcgacccggtggccaaggcagtggccccgcgcttctgggcggcggtgctgacggtgccgctgctcaccggcgtgttctgctcgctggccatcaccggcggctatttcgaagcggtgcatgtgctgggcatcgacaacggcacgttctggtcgggtctgagcaatagcgtggacttctgggacgatttcggcgtggcgatgctcaagtcggcgatcttcggcggcaccgcggcactggttgccgcctacgtgggcttccatgccgaaccgaccatcgaaggcacctcggtcgccaccacccgcgcggtggtgaacgcctcgttgctggtgctgatgttcaacttcgtcctttctgcaatgttgtttaggtga

SEQ ID NO: 112409 - protein, 249 aa, Xanthomonas axonopodis pv. citri str. 306
MAFADSIRAFGRAGLFSLTVLRGSLPTRDFIAELVREIYKVGARSLPIIAVGGAFVGLVLTLQGYRTLTTYGASDALSTLLGLSLYRELAPVLTALLFIGRAGSSIAAELGLMRATDQIKALELMAIDPVAKAVAPRFWAAVLTVPLLTGVFCSLAITGGYFEAVHVLGIDNGTFWSGLSNSVDFWDDFGVAMLKSAIFGGTAALVAAYVGFHAEPTIEGTSVATTRAVVNASLLVLMFNFVLSAMLFR

SEQ ID NO: 112410 - DNA, 804 bp, Thermosynechococcus elongatus BP-1; identical to SEQ ID NO: 17645
  CDS (1)..(804): transl_table=11

SEQ ID NO: 112411 - protein, 267 aa, Thermosynechococcus elongatus BP-1; identical to SEQ ID NO: 17646

SEQ ID NO: 112412 - DNA, 786 bp, Shewanella oneidensis MR-1
  CDS (1)..(786): transl_table=11
gtgaagttattagacaatattgccgaccttggccgcagcgctatcgagttagtgctcggttttggccgtgcgggcctgatgctgtggggcgcgattgttcgttggcctcgggtgcgtaaaggctttccattattagtgcgccaaatctatgtggtcggcgtacaatctatggttattattgttgtttccggcctgtttattggcatggtgttagcccttcagggttacaacattttggtggggtttgggacggaagaaagtttaggccccatggtagccttaagtttactgcgtgagctcggtccggtggtcacggcattgttatttgctggccgcgcaggttctgcactcactgctgaaatcggtctgatgaagagtaccgagcagttatcaagcttagaaatgatggcgattgacccgctcaggcaaatcattgcgccacgattttgggctggggtgatcagcatgcctttattggcgttgatgtttactgctgttgggatttatggcggccatttagtgggagtagagtggaagggtatcgatagcggtgctttctggtcaattttgcaggcctcggtagaatggcgccaagacatagttaactgcttgattaaaagtggggtctttgccgtcgtggtgacttggattgctctctaccgtggttatcaagtgatccctaatccagaggggatcagccgtgcaaccacctcaaccgtggtgcaatcaagcctcgccgtattggcattggactttttactgacagccctgatgtttggccgctaa

SEQ ID NO: 112413 - protein, 261 aa, Shewanella oneidensis MR-1
MKLLDNIADLGRSAIELVLGFGRAGLMLWGAIVRWPRVRKGFPLLVRQIYVVGVQSMVIIVVSGLFIGMVLALQGYNILVGFGTEESLGPMVALSLLRELGPVVTALLFAGRAGSALTAEIGLMKSTEQLSSLEMMAIDPLRQIIAPRFWAGVISMPLLALMFTAVGIYGGHLVGVEWKGIDSGAFWSILQASVEWRQDIVNCLIKSGVFAVVVTWIALYRGYQVIPNPEGISRATTSTVVQSSLAVLALDFLLTALMFGR

SEQ ID NO: 112414 - DNA, 1134 bp, Pseudomonas putida KT2440
  CDS (1)..(1134): transl_table=11
atggagcctatgaccaaccccagcgccaccctggacaccagcagccaaccggcctgcctgcgtattaccggtgactggaccctggcacactacgccaacctcaagcgcgagagcgagcgcctgcgctcgcattgccctgccgacaccgtcgccgacctcagccagctgggccgcctggacactgccggcgcttcgctgctggccgaactgctaggctccgagcgcctgtcgcactgcacccacgcgctgcctgaagccagccaggcgctgctgaaaaacgtctactgctcggtccaggattactgcatcccggtcaaggagcccgagcgcaatgtgctgttgctgctgctggagcgtatcggccgcgccgtcggcacgctgtggcaggacagcatgcagctgcttggtttcgtcggtgtgattctggaaaccttgctgcgccgcgccttccagccacatcgctggcgcttcactcctgtggtggcacatattgagcagaccgggctggacgccgcgcccatcgttgcgttgctgacctttctggtaggcgccgtagtcgcttttctcggtgccacggtgctggccgacttcggcgcgaccattttcaccgtcgacctggttgcgttctcgttcctgcgcgagttcgccgtgctgctgacagccattctcatggccggccgcactgccagcgcgttcaccgcgcagatcggctcgatgaaggccaacgaagaaattgacgccatccgcacgctgggcctcaaccccatggagctgctggtggtgccgcgggtactggccctgctgatttcgctgccgttgctcacctttgtcgccatgatctgcggcatcgttggcggggcggtggtatgcgccctgacactggatatttcgccggccatgttcctgtcgctgctgcaaagcgacattggcgtgcagcacttcctggtaggcctggccaaggcaccgttctttgccttcctgatcgccgccatcggctgcctggaaggcttcaaggtcagcggcagcgccgagtcggtgggggcacacaccacctcggcagtggtgcagtcgatttttgtggtcatcgtgctggatgcggtggcagcgctgttcttcatggagatgggctggtga

SEQ ID NO: 112415 - protein, 377 aa, Pseudomonas putida KT2440
MEPMTNPSATLDTSSQPACLRITGDWTLAHYANLKRESERLRSHCPADTVADLSQLGRLDTAGASLLAELLGSERLSHCTHALPEASQALLKNVYCSVQDYCIPVKEPERNVLLLLLERIGRAVGTLWQDSMQLLGFVGVILETLLRRAFQPHRWRFTPVVAHIEQTGLDAAPIVALLTFLVGAVVAFLGATVLADFGATIFTVDLVAFSFLREFAVLLTAILMAGRTASAFTAQIGSMKANEEIDAIRTLGLNPMELLVVPRVLALLISLPLLTFVAMICGIVGGAVVCALTLDISPAMFLSLLQSDIGVQHFLVGLAKAPFFAFLIAAIGCLEGFKVSGSAESVGAHTTSAVVQSIFVVIVLDAVAALFFMEMGW

SEQ ID NO: 112416 - DNA, 801 bp, Pseudomonas putida KT2440
  CDS (1)..(801): transl_table=11
ttgatgcgcagaaaatccttactcgagcgtgtccgcctgctgggccgctcggcaatcgacgtgctggccgtgctcgggcgttcgtgcctgttcctgttccatgcgctggtcggtcgcggtggtattggcggcggcttccagctgctgaccaagcagttgtactcggtgggtgtgctgtcgctggcgatcgtcgtcgtgtccggtgtgttcatcggcatggtgctggcgctgcagggctacagcatcctgaccaagtacggctcggagcaggcggtagggcagatggtcgccctgaccctgctgcgtgaacttggcccggtggtaacggcgttgctgttcgccgggcgtgccggttccgcgctgaccgccgaaatcggcaacatgaagtccaccgagcagttgtcgagcctggaaatgatcggtgtcgacccgctcaagtacatcgttgcgccacgcctgtgggccggtttcatctcgctgccgctgctggcgctgatcttcagcgtggtcggtatctggggtggctcgtgggtggcggtggactggctgggtgtctacgagggctcgttctgggccaacatgcagaacagtgtttctttcactgacgacgtgctcaacgggctggtcaagagcgtggtgtttgctttcgtctcgacctggatcgccgtattccaggggtacgactgtgagcccacctcagaagggatcagccgtgcaaccaccaagaccgtggtctatgcctcgttggcagtgctgggtctggactttattctgaccgccttgatgtttggagatttctga

SEQ ID NO: 112417 - protein, 266 aa, Pseudomonas putida KT2440
MMRRKSLLERVRLLGRSAIDVLAVLGRSCLFLFHALVGRGGIGGGFQLLTKQLYSVGVLSLAIVVVSGVFIGMVLALQGYSILTKYGSEQAVGQMVALTLLRELGPVVTALLFAGRAGSALTAEIGNMKSTEQLSSLEMIGVDPLKYIVAPRLWAGFISLPLLALIFSVVGIWGGSWVAVDWLGVYEGSFWANMQNSVSFTDDVLNGLVKSVVFAFVSTWIAVFQGYDCEPTSEGISRATTKTVVYASLAVLGLDFILTALMFGDF

SEQ ID NO: 112418 - DNA, 789 bp, Vibrio vulnificus CMCP6
  CDS (1)..(789): transl_table=11
atgcctaacttagtcgacatgatttcagcgctcgggcgtcgcttccttagcttatgtcaatcatttggtaaggcgagcttaatgcttgccggtgcacttgcggggagaccacaaccgcgaaaaacgctgccactattggtaaagcaaatctataacgtgggggtgcagtctttagccatcatcgtggtctctggactcttcattggtatggtgttgagtctacaaggctacgtgattttggtggattacggcgcagaaggcagcctagggcaaatggtcgcgctgtcgttattgcgtgagctagggccagttgtgacggctttgttgtttgctgggcgagcgggctctgcgctcacggctgaaattggcctgatgaaagcgacagagcaactttctagtatggaaatgatggcggttgaccccctaaaaagaatcatagcgccaagattgtgggcaggcattatctcgatgccgctgttggcgatgatcttcatggccgtgggtatttggggcggccaattggtgggtgttgactggaaaggcatcgaccacggcagtttttggtcagccatgcaagcttcggtggagttagggcaagatattggtaacagcatgatcaaatgcgtggtctttgccattaccgtgacttggattgcgctctttaatggttacgatgctattcctacttcggaaggcatcagtcgtgcgacgactcgcacggtggttcactcttctttagcggtgttggggctggattttgtcctcactgcgttgatgtttgggaattaa

SEQ ID NO: 112419 - protein, 262 aa, Vibrio vulnificus CMCP6
MPNLVDMISALGRRFLSLCQSFGKASLMLAGALAGRPQPRKTLPLLVKQIYNVGVQSLAIIVVSGLFIGMVLSLQGYVILVDYGAEGSLGQMVALSLLRELGPVVTALLFAGRAGSALTAEIGLMKATEQLSSMEMMAVDPLKRIIAPRLWAGIISMPLLAMIFMAVGIWGGQLVGVDWKGIDHGSFWSAMQASVELGQDIGNSMIKCVVFAITVTWIALFNGYDAIPTSEGISRATTRTVVHSSLAVLGLDFVLTALMFGN

SEQ ID NO: 112420 - DNA, 750 bp, Xylella fastidiosa Temecula1
  CDS (1)..(750): transl_table=11
atgccactggtatcttcaatcagctcgctaggccgctctggtctgtttgcactcactgtattacgcagctcgctgcccacacgcgacttcttcgccgaactgatccgtgaaatctacaagattggcgcgcgctcgctaccaatcatcgccgtcggaggcgcgttcgtcggcttggtactgaccttgcaaggctaccgcacactcactctgtatggcgcttccgacgcactatccaccctcctaggcctatcactgtatcgcgaacttgcgcccgtgctgactgctctgcttttcatcggacgtgcgggcagctcagtggcggcggaactgagcctgatgcgtgcgaccgatcagatcaaggcactggagctgatggccatcgaccccatcgctaaagcagtggcgccacgcttttgggcagcggtattgactgtacctttactcacaggtgtgttttgctcactggccatctgcagtggttacttccaagcagtccatgtgttaggcatagacaacggtttattctggtcaggattgagcaacagcgtggactttttggaggatttcggcgtagcaatgctcaaatcagcaatctttggtggcacctcggctcttgtggcagcttacgtaggcttccatgcgcaaccaaccattgagggcacttcaatcgcaaccacgcgtgcagtcgtcaacgcgtcattgctggtattgatgtttaacttcgtgctatcagcactattattccgataa

SEQ ID NO: 112421 - protein, 249 aa, Xylella fastidiosa Temecula1
MPLVSSISSLGRSGLFALTVLRSSLPTRDFFAELIREIYKIGARSLPIIAVGGAFVGLVLTLQGYRTLTLYGASDALSTLLGLSLYRELAPVLTALLFIGRAGSSVAAELSLMRATDQIKALELMAIDPIAKAVAPRFWAAVLTVPLLTGVFCSLAICSGYFQAVHVLGIDNGLFWSGLSNSVDFLEDFGVAMLKSAIFGGTSALVAAYVGFHAQPTIEGTSIATTRAVVNASLLVLMFNFVLSALLFR

SEQ ID NO: 112422 - DNA, 798 bp, Pseudomonas syringae pv. tomato str. DC3000
  CDS (1)..(798): transl_table=11
atgcgcaacaagtcactgatggaccgggttcgcctgctggggcgttcggccattgatatcgtcgctgtactgggccgctccggtctgtttctggtgcacgccctgctggggcgcggcggtgcgggcagcagctttcagttgctggtcaagcagctttattcagtcggtgtgatgtcgctggtcatcattgtggtgtccggcatgttcatcggcatggtgctggcgctgcaaggcttcagcattctggccaaatacggctccgagcaggcggtcggccagatggtcgccctgaccctgctgcgtgaactggggccggtggtcaccgccttgctgttcgccggccgcgcaggttctgcgctgtccgccgagatcggcaacatgaagtccaccgagcagttgtcgagccttgagatgatcggtgtcgatccactcaagtacatcgttgcgccgcgcctgtgggcaggttttatctcgctgccgattctggcgatgattttcagcgtggtgggtatctggggcgcgtcctgggtagcaatcgattggctgggcgtctatgacggttctttttggtcgaacatgcaaaacagcgtttctttcacgaacgatgtgctcaatggggtgatcaaaagcgtcgtatttgccttcgtggtgacatggattgccgtttttcagggttacgattgcgatcctacttccgaggggatcagtcgcgcgacgaccaaaaccgtcgtctacgcctcgttggccgtgctgggactggactttattttgaccgccttgatgtttggagatttctga

SEQ ID NO: 112423 - protein, 265 aa, Pseudomonas syringae pv. tomato str. DC3000
MRNKSLMDRVRLLGRSAIDIVAVLGRSGLFLVHALLGRGGAGSSFQLLVKQLYSVGVMSLVIIVVSGMFIGMVLALQGFSILAKYGSEQAVGQMVALTLLRELGPVVTALLFAGRAGSALSAEIGNMKSTEQLSSLEMIGVDPLKYIVAPRLWAGFISLPILAMIFSVVGIWGASWVAIDWLGVYDGSFWSNMQNSVSFTNDVLNGVIKSVVFAFVVTWIAVFQGYDCDPTSEGISRATTKTVVYASLAVLGLDFILTALMFGDF

SEQ ID NO: 112424 - DNA, 792 bp, Vibrio parahaemolyticus RIMD 2210633
  CDS (1)..(792): transl_table=11
atggtcgctagctttattcaatttgtcgcttcattaggaagacgcacgctcgccatctgtgaagcttttggccgtgcaaccttgatgcttgttggcgctatcttctctaagcctcaaccctctaaaagttttcctctactcatcaaacagttgtattccgttggcgtgcaatcactggctatcatcgtagtctccggtttgttcatcggcatggttcttagcttgcaaggctatgtagtgctggtggattacggcgcggaaggcagtcttggtcagatggtcgcgttgtcactactgcgtgaacttgggccggtggttactgcgcttcttttcgctggacgtgcaggctctgcgctgacggcagaaattggtttgatgaaagctactgagcagctttcaagcttagaaatgatggcagttgacccactgaaacgagtgattgcaccacgtttttgggctggggctatctcaatgccactacttgcgatgatcttcatggctgttggcatctggggggcacagctcgtcggtgtggattggaaaggtgtggatcacggcagcttttgggcagccatgcaatcttctgttgagttgggacaagatatcggcaacagcatgatcaaatgctttgtgtttgccattacggtaacttggattgctctatttaatggctacgatgcgattcctacctcggaagggatcagccgagcaactacgcgcactgttgtgcattcttctttagcagtactgggactagactttgtactgaccgcattgatgtttgggaattaa

SEQ ID NO: 112425 - protein, 263 aa, Vibrio parahaemolyticus RIMD 2210633
MVASFIQFVASLGRRTLAICEAFGRATLMLVGAIFSKPQPSKSFPLLIKQLYSVGVQSLAIIVVSGLFIGMVLSLQGYVVLVDYGAEGSLGQMVALSLLRELGPVVTALLFAGRAGSALTAEIGLMKATEQLSSLEMMAVDPLKRVIAPRFWAGAISMPLLAMIFMAVGIWGAQLVGVDWKGVDHGSFWAAMQSSVELGQDIGNSMIKCFVFAITVTWIALFNGYDAIPTSEGISRATTRTVVHSSLAVLGLDFVLTALMFGN

SEQ ID NO: 112426 - DNA, 816 bp, Nitrosomonas europaea ATCC 19718
  CDS (1)..(816): transl_table=11
atgataggaatgatcagtttggctaaacgtatcaggaccattattgaatcgatcgggcacagagtggccgacagtatctggcgactgggatgtgcaacccgtttcgtattgctggtactgttgaaatccctacctagttttctgcgtttccacttgattacacgcgaaatatatttcgccggtgttctgtcactgatcatcattctggtatccggattgttcgtcggtatggtgctgggtctgcaagggtacgaaacattacagaaattcggttctgaatcagccgtaggaacgctggtggcgttatctctcgtacgagagctgggccccgtcattgcggcattgctgtttgccagccgtgccggttcagccatgacggccgaaattggtttgatgaaagcaactgaacaactggctgccatgggaatgatggcggtggatccgatcgcacgtatcgttgcacccagattctggggaggcgtcttttccatgccgttgctggcggcgatgttttcagttatgggcgtgtttggcggatatctggtgacagtggttttcattggcgtagatgaaggatctttctggtcacagatgcagaattcggttgattttcgttatgacattgtgaacggtgtcatcaaaagttgtttcttcggggtggtcgtaacggcgattgctgtatttgaagggtttgatgcgccgccgacggctgaaggggtatcgggggcgaccacccgtacggtggtaacctcttcgctcgcgattctggggctggatttcgttttgactgcattcatgttcagaggagtaagctga

SEQ ID NO: 112427 - protein, 271 aa, Nitrosomonas europaea ATCC 19718
MIGMISLAKRIRTIIESIGHRVADSIWRLGCATRFVLLVLLKSLPSFLRFHLITREIYFAGVLSLIIILVSGLFVGMVLGLQGYETLQKFGSESAVGTLVALSLVRELGPVIAALLFASRAGSAMTAEIGLMKATEQLAAMGMMAVDPIARIVAPRFWGGVFSMPLLAAMFSVMGVFGGYLVTVVFIGVDEGSFWSQMQNSVDFRYDIVNGVIKSCFFGVVVTAIAVFEGFDAPPTAEGVSGATTRTVVTSSLAILGLDFVLTAFMFRGVS

SEQ ID NO: 112428 - DNA, 891 bp, Rhodopirellula baltica SH 1
  CDS (1)..(891): transl_table=11
atgtcggagcaagagtccacgaccgaatccgttcttcgcattcaaactgcgaaaccggagctcccgatcgatacgccgatgcggcgatggatcatgcagtggggaaccgctgtggttggtggagtcaccgcggtcggtgatttggcgatgttcacatggcagatgttcgtgtggatgttcacgcgaatgccacgacgcgacacggtcttggtcaatttctaccaggttggcgtgttgagccttccagtggtggccctcaccggatcgttcatcggaatggtgctggcggttcagagttactaccagtttcacaccatcggattggaaacgcatctcggtgtcgtgatcaacacctcgttggttcgtgaactcggaccggtgttagcggcgacgatgttggccgggcgtgtcggtggcgcgatggcggcggttctgggaacgatgcgtgtgacggaacaaatcgatgcgttgaccacgatgggcgccgaccccattcactatttggtcgtgccgcgattcatggcgtgtctgctgttgatcccggcactgaccatcgtggcggacttcatgggaatcgtcggcgggtacttctacagcgtcatcattctcgggattgaccgtgccgcctacctgcaccattcgcgtgaaggcgtggtggcatttgatttgttcaacggaattttcaagagcattttcttcggtggcgtgatcgcaatcatcagttgttatcgcggtttcaattgccaacccggagcggaaggcgttgggaaagccgcaacggaagcgtttgtgtattcgttcgtgatgatcctcgcgattgacctgttcttgaacatcgttttggactgggtgtatttcagtttctacccggaaggcacgagtctgttttag

SEQ ID NO: 112429 - protein, 296 aa, Rhodopirellula baltica SH 1
MSEQESTTESVLRIQTAKPELPIDTPMRRWIMQWGTAVVGGVTAVGDLAMFTWQMFVWMFTRMPRRDTVLVNFYQVGVLSLPVVALTGSFIGMVLAVQSYYQFHTIGLETHLGVVINTSLVRELGPVLAATMLAGRVGGAMAAVLGTMRVTEQIDALTTMGADPIHYLVVPRFMACLLLIPALTIVADFMGIVGGYFYSVIILGIDRAAYLHHSREGVVAFDLFNGIFKSIFFGGVIAIISCYRGFNCQPGAEGVGKAATEAFVYSFVMILAIDLFLNIVLDWVYFSFYPEGTSLF

SEQ ID NO: 112430 - DNA, 780 bp, Haemophilus ducreyi 35000HP
  CDS (1)..(780): transl_table=11
ttggtgcttaattttatcaatcacttaggtgagcattgcatacagctagtgaaaacttttgggcgtgcaacactgatgttatggggtgcattaattggcaaaccgcaatttagtaaacatacgcctttattaatcaaacaactgtacatcttaggcgtacagtcattattgattattatactgtctggcttatttattggcatggtattagccttacaaggctatgttgtgttagtcgattttgcagccgaatcaagtttaggcacgttaatatcactgtcattattacgcgaattaggccctgtagtcacggctttattattcgcaggacgtgccggctccgccttaacggctgaaattgcactaatgaaagcaacagaacagctatcaagcctagaaatgatggcggtggatccattaagacgagtcatagcgcctcgcttttgggcaggggttatttcaatgccaattttagcagtcatttttaccgctattggtatttggggcggttcattagttggtgtggactggaaaggcgttgatagcggcagtttttggtcagtcatgcaacattctgtaaatggacaagacttgatcaatggttttattaaaagcatcatttttgctattgctgttgtttggatcgcattatttaatggctatgattcaactgctacctcagaaggtattagccaagccactacacgtacggtggtacatgcatcattaatcgtgttaggcttagattttattttaactgccatgatgtttggcggttaa

SEQ ID NO: 112431 - protein, 259 aa, Haemophilus ducreyi 35000HP
MVLNFINHLGEHCIQLVKTFGRATLMLWGALIGKPQFSKHTPLLIKQLYILGVQSLLIIILSGLFIGMVLALQGYVVLVDFAAESSLGTLISLSLLRELGPVVTALLFAGRAGSALTAEIALMKATEQLSSLEMMAVDPLRRVIAPRFWAGVISMPILAVIFTAIGIWGGSLVGVDWKGVDSGSFWSVMQHSVNGQDLINGFIKSIIFAIAVVWIALFNGYDSTATSEGISQATTRTVVHASLIVLGLDFILTAMMFGG

SEQ ID NO: 112432 - DNA, 786 bp, Bordetella pertussis Tohama I
  CDS (1)..(786): transl_table=11
atgagcgcgcacaaggcgctgaacggcctgggcggctgggtgcgcggccagatcggcggcatcggctatttcacgcggttcctgggcgcgctgctggcgcgcagcggcatcgccgtgcgccgccccggcctggtgtcgcagcaggttcacttcatcggcaactattcgctgctgatcatcgcggtctcgggcctgttcgtgggcttcgtgctgggcctgcagggctactacaccctcaaccgctacggttccgaagaggcgctgggcctgctggtggcgctgtcgctggtccgcgagctggggccggtggtcacggcgctgctgttcgccggccgcgccggcacctcgctgacggccgaaatcggcctcatgaaggccggcgagcagctctcggccatggaagtcatggccgtggacccgatgcgccgcgtgctggtgccgcgcttctggggcggcatcatcgccatgccggtgctggcggcggtgttttccatggtcggcatcctgggcggctggatcgtcggggtgctgatgataggcgtggacgccggcgccttctggtcgcagatgcaaaatggcgtggatgtgctggacgacgtgctcaacggcgtgatcaagagcctcgtgttcggcgtgaccgtcaccctggtggcgctttacgaaggctggcaggcccggccgacgcccgaaggcgtgggccgcgccaccacccgcacggtggtggtcggctcgctggccgtccttggactggacttcatcctcaccgccctgatgtttggcaattga

SEQ ID NO: 112433 - protein, 261 aa, Bordetella pertussis Tohama I
MSAHKALNGLGGWVRGQIGGIGYFTRFLGALLARSGIAVRRPGLVSQQVHFIGNYSLLIIAVSGLFVGFVLGLQGYYTLNRYGSEEALGLLVALSLVRELGPVVTALLFAGRAGTSLTAEIGLMKAGEQLSAMEVMAVDPMRRVLVPRFWGGIIAMPVLAAVFSMVGILGGWIVGVLMIGVDAGAFWSQMQNGVDVLDDVLNGVIKSLVFGVTVTLVALYEGWQARPTPEGVGRATTRTVVVGSLAVLGLDFILTALMFGN

SEQ ID NO: 112434 - DNA, 1137 bp, Bordetella parapertussis 12822
  CDS (1)..(1137): transl_table=11
ttgcctatgcctagtttgccgagtaccgccggcgccgccacattgccgttgacgctggaccatggcgtctgccatgtgtcgggcgactggtccatgcaggcgctggctgctccgggcgaagtggagcgccgccgcgccgcgctggcccgcgtcgaccccgaccagcgctgggacttgcgcggggtcgagcggctggacaccatcggggcccacctgctgtggggcgcctgggggcaacagttgcccgagcgggtgcgctggtccgacggacagcgcgaggtgttccagacgctgcagcgcaaccgcggcgaggcgcttcccgcgccggcgccggcggaccgctggggctggctgcgcgcgatcggcgacgccgtattcgacgccggccgcaatggccgcgcattgatcatcatgttcggccaactggtgctggacctgggcgccttcctgcgccgcccgtcgcgcgggccgtggcgcgagatttcggcgcaggtctaccgcaccggcgcgcaggcgctgggcattaccgccctggtcggtttcctgatcggcgtcgtgctgtcctatctgtcggcgcagcagctgcagatgttcggcgccgaccgcttcatcgtccgtttgctgggcgtttccatcgtgcgcgagctggggccggtgctggcggccatcctggtggcgggtcgatccggctcggccatcacggcccagatcggcgtgatgcgggtgacgcaggaactggacgccatgctggtgatgggcatttcgcatggccagcgcctgatcctgccgcgcgtgatcgccctggcgatcaccatgccgctgctggtggtctggaccgatgccatggccctgctgggcgggatgctggcggcgcagatgcagctgggcgtttcggcgcaatggttcctgacctcgctgccggacgccatttcgctgaccaattactggatcggcatgttcaagggcgtgtcgttcggcatcctgatcgcgctggtggcctgccatttcggcctgtgcatccagcccaataccgaaagcctggggcgcggcaccaccacgtcggtggtgacctcgatcacgggcgtcatcctggtcgacgccctgtacgccgtcattttcagctcgataggcatctga

SEQ ID NO: 112435 - protein, 378 aa, Bordetella parapertussis 12822
MPMPSLPSTAGAATLPLTLDHGVCHVSGDWSMQALAAPGEVERRRAALARVDPDQRWDLRGVERLDTIGAHLLWGAWGQQLPERVRWSDGQREVFQTLQRNRGEALPAPAPADRWGWLRAIGDAVFDAGRNGRALIIMFGQLVLDLGAFLRRPSRGPWREISAQVYRTGAQALGITALVGFLIGVVLSYLSAQQLQMFGADRFIVRLLGVSIVRELGPVLAAILVAGRSGSAITAQIGVMRVTQELDAMLVMGISHGQRLILPRVIALAITMPLLVVWTDAMALLGGMLAAQMQLGVSAQWFLTSLPDAISLTNYWIGMFKGVSFGILIALVACHFGLCIQPNTESLGRGTTTSVVTSITGVILVDALYAVIFSSIGI

SEQ ID NO: 112436 - DNA, 1137 bp, Bordetella bronchiseptica RB50
  CDS (1)..(1137): transl_table=11
ttgcctatgcctagtttgccgagtaccgccggcgccgccacattgccgttgacgctggaccatggcgtctgccatgtgtcgggcgactggtccatgcaggcgctggctgctccgggcgaagtggagcgccgccgcgccgcgctggcccgcgtcgaccccgaccagcgctgggacttgcgcggggtcgagcggctggacaccatcggggcccacctgctgtggggcgcctgggggcaacagttacccgagcgggtgcgctggtccgacggacagcgcgaggtgttccagacgctgcagcgcaaccgcggcgaggcgcttcccgcgccggcgccggcggaccgctggggctggctgcgcgcgatcggcgacgccgtattcgacgccggccgcaatggccgcgcattgatcatcatgttcggccaactggtgctggacctgggcgccttcctgcgccgcccgtcgcgcgggccgtggcgcgagatttcggcgcaggtctaccgcaccggcgcgcaggcgctgggcattaccgccctggtcggtttcctgatcggcgtcgtgctgtcctatctgtcggcgcagcagctgcagatgttcggcgccgaccgcttcatcgtccgtttgctgggcgtttccatcgtgcgcgagctggggccggtgctggcggccatcctggtggcgggtcgatccggctcggccatcacggcccagatcggcgtgatgcgggtgacgcaggaactggacgccatgctggtgatgggcatttcgcatggccagcgcctgatcctgccgcgcgtgatcgccctggcgatcaccatgccgctgctggtggtctggaccgatgccatggccctgctgggcgggatgctggcggcgcagatgcagctgggcgtttcggcgcaatggttcctgacctcgctgccggacgccatttcgctgaccaattactggatcggcatgttcaagggcgtgtcgttcggcgtcctgatcgcgctggtggcctgccatttcggcctgtgcatccagcccaataccgaaagcctggggcgcggcaccaccacgtcggtggtgacctcgatcacgggcgtcatcctggtcgacgccctgtacgccgtcattttcagctcgataggcatctga

SEQ ID NO: 112437 - protein, 378 aa, Bordetella bronchiseptica RB50
MPMPSLPSTAGAATLPLTLDHGVCHVSGDWSMQALAAPGEVERRRAALARVDPDQRWDLRGVERLDTIGAHLLWGAWGQQLPERVRWSDGQREVFQTLQRNRGEALPAPAPADRWGWLRAIGDAVFDAGRNGRALIIMFGQLVLDLGAFLRRPSRGPWREISAQVYRTGAQALGITALVGFLIGVVLSYLSAQQLQMFGADRFIVRLLGVSIVRELGPVLAAILVAGRSGSAITAQIGVMRVTQELDAMLVMGISHGQRLILPRVIALAITMPLLVVWTDAMALLGGMLAAQMQLGVSAQWFLTSLPDAISLTNYWIGMFKGVSFGVLIALVACHFGLCIQPNTESLGRGTTTSVVTSITGVILVDALYAVIFSSIGI

SEQ ID NO: 112438 - DNA, 774 bp, Chromobacterium violaceum ATCC 12472
  CDS (1)..(774): transl_table=11
ctgacctcgccgctgcgccgcctcggccacctcaccgtcaacgccgtctggcggctgggcttcgccagccgcttcctggcggccatcctgctcaacagcggccagagcctgctgcggctgcagatgaccatacgcgagatctacttcgccggcgtgatgtcgctgatcatcatcgtggtgtccggcctgttcgtcggcatggtgctgggcctgcagggctacaccacgctggccaagttcggctccgccgacgcgctgggcgcgatggtggcgctggcgctgctgcgcgagctgggcccggtgctggccgcgctgctgttcgccagccgcgccggcagcgcgatgaccgcggaaatcggcctgatgaagaccaccgagcagctggacgcgatgagcgtgatggcggtcaatccgatggcgcgcgtgatcgcgccgcgcttctgggccggcgtcgtctccatgcccatcctggccgcgctgttcaatgtggtcggcatcttcggcggctacctggtcggcgtggtgatgataggcctggacgccgggacgttctggtcgcagatgcagggcaacgtcgacctgcactacgacgtggtcaacggcatcatcaagagcctggtgttcggcatcgccgtgacgctgatcgccgtgttcgaaggctacgacgccaccccgaccgccgccggcgtgtcggccgccaccacccgcaccgtggtcacctcggcgctggtgatcctggcgctggacttcgtgctgaccgccttcatgttctag

SEQ ID NO: 112439 - protein, 257 aa, Chromobacterium violaceum ATCC 12472
MTSPLRRLGHLTVNAVWRLGFASRFLAAILLNSGQSLLRLQMTIREIYFAGVMSLIIIVVSGLFVGMVLGLQGYTTLAKFGSADALGAMVALALLRELGPVLAALLFASRAGSAMTAEIGLMKTTEQLDAMSVMAVNPMARVIAPRFWAGVVSMPILAALFNVVGIFGGYLVGVVMIGLDAGTFWSQMQGNVDLHYDVVNGIIKSLVFGIAVTLIAVFEGYDATPTAAGVSAATTRTVVTSALVILALDFVLTAFMF

SEQ ID NO: 112440 - DNA, 807 bp, Wolinella succinogenes DSM 1740
  CDS (1)..(807): transl_table=11
gtgagatcaaaaatggtcactgcattttttggagcccttggaagacccgtccttcttctatggaagagcttggagaagtttggggagttcttgatgttccatctgcgcctcatccctgcctatttcacgcctccttttcgagcaagagagctttttattcagatggagagtattggggtgggctctttttgggtgattgtgctcacttcggtattcacgggcatggttttggcgatccagttttatcagggattccaccagtttggtgccgaaaattttatgagctatcccatctttcttgccatcacgcgtgaattaggcccagtctttgccgcgctcatgctcacgagtcgtgcgatttcagcgatggcggctgagcttgggactatgcgagtgactgagcaaattgatgcaatcgacacattggccatcgattcgaagcgttatttgattgttccaaggattctcgcctccacgctatcactccctttgttagtgattctttttaactttattgggaatctctccgcctattttatctccattcacgtcttgggagtgaatgaggagagttataggagtattgtgaggcaatacttggaattgagcgacttggtgatttctttagtgaaggcattcgtctttggctatctggtgagcttggtgggaacttatatcggatacaacactcgcggaggcgctagaggggtggggcgctccaccactagtgcggtggtctttagcgcagtgaccatttttggggctaattatctgctctctgcctttttcttggcgatggactggtga

SEQ ID NO: 112441 - protein, 268 aa, Wolinella succinogenes DSM 1740
MRSKMVTAFFGALGRPVLLLWKSLEKFGEFLMFHLRLIPAYFTPPFRARELFIQMESIGVGSFWVIVLTSVFTGMVLAIQFYQGFHQFGAENFMSYPIFLAITRELGPVFAALMLTSRAISAMAAELGTMRVTEQIDAIDTLAIDSKRYLIVPRILASTLSLPLLVILFNFIGNLSAYFISIHVLGVNEESYRSIVRQYLELSDLVISLVKAFVFGYLVSLVGTYIGYNTRGGARGVGRSTTSAVVFSAVTIFGANYLLSAFFLAMDW

SEQ ID NO: 112442 - DNA, 768 bp, Gloeobacter violaceus PCC 7421; identical to SEQ ID NO: 17647
  CDS (1)..(768): transl_table=11

SEQ ID NO: 112443 - protein, 255 aa, Gloeobacter violaceus PCC 7421; identical to SEQ ID NO: 17648

SEQ ID NO: 112444 - DNA, 783 bp, Photorhabdus luminescens subsp. laumondii TTO1
  CDS (1)..(783): transl_table=11
atgttaacacaggcgctggcggcacttggccgacgggccattgaggtgtttgcctcttttggccgtgcaggttttatgcttttccgcgcgataattggcaagccagaacccgccagacaatggccgttactccgacagcagctttacagcgtgggtgttcggtcattattgattattatcgtttcagggctgtttattggcatggtgcttggcctacaggggtatctgatcctgacaacatacagcgcagaagccagtcttggtatgatggtggcgatatctctgttgcgtgaattggggccggtggtcacggcactgttgtttgctggtcgagcaggatcagcgctgaccgcagagatcggcttgatgaaagccacggagcaaatttccagcctggagatgatggcggtagatccattacggcgtgtgatcgcgccccgtttctgggccgggtttatcagtatgccgctattatccttgatttttgtggcggtaggtatttggggcggtgcgatggttggtgttgattggaaggggattgacagtggcttcttctggtcttcaatgcagtctgctatcgagtggcagaaagatttgcttaattgttttattaaaagtgtcgttttcgccattactgtgacctggattgctctattcaatggttatgacgcgatcccgacttcggaagggataagccgagcaacgaccagaacggtggttcatgcgtcgttagcggttttaggtttggattttgtgctgacagcactcatgtttgggaactaa

SEQ ID NO: 112445 - protein, 260 aa, Photorhabdus luminescens subsp. laumondii TTO1
MLTQALAALGRRAIEVFASFGRAGFMLFRAIIGKPEPARQWPLLRQQLYSVGVRSLLIIIVSGLFIGMVLGLQGYLILTTYSAEASLGMMVAISLLRELGPVVTALLFAGRAGSALTAEIGLMKATEQISSLEMMAVDPLRRVIAPRFWAGFISMPLLSLIFVAVGIWGGAMVGVDWKGIDSGFFWSSMQSAIEWQKDLLNCFIKSVVFAITVTWIALFNGYDAIPTSEGISRATTRTVVHASLAVLGLDFVLTALMFGN

SEQ ID NO: 112446 - DNA, 774 bp, Geobacter sulfurreducens PCA
  CDS (1)..(774): transl_table=11
ttgctggtatcatccattgaaaagatcggcgccctcaccctcttcgtggtgagggagatggggaagatgctcatcttcctcacctatgccctcgtcaacatcgtgatcaggcccggcaagccgatccacatctacaagcagatccacttcatcggcgccaaatcgctcttcgtcatcgtcctgaccgccgccttcacggggatggtgctgggtctccaggggtactacaccctggcaaaattcggctccgagggaatgctcggctcggccgtggccctctccctcatccgggagctggggccggtcctctcggccctcatggtggttggccgggccggcagcgccattaccgccgagatcggcattaaaaagatcaccgaacagatcgatgccctgaagaccatggccctggagccattcaagtatctggtttcccccaagatcctggcagctctgattgcactgccgcttctctgcgccatcttcgacgtggtcggcatctacggcggttacgtggtgggggtgaaactgctgggagtcaacccgggcgcctacttctccgagatggagcggagcgtggagtggaaggacgtctggtccggcatcgtgaaatcgttttccttcggaggcatcatcgcctgggtctgctgctacaagggatatcacgccagccacggcgccgagggggtttcgcgggccaccaccgaggcggtggtcatgtcgtcggtgctggtgctcatctgggactacttcctgacttcagttatgttatag

SEQ ID NO: 112447 - protein, 257 aa, Geobacter sulfurreducens PCA
MLVSSIEKIGALTLFVVREMGKMLIFLTYALVNIVIRPGKPIHIYKQIHFIGAKSLFVIVLTAAFTGMVLGLQGYYTLAKFGSEGMLGSAVALSLIRELGPVLSALMVVGRAGSAITAEIGIKKITEQIDALKTMALEPFKYLVSPKILAALIALPLLCAIFDVVGIYGGYVVGVKLLGVNPGAYFSEMERSVEWKDVWSGIVKSFSFGGIIAWVCCYKGYHASHGAEGVSRATTEAVVMSSVLVLIWDYFLTSVML

SEQ ID NO: 112448 - DNA, 870 bp, Mycobacterium avium subsp. paratuberculosis K-10
  CDS (1)..(870): transl_table=11
atgaccgcccaggacgagcgcgcgctcgacgaggaccgagcacccgacagcgtggccaccatccaggagtggtcggccggatatgtcgtgcggcacccgcttgcctcactcaatacccttggcgagcaatacattctcgcggtacgcacagtcgagtactgcgtggtcgatctgttcaccgggcgcttccaatgggcggaattcgtgcgccagggcgcattcatggcggccacggcggtattgcccaccgtgctggtggcgctgccgatcggcgtgacgctgtccatccagttcgccctgctggccaaccaggtcggtgcgacgtcgctcgccggcgcagccagtgggctcgccgtgatccgccaggccgcctcgctggtggccgcggtgctgacggcgtcggccgtcggctccgcgatcaccgccgacctcggctcgcgaaccatgcgcgaagagaccgacgcgatggaggtgatgggcgtctcggtgatccgccgactggtggtgccgcgcttcgccgcggcgatcatggtcggtgtcgccctgaccggaatcacctgcttcgtcggctttttggccagctatctgttcaacgtgtatttccagcgcggcgcgccgggcagtttcgtggcgaccttctcgtccttcgccaccaccgaggacatgatcgtcgcgctgctcaaggccgtgatctacggcgcgatcgtcgcggtaatcgcctgccagaaaggccttttcaccaagggcggaccggcgggcgtggccaactcggtgaacgcggccgtggtggagtcgatcctggtgctgatgatcgtcaacgtcggcatcagcgagttgtacaacacgctgttccccaggaccgggttgtga

SEQ ID NO: 112449 - protein, 289 aa, Mycobacterium avium subsp. paratuberculosis K-10
MTAQDERALDEDRAPDSVATIQEWSAGYVVRHPLASLNTLGEQYILAVRTVEYCVVDLFTGRFQWAEFVRQGAFMAATAVLPTVLVALPIGVTLSIQFALLANQVGATSLAGAASGLAVIRQAASLVAAVLTASAVGSAITADLGSRTMREETDAMEVMGVSVIRRLVVPRFAAAIMVGVALTGITCFVGFLASYLFNVYFQRGAPGSFVATFSSFATTEDMIVALLKAVIYGAIVAVIACQKGLFTKGGPAGVANSVNAAVVESILVLMIVNVGISELYNTLFPRTGL

SEQ ID NO: 112450 - DNA, 1053 bp, Arabidopsis thaliana; identical to SEQ ID NO: 17637
  CDS (1)..(1053)

SEQ ID NO: 112451 - protein, 350 aa, Arabidopsis thaliana; identical to SEQ ID NO: 17638

SEQ ID NO: 112452 - DNA, 780 bp, Leptospira interrogans serovar Copenhageni str. Fiocruz L1-130
  CDS (1)..(780): transl_table=11
atgacaggacctatcaaagaaaaacttaccgaatttttctacgctagtggttttacaattcttttagtatatgagagtattctaaaccttccttatagttttttcaaaagaaaggaaattttagatcagatgtatattacaggagtcggaagtatctctgtggtttcgatagtcgccgtttttactggaatgatcatgtcgcttaacaccggactgggactcaaagacttcggcgcagaaggtcaaatcggtcttttgatgacaattactttgaccagagaaatgtctccttttatgaccgcgttgattcttgctgcttcgatcggttccgccatggccgcggaaattggaacgatgaaagtttccgaagaagtggacgcactcgaagtgatgtccatcgatccggtgcgttatttgatctttcctaggattttaggattttcggtcatggtacctgtgttatgcgtttattctactgctcttggaattttaggaggagcgatcgtaggttattttcaacttggaatcgactattttacttattttagagacgtgtttgatagaatcgcttcgattccgggcttaaaagatttatatgtaggaattctaaaaggttttatatttggaatcatcgtatctgcgatttcttgttcgcacggacttagaacatccggaggagcaattggagtcggtcgagccacaagagaatctgtagttgcttcatttttgatggtgatctttacaggttatatgattactgcattattctatagagattaa

SEQ ID NO: 112453 - protein, 259 aa, Leptospira interrogans serovar Copenhageni str. Fiocruz L1-130
MTGPIKEKLTEFFYASGFTILLVYESILNLPYSFFKRKEILDQMYITGVGSISVVSIVAVFTGMIMSLNTGLGLKDFGAEGQIGLLMTITLTREMSPFMTALILAASIGSAMAAEIGTMKVSEEVDALEVMSIDPVRYLIFPRILGFSVMVPVLCVYSTALGILGGAIVGYFQLGIDYFTYFRDVFDRIASIPGLKDLYVGILKGFIFGIIVSAISCSHGLRTSGGAIGVGRATRESVVASFLMVIFTGYMITALFYRD

SEQ ID NO: 112454 - DNA, 723 bp, Candidatus Protochlamydia amoebophila UWE25
  CDS (1)..(723): transl_table=11
atggtttctttacggcgacctccgacttggattcttatcagagatcagctttttgatattggggtcatgtcactacccgttgttgcgattacaggtttttcgacaggaatggttcttgctgctcaatctttttttcaactttctgacaaaggcttagcaagcgcaacgggattaatggtggctaaggctatgttagttgaactgggacctgttttaacagctttcatggttactggaagagtaggagctgctatgtgtgcagaattaggaaccatgagggtcacagagcagatagatgcaatgcgcaccatgtctgttaatccacttgggtatcttgtcgcgcctcgttttcttgcgggaatgataatgatgccattactaacagtatttagcgctattatggggatttttggaggatatcttattgctgtttatttttataaaatgccagcaagctcttttattgatcctttacctcttcatatcaacacatttgattttattagtggcatggttaaagcctttgtatttgggattatcattgtaacgatttcttgttataaaggtatgaaaacccgaggtggagctgcaggagtgggacgttcaacaaccaatagcgttgtcatttgctattctgtcattctcattataaacttcatcttaactcttggcctaaattcttcctttaacttcattaatgagtttttgacgaaatggttttaa

SEQ ID NO: 112455 - protein, 240 aa, Candidatus Protochlamydia amoebophila UWE25
MVSLRRPPTWILIRDQLFDIGVMSLPVVAITGFSTGMVLAAQSFFQLSDKGLASATGLMVAKAMLVELGPVLTAFMVTGRVGAAMCAELGTMRVTEQIDAMRTMSVNPLGYLVAPRFLAGMIMMPLLTVFSAIMGIFGGYLIAVYFYKMPASSFIDPLPLHINTFDFISGMVKAFVFGIIIVTISCYKGMKTRGGAAGVGRSTTNSVVICYSVILIINFILTLGLNSSFNFINEFLTKWF

SEQ ID NO: 112456 - DNA, 804 bp, Desulfovibrio vulgaris subsp. vulgaris str. Hildenborough
  CDS (1)..(804): transl_table=11
atgacaaacccacccgaacgcgacaatccggtaacggcactgggcaggagctttctccggctcctcggtgaactgggcgcgatgttcatcttcatgctcgacggattccggcacatcttcgcctcgacgaagcaactgccgaaaatcgtcaatcaggtttatgtcatcgggtacaagtcgctgttcgtcattctgctcatcggcatcttcacaggcatggtgctgggacttcaagggtactacacccttgtcaaattcggttctgagggcctgcttggcgccgccgtggcgctcaccctcatacgcgaactcggccccgtgctcaccgccatcatggtcaccgggcgcgctggttcgtccatggcagccgaaatcggcgtcatgcgcatcaccgaccagatagacgccctcgatgtcatggacatcaaccccatgggctacctcgtctcaccgcgtatcgcggcatcgctggtggcctttcccctgctgacggcactgttcgacgtcatcggcatcatcggagggtatgtgaccggcgtcatgctcctcggcatcaacgaaggggtttactttcaccgcatcgccaccagcgtggaactcgccgacgtgaccggcggcttcatgaagtcgttgctgttcgcgctcatcgtctccacggtaagctgctatcaggggtacttcacccacatgaggcgagacggtatggggcctgaaggcgtgagcaactcaaccacgtctgctgtcgtcatgtcgtgcgtgctggttcttgtcgccgactacgttctcacctcgttcctgctgtag

SEQ ID NO: 112457 - protein, 267 aa, Desulfovibrio vulgaris subsp. vulgaris str. Hildenborough
MTNPPERDNPVTALGRSFLRLLGELGAMFIFMLDGFRHIFASTKQLPKIVNQVYVIGYKSLFVILLIGIFTGMVLGLQGYYTLVKFGSEGLLGAAVALTLIRELGPVLTAIMVTGRAGSSMAAEIGVMRITDQIDALDVMDINPMGYLVSPRIAASLVAFPLLTALFDVIGIIGGYVTGVMLLGINEGVYFHRIATSVELADVTGGFMKSLLFALIVSTVSCYQGYFTHMRRDGMGPEGVSNSTTSAVVMSCVLVLVADYVLTSFLL

SEQ ID NO: 112458 - DNA, 777 bp, Acinetobacter sp. ADP1
  CDS (1)..(777): transl_table=11
atgaatgcgattgcctggttaggccggctggtgattgaacgtgttcgagggatcggtgttgccgccctcatgttgttacagattttattttcgatgccctctacgggtgggtttcggcgctttatttatcagatgtatcgtgtcggtgtgatgtccttattgattatcactgtttcaggcttgtttattggtctggtgattggcctgcaaggctattccattctggtcaatgttggcagtgaagcgatgctgggtacaatggtttcacttacgctgctgcgtgagttggcacctgtagttgctgctttactatttgctggacgggcaggttctgctttaactgccgaaattggttccatgaagcaaagtgaacaactggccagtatggaaatgattggtgttgatccgcttaagcagatcgtttcaccgcgcttatgggcaggtattgtgagcctacccatgctcaccgtgatttttgccgcgattggaattttaggcggcaaaatggtaggtgtggattttcttggcgtggatgaaggatctttctggagcggtatgcaaagtaatgttcagtttggacacgatgtggtcaatggcattattaaaagtattgtatttgccttagtgtgtacttggattgcagtttatcaaggatatgcctgtgatccgacacctgagggcattgcaacttcaatgacacgtaccgttgtttattcttctttgtgtgtattgggatcagattttgttttgactgcggtcatgttcggaggtatttaa

SEQ ID NO: 112459 - protein, 258 aa, Acinetobacter sp. ADP1
MNAIAWLGRLVIERVRGIGVAALMLLQILFSMPSTGGFRRFIYQMYRVGVMSLLIITVSGLFIGLVIGLQGYSILVNVGSEAMLGTMVSLTLLRELAPVVAALLFAGRAGSALTAEIGSMKQSEQLASMEMIGVDPLKQIVSPRLWAGIVSLPMLTVIFAAIGILGGKMVGVDFLGVDEGSFWSGMQSNVQFGHDVVNGIIKSIVFALVCTWIAVYQGYACDPTPEGIATSMTRTVVYSSLCVLGSDFVLTAVMFGGI

SEQ ID NO: 112460 - DNA, 783 bp, Erwinia carotovora subsp. atroseptica SCRI1043
  CDS (1)..(783): transl_table=11
atgttattacggacgttggcgtcgctaggacgtcagggaatctccgccagtgcctcgtttgggcgcgctgggctgatgctgtttaatgcgctggtgggtaaacccgaatttagaaaacagtggccgctgttggtgaaacaactttacagcgttggcgtgcagtcgttgctgatcatcatcgtttccggtctgttcatcggcatggtgctggggttacagggttatatcatcctgacgacttacagtgccgaggccagtttgggcatgatggtggcgctgtcgctgctacgtgagcttggtccggtggtgacggcactgctgttcgctgggcgtgccggttccgcgttgacggcggaaatcggtttgatgaaggcaactgagcagctttccagcatggagatgatggcggttgacccgctgcgccgcgttgtcgcgccgcgcttctgggcggggttaatcagcatgcctctgctggcggtgatttttgtcgctgtggggatctggggaggtgcgctggtcggtgtggactggaaaggtatcgacagcgggttcttctggtctgccatgcagggcgcggttgactggcgtcaggatgtgttgaactgcgtgattaaaagtatcgtatttgcgattaccgtgacctggattgcactgtttaacggctatgacgcgatcccgacgtctgaggggattagccgtgcaacgacccgaaccgtcgtgcactcgtcgttagcggtactgggattggattttgtgctgacagcactgatgtttgggaactga

SEQ ID NO: 112461 - protein, 260 aa, Erwinia carotovora subsp. atroseptica SCRI1043
MLLRTLASLGRQGISASASFGRAGLMLFNALVGKPEFRKQWPLLVKQLYSVGVQSLLIIIVSGLFIGMVLGLQGYIILTTYSAEASLGMMVALSLLRELGPVVTALLFAGRAGSALTAEIGLMKATEQLSSMEMMAVDPLRRVVAPRFWAGLISMPLLAVIFVAVGIWGGALVGVDWKGIDSGFFWSAMQGAVDWRQDVLNCVIKSIVFAITVTWIALFNGYDAIPTSEGISRATTRTVVHSSLAVLGLDFVLTALMFGN

SEQ ID NO: 112462 - DNA, 789 bp, Desulfotalea psychrophila LSv54
  CDS (1)..(789): transl_table=11
atgttaacatttaaagttgaagaaattggttcctgggcaattgacagagtcacaaatttggggcgcttttgtctgtttttactgacaggtataggtcaaatttttcagaagccgtttcaaatttttagaatagttgaaaatatttggtttattggtaccaagtccatggccgtagttattttaacgggattttttacagggatggtcctagcccttcagggctattacgccctggctaaatttggctctgccggcatgcttggctctgctgttgccctcacccttatccgcgagcttggaccggtacttaccgccatcatgattacggcgagagcaggttctgccatggccgccgagataggtactatgaggatatctgagcaacttgatgccctgcagacaatggatattaatccggtgaaatttgtctttagtccgagactcattgcctctataatttgctttcctcttttgacctcaatttttgatgttgttggtatatttggtggtcttttcatagcgacaaccctaaaggtcaacggttatatctatatgtaccgggtccacgagagtgtggttatggaggatattagaagcgggataattaaatcacttgtttttgccgttgttgttgtctcaacatgttgttttaaagggtattatgcgcatatacaaaaggagggtggttttggctcacgggctgttagcctggcaacaaccaacgccgttgtctcttccagtgttcttatcctgatttatgattacctgatcacatatattcttctttag

SEQ ID NO: 112463 - protein, 262 aa, Desulfotalea psychrophila LSv54
MLTFKVEEIGSWAIDRVTNLGRFCLFLLTGIGQIFQKPFQIFRIVENIWFIGTKSMAVVILTGFFTGMVLALQGYYALAKFGSAGMLGSAVALTLIRELGPVLTAIMITARAGSAMAAEIGTMRISEQLDALQTMDINPVKFVFSPRLIASIICFPLLTSIFDVVGIFGGLFIATTLKVNGYIYMYRVHESVVMEDIRSGIIKSLVFAVVVVSTCCFKGYYAHIQKEGGFGSRAVSLATTNAVVSSSVLILIYDYLITYILL

SEQ ID NO: 112464 - DNA, 783 bp, Yersinia pseudotuberculosis IP 32953
  CDS (1)..(783): transl_table=11
atgttagtaaagtcgttagcatctttaggtcgccgaggaattaatgtttgcgcctcatttggtcgcgcaggcttgatgctgttcaatgcccttgtcgggcggcctgaaccgcgcaaacaatggccattattaatcaaacaactgtacagcgttggggttcaatccctgttgattatcgtggtctccggtttgttcatcggtatggttctgggtttacagggctttttgatcctcaccacgtacagcgcagaggccagcctcggcatgatggtttctttatcactgctgcgtgaattggggcctgtggtcactgcgttactgtttgcggggcgagctggttctgccctgaccgcagaaattggcctaatgaaagccactgaacagatctcaagtctggaaatgatggctatcgaccctttacggcgagtggttgcgcctcgcttctgggccggtctgatcagtatgccattgctgacagctatttttgttgctgtgggtatttggggcggttcagtggttggcgttgattggaaagggatcgacagtggtttcttctggtcagcgatgcaaaatgcggtggagtggcgtacagatttactgaattgcctgattaagagtctggtatttgctcttaccgtgacctggattgcgctgttcaatggttatgatgcggtcccaacgtctgaagggattagccgggcaacgacacgtactgtagtgcattcgtcactggcggtattgggattggattttgtgctgacagcactgatgtttgggaactga

SEQ ID NO: 112465 - protein, 260 aa, Yersinia pseudotuberculosis IP 32953
MLVKSLASLGRRGINVCASFGRAGLMLFNALVGRPEPRKQWPLLIKQLYSVGVQSLLIIVVSGLFIGMVLGLQGFLILTTYSAEASLGMMVSLSLLRELGPVVTALLFAGRAGSALTAEIGLMKATEQISSLEMMAIDPLRRVVAPRFWAGLISMPLLTAIFVAVGIWGGSVVGVDWKGIDSGFFWSAMQNAVEWRTDLLNCLIKSLVFALTVTWIALFNGYDAVPTSEGISRATTRTVVHSSLAVLGLDFVLTALMFGN

SEQ ID NO: 112466 - DNA, 783 bp, Mannheimia succiniciproducens MBEL55E
  CDS (1)..(783): transl_table=11
atgatggttgatttaatctctgcactgggacgcaatgttattaattcggtaaaagctttaggtagagcgggctttatgctgtttggctctttagtgggtaaaccgcaaattaaaaaacattttccattattaattaaacagttatatgtgcttggcgttcaatccctattaattatcctgttatcgggcttttttatcggcatggtattgggattgcagggttatgttattttagtggattttgccgccgaggcgaatgtcgggcagttggttgcgttgtccttattacgggaattaggcccggttgtgaccgcacttttatttgccgggcgagccggttcggcattgactgccgaaatcggtttaatgaaggcaacagagcagttatccagcctcgaaatgatggcggttgatccgttgcgtcgggttatcgcacctcgtttttgggcgggcgtgattgccatgccggttttaactgtgctatttactgcagtggggattatcggcggccatttgatcggcgttgaatggaaaggtattgatagcggtagtttctggtcggtaatgcaaaatgcggtaagaactctggatttatgggatgggtttattaagagcctggtttttgcctttaccgtaacctggattgctttattcaacggctatgactgtattcccacttcggaaggtatcagccaggcaaccaccagaactgtagtgaacgcctctttattggtgttggggttagactttgtgctaacagcaattatgtttggtgccggttaa

SEQ ID NO: 112467 - protein, 260 aa, Mannheimia succiniciproducens MBEL55E
MMVDLISALGRNVINSVKALGRAGFMLFGSLVGKPQIKKHFPLLIKQLYVLGVQSLLIILLSGFFIGMVLGLQGYVILVDFAAEANVGQLVALSLLRELGPVVTALLFAGRAGSALTAEIGLMKATEQLSSLEMMAVDPLRRVIAPRFWAGVIAMPVLTVLFTAVGIIGGHLIGVEWKGIDSGSFWSVMQNAVRTLDLWDGFIKSLVFAFTVTWIALFNGYDCIPTSEGISQATTRTVVNASLLVLGLDFVLTAIMFGAG

SEQ ID NO: 112468 - DNA, 783 bp, Legionella pneumophila subsp. pneumophila str. Philadelphia 1
  CDS (1)..(783): transl_table=11
atgcttgatacaatcgcgcgtctgggtaatcgaggtgtacaagccttacaaggtattggtagctcagggctgtttttattttctatgttgttcagaaagcctaatgttttaaggttatggccattattacgttatcagctttattttatcggtgtattgtcttgtttaattattgtggtttcagccttgtttattggtatggttgtaggacttcagggttataatacgttacaaaaatttggtgcttcaagtcaattaggccaattattggctttaagcgtcgccagagaattaggacctgtgattagcgctttgttgtttgcagggcgtgccgggtcagcccttacagctgaaattggtttaatgaaggcaacagagcagttatccagtatggatatgatgggagtggatccattaggaagagtggtttatccgcgttttgtggcaggatttatagcgttaccgatacttgctttgattttttctgcagtagctatatatggtggttattttattggtgtttactggctaggcgtggatgcagggagtttttggtctaatatgcaagctgctgtaaattttcgtatagatatcttaagcgggattattaaaagcttggttttcgcatttgtggttacttggatttctgtataccaaggttttgagtgtgtgccaacagctgaaggcattagtcatgctacaactaaaactgtagtatactcatcgcttgctgtattaggtcttgatttcttgttgactgcaatgatgattggagattggtaa

SEQ ID NO: 112469 - protein, 260 aa, Legionella pneumophila subsp. pneumophila str. Philadelphia 1
MLDTIARLGNRGVQALQGIGSSGLFLFSMLFRKPNVLRLWPLLRYQLYFIGVLSCLIIVVSALFIGMVVGLQGYNTLQKFGASSQLGQLLALSVARELGPVISALLFAGRAGSALTAEIGLMKATEQLSSMDMMGVDPLGRVVYPRFVAGFIALPILALIFSAVAIYGGYFIGVYWLGVDAGSFWSNMQAAVNFRIDILSGIIKSLVFAFVVTWISVYQGFECVPTAEGISHATTKTVVYSSLAVLGLDFLLTAMMIGDW

SEQ ID NO: 112470 - DNA, 792 bp, Methylococcus capsulatus str. Bath
  CDS (1)..(792): transl_table=11
atgaatatcgtgttgaagccgttccagctgcttggccagtcggccttggtcggcatccgcaaactggggcgggcccatttgttcatcctgcatgtgctgacggggttgcccgggctggttgctcgcctggacctcctcatcgttcagatgtattcggtcggtgtgttgagcatcctcctgatcatgatctcggggctgttcgtcgggatggtgctcgggctgcagggctattatgttctctcggatttcggcgcggaggagagtctgggcgtgatggtggccgcatcgctggtgcgggagctggggcccgtggtgacggcgctcctgtttgcgggtcgggctggttccgccctgacggcggaaatcggtctcatgaaggcgaccgagcagctctcgggcatggaaatgatggcggtcgatccggtgaaacggatcatagcgccacgctatttcgccggtgtggtgtcgatgccgctgctggcggcgttgttcagcatcatcggcgtgctgggcggctatttcgtcggcgtcggtctgctcggcgtggacgagggcgcgttccgctcgcagatgcaggccaagatcgatttcgacgaggatatcgtcaacggttttatcaagagcctggtgttcggcgcggtcgtcacttggatcgccgttttcgaaggttacgatgccacgccgacctcggagggcgtcagccgggcgacgacgcggtcggtggtctactcggcattcgcagtgctgggctgcgacttcgtgctcacggccctgatgtttggaaaggattga

SEQ ID NO: 112471 - protein, 263 aa, Methylococcus capsulatus str. Bath
MNIVLKPFQLLGQSALVGIRKLGRAHLFILHVLTGLPGLVARLDLLIVQMYSVGVLSILLIMISGLFVGMVLGLQGYYVLSDFGAEESLGVMVAASLVRELGPVVTALLFAGRAGSALTAEIGLMKATEQLSGMEMMAVDPVKRIIAPRYFAGVVSMPLLAALFSIIGVLGGYFVGVGLLGVDEGAFRSQMQAKIDFDEDIVNGFIKSLVFGAVVTWIAVFEGYDATPTSEGVSRATTRSVVYSAFAVLGCDFVLTALMFGKD

SEQ ID NO: 112472 - DNA, 795 bp, Azoarcus sp. EbN1
  CDS (1)..(795): transl_table=11
atgaacggattgctggctctcgtgcgccggctcggcggcgccgtcaccgacgcggtgtggcggctcggtttcgcggcacgcttcttcggcttgctgctgctgtattccgggcagtcgctgctgcgcgtgcacctgacgatccgcgaagtctatttcagcggcgtgctgtcgctgctgatcatcgtcgtgtccgggcttttcgtcggcatggtgctcggcctgcagggttacgagacgctgcagcgtttcggctccggcgatgcgctcggcgtgctcgtggccctgtcgctgacgcgcgaactggggccggtcgtcgccgcgctgctgttcgcgagccgcgccggttcggcggtgacggccgagatcggcctgatgaaagcgaccgagcaactcaaggcgatggacatgatggccgtcaatccgatcgcccgcgtcgtagcgccccgcttctggggaggcgtgatctcgatgccactgctcgcggcgcttttttccgcgatgggcgtgttcggcggctggctgatcggggtcgtgctgatcggcgtcgatgaaggcgctttctggtcgcagatgcaggcggcggtcgattttcgcttcgatgtcgtcaacggcgtgatcaagagcgtggtgttcggtgccgcggtgtcgctgatcgcggtcttcgaaggctacgactgcacacccactgccgaaggcgtctcgcgggcgatcacccgcaccgtcgtcagttccgctttggcgatcctggcgctcgacttcgtgcttacttccttcatgttcaggggccagtcatga

SEQ ID NO: 112473 - protein, 264 aa, Azoarcus sp. EbN1
MNGLLALVRRLGGAVTDAVWRLGFAARFFGLLLLYSGQSLLRVHLTIREVYFSGVLSLLIIVVSGLFVGMVLGLQGYETLQRFGSGDALGVLVALSLTRELGPVVAALLFASRAGSAVTAEIGLMKATEQLKAMDMMAVNPIARVVAPRFWGGVISMPLLAALFSAMGVFGGWLIGVVLIGVDEGAFWSQMQAAVDFRFDVVNGVIKSVVFGAAVSLIAVFEGYDCTPTAEGVSRAITRTVVSSALAILALDFVLTSFMFRGQS

SEQ ID NO: 112474 - DNA, 783 bp, Silicibacter pomeroyi DSS-3
  CDS (1)..(783): transl_table=11
atgagcccgcttgcccttttggcgcggctgggccggttggccctgtcggttctggccagctttggccgggtaaccctgtttgcgctggacgcggtcagccatatcctgcgcccgccctattacccgcgcgaactggcgatcgcgctgctgaacatcggctggctgtcgctgcccgttgtcgggctgaccgccatctttaccggcggcgcgctggcgctgcagatctatgcaggcggcgcccggttcaacgccgaggcggtggtgccccagatcgtcgccatcggcatggtgcgcgaactgggcccggtgctggtggggctgatgatcgcggcgcgtgtcacctcctccatcgcggccgagattgccacgatgaaggtgaccgagcagatcgacgcgctggtgacactgtcgacccatccgatgaaatacctgaccgcgccccgggtgctggcggcgctgatcacggtgccgctgctggtcggcatcggcgatatcatcggcatcatgggcggctatacggtggcggtgcagaacctcggcttcaacgccgccgcctatctgcaaaacaccgtcgatttcctggaaacgcgcgacgtggtctcgtcgctggtcaagggcgcggtctttggcgtcatcgccgcactgatgggatgctactacggcatgaactcgggccgcggcgcccagggcgtgggccgcgccaccaagggctcggtcgaggcggccgccgtgctgatcctggccgccaactttgtactcacgggggtgttcttctcgatatga

SEQ ID NO: 112475 - protein, 260 aa, Silicibacter pomeroyi DSS-3
MSPLALLARLGRLALSVLASFGRVTLFALDAVSHILRPPYYPRELAIALLNIGWLSLPVVGLTAIFTGGALALQIYAGGARFNAEAVVPQIVAIGMVRELGPVLVGLMIAARVTSSIAAEIATMKVTEQIDALVTLSTHPMKYLTAPRVLAALITVPLLVGIGDIIGIMGGYTVAVQNLGFNAAAYLQNTVDFLETRDVVSSLVKGAVFGVIAALMGCYYGMNSGRGAQGVGRATKGSVEAAAVLILAANFVLTGVFFSI

SEQ ID NO: 112476 - DNA, 777 bp, Neisseria gonorrhoeae FA 1090
  CDS (1)..(777): transl_table=11
atgaattttatccgttccgtcggggcgaaaaccctcggccttattcaatccttcggcagtatcacgctgtttctgctgaacattttggcgaaatccggcacggctttcgcccgtccgcgcctgagcgtgcgccaagtgtattttgccggcgtgctgtcggtgctgattgttgccgtttcggggctgttcgtcggtatggttttgggtttgcagggctatacgcagttgtcgaaattcaaatccgccgatattttgggctatatggtcgcggcttctctgttgcgcgaactgggtcccgtgttggcggcgattctgtttgccagcagcgcgggcggtgcgatgaccagcgaaatcggtttgatgaaaacgaccggacagctcgaagcgatgaacgtgatggcggtcaaccccgtcgcccgcgtggttgccccgcgtttttgggcgggcgtgttttctatgccgcttttggcttcgattttcaacgtcgcgggcattttcggcgcgtatttggtcggcgtgagctggctgggtttggacagcggtattttctggccgcagatgcagaacaacattacgatacattacgatgtaatcaacggtttgatcaaatccgccgcgttcggcgtggcggtaacgctgattgccgtgcatcagggcttccactgcatcccgacttcggaaggcattttgcgcgccagcacgcgcacggtggtttcgtccgccctgacgattttggcggtcgattttatattgaccgcgtggatgtttacagattga

SEQ ID NO: 112477 - protein, 258 aa, Neisseria gonorrhoeae FA 1090
MNFIRSVGAKTLGLIQSFGSITLFLLNILAKSGTAFARPRLSVRQVYFAGVLSVLIVAVSGLFVGMVLGLQGYTQLSKFKSADILGYMVAASLLRELGPVLAAILFASSAGGAMTSEIGLMKTTGQLEAMNVMAVNPVARVVAPRFWAGVFSMPLLASIFNVAGIFGAYLVGVSWLGLDSGIFWPQMQNNITIHYDVINGLIKSAAFGVAVTLIAVHQGFHCIPTSEGILRASTRTVVSSALTILAVDFILTAWMFTD

SEQ ID NO: 112478 - DNA, 765 bp, Bacteroides fragilis NCTC 9343
  CDS (1)..(765): transl_table=11
ttgcaaacaaatatacgagttatgattaaagcattaagaaccgtcggcagatacatcatgcttatggggcggactttttcacgtcccgagcgtatgcgtatgttcttccggcaatatatcaaagagatagagcaactgggagtaaactctatcggcatcgtgctgttgatttcattcttcatcggagcggtgatcaccatccagataaaattaaacatcgaaagcccatggatgccccgctggacggtgggatacgtcacccgagagattcttctgcttgaattctcctcctccatcatgtgtctgatcctggccggtaaagtagggtcgaacatagcttccgagctgggcaccatgcgcgtgacgcaacagattgacgcacttgaaatcatgggagtcaactccgccaactatctgatattacccaaaattacggcaatggtcaccatgattcctattttagtgactttcagtatcttcgcaggtatcatcggagcgtttgcaacctgctggttcggtggcatcatgacggctaccgaccttgagtacggacttcaatacatgtttgtagagtggtttgtgtggtgcggcatcatcaaatccctgttttttgcctttatcattgccagcgtctcctctttcttcggctataccgtagaaggcggttcgatagaagtgggaaaggcatctaccgattcggtggtttccagcagcgtactgattttgtttgccgacctggtattaactaaacttttaatgggatga

SEQ ID NO: 112479 - protein, 254 aa, Bacteroides fragilis NCTC 9343
MQTNIRVMIKALRTVGRYIMLMGRTFSRPERMRMFFRQYIKEIEQLGVNSIGIVLLISFFIGAVITIQIKLNIESPWMPRWTVGYVTREILLLEFSSSIMCLILAGKVGSNIASELGTMRVTQQIDALEIMGVNSANYLILPKITAMVTMIPILVTFSIFAGIIGAFATCWFGGIMTATDLEYGLQYMFVEWFVWCGIIKSLFFAFIIASVSSFFGYTVEGGSIEVGKASTDSVVSSSVLILFADLVLTKLLMG

SEQ ID NO: 112480 - DNA, 786 bp, Haemophilus influenzae 86-028NP
  CDS (1)..(786): transl_table=11
atgatcgtcaattttatttctgctttaggaaaacaggtgatcgactttttccgtgcattggggcgagcaggctttatgttatttggtgcattgatcggcaagccacaaattcgtaagcattttcctttgcttgtgaagcaaatgcatgttttaggtgtccaatcgttactcattattttgttgtccggtttatttattggaatggtattaggactacaaggttatgtcgtattagttgatttttctgctgaaacaagtttaggtcagttggtggcactttctcttttgcgagaattagggcctgttgttaccgcacttttatttgctggtcgagcaggttctgcattgacggctgaaataggcttaatgaaagccactgaacaactttctagtcttgaaatgatggctgttgatcctttacgtcgagtgattgcacctcgtttttgggcaggggttatttccatgccaattttgtcaatcttgtttatcgcgattggtatttggggcagttccttagtaggtgtggattggaaaggtgttgattcaggcagcttttggtctgttatgcaaaattccgtgagttggagctatgatattttaaatggctttattaaagcggttttctttgctgtagccgtaacttggattgcactttttaatggttatgattgtatgccaacatcagaaggtatcagccaagctacaacacgaacagttgtgcacgcttcacttgttgttctaggattagattttattttgactgctattatgtttggcgcaagttaa

SEQ ID NO: 112481 - protein, 261 aa, Haemophilus influenzae 86-028NP
MIVNFISALGKQVIDFFRALGRAGFMLFGALIGKPQIRKHFPLLVKQMHVLGVQSLLIILLSGLFIGMVLGLQGYVVLVDFSAETSLGQLVALSLLRELGPVVTALLFAGRAGSALTAEIGLMKATEQLSSLEMMAVDPLRRVIAPRFWAGVISMPILSILFIAIGIWGSSLVGVDWKGVDSGSFWSVMQNSVSWSYDILNGFIKAVFFAVAVTWIALFNGYDCMPTSEGISQATTRTVVHASLVVLGLDFILTAIMFGAS

SEQ ID NO: 112482 - DNA, 798 bp, Pseudomonas fluorescens Pf-5
  CDS (1)..(798): transl_table=11
atgcgcaaaatatcgctaatcgagagggttcgcctcttcggtcgctcaggcatcgatgtcctggcggtactggggcgttccacgctgttcctgttccatgcgctgctgggccgcggtggcatcggcggcagctttggcctgctggtcaagcaactgcactcagtgggcgtgatgtccctggtgatcattgtcgtgtccgggatcttcatcggcatggtgctggcgctgcagggcttcaatatcctttccagctacggttcggagcaggcggtggggcagatggtggccctgaccctgttgcgggagctggggccggtagtaactgcgctgctgttcgccgggcgtgccggctcggcgctgaccgcggaaatcggcaacatgaagtccaccgagcagctctccagcctggagatgatcggtgtcgacccgctcaagtacatcattgcgccgcgcctgtgggctggcttcatttccctgccattgctggcgatgattttcagcgtggtgggcatctggggcggttcgtgggtcgctgtcgactggctgggagtctacgacggttcctactgggcgaacatgcagaacagcgtgaccttcagtggtgacgtgctcaacggtgtgatcaaaagtattgtttttgcgtttgtagtgacctggatcgccgttttccaaggctatgactgtgagcccacttcagaggggatcagccgtgccactaccaagaccgtggtgtatgcctcgttggccgtactcggcttggactttattctgaccgccttgatgtttggagatttctga

SEQ ID NO: 112483 - protein, 265 aa, Pseudomonas fluorescens Pf-5
MRKISLIERVRLFGRSGIDVLAVLGRSTLFLFHALLGRGGIGGSFGLLVKQLHSVGVMSLVIIVVSGIFIGMVLALQGFNILSSYGSEQAVGQMVALTLLRELGPVVTALLFAGRAGSALTAEIGNMKSTEQLSSLEMIGVDPLKYIIAPRLWAGFISLPLLAMIFSVVGIWGGSWVAVDWLGVYDGSYWANMQNSVTFSGDVLNGVIKSIVFAFVVTWIAVFQGYDCEPTSEGISRATTKTVVYASLAVLGLDFILTALMFGDF

SEQ ID NO: 112484 - DNA, 777 bp, Colwellia psychrerythraea 34H
  CDS (1)..(777): transl_table=11
gtgcagcagatacagtttttaggtaaacaaacgctcaatatgataagtggtctaggccgcgcagtaattttgttgatctctgcgttaatgcatgtacccaatattcgcaagggcacgcctttactgatgcaacagctatacagtgttggtgtattgtctttgttgattatcgtggtgtcaggtacgtttattggtatggtcttggctttacaaggctatactattcttgtgggttatggcgcggaagcaagtttaggtcctatggttgcactgtcgttattacgagagcttggccctgtggttgccgctctgttatttgcgggtcgtgcaggatcggcacttaccgctgaaattggtttgatgaaagcgactgagcaattatcaagtctagagatgatggcgattgatccattaagacgagtaattgccccgcgtttttgggctggatttattagcttacccctgttagctgctattttttctatggtaggaatacttggcgctcatgttgttggtgtggattggttaggtgttgatggcggtactttttggtcagtaatgcaagatcaagtcgacttccaaaaagatattctcaacggtattattaaaagtattgtttttgcttttgttgtgatgtggatagccgtatacaaaggctatgattgtgaacctacctctgaaggtattagtcgagcgactacttcaactgtggtgcaatcatcattactggtgttatttttggatttcattttaacggcattaatgttcgtcaagtaa

SEQ ID NO: 112485 - protein, 258 aa, Colwellia psychrerythraea 34H
MQQIQFLGKQTLNMISGLGRAVILLISALMHVPNIRKGTPLLMQQLYSVGVLSLLIIVVSGTFIGMVLALQGYTILVGYGAEASLGPMVALSLLRELGPVVAALLFAGRAGSALTAEIGLMKATEQLSSLEMMAIDPLRRVIAPRFWAGFISLPLLAAIFSMVGILGAHVVGVDWLGVDGGTFWSVMQDQVDFQKDILNGIIKSIVFAFVVMWIAVYKGYDCEPTSEGISRATTSTVVQSSLLVLFLDFILTALMFVK

SEQ ID NO: 112486 - DNA, 798 bp, Pseudomonas syringae pv. phaseolicola 1448A
  CDS (1)..(798): transl_table=11
atgcgcaataagtcactgatggaccgggtacgcctgttagggcgttcggccattgatattgttactgttctgggccgttccggtctgtttctggtaaacgccctgcttggccgcggcggtgcgggcagcagttttcaactgctggtgaggcagctgtattcggtcggtgtcatgtcgctggtcatcatcgtggtgtccggcatgttcatcggcatggtgctggcgctgcagggcttcagcattctgaccaagtacggctccgagcaggccgttggccagatggtcgcactgaccctgctgcgtgagctggggcctgtggttacagccctgctgttcgccgggcgtgcaggttctgcgctgaccgccgagatcggcaacatgaaatccaccgagcaactgtcgagccttgagatgatcggtgtcgatccactcaagtacatcgttgcgccacgcctgtgggcaggtttcatctcgatgccgattctggcgatgattttcagtgtggtcggtatatggggcgcttcctgggtagcgatcgattggctgggtgtctatgacggttctttctggtcaaacatgcagaacagcgtttctttcacgaacgatgtgctcaatggggtgatcaaaagcgtcgtatttgccttcgtggtgacatggattgccgttttccagggttacgattgcgagcctacttccgaggggatcagtcgcgcgacgaccagaaccgtcgtatacgcctcgttggccgtgctgggactggactttattttgaccgctttgatgtttggagatttctga

SEQ ID NO: 112487 - protein, 265 aa, Pseudomonas syringae pv. phaseolicola 1448A
MRNKSLMDRVRLLGRSAIDIVTVLGRSGLFLVNALLGRGGAGSSFQLLVRQLYSVGVMSLVIIVVSGMFIGMVLALQGFSILTKYGSEQAVGQMVALTLLRELGPVVTALLFAGRAGSALTAEIGNMKSTEQLSSLEMIGVDPLKYIVAPRLWAGFISMPILAMIFSVVGIWGASWVAIDWLGVYDGSFWSNMQNSVSFTNDVLNGVIKSVVFAFVVTWIAVFQGYDCEPTSEGISRATTRTVVYASLAVLGLDFILTALMFGDF

SEQ ID NO: 112488 - DNA, 792 bp, Dechloromonas aromatica RCB
  CDS (1)..(792): transl_table=11
atgcttgacccgatttccctggttcggagattgggccatgaaacggtcgagcgcatctggcggcttggcttcgctgcgcgcttcttctgggccgtgctcatgcattccggctcctcgttccgccgcttgccgctgaccttgcgtgaaatctatttcagcggcgtgctgtcgctgttgatcatcatggtttccggcctgttcgtcggcctggtgcttggtcttcagggctatgaaattctgcagcgttttggttcaaccgaagcgctggggacgctggtcgccctgtcgctgacccgcgaactggggccggttctggccgcaatctttttcgcctcacgggctgggtcgtcggtgaccgctgaaatcggtttgatgaaggcgaccgagcaactcaaggccatggatatgatggcggtcaacccgatcgcccgtgtcgtggcgccgcgtttctggggtggcgtcatttcgatgccgttgctggctgcaattttttccgccatgggagtgcttggcggatggctgatcggtgtcgtgttcatcggtgtcgatgacggtgcttattggtcgcagatgcaggcaagcgtcgattttcgctacgacatctggaatggtgtcgtcaaaagtttcgtctttggtattgcggtttcgctgatcgccgtttttgaaggctacgattcggtgccgacggccgagggtgtctcgcgcgccatcacgcgaaccgtggtgacttcggtgctgaccgtgctggcgctggattttgtcttaacctcgttcatgttccggggagcttaa

SEQ ID NO: 112489 - protein, 263 aa, Dechloromonas aromatica RCB
MLDPISLVRRLGHETVERIWRLGFAARFFWAVLMHSGSSFRRLPLTLREIYFSGVLSLLIIMVSGLFVGLVLGLQGYEILQRFGSTEALGTLVALSLTRELGPVLAAIFFASRAGSSVTAEIGLMKATEQLKAMDMMAVNPIARVVAPRFWGGVISMPLLAAIFSAMGVLGGWLIGVVFIGVDDGAYWSQMQASVDFRYDIWNGVVKSFVFGIAVSLIAVFEGYDSVPTAEGVSRAITRTVVTSVLTVLALDFVLTSFMFRGA

SEQ ID NO: 112490 - DNA, 789 bp, Thiobacillus denitrificans ATCC 25259
  CDS (1)..(789): transl_table=11
atgcttaggcaggccatcgaaaacctcggcgcccgcacgatagacgcggtctggcgcatcggcttcgcgacccgtttcttcgccgcgacgctgctgcattcgggcaccgcgttccgccgtttcggcctgaccgtgcgtgagctctatttcaccggcgtgctgtcgctcatcatcatcctggtgtcgggcctcttcgtcggcatggtgctcgggctgcaaggctacgagaccttgcagacctacggctcggaggaagcgctcggcatcctggtcgcgctgtcgctggtgcgcgaactcggcccggtcgtcgcggccttgctgttcgccagccgcgccggcagcgcgatcacggccgagatcggcctcatgaaggcgaccgaacagctttcggcgatggaaatgatggccgtcgacccgatcgcccgcgtcgtcgcgccgcgcttctgggcaggcgtgatctcgatgccgctcctggcggcactgttctcggccatgggggtgttcggcggctacctcgtcggcgtgcagctgatcggggtcgacgagggcgcgttctggtcgcagatgcaaagtgcggtggatttcgagcaggacatcctgaacggcgtcatcaagagcgtcgtcttcggcgtcgcgatcaccgcgatcgcgctgttcgagggctacgacgcgccgccgaccgccgagggggtgtcgcgggcgacgacccgtaccgtggtgacctcgagcctcgcggtgctcgcgctcgatttcgttttgactgcattcatgttccggggaagcaactga

SEQ ID NO: 112491 - protein, 262 aa, Thiobacillus denitrificans ATCC 25259
MLRQAIENLGARTIDAVWRIGFATRFFAATLLHSGTAFRRFGLTVRELYFTGVLSLIIILVSGLFVGMVLGLQGYETLQTYGSEEALGILVALSLVRELGPVVAALLFASRAGSAITAEIGLMKATEQLSAMEMMAVDPIARVVAPRFWAGVISMPLLAALFSAMGVFGGYLVGVQLIGVDEGAFWSQMQSAVDFEQDILNGVIKSVVFGVAITAIALFEGYDAPPTAEGVSRATTRTVVTSSLAVLALDFVLTAFMFRGSN

SEQ ID NO: 112492 - DNA, 792 bp, Anabaena variabilis ATCC 29413; identical to SEQ ID NO: 17649
  CDS (1)..(792): transl_table=11

SEQ ID NO: 112493 - protein, 263 aa, Anabaena variabilis ATCC 29413; identical to SEQ ID NO: 17650

SEQ ID NO: 112494 - DNA, 783 bp, Rhodobacter sphaeroides 2.4.1
  CDS (1)..(783): transl_table=11
gtgagcgccgcagcccccatcgccgccctcggacgcgccaccctcgggatgctggcggccgtgggccgcatcgcgctctttgcgggcgcggtggtgagccatatcttccgcccccccttctacccgcgcgagcttctgaccgcgctgatccagatcggctggctgtcgctgccggtggtggggctgaccgcgatcttcaccggcggggcgctcgcgctccagatctatgccggcggcgcgcgcttctcggccgaggcggtggtgccctccatcgtggccatcggcatgacgcgcgagctgggcccggttctgggcgggctcatggtggcggcccgcgtggcctcctccatcgcggccgagatcggcacgatgaaggtgaccgagcagatcgacgcgctcgtgaccctgtcgacgaacccgctgaaatatctggccgtgccccgcgtgctggcagccaccctcgccgtgccgatcctcgtggcggtgggcgattccatcggcatcgcgggcggctggctcgtgggggtgaaccggctcgacttcaactcggccacctacatcaagaacacgaccgacttcctcgaggtctgggacgtgggctcgggcctcgtgaagggcgcggccttcggcttcatcgtggcgctgatgggctgctatcacggcatgaactcgggccgcggcgcgcagggcgtgggccgggccaccaaatccgccgtcgtggcggcctcggtgctgatcctcgccgcgaactacctgctgacggaggtgttcttcacctcatga

SEQ ID NO: 112495 - protein, 260 aa, Rhodobacter sphaeroides 2.4.1
MSAAAPIAALGRATLGMLAAVGRIALFAGAVVSHIFRPPFYPRELLTALIQIGWLSLPVVGLTAIFTGGALALQIYAGGARFSAEAVVPSIVAIGMTRELGPVLGGLMVAARVASSIAAEIGTMKVTEQIDALVTLSTNPLKYLAVPRVLAATLAVPILVAVGDSIGIAGGWLVGVNRLDFNSATYIKNTTDFLEVWDVGSGLVKGAAFGFIVALMGCYHGMNSGRGAQGVGRATKSAVVAASVLILAANYLLTEVFFTS

SEQ ID NO: 112496 - DNA, 1101 bp, Rhodobacter sphaeroides 2.4.1
  CDS (1)..(1101): transl_table=11
ttggtttcagatcgaccgaccccgtcttccgtgcccctgcgcggacgactgaccatcgagacgcttcccgagacgcagcgcagcctcggctcggtcggggccggggagcagatcgacatggccgcggtggaggcgctcgacacggcgggggcctgggcgctcctgcaggcccagaagcgcgccgaggcggcggggcaggcgctcgagatcgtcaatctgagcgagtcccaccgccatctcctcgagacggtcgcggcggccatgcccgagcccgagcggcggcggcgcacgatcccggggcggccggacgacgggctcgccaacctcggtcaggaggtggcgcagggcctgcgcggaagcctgacctccgttggattcttcggcgaggtggtgacccatctcggcgcactcgtcctgcatccgacgcgtctcaagctgacgccgctcgtccatcacatgcaggaggcgggctggaacgcggtgcccatcgtctcgctcatggggttcctgatcggcatcgtcttggccttccagggctcgacgcagctcaagtccttcggagcggaagtctatgtggtcgatctcgtggccatctcgatcctgcgcgaactgggcatcctgctgaccgcgatcatcgtggccggacgctccgcctcggccttcaccgcggccatcggctcgatgaagatgcgcgaggagatcgacgcgatgcgcgttctgggcctcgatccgatcgaccggctggtgctgccgcggctgatcgcgctagtcatcctgctgcccgcgctcgggttcatcgcctctctggcgggcctcgtgggcggggggctgatggcctggatcgacctcggcatcacgccgggcatgttccgcacccagcttctggccgataccgatgtcagccatgcgatcatcgggctggtcaaggcgcccttcttcgccgtcatcatcgctgtcatcggctgccatcagggaatgcaggtctcgggcaatgccgaatcgctcggcagccacacgtcgcgctcggtcgttcaggccatcttcctggtcatcgtcgtcgatgcgctcttctcgatcttcttcgcggtctgggggctctga

SEQ ID NO: 112497 - protein, 366 aa, Rhodobacter sphaeroides 2.4.1
MVSDRPTPSSVPLRGRLTIETLPETQRSLGSVGAGEQIDMAAVEALDTAGAWALLQAQKRAEAAGQALEIVNLSESHRHLLETVAAAMPEPERRRRTIPGRPDDGLANLGQEVAQGLRGSLTSVGFFGEVVTHLGALVLHPTRLKLTPLVHHMQEAGWNAVPIVSLMGFLIGIVLAFQGSTQLKSFGAEVYVVDLVAISILRELGILLTAIIVAGRSASAFTAAIGSMKMREEIDAMRVLGLDPIDRLVLPRLIALVILLPALGFIASLAGLVGGGLMAWIDLGITPGMFRTQLLADTDVSHAIIGLVKAPFFAVIIAVIGCHQGMQVSGNAESLGSHTSRSVVQAIFLVIVVDALFSIFFAVWGL

SEQ ID NO: 112498 - DNA, 768 bp, Burkholderia sp. 383
  CDS (1)..(768): transl_table=11
atgatcagcgcgatcggacgttacgtcatcggcggcctcgagcgcacgggctacggcacgcggctgttcgtgcgcctcgtgctggaattcttcccgctgctgcgccggccgcggttggtcacgaagcagatccacttcctcggcaactattcgttcgtgatcattgccgtgtcggggctgttcgtcggcttcgtgctcggcctgcaggggtattacacgctgaaccgctatggttccgagcaggcgctcggcctgctggtcgcgctgtcgctggtgcgtgagctggggccggtcgtcaccgcgctgctgttcgcgggccgcgcgggcacgtcgctcacggccgagatcggtctgatgaaagccggcgagcagctcaccgcgctcgaaatgatggcggtggacccgatcaagaacgtgatcgcgccgcgcatgtgggcgggcatcatcgcgatgccgctgctggccgcgatcttcaacgcggtcggcgtgctcggcggctacttcgtcggcgtcgtgctgatcggcgtcgatccgggggcgttctggtcgcagatgcagggcggcgtgcaggtctgggccgacgtcggcaacggcgtgctgaagagcatcgtgttcgggttcgccgtgaccttcattgcgctgtatcaagggtatgaagcgaagcccacgcctgagggcgtgtcgcgcgcgaccaccaagacggtcgtgttcgcgtcgctcgccgtactcggcctcgatttcctgctgaccgcgctgatgttcagctaa

SEQ ID NO: 112499 - protein, 255 aa, Burkholderia sp. 383
MISAIGRYVIGGLERTGYGTRLFVRLVLEFFPLLRRPRLVTKQIHFLGNYSFVIIAVSGLFVGFVLGLQGYYTLNRYGSEQALGLLVALSLVRELGPVVTALLFAGRAGTSLTAEIGLMKAGEQLTALEMMAVDPIKNVIAPRMWAGIIAMPLLAAIFNAVGVLGGYFVGVVLIGVDPGAFWSQMQGGVQVWADVGNGVLKSIVFGFAVTFIALYQGYEAKPTPEGVSRATTKTVVFASLAVLGLDFLLTALMFS

SEQ ID NO: 112500 - DNA, 774 bp, Geobacter metallireducens GS-15
  CDS (1)..(774): transl_table=11
gtgctccgcaccttcctcgaaaaactgggcgccgtcaccatcttcatcttccgggaaatgggccggatgctgatctttctcgtcatggccctcgtgaacatcatcatccggcccggcaggcccttccatattttcaaacagatccacttcatcggcaccaaatccctcttcgtcataaccctcaccgcctcgttcaccggtatggtcctggggctccaggggtactacaccctggccaagttcggctccgaggggatgctcggctcggcggtggccctctccctcatccgcgagttggggccggtcctcacggccctcatggtggtggggcgtgccggcagcgccataaccgccgaaatcgggatcatgaagataaccgaacagatcgacgcgatgaagaccatggcgctggaaccgttcaagtacctgatctcgccgaagatcgtcggggcgctggtggccgtgccgcttctgtgcgccatcttcgacgtggtcggcatctacggcgggtacctggtgggggtcaaactcctgggggttaaccccggcgcctatttccacgagatggagcggagcgtggagtggaaggacgtctggtccgggttcgtcaaatccatctccttcggcggcatcctcgcctgggtctgctgctacaagggataccacgccagccacggcgccgagggggtgtcgcgggccaccaccgaggcggtggtcatgtcgtcggtcttggtgctggtgtgggactacttcctcacgtcggtgatgctgtaa

SEQ ID NO: 112501 - protein, 257 aa, Geobacter metallireducens GS-15
MLRTFLEKLGAVTIFIFREMGRMLIFLVMALVNIIIRPGRPFHIFKQIHFIGTKSLFVITLTASFTGMVLGLQGYYTLAKFGSEGMLGSAVALSLIRELGPVLTALMVVGRAGSAITAEIGIMKITEQIDAMKTMALEPFKYLISPKIVGALVAVPLLCAIFDVVGIYGGYLVGVKLLGVNPGAYFHEMERSVEWKDVWSGFVKSISFGGILAWVCCYKGYHASHGAEGVSRATTEAVVMSSVLVLVWDYFLTSVML

SEQ ID NO: 112502 - DNA, 768 bp, Geobacter metallireducens GS-15
  CDS (1)..(768): transl_table=11
atgttcgagcgcgtagggaaacgggtgattgcgtttaacgaaatcgtgggagagatggtcatgctcctctgccagaccgtctggttttttcgtgaggcgccgcgcaacatcctgagcatctttacccagatgtcgatcatcggttacgaaacgctgccgatggcttcagtcatggcattcttcgtggggatggtcctggcgctccagaccggggccgagcttcagaagtatggtacccagaacatcatcggcggcattgtggggctctccatggttcgggaactggggccggtcatgacgagctttttggtggccgggcgggccggatcagccatggcggccgagatcggggtcatgaaggtctatgaggaaatcgacgccctcaagaccctcgatatcaaccccgtgcgctaccttgccatgccacggcttatcgcctgtctcatctgtgttccggcgctggtcatctacgccgatttcgtggggattctggggggggcgctcctgagtcacctgcatccgaagatttttatttcctattcaacctattacgacagcctcaatacggcgctcaaattgaaggagatcggtgccgggcttctcaaggccacggtgtttggctgtatcatcggggtggtgtcgtgttacaccggtttcaagactaccggaggggcccggggaatcgcccagtccaccaccagggctgtggtcctctcatttatgctgattctggcggctgattattttctgacgaggcttctgctctga

SEQ ID NO: 112503 - protein, 255 aa, Geobacter metallireducens GS-15
MFERVGKRVIAFNEIVGEMVMLLCQTVWFFREAPRNILSIFTQMSIIGYETLPMASVMAFFVGMVLALQTGAELQKYGTQNIIGGIVGLSMVRELGPVMTSFLVAGRAGSAMAAEIGVMKVYEEIDALKTLDINPVRYLAMPRLIACLICVPALVIYADFVGILGGALLSHLHPKIFISYSTYYDSLNTALKLKEIGAGLLKATVFGCIIGVVSCYTGFKTTGGARGIAQSTTRAVVLSFMLILAADYFLTRLLL

SEQ ID NO: 112504 - DNA, 813 bp, Desulfovibrio desulfuricans G20
  CDS (1)..(813): transl_table=11
atgcaaacaggcacttctgcatcaggactgaccgcccccttacaacagctcgggcgcaatactctccggtttatcggagagcttggcgcggtgctgcttttttttcttgatgcagtccgtcatatattcatagcttcccgcctgttccgcaaggttgtccagcaggtgtatttcatcggctccaagtcgctgtttgtcattgcccttatcggcattttcaccggcatggttctggggctgcagggctactacactctggtcaaattcggctctgaaggcttgctgggggcggctgtggcgcttacgctcatccgtgaactggggccggtgcttacggcaatcatggtcacaggtcgcgcaggttctgccatggcggccgaaatcggcgtcatgcgcatatccgaccagatagatgcgctggaggtcatggacgtcccgcccatgggataccttgtcactccgcggcttctcgcctcactcatcgtgtttcccatgcttacggcgctgttcaacaccataggcatcataggcggatatctgaccggcgttgtgctgctgggcatcaactccggtgtctacttttaccgcatagacagcagtgtgggctggtcagatgtgagcggcggctttttaaaaaccatggttttcgcggtgatagtgtccattataagctgttatcagggctatttcacgcatatgcgtaaagacggcatggggccggagggcgtcagcaactccaccacatcggccgtggtgatgtcctgtgtgctcgttctggtttcagactatgtcctgacctcattcctgctgtag

SEQ ID NO: 112505 - protein, 270 aa, Desulfovibrio desulfuricans G20
MQTGTSASGLTAPLQQLGRNTLRFIGELGAVLLFFLDAVRHIFIASRLFRKVVQQVYFIGSKSLFVIALIGIFTGMVLGLQGYYTLVKFGSEGLLGAAVALTLIRELGPVLTAIMVTGRAGSAMAAEIGVMRISDQIDALEVMDVPPMGYLVTPRLLASLIVFPMLTALFNTIGIIGGYLTGVVLLGINSGVYFYRIDSSVGWSDVSGGFLKTMVFAVIVSIISCYQGYFTHMRKDGMGPEGVSNSTTSAVVMSCVLVLVSDYVLTSFLL

SEQ ID NO: 112506 - DNA, 795 bp, Synechococcus elongatus PCC 7942; identical to SEQ ID NO: 17651
  CDS (1)..(795): transl_table=11

SEQ ID NO: 112507 - protein, 264 aa, Synechococcus elongatus PCC 7942; identical to SEQ ID NO: 17652

SEQ ID NO: 112508 - DNA, 774 bp, Rhodospirillum rubrum ATCC 11170
  CDS (1)..(774): transl_table=11
atgaatttcctggccattattggacgggtttttcttacctttttgcgccatgtcggacggctgtcggtctttaccggcacggcgctgtcccattgcgtgcgcccgccgttcttcccccggctgatcggccgccaattggtcgagatcggctattattccctgccggtggtcgggctgacggcgatcttcaccggcatggtcctcagcttgcaaagccattccggcttcgcccgcttctcggccgagggggcgacggcgacggtggtggtgctgtcgatgacccgcgaactggggccggtcctggccgggctgatggtggccggacggatcggcgccgccatggccgccgagatcggcaccatgaaggtgaccgagcagatcgacgccctgacgacgctggcgaccaatccctataagtatctggtggtgccgcgcctgatcgccggcgtcaccatgctgccgatcctggtgctgacggccgatatcatcggcgtcttcggcggctatctgatcggcgtctacaagctgggcttcaaccccagcaactatatcgccagcacctgggaattcctcgagccgatggacgtcatcagcggcttggtcaaggcctcggtctttggctttatcatcgccttgatgggctgttaccatggcagccagtcgaaggggggagcccagggggtgggggcggccacgaccaatgcggtggtcagcgcctcaatcttgatcctggtctgcaactacatgatcaccgaactgttcttcgcccaatga

SEQ ID NO: 112509 - protein, 257 aa, Rhodospirillum rubrum ATCC 11170
MNFLAIIGRVFLTFLRHVGRLSVFTGTALSHCVRPPFFPRLIGRQLVEIGYYSLPVVGLTAIFTGMVLSLQSHSGFARFSAEGATATVVVLSMTRELGPVLAGLMVAGRIGAAMAAEIGTMKVTEQIDALTTLATNPYKYLVVPRLIAGVTMLPILVLTADIIGVFGGYLIGVYKLGFNPSNYIASTWEFLEPMDVISGLVKASVFGFIIALMGCYHGSQSKGGAQGVGAATTNAVVSASILILVCNYMITELFFAQ

SEQ ID NO: 112510 - DNA, 828 bp, Rhodospirillum rubrum ATCC 11170
  CDS (1)..(828): transl_table=11
ttggacagccccaagacaaaacccggcctgtcccaggccctgctcaaggccgtggaacgcctgggccagggggtcatcgccggggtggccgagatcggtcaggcgtcgcttcttggcgccgaaagcctttattggctggtagtcgggcggtttcgcggtcagccggtgcgcctgggcgccattgtcgagcaggccatggagatgggcatccgcgccctgccgatcgtgctggtgatgaatttcaccatcggcatgatgctggcgatccagggaatctacagcctgcgcatgttcggggccgagcagcaggtggtgctgggcgtggccttttccgtggtccgcgaattcgcgcccctgatcaccggcattctggtcgccggccgttcgggatcggcgatcgccgcccgcctgggcaccatgaccatcaatcaggagatcgacgccctgacggtgatgggcatcgtgcccgtccgctatttggtggccccgccgttgatcgccgccctggtgatggtgccgctgatgacctttctcggcatgctggtcgccctgcttggcgcctcgctgaccgtgcgcatcgaccttggcatgtcgctttcggccttttttcatcaaacgcttgatatcctgcgcctgatcgatctgacccatggcctgggcaaaagcgccttgttcgccttgcaaatcgtgctggtcggcgtggtcaacggcgtatcggtcagcggcggagccgagggcgtgggcaagatgaccacccggtcggtcgtccaggcgatcagcgcgatcatcgtcaccgacatggtcttcgccttcatcctgacccggtag

SEQ ID NO: 112511 - protein, 275 aa, Rhodospirillum rubrum ATCC 11170
MDSPKTKPGLSQALLKAVERLGQGVIAGVAEIGQASLLGAESLYWLVVGRFRGQPVRLGAIVEQAMEMGIRALPIVLVMNFTIGMMLAIQGIYSLRMFGAEQQVVLGVAFSVVREFAPLITGILVAGRSGSAIAARLGTMTINQEIDALTVMGIVPVRYLVAPPLIAALVMVPLMTFLGMLVALLGASLTVRIDLGMSLSAFFHQTLDILRLIDLTHGLGKSALFALQIVLVGVVNGVSVSGGAEGVGKMTTRSVVQAISAIIVTDMVFAFILTR

SEQ ID NO: 112512 - DNA, 768 bp, Burkholderia thailandensis E264
  CDS (1)..(768): transl_table=11
atgatcagcgcgatcgggcgtttcgtgatcggcggactcgagcgcacgggctatgcgacccggatgttcgtgcgcgtcgtgctcgaattcttttcactgttgcggcggccacggctcgtcacgaagcagatccacttcctcggcaattattcgttcgtgatcattgccgtgtcgggcctgttcgtcggcttcgtgctcggcctgcagggctactacacgctgaaccgctacggctccgagcaggcgctgggcctgctcgtcgcgctgtcgctcgtgcgcgagctcggccccgtcgtgtcggcgctgctgttcgcgggccgcgcgggcacgtcgctcacggccgagatcggcctgatgaaggcgggcgagcaactgaccgcgctcgagatgatggcggtcgatccgctgaagaacgtgatcgcgccgcggatgtgggcgggcgtcatcgcgatgccgctgctcgcggcgatcttcagcgcggtcggcgtgctcggcggctacgtcgtcggcgtgctcctgatcggcgtcgatcccggcgcgttctggtcgcagatgcaaggcggcgtcgaagtgtgggccgacgtcggcaacggcgtgatcaagagcgtcgtgttcggcttcgccgtcacgtttatcgcgctgtttcagggttacgaagcgaagccgacgcccgagggcgtgtcgcacgcgacgaccaagacagtcgtgtacgcgtcgcttgccgtgctcggcctcgatttcctgctgaccgcgttgatgttcagctaa

SEQ ID NO: 112513 - protein, 255 aa, Burkholderia thailandensis E264
MISAIGRFVIGGLERTGYATRMFVRVVLEFFSLLRRPRLVTKQIHFLGNYSFVIIAVSGLFVGFVLGLQGYYTLNRYGSEQALGLLVALSLVRELGPVVSALLFAGRAGTSLTAEIGLMKAGEQLTALEMMAVDPLKNVIAPRMWAGVIAMPLLAAIFSAVGVLGGYVVGVLLIGVDPGAFWSQMQGGVEVWADVGNGVIKSVVFGFAVTFIALFQGYEAKPTPEGVSHATTKTVVYASLAVLGLDFLLTALMFS

SEQ ID NO: 112514 - DNA, 855 bp, Syntrophus aciditrophicus SB
  CDS (1)..(855): transl_table=11
gtgaccgtggcgatgcgtccggatattcaggaaagttccgaggaaaaagcagggtggaatgccatcaggctgctgtcctggccgtttgcccaactcggaagatcggtgatcagctggatcaacaattccggggctgcggccatcttcctactgctcgctgccctgaaaatcttccgtccccggcagctgatgaagatcactcagcagatctattatatcggggcgcgttccacgatgattatcatgctggtcgggctttttaccggcatggtcctggggctccagtcctaccatgccctggttcaggtgggcgcggaaggggcgctcggcaccctcgtcgccctgtcgctgattcgggaactgggccctgttctcacggcgatcatgataaccgccagggccggttcggcgataacagcccagatcggtattgaacgcatctcggagcagattgacgctcttgacaccatgcacattgatccattgagatacctcatcagcccgagaatcgcggcggcaatcatcagttttcccgtgcttacggcgctctttgacctcatcggcatactgggcagttacatttccggggtcctgatcatgggagcgaatgccggcaccttttttcatcgggttcagtccagcgtggaaatgtcggatgtcaacgagggatttatcaaggccattgtttttgctgttatcgtttccaccgtctgctgttatcagggctattttgcccacatgcgtccggacagccacggggccaaggccgtcggcctctccacaacctcggccgttgtgctttcctgcgtgctgattctggtatcggattacgtggtcacttctcttctgatttag

SEQ ID NO: 112515 - protein, 284 aa, Syntrophus aciditrophicus SB
MTVAMRPDIQESSEEKAGWNAIRLLSWPFAQLGRSVISWINNSGAAAIFLLLAALKIFRPRQLMKITQQIYYIGARSTMIIMLVGLFTGMVLGLQSYHALVQVGAEGALGTLVALSLIRELGPVLTAIMITARAGSAITAQIGIERISEQIDALDTMHIDPLRYLISPRIAAAIISFPVLTALFDLIGILGSYISGVLIMGANAGTFFHRVQSSVEMSDVNEGFIKAIVFAVIVSTVCCYQGYFAHMRPDSHGAKAVGLSTTSAVVLSCVLILVSDYVVTSLLI

SEQ ID NO: 112516 - DNA, 780 bp, Syntrophus aciditrophicus SB; identical to SEQ ID NO: 17653
  CDS (1)..(780): transl_table=11

SEQ ID NO: 112517 - protein, 259 aa, Syntrophus aciditrophicus SB; identical to SEQ ID NO: 17654

SEQ ID NO: 112518 - DNA, 792 bp, Methylobacillus flagellatus KT
  CDS (1)..(792): transl_table=11
atgtttagtgctgtggcgaatatgctgcgcgggatcggtcatcgcgtgattgaccgcctgtggcggttcggtgccgggatccgttttttcttctacgtcctgatttactcaggcgagagtttccgcaggctacacctgaccatacgcgagatttattttactggcgtgttgtcattgatcattatcctcgtctcggcgttcttcgttggcatggtgctggccttgcaaggatataacaccttgcagcgctatggctcttccgaggcgattggcgtgctggtggccttgtcgctggtgcgtgagctgggaccggtggttaccgccttgctgttcgccgggcgcgccggtaccgcgatcacggcggaaattggtctgatgagggcgactgagcagttatctgccatggagatgatggcggttagccccatcgcccgcgtggtggcgccgagattctgggcggggctgttctccatgccgttgctggcggccttgttctccatggtcggggtgctgggcggctacctggtggcggttcccttgattggagtggatgcaggtgcgttctggtcgcaaatgcaggccagtgtggattttcgcgaagatattgtgaatggggtaatcaagagcctggtgttcggtattgcctgcaccatgattgccctgtttgaaggttttgatgcgccaccgactgccgagggcgtcagccgcgcgacgacacgtacggtggtgaattcctctctggcagtactagggctcgattttataatgacttcgttcatgattgttgcgtaa

SEQ ID NO: 112519 - protein, 263 aa, Methylobacillus flagellatus KT
MFSAVANMLRGIGHRVIDRLWRFGAGIRFFFYVLIYSGESFRRLHLTIREIYFTGVLSLIIILVSAFFVGMVLALQGYNTLQRYGSSEAIGVLVALSLVRELGPVVTALLFAGRAGTAITAEIGLMRATEQLSAMEMMAVSPIARVVAPRFWAGLFSMPLLAALFSMVGVLGGYLVAVPLIGVDAGAFWSQMQASVDFREDIVNGVIKSLVFGIACTMIALFEGFDAPPTAEGVSRATTRTVVNSSLAVLGLDFIMTSFMIVA

SEQ ID NO: 112520 - DNA, 1134 bp, Burkholderia xenovorans LB400
  CDS (1)..(1134): transl_table=11
ttgaactacgacactccgcccggcctcgaagtcgcggcaggcagccaaggcaagatcgtccggctctcgggccagtggacggcgctagcgctcgcgcgcgatcgggctaccgggcacgtgattcccctgttgctgtcactggtcggcgccgaaggcatcggcgggtgggacctctcgcgcatcgaccggatggaccacgtgggcggccaggcgctgtggcgcgtgtggggccacaagatgccggcggacaccacgctcaccgatacgcaacgcgacattttcgagcgcatcgccctgctcgacaccgtgcgcgagacggccgagccggtgatcaaactcgatccgttcacgcggctggggctcgcgatcttctcgttcttcgagcatctgtatggcggcgtggccatgctcgggcgcgtcgtgctcgatctgctggcgatcgtgcgcaagccgaagatcacgccgtggaccgaaatctccgcgaacgtctacaacgccggcacgcaggcgttgccgatcaccgcgctggtcgcgttcctgatcggcatcgtgctgagctatctgtcggcgcagcaactgcggctttttggcgcaaaccagtacatcgtcaatattctcggcctctcggtgatccgcgaactcggaccggtgctctcggcgattctggtggcgggccgctcgggttcggcgatcactgcgcagatcggcgtgatgcgcgtgaccgaagagctcgacgccatgcgcgtgatgggcattccgcatggcctgcggctgatcctgccgcgcgtgcttgcgctcggcgtggcgatgccgctgctcgtcatgtggaccaacatcatcgcgctgaccggcggtgcgctggccgccaggatcgtgctcggcatcgacatgagctacttcgcgcgggctttgccgggcgtggtgccggtggcgaatctgtggatcgggctcggcaagggtgtggtgttcggcatgctgatcgcgatcgtcggctgtcacttcggtttccgtatcaaggccaattcgcaaagtctcggcgaaggcacgacgacttccgtggtgacctcgattacgatcgtgattctcgcggacgccgtgttcgcgattctcttccagaacgtggggctcggatga

SEQ ID NO: 112521 - protein, 377 aa, Burkholderia xenovorans LB400
MNYDTPPGLEVAAGSQGKIVRLSGQWTALALARDRATGHVIPLLLSLVGAEGIGGWDLSRIDRMDHVGGQALWRVWGHKMPADTTLTDTQRDIFERIALLDTVRETAEPVIKLDPFTRLGLAIFSFFEHLYGGVAMLGRVVLDLLAIVRKPKITPWTEISANVYNAGTQALPITALVAFLIGIVLSYLSAQQLRLFGANQYIVNILGLSVIRELGPVLSAILVAGRSGSAITAQIGVMRVTEELDAMRVMGIPHGLRLILPRVLALGVAMPLLVMWTNIIALTGGALAARIVLGIDMSYFARALPGVVPVANLWIGLGKGVVFGMLIAIVGCHFGFRIKANSQSLGEGTTTSVVTSITIVILADAVFAILFQNVGLG

SEQ ID NO: 112522 - DNA, 768 bp, Burkholderia xenovorans LB400
  CDS (1)..(768): transl_table=11
atgatcagtgcgatcggccgctccgtgctcgacgggctgggcacggccggctatgccacgcgtttcttcttccggctgctgctcgagtttttcccgttgttgcgccgtccacgtcttgtcacgaagcagatccacttcgtcggtaattattcgctggtgatcatcgccgtgtcgggcctgttcgtcggcttcgtgctcggtcttcagggctattacacgctgacccggtacggctccgaggaggcgctcggactgctggtcgcgctctcgctcgtgcgcgagctcgggccggtggtcacggcgctgctgttcgccgggcgcgccggtacgtcgctcacggccgagatcggcctgatgaaggcgggcgagcaactgaccgcaatggaaatgatggcggtggacccggtgaagatcgtgatcgcgccgcgcctgtgggccggcattatttcaatgccgatcctcgccgcgattttcagcgcggtcggcgtattcggcggctatgtggtgggcgtgctgctgatcggtgtcgatgccggtgcgttctggtcgcagatgcaaggcggcgtcgatgtctggcacgacgtgggcgccggcgtcgtcaagagcgtggtgttcggcctcgcggtgacgttcgttgcgctgtttcagggctatgaagccaagccgacgccggaaggcgtgtcgcgcgccacgaccaagacagtcgtgtacgcgtcgcttgcggtgctcggcctcgattttctgctgaccgcgctgatgttcagctaa

SEQ ID NO: 112523 - protein, 255 aa, Burkholderia xenovorans LB400
MISAIGRSVLDGLGTAGYATRFFFRLLLEFFPLLRRPRLVTKQIHFVGNYSLVIIAVSGLFVGFVLGLQGYYTLTRYGSEEALGLLVALSLVRELGPVVTALLFAGRAGTSLTAEIGLMKAGEQLTAMEMMAVDPVKIVIAPRLWAGIISMPILAAIFSAVGVFGGYVVGVLLIGVDAGAFWSQMQGGVDVWHDVGAGVVKSVVFGLAVTFVALFQGYEAKPTPEGVSRATTKTVVYASLAVLGLDFLLTALMFS

SEQ ID NO: 112524 - DNA, 777 bp, Ralstonia metallidurans CH34
  CDS (1)..(777): transl_table=11
gtgaacggcttctttacctcgattggctcgacggtacgccagttcgtcggcggcctgggtcatgccacgcgcatgttcctgacgatgctggcgctctcgcccgcgctgttgcgccgcttccggctggtgaccgaccaggtgttcttcgtcggcaacctttcgctcgtgatcatcgcggtgtcgggtttgttcgtcggattcgtgctgggtctgcagggctactacacgctgaaccgcttcggttcggagcaggcgctgggccttctggtagccctgtcgctggtgcgcgagctggggccggtggtggcagcgctgctgttcgccggccgcgctggcacgtcgctgacggccgaaatcggtctgatgaaggccggtgagcaactcagcgccatggagatgatggccgtgaacccgttgcagcgcgtgatcgcaccgcgtttctgggccggcgtgatcgccatgcctgtgctggccacgatcttcagcgccctgggtgtcctgggtggctacctggtcggcgtgcaactgattggtgtggacgccggcgcattctggtcgcagatgcagaacggcgtcgatgtgcgcgcggatgtgctcaacggcgtgatcaagagctttattttcggtatcaccgtgacgttcatcgcgctgtatcaaggtttcgaagccaagccgaccccggagggcgtatcgcgcgccaccacacgtaccgtggtactggcctcgctggccgtgctgggactggatttcctgctgaccgcgctgatgttcagctag

SEQ ID NO: 112525 - protein, 258 aa, Ralstonia metallidurans CH34
MNGFFTSIGSTVRQFVGGLGHATRMFLTMLALSPALLRRFRLVTDQVFFVGNLSLVIIAVSGLFVGFVLGLQGYYTLNRFGSEQALGLLVALSLVRELGPVVAALLFAGRAGTSLTAEIGLMKAGEQLSAMEMMAVNPLQRVIAPRFWAGVIAMPVLATIFSALGVLGGYLVGVQLIGVDAGAFWSQMQNGVDVRADVLNGVIKSFIFGITVTFIALYQGFEAKPTPEGVSRATTRTVVLASLAVLGLDFLLTALMFS

SEQ ID NO: 112526 - DNA, 816 bp, Myxococcus xanthus DK 1622
  CDS (1)..(816): transl_table=11
atgaccacgcagacccccagcaagccggcacgcgagcccgggcccttcacccaggccgtcacgcgctttggccagggcctcatcgacattgtcagcaccctgggcggcatcatcaccatggggctggacgtgttccgctggagcgtgcggcgccccttccggctggtcaacctcttcgcccaactggacttcgtgggtgtggggtccatcttcatcgtgtcgctcaccggcacgttcaccggcatggtcttcgcgctgcagacgtccaccgcctttcagctcttcgacgcggagagcctggtgggccccacggtggcactgacgctcacccgcgagctggcggccgtgttctccgcgctgatggtgaccatgcgggcaggttccgccatgtgcaccgagctgggcaccatgcgcgtcaccgagcaggtggacgcgctagagaccatggccgtcaacccggtgcagtacctgctggttccccgggtgctggccggcctcttcatggtgccggcgctcaccatgctcttcaacaccatgggcatgggcggggcctacgtggtagccgtcgggggcctgggcatctcccccggaaccttcctctcccggacgcagcagtggctggcgcccgaggacatcttccagggcctgctcaagggcgccgtgttcggcctgtcggtgtccctcatctgctgcttcaagggcttcaacgcctcgggcggcgccaagggcgtggggcaggccaccacggaggcgatggtggccagcgccctgtccatcttcatcctcgacttcatcctgggcatcctcttcttctga

SEQ ID NO: 112527 - protein, 271 aa, Myxococcus xanthus DK 1622
MTTQTPSKPAREPGPFTQAVTRFGQGLIDIVSTLGGIITMGLDVFRWSVRRPFRLVNLFAQLDFVGVGSIFIVSLTGTFTGMVFALQTSTAFQLFDAESLVGPTVALTLTRELAAVFSALMVTMRAGSAMCTELGTMRVTEQVDALETMAVNPVQYLLVPRVLAGLFMVPALTMLFNTMGMGGAYVVAVGGLGISPGTFLSRTQQWLAPEDIFQGLLKGAVFGLSVSLICCFKGFNASGGAKGVGQATTEAMVASALSIFILDFILGILFF

SEQ ID NO: 112528 - DNA, 786 bp, Haemophilus somnus 129PT
  CDS (1)..(786): transl_table=11
atgatccgagttatttcatctttaggtagatggggaatggatttttgtcgttctttagggcgagccggttttatgctttttggtgcattggttgggaaacaacagatgaggaagcatttccccttacttattaaacaactttatgtattaggtgtacaatctttgttaatcatcatgttatcgggtttatttattggcatggtgttggggttgcaagggtatgtggtgttagtggatttttccgcagaaacaagtcttggacaattagttgcattatcattgttacgagaattaggccctgttgtaaccgcacttttattcgctggtcgagccggttcagctcttacggctgaaataggtttaatgaaagcaacagagcagttatccagcttagaaatgatggcagttgatcctttgcgtcgagttatttcacctcgtttttgggcaggtgtgatttctatgcccattcttgccgttatttttaccgcaattggtatttggggcggttctttaatcggtgtggattggaaaggtgtggatgctgggagtttttggtcggtgatgcaaaactcggtcagttggagctatgatttattaaatggttttattaagagtttatgttttgctattgctgttgtttggattgcattattcaacggctatgattgtattccgacgtcggagggaattagtaaagcgacaacgaaaacggtggtgcatgcttctcttgttgttttaggattggattttgtactaacagcgttgatgtttggtgcaggttcataa

SEQ ID NO: 112529 - protein, 261 aa, Haemophilus somnus 129PT
MIRVISSLGRWGMDFCRSLGRAGFMLFGALVGKQQMRKHFPLLIKQLYVLGVQSLLIIMLSGLFIGMVLGLQGYVVLVDFSAETSLGQLVALSLLRELGPVVTALLFAGRAGSALTAEIGLMKATEQLSSLEMMAVDPLRRVISPRFWAGVISMPILAVIFTAIGIWGGSLIGVDWKGVDAGSFWSVMQNSVSWSYDLLNGFIKSLCFAIAVVWIALFNGYDCIPTSEGISKATTKTVVHASLVVLGLDFVLTALMFGAGS

SEQ ID NO: 112530 - DNA, 786 bp, Shewanella sp. MR-4
  CDS (1)..(786): transl_table=11
gtgaagttatttgacagtattgccgacctcggccgcagcgctatcgagttagtgctcggttttggccgtgcgggcctgatgctctggggcgcgattgttcgctggcctcgggtacgtaaggggtttccattattagtgcgccaaatctatgtggtcggcgtacaatctatggtcattattgtggtctcgggcctgtttatcggcatggtattggcgctgcagggctacaacatcttagtcggtttcggtactgaggagagcttaggccccatggtggccttaagcttactgcgtgaactcggtcctgtggtcaccgcgctattatttgcgggccgcgccggctcggcgctgaccgctgaaatcggtttgatgaagagtaccgaacagttatccagcttagagatgatggcgattgacccgctgcggcaaatcattgcgccccgtttttgggctggggtgatcagcatgccgctgttggcgctgatgtttaccgcggtaggcatttatggcggccatttagtgggcgtggaatggaaaggtatcgatggcggggctttttggtcgattctgcaagcttcggtcgaatggcgccaagacatagtgaactgcctgattaagagtggcgtatttgccgtggtggtgacttggattgccttataccgtggctatcaagtggtgccgaatcctgaggggatcagccgtgcaaccacctcaaccgtggtgcaatcgagcctcgccgtactggcattggactttttactaacagccctgatgtttggccgctaa

SEQ ID NO: 112531 - protein, 261 aa, Shewanella sp. MR-4
MKLFDSIADLGRSAIELVLGFGRAGLMLWGAIVRWPRVRKGFPLLVRQIYVVGVQSMVIIVVSGLFIGMVLALQGYNILVGFGTEESLGPMVALSLLRELGPVVTALLFAGRAGSALTAEIGLMKSTEQLSSLEMMAIDPLRQIIAPRFWAGVISMPLLALMFTAVGIYGGHLVGVEWKGIDGGAFWSILQASVEWRQDIVNCLIKSGVFAVVVTWIALYRGYQVVPNPEGISRATTSTVVQSSLAVLALDFLLTALMFGR

SEQ ID NO: 112532 - DNA, 780 bp, Alkalilimnicola ehrlichei MLHE-1
  CDS (1)..(780): transl_table=11
atgattaccgcagcctttcgcaacctcggtgcccgcaccctggctgccctcggcggcgtgggccgggcccatctgctcatgttccgcctgctggccgggctgctgcgggtgctggcccagccgcgctacatcattcagcagctctacgccgtgggcgtgctctcgctggtgatcatcgtggtctccgggctgttcgtcggcatggtgctggcgctgcagggctactacaccctggtggatttcggcgccgccgagtcggtgggcgtgctggtggcgctctcgctgctgcgcgagctggggccggtggtgaccgcgctgctgtttgccgggcgggccgggtcctcactcaccgccgaggtggggctgatgaaggccaccgaacagctctccagtatggagatgatggccgtggacccggagctgcgggtgatcgccccgcgtttccttgcctgcgtggttgccgtgcccctgctggcgggtattttcagcctggtggggatctacggtggctatctggtgtctgtaggattgatagggctcgatggcggggcgtactggggcaacatgcagtccgcggtgagcttcagcgacgatgtgctgaacggggtcatcaagagtgtggtcttcggcattgtggtgggctggatcgccctctacaaaggttatgaggccgtgcccacttccgagggtgtgagccgggccaccacccacggcgtggtgcacgcctcgctggccgtactggggctggacttcctgctcaccgccctgatgttcgactga

SEQ ID NO: 112533 - protein, 259 aa, Alkalilimnicola ehrlichei MLHE-1
MITAAFRNLGARTLAALGGVGRAHLLMFRLLAGLLRVLAQPRYIIQQLYAVGVLSLVIIVVSGLFVGMVLALQGYYTLVDFGAAESVGVLVALSLLRELGPVVTALLFAGRAGSSLTAEVGLMKATEQLSSMEMMAVDPELRVIAPRFLACVVAVPLLAGIFSLVGIYGGYLVSVGLIGLDGGAYWGNMQSAVSFSDDVLNGVIKSVVFGIVVGWIALYKGYEAVPTSEGVSRATTHGVVHASLAVLGLDFLLTALMFD

SEQ ID NO: 112534 - DNA, 786 bp, Hyphomonas neptunium ATCC 15444
  CDS (1)..(786): transl_table=11
atgatgcagaaccctattcaactcattggccgggcaacgcttgggctgttcggggaagtcggccggctggccgtctttgccggccgcgtcaaaggcgccgccttcacgccgcgctggtatggcggggaaatcctgcgccagatcgtgcgcatcggcttctactccctgcccgtcgtgggcctggccgccgtgttcattggcgccgccctcgcgctcaacatctatgaaggcggcagccgctatggcgccgaacagttcgtgccgagcatcgtggtgctgggcatcacgcgggaactcggcgtggtgatcaccggcctgatgctggcggggcgggtctctgccgggatcgccgccgagatcggcgcgatgcgcgtgaccgagcagatcgacgcgctggaaacgctctcagcctcccgctaccgctatctctatgccccgcgcttcatcgccgcccttatcaccttgccgatgctggtggcgctggccgacatcatcggcgtcatgggcggctggctggtcagcgtttacgggctcgacttcgactcgacggtttacctgcgcaacaccctcgatttcctcaccctgaatgacatcttcgccggcctcatcaaggcggtcgtgttcggcggcgtaatcgccatcatgggctgttaccagggcgaccgcagccaggcaggcgccaccggcgttggccgcgcagccaccctttcgatggtgggcgcagcggtgctgatccttgccttcaactatgtcatgtccaccgtgttcgtggagatcggcctatga

SEQ ID NO: 112535 - protein, 261 aa, Hyphomonas neptunium ATCC 15444
MMQNPIQLIGRATLGLFGEVGRLAVFAGRVKGAAFTPRWYGGEILRQIVRIGFYSLPVVGLAAVFIGAALALNIYEGGSRYGAEQFVPSIVVLGITRELGVVITGLMLAGRVSAGIAAEIGAMRVTEQIDALETLSASRYRYLYAPRFIAALITLPMLVALADIIGVMGGWLVSVYGLDFDSTVYLRNTLDFLTLNDIFAGLIKAVVFGGVIAIMGCYQGDRSQAGATGVGRAATLSMVGAAVLILAFNYVMSTVFVEIGL

SEQ ID NO: 112536 - DNA, 798 bp, Pseudomonas aeruginosa UCBPP-PA14
  CDS (1)..(798): transl_table=11
atgcgtagagtctctcccctcgagcgtatccgcctgttcggccgcgccggcctggacgtggtcgccgcgctcggccgctcgaccctgttcctcggccacgccctgctcggccggcgcacgccaggcaccgggttgcacctgctggtgaagcaactctattcggtaggcgtgctgtcgctggcgatcatcgtcgtctcgggcctgttcattggcatggtgctggccctgcagggctacaacatcctgatttcctatggttccgagcaggcggtcgggcagatggtggccctgaccctgctgcgcgaactggggccggtggtgaccggcctgctgttcgccggccgtgccggctctgcgcttaccgcggaaatcggcaacatgaaggccaccgaacagctttccagcctggaaatgatcggtgtcgacccgctcaagtacatcgtcgcgccgcgcctgtgggccggtttcatctccatgccgctgctcgccgcgatcttcagcgtggtcggcatctggggcggggcgatggtcgcggtcgactggctgggcgtatacgaggggtcgttctgggcgaacatgcagaacagcgtgcagttcaccgaggatgtgctcaacggcgtgatcaaaagtatcgtattcgccttcgtggtgacctggatcgcggtctaccaaggctacgactgcgagccgacctcggaaggaatcagccgggcgacgactcggaccgtggtctatgcctccctggcggtgctggggctcgatttcattctgactgctttgatgtttggagatttctga

SEQ ID NO: 112537 - protein, 265 aa, Pseudomonas aeruginosa UCBPP-PA14
MRRVSPLERIRLFGRAGLDVVAALGRSTLFLGHALLGRRTPGTGLHLLVKQLYSVGVLSLAIIVVSGLFIGMVLALQGYNILISYGSEQAVGQMVALTLLRELGPVVTGLLFAGRAGSALTAEIGNMKATEQLSSLEMIGVDPLKYIVAPRLWAGFISMPLLAAIFSVVGIWGGAMVAVDWLGVYEGSFWANMQNSVQFTEDVLNGVIKSIVFAFVVTWIAVYQGYDCEPTSEGISRATTRTVVYASLAVLGLDFILTALMFGDF

SEQ ID NO: 112538 - DNA, 849 bp, Mycobacterium smegmatis str. MC2 155
  CDS (1)..(849): transl_table=11
atgacgatcctgcggtcgacctacccgcgcctgacccggcagttcaacaagccggtcgcgacgctgagccgcgtgggcgaccacacgctgttctacctgcgcgcgatcgcgggcacgccgcacgcggcactgcactaccgcaaggaactcgtccggctcatcgccgagatctccatgggcgcgggcacgctcgcgatgatcggcggcaccgtcgtcatcgtcgggttcctgaccctggccaccggcggcgtgctggcgatccaggggtactcgtcgctgggcaacatcggcatcgaggcgctcaccggattcctctcggcgttcatcaacgtgcgcatcgccgcgccggtggtcgcgggcatcggcctggcggccacgttcggcgcaggcgtgaccgcccaactcggcgcgatgcgcatcaacgaggagatcgacgcgctcgaatcgatggcgatccggcccgtcgagtacctcgtgagcacccgcatcgtcgccgggatgatcgccatcacgccgctgtacgcgatcgcggtgatcctgtcgttcctcgcgtcgcagttcaccacggtggtgctgctcggccagtccggcgggctctacaaccactacttcgacacgttcctcaacccgatcgacctgttgtggtcgttcctgcaggcgatcctgatggccatcacgatcctgttgatccacacgtacttcggatacttcgcgtccggcgggccgtccggtgtcggcgtggcggtcggcaatgccgtgcgcacctcgctgatcgtcgtcgtctccgtgacgctgctggtgtcgctggcggtgtacggatccaacggaaacttcaacttgtcggggtag

SEQ ID NO: 112539 - protein, 282 aa, Mycobacterium smegmatis str. MC2 155
MTILRSTYPRLTRQFNKPVATLSRVGDHTLFYLRAIAGTPHAALHYRKELVRLIAEISMGAGTLAMIGGTVVIVGFLTLATGGVLAIQGYSSLGNIGIEALTGFLSAFINVRIAAPVVAGIGLAATFGAGVTAQLGAMRINEEIDALESMAIRPVEYLVSTRIVAGMIAITPLYAIAVILSFLASQFTTVVLLGQSGGLYNHYFDTFLNPIDLLWSFLQAILMAITILLIHTYFGYFASGGPSGVGVAVGNAVRTSLIVVVSVTLLVSLAVYGSNGNFNLSG

SEQ ID NO: 112540 - DNA, 792 bp, Azoarcus sp. BH72
  CDS (1)..(792): transl_table=11
atgagcgggctggtcgcggcgctccggcgcctgggcgggatgagcatcgacgcggtgtggcggctgggctttgccacccgcttcctgttgatggtgctggtgtattccgggcagtcggtgcgccgcattcaccttacgctgcgcgagatctacttcgcgggcgtgctgtcgctgctgatcatcctcgtgtcggggctgttcgtggggctggtgctcgggctgcagggctatgaaaccttgcagcgtttcgggtccagcgatgcgctcggcgtgctggtcgcgctgtcgctgacgcgcgaactcggcccggtcgtggcggcgctgctcttcgccagccgcgcggggtcggcagtcaccgcggagatcggcctgatgaaggccaccgagcagctcaaggcgatggacatgatggcggtgaatccgctggcgcgggtggtagcgccgcggttctggggcggggtgatctcgatgccgctgctcgccgcgatgttctccgcgatgggcgtgttcggcggctggctcatcggcgtcgtcttcatcggtgtggacgacggcgcgttctggtcgcagatgcaggccgcggtggatgtgcgctatgacgtgctgaacggcgtcatcaagtccttcgtgttcggcgtcgcggtgtccttgatcgcggtgttcgagggctacgactgcacccccaccgccgagggcgtctcgcgggcgatcacccgcaccgtggtcagttcggcgctcgccatcctggcgctcgacttcgtgctcacctctttcatgttccggggacaatga

SEQ ID NO: 112541 - protein, 263 aa, Azoarcus sp. BH72
MSGLVAALRRLGGMSIDAVWRLGFATRFLLMVLVYSGQSVRRIHLTLREIYFAGVLSLLIILVSGLFVGLVLGLQGYETLQRFGSSDALGVLVALSLTRELGPVVAALLFASRAGSAVTAEIGLMKATEQLKAMDMMAVNPLARVVAPRFWGGVISMPLLAAMFSAMGVFGGWLIGVVFIGVDDGAFWSQMQAAVDVRYDVLNGVIKSFVFGVAVSLIAVFEGYDCTPTAEGVSRAITRTVVSSALAILALDFVLTSFMFRGQ

SEQ ID NO: 112542 - DNA, 777 bp, Magnetospirillum magnetotacticum MS-1
  CDS (1)..(777): transl_table=11
atgacctcattcttggccaccatcggccgggtcttcctggcattcctggcccatgtggggcggctgtcggccttcaccgccatggcggtgtcgcacacggtccgcccgcccttctatcctcgcctgatcctgcgcgaattcgtcgagatcggttatttctcgctgcccgtggtcggcctgaccgccgtgttcaccggcatggtgctggcgctgcaatcctattcgggcttctcgcgctttgccgccgagggcgccgtggccaccgtggtggtcctctcggtgacccgcgaactggcgcccgtcctggccggtctgatggtggcggggcgcatcggcgcctccatggccgccgaaatcggcaccatgcgcgtcaccgagcagatcgacgccctgaccacgctatcgaccaatcccttcaagtatctggtggcgccgcgcatcctggccgggaccctgatgctgcccttcctggtgctgatcgccgacatcatcggcgtgttcggcggctatatcgtcggtgtctacaagctgggcttcaactcggccacctatatcgcgcgtacctgggaattcctcgagccgctggacgtgatctcgggcctgaccaaggccgccgtgttcggcttcttgatcacgctgatgggctgctataacggctattactccaagggcggcgcccagggcgtgggcgcggccaccaccaatgcggtggtgtccgcggccatcatgatcctggtgttcaactacatcatcaccgccatgttcttcgggaaataa

SEQ ID NO: 112543 - protein, 258 aa, Magnetospirillum magnetotacticum MS-1
MTSFLATIGRVFLAFLAHVGRLSAFTAMAVSHTVRPPFYPRLILREFVEIGYFSLPVVGLTAVFTGMVLALQSYSGFSRFAAEGAVATVVVLSVTRELAPVLAGLMVAGRIGASMAAEIGTMRVTEQIDALTTLSTNPFKYLVAPRILAGTLMLPFLVLIADIIGVFGGYIVGVYKLGFNSATYIARTWEFLEPLDVISGLTKAAVFGFLITLMGCYNGYYSKGGAQGVGAATTNAVVSAAIMILVFNYIITAMFFGK

SEQ ID NO: 112544 - DNA, 786 bp, Haemophilus somnus 2336
  CDS (1)..(786): transl_table=11
atgatccgagttatttcatctttaggtagatggggaatggatttttgtcgttctttagggcgagccggttttatgctttttggtgcattggttgggaaacaacagatgaggaagcatttccccttacttattaaacaactttatgtattaggtgtacaatctttgttaatcatcatgttatcgggtttatttattggcatggtgttggggttgcaagggtatgtggtgttagtggatttttccgcagaaacaagtcttggacaattagttgcattatcattgttacgagaattaggccctgttgtaaccgcacttttattcgctggtcgagccggctcagctcttacggctgaaataggtttaatgaaagcaacagagcagttatccagcttagaaatgatggcagttgatcctttgcgtcgagttatttcacctcgtttttgggcaggtgtgatttctatgcccattcttgccgttatttttaccgcaatcggtatttggggcggttctttagtcggtgtggattggaaaggtgtggatgcagggagtttttggtctgtgatgcaaaactccgttagctggggatatgatttattaaacggttgtattaagagtttatgttttgccatcgctgttgtttggattgcattattcaacggctatgattgtatcccgacatcagagggaattagtaaagcgacaacgaaaacggtggtgcatgcttctcttgttgttttaggattggattttgtactaacagcgttgatgtttggtgcaggttcataa

SEQ ID NO: 112545 - protein, 261 aa, Haemophilus somnus 2336
MIRVISSLGRWGMDFCRSLGRAGFMLFGALVGKQQMRKHFPLLIKQLYVLGVQSLLIIMLSGLFIGMVLGLQGYVVLVDFSAETSLGQLVALSLLRELGPVVTALLFAGRAGSALTAEIGLMKATEQLSSLEMMAVDPLRRVISPRFWAGVISMPILAVIFTAIGIWGGSLVGVDWKGVDAGSFWSVMQNSVSWGYDLLNGCIKSLCFAIAVVWIALFNGYDCIPTSEGISKATTKTVVHASLVVLGLDFVLTALMFGAGS

SEQ ID NO: 112546 - DNA, 705 bp, Actinobacillus pleuropneumoniae serovar 1 str. 4074
  CDS (1)..(705): transl_table=11
atgttgcttggcgcacttatcggtaaaccgcaatttcgtaaacatacgccgctattaattaaacaattatatgttttaggtgtacaatccttactgattattatgctttccgggttgtttatcgggatggtactcggcttgcaggggtatgtagtactagtagatttcgcagcggaaacgagcttaggtactttggtttctctttcgcttttaagagaacttggtccggttgtaaccgcgttattatttgccggtcgagccggttccgcactaactgccgaaatcggtttaatgaaggcgaccgaacagctttccagccttgaaatgatggcggttgatccgttaagacgcattattgcgccgcgtttttgggcgggcgtgatttccatgccgattttagccgcaatttttaccgctatcggtatttggggcggttcgttagtcggggttgattggaaaggtgttgatggcggcagtttttggtcggtaatgcaaaattccgtagattggagcgatctgattaacggttttatcaaaagtattatttttgcgtttgcggtcgtctggatagcgttatttaacggttatgattccgtagcgacttcagagggaattagccaagcaacgaccagaacggtagtacacgcttcattagtcgtactcggattggattttattttaaccgcaattatgttcggcggttaa

SEQ ID NO: 112547 - protein, 234 aa, Actinobacillus pleuropneumoniae serovar 1 str. 4074
MLLGALIGKPQFRKHTPLLIKQLYVLGVQSLLIIMLSGLFIGMVLGLQGYVVLVDFAAETSLGTLVSLSLLRELGPVVTALLFAGRAGSALTAEIGLMKATEQLSSLEMMAVDPLRRIIAPRFWAGVISMPILAAIFTAIGIWGGSLVGVDWKGVDGGSFWSVMQNSVDWSDLINGFIKSIIFAFAVVWIALFNGYDSVATSEGISQATTRTVVHASLVVLGLDFILTAIMFGG

SEQ ID NO: 112548 - DNA, 786 bp, Haemophilus influenzae R2866
  CDS (1)..(786): transl_table=11
atgatcgtcaattttatttctgctttaggaaaacaggtgatcgactttttccgtgcattggggcgagcaggctttatgttatttggtgcattgatcggcaagccacaaattcgtaaacattttcctttgcttgtgaagcaaatgcatgttttaggtgtccaatcgttactcattattttgttgtccggtttatttattggaatggtgttaggactacaaggttatgtcgtattagttgatttttctgctgaaacaagtttaggtcagttggtggcactttctcttttgcgagaattaggccctgttgttaccgcacttttatttgctggtcgagcaggttctgcattgacggctgaaataggcttaatgaaagccactgaacaactttctagtcttgaaatgatggctgttgatcctttacgtcgagtgattgcacctcgtttttgggcaggggttatttccatgccaattttgtcaatcttgtttatcgcgattggtatttggggcggttccttagttggtgtggattggaaaggtgttgattcaggcagcttttggtctgttatgcaaaattccgtgagttggagctatgatattttaaatggctttattaaagcggttttctttgctgtagccgtaacttggattgcgctttttaatggttatgattgtatgccaacatcagaaggtatcagtcaagctacaacacgaacagttgtgcacgcttcacttgttgttctaggattagattttattttgactgctattatgtttggtgcaagttaa

SEQ ID NO: 112549 - protein, 261 aa, Haemophilus influenzae R2866
MIVNFISALGKQVIDFFRALGRAGFMLFGALIGKPQIRKHFPLLVKQMHVLGVQSLLIILLSGLFIGMVLGLQGYVVLVDFSAETSLGQLVALSLLRELGPVVTALLFAGRAGSALTAEIGLMKATEQLSSLEMMAVDPLRRVIAPRFWAGVISMPILSILFIAIGIWGGSLVGVDWKGVDSGSFWSVMQNSVSWSYDILNGFIKAVFFAVAVTWIALFNGYDCMPTSEGISQATTRTVVHASLVVLGLDFILTAIMFGAS

SEQ ID NO: 112550 - DNA, 768 bp, Burkholderia vietnamiensis G4
  CDS (1)..(768): transl_table=11
atgatcagcgcgatcggacgttacgtcatcggcggcctcgagcgcgcgggctacggcacgcggttgttcgtgcgcctcgtgctggaattcttcccgctgctgcgccggcctcggctcgtcaccaagcagatccacttcctcggcaactactcgttcgtgatcatcgccgtgtcggggctgttcgtcggcttcgtgctcgggctgcagggctactacacgctgaatcgctacgggtccgagcaggcactcgggctgctcgtcgcgctgtcgctggtgcgcgagctggggccggtcgtgaccgcgctgctgttcgcgggccgcgccggcacgtcgctgaccgccgaaatcggcctgatgaaggccggcgaacagctgaccgcgctcgagatgatggccgtcgacccgctgaagacggtgatcgcgcctcgcctgtgggccggcatcatcgcgatgccgctgctcgcggcgatcttcaacgcggtcggcgtgctcggcggctatttcgtcggcgtggtgctgatcggcgtcgatccgggcgcgttctggtcgcagatgcagggcggtgtcgaggtctgggccgacgtcggcaacggcgtgatcaagagcatcgtgttcggattcgccgtcaccttcattgcgctgtttcaggggtatgaagcgaagcccacgcccgagggcgtgtcgcgcgcgacgaccaagacggtcgtgttcgcgtcgctcgccgtactcggcctcgatttcctgctgaccgcgctgatgttcagctaa

SEQ ID NO: 112551 - protein, 255 aa, Burkholderia vietnamiensis G4
MISAIGRYVIGGLERAGYGTRLFVRLVLEFFPLLRRPRLVTKQIHFLGNYSFVIIAVSGLFVGFVLGLQGYYTLNRYGSEQALGLLVALSLVRELGPVVTALLFAGRAGTSLTAEIGLMKAGEQLTALEMMAVDPLKTVIAPRLWAGIIAMPLLAAIFNAVGVLGGYFVGVVLIGVDPGAFWSQMQGGVEVWADVGNGVIKSIVFGFAVTFIALFQGYEAKPTPEGVSRATTKTVVFASLAVLGLDFLLTALMFS

SEQ ID NO: 112552 - DNA, 786 bp, Roseovarius nubinhibens ISM
  CDS (1)..(786): transl_table=11
atgagcatgatcgcacagttcctcgccagcatcggcgccaccgttctgggctttctcgccaccatcggccgggtcacgatctttgccggcaacaccgtgtcgcatctgatccgcccgcccttctacgggcgcgaattcggcgcggcgctgatccagatcggctggctctcgctgcccgtggtcggcatgaccgcgctcttcaccggcggcgcgctggcgctgcagatctatgccggcggcgcccggttcaacgctgaaaccgtggtgccctcgatcgtcgccatcggcctcacccgcgagttgggcccagtgctcggcggtctcatggtcgccgcccgcgtggcaagctcgatcgccgccgagatcggcaccatgaaagtcaccgaacagatcgacgcgctcaccacgctctcgaccaacccgatgaaatacctgaccctgccgcgcgttctcgccgccacgctcgccgtgccggtgctggtcggcgtcggcgatgtgctcggcatcatgggcggctttctcgtcggcgtcggacggctcgatttcggcgccgccacctatctgcacaacacgctcgacttcctgaccctctgggacgtgacctcgggcctgatcaaaggcgcggttttcggctttctcgtcgccctcatgggctgctatttcggcatgaactccggccgcggcgcccagggcgtcggccgagccaccaaatccgccgtggtcgctgcctcggtgctgatcctcgcctccaattacctcctgacagagctgtttttctccgcatga

SEQ ID NO: 112553 - protein, 261 aa, Roseovarius nubinhibens ISM
MSMIAQFLASIGATVLGFLATIGRVTIFAGNTVSHLIRPPFYGREFGAALIQIGWLSLPVVGMTALFTGGALALQIYAGGARFNAETVVPSIVAIGLTRELGPVLGGLMVAARVASSIAAEIGTMKVTEQIDALTTLSTNPMKYLTLPRVLAATLAVPVLVGVGDVLGIMGGFLVGVGRLDFGAATYLHNTLDFLTLWDVTSGLIKGAVFGFLVALMGCYFGMNSGRGAQGVGRATKSAVVAASVLILASNYLLTELFFSA

SEQ ID NO: 112554 - DNA, 747 bp, Prochlorococcus marinus str. MIT 9211; identical to SEQ ID NO: 17665
  CDS (1)..(747): transl_table=11

SEQ ID NO: 112555 - protein, 248 aa, Prochlorococcus marinus str. MIT 9211; identical to SEQ ID NO: 17666

SEQ ID NO: 112556 - DNA, 780 bp, Pseudoalteromonas tunicata D2
  CDS (1)..(780): transl_table=11
atgattgcattttggcagcaactaggaaaagaaacactcaatcgatttgcctcagtaggtcgagcattgatgatgttaattggtgctattttcagtgtgccaaactttaggaaaggcacgccattactaattaaacagttgtatatggtgggatttttatcccttatgatcattgttgtatctggtttgttcattggtatggttttagctttacagggctatactgtattagttgattatggtgctgaagatagtttagggccgctggtggcacttagtttattgcgtgagctagggcctgttgttactgctttattatttgccgggcgtgcaggtagtgcattaacagctgaaatcggtttaatgaaagccactgaacaactcagtagtttagaaatgatggcgattgatcctctcaaacgtattatcgccccacgtttttgggcgggcattatcagtatgccattactcgcattaatattttcagctgtggctattttaggcgctcacttagtgggtgttgattggttgggaatagattctggtagtttctggtctgttatgcaggctcaggtttcttttgaaaaagatatccttaatggcatgattaaaagtctggtatttgcttttgtcgtaacatggattgctttgtacaaaggatatttttgtatccctacatctgaggggatcagtaaagcgacaaccgaaaccgtagtgcagtcatcattggcagtactgggttttgattttgtattgaccgctgtgatgtttagcagctaa

SEQ ID NO: 112557 - protein, 259 aa, Pseudoalteromonas tunicata D2
MIAFWQQLGKETLNRFASVGRALMMLIGAIFSVPNFRKGTPLLIKQLYMVGFLSLMIIVVSGLFIGMVLALQGYTVLVDYGAEDSLGPLVALSLLRELGPVVTALLFAGRAGSALTAEIGLMKATEQLSSLEMMAIDPLKRIIAPRFWAGIISMPLLALIFSAVAILGAHLVGVDWLGIDSGSFWSVMQAQVSFEKDILNGMIKSLVFAFVVTWIALYKGYFCIPTSEGISKATTETVVQSSLAVLGFDFVLTAVMFSS

SEQ ID NO: 112558 - DNA, 783 bp, Photobacterium sp. SKA34
  CDS (1)..(783): transl_table=11
atgattgttgatgcgatagcccatttagggcgaagtggtattgaaaaatgccaaacaatgggacgagcaacgttaatgttgtttggcgcattggtgagtaagcctcagccaagaaaaatgtttccgttattaataaagcaactgtattcagttggtgttttatcaatcgcgattattattgtttctggtttgtttatcggcatggtattgagtttacaaggttaccttgtactggcaggctttggtgccgaaacgagcttaggacaaatggttgcattgtctttacttcgcgaattaggtccagttgtgacagcgttattatttgctgggcgagcaggctctgcacttaccgctgaaataggtttaatgaaagcgacagaacagctttcaagtatggaaatgatggcggttgatccgcttcgtcgagtgattgcgccacgcttttgggctggagttatctcaatgccattattagcgctgatgtttagtgttgttggtttatggggggcgcaagttgttggcgttgactggaaagggattgattacggtagtttctggtcggtcatgcaatcttcagtgaactttagttatgacatagggaacagcattattaaggctgttgcttttgcgataacagtaacctggattgcggtatttaatggttatgatgccgttcctacttctgaagggatcagccgagcaacgacacgaacggtggtgaattcatcattggccgtattgggcttagattttattttgactgcacttatgtttggtagctaa

SEQ ID NO: 112559 - protein, 260 aa, Photobacterium sp. SKA34
MIVDAIAHLGRSGIEKCQTMGRATLMLFGALVSKPQPRKMFPLLIKQLYSVGVLSIAIIIVSGLFIGMVLSLQGYLVLAGFGAETSLGQMVALSLLRELGPVVTALLFAGRAGSALTAEIGLMKATEQLSSMEMMAVDPLRRVIAPRFWAGVISMPLLALMFSVVGLWGAQVVGVDWKGIDYGSFWSVMQSSVNFSYDIGNSIIKAVAFAITVTWIAVFNGYDAVPTSEGISRATTRTVVNSSLAVLGLDFILTALMFGS

SEQ ID NO: 112560 - DNA, 780 bp, Oceanospirillum sp. MED92
  CDS (1)..(780): transl_table=11
atggataaattagctttattaggacgtcatgggttagacaggttagctgcctttggtcgttcttcaatgattttgtttcaagcgttagtggctaaaccccagccattaatgatgtttcctctgttagttcagcagatctattttgtgggcgttttgtcgctcattattatcgtagtctcgggtttgtttatcgggatggttttgggattgcagggctatactattctggttgactatggttctgagcaagctgttgggcagatggtcgcactgagcctagtcagagagcttgcgcctgtggtcacggccttgctgtttgcggggcgcgctggttctgcattgacagcagaaattggtttaatgaaagcaacagagcagctttctagcctggaaatgatcggtgttgatccgttacggcgaattattgctccccggttttgggcgggctttatttgcttacctatactctcggcgatatttgccattgtgggggtgtatggtggtgctctggtgagtattgattggctcggaatctatgatggttcgttttgggccaatatgcagaattcggttaatttctatgaagacgtcatgaacggtttggtgaaagccgtggtcttcggttttgttgtgacctggatagcagtctttcagggatatgattgcatcccgacctcggaagggattagtcaggcaacaacaaaaacagtggtttattcatcgcttgcggtgttaggcctggattttattcttacagctgtaatgtttggagaagtttga

SEQ ID NO: 112561 - protein, 259 aa, Oceanospirillum sp. MED92
MDKLALLGRHGLDRLAAFGRSSMILFQALVAKPQPLMMFPLLVQQIYFVGVLSLIIIVVSGLFIGMVLGLQGYTILVDYGSEQAVGQMVALSLVRELAPVVTALLFAGRAGSALTAEIGLMKATEQLSSLEMIGVDPLRRIIAPRFWAGFICLPILSAIFAIVGVYGGALVSIDWLGIYDGSFWANMQNSVNFYEDVMNGLVKAVVFGFVVTWIAVFQGYDCIPTSEGISQATTKTVVYSSLAVLGLDFILTAVMFGEV

SEQ ID NO: 112562 - DNA, 741 bp, Flavobacteria bacterium BBFL7
  CDS (1)..(741): transl_table=11
atgagatttttaagacacataggtaaatatatattgatgttgataggtatttttaaaagacctaccaaaacatctgtattaagagaactgatacttaaggaaatagatgatctagttataggatcaataggcatcacagcttttatttctctttttatgggagctgttgtagcactgcaaacagccttaaatttagataatccattgattcctaaaagtttaattggttttgccacaagacaatccataattcttgagtttgctcctacatttatatctgtgattatggctggtaaagttggttcgtacatcacatccagtataggtacaatgcgagttacagagcagattgacgccttagaagtaatgggaataaatcctcttaactatttaatatatcctaagattatagcgcttttattctatccatttttgattgccatcatcatgtttgttgggatattcggtggttttttggccagtgtttatggtaacctagttagtttagaagattttatagtcggtttacaggactcgtttattccttggcatgtagcttacgcatttattaaaacgatggtatttggtattctactagctactattcctagttatcacggatattatatggaaggtggcgcacttgaagtaggaaaggcatctacaacatcctttgtatggacttgtgttgctatcatagtagcaaactacattcttactcaaattcttttaacgacatga

SEQ ID NO: 112563 - protein, 246 aa, Flavobacteria bacterium BBFL7
MRFLRHIGKYILMLIGIFKRPTKTSVLRELILKEIDDLVIGSIGITAFISLFMGAVVALQTALNLDNPLIPKSLIGFATRQSIILEFAPTFISVIMAGKVGSYITSSIGTMRVTEQIDALEVMGINPLNYLIYPKIIALLFYPFLIAIIMFVGIFGGFLASVYGNLVSLEDFIVGLQDSFIPWHVAYAFIKTMVFGILLATIPSYHGYYMEGGALEVGKASTTSFVWTCVAIIVANYILTQILLTT

SEQ ID NO: 112564 - DNA, 792 bp, delta proteobacterium MLMS-1
  CDS (1)..(792): transl_table=11
ttgctgctggcacgtgtcgagcgcttgggtgagcgctccctttatatcctgggtgatctcgggcggatgggggtctttctgctgctggccgtaggtggcctgttcaagcggcctttccgttttgccgaggtggtgcgccagacccgcttgatcggggccaactcgttgccggttatcttctttaccgccgcctttaccgggatggtgctgggtttgcagggttactacaccctgcgccagttcggggctgaaagcgccctgggctcggcggtggccctgtcgctgatccgcgagctggggccggtgctcaccgccctgatggtcatcggccgggccggttcggcgatgtgcgccgagattggcatcatgcgcaattccgaacagatcgacgccctggagtgcatggccgtcgaccccttccgctacctgatcgcccccaaactgctggccaccatgatttccattcccctgctgaccctgatcttcaatgtggtcggcatctttggcggttacgtggccggtgttatgctgctgggggtcaatcccggctcctatttcgccggcatggaacagagcgtggtcgatgccgatatccggatggggattatcaaatccctggttttcgccctgctggtggtttggatttgtaccgcccgggggtactatgtccacgccatccggggggccggtttcggggccgaaggggtcagccgggccaccacccaggcggtggtcttttcctccatttcggtcctgctctttgattatctgctgacagcggtgctgttatga

SEQ ID NO: 112565 - protein, 263 aa, delta proteobacterium MLMS-1
MLLARVERLGERSLYILGDLGRMGVFLLLAVGGLFKRPFRFAEVVRQTRLIGANSLPVIFFTAAFTGMVLGLQGYYTLRQFGAESALGSAVALSLIRELGPVLTALMVIGRAGSAMCAEIGIMRNSEQIDALECMAVDPFRYLIAPKLLATMISIPLLTLIFNVVGIFGGYVAGVMLLGVNPGSYFAGMEQSVVDADIRMGIIKSLVFALLVVWICTARGYYVHAIRGAGFGAEGVSRATTQAVVFSSISVLLFDYLLTAVLL

SEQ ID NO: 112566 - DNA, 789 bp, Rickettsiella grylli
  CDS (1)..(789): transl_table=11
atgttgatacttgagaagttacagcaattgggtcagcgtggcttacgactactggtaaattttggccgcgcaaccctttttttaactcaattgttgattcgtaagccacgttttagaaaaagctttcctttgctcatagaacaattatattttataggtgtattgtcgttaatcatcatggtcatatcggggttatttattggcatggtcgttggattacaaggttataataccttaaataagtttggcgccagccaacaattaggccaattagttgccttaagcgtggtgcgagaattaggacctgttattacggcattattatttgcaggccgtgcgggttcagcgttgactgcagaaattggtttaatgaagtcaaccgaacagcttgcaagtatggaaatgatgggtatcgatccactgtggcgtgttatttctccccgtttttggggtggctttataagcatgccatttctgatgattatttttagtacggttgctatttggggggggtatttagtcggtgttgtttggttgggtgttgacggggggaccttttggagtgcgatgcaatcggcggttaatttccatgacgatataatcaatgggattataaaaagtattgtttttggtggtgtagtgacctggatagccgtatttcagggatatgatacgatacctacgccacagggtgttggacgcgcaacaacgcataccgttgtttattcttctctggctatactcggtttggattttgtattaactgctgtcatgatgggaggctggtaa

SEQ ID NO: 112567 - protein, 262 aa, Rickettsiella grylli
MLILEKLQQLGQRGLRLLVNFGRATLFLTQLLIRKPRFRKSFPLLIEQLYFIGVLSLIIMVISGLFIGMVVGLQGYNTLNKFGASQQLGQLVALSVVRELGPVITALLFAGRAGSALTAEIGLMKSTEQLASMEMMGIDPLWRVISPRFWGGFISMPFLMIIFSTVAIWGGYLVGVVWLGVDGGTFWSAMQSAVNFHDDIINGIIKSIVFGGVVTWIAVFQGYDTIPTPQGVGRATTHTVVYSSLAILGLDFVLTAVMMGGW

SEQ ID NO: 112568 - DNA, 792 bp, Vibrio sp. Ex25
  CDS (1)..(792): transl_table=11
atggtcgataactttatgcattttgtcgcctcactaggtagacgaacgctctccatctgcggagcatttggtcgtgcgactttcatgctgattggggcactgtttactaagccacaaccgctcaaaagctttcctctgctcgttaaacaactttattccgtaggcgtccagtctctggcgattatcgtcgtatctgggttgttcattggtatggtcttgagcctacaaggctatgttgtgctggtggattacggcgcagagggcagtttggggcaaatggtggcgctctcattgctacgtgaattagggcccgttgtcactgcacttctgtttgctggtcgtgcaggctctgcgttaactgcagagataggtttgatgaaagcgacggagcaactttctagccttgaaatgatggcggtagatccgctgaaaagagtgatcgcgccacgtttttgggctggtgctatttcaatgccattactggctatgattttcatggcagtgggtatttggggcgctcagcttgttggtgttgactggaaaggtgttgaccatggcagtttttggtcagcgatgcagtcctcagttgaactaggacaggatattggtaacagtatgatcaaatgctttgcgtttgcaattacggttacttgggtcgctctatttaacggttatgatgctattccaacttcggaagggatcagccgagcaactacgcgcactgttgtgcattcttctttagcagtactaggactagactttgtactgaccgcattgatgtttgggaattaa

SEQ ID NO: 112569 - protein, 263 aa, Vibrio sp. Ex25
MVDNFMHFVASLGRRTLSICGAFGRATFMLIGALFTKPQPLKSFPLLVKQLYSVGVQSLAIIVVSGLFIGMVLSLQGYVVLVDYGAEGSLGQMVALSLLRELGPVVTALLFAGRAGSALTAEIGLMKATEQLSSLEMMAVDPLKRVIAPRFWAGAISMPLLAMIFMAVGIWGAQLVGVDWKGVDHGSFWSAMQSSVELGQDIGNSMIKCFAFAITVTWVALFNGYDAIPTSEGISRATTRTVVHSSLAVLGLDFVLTALMFGN

SEQ ID NO: 112570 - DNA, 780 bp, Alteromonadales bacterium TW-7
  CDS (1)..(780): transl_table=11
atgttggatttgtttcaaaagttagggcataaaactctgggtcgctttgctgcccttggtcgctcagcttacatgttgttcagtgcactcgcgcatgttcctaattttaaaaaaggcactccgctgcttgttcgccagctttatatggtgggttcgcagtcgctgcttataattatggtatcgggcttgtttatcggtatggtactcgcattgcaaggctacaccgtattagtagggtatggtgctgaagatagcttagggccacttgtagcactgagtttactgcgtgagctaggccctgttgttactgcgctattatttgctgggcgtgcaggcagtgcacttaccgcagaaataggcctcatgaaagccaccgaacaattatcatcattagagatgatggcaattgatccacttaaacgtattatcgcacctcgtttttgggctggttttattagcatgcctttacttgcaattatattctctgccgttgcaattataggggcgcatttagttggggttgattggttaggtgtagataccggtagcttttggtcaattatgcaatcgcaagtgtcgtttcaggctgatgtactaaacggcataattaaaagctttgtatttgcaatagtggttacttggattgcactttacaaaggctatgactgtgttccaacgtcagaagggatcagcaaagcaactaccgagacagttgtacattcgtcattggccgttttaggtttcgactttattttgacagcggtaatgtttaccagctaa

SEQ ID NO: 112571 - protein, 259 aa, Alteromonadales bacterium TW-7
MLDLFQKLGHKTLGRFAALGRSAYMLFSALAHVPNFKKGTPLLVRQLYMVGSQSLLIIMVSGLFIGMVLALQGYTVLVGYGAEDSLGPLVALSLLRELGPVVTALLFAGRAGSALTAEIGLMKATEQLSSLEMMAIDPLKRIIAPRFWAGFISMPLLAIIFSAVAIIGAHLVGVDWLGVDTGSFWSIMQSQVSFQADVLNGIIKSFVFAIVVTWIALYKGYDCVPTSEGISKATTETVVHSSLAVLGFDFILTAVMFTS

SEQ ID NO: 112572 - DNA, 1134 bp, Pseudomonas putida GB-1
  CDS (1)..(1134): transl_table=11
atggagcctatgaccacccccagcgccattctggacaccagcagccagccgccctgcctgcgcattaccggtgattggaccctggcgcattacgccaacctcaagcgcgaaagcgagcaactgcgcacgcaatacgctgccgacaccgtcgccgacctcagccagctaggccgcctggacaccgccggcgcgtcgctgctggccgagctgctaggttccgagcgcctgtcgcgttgtacccaagacctgcccgaagccagccgcgcactgctcaagaacgtctactgctcggtccaggactactgcatcccggtcaaggagcccgagcggaacgtactgctgatgctgctggaacgcatcggccgcgccgtcggcacactgtggcaagactccatgcagttgctcggtttcgtcggcgtcatcctcgaaaccttgctgcgtcgcgccctgcaaccgcatcgctggcgcttcacaccggtcgtggcacatatcgaacagaccgggctggatgccgcgcccatcgtcgccttgctgaccttcctggtgggtgcggtagtggccttcctcggtgccacggtgctggccgacttcggcgcgaccattttcaccgtcgacctggtggcgttctcgttcctgcgcgaattcgccgtgctgctgaccgccatcctcatggccgggcgcacggccagcgcgttcaccgcacaaataggctcgatgaaggccaatgaagaaatcgacgccatccgcaccctgggcctgaaccccatggagctactggtggtgccacgggtgctggccttgctgatttcgctgccgttgctcacctttgtcgcgatgatctgcggcatgattggtggcgcggtggtctgcgccctgacgctggatatctcgccggccatgttcctgtcgctgctgcaaagcgacatcggcgtgcagcactttctggtaggcctggccaaggcacccttcttcgccttcctgatcgccgccatcggctgcctggaaggcttcaaggtcagcggcagcgccgaatcggtaggggcacacaccacctcggcggtggtgcagtcgattttcgtggtcatcgtgctggatgcggtagccgcgctgttcttcatggagatgggctggtga

SEQ ID NO: 112573 - protein, 377 aa, Pseudomonas putida GB-1
MEPMTTPSAILDTSSQPPCLRITGDWTLAHYANLKRESEQLRTQYAADTVADLSQLGRLDTAGASLLAELLGSERLSRCTQDLPEASRALLKNVYCSVQDYCIPVKEPERNVLLMLLERIGRAVGTLWQDSMQLLGFVGVILETLLRRALQPHRWRFTPVVAHIEQTGLDAAPIVALLTFLVGAVVAFLGATVLADFGATIFTVDLVAFSFLREFAVLLTAILMAGRTASAFTAQIGSMKANEEIDAIRTLGLNPMELLVVPRVLALLISLPLLTFVAMICGMIGGAVVCALTLDISPAMFLSLLQSDIGVQHFLVGLAKAPFFAFLIAAIGCLEGFKVSGSAESVGAHTTSAVVQSIFVVIVLDAVAALFFMEMGW

SEQ ID NO: 112574 - DNA, 798 bp, Pseudomonas putida GB-1
  CDS (1)..(798): transl_table=11
atgcgcagaaaatccttactcgaacgtgtccgtctgctgggccgttcggcaatcgacgtgctggccgtgctcgggcgttcgtgcctgttcctgttccatgcgctggtcggtcgcggcggcattggcggcggcttccaactgctgaccaagcagctgtactcggtgggtgtgctgtcgctggcgatcgttgtcgtgtccggggtattcatcggcatggtgctggcgctgcagggttacagcatcctgaccaaatacggctcggagcaggcggtagggcaaatggttgccctgaccctgctgcgtgagcttggcccggtggtgacggcgctgctgttcgcgggccgtgccggttccgcgttgaccgccgaaatcggcaacatgaagtccaccgagcagttgtcgagcctggaaatgattggcgtcgacccgctcaagtacatcgttgcgccacgtttgtgggccggtttcatctcgctgccgctgctggcgctgatcttcagcgtggtcggtatctggggtggctcgtgggtggcagtggactggctgggcgtctacgagggctcgttctgggccaacatgcagaacagtgtttcattcactgacgacgtgctcaacgggctggtcaagagcctggtgttcgctttcgtcacaacctggatcgccgttttccaggggtacgactgtgagcccacctcagaagggatcagccgtgccaccaccaagaccgtggtctatgcctcgttggcagtgctgggtctggactttattctgaccgccttgatgtttggagatttctga

SEQ ID NO: 112575 - protein, 265 aa, Pseudomonas putida GB-1
MRRKSLLERVRLLGRSAIDVLAVLGRSCLFLFHALVGRGGIGGGFQLLTKQLYSVGVLSLAIVVVSGVFIGMVLALQGYSILTKYGSEQAVGQMVALTLLRELGPVVTALLFAGRAGSALTAEIGNMKSTEQLSSLEMIGVDPLKYIVAPRLWAGFISLPLLALIFSVVGIWGGSWVAVDWLGVYEGSFWANMQNSVSFTDDVLNGLVKSLVFAFVTTWIAVFQGYDCEPTSEGISRATTKTVVYASLAVLGLDFILTALMFGDF

SEQ ID NO: 112576 - DNA, 1068 bp, Medicago truncatula; identical to SEQ ID NO: 17675
  CDS (1)..(1068)

SEQ ID NO: 112577 - protein, 355 aa, Medicago truncatula; identical to SEQ ID NO: 17676

SEQ ID NO: 112578 - DNA, 837 bp, Amycolatopsis mediterranei
  CDS (1)..(837): transl_table=11
atgacgttcctccagggcgcgaaacgcgtcgtcaaccgacccctccagacactggacaccttgggtgaccagatgtcgttctacggccgcgcgctgctgtggacgccgcggacgctgcgccgctacaccaaagaggtgctccggctgctggccgaggtgagcttcgggtccggctcgctggcggtcatcggcggcacggtgggcgtgatggtcggcctgacgctgttcaccggtgtcctcgtcggcctccagggctattcggcgctgaactcgatcgggacgtcggccttcaccggcttcctgaccgcgttcttcaacacgcgcgagatcgccccgctggtcgccgggctcgccctgagcgccaccgtcggcgccgggttcaccgcgcagctgggcgccatgcggatctcggaggagatcgacgcactggaagtcatgggtgtgccgagcctgccgtacctggtgacgacgcggatcatcgccgggttcgtcgcggtcatcccgctctacatcatcggcctgctgagctcgtacctcgcgtcgagactggtcgtgatctacatctaccaccagtcggccggtacctacgaccactacttcgacctgttcctgcccccgcaggacgtgctgtattcgttcatcaaggtgctgctgttcagcgtcctgatcatcctgtcgcactgctacttcgggtaccgggcgaccggtggcccggccggggtcggcgtcgcggtcggcaaggccgtgcggctgtccatcgtcacggtgtcgatcatgaacttcttcatcgggttcgccatctggggaaccgacgtcacggtaaggatcgcgggatga

SEQ ID NO: 112579 - protein, 278 aa, Amycolatopsis mediterranei
MTFLQGAKRVVNRPLQTLDTLGDQMSFYGRALLWTPRTLRRYTKEVLRLLAEVSFGSGSLAVIGGTVGVMVGLTLFTGVLVGLQGYSALNSIGTSAFTGFLTAFFNTREIAPLVAGLALSATVGAGFTAQLGAMRISEEIDALEVMGVPSLPYLVTTRIIAGFVAVIPLYIIGLLSSYLASRLVVIYIYHQSAGTYDHYFDLFLPPQDVLYSFIKVLLFSVLIILSHCYFGYRATGGPAGVGVAVGKAVRLSIVTVSIMNFFIGFAIWGTDVTVRIAG

SEQ ID NO: 112580 - DNA, 798 bp, Pseudomonas putida
  CDS (1)..(798): transl_table=11
atgcgcagaaaatccttactcgagcgtgtccgcctgctgggccgctcggcaatcgacgtgctggccgtgctcgggcgttcgtgcctgttcctgttccatgcgctggtcggtcgcggtggtattggcggcggcttccagctgctgaccaagcagttgtactcggtgggtgtgctgtcgctggcgatcgtcgtcgtgtccggtgtgttcatcggcatggtgctggcgctgcagggctacagcatcctgaccaagtacggctcggagcaggcggtagggcagatggtcgccctgaccctgctgcgtgaacttggcccggtggtaacggcgttgctgttcgccgggcgtgccggttccgcgctgaccgccgaaatcggcaacatgaagtccaccgagcagttgtcgagcctggaaatgatcggtgtcgacccgctcaagtacatcgttgcgccacgcctgtgggccggtttcatctcgctgccgctgctggcgctgatcttcagcgtggtcggtatctggggtggctcgtgggtggcggtggactggctgggtgtctacgagggctcgttctgggccaacatgcagaacagtgtttctttcactgacgacgtgctcaacgggctggtcaagagcgtggtgtttgctttcgtctcgacctggatcgccgtattccaggggtacgactgtgagcccacctcagaagggatcagccgtgcaaccaccaagaccgtggtctatgcctcgttggcagtgctgggtctggactttattctgaccgccttgatgtttggagatttctga

SEQ ID NO: 112581 - protein, 265 aa, Pseudomonas putida
MRRKSLLERVRLLGRSAIDVLAVLGRSCLFLFHALVGRGGIGGGFQLLTKQLYSVGVLSLAIVVVSGVFIGMVLALQGYSILTKYGSEQAVGQMVALTLLRELGPVVTALLFAGRAGSALTAEIGNMKSTEQLSSLEMIGVDPLKYIVAPRLWAGFISLPLLALIFSVVGIWGGSWVAVDWLGVYEGSFWANMQNSVSFTDDVLNGLVKSVVFAFVSTWIAVFQGYDCEPTSEGISRATTKTVVYASLAVLGLDFILTALMFGDF

SEQ ID NO: 112582 - DNA, 1053 bp, Arabidopsis thaliana; identical to SEQ ID NO: 17637
  CDS (202)..(1053)

SEQ ID NO: 112583 - protein, 283 aa, Arabidopsis thaliana; identical to SEQ ID NO: 17680

SEQ ID NO: 112584 - DNA, 798 bp, Pseudomonas putida
  CDS (1)..(798): transl_table=11
atgcgcagaaaatccttactcgaacgtgtccgcctgctgggacgctcggccatcgacgtgctggcggtgctggggcgctcctgcctgttcctgttccatgcgctgatcggccgtggcggcatcggcggcggcttccagctgctgaccaagcagctgtattcggtgggcgtgctgtcgctggcgatcatcgtcgtgtccggggtgttcatcggcatggtgctggcgctacagggcttcagcatcctgaccaagtacggctcggagcaggcggtggggcagatggtcgccctgaccctgctgcgtgagctcggcccggtggtgacggcgttgctgttcgccggccgtgccggttcggcgctgaccgcagaaatcggcaacatgaagtccaccgagcagttgtcgagccttgaaatgatcggcgtcgacccgctcaagtacatcgtcgcgccgcgcctgtgggccggtttcatctcgctgccgttgctggcgctgattttcagcgtggtcggcatctggggtggctcgtgggtggcggtggactggctgggcgtctacgagggctcgttctgggccaacatgcagaacagtgtttcgttcacggacgatgtgctcaacgggctgatcaagagcctggtatttgccttcgtcacgacctggatcgccgtattccaggggtacgactgtgagcccacctcagaagggatcagccgtgccaccaccaagaccgtggtctatgcctcgttggcagtgctgggtctggactttattctgaccgccttgatgtttggagatttctga

SEQ ID NO: 112585 - protein, 265 aa, Pseudomonas putida
MRRKSLLERVRLLGRSAIDVLAVLGRSCLFLFHALIGRGGIGGGFQLLTKQLYSVGVLSLAIIVVSGVFIGMVLALQGFSILTKYGSEQAVGQMVALTLLRELGPVVTALLFAGRAGSALTAEIGNMKSTEQLSSLEMIGVDPLKYIVAPRLWAGFISLPLLALIFSVVGIWGGSWVAVDWLGVYEGSFWANMQNSVSFTDDVLNGLIKSLVFAFVTTWIAVFQGYDCEPTSEGISRATTKTVVYASLAVLGLDFILTALMFGDF

SEQ ID NO: 112586 - DNA, 780 bp, Rickettsia felis; identical to SEQ ID NO: 17681
  CDS (1)..(780): transl_table=11

SEQ ID NO: 112587 - protein, 259 aa, Rickettsia felis; identical to SEQ ID NO: 17682

SEQ ID NO: 112588 - DNA, 780 bp, Rickettsia prowazekii
  CDS (1)..(780): transl_table=11
atgttattaaagatagctcatttggttggtaaacatactataaagtttgcacaaagtgtaggcattttttctctatttagttttattgccattagcagtatcataaaaccacctttatatttaagtttaataattagacaattattatttatcgggttccattcgcttccagttgttgcgatgacaactttcttctcaggtgcagtgcttgcattacaaagttatacaggattttcacgtttctcagctgaaaattctattgcaacggtagtagtattgtcgctgactagagaacttggaccagttttagctggattaatagtagctggacgagttggtgcatcaattgcagctgaaatagcaacaatgagagtaactgagcaggtagatgcgttatatactttatcgactgatcctattaaatatttagtttgtccaagagtaatagcggctattattacgatgccttgtcttgttttaatcggtgatatcattggtgtgatgggtggttatttagtagggatatataaacttgattttaatagtacagcttatttaacaagtacttttcagtatttagaaccaattgatgttatttccggtcttattaaagctactgtttttgggtttattatttctataataagttgttatagtggttactattcaggtaaaggagctaagggagtgggaagagcaactacctcggcagtagtaaattcctctattcttattttaataagtaactatttaataactgaactattttttaaagtttaa

SEQ ID NO: 112589 - protein, 259 aa, Rickettsia prowazekii
MLLKIAHLVGKHTIKFAQSVGIFSLFSFIAISSIIKPPLYLSLIIRQLLFIGFHSLPVVAMTTFFSGAVLALQSYTGFSRFSAENSIATVVVLSLTRELGPVLAGLIVAGRVGASIAAEIATMRVTEQVDALYTLSTDPIKYLVCPRVIAAIITMPCLVLIGDIIGVMGGYLVGIYKLDFNSTAYLTSTFQYLEPIDVISGLIKATVFGFIISIISCYSGYYSGKGAKGVGRATTSAVVNSSILILISNYLITELFFKV

SEQ ID NO: 112590 - DNA, 780 bp, Rickettsia conorii
  CDS (1)..(780): transl_table=11
atgttattcaatatagctaattcggtcggtaaacgtactgtaaagtttgcacaaagtgtaggtagtttttctctatttagctttgctgccgttagcagtatcataagaccgcctttatatttgagtttaattatcagacaattattatttatcgggtttcactcgcttccggttgttgcgatgacgacttttttctcaggggcggtacttgcattacagagctatatcggtttttcccgtttctcagctgaaagctctattgcaacggtagtagtattgtcgctgactagagagcttggacctgtcttagctggactaatggtagcgggaagagttggggcatcaatcgccgccgaaatagccacaatgagagtaacggagcagatagatgctttatatactttatctaccgatcctattaaatatttagtttttccaagagtaataacagctattattacaatgccttgtcttgttttaatcggggatatcattggtgttatgggcggttatttggtaggggtatataaacttgattttaatagtgcagcttatttaaccagtacttttcagtatttagaaccgattgacgtaatttccggtcttgttaaagcgggagtttttgggtttattatttctataataagttgctatagcggctattattcaggtaaaggggctaagggagttggaagagcaactacctcggcagtagtgaattcttctatccttatcttaatcagtaattatttaataaccgaattattttttaaagtatag

SEQ ID NO: 112591 - protein, 259 aa, Rickettsia conorii
MLFNIANSVGKRTVKFAQSVGSFSLFSFAAVSSIIRPPLYLSLIIRQLLFIGFHSLPVVAMTTFFSGAVLALQSYIGFSRFSAESSIATVVVLSLTRELGPVLAGLMVAGRVGASIAAEIATMRVTEQIDALYTLSTDPIKYLVFPRVITAIITMPCLVLIGDIIGVMGGYLVGVYKLDFNSAAYLTSTFQYLEPIDVISGLVKAGVFGFIISIISCYSGYYSGKGAKGVGRATTSAVVNSSILILISNYLITELFFKV

SEQ ID NO: 112592 - DNA, 1035 bp, Oryza sativa; identical to SEQ ID NO: 17677
  CDS (1)..(1035)

SEQ ID NO: 112593 - protein, 344 aa, Oryza sativa; identical to SEQ ID NO: 17678

SEQ ID NO: 112594 - DNA, 1053 bp, Brassica napus; identical to SEQ ID NO: 17687
  CDS (1)..(1053)

SEQ ID NO: 112595 - protein, 350 aa, Brassica napus; identical to SEQ ID NO: 17688

SEQ ID NO: 112596 - DNA, 1047 bp, Brassica napus; identical to SEQ ID NO: 17689
  CDS (1)..(1047)

SEQ ID NO: 112597 - protein, 348 aa, Brassica napus; identical to SEQ ID NO: 17690

SEQ ID NO: 112598 - DNA, 1113 bp, Zea mays; identical to SEQ ID NO: 17691
  CDS (1)..(1113)

SEQ ID NO: 112599 - protein, 370 aa, Zea mays; identical to SEQ ID NO: 17692

SEQ ID NO: 112600 - DNA, 1008 bp, Zea mays; identical to SEQ ID NO: 17693
  CDS (1)..(1008)

SEQ ID NO: 112601 - protein, 335 aa, Zea mays; identical to SEQ ID NO: 17694

SEQ ID NO: 112602 - DNA, 21 bp, Artificial sequence
  primer
atgctgttaaatgcgctggcg

SEQ ID NO: 112603 - DNA, 26 bp, Artificial sequence
  primer
ttaattcccaaacatcaatgcggtca

SEQ ID NO: 112604 - protein, 204 aa, Artificial sequence
  consensus sequence
  Variant (2)..(3): Xaa in position 2 to 3 is any amino acid
  Variant (5)..(12): Xaa in position 5 to 12 is any amino acid
  Variant (13)..(18): Xaa in position 13 to 18 is any or no amino acid
  Variant (20)..(20): Xaa in position 20 is any amino acid
  Variant (22)..(22): Xaa in position 22 is any amino acid
  Variant (24)..(26): Xaa in position 24 to 26 is any amino acid
  Variant (28)..(50): Xaa in position 28 to 50 is any amino acid
  Variant (51)..(51): Xaa in position 51 is any or no amino acid
  Variant (55)..(55): Xaa in position 55 is any amino acid
  Variant (58)..(63): Xaa in position 58 to 63 is any amino acid
  Variant (67)..(67): Xaa in position 67 is any amino acid
  Variant (70)..(72): Xaa in position 70 to 72 is any amino acid
  Variant (75)..(75): Xaa in position 75 is any amino acid
  Variant (77)..(77): Xaa in position 77 is any amino acid
  Variant (79)..(81): Xaa in position 79 to 81 is any amino acid
  Variant (84)..(93): Xaa in position 84 to 93 is any amino acid
  Variant (95)..(100): Xaa in position 95 to 100 is any amino acid
  Variant (103)..(104): Xaa in position 103 to 104 is any amino acid
  Variant (106)..(109): Xaa in position 106 to 109 is any amino acid
  Variant (110)..(110): Xaa in position 110 is any or no amino acid
  Variant (112)..(112): Xaa in position 112 is any amino acid
  Variant (114)..(120): Xaa in position 114 to 120 is any amino acid
  Variant (122)..(123): Xaa in position 122 to 123 is any amino acid
  Variant (125)..(133): Xaa in position 125 to 133 is any amino acid
  Variant (135)..(158): Xaa in position 135 to 158 is any amino acid
  Variant (159)..(162): Xaa in position 159 to 162 is any or no amino acid
  Variant (164)..(166): Xaa in position 164 to 166 is any amino acid
  Variant (168)..(178): Xaa in position 168 to 178 is any amino acid
  Variant (180)..(187): Xaa in position 180 to 187 is any amino acid
  Variant (188)..(193): Xaa in position 188 to 193 is any or no amino acid
  Variant (195)..(198): Xaa in position 195 to 198 is any amino acid
  Variant (201)..(202): Xaa in position 201 to 202 is any amino acid
GXXSXXXXXXXXXXXXXXFXGXVXXXQXXXXXXXXXXXXXXXXXXXXXXXXRELXPVXXXXXXAGRXGSXXXAEXGXMXXXEQXXXXXXXXXXPXXXXXXPRXXAXXXXXPXLXXXXXXXGXXGXXXXXXXXXGXXXXXXXXXXXXXXXXXXXXXXXXXXXXKXXXFXXXXXXXXXXXGXXXXXXXXXXXXXXGXXXXTTXXVV

SEQ ID NO: 112605 - protein, 60 aa, Artificial sequence
  protein pattern
  Variant (4)..(4): Xaa in position 4 is Ala, Gly or Ser
  Variant (7)..(7): Xaa in position 7 is Ile, Leu, Met or Val
  Variant (8)..(8): Xaa in position 8 is Ala, Gly, Ser, Thr or Val
  Variant (9)..(9): Xaa in position 9 is Ala, Gly or Ser
  Variant (10)..(10): Xaa in position 10 is any amino acid
  Variant (11)..(11): Xaa in position 11 is Phe, Ile, Leu, Met or Val
  Variant (12)..(13): Xaa in position 12 to 13 is any amino acid
  Variant (14)..(14): Xaa in position 14 is Ala, Gly or Ser
  Variant (16)..(16): Xaa in position 16 is any amino acid
  Variant (17)..(18): Xaa in position 17 to 18 is Ala, Gly, Ser or Thr
  Variant (19)..(19): Xaa in position 19 is Ala or Ser
  Variant (20)..(20): Xaa in position 20 is Phe, Ile, Leu, Met or Val
  Variant (21)..(21): Xaa in position 21 is Ala, Cys, Ser or Thr
  Variant (23)..(23): Xaa in position 23 is any amino acid
  Variant (24)..(24): Xaa in position 24 is Ile, Leu or Val
  Variant (25)..(25): Xaa in position 25 is Ala, Gly or Ser
  Variant (26)..(30): Xaa in position 26 to 30 is any amino acid
  Variant (31)..(31): Xaa in position 31 is Asp, Glu or Gln
  Variant (32)..(32): Xaa in position 32 is Glu or Gln
  Variant (33)..(34): Xaa in position 33 to 34 is any amino acid
  Variant (35)..(35): Xaa in position 35 is Ala, Gly, Ser or Thr
  Variant (36)..(36): Xaa in position 36 is Leu or Met
  Variant (37)..(38): Xaa in position 37 to 38 is any amino acid
  Variant (39)..(39): Xaa in position 39 is Ile, Leu or Met
  Variant (40)..(46): Xaa in position 40 to 46 is any amino acid
  Variant (47)..(47): Xaa in position 47 is Ala, Ile, Leu or Val
  Variant (48)..(49): Xaa in position 48 to 49 is any amino acid
  Variant (51)..(51): Xaa in position 51 is Lys or Arg
  Variant (52)..(53): Xaa in position 52 to 53 is any amino acid
  Variant (54)..(54): Xaa in position 54 is Ala, Gly or Thr
  Variant (55)..(58): Xaa in position 55 to 58 is any amino acid
  Variant (59)..(59): Xaa in position 59 is Phe, Ile, Leu, Met or Val
RELXPVXXXXXXXXRXXXXXXAXXXXXXXXXXXXXXXXXXXXXXXXXXXPXXXXXXXXXP

SEQ ID NO: 112606 - DNA, 546 bp, Escherichia coli
  CDS (1)..(546): transl_table=11
atgcaggccaaaattgcggcatcaaatacgggtgaactggatgccctgcaacagctgggattctccctggtagaaggtgaagttgatttggcgctacccgtgaacaatgccagtgatagcggtgctgtagtggcacaagagaccgatattcccgcattacgtcagttagccagcgccgcatttgcgcaaagccgttttcgtgcgccgtggtatgcgcctgacgccagcagtcgcttttatgcacagtggattgaaaatgccgtgcgcggcacctttgatcatcaatgtctgattttacgtgcggcgtccggcgatattcgcggctatgtctctttacgggaactcaatgcgacagatgcgcgaattggcctgctggctggacgcggtgcaggtgctgagctgatgcaaacggcgctaaactgggcgtatcgtcgcggtaaaacaactttgcgggtggcgacccaaatgggcaacaccgccgcgcttaaacgatacatacaaagtggtgcgaatgtagaaagcaccgcgtactggttatacaggtaa

SEQ ID NO: 112607 - protein, 181 aa, Escherichia coli
MQAKIAASNTGELDALQQLGFSLVEGEVDLALPVNNASDSGAVVAQETDIPALRQLASAAFAQSRFRAPWYAPDASSRFYAQWIENAVRGTFDHQCLILRAASGDIRGYVSLRELNATDARIGLLAGRGAGAELMQTALNWAYRRGKTTLRVATQMGNTAALKRYIQSGANVESTAYWLYR

SEQ ID NO: 112608 - DNA, 669 bp, Yersinia pestis CO92
  CDS (1)..(669): transl_table=11
ttgattttttccgactcagccccgccacttaacccggctgagttggctgcttttactctcgttcaggctaaagtacctactcatcgccttgatcttatagatgccctgagccaacttgattttcatttggttgaaggggaaattgatctgtcgctggtcgtgggtgaaaaagaaggtattggcacggaaaatgctacatcagaacccaatatgggggcctactcgctacgggttgccaccgaggcagatattccgcagttgcgccgtgttgctgccagtgcttttgccttaagccgctttcgtgcgccttggtatgacgcacaggacagtgggcgattttatgctttgtgggttgaaaaggcggtgctgggaacctttgatcaccaatgtttattggtgctcgaccctacggatcaacccgtcgggtttgtgacgttgcgtgacttgcaagacgggagtgcgcgtattggcctgttggccgtattccccggtgcacagagtaaaggtatagggttaagattaatgtcggcggcgaagcagtggtgccagcatcatgggttacaccggttacgggtagccacacaaatgagcaatattgctgctttacgtctctatattcgtagtggtgcctccattgagagtaccgcgtattggttatgcaggggatga

SEQ ID NO: 112609 - protein, 222 aa, Yersinia pestis CO92
MIFSDSAPPLNPAELAAFTLVQAKVPTHRLDLIDALSQLDFHLVEGEIDLSLVVGEKEGIGTENATSEPNMGAYSLRVATEADIPQLRRVAASAFALSRFRAPWYDAQDSGRFYALWVEKAVLGTFDHQCLLVLDPTDQPVGFVTLRDLQDGSARIGLLAVFPGAQSKGIGLRLMSAAKQWCQHHGLHRLRVATQMSNIAALRLYIRSGASIESTAYWLCRG

SEQ ID NO: 112610 - DNA, 549 bp, Salmonella typhimurium LT2
  CDS (1)..(549): transl_table=11
gtgcaggtaaaagtgccggctgaaaacatcgcctggctgtcggcgttgcaatcgctgggattctctttggttgaaggcgaggtggattttgcgttgccggtaaaagggcatcgcgaccagcatggcgcggaaattgcacaccttacggacattcctgctttgcgtcagttggccggagaggcgtttacgcagagtcgttttcgcgcgccgtggtatgcgcccgacgccagcgcccgtttttacgcccagtggattgagaatgcggtacgcggcacgtttgatcaccaatgcctggtgcttcgcacggagacaggcgctatccgcggttacgtctcgctgcgggaattgaatgataccgacgcgcgcattggcctgttggccggacgcggcgcgggagcggaacttatgcaggcggcgatctgttgggcgcagagtcgcggcaaagcaacattgcgggtggcgacccagttgggcaacaccgccgcgcttaaacgttacatacaaagcggtgccaacatcgaaagcactgcgtactggttatacaggtga

SEQ ID NO: 112611 - protein, 182 aa, Salmonella typhimurium LT2
MQVKVPAENIAWLSALQSLGFSLVEGEVDFALPVKGHRDQHGAEIAHLTDIPALRQLAGEAFTQSRFRAPWYAPDASARFYAQWIENAVRGTFDHQCLVLRTETGAIRGYVSLRELNDTDARIGLLAGRGAGAELMQAAICWAQSRGKATLRVATQLGNTAALKRYIQSGANIESTAYWLYR

SEQ ID NO: 112612 - DNA, 549 bp, Salmonella enterica subsp. enterica serovar Typhi Ty2
  CDS (1)..(549): transl_table=11
gtgcaggcaaaagtgccggctgaaaacatcgcctggctgtcggcgttgcaatcgctgggattctctttggttgaaggcgaggtggattttgcgttgccggtaaaagggcatcgcgaccagcatggcgcggaaattgcacatcttacggacattcctgctttgcgtcagttggccggagaggcgtttacgcagagtcgttttcgcgcgccgtggtatgcgcccgacgccagcgcccgtttttacgcccagtggattgagaatgcggtacgcggcacgtttgatcaccaatgcctggtgcttcgcacggagacaggcgctatccgtggttacgtctcgctgcgggaattgaatgataccgacgtgcgcattggcctgttggccggacgcggcgcgggagcggaacttatgcaggcggcgatctgttgggcgcagagtcgcggcaaagcaacattgcgggtggcgacccagttgggcaacaccgccgcgcttaaacgttacatacaaagcggtgccaacatcgaaagcactgcgtactggttatacaggtga

SEQ ID NO: 112613 - protein, 182 aa, Salmonella enterica subsp. enterica serovar Typhi Ty2
MQAKVPAENIAWLSALQSLGFSLVEGEVDFALPVKGHRDQHGAEIAHLTDIPALRQLAGEAFTQSRFRAPWYAPDASARFYAQWIENAVRGTFDHQCLVLRTETGAIRGYVSLRELNDTDVRIGLLAGRGAGAELMQAAICWAQSRGKATLRVATQLGNTAALKRYIQSGANIESTAYWLYR

SEQ ID NO: 112614 - DNA, 675 bp, Haemophilus ducreyi 35000HP
  CDS (1)..(675): transl_table=11
atgctgaattcaacatcatcaaccattatttcgccagatcaatggctatcagatttttttggtcgtcctattgtgcaagtaaaagtggctactgccgatcatcaacaaatacaaaagctagcgcaacaaggtttgcaattagccagcagtgagatcgtctttgcattgccattaacaaataaagtgtgcaaaccaaccacttgtcagcaagcaacaacttgcgatcttaatgaattaacatggttatttggtcaagcatttccgcgtagccgttttggtccgccttggttttcagcttctgaaaattgccgcttctatcaaacgtggattcggcgagcggtacaaggtgaatttgatgatctttgcttaattcaacgatcagaagatgggcaattacaaggcgggattagcctcagaaggcaacaacaagagggacaaccgccttatgcccaagtagggttattggcagttgatccgctttttcaacgccaaggggttgggcgaacattattacaagcgtctataaattgggcattaacacaacagcttgaacatttagtgattagtacacaattgagcaatttaaatgcaataaattgttatttaactttcaatgctcgagtcgtaagcactcattattggttttacccacggttacacaatgattccttttaa

SEQ ID NO: 112615 - protein, 224 aa, Haemophilus ducreyi 35000HP
MLNSTSSTIISPDQWLSDFFGRPIVQVKVATADHQQIQKLAQQGLQLASSEIVFALPLTNKVCKPTTCQQATTCDLNELTWLFGQAFPRSRFGPPWFSASENCRFYQTWIRRAVQGEFDDLCLIQRSEDGQLQGGISLRRQQQEGQPPYAQVGLLAVDPLFQRQGVGRTLLQASINWALTQQLEHLVISTQLSNLNAINCYLTFNARVVSTHYWFYPRLHNDSF

SEQ ID NO: 112616 - DNA, 591 bp, Photorhabdus luminescens subsp. laumondii TTO1
  CDS (1)..(591): transl_table=11
gtgcaggctaaagtacctgcgcagcgattggatcttattgatggattatccgcgttgggcttttcgttagtagaaggggaagtagacctttccttaatgattggcatagaaaatgctgaaaatgctaaagacaatcctgagagtaacctacttttggctgagaggcgagatatcccgatgttgaaggaggtggcttccaacgtatttcctttgagtcgtttccgaaccccgtggtatcaaccacaggatagtggtcgtttttacgcgacttgggttgaaaaagcggtattagggacatttgatcatcagtgtttactggtaaacggagataatgagcaacccgcagggtttgttaccttacgggatataggcgcaggagaggctcgtataggtttgctagccgtattcccaggaaatattggctgtgggattggctcaaaattaatgttggcggcgcagcagtggtgtcagcaccaccaaatacatcagttaaggattgcgacacaaaccagcaacattgctgctttgcgcctttatacacgcagtggtgcgtttgttgaaagcaccgcgtattggttatataggggatga

SEQ ID NO: 112617 - protein, 196 aa, Photorhabdus luminescens subsp. laumondii TTO1
MQAKVPAQRLDLIDGLSALGFSLVEGEVDLSLMIGIENAENAKDNPESNLLLAERRDIPMLKEVASNVFPLSRFRTPWYQPQDSGRFYATWVEKAVLGTFDHQCLLVNGDNEQPAGFVTLRDIGAGEARIGLLAVFPGNIGCGIGSKLMLAAQQWCQHHQIHQLRIATQTSNIAALRLYTRSGAFVESTAYWLYRG

SEQ ID NO: 112618 - DNA, 687 bp, Vibrio vulnificus YJ016
  CDS (1)..(687): transl_table=11
atgcttactcaattgacctactgtttgcgtgaatgggattctgctttttttaatcgtcgaattggtgacgttagcttagctacccacaaccactataaagatacattgttcgacctcattacaactaaagtctgtagtgatgatgtaaatctcatctcgaacctcaatcaaaacggatttcaatattgtgaaggtgagataacgttttcaaagatgttatccaatcactctcatatcgattacgatatagctgatgaatcagatttaccacaactatcttccctagtagctggtatgtataagtatagccgtttcaaatatccatggtttaatccagaagaaaaggacctcttttataaaacatggctaaagaaggctgtgttaggacaatttgatgacgtttgtataattttccgtcaaaaaaaaacaattagtgggtttgtcacattaaaactgtcatcaaattcagcgactattggactcattggtgtaaatgatctcagtagaggacagggtattggttgtaaacttatccagtgttgcgagtcctatctagtaaacaaaaatattcagctaatacacgtcgcgacacaaacatctaatgtagctgcgataaatctctatattaaaaacgattttttagtagaaaatacatctgtttggctttacaaaagtaactcaagctaa

SEQ ID NO: 112619 - protein, 228 aa, Vibrio vulnificus YJ016
MLTQLTYCLREWDSAFFNRRIGDVSLATHNHYKDTLFDLITTKVCSDDVNLISNLNQNGFQYCEGEITFSKMLSNHSHIDYDIADESDLPQLSSLVAGMYKYSRFKYPWFNPEEKDLFYKTWLKKAVLGQFDDVCIIFRQKKTISGFVTLKLSSNSATIGLIGVNDLSRGQGIGCKLIQCCESYLVNKNIQLIHVATQTSNVAAINLYIKNDFLVENTSVWLYKSNSS

SEQ ID NO: 112620 - DNA, 732 bp, Erwinia carotovora subsp. atroseptica SCRI1043
  CDS (1)..(732): transl_table=11
atgtccaattccatatcagcaggaaagggagaaattcgcgccacggttgaaccgctgggctgggagagtgaattcttccagattgacagcggtaagctgaatttttcgccttcttcgcctgtgttgacgcctgatgtgttgaacgtatttgcgctgacgcaggccaaaatcgcggcggacaatctggtactggcggatgcgctggccgatctcggttttcgcttggtggaaggcgaggtcgatctcagtttgccgctgcatccgacgacagtcgttacgccactaccgcgctggcgtgaagccacgctcgatgatattcctgctctgagggacgcggcatcacgtgtttttgcgctgagccgtttccgtacgccgtggtatcagccggaggatagtgggcgtttttacgctcagtgggttgaaaatgcggtatgcggtacgttcgaccacagttgcttgatgatggaagatgccgcgggtcatccacaaggatgggtcacgctgcgcagactggatgactcggatgcccgtatcgggctgctgggcgtctggccgggcgttacgatacgcggtattggttcacaactgatggcgctggcggaagcgtggtgccgacagcaagggttgatacgcctccgggttgcgacgcaggttggcaacgtggcggctcttcgtctttatcttcgccgtggtgccacgattgagagcacggcgtattggttatacaggtga

SEQ ID NO: 112621 - protein, 243 aa, Erwinia carotovora subsp. atroseptica SCRI1043
MSNSISAGKGEIRATVEPLGWESEFFQIDSGKLNFSPSSPVLTPDVLNVFALTQAKIAADNLVLADALADLGFRLVEGEVDLSLPLHPTTVVTPLPRWREATLDDIPALRDAASRVFALSRFRTPWYQPEDSGRFYAQWVENAVCGTFDHSCLMMEDAAGHPQGWVTLRRLDDSDARIGLLGVWPGVTIRGIGSQLMALAEAWCRQQGLIRLRVATQVGNVAALRLYLRRGATIESTAYWLYR

SEQ ID NO: 112622 - DNA, 669 bp, Yersinia pseudotuberculosis IP 32953
  CDS (1)..(669): transl_table=11
ttgattttttccgactcagccccgccacttaacccggctgagttggctgcttttactctcgttcaggctaaagtacctactcatcgccttgatcttatagatgccctgagccaacttgattttcatttggttgaaggggaaattgatctgtcgctggccgtgggtgaaaaagaaggtattggcacggaaaatgctacatcagaacccaatatggggccctactcgcaacgggttgccaccgaggcagatattccgcagttgcgccgtgttgctgccagtacttttgccttaagccgctttcgtgcgccttggtatgacgcacaggacagtgggcgattttatgctttgtgggttgaaaaggcggtgctgggaacctttgatcaccaatgtttattggtgctcgactctacggatcaacccgtcgggtttgtgacgttgcgtgacttgcaagacgggagtgcgcgtattggcctgttggccgtattccccggtgcacagagtaaaggtatagggttaagattaatgtcggcggcgaagcagtggtgccagcatcatgggttacaccggttacgggtagccacacaaatgagcaatattgctgctttacgtctctatattcgtagtggtgcctccattgagagtaccgcgtattggttatgcaggggatga

SEQ ID NO: 112623 - protein, 222 aa, Yersinia pseudotuberculosis IP 32953
MIFSDSAPPLNPAELAAFTLVQAKVPTHRLDLIDALSQLDFHLVEGEIDLSLAVGEKEGIGTENATSEPNMGPYSQRVATEADIPQLRRVAASTFALSRFRAPWYDAQDSGRFYALWVEKAVLGTFDHQCLLVLDSTDQPVGFVTLRDLQDGSARIGLLAVFPGAQSKGIGLRLMSAAKQWCQHHGLHRLRVATQMSNIAALRLYIRSGASIESTAYWLCRG

SEQ ID NO: 112624 - DNA, 624 bp, Actinobacillus pleuropneumoniae serovar 1 str. 4074
  CDS (1)..(624): transl_table=11
atgcaatgttttaccccggatccgtggctgtcggatttcttcgcccgtccgattatacaagcgaaggtcactgctcaagattatccaaaaattcagcagctacaggcacaaggctttcaatttgttgaaggcgaaatcgagttcggttttgaccttgtaaactatcaagaaaaaataaccgcttgcgaagcggcaacggttgaagatattaagcaattggaaacgttattcgggcaagcctttccgacaagtcgctttcgaggaccttggttttcagcagcggaaaatcaacgtttgtaccgaacttggattgcccgtgcggtacgaggcgaatttgatcagctttgtttggttttaaaaacaacaagcggtcaaattcagggcggaatcagcttgcgtttagccggcgaacaagcgaaggtcggtttattagcggtctcgcctgcattccaacgacaaggtgttgcaagcatattgttacaagcggcgcaaaattgggcgaaaagacagggagccaattcgcttttagtttcgactcaaatcggtaacttgcctgcgatgaatctctatttaacgcagggtgcgagcatattagcgacggcttattggttttatcggaaataa

SEQ ID NO: 112625 - protein, 207 aa, Actinobacillus pleuropneumoniae serovar 1 str. 4074
MQCFTPDPWLSDFFARPIIQAKVTAQDYPKIQQLQAQGFQFVEGEIEFGFDLVNYQEKITACEAATVEDIKQLETLFGQAFPTSRFRGPWFSAAENQRLYRTWIARAVRGEFDQLCLVLKTTSGQIQGGISLRLAGEQAKVGLLAVSPAFQRQGVASILLQAAQNWAKRQGANSLLVSTQIGNLPAMNLYLTQGASILATAYWFYRK

SEQ ID NO: 112626 - DNA, 669 bp, Vibrio cholerae
  CDS (1)..(669): transl_table=11
atgaattttgagttaagacattgggatagtgattttttttcaagacagatcggcgatgtcagttggtcagatgaacctagttgcagtgagagtgggagactagacttaatcacaacgaaggtatcctctactgaagaggataagatacgtattttaaatcaagctgggtttactctgtgtgagggagaggctctatttttaaaaccgcttcggcaggtaaaaattttaaccggagtagaacgtttgggtgtcaatgacttaccaatgttaagaaatattacagatggcttatatctatcgagtcgttttaaagctccatggtttactgaagaagaaaaagacagcttttatagagagtggctcagaaaagcggttttaagtcagtttgatgacctatgcatggttaaacgagtagatacaaagattgctggttttgtaacagtgagagttgaaggagagcatgcatcaattggtcttattggtgtattgcctgaatatcaaacccttggtttaggtaaggctttaattgaatgtgctgagtcttatgcttttgagcatggatgtaagcacctatctgttgcaacgcaactgagtaatattaaagcgatgaatctctacatgaaatcaggttattctttacagaagacagcttattggttctataagtga

SEQ ID NO: 112627 - protein, 222 aa, Vibrio cholerae
MNFELRHWDSDFFSRQIGDVSWSDEPSCSESGRLDLITTKVSSTEEDKIRILNQAGFTLCEGEALFLKPLRQVKILTGVERLGVNDLPMLRNITDGLYLSSRFKAPWFTEEEKDSFYREWLRKAVLSQFDDLCMVKRVDTKIAGFVTVRVEGEHASIGLIGVLPEYQTLGLGKALIECAESYAFEHGCKHLSVATQLSNIKAMNLYMKSGYSLQKTAYWFYK

SEQ ID NO: 112628 - DNA, 23 bp, Artificial sequence
  primer
atgcaggccaaaattgcggcatc

SEQ ID NO: 112629 - DNA, 25 bp, Artificial sequence
  primer
ttacctgtataaccagtacgcggtg

SEQ ID NO: 112630 - protein, 203 aa, Artificial sequence
  consensus sequence
  Variant (2)..(2): Xaa in position 2 is any amino acid
  Variant (5)..(14): Xaa in position 5 to 14 is any amino acid
  Variant (16)..(18): Xaa in position 16 to 18 is any amino acid
  Variant (21)..(21): Xaa in position 21 is any amino acid
  Variant (23)..(23): Xaa in position 23 is any amino acid
  Variant (27)..(43): Xaa in position 27 to 43 is any amino acid
  Variant (44)..(57): Xaa in position 44 to 57 is any or no amino acid
  Variant (59)..(61): Xaa in position 59 to 61 is any amino acid
  Variant (63)..(63): Xaa in position 63 is any amino acid
  Variant (65)..(65): Xaa in position 65 is any amino acid
  Variant (67)..(73): Xaa in position 67 to 73 is any amino acid
  Variant (75)..(76): Xaa in position 75 to 76 is any amino acid
  Variant (80)..(81): Xaa in position 80 to 81 is any amino acid
  Variant (84)..(90): Xaa in position 84 to 90 is any amino acid
  Variant (94)..(95): Xaa in position 94 to 95 is any amino acid
  Variant (97)..(99): Xaa in position 97 to 99 is any amino acid
  Variant (102)..(102): Xaa in position 102 is any amino acid
  Variant (104)..(104): Xaa in position 104 is any amino acid
  Variant (107)..(108): Xaa in position 107 to 108 is any amino acid
  Variant (111)..(119): Xaa in position 111 to 119 is any amino acid
  Variant (120)..(120): Xaa in position 120 is any or no amino acid
  Variant (122)..(122): Xaa in position 122 is any amino acid
  Variant (124)..(124): Xaa in position 124 is any amino acid
  Variant (127)..(131): Xaa in position 127 to 131 is any amino acid
  Variant (132)..(136): Xaa in position 132 to 136 is any or no amino acid
  Variant (138)..(138): Xaa in position 138 is any amino acid
  Variant (143)..(145): Xaa in position 143 to 145 is any amino acid
  Variant (146)..(151): Xaa in position 146 to 151 is any or no amino acid
  Variant (153)..(153): Xaa in position 153 is any amino acid
  Variant (155)..(156): Xaa in position 155 to 156 is any amino acid
  Variant (158)..(160): Xaa in position 158 to 160 is any amino acid
  Variant (162)..(163): Xaa in position 162 to 163 is any amino acid
  Variant (165)..(172): Xaa in position 165 to 172 is any amino acid
  Variant (174)..(174): Xaa in position 174 is any amino acid
  Variant (179)..(180): Xaa in position 179 to 180 is any amino acid
  Variant (182)..(183): Xaa in position 182 to 183 is any amino acid
  Variant (185)..(187): Xaa in position 185 to 187 is any amino acid
  Variant (189)..(191): Xaa in position 189 to 191 is any amino acid
  Variant (194)..(197): Xaa in position 194 to 197 is any amino acid
  Variant (202)..(202): Xaa in position 202 is any amino acid
QXKVXXXXXXXXXXLXXXGFXLXEGEXXXXXXXXXXXXXXXXXXXXXXXXXXXXXXXAXXXDXPXLXXXXXXXFXXSRFXXPWXXXXXXXRFYXXWXXXAVXGXFDXXCLXXXXXXXXXXGXVXLRXXXXXXXXXXAXIGLLXXXXXXXXXGXGXXLXXXAXXWXXXXXXXXLXVATQXXNXXAXXXYXXXGAXXXXTAYWXY

SEQ ID NO: 112631 - protein, 51 aa, Artificial sequence
  protein pattern
  Variant (2)..(2): Xaa in position 2 is any amino acid
  Variant (3)..(3): Xaa in position 3 is any or no amino acid
  Variant (5)..(5): Xaa in position 5 is any amino acid
  Variant (7)..(7): Xaa in position 7 is any amino acid
  Variant (8)..(8): Xaa in position 8 is Asp, Glu, Asn, Gln, Arg or Ser
  Variant (9)..(9): Xaa in position 9 is Ala, Ile, Leu or Val
  Variant (10)..(10): Xaa in position 10 is Ala, Thr or Val
  Variant (11)..(11): Xaa in position 11 is Ala, Asp, Gly or Ser
  Variant (12)..(13): Xaa in position 12 to 13 is any amino acid
  Variant (14)..(14): Xaa in position 14 is Phe or Tyr
  Variant (15)..(16): Xaa in position 15 to 16 is any amino acid
  Variant (20)..(20): Xaa in position 20 is Lys or Arg
  Variant (21)..(21): Xaa in position 21 is any amino acid
  Variant (24)..(24): Xaa in position 24 is Phe or Tyr
  Variant (25)..(25): Xaa in position 25 is Ala, Asp, Asn, Gln or Thr
  Variant (26)..(26): Xaa in position 26 is any amino acid
  Variant (27)..(27): Xaa in position 27 is Asp, Glu or Gln
  Variant (28)..(28): Xaa in position 28 is Ala, Asp or Glu
  Variant (29)..(29): Xaa in position 29 is any amino acid
  Variant (30)..(30): Xaa in position 30 is Ala, Asp, Gly or Ser
  Variant (31)..(31): Xaa in position 31 is any amino acid
  Variant (34)..(35): Xaa in position 34 to 35 is any amino acid
  Variant (37)..(37): Xaa in position 37 is Ile, Leu or Val
  Variant (38)..(38): Xaa in position 38 is Glu, Lys or Arg
  Variant (39)..(39): Xaa in position 39 is any amino acid
  Variant (42)..(42): Xaa in position 42 is any amino acid
  Variant (43)..(43): Xaa in position 43 is Gly or Ser
  Variant (44)..(44): Xaa in position 44 is Gln or Thr
  Variant (47)..(47): Xaa in position 47 is Asp or His
  Variant (48)..(48): Xaa in position 48 is any amino acid
  Variant (50)..(50): Xaa in position 50 is Ile, Leu or Met
  Variant (51)..(51): Xaa in position 51 is Ile, Leu, Met or Val
DXXPXLXXXXXXXXXXSRFXXPWXXXXXXXXFYXXWXXXAVXXXFDXXCXX

SEQ ID NO: 112632 - protein, 55 aa, Artificial sequence
  protein pattern
  Variant (2)..(2): Xaa in position 2 is any amino acid
  Variant (3)..(4): Xaa in position 3 to 4 is any or no amino acid
  Variant (6)..(7): Xaa in position 6 to 7 is any amino acid
  Variant (8)..(9): Xaa in position 8 to 9 is any or no amino acid
  Variant (11)..(11): Xaa in position 11 is Ile, Leu or Met
  Variant (12)..(13): Xaa in position 12 to 13 is any amino acid
  Variant (14)..(14): Xaa in position 14 is Ala or Ser
  Variant (15)..(16): Xaa in position 15 to 16 is any amino acid
  Variant (17)..(17): Xaa in position 17 is Trp or Tyr
  Variant (18)..(18): Xaa in position 18 is Ala or Cys
  Variant (19)..(21): Xaa in position 19 to 21 is any amino acid
  Variant (22)..(22): Xaa in position 22 is Gly or Gln
  Variant (23)..(25): Xaa in position 23 to 25 is any amino acid
  Variant (27)..(27): Xaa in position 27 is any amino acid
  Variant (28)..(28): Xaa in position 28 is Ile or Val
  Variant (29)..(29): Xaa in position 29 is Ala or Ser
  Variant (32)..(32): Xaa in position 32 is any amino acid
  Variant (33)..(33): Xaa in position 33 is Gly or Ser
  Variant (35)..(36): Xaa in position 35 to 36 is any amino acid
  Variant (38)..(38): Xaa in position 38 is Ile, Leu or Met
  Variant (39)..(40): Xaa in position 39 to 40 is any amino acid
  Variant (42)..(44): Xaa in position 42 to 44 is any amino acid
  Variant (45)..(45): Xaa in position 45 is Gly or Asn
  Variant (46)..(47): Xaa in position 46 to 47 is any amino acid
  Variant (48)..(48): Xaa in position 48 is Ile, Leu or Val
  Variant (49)..(50): Xaa in position 49 to 50 is any amino acid
  Variant (52)..(52): Xaa in position 52 is any amino acid
  Variant (55)..(55): Xaa in position 55 is Phe or Leu
GXXXGXXXXLXXXXXXXXXXXXXXXLXXXTQXXNXXAXXXYXXXXXXXXXTXYWX

SEQ ID NO: 112633 - protein, 31 aa, Artificial sequence
  protein pattern
  Variant (2)..(2): Xaa in position 2 is Ile or Val
  Variant (3)..(3): Xaa in position 3 is Ala, Cys, Pro or Thr
  Variant (4)..(4): Xaa in position 4 is Ala, Ser or Thr
  Variant (5)..(5): Xaa in position 5 is any amino acid
  Variant (6)..(6): Xaa in position 6 is Asp, Asn or Arg
  Variant (7)..(9): Xaa in position 7 to 9 is any amino acid
  Variant (10)..(10): Xaa in position 10 is Ala, Ile or Leu
  Variant (11)..(11): Xaa in position 11 is Asp, Gln or Ser
  Variant (12)..(12): Xaa in position 12 is Ala, Gly, Asn or Gln
  Variant (14)..(14): Xaa in position 14 is Ala, Asn, Gln or Ser
  Variant (15)..(15): Xaa in position 15 is Ala, Asp, Gln or Ser
  Variant (16)..(16): Xaa in position 16 is any amino acid
  Variant (17)..(17): Xaa in position 17 is Asp or Gly
  Variant (19)..(20): Xaa in position 19 to 20 is any amino acid
  Variant (21)..(21): Xaa in position 21 is Cys or Val
  Variant (25)..(26): Xaa in position 25 to 26 is any amino acid
  Variant (27)..(30): Xaa in position 27 to 30 is any or no amino acid
KXXXXXXXXXXXLXXXXFXXXEGEXXXXXXL

SEQ ID NO: 112634 - DNA, 243 bp, Escherichia coli
  CDS (1)..(243): transl_table=11
atgaactctctggcaggtatagatatgggcagaattttactcgatttatcgaatgaggtgattaagcaacttgatgatctcgaggtgcagcgtaatcttcctcgtgcggacctattaagggaagcggtagatcaatacctgataaatcaatcgcaaacagcaagaaccagtgttcctggcatctggcaagggtgtgaggaagatggtgtcgaatatcagcgtaagctgcgcgaggaatggtaa

SEQ ID NO: 112635 - protein, 80 aa, Escherichia coli
MNSLAGIDMGRILLDLSNEVIKQLDDLEVQRNLPRADLLREAVDQYLINQSQTARTSVPGIWQGCEEDGVEYQRKLREEW

SEQ ID NO: 112636 - DNA, 216 bp, Sinorhizobium meliloti 1021
  CDS (1)..(216): transl_table=11
atgcgagccttgatcgatatgaacgatacccaggtcgaagccctagataccctcgccaagcgggtgcgccggtcccgtgcggctctgatccgcgaagcgatcgacgactatctcaaccgtcatcatcgcgagcagatcgaagatggcttcggtttgtggggcaagcgcaaagttgacggtctggcttatcaggagaaggtgcgcggcgaatggtag

SEQ ID NO: 112637 - protein, 71 aa, Sinorhizobium meliloti 1021
MRALIDMNDTQVEALDTLAKRVRRSRAALIREAIDDYLNRHHREQIEDGFGLWGKRKVDGLAYQEKVRGEW

SEQ ID NO: 112638 - DNA, 249 bp, Salmonella enterica subsp. enterica serovar Typhi Ty2
  CDS (1)..(249): transl_table=11
gtgagtatgatggctgggatggatatgggcagaattttactcgatttatcagacgatgtgattaaacggcttgacgatctcaaggtgcaacgcaacctacctcgtgcagaactcttgcgggaggccgttgagcagtatctggaaagacaggatcgggctgagaccacaatttcgaaagcattggggctctggcaaggctgtgaggaagatggcgttgaataccaacgtaaacttcgtgaggaatggtaa

SEQ ID NO: 112639 - protein, 82 aa, Salmonella enterica subsp. enterica serovar Typhi Ty2
MSMMAGMDMGRILLDLSDDVIKRLDDLKVQRNLPRAELLREAVEQYLERQDRAETTISKALGLWQGCEEDGVEYQRKLREEW

SEQ ID NO: 112640 - DNA, 231 bp, Photorhabdus luminescens subsp. laumondii TTO1
  CDS (1)..(231): transl_table=11
atggttgctatggtagaaattaatataaatctgctggaagaaacaattaaaaagcgtgaaattgtagagaaatgttctcctgataagtcacgtgctacacagagccgaagagcggtagatacttatcttgatgctaatattccagaacagaataatagcgtttttggtttatggggggataaaaagttggatggattgaaatatcaaggtaagttacgcgaagaatggtaa

SEQ ID NO: 112641 - protein, 76 aa, Photorhabdus luminescens subsp. laumondii TTO1
MVAMVEININLLEETIKKREIVEKCSPDKSRATQSRRAVDTYLDANIPEQNNSVFGLWGDKKLDGLKYQGKLREEW

SEQ ID NO: 112642 - DNA, 243 bp, Salmonella enterica subsp. enterica serovar Paratyphi A str. ATCC
  CDS (1)..(243): transl_table=11
atgatggctgggatggatatgggcagaattttactcgatttatcagacgatgtgattaaacggcttgacgatctcaaggtgcaacgcaacctacctcgtgcagaactcttgcgggaggccgttgagcagtatctggaaagacaggatcgggctgagaccacaatttcgaaagcattggggctctggcaaggctgtgaggaagatggcgttgaataccaacgtaaacttcgtgaggaatggtaa

SEQ ID NO: 112643 - protein, 80 aa, Salmonella enterica subsp. enterica serovar Paratyphi A str. ATCC
MMAGMDMGRILLDLSDDVIKRLDDLKVQRNLPRAELLREAVEQYLERQDRAETTISKALGLWQGCEEDGVEYQRKLREEW

SEQ ID NO: 112644 - DNA, 366 bp, Burkholderia sp. 383
  CDS (1)..(366): transl_table=11
gtggttgaggaagatggcgggaatttgagcggggcagaacgataccgctccgacagtcagccgattcgggaagccgcattcgcatcggacgcgccgcgcacttgcacttgcccggccggatcgtcacgatggccgcgtcccgtcacggaggttgcaatgatcagaattccggtcgatctatcaaatgaccagcatgcggcgttgacccgcatcgccacgcgccagagcagttcccccgccgagatcatccgggacgcgatcgatgcctacatcgcgcagcaggaccggacacttgctgacaatgtgttcggcctctggaaggggcgcgacgtcgtcgaccaggaagacttgcgctcggagtggtga

SEQ ID NO: 112645 - protein, 121 aa, Burkholderia sp. 383
MVEEDGGNLSGAERYRSDSQPIREAAFASDAPRTCTCPAGSSRWPRPVTEVAMIRIPVDLSNDQHAALTRIATRQSSSPAEIIRDAIDAYIAQQDRTLADNVFGLWKGRDVVDQEDLRSEW

SEQ ID NO: 112646 - DNA, 216 bp, Rhodospirillum rubrum ATCC 11170
  CDS (1)..(216): transl_table=11
gtgagagcccttgtcgatatgagcgatgcccagatcgaagccctcgacacccttgccaagcgggtgggccagtcgcgtgccgcgctgatcagggcggcgatagacgattatctagatcgtcatcaccgcgaacaggtcgcggacggtttcggcctttggggcaagcgcaaggtcgatggtctggcctatcaggagaaggcgcgcagcgaatggtag

SEQ ID NO: 112647 - protein, 71 aa, Rhodospirillum rubrum ATCC 11170
MRALVDMSDAQIEALDTLAKRVGQSRAALIRAAIDDYLDRHHREQVADGFGLWGKRKVDGLAYQEKARSEW

SEQ ID NO: 112648 - DNA, 219 bp, Burkholderia cenocepacia AU 1054
  CDS (1)..(219): transl_table=11
atgagccggattctggtcgatctgtcggatggccaactcgacgagttggccgtcatcgtcgagactcaacaccgtccccgcgccgccatcattcgtgacgcgatcgacgcctacattgccctgaacaagcaccggcttgccgacgacgtcttcggtctatggaaagatcgcacggtcgacgggctcgcctatcaagaggaattgcgctcggaatggtaa

SEQ ID NO: 112649 - protein, 72 aa, Burkholderia cenocepacia AU 1054
MSRILVDLSDGQLDELAVIVETQHRPRAAIIRDAIDAYIALNKHRLADDVFGLWKDRTVDGLAYQEELRSEW

SEQ ID NO: 112650 - DNA, 219 bp, Burkholderia vietnamiensis G4
  CDS (1)..(219): transl_table=11
atgagccgcatcctgatcgatctgtcgaatggccagctcgacgagctggccgccatcgtcgacactgagcaacgccctcgcgccgcgatcattcgcgatgcaatcgatgcgtatatcgcacaacacaagcgatcgcatgccgatatcgtgttcggcctgtggaaggaccgcgccgtcgacgggctcacctatcaggaggcactgcgttcagaatggtaa

SEQ ID NO: 112651 - protein, 72 aa, Burkholderia vietnamiensis G4
MSRILIDLSNGQLDELAAIVDTEQRPRAAIIRDAIDAYIAQHKRSHADIVFGLWKDRAVDGLTYQEALRSEW

SEQ ID NO: 112652 - DNA, 213 bp, Escherichia coli
  CDS (1)..(213): transl_table=11
atgaatacggtttttcttcatttatcagaagaggcaattaaacggctgaacaagcttcggggctggcgtaaggtttcacgatctgcaattttacgcgaagcggtagagcaatatctggaacgtcagcaattcccggtgcgtaaagcaaagggaggcaggcaaaagggggaggtagttggtgttgatgatcagtgtaaggagcataaggaatga

SEQ ID NO: 112653 - protein, 70 aa, Escherichia coli
MNTVFLHLSEEAIKRLNKLRGWRKVSRSAILREAVEQYLERQQFPVRKAKGGRQKGEVVGVDDQCKEHKE

SEQ ID NO: 112654 - DNA, 219 bp, Escherichia coli
  CDS (1)..(219): transl_table=11
atgggcagaattttactcgatttatcgaatgaggtgattaagcaacttgatgatctcgaggtgcagcgtaatcttcctcgtgcggacctattaagggaagcggtagatcaatacctgataaatcaatcgcaaacagcaagaaccagtgttcctggcatctggcaagggtgtgaggaagatggtgtcgaatatcagcgtaagctgcgcgaggaatggtaa

SEQ ID NO: 112655 - protein, 72 aa, Escherichia coli
MGRILLDLSNEVIKQLDDLEVQRNLPRADLLREAVDQYLINQSQTARTSVPGIWQGCEEDGVEYQRKLREEW

SEQ ID NO: 112656 - DNA, 24 bp, Artificial sequence
  primer
atgaactctctggcaggtatagat

SEQ ID NO: 112657 - DNA, 23 bp, Artificial sequence
  primer
ttaccattcctcgcgcagcttac

SEQ ID NO: 112658 - protein, 75 aa, Artificial sequence
  consensus sequence
  Variant (2)..(5): Xaa in position 2 to 5 is any amino acid
  Variant (6)..(7): Xaa in position 6 to 7 is any or no amino acid
  Variant (9)..(14): Xaa in position 9 to 14 is any amino acid
  Variant (15)..(15): Xaa in position 15 is any or no amino acid
  Variant (17)..(26): Xaa in position 17 to 26 is any amino acid
  Variant (27)..(27): Xaa in position 27 is any or no amino acid
  Variant (30)..(32): Xaa in position 30 to 32 is any amino acid
  Variant (34)..(34): Xaa in position 34 is any amino acid
  Variant (36)..(38): Xaa in position 36 to 38 is any amino acid
  Variant (40)..(51): Xaa in position 40 to 51 is any amino acid
  Variant (52)..(54): Xaa in position 52 to 54 is any or no amino acid
  Variant (56)..(56): Xaa in position 56 is any amino acid
  Variant (58)..(62): Xaa in position 58 to 62 is any amino acid
  Variant (65)..(66): Xaa in position 65 to 66 is any amino acid
  Variant (69)..(71): Xaa in position 69 to 71 is any amino acid
  Variant (73)..(73): Xaa in position 73 is any amino acid
MXXXXXXLXXXXXXXLXXXXXXXXXXXRAXXXRXAXXXYXXXXXXXXXXXXXXXGXWXXXXXDGXXYQXXXRXEW

SEQ ID NO: 112659 - protein, 27 aa, Artificial sequence
  protein pattern
  Variant (3)..(7): Xaa in position 3 to 7 is any or no amino acid
  Variant (9)..(9): Xaa in position 9 is Ile or Val
  Variant (10)..(10): Xaa in position 10 is Asp or Glu
  Variant (11)..(11): Xaa in position 11 is Ala, Asp, Gln or Thr
  Variant (13)..(13): Xaa in position 13 is Ile or Leu
  Variant (14)..(21): Xaa in position 14 to 21 is any amino acid
  Variant (22)..(22): Xaa in position 22 is Ala, Asp, Glu, Asn or Thr
  Variant (23)..(23): Xaa in position 23 is any amino acid
  Variant (24)..(24): Xaa in position 24 is Gly, Ser or Val
  Variant (25)..(25): Xaa in position 25 is any amino acid
  Variant (26)..(26): Xaa in position 26 is Ala or Gly
  Variant (27)..(27): Xaa in position 27 is Ile or Leu
RAXXXXXAXXXYXXXXXXXXXXXXXXX

SEQ ID NO: 112660 - protein, 14 aa, Artificial sequence
  protein pattern
  Variant (3)..(3): Xaa in position 3 is Leu or Val
  Variant (4)..(4): Xaa in position 4 is any amino acid
  Variant (7)..(8): Xaa in position 7 to 8 is any amino acid
  Variant (9)..(9): Xaa in position 9 is Ala, Leu or Val
  Variant (11)..(11): Xaa in position 11 is any or no amino acid
  Variant (13)..(13): Xaa in position 13 is any or no amino acid
DGXXYQXXXRXEXW

SEQ ID NO: 112661 - DNA, 1155 bp, Synechocystis sp.
  CDS (1)..(1155): transl_table=11
atgggcacaaaacgtattggaattttgaccagtggtggtgattgtcctggcctcaatgccgtcatccgagcagtggttaaggcctcagctcttaaggggtgggaggtttatggtattccctacggcaccgatggttttgttgaagttgcccacggaaaataccaggcagaggatttactgttaactaaacatggctatgctctgcccgggatgctcaaaggcttagatgtattgcaatttctcagcggtagtgttttagggtccttaagtaagggacatccagagcaaccggcgatcgccgaagccattctcaagggttatgccatacttgacctggaagcactaattgttattggtggcgatggtagtttagacattatttatgatttagcccaaaaaggtaattggcatattattgccattcccaaaaccattgacaatgatgtgccctttacggatctggcagtgggatttagcactgcggtggatattgttacccaagccttatacgacctgacttttaccgccgctagccatgaacgcattatcattgtccaggtcatggggcgggatgcggggcatttgactctccatgcaggcattgccggcggagctgatatcattttaattcccgaaattaccccttgtttgacttctgaaattatccgcaattgttgttatcaactaatgaatttgcggaagtctggccgccattttgctttaatagttatttcagagggtgtccacgatcaaaataataagaaaaataaacatatcgccgactacttagcagaagaaatcagtgaaaccagtcaacacctttgcgacattaaagatcccgctttttgcgatctaataagtctagacattcgagccacaaccctgggtcatttacaacggagcgggacccccctatcgttcgatcgcctcttggccacggtgtttggaattagggcagtggagttgatcgaacaggaaatttatgaccaggtggtgatctggcgcagtgggaaggtggaacacgctgaccttaaaccaattatcagcatcattaaagaatgtcaccaggaaaatcgctgtcctttcccggtggatagggatggttttatggttaaaacggccaagtcattgggcatatacctaggagaagactaa

SEQ ID NO: 112662 - protein, 384 aa, Synechocystis sp.
MGTKRIGILTSGGDCPGLNAVIRAVVKASALKGWEVYGIPYGTDGFVEVAHGKYQAEDLLLTKHGYALPGMLKGLDVLQFLSGSVLGSLSKGHPEQPAIAEAILKGYAILDLEALIVIGGDGSLDIIYDLAQKGNWHIIAIPKTIDNDVPFTDLAVGFSTAVDIVTQALYDLTFTAASHERIIIVQVMGRDAGHLTLHAGIAGGADIILIPEITPCLTSEIIRNCCYQLMNLRKSGRHFALIVISEGVHDQNNKKNKHIADYLAEEISETSQHLCDIKDPAFCDLISLDIRATTLGHLQRSGTPLSFDRLLATVFGIRAVELIEQEIYDQVVIWRSGKVEHADLKPIISIIKECHQENRCPFPVDRDGFMVKTAKSLGIYLGED

SEQ ID NO: 112663 - DNA, 1005 bp, Deinococcus radiodurans R1
  CDS (1)..(1005): transl_table=11
atgacccaacctgacatggcctaccccaaccccgccggcatcaagcgcgtggccgtcctgacgagcggcggcgacgcgcccggcatgaacgccgccattcgcgccgtggtccgcacgggtgcccagcagggcatcgaagtcgtcggcgtgcgccggggcttttccggcctgcaccggggcgaagtgcagcttctgggcccgcgcgacgtggcgaacaccattcagcgcggcggcaccattctgctcaccgcccgcagccacacctggcgctcgccggaaggccgggccaaaggggcggcggtgctgcgcgagtggggcgtggacggcttggtggtcatcggcggcgacggctcctttcacggcgggtactttttgcaagaggaacacggcatcccggtcatcggcgtgccgggcaccatcgacaacgacctgtacggcactgaccacaccatcgggtacttcacggcagtggaaacggcgctcgaagcggtggacaagctacgcgacacgggcgcgagccacgagcgcatcttcgtcatcgaggtgatgggccgccacgccgggcacatcgcgctcgacgtggcggtggcgggcggcgccgaggaagtctttattcccgaagacaaaaaacccatcggcgacgtggtgaacatcgtcaaggacagcattgccaagggcaagcggggcagcatcatcatcgtggccgagggctatgacggcggcgccgaggcggtcgcgcaggccattcacgccggcaccggcctggaaacccgcgtcagcatcctggggcacatccagcgtggcggcaccccggtcagctcggaccgcatcctggcgagccgactgggcgaagccgccgtctacgccctgatggacggcaaaaagggcgtgatggtggggcgcatcggcgggggcatcgcctacacgccgctgcacgaaacctgggaaaagcgcaaggacgtgagccgcgacctttaccgctgcgccaagatgttgagcatttaa

SEQ ID NO: 112664 - protein, 334 aa, Deinococcus radiodurans R1
MTQPDMAYPNPAGIKRVAVLTSGGDAPGMNAAIRAVVRTGAQQGIEVVGVRRGFSGLHRGEVQLLGPRDVANTIQRGGTILLTARSHTWRSPEGRAKGAAVLREWGVDGLVVIGGDGSFHGGYFLQEEHGIPVIGVPGTIDNDLYGTDHTIGYFTAVETALEAVDKLRDTGASHERIFVIEVMGRHAGHIALDVAVAGGAEEVFIPEDKKPIGDVVNIVKDSIAKGKRGSIIIVAEGYDGGAEAVAQAIHAGTGLETRVSILGHIQRGGTPVSSDRILASRLGEAAVYALMDGKKGVMVGRIGGGIAYTPLHETWEKRKDVSRDLYRCAKMLSI

SEQ ID NO: 112665 - DNA, 2853 bp, Drosophila melanogaster
  CDS (1)..(2853)
atgcattcaataaaatttcgagtatttaccaaattaaaacctatatttttggaaatcaatggacggatacccatttgccgccattttcatggtcctacaacatttcgcttagaaatctcaaacaaaacacctccgattaggcaaaagctcacatttccaaacatcggcatccaatgcacacgaagtcatcatttgtgttgtcctcgagatatttcaggaaatactcttttaagtgtaaaatttaattgcaaacgacattgtataaagttgcgcagtgattctggtgatcaaaagaatgatagtcctggtgaaaaaaacatacaaaaagacaagtctgcgcaacgatgtggaaaaccaataaacaatctgcacaacggatttcttaatgctgtgaactattctgaaaagaatgcggtgaaaaagaaaaagagtgcaccaaaaaggaaatgtggcaaatcggtggatgagctgcgaaagtgtttaagaaccatgcaggatgttattgattttgtacatccagtcaagccttttaaggacaaaggactggcggtcttcaccagcggcggggattcccagggcatgaatgccgccgtgcgagcctgtgtccgtatggccatctatttgggctgcaaggtctacttcattcgtgaaggctaccagggcatggtggatggtggcgactgcatccaggaagccaactgggcctcagtctcatccattatccatcgtggtggcaccatcattggctccgcccgttgccaggacttccgtgagcgtcagggtcgcttgaaagccgctaacaacctgattcagcgaggaatcaccaatctggtggtcattggaggcgatggctccctcacgggcgccaatctgttccgtcaggagtggtccagcctgttggacgagctggtcaagaacaagaccattaccaccgagcagcaggagaagttcaatgtcctgcacatcgttggattggttggctccatcgacaacgatttctgtggcactgacatgaccatcggcacggacacggcactacatcgcatcatcgaggcaatcgatgccatctccagtacagcctactcccatcagcgcaccttcatcatggaggtcatgggtcgtcattgcggctatttagctcttgtgggtggactggcgtgcgaggcggatttcatattcattcccgaaatgccgcccaaggtcgattggccagacaggctctgctctcagctggcccaggagcgatctgctggccagcgtctgaacatcgtgattgtggccgagggagccatggatcgcgagggtcatcccatcacagccgaggatgtaaagaaggtgatcgacgagcgtctgaagcacgatgcccgcatcactgtcttgggtcacgtgcagcgcggtggcaatcccagtgccttcgatcgtattttggcttgccgcatgggagctgaggccactttggccctgatggaggccaccaaggactcggtgccagtggtcatctctctggacggcaaccaggcggttcgcgtgccgctgatggagtgcgtagagcgcacccaggctgtggccaaggccatggcggagaaacgctgggcggatgccgtcaagctgcgcggacgctccttcgagcggaatctggagacctacaagatgctgacgcgcttgaagccgcccaaggagaacttcgacgccgatggcaagggaatcgaaggataccgcctagctgtgatgcatattggtgctccggcttgcggtatgaatgccgctgtgcgcagcttcgtgcgcaatgccatctaccgcggtgatgtggtttatggaatcaacgacggtgtcgagggtctgattgccggaaatgtccgcgagctgggctggtcggatgtctcaggatgggttggtcagggtggcgcctacttgggtaccaaacgcacactgcctgagggcaagttcaaggagatcgccgctcgtctcaaggagtttaagatccagggtctcctgatcattggtggctttgagagttaccatgccgccggacagatcgccgatcagcgggacaactacccacagttctgcatccccattgtggttattccatcgacgatttcgaacaatgtgcccggcacagaattttctctgggatgcgacaccggtttaaatgagattacggagatttgcgaccgtatccgtcagtcggcacagggaaccaagcgccgagtgttcgtcattgagacgatgggtggctactgtggctatttggccaccttggccggcttggccggcggagctgatgccgcctacatctacgaggagaagttctccatcaaagacctgcagcaggatgtctaccacatggcctccaagatggccgagggcgtctcccgcggtctaatcctgcgaaacgagaaggctagcgagaactacagcacggacttcatttaccgcctgtactcggaggagggcaagggcctcttcacctgccgtatgaacatcctgggtcacatgcagcagggcggctcacccactcccttcgaccgcaacatgggcaccaaaatggccgccaagtgtgtcgactggctggccgcccagatcaaggcgaacatcgacgccaacggcgtagtcaactgcaagtccccggacaccgccacgctgctgggaatcgtgtcgcggcagtaccgcttctcaccgctggtcgacctcattgcagagacgaacttcgatcaacgcatcccgaagaagcagtggtggctgcgcctgcgtcccctgctgcgcatcctggccaagcacgattccgcctacgaggaggagggtatgtacatcaccgtcgaggaggagtgtgacactgacgccgtcgcctaa

SEQ ID NO: 112666 - protein, 950 aa, Drosophila melanogaster
MHSIKFRVFTKLKPIFLEINGRIPICRHFHGPTTFRLEISNKTPPIRQKLTFPNIGIQCTRSHHLCCPRDISGNTLLSVKFNCKRHCIKLRSDSGDQKNDSPGEKNIQKDKSAQRCGKPINNLHNGFLNAVNYSEKNAVKKKKSAPKRKCGKSVDELRKCLRTMQDVIDFVHPVKPFKDKGLAVFTSGGDSQGMNAAVRACVRMAIYLGCKVYFIREGYQGMVDGGDCIQEANWASVSSIIHRGGTIIGSARCQDFRERQGRLKAANNLIQRGITNLVVIGGDGSLTGANLFRQEWSSLLDELVKNKTITTEQQEKFNVLHIVGLVGSIDNDFCGTDMTIGTDTALHRIIEAIDAISSTAYSHQRTFIMEVMGRHCGYLALVGGLACEADFIFIPEMPPKVDWPDRLCSQLAQERSAGQRLNIVIVAEGAMDREGHPITAEDVKKVIDERLKHDARITVLGHVQRGGNPSAFDRILACRMGAEATLALMEATKDSVPVVISLDGNQAVRVPLMECVERTQAVAKAMAEKRWADAVKLRGRSFERNLETYKMLTRLKPPKENFDADGKGIEGYRLAVMHIGAPACGMNAAVRSFVRNAIYRGDVVYGINDGVEGLIAGNVRELGWSDVSGWVGQGGAYLGTKRTLPEGKFKEIAARLKEFKIQGLLIIGGFESYHAAGQIADQRDNYPQFCIPIVVIPSTISNNVPGTEFSLGCDTGLNEITEICDRIRQSAQGTKRRVFVIETMGGYCGYLATLAGLAGGADAAYIYEEKFSIKDLQQDVYHMASKMAEGVSRGLILRNEKASENYSTDFIYRLYSEEGKGLFTCRMNILGHMQQGGSPTPFDRNMGTKMAAKCVDWLAAQIKANIDANGVVNCKSPDTATLLGIVSRQYRFSPLVDLIAETNFDQRIPKKQWWLRLRPLLRILAKHDSAYEEEGMYITVEEECDTDAVA

SEQ ID NO: 112667 - DNA, 1203 bp, Clostridium perfringens str. 13
  CDS (1)..(1203): transl_table=11
atgaattgtattatagctcagtctggcggacctacttcagtaataaatgctagtgtttatggtctagttaaagcaaataaaaaacttaatttatatgagaatgtttatggtggattaaacggaatagaaggtattttaaataagaaaataataaacctttcagaccttgatgaacttcaattagaaagatttaaaaattcaccagcctctggtttaggttcttgtagatataaattaaaacctcttagcgaaagtgaagatgagtacttaaaacttttagatattttaaactcacttaatataaaagctttcttttatgtaggtggaaatgactcaatggatactactgctaaattaaatgcttttgcaaaagctaaaaatatagatataaaattctttggaatccctaaaacaatagataatgatttaatgcacacagatcacactccaggatttggtagcgctgcaaaattcatatctacagcagttttagaaacttatttagactcaaaagtttatactaataatggaattttcataattgaaactatgggaagagatacaggttggttagcagcttctggtgccttagcaactataaacgggaataaatgtgctgatttagtatatttacctgaaagagcattttcagtacaaagctttttaactgatgtagctagaatatttaaagaaaaaaaacatgtatatatagtagcttctgaaggattaaaagatgaaaatggaaagtttcttactgaaactgcaccaaatgacgattcatttggacatgctcaattaggtggtgtaggtgcttacttaaagaacctaataatccaagctagtataacacatagagttaaatctctagaacttaatactctacaaagatgttctatgcatgcttcatctaaaatagatgtaaatgaagctgttatggtaggacaagctgccttagaagcttctattaattcagaaggtggttatatggttgctataagaagagattcttcattcccatataaaagctctacttttttaattgaagctgataaaatagctaataatataaaatattttccaagtgaatggataaatgaagaaggtaataatataaccgaagaaggtttattatatcttaagccattaattagcgattttgaggatagagattctcttcctctttatcatagttttgttttataa

SEQ ID NO: 112668 - protein, 400 aa, Clostridium perfringens str. 13
MNCIIAQSGGPTSVINASVYGLVKANKKLNLYENVYGGLNGIEGILNKKIINLSDLDELQLERFKNSPASGLGSCRYKLKPLSESEDEYLKLLDILNSLNIKAFFYVGGNDSMDTTAKLNAFAKAKNIDIKFFGIPKTIDNDLMHTDHTPGFGSAAKFISTAVLETYLDSKVYTNNGIFIIETMGRDTGWLAASGALATINGNKCADLVYLPERAFSVQSFLTDVARIFKEKKHVYIVASEGLKDENGKFLTETAPNDDSFGHAQLGGVGAYLKNLIIQASITHRVKSLELNTLQRCSMHASSKIDVNEAVMVGQAALEASINSEGGYMVAIRRDSSFPYKSSTFLIEADKIANNIKYFPSEWINEEGNNITEEGLLYLKPLISDFEDRDSLPLYHSFVL

SEQ ID NO: 112669 - DNA, 990 bp, Fusobacterium nucleatum subsp. nucleatum ATCC 25586
  CDS (1)..(990): transl_table=11
atgagggtgaagattaaaaaaatggaaaaaaaattagctatattaacaagtggtggagatgcaccaggaatgaatgccgcaataagagcaacagcaaaaattgctgagtattatggatttgaagtttatggaataagaagaggatatttaggaatgttaaatgatgaaatatttcctatgactggtagatttgtatcagggattattgataagggtggaacagttttactgacagctcgttcagaagaatttaaggaagccagattcagagagattgcagcaaataatttaaaaaagaaaggtataaactacttagtggttataggtggagatggttcttatcgtggagctaacttactttataaagaacatggaataaaagtagttggaataccaggaactattgataatgatatctgtggaacagattttactcttggatttgatacatgtcttaatacaattttagatgcaatgtcaaaaataagagatacagcaacatctcatgaaagaacaattttaattcaagttatgggaagaagagcaggagatttagctctacatgcttgtatagcaggtggtggagatggaataatgatacctgaaatggataatcctattgaaatgctagcactccaattaaaagaaagaagaaaaaatgggaagctacatgatatagttttagttgcagaaggtgttggaaatgtattggacattgaagaaaaattaaaaggacatattaacagtgaaattagatcagttgttttaggacatattcaaagaggaggaacaccatcaggatttgatagagttcttgcaagtagaatggcagcaaaagcagttgaagtattgaataaaggggaagcaggagttatggttggaattgaaaaaaatgaaatggtaactcatccacttgaagaagcttgttctgttgataagagaaagagtattgaaaaagactatgaattagcacttttactatcgaaataa

SEQ ID NO: 112670 - protein, 329 aa, Fusobacterium nucleatum subsp. nucleatum ATCC 25586
MRVKIKKMEKKLAILTSGGDAPGMNAAIRATAKIAEYYGFEVYGIRRGYLGMLNDEIFPMTGRFVSGIIDKGGTVLLTARSEEFKEARFREIAANNLKKKGINYLVVIGGDGSYRGANLLYKEHGIKVVGIPGTIDNDICGTDFTLGFDTCLNTILDAMSKIRDTATSHERTILIQVMGRRAGDLALHACIAGGGDGIMIPEMDNPIEMLALQLKERRKNGKLHDIVLVAEGVGNVLDIEEKLKGHINSEIRSVVLGHIQRGGTPSGFDRVLASRMAAKAVEVLNKGEAGVMVGIEKNEMVTHPLEEACSVDKRKSIEKDYELALLLSK

SEQ ID NO: 112671 - DNA, 1173 bp, Chlorobium tepidum TLS
  CDS (1)..(1173): transl_table=11
atgcatatcggtgttttgaccggcggcggcgacgctcccggcatcaacgcgtgcatcaagaccatcgtgacgatcagcacggagaaagggtatcgggtgaccggtatccgcaggggctggaacggtcttctggcgtttgatcccgatgatccggcatcccgcacggagcatatcgtcgatcttgactccgagcttgtccgcagaatcgatcgtactggcggcaccctgcttcacaccagccgcatcaatcccggcaacctcaaaaagaaagaaattccaccatttcttcgcaactcgccacacctgttgcgcacgggcttgcatcactccggaaactttgatctgaccgatcatgtgttgcggagtattgatgcgcttggcctggatgtcatcattgtcatcggcggtgacgacacgatcggctatgccgatcacctggccaaagctgctgtcaaggtgattggcgtgccaaagacgatggacaacgatgtttatggctcggactactgcatcgggtttggcacggccgttacccgcagtgtccagtacattcatcagctgcgtaccagttccggctcgcacgagcgaatcactattgtcgagctgttcggtcgtagcaccggggaaacctgcctcgtcagtgcctacctggccggtgttgaccgcgccctcattccggaagtgcctttcgaccccgaaactctcgccgattacgttattcaggacaaagcagccaatccgagccaatatgccatgattgctatcagtgaaggtgcgcggatgattggcagcaagatgatcgaatattgcggacggcggtacgacgaggatggccatgagcctgccggaattggccaattgacccgtgaaaccatctccatgctgaccggccaggatgtcatctgccagcagctgggctatctgatgcgttcaggtattcccgatgctctggatctgatggtcggcttcaattttgcgcagcttgccgtggaactgattgcagaaggcaccttcggtgtcatggtggcgctccagaaaggcatctacacctgtctcccccttgcagaggtgtcgtcaaacaccaagcaggtcgatatcagtgaactgtatgacccgcgctactaccgcccgaagatgcgaagcgtcatgggcaagccgatgtttctttattag

SEQ ID NO: 112672 - protein, 390 aa, Chlorobium tepidum TLS
MHIGVLTGGGDAPGINACIKTIVTISTEKGYRVTGIRRGWNGLLAFDPDDPASRTEHIVDLDSELVRRIDRTGGTLLHTSRINPGNLKKKEIPPFLRNSPHLLRTGLHHSGNFDLTDHVLRSIDALGLDVIIVIGGDDTIGYADHLAKAAVKVIGVPKTMDNDVYGSDYCIGFGTAVTRSVQYIHQLRTSSGSHERITIVELFGRSTGETCLVSAYLAGVDRALIPEVPFDPETLADYVIQDKAANPSQYAMIAISEGARMIGSKMIEYCGRRYDEDGHEPAGIGQLTRETISMLTGQDVICQQLGYLMRSGIPDALDLMVGFNFAQLAVELIAEGTFGVMVALQKGIYTCLPLAEVSSNTKQVDISELYDPRYYRPKMRSVMGKPMFLY

SEQ ID NO: 112673 - DNA, 1206 bp, Chlorobium tepidum TLS
  CDS (1)..(1206): transl_table=11
gtgaaaaaaatcggaattcttaccagcggtggcgactgcggcggcctgaacgccgtcatcaagggtgccgcactcatggccctgaacaaggggcttgaactgtatgtgatccccaacggctacgccggactgtacaacctcctgaatcaggaccggttggtcaggctcgacgaggcccgtctcgaccagttccaggccagcttcgccggctcggaagccggccactcgcgggtgaaaatcaaggcgatcagcaaccccgacaaatacaaccgcatcaaggtcggcatgaaaaagttcgatctcgacgcgctcatcatcagcggcggcgacgactccggcagcgtcatgatcgacctgaaccacaacggcatccagtgcatccactgtccaaagacgatggatcttgacttgcagacctactcggtcggcggtgactcgaccatcaaccgcatcgcccagttcgtcgaggatctgaagacgacaggacgtacccacaaccgcgtgctggtcacggaggtgttcggacgctacgcgggccacacggccttccgcagcggcgtggctgccgaagccgactgcatcctgattccggaaatcccggttgactgggatgtcgtgtacgagcacatcgtcgaacgcttcacccgccgcatccggcagagcgacgtgcacagcggcacctataccatcgtggtcgccgagggcatgaagaacgccgacggcacggacatcgtcgatgagtcggcaggcatcgatgcatttggccacaaaaagctcgcgggcgcgggcaagtatgtttgccaggagatcaagaagcgcttcaagaccgacccgcgaatgccgcagttcatgaaggataccggcatgttcgtcgagggcatctacgaaattccggaggtgcgcgaagtccatccgggccacttggtgcgcgccgggcactcctcggcctacgacatcaacttcggcttcgaggctggcgcagcagcggtattgctcctgcttgaaggcaaaaccggtgtgacgatctccaaggtcaaggggcgcaaaatcgagtacatcgaagcctcaaaggcgatcgaacagcgctatgtcgatctcgaccaggttgccatgtacgaatcgatcggcacctgtttcggcagaactccggcagcctacgagccgatcctgcgagaagttgacggcgtgtacgaaaggatttattga

SEQ ID NO: 112674 - protein, 401 aa, Chlorobium tepidum TLS
MKKIGILTSGGDCGGLNAVIKGAALMALNKGLELYVIPNGYAGLYNLLNQDRLVRLDEARLDQFQASFAGSEAGHSRVKIKAISNPDKYNRIKVGMKKFDLDALIISGGDDSGSVMIDLNHNGIQCIHCPKTMDLDLQTYSVGGDSTINRIAQFVEDLKTTGRTHNRVLVTEVFGRYAGHTAFRSGVAAEADCILIPEIPVDWDVVYEHIVERFTRRIRQSDVHSGTYTIVVAEGMKNADGTDIVDESAGIDAFGHKKLAGAGKYVCQEIKKRFKTDPRMPQFMKDTGMFVEGIYEIPEVREVHPGHLVRAGHSSAYDINFGFEAGAAAVLLLLEGKTGVTISKVKGRKIEYIEASKAIEQRYVDLDQVAMYESIGTCFGRTPAAYEPILREVDGVYERIY

SEQ ID NO: 112675 - DNA, 945 bp, Shigella flexneri 2a str. 301
  CDS (1)..(945): transl_table=11
gtgttgacaagcggcggtgatgcgccaggcatgaacgccgcaattcgcggggttgttcgttctgcgctgacagaaggtctggaagtaatgggtatttatgacggctatctgggtctgtatgaagaccgtatggtacagctagaccgttacagcgtgtctgacatgatcaaccgtggcggtacgttcctcggttctgcgcgtttcccggaattccgcgacgagaacatccgcgccgtggctatcgaaaacctgaaaaaacgtggtatcgacgcgctggtggttatcggcggtgacggttcctacatgggtgcaatgcgtctgaccgaaatgggcttcccgtgcatcggtctgccgggcactatcgacaacgacatcaaaggcactgactacactatcggtttcttcactgcgctgagcaccgttgtagaagcgatcgaccgtctgcgtgacacctcttcttctcaccagcgtatttccgtggtggaagtgatgggccgttattgtggcgatctgaccctggctgcggccattgccggtggctgtgaattcgttgtagttccggaagttgaattcagccgtgaagacctggtaaacgaaatcaaagcgggtatcgcgaaaggtaaaaaacacgcgatcgtggcgattaccgaacatatgtgtgatgttgacgaactggcgcatttcatcgagaaagaaaccggtcgtgaaacccgcgcaactgtgctgggccacatccagcgcggtggttctccggtgccttacgaccgtattctggcttcccgtatgggcgcttacgctatcgatctgctgctggcaggttacggcggtcgttgtgtaggtatccagaacgaacagctggttcaccacgacatcatcgacgctatcgaaaacatgaagcgtccgttcaaaggtgactggctggactgcgcgaaaaaactgtattaa

SEQ ID NO: 112676 - protein, 314 aa, Shigella flexneri 2a str. 301
MLTSGGDAPGMNAAIRGVVRSALTEGLEVMGIYDGYLGLYEDRMVQLDRYSVSDMINRGGTFLGSARFPEFRDENIRAVAIENLKKRGIDALVVIGGDGSYMGAMRLTEMGFPCIGLPGTIDNDIKGTDYTIGFFTALSTVVEAIDRLRDTSSSHQRISVVEVMGRYCGDLTLAAAIAGGCEFVVVPEVEFSREDLVNEIKAGIAKGKKHAIVAITEHMCDVDELAHFIEKETGRETRATVLGHIQRGGSPVPYDRILASRMGAYAIDLLLAGYGGRCVGIQNEQLVHHDIIDAIENMKRPFKGDWLDCAKKLY

SEQ ID NO: 112677 - DNA, 2367 bp, Drosophila melanogaster
  CDS (1)..(2367)
atgaattccgagattaatcaacgattcctggcccgcggctcgcagaaggacaaaggactggcggtcttcaccagcggcggggattcccagggcatgaatgccgccgtgcgagcctgtgtccgtatggccatctatttgggctgcaaggtctacttcattcgtgaaggctaccagggcatggtggatggtggcgactgcatccaggaagccaactgggcctcagtctcatccattatccatcgtggtggcaccatcattggctccgcccgttgccaggacttccgtgagcgtcagggtcgcttgaaagccgctaacaacctgattcagcgaggaatcaccaatctggtggtcattggaggcgatggctccctcacgggcgccaatctgttccgtcaggagtggtccagcctgttggacgagctggtcaagaacaagaccattaccaccgagcagcaggagaagttcaatgtcctgcacatcgttggattggttggctccatcgacaacgatttctgtggcactgacatgaccatcggcacggacacggcactacatcgcatcatcgaggcaatcgatgccatctccagtacagcctactcccatcagcgcaccttcatcatggaggtcatgggtcgtcattgcggttacttagccatatcggcagccatagccacagaggctgattttatgttcatacccgaggagccggtgtcagtcaattggaaggacgagatctgtgtcaagctccaccaggagcgatctgctggccagcgtctgaacatcgtgattgtggccgagggagccatggatcgcgagggtcatcccatcacagccgaggatgtaaagaaggtgatcgacgagcgtctgaagcacgatgcccgcatcactgtcttgggtcacgtgcagcgcggtggcaatcccagtgccttcgatcgtattttggcttgccgcatgggagctgaggccactttggccctgatggaggccaccaaggactcggtgccagtggtcatctctctggacggcaaccaggcggttcgcgtgccgctgatggagtgcgtagagcgcacccaggctgtggccaaggccatggcggagaaacgctgggcggatgccgtcaagctgcgcggacgctccttcgagcggaatctggagacctacaagatgctgacgcgcttgaagccgcccaaggagaacttcgacgccgatggcaagggaatcgaaggataccgcctagctgtgatgcatattggtgctccggcttgcggtatgaatgccgctgtgcgcagcttcgtgcgcaatgccatctaccgcggtgatgtggtttatggaatcaacgacggtgtcgagggtctgattgccggaaatgtccgcgagctgggctggtcggatgtctcaggatgggttggtcagggtggcgcctacttgggtaccaaacgcacactgcctgagggcaagttcaaggagatcgccgctcgtctcaaggagtttaagatccagggtctcctgatcattggtggctttgagagttaccatgccgccggacagatcgccgatcagcgggacaactacccacagttctgcatccccattgtggttattccatcgacgatttcgaacaatgtgcccggcacagaattttctctgggatgcgacaccggtttaaatgagattacggagatttgcgaccgtatccgtcagtcggcacagggaaccaagcgccgagtgttcgtcattgagacgatgggtggctactgtggctatttggccaccttggccggcttggccggcggagctgatgccgcctacatctacgaggagaagttctccatcaaagacctgcagcaggatgtctaccacatggcctccaagatggccgagggcgtctcccgcggtctaatcctgcgaaacgagaaggctagcgagaactacagcacggacttcatttaccgcctgtactcggaggagggcaagggcctcttcacctgccgtatgaacatcctgggtcacatgcagcagggcggctcacccactcccttcgaccgcaacatgggcaccaaaatggccgccaagtgtgtcgactggctggccgcccagatcaaggcgaacatcgacgccaacggcgtagtcaactgcaagtccccggacaccgccacgctgctgggaatcgtgtcgcggcagtaccgcttctcaccgctggtcgacctcattgcagagacgaacttcgatcaacgcatcccgaagaagcagtggtggctgcgcctgcgtcccctgctgcgcatcctggccaagcacgattccgcctacgaggaggagggtatgtacatcaccgtcgaggaggagtgtgacactgacgccgtcgcctaa

SEQ ID NO: 112678 - protein, 788 aa, Drosophila melanogaster
MNSEINQRFLARGSQKDKGLAVFTSGGDSQGMNAAVRACVRMAIYLGCKVYFIREGYQGMVDGGDCIQEANWASVSSIIHRGGTIIGSARCQDFRERQGRLKAANNLIQRGITNLVVIGGDGSLTGANLFRQEWSSLLDELVKNKTITTEQQEKFNVLHIVGLVGSIDNDFCGTDMTIGTDTALHRIIEAIDAISSTAYSHQRTFIMEVMGRHCGYLAISAAIATEADFMFIPEEPVSVNWKDEICVKLHQERSAGQRLNIVIVAEGAMDREGHPITAEDVKKVIDERLKHDARITVLGHVQRGGNPSAFDRILACRMGAEATLALMEATKDSVPVVISLDGNQAVRVPLMECVERTQAVAKAMAEKRWADAVKLRGRSFERNLETYKMLTRLKPPKENFDADGKGIEGYRLAVMHIGAPACGMNAAVRSFVRNAIYRGDVVYGINDGVEGLIAGNVRELGWSDVSGWVGQGGAYLGTKRTLPEGKFKEIAARLKEFKIQGLLIIGGFESYHAAGQIADQRDNYPQFCIPIVVIPSTISNNVPGTEFSLGCDTGLNEITEICDRIRQSAQGTKRRVFVIETMGGYCGYLATLAGLAGGADAAYIYEEKFSIKDLQQDVYHMASKMAEGVSRGLILRNEKASENYSTDFIYRLYSEEGKGLFTCRMNILGHMQQGGSPTPFDRNMGTKMAAKCVDWLAAQIKANIDANGVVNCKSPDTATLLGIVSRQYRFSPLVDLIAETNFDQRIPKKQWWLRLRPLLRILAKHDSAYEEEGMYITVEEECDTDAVA

SEQ ID NO: 112679 - DNA, 1059 bp, Escherichia coli CFT073
  CDS (1)..(1059): transl_table=11
ttgttatactatttgcacattcgttggatcacttcgatgtgcaagaagacttccggcaacagatttcattttgcattccaaagttcagaggtagtcatgattaagaaaatcggtgtgttgacaagcggcggtgatgcgccaggcatgaacgccgcaattcgcggggttgttcgttctgcgctgacagaaggtctggaagtaatgggcatttatgacggctatctgggtctgtatgaagaccgtatggtacagctagaccgttacagcgtttctgacatgatcaaccgtggtggtacgttcctcggttctgcgcgtttcccggaattccgcgacgagaacatccgcgccgtggctatcgaaaacctgaaaaaacgtgggatcgacgcgctggtggttatcggcggtgacggttcctacatgggtgcaatgcgtctgaccgaaatgggcttcccgtgcatcggcctgccgggcactatcgacaacgacatcaaaggcactgactacactatcggtttcttcactgcgctgagcaccgttgtagaagcgatcgaccgtctgcgtgacacctcttcttctcaccagcgtatttccgtggtggaagtgatgggccgttattgtggcgatctgacgttggctgcggctattgccggcggctgtgaattcgttgtggttccggaagttgaattcagccgtgaagacctggtaaacgaaatcaaagcgggtatcgcgaaaggtaaaaaacacgcgatcgtggcgattaccgaacatatgtgtgatgttgacgaactggcgcatttcatcgagaaagaaaccggtcgtgaaacccgcgcaactgtgctgggccacatccagcgcggtggttctccggtgccttacgaccgtattctggcttcccgtatgggcgcttacgctatcgagctgctgctggcaggttacggtggtcgttgcgtaggtatccagaacgaacagctggttcaccacgacatcatcgacgctatcgaaaacatgaagcgtccgttcaaaggcgactggctggactgcgcgaaaaaactgtattaa

SEQ ID NO: 112680 - protein, 352 aa, Escherichia coli CFT073
MLYYLHIRWITSMCKKTSGNRFHFAFQSSEVVMIKKIGVLTSGGDAPGMNAAIRGVVRSALTEGLEVMGIYDGYLGLYEDRMVQLDRYSVSDMINRGGTFLGSARFPEFRDENIRAVAIENLKKRGIDALVVIGGDGSYMGAMRLTEMGFPCIGLPGTIDNDIKGTDYTIGFFTALSTVVEAIDRLRDTSSSHQRISVVEVMGRYCGDLTLAAAIAGGCEFVVVPEVEFSREDLVNEIKAGIAKGKKHAIVAITEHMCDVDELAHFIEKETGRETRATVLGHIQRGGSPVPYDRILASRMGAYAIELLLAGYGGRCVGIQNEQLVHHDIIDAIENMKRPFKGDWLDCAKKLY

SEQ ID NO: 112681 - DNA, 1209 bp, Bradyrhizobium japonicum USDA 110
  CDS (1)..(1209): transl_table=11
atgccgatccgggaggtggatatggcaagaaaacgcatcggcattctcacgggcggtggcgacgtcgccggcctcaatgcagtcatcaagagcgtgacttatcgcggcagtgaggacgacatcgaggttgtcggtctgcgccgtggttgggaggccctcacgcacctgaacctcgacgacccaaacagcaggtcccactacgtcatcccgctgaaccgtgaaaacacgcgaaccatcgaccggcgcggcggcaccgtgctgcactcgagccgcgtcaatccctccaaaatacaaaagctgcccggtcatctcgtcggcaatgaggttccggtctcgctgagcaccaacggcggcatcgcgacaaagacatgggacctcaccagccgggtgctcgctaacctttcgggacttggcatcgaacacctgatcgccatcggtggcgacgacacgctcagttatgcggccaagctcaacgaactcggcgtcaagatcatcgccatcccgaagacgatggataatgacgtccgcaacaccgagtactgcatcggcttctcgaccgcgatcacccgcgccagcgatgccatccagcggcagcgcaccaccgtcggctcgcatgagcgaattggcattttccgcgtctttggtcgcgatgccggatttacggcactctacaccgcgtatgcgacctcgatacgatgcctcataccggagcataaggtcgacctcgacaagctgatccagttgctcatcgaggacaagcgcgccaatccaagcaactacgcgctgatcgtgctcagcgagggagctcagtgggaaggctacaagctgcgggaatacggcgagcctgacgcctacggtcaccgcaagaaggccaacgtggcggaatcgcttgccgacgagatcaagcagcgcaccggcgaggagacgatcacctccgatctcacctacgatctgcgatcgggcgatccggacttcatcgacaagcttgtggccctgactttcggtaacatggcctacgatgccatgctggaaagcaagaccggcctcatgtcggcgctggtcgagggccgctacgacctcgtgcccatccctgacgccaagctcggtccgcgcaaattggacgttgcgagcagctacaacacggagcgctaccgccccatctacgccaacaagcaggggctgccgatctttctcaaccgcgcgtcttag

SEQ ID NO: 112682 - protein, 402 aa, Bradyrhizobium japonicum USDA 110
MPIREVDMARKRIGILTGGGDVAGLNAVIKSVTYRGSEDDIEVVGLRRGWEALTHLNLDDPNSRSHYVIPLNRENTRTIDRRGGTVLHSSRVNPSKIQKLPGHLVGNEVPVSLSTNGGIATKTWDLTSRVLANLSGLGIEHLIAIGGDDTLSYAAKLNELGVKIIAIPKTMDNDVRNTEYCIGFSTAITRASDAIQRQRTTVGSHERIGIFRVFGRDAGFTALYTAYATSIRCLIPEHKVDLDKLIQLLIEDKRANPSNYALIVLSEGAQWEGYKLREYGEPDAYGHRKKANVAESLADEIKQRTGEETITSDLTYDLRSGDPDFIDKLVALTFGNMAYDAMLESKTGLMSALVEGRYDLVPIPDAKLGPRKLDVASSYNTERYRPIYANKQGLPIFLNRAS

SEQ ID NO: 112683 - DNA, 963 bp, Enterococcus faecalis V583
  CDS (1)..(963): transl_table=11
atgaaacgcattggtattttaaccagcgggggagatgcccctggaatgaacgctgcaattcgtgcagtcgtacgcaaaagtatttttgatggaatcgaagtttacggtattaactatggatttgccggtttagtcgcaggcgacatccgtcgtttagatgttgctgacgttggcgataagattcaacgtggtggaacattcttgtattctgctcgttatcctgaatttgctactgaagaagggcaattaaaaggaatcgaacaattgaaaaaattcggtattgaaggcttagttgttattggtggagacggttcttatcatggcgcaatggctttgacaaaacgtggtttccccgctgttggaattcctggaacgattgataatgatattcctggaacagatttcacaatcggttttgatacagcgattaacactgttttggaatcaattgaccgaattcgtgatacagcgacttctcatgttcgtacattcgttatcgaagtaatgggacgtaacgctggtgatatcgcattgtggtcaggcgtggcaggcggagcagatgaaatcattattcctgaacatgattttgatatgaaaaacgttgccaaacgtattcaagaaggccgcgaccgcgggaaaaaacattgcttaatcattttagcagaaggcgtaatgggcggaaatgaatttgctgataaactttctgaatacggtgatttccatacgcgtgtatcaattttaggacacgtggttcgtgggggctcgccaagtgctcgtgaccgtgtattagcaagtaaatttgggtcatatgctgttgaacttctaaaagaaggcaaaggcggtttatgtatcggtatgttagataaccaagtagttgcagctgatattattgacacgttagaaaacaataaacataaaccagatttatctctttatgagttaaatcatgaaatttctttttaa

SEQ ID NO: 112684 - protein, 320 aa, Enterococcus faecalis V583
MKRIGILTSGGDAPGMNAAIRAVVRKSIFDGIEVYGINYGFAGLVAGDIRRLDVADVGDKIQRGGTFLYSARYPEFATEEGQLKGIEQLKKFGIEGLVVIGGDGSYHGAMALTKRGFPAVGIPGTIDNDIPGTDFTIGFDTAINTVLESIDRIRDTATSHVRTFVIEVMGRNAGDIALWSGVAGGADEIIIPEHDFDMKNVAKRIQEGRDRGKKHCLIILAEGVMGGNEFADKLSEYGDFHTRVSILGHVVRGGSPSARDRVLASKFGSYAVELLKEGKGGLCIGMLDNQVVAADIIDTLENNKHKPDLSLYELNHEISF

SEQ ID NO: 112685 - DNA, 981 bp, Coxiella burnetii RSA 493
  CDS (1)..(981): transl_table=11
gtgaccgaaataaaaaaattaatagtgcttacttctggaggcgatgcacctggcatgaatgctgcaatccgtgctgttgtgcgaacagcgctccattatcaatttgaagtttacggtgccacagccggttttgctggtttagttaacgggcaggtcgttcctctcaattcgcgcgcggttgccaattgcatccagcgtggcggtacaattttaaaaacggggcgtttcgaaaattttcgtttcaaagcagtccgtgacaaagcgcgggaatttttaaaaaaattgcaaatcgatgccatgatcgttctcggcggcaacggcagttttgcgggcgcttcaaaactgtaccaagaaggcggacctcaaatgattgggattccatgcactatcgataacgacattcaaggaacggattattgcattggttttgatacggcttgtaatacagctttgcaagctatcgataaaattcgcgatacggcattcagccacgagcgaaattttttaattgaggttatggggcggtcttccggttttatcgcggtgaatgtcggcatcgctggcggtgcggaaatcattgcgctacctgaatttcacgtcgatattgatacattgacgcaaaaaattaaaaaacaacacggtaaaaaatcagcctccattattgtcgctgctgaagccaatcaacccggccacagctttgaagtcgccaaacaaataaaagaaaaaaccggcatcgaataccgcgtctgcgtcctcggccacacccaacgcggcggaaccccaacggtaaaagatcgcgtgcttgcttctctgatgggagcacaggccattgaagcactaaaaaaaggattaaccgaaaagatgatcgcttatcaaaatggtaaaatagctgttgcgcccctgccggatcccgacaacggaacgcgatattttgctgatgaggccttgttaagggttaataatattatttgcgccatgtga

SEQ ID NO: 112686 - protein, 326 aa, Coxiella burnetii RSA 493
MTEIKKLIVLTSGGDAPGMNAAIRAVVRTALHYQFEVYGATAGFAGLVNGQVVPLNSRAVANCIQRGGTILKTGRFENFRFKAVRDKAREFLKKLQIDAMIVLGGNGSFAGASKLYQEGGPQMIGIPCTIDNDIQGTDYCIGFDTACNTALQAIDKIRDTAFSHERNFLIEVMGRSSGFIAVNVGIAGGAEIIALPEFHVDIDTLTQKIKKQHGKKSASIIVAAEANQPGHSFEVAKQIKEKTGIEYRVCVLGHTQRGGTPTVKDRVLASLMGAQAIEALKKGLTEKMIAYQNGKIAVAPLPDPDNGTRYFADEALLRVNNIICAM

SEQ ID NO: 112687 - DNA, 1029 bp, Streptomyces avermitilis MA-4680
  CDS (1)..(1029): transl_table=11
atgcgggtcggagtactgaccggaggcggcgactgccccgggctcaacgccgtcatccggggcgtcgtccgtaagggcgtgcaggagtacggctacgacttcgtcggcttccgggacggctggcggggaccactcgaaggcgacgccgtacggctcgacatccccgcggtgcgcggcatcctgccccgcggcggcacgatcctcggctcctcgcgcaccaaccccctcaagctcgacgacggcatccgccggatcaaggagaacctcgccaagcaggaggtcgacgcgctcatcgcgatcggcggcgaggacacgctcggcgtcgccgcacgcctcaccgacgagtacggcgtgcccgtcgtcggcgtcccgaagaccatcgacaacgacctgtcggccaccgactacacgttcggcttcgacacggccgtcggcatcgcgaccgaggccatcgaccgcctccacaccaccgccgagtcccacatgcgcgtcctcgtctgcgaggtgatgggccggcacgcgggctggatcgccatccactcgggcctggccggcggcgccaacgtcatcctcatccccgagcagcgcttcgacgtcgaccaggtgtgcgcctatgtgacctcgcggttcaaggcctcgtacgcgccgatcgtggtcgtcgccgagggcgcgatgcccaaggacggccagatggtcctcaaggacgagtccctcgactccttcggccacgtgcgcctctccggggtcggcgagtggctggccaaggagatcgagaagcgcaccggcaaggaggcccgcaccacggtcctcgggcatgtgcagcgcggcggcacgccgagcgcgttcgaccgctggctcgccacccgcttcggcctgcacgccatcgaggccgtccgcgacggcgacttcggcaagatggtcgccctgcgcggcacggacatcgtccgtgtcccgatcgcggaggccacggcgaagctgaagacggtcgatccgaagctgtacgaggaggtcggggtcttcttcggctga

SEQ ID NO: 112688 - protein, 342 aa, Streptomyces avermitilis MA-4680
MRVGVLTGGGDCPGLNAVIRGVVRKGVQEYGYDFVGFRDGWRGPLEGDAVRLDIPAVRGILPRGGTILGSSRTNPLKLDDGIRRIKENLAKQEVDALIAIGGEDTLGVAARLTDEYGVPVVGVPKTIDNDLSATDYTFGFDTAVGIATEAIDRLHTTAESHMRVLVCEVMGRHAGWIAIHSGLAGGANVILIPEQRFDVDQVCAYVTSRFKASYAPIVVVAEGAMPKDGQMVLKDESLDSFGHVRLSGVGEWLAKEIEKRTGKEARTTVLGHVQRGGTPSAFDRWLATRFGLHAIEAVRDGDFGKMVALRGTDIVRVPIAEATAKLKTVDPKLYEEVGVFFG

SEQ ID NO: 112689 - DNA, 1026 bp, Streptomyces avermitilis MA-4680
  CDS (1)..(1026): transl_table=11
atgcgcattggtgtcctcacgtccggtggcgactgccccggcctgaacgccgtcatccggtccgtcgtgcaccgggccgtcgtcgaccacggcgacgaggtcatcggcttccgggacggctggaagggcctcctggagtgcgactacctcaagctcgacctcgacgcggtgagcggaatcctggctcgcggcggcaccatcctcggctcctcccgggtccagccggcgcatctgcgtgacggcgtggagcgggccaggggccatgtcgcggagctcggcctcgacgcgatcatcccgatcggcggcgagggcacgctcaaggcggcccgcctcctgtcggacgccggcctgccgatcgtcggcgtgccgaagaccatcgacaacgacatcgcggtcaccgacgtgaccttcggtttcgacaccgccgtgggcgtcgcgaccgaggcgctcgaccggctgaagaccaccgccgagtcccaccagcgcgtcctcatcgtggaggtcatgggccgccacaccggctggatcgcgctgcactcgggcatggcggcgggcgcccacgccatcgtcgtaccggaacgccccttcgacatcgaggaactggccgccaaggtcggcgagcgcttcgaggcgggcaagcggttcgcgatcgtggtggccgccgagggcgccaagccccgtgcgggctcgatggacttcgacgagggcaagaaggacgtctacggccacgagcgcttcgccggcatcgcccgccagctctccctggagctggaggagcgcctcggcaaggaggcccggccggtgatcctcggacatgtccagcgcggcggcactccgacggcgtacgaccgcgtcctcgcgacccgtttcggctggcatgccgtggaggccgtgcaccggggcgagttcggcaagatgaccgcgctgcgcggcaccgacatcgtgatggtctcgctcgccgaggcggtcgagacgctgaagacggtccccgaggagcggtacgccgaggcggagtgcgtcctgtaa

SEQ ID NO: 112690 - protein, 341 aa, Streptomyces avermitilis MA-4680
MRIGVLTSGGDCPGLNAVIRSVVHRAVVDHGDEVIGFRDGWKGLLECDYLKLDLDAVSGILARGGTILGSSRVQPAHLRDGVERARGHVAELGLDAIIPIGGEGTLKAARLLSDAGLPIVGVPKTIDNDIAVTDVTFGFDTAVGVATEALDRLKTTAESHQRVLIVEVMGRHTGWIALHSGMAAGAHAIVVPERPFDIEELAAKVGERFEAGKRFAIVVAAEGAKPRAGSMDFDEGKKDVYGHERFAGIARQLSLELEERLGKEARPVILGHVQRGGTPTAYDRVLATRFGWHAVEAVHRGEFGKMTALRGTDIVMVSLAEAVETLKTVPEERYAEAECVL

SEQ ID NO: 112691 - DNA, 1614 bp, Arabidopsis thaliana
  CDS (1)..(1614)
atggatgctctttctcaggcgatcagttccgggatctccgttccttacaagaacaattcttcttctctcgttccttctcacggactcacctccttaatcctccggaaatcgagatctccggtgaatccctcatcacgatctcgcgtctcggtgcgagcttcggagattcaacacagcaaaacctcagcttcatcgatcgatctcagcgatccagattggaaattaaagtatgagaaagatttcgagcaacgattcagcatacctcacatcactgatgtcttacctgatgctgaagccattcgttcaacgttttgtcttaagatgaggtctccgacggaagattttgttggtggttacccttctgatgaagaatggcatggatacattaataacaatgatagagttcttctcaaggttattagttactcctcacctacttctgctggagctgagtgccttgatcatgactgttcttgggttgaacaatggattcaccgtgctggtccgagggagaagatatacttcaggccggaagaagtgaaagctgcgattatcacttgtggtggcctttgccctggtctcaatgatgtcatcagacatattgtcattactcttgagatttatggtgttaagaacattgtggggattcctttcggttatcgaggcttctctgataaagatctaactgaaatgccgttatcaaggaaagtggttcagaatattcatttatctggaggaagtttgcttggagtttcacgtggaggcccgagtgtgagtgaaattgtcgacagcatggaggagagaggaatcaacatgcttttcgtgctcggtggaaacggaactcatgctggcgccaacgctatacacaatgagtgccgcaaaagaaagataaaggtagctgtagttggtgtgccaaaaaccatcgacaatgatattttacatatggataaaacttttgggtttgatactgctgttgaagaagctcaacgagcaattaactctgcttacattgaggcacatagtgcttatcatggcattggcgttgtaaaactgatgggtcgtaacagtggtttcattgctatgcaagcctctctagcaagtggacaagtcgacatctgtttgattcctgaggttcccttcaatcttcatgggcctaatggtgtattgaagcatttgaagtaccttattgaaacaaaaggctctgctgtgatctgtgtagcagaaggagctggacagaattttcttgagaaaaccaatgccaaagatgcatctggaaacgccgtacttggtgatttcggtgtgtatattcaacaagagactaagaagtatttcaaagaaataagtactccaatagatgtgaagtatattgatccaacatacatgattcgcgctgtacgtgcaaatgcctcggatggtatcctctgcaccgttcttggacaaaacgctgttcatggtgcgtttgctggatacagtggaatcacggtaggcataatcaacactcactatgcatatttgccaatcactgaggtaattgcatatccaaaatcagtggatcctaatagtcgaatgtggcatcgttgcttgacatcaacgggccaacccgatttcatctaa

SEQ ID NO: 112692 - protein, 537 aa, Arabidopsis thaliana
MDALSQAISSGISVPYKNNSSSLVPSHGLTSLILRKSRSPVNPSSRSRVSVRASEIQHSKTSASSIDLSDPDWKLKYEKDFEQRFSIPHITDVLPDAEAIRSTFCLKMRSPTEDFVGGYPSDEEWHGYINNNDRVLLKVISYSSPTSAGAECLDHDCSWVEQWIHRAGPREKIYFRPEEVKAAIITCGGLCPGLNDVIRHIVITLEIYGVKNIVGIPFGYRGFSDKDLTEMPLSRKVVQNIHLSGGSLLGVSRGGPSVSEIVDSMEERGINMLFVLGGNGTHAGANAIHNECRKRKIKVAVVGVPKTIDNDILHMDKTFGFDTAVEEAQRAINSAYIEAHSAYHGIGVVKLMGRNSGFIAMQASLASGQVDICLIPEVPFNLHGPNGVLKHLKYLIETKGSAVICVAEGAGQNFLEKTNAKDASGNAVLGDFGVYIQQETKKYFKEISTPIDVKYIDPTYMIRAVRANASDGILCTVLGQNAVHGAFAGYSGITVGIINTHYAYLPITEVIAYPKSVDPNSRMWHRCLTSTGQPDFI

SEQ ID NO: 112693 - DNA, 963 bp, Candidatus Blochmannia floridanus
  CDS (1)..(963): transl_table=11
atgataaagaaaataggagtgttaacaagtggtggtgattctccaggaatgaatgcggctattcgaggagtagttcgggctggtttatctgaaggaatagaagtatatggaatatatgatggttatttagggttgtttcagaatcgtatgatgttattgagttattgtagtgtgtcagatataattaataaaggtggaacagttttaggatcttctcgttttcctgaattaaaaaaagatatgattagatctgtagtaatgaataatataagtaagagtcatcttgatgctttagtgataattggaggagatggatcttatataggagcaagacggttaagtgatttgggttgtccttgtattgggattccgggtacaattgataatgatgtagctggaacagattatactattggttattttacagcattggaaactattattgaggcaattgatcgattaagagatacttcttcatctcatcaacgtatttctattgtagaggtaatgggtcgttattgtggtgatttaactatatctgccgctatagcaggtggttgtgagtttgttattattccagaattaaagtttcaaatgcaagatttagtagataaaattaagttaaatatttctaaaggaaaaaaacatgctatagttgctataactgagcgtatttgtaatgtttttgatttagctcagtatattgaaaatgaaactggaaaagaaacccgggctactgttttaggtcatattcaacgtgggggaaagccagttgcatatgataggattttggcatctagaatgggggcgtattctattgagttgttgttaaaaggttatggtagacattgtattggtatagaaaatgaaaagttagttcatcatgatattaatgatgctacaaagtatatgcgtcgttcatttcggcaagatctattaacaacggctaaaaagttgtgttaa

SEQ ID NO: 112694 - protein, 320 aa, Candidatus Blochmannia floridanus
MIKKIGVLTSGGDSPGMNAAIRGVVRAGLSEGIEVYGIYDGYLGLFQNRMMLLSYCSVSDIINKGGTVLGSSRFPELKKDMIRSVVMNNISKSHLDALVIIGGDGSYIGARRLSDLGCPCIGIPGTIDNDVAGTDYTIGYFTALETIIEAIDRLRDTSSSHQRISIVEVMGRYCGDLTISAAIAGGCEFVIIPELKFQMQDLVDKIKLNISKGKKHAIVAITERICNVFDLAQYIENETGKETRATVLGHIQRGGKPVAYDRILASRMGAYSIELLLKGYGRHCIGIENEKLVHHDINDATKYMRRSFRQDLLTTAKKLC

SEQ ID NO: 112695 - DNA, 1218 bp, Chromobacterium violaceum ATCC 12472
  CDS (1)..(1218): transl_table=11
atgaccaagccaagagccgtatatctgcaatccggcggacccaccgccgttctgaacgcttccgcccagggcgcgattgaaaccgcgcgtcgcctcggcctttccttgtacgccgcttacgatggcctggcgggattgctggatggccgcctgtgcgataccgacggcgtgtccgacaccgccatcgcccagctggccttcatgcccggcggcagcttcggcgtcagccgccgcatgataggcacgttcgaggaagcgccggaagactggctgcggctgcgcgacgtgctggccaagcacgacatccactacctgctgatcaacggcggcaacggttcgctgggctgcgccgagcgcctggtcgatttcgaaaagcacaccggctacaagctgggcgtgatcggcatccccaagaccatagacaacgacctggtcggcaccgacaacagccccggctacggctcctccgccaaattcctggccagcgcgatgcgcgaggtcggcctggacatgaccagtatgggctggggccgggtgttcatcatggaaaccatgggccgccacaccggctggctggcggccgcctgcgccgccgcctcccgcaatccgcacgaagcgccgcatttgctgctgttgcccgaggtgccgttcgaccaggcgcgcttcctggcggcgctggacgccagcctggcgaagtacggccagtgcgcgatcgcggtggccgaaggcatcaccggccaggacggccgcttcgtcgccgaggccaagaagtccgaaacctacggccacgagcaactgggcggcgccggccactggctggcccagctgatcctgcgcgagcgcggcatctccgcccacgtggcgcaggtggactatctgcagcgcgccggcggccacctggcttccgccaccgacgtccgccaggcctacgtgatgggcgagagggcggtggagtggctgctggccggcaagaccggcctgatggccggcatcaggcggctgaacgaccatccttactgctgggacgtggccgaagtgccgctgtcggcggtgggcgacaaggagaagcggctgccgccggagttcatcggcgccgacggcttcagcgtcacccaggctttcctggactacgtgaagccgttgatagagggcgagcgcatcccgccgttcaaggacggcttgccggactaccgcccgatcgcctggccgcgggtctga

SEQ ID NO: 112696 - protein, 405 aa, Chromobacterium violaceum ATCC 12472
MTKPRAVYLQSGGPTAVLNASAQGAIETARRLGLSLYAAYDGLAGLLDGRLCDTDGVSDTAIAQLAFMPGGSFGVSRRMIGTFEEAPEDWLRLRDVLAKHDIHYLLINGGNGSLGCAERLVDFEKHTGYKLGVIGIPKTIDNDLVGTDNSPGYGSSAKFLASAMREVGLDMTSMGWGRVFIMETMGRHTGWLAAACAAASRNPHEAPHLLLLPEVPFDQARFLAALDASLAKYGQCAIAVAEGITGQDGRFVAEAKKSETYGHEQLGGAGHWLAQLILRERGISAHVAQVDYLQRAGGHLASATDVRQAYVMGERAVEWLLAGKTGLMAGIRRLNDHPYCWDVAEVPLSAVGDKEKRLPPEFIGADGFSVTQAFLDYVKPLIEGERIPPFKDGLPDYRPIAWPRV

SEQ ID NO: 112697 - DNA, 960 bp, Wolinella succinogenes DSM 1740
  CDS (1)..(960): transl_table=11
atgaggatcgggcttgtttgctctgggggagattgcgcggggatgaaccccgccaccaaaaaattcgttgaatattcactagagttgggctatgagccctactttatccgcgaaggtttagagggcttgatcgaagggaagattgagcccgccaccctcaaagaggtctctggaattcttcataaaggaggcaccatcctccaatcttctcgctccaaacgcttttttgatccagcctttcgtctccaagcctaccaaaatctccagcgccactccatcgaagcgttagtaactctagggggtgatggctcttttagggcgatggaggttttggccaaagaacactccctgctctatgcagggattcccgccacaattgataatgacatccgtgcaagcgattacgctctaggtgtggatagtgcacttaatgtgattttggagagcacggatagacttcgagataccgccgaatcatttcgtcgagcgtttgtggtggaggtgatggggagagattgtggctatttggcattagcaagcgcgatcgcttgtggggcggaagtctgcatcatccctgagatgggctattcgctccaaagccttggcgcaaggctcaaagaggagctaggcacaggcaagcgccgctatgtattagccatcgtctctgagggagccaaagcctcttcagaggttgtctcttggctcaaggaagaggtgggaatcgagacgagaatcacgattcttgggcatgttcagcgaggagggtcgccgagtgtttatgaccgtttgatgggttttcgattcatgcaaaaggcactcgattctctttcgctaggcaagagtggcgtggtggtattgcgcgaggggagggtggagtttctctcttcacaagaggcctcatctgcccccgcatcactgcccttggatatggtgaggctggcttcgcgcctcatgttttga

SEQ ID NO: 112698 - protein, 319 aa, Wolinella succinogenes DSM 1740
MRIGLVCSGGDCAGMNPATKKFVEYSLELGYEPYFIREGLEGLIEGKIEPATLKEVSGILHKGGTILQSSRSKRFFDPAFRLQAYQNLQRHSIEALVTLGGDGSFRAMEVLAKEHSLLYAGIPATIDNDIRASDYALGVDSALNVILESTDRLRDTAESFRRAFVVEVMGRDCGYLALASAIACGAEVCIIPEMGYSLQSLGARLKEELGTGKRRYVLAIVSEGAKASSEVVSWLKEEVGIETRITILGHVQRGGSPSVYDRLMGFRFMQKALDSLSLGKSGVVVLREGRVEFLSSQEASSAPASLPLDMVRLASRLMF

SEQ ID NO: 112699 - DNA, 972 bp, Photorhabdus luminescens subsp. laumondii TTO1
  CDS (1)..(972): transl_table=11
atgagcaatgagatcaaaagaatcggtgtcttaacgagtggcggtgatgcgccgggtatgaatgcagctattcgtggtgtggttcgtgcgggattaaccgaagggttggaagttttcggtatttatgatggctatcttggcttgtatgaaaaccgtatgaagaaacttgaccgttttagtgtatccgacatgattaaccgtggtggtacttttctaggttcagcccgtttccctgagttcagggatgagaaggttcgtactgtcgctattgagaacatgagaaaaaatggtcttgatgctctggtcgttatcggcggtgacggttcctatcttggcgcgaaaaaactgacagaagcgggtttcccctgcattggcctgccgggcactattgataatgatgtggcgggtaccgactataccatcggctatttcactgcgctggaaactgtggttgaagcgattgaccgtctgcgtgatacctcgacttcccacaaacgtatttccattgttgaagtaatgggacgttattgtggtgatctcactttgtcagccgctattgcaggcggttgtgagtttattgttttaccggaagtctcatttagttgtgatgagctcgtagctgaaattaaagcgggtatcgataaaggcaaacgccacgccatcgttgcaattaccgaacatgtttgtgatgtttatgaacttgcgaaacatatcgaaaaagagacgcatcatgaaacccgtgccacagtcttaggccatgttcagcgtggtggttccccagttgcctatgatcgtattctggcttcccgtatgggggcatattccattcaattactgttggaaggttatggtggtcgttgtgttggtattcagaacgagaaacttgttcatcatgacatcattgatgcagtgcaaaatatgaaacgtgtgtttaaacaggattggttggaaaccgcgaaaaagttgtattga

SEQ ID NO: 112700 - protein, 323 aa, Photorhabdus luminescens subsp. laumondii TTO1
MSNEIKRIGVLTSGGDAPGMNAAIRGVVRAGLTEGLEVFGIYDGYLGLYENRMKKLDRFSVSDMINRGGTFLGSARFPEFRDEKVRTVAIENMRKNGLDALVVIGGDGSYLGAKKLTEAGFPCIGLPGTIDNDVAGTDYTIGYFTALETVVEAIDRLRDTSTSHKRISIVEVMGRYCGDLTLSAAIAGGCEFIVLPEVSFSCDELVAEIKAGIDKGKRHAIVAITEHVCDVYELAKHIEKETHHETRATVLGHVQRGGSPVAYDRILASRMGAYSIQLLLEGYGGRCVGIQNEKLVHHDIIDAVQNMKRVFKQDWLETAKKLY

SEQ ID NO: 112701 - DNA, 969 bp, Vibrio vulnificus YJ016
  CDS (1)..(969): transl_table=11
gtgagcatgattaagaagatcggtgttttgacaagtggtggtgacgcccctggtatgaacgcagcaatccgtggtgtggtacgtactgcactgggtgctggtcttgaagtttatggtatctatgatggctacctaggcttgtacgaaggccgtattaaacaacttgatcgttcaagcgtttctgatgtgattaaccgtggtggtacattcttgggatcagctcgtttcccagaatttaaagaagttgcggtacgtgaaaaagcgattgaaaacctaaaagcacacggtattgacgcgcttgtggttatcggcggcgacggttcgtacatgggtgcgaagaaactgactgaaatgggttacccatgtatcggtctaccaggcacgattgacaacgatatcgcaggtacggattacaccatcggttacctaacggcgctgaacacggttatcgaatcgatcgaccgtctacgcgatacttcatcttctcaccagcgtatttctatcgtagaaatcatgggtcgtcactgtggtgacctcactctgatgtctgctatcgcaggtggctgtgaatacatcatcacaccagaaactggcctagataaagagaagctgattggcaacatccaagacggcatttctaaaggtaagaaacatgcgatcatcgcgctgactgagctgatgatggacgcgaacgaactggcaaaagagatcgaagcgggaacgggtcgtgaaactcgtgccacggttcttggtcacatccaacgtggtggccgtccaacggcgttcgaccgtgttcttgcgtctcgtatgggtaactacgcggttcacctattgatggaaggtcatggtggccgttgtgttggtatcgtgaaagagcaacttgttcaccacgacatcatcgatgcaatcgagaacatgaagcgtccagttcgcaatgatctgttcaaagtagcagaagagctattctaa

SEQ ID NO: 112702 - protein, 322 aa, Vibrio vulnificus YJ016
MSMIKKIGVLTSGGDAPGMNAAIRGVVRTALGAGLEVYGIYDGYLGLYEGRIKQLDRSSVSDVINRGGTFLGSARFPEFKEVAVREKAIENLKAHGIDALVVIGGDGSYMGAKKLTEMGYPCIGLPGTIDNDIAGTDYTIGYLTALNTVIESIDRLRDTSSSHQRISIVEIMGRHCGDLTLMSAIAGGCEYIITPETGLDKEKLIGNIQDGISKGKKHAIIALTELMMDANELAKEIEAGTGRETRATVLGHIQRGGRPTAFDRVLASRMGNYAVHLLMEGHGGRCVGIVKEQLVHHDIIDAIENMKRPVRNDLFKVAEELF

SEQ ID NO: 112703 - DNA, 1029 bp, Corynebacterium diphtheriae NCTC 13129
  CDS (1)..(1029): transl_table=11
atgcgaattgcgactcttacatccggcggcgattgccccggcctcaacgctgtgatccgcggcattgtccgcacatgttctgagtacggctcgaccgtcgttggataccaagacggctgggtggggctcatggaagacaagcgcattcaactatatgacgatgaaaacatcgatcgtatcctgttgcgcggcggaaccattttgggtaccggccgccttcaccctgacaagtttaagtctggtcttgaccagattaaggcaaaccttgaggatgcaggtattgatgcactgattcctatcggtggcgaaggtacactcaagggtgccaaatggctatctgataatggtattcctgtagttggcgtgcctaagacgatcgacaacgacgttaacggtacggactacacttttggctttgataccgcagtctctgttgctacggatgctatcgaccgactgcacaccacagctgagtctcacaaccgtgtgatgatcgttgaggttatgggtcgtcacgttggctggattgcgctgcacgccggcatggcaggcggtgcgcattacacagtcattcctgagcagccatttgatattgcagagatctgcaaggcaatggaacgccgcttccagatgggtgaaaagtacggcattatcgtcgtggcggaaggtgcattgcctaaggaaggcacgatggactttgtcgagggcggcgtcgaccaatttggccaccaaacgtttaatggcattggtcaagtaattggtgaggaaatcaagaagcgcctcggccatgacgttcgtaccacggttttgggtcatatccagcgtggtggcacacctacttcttatgaccgcgttttggctacccgttacggtgttcatgccgcacgtgcgtgccacaacggcgattacggcaagatggttgcgttgcacggtgaacatatcgatctgattccgctcgaggacgcggtagatacgctaaagactgtcccggaaggacgctaccgcacagcacgcgccctgtttggctaa

SEQ ID NO: 112704 - protein, 342 aa, Corynebacterium diphtheriae NCTC 13129
MRIATLTSGGDCPGLNAVIRGIVRTCSEYGSTVVGYQDGWVGLMEDKRIQLYDDENIDRILLRGGTILGTGRLHPDKFKSGLDQIKANLEDAGIDALIPIGGEGTLKGAKWLSDNGIPVVGVPKTIDNDVNGTDYTFGFDTAVSVATDAIDRLHTTAESHNRVMIVEVMGRHVGWIALHAGMAGGAHYTVIPEQPFDIAEICKAMERRFQMGEKYGIIVVAEGALPKEGTMDFVEGGVDQFGHQTFNGIGQVIGEEIKKRLGHDVRTTVLGHIQRGGTPTSYDRVLATRYGVHAARACHNGDYGKMVALHGEHIDLIPLEDAVDTLKTVPEGRYRTARALFG

SEQ ID NO: 112705 - DNA, 999 bp, Onion yellows phytoplasma OY-M
  CDS (1)..(999): transl_table=11
atgaaaaatgaaaaccaaaaagcaaaaacaaaaacaaaagaaaacaaaaaaattgctgtgttaacttcaggcggcgatgctcctggaatgaatgcagctattcgtgctttagtttttgaaagcgctaaacaaggatttgaagttttcggcgtaaaagatggttatttaggactttttaataaccaaatcgaaatcttaaatcctcaaacatttcctcgtgttcttaatgtgtctggtacttttttgggaacttctcgttttttagattttcaaaataatttagatgttcgcaagcaatgcgcccaaaatttaaaaactttaggaattgataaattagttgtaattggtggtgatggttcttataaaggagcatccaaattgcacgaacttggcatcaaatgcgtaggactgccagccaccattgacaatgatatttgtgccactgattttactattggatttagcactgctctcaataatattgtagatgccattgaaaaattgcgcgatacttctgtttctcacaaccgatgcagtattattgaagtgatgggacgccacaaaggggatttggctttatttggtggacttgctgcaggagcagacgttattgttactcgcgaaaatcttttatcccaaaaaactatttgccaaaaaattaaatctttgcgccaagcaaaccaaagacatgctattgtagttgtcactgaacatatttttgatgttgcaagtttagccaaagaggtagaaaattacagtggtttcgaaactagagcccaagttttaggacacattcaaagaggtggtaaaccaactgcagaagatctagtccttgcttttagaatgggaagttatgccgtttctttattgcaacaaaacatttttaattgtgctgttggcacttgcggacttaatttgcattacactacttttggtgatctttttgaaaaaacttatgaaaaaaatgaattatttaatgtagtagctaaattgttgtaa

SEQ ID NO: 112706 - protein, 332 aa, Onion yellows phytoplasma OY-M
MKNENQKAKTKTKENKKIAVLTSGGDAPGMNAAIRALVFESAKQGFEVFGVKDGYLGLFNNQIEILNPQTFPRVLNVSGTFLGTSRFLDFQNNLDVRKQCAQNLKTLGIDKLVVIGGDGSYKGASKLHELGIKCVGLPATIDNDICATDFTIGFSTALNNIVDAIEKLRDTSVSHNRCSIIEVMGRHKGDLALFGGLAAGADVIVTRENLLSQKTICQKIKSLRQANQRHAIVVVTEHIFDVASLAKEVENYSGFETRAQVLGHIQRGGKPTAEDLVLAFRMGSYAVSLLQQNIFNCAVGTCGLNLHYTTFGDLFEKTYEKNELFNVVAKLL

SEQ ID NO: 112707 - DNA, 1092 bp, Geobacter sulfurreducens PCA
  CDS (1)..(1092): transl_table=11
atggcgcgtaaagtaggcatactgaccggggggggagactgcccgggactcaatgcggtgatcaggggagttgtcaaaagctccatcatccggcgcggctgggaagtggtcggcatcagggacgggttcgacggcctgctctacaacaacagaatcgtaccgctcggtctcaatgaagtacgtggaatactcccccgcggcggaaccatcctcggtacgtccaatcgcggcaatcccttctcataccctgttgaagcggatggcaaaaccgttttaaccgatgtgtccgacgaggtcgtcgcgaacatcaaaaaacagggaatcgacgcgctcgtggcagtgggaggggacggctcgctcaagatcgcgcttgagctcatgaacaaggggattcccgttgtgggcgtgccgaagaccattgacaacgatctgatggagaccgatgtcacctttggctacaacaccgccctggaaaccgcaaccgatgccctggacaagcttcactccacggccgagagtcaccaccgggtcatgatcatggaggtcatggggcgctatgccggttggatcgctctcgaatcgggcatcagcggcggtgcggacgtcattctcatccccgagattccctacgatatcagtgccgtctgccgcgcggtcgacgagcggcgaagacggggaagctccttcagtatcatcgtggtggcggagggggcgttcccgcgcggcggcaaccgggtcgtgcagaagcgggccgatgaaacgaacaccatcgagcggcttggggggatcggtcaatacgtggcccggcagctgggagactgcctcgacatggatgttcgcgtcatggtcctgggccaccttcaacggggcggttcaccatcgacctttgaccgttgcctaggcagccgcttcggcgttgccgcaatagacctcattgaacaggaacagtatggacgcatggtctgtctgcgcggccgcgacatcaaatcggtatccatcgagcgggcggtgcggaagctgaaactggtgaaccccggcggtcagatggtgacggcggcggaagagctcggcatcgtggtggggcggcggtga

SEQ ID NO: 112708 - protein, 363 aa, Geobacter sulfurreducens PCA
MARKVGILTGGGDCPGLNAVIRGVVKSSIIRRGWEVVGIRDGFDGLLYNNRIVPLGLNEVRGILPRGGTILGTSNRGNPFSYPVEADGKTVLTDVSDEVVANIKKQGIDALVAVGGDGSLKIALELMNKGIPVVGVPKTIDNDLMETDVTFGYNTALETATDALDKLHSTAESHHRVMIMEVMGRYAGWIALESGISGGADVILIPEIPYDISAVCRAVDERRRRGSSFSIIVVAEGAFPRGGNRVVQKRADETNTIERLGGIGQYVARQLGDCLDMDVRVMVLGHLQRGGSPSTFDRCLGSRFGVAAIDLIEQEQYGRMVCLRGRDIKSVSIERAVRKLKLVNPGGQMVTAAEELGIVVGRR

SEQ ID NO: 112709 - DNA, 960 bp, Geobacter sulfurreducens PCA
  CDS (1)..(960): transl_table=11
atgaaaaaaatcggcatactcaccagcggcggcgactgctcgggcatgaacgccgctatccgggccgcggtgcgcacggctatccgcatgaatatcgaagtggtcggtttccgcaagggctaccttgggctcatgaagggggatgccatccccctggacaccaaggcggtctcgggcattctccaccgggggggcacctttctccagtcggctcgctcccccgagttcaaaacaccggaaggacagcgcacggccctgaacaacctgaaggccctcggcgtcgagggaatggttgtaatgggcggcgacgggtcgctcaccggtgccctggccttgaaccgtctgggattgccggtggtaggcattcccgccagcatcgacaacgacatcccgttcaccgatatggcactgggggttgacacggccctcaacaacatcatctacgccgttgactgtatcaaggacacggccagctctcacgcgcgggcctttgtcatcgaggttatggggcgccattcgggctaccttgccagcatctccgccatcgccaccggcgccgagtacgcactggtccccgaacgggaatacgatctggccgagatctgtcagcagttgcgggcacgctacgaggaagggcgcgacaatgccatcatcattctggcggagggggccggtcatggccatgaaatcgccaacagcatcaaggacgccatcggcttcgagacgcgggtgacggtgctgggtcactaccagcgcggaggcgcgccgacggtatttgaccggctgttggcgagccgcttgggaaagaaatcagttgagctgctggtgacaggcacgtggggagtgatggtgggactgtcctgcaatgcaatcctcgccacccccctggaggatgtcatcaagggtgagaagcgtcctcaggacgaggtgctgcgcttggccgaggtgctgggcgtatga

SEQ ID NO: 112710 - protein, 319 aa, Geobacter sulfurreducens PCA
MKKIGILTSGGDCSGMNAAIRAAVRTAIRMNIEVVGFRKGYLGLMKGDAIPLDTKAVSGILHRGGTFLQSARSPEFKTPEGQRTALNNLKALGVEGMVVMGGDGSLTGALALNRLGLPVVGIPASIDNDIPFTDMALGVDTALNNIIYAVDCIKDTASSHARAFVIEVMGRHSGYLASISAIATGAEYALVPEREYDLAEICQQLRARYEEGRDNAIIILAEGAGHGHEIANSIKDAIGFETRVTVLGHYQRGGAPTVFDRLLASRLGKKSVELLVTGTWGVMVGLSCNAILATPLEDVIKGEKRPQDEVLRLAEVLGV

SEQ ID NO: 112711 - DNA, 969 bp, Bacillus methanolicus
  CDS (1)..(969): transl_table=11
atgaataagattgcagtattaactagcggcggggatgcaccaggaatgaacgctgctattcgtgcggtcgttcgaagaggaatctttaaaggactagatgtttatggtgtaaaaaatggctacaaaggtttaatgaatgggaattttgtttcaatgaacctcggaagtgtgggtgatattattcaccgaggaggcactatcttacaaactacacgctgtaaagagtttaagacagctgaagggcaacaacaggctttagcacagctaaaaaaagaaggcattgatggcttaatcgtgattggtggagatggcacttttgaaggtgcgagaaaattaactgcccaagagtttccaactattggtattccggcaaccattgacaatgacattgcagggacggaatatacaattggatttgatactgctgtgaacacagcagtggaagcaattgataaaattcgtgatacggcagcctctcatgatcgtatctatgtcgttgaagtaatgggccgcaatgcaggagacatcgctctatgggcaggaatgtgtgcgggagcagaatcaattattatcccagaagccgaccatgatgtggaagatgtaattgatcgtattaaacaaggatatcagcgaggaaaaacgcacagtattattgtggttgcagaaggggcatttaatggagtaggagcaatagaaattggtagagcaattaaagagaaaacaggatttgacacaaaggtaaccatacttgggcatattcaacgtgggggatctcctagcgcttacgaccgaatgatgagcagtcagatgggtgcaaaagccgtggatttgctggttgaaggcaaaaaaggtctgatggtaggattaaaaaatggtcaactgattcatacaccttttgaggaagctgcgaaagataagcatacggttgatttgtccatctaccatttagcaagaagtctttctttatag

SEQ ID NO: 112712 - protein, 322 aa, Bacillus methanolicus
MNKIAVLTSGGDAPGMNAAIRAVVRRGIFKGLDVYGVKNGYKGLMNGNFVSMNLGSVGDIIHRGGTILQTTRCKEFKTAEGQQQALAQLKKEGIDGLIVIGGDGTFEGARKLTAQEFPTIGIPATIDNDIAGTEYTIGFDTAVNTAVEAIDKIRDTAASHDRIYVVEVMGRNAGDIALWAGMCAGAESIIIPEADHDVEDVIDRIKQGYQRGKTHSIIVVAEGAFNGVGAIEIGRAIKEKTGFDTKVTILGHIQRGGSPSAYDRMMSSQMGAKAVDLLVEGKKGLMVGLKNGQLIHTPFEEAAKDKHTVDLSIYHLARSLSL

SEQ ID NO: 112713 - DNA, 960 bp, Lactobacillus johnsonii NCC 533
  CDS (1)..(960): transl_table=11
atgaaacggattggtattttaactagtggtggagatgcccctggtatgaacgctgccattagagctgtcactcgtacagctttggcaaacggtatcgaagtttgcggaattcgttatggatatgctggtttagttgctggtgatattttccaaatgacttctgaaacagttgcggataaaattagccgcggcggtacttttctttattcagctcgtttcccagaatttaaggaagaagaagttcaacttaagggaatcgaacaattaaagaagcacggaatcgatgctttggttgtcattggtggtgacggttcttaccacggtgcattgaagcttacaagacatggctataatgctattggtcttcctggttcaattgataacgatattccttatactgattacacaattggttttgacactgcatgtaatactgcaatggaagccattgataagatccgtgacactgcaacaagtcaccaacgtgtatttgttgtaaatgttatgggtcgtgattgtggggatatcgcaatgcacgttggtgttgctaccggtgctgacgcaattgttattccagaagaaccttatgacattaaggaaattgctgaaaacttgaagcaaggatttgctaatggtaagaaacatggaatcgttgttttagctgaaggtgttatggacgctgaaaaatttaaggatgaacttcttaaatatggtgactttgacgctcgtgctaatgtattgggccatatgcaacgtggcggaagcccaacaatgcgtgaccgtgtagtagcaagtgaaatgggtgcctacgctgttaagttattacttgaaggtaaaggcggcttagctgttggtatggaaaacaacaagcttactcaccatgatattcttgatttgtttgatgcaaaacaccacggtaattatgcgttatactcattaaacaaagacttagccaagtag

SEQ ID NO: 112714 - protein, 319 aa, Lactobacillus johnsonii NCC 533
MKRIGILTSGGDAPGMNAAIRAVTRTALANGIEVCGIRYGYAGLVAGDIFQMTSETVADKISRGGTFLYSARFPEFKEEEVQLKGIEQLKKHGIDALVVIGGDGSYHGALKLTRHGYNAIGLPGSIDNDIPYTDYTIGFDTACNTAMEAIDKIRDTATSHQRVFVVNVMGRDCGDIAMHVGVATGADAIVIPEEPYDIKEIAENLKQGFANGKKHGIVVLAEGVMDAEKFKDELLKYGDFDARANVLGHMQRGGSPTMRDRVVASEMGAYAVKLLLEGKGGLAVGMENNKLTHHDILDLFDAKHHGNYALYSLNKDLAK

SEQ ID NO: 112715 - DNA, 990 bp, Bdellovibrio bacteriovorus HD100
  CDS (1)..(990): transl_table=11
atggctcagtttgataagaaaattcagaaaattggtgtgtacacaagcggcggcgatgccccgggtatgaatgcggcaatccgcgcagtggtgcgtgtggggatctcgcaaaaacttgaagtgtacggaattcataatggctatgttggcatgatcgaaaacaagatcgagcctttgcaattgcgtgacatggccaacatcatccagcgcggcggtacaatcctgaaaaccggtcgctccactgaattcatgcgccccgaaggccgggcccgtgccgctcagaatatcaaaaatttgggacttgatgccctggtctgcatcggtggtgatggctccttccgtggtgctcacgccctttgggaagaacatcagatccccgtcgtcggcgttcccggcaccatcgacaatgacatcttcggcagcgacaaaaccatcggctttgatacggctgtgaacacagctcttgaagcaattgaccgcattcgtgacaccgccgcctctcacgaccgtttgttcatcgttgaagtgatgggcagaaactcgggcttcatcgcctctcacgtgggccttgcgggtggcgcggaagaaatcttcactccggatgccaacaccactgttgaaaaagccatcgaccgcatcaacgaagccaaatcccgcggcaaaaccagcagcatcatcatcaccgctgaaggacagaaaccgggacgcgcgtatgatctggccgatgccatccgcaaaaaatccggtatggacgcaaaagtttgtattcttggacaccaacaacgtggtggctccccgacagcggccgaccgtattcttgccagccgcatgggtgctgctgccgtggatgctttgttcaaagggtattgcgacgtcatgatcggcacggaaggtgaacgacttattcaggtgcctttggacctcgtgtacaagaatgaaaagaaaaaccagttggatctgatctcgctggcgagtgttctggcaacttaa

SEQ ID NO: 112716 - protein, 329 aa, Bdellovibrio bacteriovorus HD100
MAQFDKKIQKIGVYTSGGDAPGMNAAIRAVVRVGISQKLEVYGIHNGYVGMIENKIEPLQLRDMANIIQRGGTILKTGRSTEFMRPEGRARAAQNIKNLGLDALVCIGGDGSFRGAHALWEEHQIPVVGVPGTIDNDIFGSDKTIGFDTAVNTALEAIDRIRDTAASHDRLFIVEVMGRNSGFIASHVGLAGGAEEIFTPDANTTVEKAIDRINEAKSRGKTSSIIITAEGQKPGRAYDLADAIRKKSGMDAKVCILGHQQRGGSPTAADRILASRMGAAAVDALFKGYCDVMIGTEGERLIQVPLDLVYKNEKKNQLDLISLASVLAT

SEQ ID NO: 112717 - DNA, 1092 bp, Mycoplasma mycoides subsp. mycoides SC str. PG1
  CDS (1)..(1092): transl_table=4
gtggcaatctgtaaaataggttcaaagtatacctttacaattaggggtatacttttttgttatataattaaatttatgttaatgtgttttttagaaagaggtttatatttaatgataaaaaaaattggaattttgacttctggaggggatgctcctggaatgaataatgccattgctggagttgtaaaaacagcagcttcaaaaggaattgaagtatatgggattaatgatgggtataaaggattagttaatggttgatttgaaaaactaaatgttgaaaaaactttagatattctttcaagaggtggaacttatttaggatctgcaagattaccagaatttaaagaattagaagtaagacaaaaagctgttgctaatttaaaaaaagctggaattgaagctttagttgtaattggtggagatggtagttatatgggtgctcaaaaattaactgaaatgggtattaattgtattggattacctggaactattgataatgatatttcttcaactgattatactattggttttcatactgcattaaacacaattgttgaagcagttgatagaattagagatacaatgcaatcacacaatagagcagacgttgttgaaattatgggaaatggttgtggtgatttagtaacttatactgcagttgctacaggagctgaaattttttcaccagctgaagatctactaacaattgaacaaatgggtcaaaaagcaaaacaatttagattattaggtaaaaaaagtttaattattttagtttcagaaaaatcatatggaatttcagctaaagaaattgctgaaaaaattcaaaaaattagtggttatgaaactaaggcaactgttttaggacatattcaacgtggtggtagaccaactgctatggatagatatattgcttttacagcaggtatgtttgctgttgaaaaattagctgaaggtaaaggtggattatttatcgggttagaaaataataaattagttgcaagagatattgattcaactttaaatatgaaaaaagaagataaaaaaccatttattaaatatttaagagaaattaatggatattttagtaaataa

SEQ ID NO: 112718 - protein, 363 aa, Mycoplasma mycoides subsp. mycoides SC str. PG1
MAICKIGSKYTFTIRGILFCYIIKFMLMCFLERGLYLMIKKIGILTSGGDAPGMNNAIAGVVKTAASKGIEVYGINDGYKGLVNGWFEKLNVEKTLDILSRGGTYLGSARLPEFKELEVRQKAVANLKKAGIEALVVIGGDGSYMGAQKLTEMGINCIGLPGTIDNDISSTDYTIGFHTALNTIVEAVDRIRDTMQSHNRADVVEIMGNGCGDLVTYTAVATGAEIFSPAEDLLTIEQMGQKAKQFRLLGKKSLIILVSEKSYGISAKEIAEKIQKISGYETKATVLGHIQRGGRPTAMDRYIAFTAGMFAVEKLAEGKGGLFIGLENNKLVARDIDSTLNMKKEDKKPFIKYLREINGYFSK

SEQ ID NO: 112719 - DNA, 2493 bp, Strongylocentrotus purpuratus
  CDS (1)..(2493)
atgacggatccaggctcgccgacgaagcggccacggcaagacccaatacccgggtctagaccggtgggaggggacgacgtattcacatcgcccatcagagaacagttgatgcagcacagcacaagtgcatcgcacttacaaagacgtcaaaccttgtcatatgacatggtggatacagtgggacagttttcagcaagaggagagggctttaatatggtgggagaaggaaaatgtattgcagtattcacaagtggaggtgattctcaaggtatgaatgcagctgtgagatctgttgcacgtatagggatctatgttggattcaaggtctatgcaatacatgagggttaccaagggatgtgtgatggaggcgatcatatcaaggagctttcttggtcagatgtttctaatatcatccagctgggtggtaccgtgatcgggagtgctcgctgcaaggacttcagggagagggacggaagaaagaaggctgccatgaacctcatcaagaaaggcatcaacaacctggtggtcatcgggggagacggtagcttgactggtgctaatgtcttcagacaagagtggggcaactttgtagcagaactctccaaagaaggcaagataacttcagaagaggctaaagcttgtgaatacctcaacgtcgttggcatggtgggttccatcgacaatgatttctgtggtactgacatgaccataggcacagacactgcactgcacaggatcttagaggcagtggatgcaatcagtactacagcatcaagccatcagcgctgcttcgtactggaggtcatgggtcgtcactgtggttacctagccttggttgcaggcttggcgtccgctgccgattggatcttcattcctgaaatgccaccagatgctggctgggaaaataagatctgtaacaaactgcagcagacccgagagttccgtaaacgtctgaacatcatcatcgtagcagagggcgcctgcactcaggaaggagatccaatcacagccaacctcatcaaggatctgattatcaagcgtctagggtttgacaccagagtgactgttcttggtcacgtccagcgaggcggtaacccatcggcctttgaccgaattctggggtgtaggatgggtgctgaagcagtactgtctctggtagataccaagcctgacatgccagcctatgtggtatctctagacggtaacaaggctatacgggttcctctcatggactgtgttagaaagactcaggcggttggtgaggctttgagagcgaaagacttcaagaaggcatgctctctgagaggaaggagttttttgagcaatctaagcatttacctgacactatcccgaatcaagcccaaggaggagagcaatcacaacttggctgttatgaacgtcggagcacctgcagctggcatgaatgcaactgtgagggcgtttatccgaacgtctctcttccagggatatagggtctaccgcatcaccgacgggtttgaagggcttatcgctgacaaggttcagctatctggctggatggatgtgagtgattgggtgcgacaaggaggctctctacttggaacaaacaggacaactccaaagaaggacatggctgctgttgcagagaaaattaagaagtacaatatccatgcacttctcatgattggcggctttgaggcgtacatgagtgcaatccagatgctagaggctcgcaagcaatacccagagctgtgcatcccagtggtcgttatcccggcgactgtcagtaacaacgtaccagggacagacttcagtctgggatgtgatactgccctcaacgccatcgctgatatctgtgatcgcatcaagcagtcggccagcgggtccaagaggcgtgtcttcatcgtggagaccatgggtggatactgcggttacctagcaaccatgagcggcttggccggaggagccgatgcagcttacatctttgaagaacccttcaccatcagggatctagagcttgatgtgactcatttggcagccaagatagctgatggtgtacagagaggtctcatcctcaggaatgagaaggccagcagcaatttcaccaccgaattcctccagcgtctgtactctgaggagggcaagcatctcttcaccaccaggatgaatgttctcggtcacatgcagcagggtggtagtccgactgtttttgatcgtaatatgggtaccaagcttggagtcaaagcatcaaacttcctccaggaaaaggtcaaggaattctccaaagatggtggcgtgttcacagactctgatgatactgtatgtttgttgggcatctctcagagagtggttggcttcacaccagtcaagttgcttgagaaatacacagactttgagcatcgcatcccaaagaaccagtggtggatgaaattgcgccctctgttgaggattcttgccaagcatgtagagatctacgaagccgagacggagggtgtggcccaaccaatagaatag

SEQ ID NO: 112720 - protein, 830 aa, Strongylocentrotus purpuratus
MTDPGSPTKRPRQDPIPGSRPVGGDDVFTSPIREQLMQHSTSASHLQRRQTLSYDMVDTVGQFSARGEGFNMVGEGKCIAVFTSGGDSQGMNAAVRSVARIGIYVGFKVYAIHEGYQGMCDGGDHIKELSWSDVSNIIQLGGTVIGSARCKDFRERDGRKKAAMNLIKKGINNLVVIGGDGSLTGANVFRQEWGNFVAELSKEGKITSEEAKACEYLNVVGMVGSIDNDFCGTDMTIGTDTALHRILEAVDAISTTASSHQRCFVLEVMGRHCGYLALVAGLASAADWIFIPEMPPDAGWENKICNKLQQTREFRKRLNIIIVAEGACTQEGDPITANLIKDLIIKRLGFDTRVTVLGHVQRGGNPSAFDRILGCRMGAEAVLSLVDTKPDMPAYVVSLDGNKAIRVPLMDCVRKTQAVGEALRAKDFKKACSLRGRSFLSNLSIYLTLSRIKPKEESNHNLAVMNVGAPAAGMNATVRAFIRTSLFQGYRVYRITDGFEGLIADKVQLSGWMDVSDWVRQGGSLLGTNRTTPKKDMAAVAEKIKKYNIHALLMIGGFEAYMSAIQMLEARKQYPELCIPVVVIPATVSNNVPGTDFSLGCDTALNAIADICDRIKQSASGSKRRVFIVETMGGYCGYLATMSGLAGGADAAYIFEEPFTIRDLELDVTHLAAKIADGVQRGLILRNEKASSNFTTEFLQRLYSEEGKHLFTTRMNVLGHMQQGGSPTVFDRNMGTKLGVKASNFLQEKVKEFSKDGGVFTDSDDTVCLLGISQRVVGFTPVKLLEKYTDFEHRIPKNQWWMKLRPLLRILAKHVEIYEAETEGVAQPIE

SEQ ID NO: 112721 - DNA, 2367 bp, Nasonia vitripennis
  CDS (1)..(2367)
atggacgaagaacaggtggcccacaggtttattaaacctggcagtcacagagggaaaggccttgctgtttttaccagtggtggcgattctcagggtatgaatgctgctgtccgtgctgttgttcgcatgggcatctacttagggtgcaaagttttcttcattagagaaggttaccaaggaatggtggacggtggtgacaatatcgttgaggccaactggtcctctgtgtcttgcatcatccatcgtggtggcacggtgatcggctcggcccgttgcatggaattccgagagcgtgaaggtagaaagagggcggccaagaatttggtgacacgcggtatatccaacttgtgcgtcattggtggagacggctctctgaccggtgccaatctcttcaaagaagaatgggccgatctgttgaaagaattggtgaaagatggcgaaatcacactggagcaaagcgaaaaatacaagcatttgcacatcgtcggtctggttggctcgatcgacaatgacttttgcggaacggatatgaccatcggtacggacaccgcgctacacaggatcatcgaaagcatcgatgccatcgccagtactgcctactcgcaccagcgtaccttcattatggaagtaatgggccgtcattgcggctatctggctctggtggcagctatgtgtagcgaagcagactatgttttcatcccagaatggccgccggagcaggattggccgaacaagctctgcaaaaagttgattcaggagcggctgacgggtcagaggctgaacatcatcatcgtggctgagggtgccctcgacagaaacggtgaccccatcaccgctgagaaggtgcgccaggtcgtcgtcgagaagcttcagcaggacacgagaatcacggttctcggccacgtccaacgcggtggcaatccctcggccttcgatcgcgttctcggctgccgtatgggtgccgaggccgtgatggcactggttgaggcgacccccgaaacggaagcctgcgtcgtaacattggacggcaaccaggccgtacggctgcctctgatggaatgcgtacggcgcaccaaggctgtggcccaggctatggctgacaagaactgggacttggctgtacagctacgtggaaagggcttcgtccgaaacctcgagacctacaagatgctaactcggctcaaagctcccgtcgaaatcgaccccaacaaggaccattacacattggcggtgatgcacgtcggttcgccgtcatgcggcatgaacgccgctgtgcgttctttcgtgagaaactgcatttaccgcggtgacaaggtatacggtattatggacggtgttctgggcttggcgacgggcaagttgaagctcatggattggccctcggtgacgggttgggtcgctcagggtggcgcctatctgggtactaaacgagccccacccaaggacgatcaacttcctctaatcgctcagaaactgaaggagtttggaattcaggctcttcttataattggtggtttcgagggatttcaaaccggtcttagtttctacaacgccagaactcagcacccagaatttcgcatccccattgccatgattcctgccactattagtaacaatgttccgggaaccgagttttctctgggttgtgatacagctctcaatgaaattaccgagatttgcgaccgtatcaggcagtcggctcagggtacaaagcgccgcgtttttatcattgaaactatgggcggattttgcggttatcttgccaccctggcgggactggcaggtggtgccgacgcggcctacattttcgaggaaaaattcaacatcaaggatcttaaccaagatatcatcgcgatggctgccaaaatgtccgagggagtgcagcgcggtctaattctgcgtaatgagagtgccaactcgaattacaataccgagttcatgcaaaggctcttcaccgaagagggtaaaggacttttcagctgcagaatgaatataatcggtcacatgcagcaaggtggttcgcccactccgtttgatcgtaatttgggcactaagatgggagccaaggctgtcgaatggtttacagagcgattgaagaaggataccacagccgatggacaggcggtttctaatagcgacgagagtgccgtaatgctgggtattgtcagacgtcagtacagatatacgccgttcagcaaactaatcgataccactgatttcgagcacagaatccctacatatcagtggtggatgaaactgcgtccactgctcaaagtattggcaaagcatgagtcgacctacgaggaagagggtctctacatcacggtcgaggaaatggacaagaacaatgacgcaccgctagtttaa

SEQ ID NO: 112722 - protein, 788 aa, Nasonia vitripennis
MDEEQVAHRFIKPGSHRGKGLAVFTSGGDSQGMNAAVRAVVRMGIYLGCKVFFIREGYQGMVDGGDNIVEANWSSVSCIIHRGGTVIGSARCMEFREREGRKRAAKNLVTRGISNLCVIGGDGSLTGANLFKEEWADLLKELVKDGEITLEQSEKYKHLHIVGLVGSIDNDFCGTDMTIGTDTALHRIIESIDAIASTAYSHQRTFIMEVMGRHCGYLALVAAMCSEADYVFIPEWPPEQDWPNKLCKKLIQERLTGQRLNIIIVAEGALDRNGDPITAEKVRQVVVEKLQQDTRITVLGHVQRGGNPSAFDRVLGCRMGAEAVMALVEATPETEACVVTLDGNQAVRLPLMECVRRTKAVAQAMADKNWDLAVQLRGKGFVRNLETYKMLTRLKAPVEIDPNKDHYTLAVMHVGSPSCGMNAAVRSFVRNCIYRGDKVYGIMDGVLGLATGKLKLMDWPSVTGWVAQGGAYLGTKRAPPKDDQLPLIAQKLKEFGIQALLIIGGFEGFQTGLSFYNARTQHPEFRIPIAMIPATISNNVPGTEFSLGCDTALNEITEICDRIRQSAQGTKRRVFIIETMGGFCGYLATLAGLAGGADAAYIFEEKFNIKDLNQDIIAMAAKMSEGVQRGLILRNESANSNYNTEFMQRLFTEEGKGLFSCRMNIIGHMQQGGSPTPFDRNLGTKMGAKAVEWFTERLKKDTTADGQAVSNSDESAVMLGIVRRQYRYTPFSKLIDTTDFEHRIPTYQWWMKLRPLLKVLAKHESTYEEEGLYITVEEMDKNNDAPLV

SEQ ID NO: 112723 - DNA, 2976 bp, Candida glabrata CBS 138
  CDS (1)..(2976)
atgctacatcaggataactgttatggtgtagctttcagggctatcgccactgctgatgaagagctatttaagcaaacagtgcgtttctatcacagtctgggtttctccaccatcaaggacttcaacaagttcaagcacggtgagaacgtcgttctagcgtctggtacttccgacgattccttgagagaggtctggctggagtccttcaagctaagtgaaaccgactctctagggttccgtgtcccacaacaggaggcctctaacaaggcccaaagccaaggtgccttcgtcaaagttcgtctggtcatgcacgaacctttgaaggacgtatacagcactgcacaaacctcccacatcacttacttctccgctgaccttccagccatcgccaaggagttcggcgacaaggtcaccaaggtctccgactccgtcctgcagatgaacgacccaatgggcaaccaattgagcttcacctcatttgcatctcctctagacgaaaagccaactaacatggacgctttcttgaagcctctagagaaggaggacgacatcaccgctagccaaagcaccgacgccgtcaaccaactaaaggagtccctacaaagtggctccaacctacaaaagaagaagaagatcgccgtcatgacttccggtggtgactctccaggtatgaacgccgccgttcgtgctgttgtccgtaccggtatccactacggttgcgatgttttcgccgtttacgaaggttacgaaggtctattgagaggtggtaagtacttgaagaagatgcactgggaagatgtcagaggctggctaagcgagggtggtactttgatcggtaccgctcgttccatggaattcaagaagcgtgaaggtcgtaagagagctgccggtaacttgatttctcaaggtatcgacgctctggtcgtctgtggtggtgacggttctctaaccggtgccgaccttttcagatccgaatggccatccttggttgaagaattagtcaaggacggtactttcaccagcgaacaggtcgccccatacagaaacttgaccattgtcggtttggtcggttctatcgataacgatatggctggtactgactccaccatcggtgccttctccgctttagaaagaatctgtgaaatggttgactacatcgatgccaccgccaagtctcactccagagccttcgttgtcgaagttatgggtagacattgtggttggttagctttgatggctggtatcgctaccggtgctgactacattttcatcccagaaagagctgttccacacggtcaatggcaagatgagttgaaggaagtctgtcaaagacacagaaacaagggtagaagaaacaacaccatcatcgttgctgaaggtgctctcgatgaccaattgaacccagttactgccgaagacgttaaggatgtcttggttgatctaggtctagacaccaaggttactatccttggtcacgttcaaagaggtggtaccgctgtcgctcacgacagatggttggccactttgcaaggtgttgacgctgtcaaggccgttctagaaatgaccccagagaccccatctccattgattggtatcctagaaaacaagatcattagaatgccattggttgaatctgtcaagttgactaagtctgttgctacagcaattgaaaacaaggactttgacaaggctatttccatgagagacactgaattcatcgaactgtatgaaaactttttgtctactactgttaaagatgatggttctgaaatgctgccagttactgaaagattaaacatcggtattgtccacgttggtgctccatccgcagctttgaacgctgccactcgtgctgccactctatactgtttgtctcacggtcacaagccatatgccatcatgaacggtttcagtggtctaatccaaaccggtgaagtccaagagttgagctggatcgatgttgaaaactggcacaacatgggtggttccgaaattggtaccaacagatctgttgccgctgaagacatgggtaccatcgcttactacttccaaaagaacaagcttgatggtttgatcattttgggtggtttcgaaggtttcaagtctttgaagcaactacgtgacagcagagagcaatacccaatcttcaacatcccaatggttctattgccttgtaccatttctaacaacgtcccaggtactgaatactccttgggtgttgatacctgtttgaatgccctagttaactacactgatgacattaagcaatctgcctctgctaccagaagaagagtcttcgtcgttgaagttcaaggtggtcactccggttacattgcttctttcactggtttggttactggtgctgtctctgtatacactccagaagatccaatcagcctaaagtctatcagagaagatctttcattgttgaaggagaacttccgtcacgacaagggtgaaaacagaaacggtaagttgttggttagaaacgaacaagcttccagcatttacagcactgagttgattgctgacatcatttctgaatccagcaagggtagatttggtgttagaactgctatgccaggtcatgctcaacaaggtggtgctccatcctctaaggatcgtgttatcgcctccagatatgctgttaagtgtattaagttcattgaacaatggaacaagaagaacaaggccactgctttggacaaggatgctaaggttttgagattcaagtttgacaagcacggtgctaagattccaactgttgaacacgaagatgactctgctgccattatctgtgtcaacggttctcacatctccttcaagccaatcgcttctctatgggaaaacgaaaccaacattgagctaagaaagggtcatgaagtccactggaccgaattcaacgaaatcagtaacatcctttccggtagattgagattgagagctgaagtcgaagcttctaacaacagagtttaa

SEQ ID NO: 112724 - protein, 991 aa, Candida glabrata CBS 138
MLHQDNCYGVAFRAIATADEELFKQTVRFYHSLGFSTIKDFNKFKHGENVVLASGTSDDSLREVWLESFKLSETDSLGFRVPQQEASNKAQSQGAFVKVRLVMHEPLKDVYSTAQTSHITYFSADLPAIAKEFGDKVTKVSDSVLQMNDPMGNQLSFTSFASPLDEKPTNMDAFLKPLEKEDDITASQSTDAVNQLKESLQSGSNLQKKKKIAVMTSGGDSPGMNAAVRAVVRTGIHYGCDVFAVYEGYEGLLRGGKYLKKMHWEDVRGWLSEGGTLIGTARSMEFKKREGRKRAAGNLISQGIDALVVCGGDGSLTGADLFRSEWPSLVEELVKDGTFTSEQVAPYRNLTIVGLVGSIDNDMAGTDSTIGAFSALERICEMVDYIDATAKSHSRAFVVEVMGRHCGWLALMAGIATGADYIFIPERAVPHGQWQDELKEVCQRHRNKGRRNNTIIVAEGALDDQLNPVTAEDVKDVLVDLGLDTKVTILGHVQRGGTAVAHDRWLATLQGVDAVKAVLEMTPETPSPLIGILENKIIRMPLVESVKLTKSVATAIENKDFDKAISMRDTEFIELYENFLSTTVKDDGSEMLPVTERLNIGIVHVGAPSAALNAATRAATLYCLSHGHKPYAIMNGFSGLIQTGEVQELSWIDVENWHNMGGSEIGTNRSVAAEDMGTIAYYFQKNKLDGLIILGGFEGFKSLKQLRDSREQYPIFNIPMVLLPCTISNNVPGTEYSLGVDTCLNALVNYTDDIKQSASATRRRVFVVEVQGGHSGYIASFTGLVTGAVSVYTPEDPISLKSIREDLSLLKENFRHDKGENRNGKLLVRNEQASSIYSTELIADIISESSKGRFGVRTAMPGHAQQGGAPSSKDRVIASRYAVKCIKFIEQWNKKNKATALDKDAKVLRFKFDKHGAKIPTVEHEDDSAAIICVNGSHISFKPIASLWENETNIELRKGHEVHWTEFNEISNILSGRLRLRAEVEASNNRV

SEQ ID NO: 112725 - DNA, 2874 bp, Candida glabrata CBS 138
  CDS (1)..(2874)
atggtgaagaattcaatggtgcatggagtcactcgagtcgatttgactgcttactctgcggaatcatttgaaaatgcaatccagttttacttggcattccttgtgctggacgagctagaccaaaatgaagacggaggtgtggtccttgccaattcccatgtatatatcaagatcagttataaagaagatggtgagatggagcgtaaagtgaatgataggctcatgaacctaatagaaaagacgacgtcgggtgattggcgtgctgtgtcatctaacgtgcttgtatatactgttgatgacatcgggttggtgaaagaaacattgaagaggattgggttaccacatcaagcatatccaacagaattgacaccggcacagatctacaccttagatccccttggaaacgttgttggttttactggaaacaagctagcgatagccaccgagataccctttgtactaccaaccgaggaggatgatgaatcagaactgtcatcgaaggaatcttcctacactaatcttacgtcattgatgcgtacaacaagtggctatccgtccctaccttttgggcactcaagaacacatagaaatattgcaatactgacatcgggcggtgatgcacccgggatgaactcggtgataagggctgttgtaagaacagcattatttaaaggatgcagagtatacatagttagagaaggtctggaaggtttagtaaagggatacatagaggagtttttttgggaagatgtaggtggatggaacagtcaaggtggtacaaatatcggtacagctaaaagtaatgcatttttacaaagaagaggcagattattggctgccagaaacttgatcattcatgatatagattcattgattgtctgtggtggtgatggatcattagctgctgctgatatcttcaagcatgaatggcattcgcttattagtgaattattgagctctcatcttattaagatagagcaattgcattcacataaacacttaacaatatgtggaatttcagcatcgatagacaatgacatacccgttactgatgcaagcattggggcatattctgctcttgatagaatatgtaaagcattagattacatacaggtaacagctgagtctacatcgcgcgcatatgttgtagaaatcatgggtggaaactgtggttggctaacattactcgctggtattgcaacagctgcagattatatattccttccagaatgtcctcaacaaaaggaggactggcgaacacaccttcagaggattgttaaacgaaatagaaggaatggaagacgtaacacattggttctattatgtgagggagctgtggctgcagactctaccccaattacctcaagagatgttcaccaggttttatctgaggagcttgatatagatacgcgtattactgtcctaggtcatgtacaaagaggtggtgcaccagttgcatatgacagaattttagctacattacaaggtgtcgaagccgtcagtgtcattttggagtctacacctgatacaccttcttacttaattgctgtaaaggagaataaaatcttgagaaaagatttgcaggatgctgtgcgtcaaacatttaagatatccacttccctcaaggatagagagtttgaaaaggcattcagagcgaaggaggcggagtttatcgaacactatcataactttcttgcaataaatgctgccgatcaagataagaagttagtcaaatcagcttcacttctgaacattgcaataattaacattggcgctcctgcaggaggcatgaactctgctgtttatgcaatggcatcatattgtatgtggaaagggcatcggcccattgccatctataatgggtggtctggtcttgcaagacatgagagtattagaagtttgaaatggtccgaaattgtaggatggcagagccggggcggttctgaaattggtacaaatagggaaacaccaaatgaggcagatgttggtatgatagcatattatttccagaagtacaaaattgatggtctgatcattgttggtggctttgaggggtttgagtctcttagacaactagagaaggcacgtgaactgttcccagcatttagaattccaatggtactaatccctgccacattgtcaaacaatgttccaggaacggagtattcacttggatcagatacagcactaaattcattgactgaattttgtgataatatcggtatttcatccgccgctacaaaggataaggcttatgtagtggaagtccaaggtggaaattcgggatatttagctactctcacctctattgccatcggtgcatgtgcgacatatgtaccggaagaaggtatatcactggtgcaactttcagaagatatagaaactatttctaagtcatttgattgtgttcaaacaggtgatcacgctggtaagattattttgaaaagtcaaaatgcatctaaggcaatgagtgctgaaaaattagctaatattattacagaggaagctgctggcaaatttgaagcaaagtctgttataccgggccatttacaacaaggtggtactccaagtccaattgatagaactagagcaacaaaacttgctattagagctgttgatttcatacttgaaaaatctaaggtgctgaaatctcaggatgatgtgatatatgaacacacaaaagaactgacagaatcagcagtggtccttggggtcaaaggtagtaatattttatttacatcagttaagcaattgtacttatttgagacaaatgttcgtgatagaatgcccaaggttatacattgggatgggatccgcacgttatcagatcatatggcaggaaggaggagaatctatgaagatgaagacaattaa

SEQ ID NO: 112726 - protein, 957 aa, Candida glabrata CBS 138
MVKNSMVHGVTRVDLTAYSAESFENAIQFYLAFLVLDELDQNEDGGVVLANSHVYIKISYKEDGEMERKVNDRLMNLIEKTTSGDWRAVSSNVLVYTVDDIGLVKETLKRIGLPHQAYPTELTPAQIYTLDPLGNVVGFTGNKLAIATEIPFVLPTEEDDESELSSKESSYTNLTSLMRTTSGYPSLPFGHSRTHRNIAILTSGGDAPGMNSVIRAVVRTALFKGCRVYIVREGLEGLVKGYIEEFFWEDVGGWNSQGGTNIGTAKSNAFLQRRGRLLAARNLIIHDIDSLIVCGGDGSLAAADIFKHEWHSLISELLSSHLIKIEQLHSHKHLTICGISASIDNDIPVTDASIGAYSALDRICKALDYIQVTAESTSRAYVVEIMGGNCGWLTLLAGIATAADYIFLPECPQQKEDWRTHLQRIVKRNRRNGRRNTLVLLCEGAVAADSTPITSRDVHQVLSEELDIDTRITVLGHVQRGGAPVAYDRILATLQGVEAVSVILESTPDTPSYLIAVKENKILRKDLQDAVRQTFKISTSLKDREFEKAFRAKEAEFIEHYHNFLAINAADQDKKLVKSASLLNIAIINIGAPAGGMNSAVYAMASYCMWKGHRPIAIYNGWSGLARHESIRSLKWSEIVGWQSRGGSEIGTNRETPNEADVGMIAYYFQKYKIDGLIIVGGFEGFESLRQLEKARELFPAFRIPMVLIPATLSNNVPGTEYSLGSDTALNSLTEFCDNIGISSAATKDKAYVVEVQGGNSGYLATLTSIAIGACATYVPEEGISLVQLSEDIETISKSFDCVQTGDHAGKIILKSQNASKAMSAEKLANIITEEAAGKFEAKSVIPGHLQQGGTPSPIDRTRATKLAIRAVDFILEKSKVLKSQDDVIYEHTKELTESAVVLGVKGSNILFTSVKQLYLFETNVRDRMPKVIHWDGIRTLSDHMAGRRRIYEDEDN

SEQ ID NO: 112727 - DNA, 2916 bp, Candida glabrata CBS 138
  CDS (1)..(2916)
atgactgcggaagctcttgttaatggtacttcttataccacgctagtggctcactcccaagagtctttcaagaatgctgtggaattttacaagaacttcttgtccttgatgaagttgaacgacaagaacgccaatgaggctactctgtataactcttctgtctgtttgaagattgtcctagaggaggacagctccaagaaccaggctgctatgcacagagtcaccaagttgtctgagatgtccaagaagcaggactggagagcccaagtcaaggactctcttgtcttcaacattgtcgacatccaatccatccaaaagtctttgattgcaaacaacttccctatccaagcatacccaaccactttgcaaccaatgcaactttttaccatcgacccattgggtaacgttgtcggtgttacttgcacaaagaacgccgcctccaccagaccaaccaagccacaagctgatgtcaccaccgtcccaccatctgctttggcctctaatgtaccatctgccttgccatccaaggtccaatcattcacagacttgtcctactgtatgaagacaaccgaccactacccatccttgccaactaaggctactagagtcactccagagtccaagaaggccattgccgttatgacctctggtggtgatgctccaggtatgaactccaacgtccgtgctattgtccgttctgctctattcaagggctgtcgtgcattcgtcgtcatggaaggttacgaaggtttggtccgtggtggtccagaatacatcaaggaattcagctgggaagatgtcagaggctggtccactcaaggtggtaccaacatcggtactgcccgttgtatggaattcagagaaagaaagggtcgtctgttaggtgcccaacacttgatcgaagccggtgtcgatgctttgattgtttgtggtggtgatggttccttgactggtgctgacttgttcagatccgaatggccatctttgatcgacgaacttctaaaggaaaacagaattgacaacgaccaatacgaaagatacaagcacttgaacatctgtggtactgttggttccatcgataacgatatgtctaccactgatgctaccatcggtgcttactctgccttggacagaatctgtaccgctatcgactacgttgaagccactgctaactcccactccagagctttcgttgtcgaagtcatgggtagaaactgtggttggttagctctattggctggtatcgccacttccgctgactacatcttcattccagaaaagccagctacttcttccgaatggcaagatcaaatgtgtgacattgtcgccaagcacagatccagaggtaagagaaccaccatcgttattgttgccgaaggtgctatcgctaacgatctaactccaatttctccaagtgatgttcacaaggttctttgtgacagattaggtctagacaccagaatcacaactctaggtcacgttcaaagaggtggtaccgctgtcgcttacgaccgtatcttggccactctacaaggtattgaagctgttaatgctgtcttggaaagtaagccagacactcaatctccattgattgccattaacgaaaacaagatcactcgtaaacctttggttgaatctgtcaagttgaccaagtctgttgcagatgctatccaagccaaggacttcaagaaggctatgtctctaagagacactgagttcatcgagcacatgaagaacttcatggccattaactctgctgaccataatgaaccaaagttgagtgaagacaagagattgaagatcgccatcgtcaatgtcggtgcaccagctggtggtatcaactctgccgtctactctatggctacctactgtatgtcccaaggtcacaaaccatacgccatctacaacggtttctccggtttggctagacatgaaagtgttcgctccctaaaatggcaagatatgctgggatggcaatcccgtggtggttctgaaatcggtaccaacagagtcaccccagaagaagctgatctaggtatggtcgcttactacttccaaaagtaccaattcgatggtttgatcctagtcggtggtttcgaggctttcgaatctctacaccaattggaaagagctagagaaacctacccagctttcagaatcccaatggttttgattccagctaccctatccaacaacgttccaggtactgaatactccctaggttctgacactgctttgaacgctctaatggaatactgtgacattgttaagcaatctgcttcatctaccagaggtagagcttttgttgttgatgttcaaggtggtaactccggttacctggccacttacgctgctttggctgtcggtgctcaagtttcctatgtcccagaagaaggtatttctctagaacaattgtctcaagatatcgaatacttagctgaagcttttgaagttgctcaaggtagagaaggtttcggtaagttgatcttgaaatctactaatgcttctaaggctttgactgctgagaagttggctgaagttatcaccgctgaagctaacggcagattcgatgccaaggctgcttacccaggtcacgtccaacaaggtggtctaccatctccaattgacagaactagagctactagattcgctatcagagctgttgacttcattgaagaacaacaatctgttattgctaacgcccgtgctgccaacgatgtatttgttgctgatgacaaggatgttgaatctactgccactgtattgggtgtcaagggttctcaaattgtcttctcctctatcagacaactatatgatttcgaaactgaagtcggtaagagaatgccaaaggtcattcactggcaaaacgccagagctattgctgaccacttggttggcagaaagagagttgattag

SEQ ID NO: 112728 - protein, 971 aa, Candida glabrata CBS 138
MTAEALVNGTSYTTLVAHSQESFKNAVEFYKNFLSLMKLNDKNANEATLYNSSVCLKIVLEEDSSKNQAAMHRVTKLSEMSKKQDWRAQVKDSLVFNIVDIQSIQKSLIANNFPIQAYPTTLQPMQLFTIDPLGNVVGVTCTKNAASTRPTKPQADVTTVPPSALASNVPSALPSKVQSFTDLSYCMKTTDHYPSLPTKATRVTPESKKAIAVMTSGGDAPGMNSNVRAIVRSALFKGCRAFVVMEGYEGLVRGGPEYIKEFSWEDVRGWSTQGGTNIGTARCMEFRERKGRLLGAQHLIEAGVDALIVCGGDGSLTGADLFRSEWPSLIDELLKENRIDNDQYERYKHLNICGTVGSIDNDMSTTDATIGAYSALDRICTAIDYVEATANSHSRAFVVEVMGRNCGWLALLAGIATSADYIFIPEKPATSSEWQDQMCDIVAKHRSRGKRTTIVIVAEGAIANDLTPISPSDVHKVLCDRLGLDTRITTLGHVQRGGTAVAYDRILATLQGIEAVNAVLESKPDTQSPLIAINENKITRKPLVESVKLTKSVADAIQAKDFKKAMSLRDTEFIEHMKNFMAINSADHNEPKLSEDKRLKIAIVNVGAPAGGINSAVYSMATYCMSQGHKPYAIYNGFSGLARHESVRSLKWQDMLGWQSRGGSEIGTNRVTPEEADLGMVAYYFQKYQFDGLILVGGFEAFESLHQLERARETYPAFRIPMVLIPATLSNNVPGTEYSLGSDTALNALMEYCDIVKQSASSTRGRAFVVDVQGGNSGYLATYAALAVGAQVSYVPEEGISLEQLSQDIEYLAEAFEVAQGREGFGKLILKSTNASKALTAEKLAEVITAEANGRFDAKAAYPGHVQQGGLPSPIDRTRATRFAIRAVDFIEEQQSVIANARAANDVFVADDKDVESTATVLGVKGSQIVFSSIRQLYDFETEVGKRMPKVIHWQNARAIADHLVGRKRVD

SEQ ID NO: 112729 - DNA, 2982 bp, Debaryomyces hansenii CBS767
  CDS (1)..(2982)
atgcctattccgaggaatgatatcgaaggaattagttttatttcgttaattacgaataagaatgaagaattcgaagaaagtgctaatttctataataaattaggatttagattaaccaagaatttttctaaaataacgaacaactcagaaagtaagccaaaattgcagatagggatttcgaatgattccttaaaggaactttggttggagtcttttccattgcaaaatacagacgaaaatggcttcattagaccttggcaagagttgctggtgtatgatggggatggatgtgaaaaattaaactcggcgactactcttaagattagattgtctactttggatgacttaagcaatactgctaaagaattgaatttttttacgactgatttaccaaaggtcaaggatattttgacgaaggatttgaacaccgaatttgaaagtccaagcgacaccgtaatcaaagtcgttgatccaatggggaataccttaaatttttcgaacttcgaaaacccgttgtccgaaaagtcattcgattctccagaagactatttgaagtataaaacggaaaaattactttcatcattagatcgtttggaacataagagtgtcgaagatcaaccaactgagaagactaaaaagaaaaagaaaaagattgctattatgacttctggaggtgatgcgccaggtatgaattcagcagttcgtgcagttgtaagagctggtatttattatggatgcgacgtgtttgctatttatgaaggttacgaaggattagtccaaggtggtgatttgatgcgtaaaatggaatgggccgatgttagatcgtacttatcattaggtggtactgctattggtactgcgagatgtgctaaatttcgtgaacgtccgggtagattacaaggtgctcataatatggttgaaaacggtatcgatgcgttgattgtttgtggtggtgacggttcattgaccggagctgacttatttagatccgaatggccttcattagtagaagaattggttagtaacggtacttttaccacaaaagaagtagagccatatagacatttaacaatggttggattagttggctcaatcgataacgatatggcttcaacagactctactattggtgcatattcagcattggagagaattaccgagatggttgattacattgatgctacagcttcttctcattcgagagcttttattgttgaagttatgggtagacattgtgggtggttaggtttgatgtcgggtcttgcgactggggctgactttattttcattcctgaaagaccaccaaaggcaggccaatggcaaaacgaattaaaagatgtttgctcgagacatagacaaaaaggtaaaagaaacactactgttattattgcagagggggcaattgatgatgatttaaacccgattacccctgatgaggttcaaaaagttcttgttgcattaggtttagataccagaattactaccttaggccacgttcaaagaggtggtacagccgtagcatatgaccgtttgttagcaacattacagggtgttgatgctgttaaagctgtattggaattaactcctgatgacccttcacctatgatcggtagtttagaaaacaagatcgtcagaaagcctttaatcgaagcagttaaattaactaagtctgtcgcgactgctattgaaaataaagatttcgataaagctatgagtttaagagactctagtttcgaggatgcatatcatcacttcttatcgtcttcaatctatgatgatggcctgaaaatattaccagaagcagaaagattgaatatcggtgtcgttcatgttggggcttcatcctcgggtttgaatgcggcaaccagagctgcagccttatactgtatgtctaaaggtcataaattatttgctattcaaaacggttttagtggattaatcaatgaaggtgaaataaaggaattaagttggttagatgtcgaaggatggcataacaaaggtggttcggaaattggcactaataggtcattaccaagtgaggattttggtaacgttgcatactatttccaaaagttcaagcttcaaggtttgataataatcggtggctttgaaagtttttcagctttaaatgaattggatgaaaaaaaacaagaatatcctattttcaatattccgatggttgttatacctgcaaccgtgtctaataacgtgccgggtacagaatattcgttgggtggtgacacctgtatgaatcaattgcttaaatattgtgatgctgtaaagcaatcagcgtcttcatctagaagaagagtattcgtggttgaggttcaaggtggttattcagggtttgttgcctcatactgtggtttaatcactggatcacttgctacatataccccagaatccaaaatcgacttgaaaactatacaagaggacatagatcttttgtacgaggttttcgaagatgacagaggtgaatataacaacgggaaaatgattatcagaaatgaacaagcttcttctgtgtatactacagatctcattgccgacataattaaggaatctgccggtggaaggtttgaaacaagaactgctgttccgggtcacgtccaacaggggtttactcctacgtccatggatagagtaaatgcatgcagatttgccgtgaagtcgtgtcaatacatcgaagactggaacacgaaattaggaggcttgattctggacatggatgccaccaaaacgaacagaagaagtcgttctaatgtcaaaaacagtattgaacacattcttgaagagaaaaacggctctgctgttgtgcttggaatccagggtgcccaaatcaaattcaactctgtcgaagccttattcgctaaagacgctaatattcccttgagaaagggcagagtggtccattggacagaaatgatcgaagtggccgatatgttaagcggaagactcttattaagagaaaaaaagcaatga

SEQ ID NO: 112730 - protein, 993 aa, Debaryomyces hansenii CBS767
MPIPRNDIEGISFISLITNKNEEFEESANFYNKLGFRLTKNFSKITNNSESKPKLQIGISNDSLKELWLESFPLQNTDENGFIRPWQELLVYDGDGCEKLNSATTLKIRLSTLDDLSNTAKELNFFTTDLPKVKDILTKDLNTEFESPSDTVIKVVDPMGNTLNFSNFENPLSEKSFDSPEDYLKYKTEKLLSSLDRLEHKSVEDQPTEKTKKKKKKIAIMTSGGDAPGMNSAVRAVVRAGIYYGCDVFAIYEGYEGLVQGGDLMRKMEWADVRSYLSLGGTAIGTARCAKFRERPGRLQGAHNMVENGIDALIVCGGDGSLTGADLFRSEWPSLVEELVSNGTFTTKEVEPYRHLTMVGLVGSIDNDMASTDSTIGAYSALERITEMVDYIDATASSHSRAFIVEVMGRHCGWLGLMSGLATGADFIFIPERPPKAGQWQNELKDVCSRHRQKGKRNTTVIIAEGAIDDDLNPITPDEVQKVLVALGLDTRITTLGHVQRGGTAVAYDRLLATLQGVDAVKAVLELTPDDPSPMIGSLENKIVRKPLIEAVKLTKSVATAIENKDFDKAMSLRDSSFEDAYHHFLSSSIYDDGLKILPEAERLNIGVVHVGASSSGLNAATRAAALYCMSKGHKLFAIQNGFSGLINEGEIKELSWLDVEGWHNKGGSEIGTNRSLPSEDFGNVAYYFQKFKLQGLIIIGGFESFSALNELDEKKQEYPIFNIPMVVIPATVSNNVPGTEYSLGGDTCMNQLLKYCDAVKQSASSSRRRVFVVEVQGGYSGFVASYCGLITGSLATYTPESKIDLKTIQEDIDLLYEVFEDDRGEYNNGKMIIRNEQASSVYTTDLIADIIKESAGGRFETRTAVPGHVQQGFTPTSMDRVNACRFAVKSCQYIEDWNTKLGGLILDMDATKTNRRSRSNVKNSIEHILEEKNGSAVVLGIQGAQIKFNSVEALFAKDANIPLRKGRVVHWTEMIEVADMLSGRLLLREKKQ

SEQ ID NO: 112731 - DNA, 2388 bp, Aspergillus nidulans FGSC A4
  CDS (1)..(2388)
atggccccaacagtcgcaactcaacctccccctcccaagcggcgccgcattggtgtcctcacctctggaggagatgcccccggtatgaacggtgcagtacgagcggtggtccgcatggccattcactccgactgcgaagcttacgccgtttacgagggatacgaaggtctggtggaaggcggggacatgatccgacagctacactgggaagatgttcgtggatggctctcccaggggggtacattgatcggatccgctcgctgcatgtcttttcgtgagagatctggccgtctccgcgccgctaaaaacatggtcctgcgcggaatcgacgcattggttgtctgcggtggtgacggtagtttgactggtgccgatgttttccgctctgaatggcctggtttattggacgagctggtgaagaatggagaattgacggcagagcaggtcgagccgtacagagtcttgaacattgtcggtctcgtgggctcaattgacaacgacatgtccggtacggatgccactattggctgctactcctcgttgactcggatctgcgatgctgttgatgacgtcttcgacactgcgttctcccaccagcgaggcttcgttatcgaagttatgggccggcattgcggttggcttgctctgatggctgccattagcacaggcgccgactggcttttcattcctgagatgccccctaaggatggctgggaggatatcatgtgcgcgaacatcacaaagaaccgtcgggaacgtggcaagcgcagaaccattgtcatcgtcgccgaaggagcgcaagatcgaaacctcaacaagatcacaagtgatcgcgttaaagatattctcaccgagcgcctcggacttgacactcgtacaacaattctcggacacacccaaagaggaggagccgcctgcgcctacgatcgatcgctatcgaccctgcaaggtgttgaggccgttcgtgctgttttggacatgacgccggactctccttccccagtgatcacgatccgcgagaacaagatcatgcgcaccccgttgatggacgctgtcaaggccacgcaggaggttacagctcacatcaaaaacagagaatttgagaaggcgatgttgttgcgcgactcagaattcaaagagtaccactttgcttatctgaaaactgccacacctgatcaccccaaactctccttgacccaagaaaagagaatgcgcattgccattgtccacgtcggtgccccggctggaggcatgaaccaagctacacgagctgccgtgacatactgtctcacccgtggccacactccgattgccatccacaacggtttccccggcttgatccgccaccacgcagatcaacccatcagctcagtgcgcgaagtcaaatggcaagaaacagacgcgtgggtaaacgagggtggttccgacatcggcacaaaccgcggtctcccgtctgaagactacgacgaggttgccaggtgcttcaaagagcacaagttcgacgccttatttgtcgttggtggctttgaagccttcacggcagtgagccagctccgccaagctcgcgacaaatacgacgccttcaagatccccatggttgtcctgcccgccacaatctccaacaacgtcccgggcactgagtactccctcggcagcgacacctgcctcaacgccctgatcgacttctgcgacgcaattcgccagtcagcctcctcctcccgtcgccgcgtcttcgtcatcgaaacccagggcggtaaatcaggctacatcgctacaacagcagggttggccgtcggcgcagtcgccgtatacatccctgaagaaggaatcgacatcaagatgctcgcccgagacatcgattttctccgcgagaactttgcccgcgacaagggtgccaaccgcgccggaaagatcatcatgcgcaatgagactgcctcatccacatacaccacacaggtcattgctgatatgatcaaggaggaagcaaagggccgcttcgagtcccgtgccgcagttcccggccacttccagcagggaggcaagccctcgcccatggaccgcattcgcgcgctgcgcatggcaatcaagtgtatgatgcacctggagggctacgcgggtaaatcaaaagacgaaatcgcgaacgatgagatgtctgcaaccgtcattggcatcaagggctcccaagtcctcttctccgtcatgggtggtgaacatggactcgagaaggtcgagacggactgggcgagacggcgtcccaaggccgaattctggttgcagttgcaggatacagttaacatcttgtcgggacgggcgggggccaaagcaatgtggaccggttatgaggatgagagccggacgcgaccttcgagtccggcacacttgtcatga

SEQ ID NO: 112732 - protein, 795 aa, Aspergillus nidulans FGSC A4
MAPTVATQPPPPKRRRIGVLTSGGDAPGMNGAVRAVVRMAIHSDCEAYAVYEGYEGLVEGGDMIRQLHWEDVRGWLSQGGTLIGSARCMSFRERSGRLRAAKNMVLRGIDALVVCGGDGSLTGADVFRSEWPGLLDELVKNGELTAEQVEPYRVLNIVGLVGSIDNDMSGTDATIGCYSSLTRICDAVDDVFDTAFSHQRGFVIEVMGRHCGWLALMAAISTGADWLFIPEMPPKDGWEDIMCANITKNRRERGKRRTIVIVAEGAQDRNLNKITSDRVKDILTERLGLDTRTTILGHTQRGGAACAYDRSLSTLQGVEAVRAVLDMTPDSPSPVITIRENKIMRTPLMDAVKATQEVTAHIKNREFEKAMLLRDSEFKEYHFAYLKTATPDHPKLSLTQEKRMRIAIVHVGAPAGGMNQATRAAVTYCLTRGHTPIAIHNGFPGLIRHHADQPISSVREVKWQETDAWVNEGGSDIGTNRGLPSEDYDEVARCFKEHKFDALFVVGGFEAFTAVSQLRQARDKYDAFKIPMVVLPATISNNVPGTEYSLGSDTCLNALIDFCDAIRQSASSSRRRVFVIETQGGKSGYIATTAGLAVGAVAVYIPEEGIDIKMLARDIDFLRENFARDKGANRAGKIIMRNETASSTYTTQVIADMIKEEAKGRFESRAAVPGHFQQGGKPSPMDRIRALRMAIKCMMHLEGYAGKSKDEIANDEMSATVIGIKGSQVLFSVMGGEHGLEKVETDWARRRPKAEFWLQLQDTVNILSGRAGAKAMWTGYEDESRTRPSSPAHLS

SEQ ID NO: 112733 - DNA, 2964 bp, Candida albicans SC5314
  CDS (1)..(2964): transl_table=12
atgcctagctcctccgacgcaatcaataggataagttacatatcccttgtcaccagtgacaatgacaaattcaaccaaacattccaattctacagtcaattgggatttagattgacaaaaagtttctccaaagtttcaagctacggatctggattaggtgccaaccatccagaattccaattgggtgtttctcatgattcacttaaagaagtttggttagaatcttacccattacaaaatgtcgacagtaatggaaaccttcgtccttggcaagaaatggaagtttatgacggtgataattgtgaaagattaaatgaatcaactgtgattaaagttagattacttggcgaaacccctttgaagtcaatttctcaaaaacaatttgtgtttttcaccactcaattgaataaaattgaaaaaatcttgaccgatgcaaatgtcaaatatgggaaagttgttgataatgtcattttagctgaggatccattaagcaacattatcagtttttccaatactcaaaatgaattgtgtaaaactagattccaatcaccagaagagtatgttgaaaaaaccactgcagaaatattggctaaaagaaagaaatctcaattgggttctaaatttggttcatttgaagaaatttcaccaagtgaagttggcggtggtaatggtttacgtaaaaagaaaattggggtgatgacatctggtggtgatgctcctggtatgaatccagcagttcgtgctgttgttagagccggtatttattatggttgtgatgtttatgccgtttacgaaggttatgaagggttagttaaaggaggtgatcttttaaagaagatggagtggagtgatgttcgttcttatatgtctcttggtggtacttcaattggtactgctagatgtaaagaatttagagaaagagccggaagattacaaggggcatacaatatgatcaagaatggtattgacgcattagttgtatgtggtggtgacggttcattaactggtgctgatttatttagaagcgaatggccatcacttgtgaaggaattagtagacactggaaaattaactaaagaagaagtttcaccttatgaacatcttaccattgttggattggttggttccattgataatgatatgtctggtaccgatgttaccattggtgcattctctgccttagaaagaatcacagaaatggttgattatattggtgccactgctgcttctcattctcgtgcttttgttgttgaagtcatgggtagacattgtggttggctagcattattgtctggtttggccactggagctgattttgttttcattcctgaaagaccacctaaagccggattatggaaagaacaattgaaagaagtatgtttgagacacagagaatatggtagaagaaaaaccaccgttattgttgccgaaggggccattgatgatgaattgaacccaatcacttcagaagaagtcaaacaagttttagctgatttaggattggacaccagaaataccattttgggacatgttcaaagaggtggtactgctgttgcttttgacagaagattggctactttacaaggggttgaagctgttaaagcagttttggaaatgacaccagacacaccatcaccaatgattggtatattgaaacacaagattgttagaattccattagttgatgctgttaaacaaactaaagctgtagctgaagccattagcaacaaagattttgataaagctatgagtttaagagacaatagtttctacgatgattatagatatttccgtgatatttctatttatgatgatggtagtaaacaattgagtgaagataagagattaaatattgcaatcgttcacgttggtgccgcatctgctggtttaaatgctgccactcgtgcagtggcattgtacagtctttctcgtggccacaaattgtatgctgtacaagatggatttgctggtttagtcaaaggtgatttgaagaacttgacatggatggatgttgaaggatggcatagtcttggtggttcagaaatcggtaccaatagatccttaccatcacaaaacattggtaaagttgcctacaatttacaaaaattcaatatccaagggttattgattgttggtggatttgaagcttttacttcattgcatgaattatctgaacaaaaagccaattatccaatatttgaaattccaatggtggttgttccagcaacagtttcaaacaatgttcctggtactgagtattctcttggtgctgacacctgtttgaatcaattagtttcatactgtgatgcagttcaacaatcagcatcttcaactagaagaagagtgtttgtagttgaagtgcaaggtggtcacagtgggtatgttgcctcctactgtggattgataactggtgctttagccacttatacacctgaatcaaacataaacttgagagaattacaaggagatatcgatttattgcagaaagtgtttgccactgaccgtggtgaagatcataatggtactcttattgttagaaatgaacaagccagtgctgtttattcgactcaattgattgctgatattcttaaagaaaatgccaataaaagatttgaaaccagaacagcaattccaggtcatgttcaacaaggtttcacaccaagtgccaatgatcgtgttatggcagttaaattctcattaaaagccatggaatttattgaaacaagaaatgggtgttatggtaaacacgatcgtaaattctctgatgaagaaatcagtgaacattctcaagttgtcattggtatccatggagatgttgttaaattcacatgtatcaaacatttgtatgataatgaagctaatgttgccttgagaaagggtaagacagttcattggaccgatatgattgatgtggctaacattttgaacggtaaactgttgttgaaaaaacaagaaagatattag

SEQ ID NO: 112734 - protein, 987 aa, Candida albicans SC5314
MPSSSDAINRISYISLVTSDNDKFNQTFQFYSQLGFRLTKSFSKVSSYGSGLGANHPEFQLGVSHDSLKEVWLESYPLQNVDSNGNLRPWQEMEVYDGDNCERLNESTVIKVRLLGETPLKSISQKQFVFFTTQLNKIEKILTDANVKYGKVVDNVILAEDPLSNIISFSNTQNELCKTRFQSPEEYVEKTTAEILAKRKKSQLGSKFGSFEEISPSEVGGGNGLRKKKIGVMTSGGDAPGMNPAVRAVVRAGIYYGCDVYAVYEGYEGLVKGGDLLKKMEWSDVRSYMSLGGTSIGTARCKEFRERAGRLQGAYNMIKNGIDALVVCGGDGSLTGADLFRSEWPSLVKELVDTGKLTKEEVSPYEHLTIVGLVGSIDNDMSGTDVTIGAFSALERITEMVDYIGATAASHSRAFVVEVMGRHCGWLALLSGLATGADFVFIPERPPKAGLWKEQLKEVCLRHREYGRRKTTVIVAEGAIDDELNPITSEEVKQVLADLGLDTRNTILGHVQRGGTAVAFDRRLATLQGVEAVKAVLEMTPDTPSPMIGILKHKIVRIPLVDAVKQTKAVAEAISNKDFDKAMSLRDNSFYDDYRYFRDISIYDDGSKQLSEDKRLNIAIVHVGAASAGLNAATRAVALYSLSRGHKLYAVQDGFAGLVKGDLKNLTWMDVEGWHSLGGSEIGTNRSLPSQNIGKVAYNLQKFNIQGLLIVGGFEAFTSLHELSEQKANYPIFEIPMVVVPATVSNNVPGTEYSLGADTCLNQLVSYCDAVQQSASSTRRRVFVVEVQGGHSGYVASYCGLITGALATYTPESNINLRELQGDIDLLQKVFATDRGEDHNGTLIVRNEQASAVYSTQLIADILKENANKRFETRTAIPGHVQQGFTPSANDRVMAVKFSLKAMEFIETRNGCYGKHDRKFSDEEISEHSQVVIGIHGDVVKFTCIKHLYDNEANVALRKGKTVHWTDMIDVANILNGKSLLKKQERY

SEQ ID NO: 112735 - DNA, 2604 bp, Ustilago maydis 521
  CDS (1)..(2604)
atgcctccttttacaccggcagttcgtgccgaaaacacctttgccgctcaatccaccagcaccaagcctttttcctccaaattcgctcctgctagccatgacggtcaacctcgcagactcgccgtcatgacctccggtggcgattcagctggtatgaatgctgcagtccgctccgtcgtcaaaatggccatcttccgcggatgcgaggcctttgtcattcgcgaaggttgggagggtctcgttcgaggaaatcagacacccgaaaacaccccctctgcaaccccctcggtcagcaggagcgcctccaccttcttcgactcgcctaacatccaggccaagccttctcacctggaagccaacccagaacagtccgactttgtgccaacatacggagagggcgagctgctgcgagaaggtgtaggagaggcgcaggaactcggtctccgtggtcgatacatcatccgtgtcggctgggatgacgttcgcggttggatggaccaaggtggtaccctcatcggcaccgcgcgctccaagaccttccgcactcccgagggtcgcgaacaggccgcctataacctcatcatcaacggcatcgacgctctcgccgtctgtggtggagacggaagtctcaccggtgctgacaagcttcgtgcagaatggcccgacctcgtcgcatcgctcaaggccaagagcaagatcaccgaagagcaagccaccaaattcgcccacctcaacattgttggtctcgttggatccatcgacaacgacatggccaccaccgacattaccatcggcgcatccaccgctctccagcgcatctgcgaggccgtcgactctatctcgtccactgctgcctcgcattctcgtgcctttgtcgtcgaagtgatgggcagacattgcggctggctcgccctcatggccggtattgctacgggtgccgactatgtcttcatccccgagcgccctcctcagggcgaacaatggcactccgagatgtcggccgtccttcaaaagcatcgagaccttgggaaacgaaaatccatcgtcattgtcgcagagggcgccatcgaccgtgaactcaacgacatctcgcccgaaatgatcaaacaagtgctctccaacgacctcggtcttgacacccgtgtcaccaccctcggacacacccagcgtggtggaaagcccgatgccaacgaccgtatcctcgcaacgcttcaaggtatcgaagctgtcgatgccgttctcgaagccactccagagaccccctcttacgtcatcggcatcagcgaaaacaagatcactcgtattccgctcatgtttgccgtcgaacaaactcaaaaggtcgcaaagctcatcgagtccaaggactttgacggcgcgctcgcccttcgtgaccctgaattcgccgaaggactccgtgcattcaagtacatcagtcagatcaccgaagatgagatgctgccgcagaacaagcgtctccggatgggtgtcattaatgtcggcgctcctgctggaggcatgaacgcagccacacgcaccgccgtccgttactgcctcgcaaagggccacgaggccgtcgtcatctacaacggcttcccaggtctgctcgaggacaacgtctcggtgctcaactggctccgcgtagacaactgggccacaagaggtggctcggaactcggtgtcaaccgccatctgcccgatattgacattggcgcggttgccgccaagttgcaagagcataagatcgaaggtcttttgattgtcggtggcttcgaggccttcagttcggtcaagattctcaacgacaaccgcgatcgataccccgcgttccgcatccccatcgtcggtcttccggccaccatctccaacaatgtgcccatgaacgagttttcgctcggctctgatacgtcgctcaatgcgcttgtcgatgcatgcgatgctgtcaagcagtcggcgtcggcatcgcgaaaccgagtgtttgtcgtcgagacgcagggtggcaagtgcggctacattgcggttatgggtgcgcttgctgcaggagctgtgctcgtctacacgcccgaggtgggcatcggcctgcagcagctcggcaaggacgtcgctttcctcaagaagcgtttcctgctggatgtcaagggcaagtccgaaggaaggctggttatccgtaacgaaaagtcatccgacgtcttcaccaccgaggtcatcaccaagatcctcaaggaggaaggcaacagcctctttgacgcacggtccgctagcctcggacacacgcttcagggcggtgtgccttcgccgttggaccgtgtgcgcgccacacgtctggcgctcaagtgctgcgagttcctcgagtcgcaagctctcaagcagcggtctggttcttccgcctcgtccaagacgggcagtggctcaagctcggataagtcgtactcggatgacacggcggtcatgatcaccatccagggttccaccatttgcttcacctcagccaccgagatgtcgcgcaatgccgatatgaagaatcgacgtggtaagaccgcatggtggcacgagctcaaggcgctcgtagagttgcttggtggtcgcaccgctctcgctgagttgtag

SEQ ID NO: 112736 - protein, 867 aa, Ustilago maydis 521
MPPFTPAVRAENTFAAQSTSTKPFSSKFAPASHDGQPRRLAVMTSGGDSAGMNAAVRSVVKMAIFRGCEAFVIREGWEGLVRGNQTPENTPSATPSVSRSASTFFDSPNIQAKPSHLEANPEQSDFVPTYGEGELLREGVGEAQELGLRGRYIIRVGWDDVRGWMDQGGTLIGTARSKTFRTPEGREQAAYNLIINGIDALAVCGGDGSLTGADKLRAEWPDLVASLKAKSKITEEQATKFAHLNIVGLVGSIDNDMATTDITIGASTALQRICEAVDSISSTAASHSRAFVVEVMGRHCGWLALMAGIATGADYVFIPERPPQGEQWHSEMSAVLQKHRDLGKRKSIVIVAEGAIDRELNDISPEMIKQVLSNDLGLDTRVTTLGHTQRGGKPDANDRILATLQGIEAVDAVLEATPETPSYVIGISENKITRIPLMFAVEQTQKVAKLIESKDFDGALALRDPEFAEGLRAFKYISQITEDEMLPQNKRLRMGVINVGAPAGGMNAATRTAVRYCLAKGHEAVVIYNGFPGLLEDNVSVLNWLRVDNWATRGGSELGVNRHLPDIDIGAVAAKLQEHKIEGLLIVGGFEAFSSVKILNDNRDRYPAFRIPIVGLPATISNNVPMNEFSLGSDTSLNALVDACDAVKQSASASRNRVFVVETQGGKCGYIAVMGALAAGAVLVYTPEVGIGLQQLGKDVAFLKKRFLLDVKGKSEGRLVIRNEKSSDVFTTEVITKILKEEGNSLFDARSASLGHTLQGGVPSPLDRVRATRLALKCCEFLESQALKQRSGSSASSKTGSGSSSDKSYSDDTAVMITIQGSTICFTSATEMSRNADMKNRRGKTAWWHELKALVELLGGRTALAEL

SEQ ID NO: 112737 - DNA, 2841 bp, Candida albicans SC5314
  CDS (1)..(2841): transl_table=12
atgatttcaattgttaatggtacttccacactttcattggttgctggtagtgtggaaactttaaatcaagcaatcaacttctataccaacatacttgggttgtccgtccattcggaacaaaatgactggacatatttatcaaatgacgacaataaaatgattgtcaagatacaattagacaccaaatctgggttatcgcttgaccaaatcaatgatagaagaacagaaattattgccaaattgaatatcactgattggagatcattggacaccaccagtgttttgaaagttcaaaatttagttgctttgattgaaactttaaccacattcaactacactttgcaaatcacccctaacgaattgtaccctaatgaagtttattgcgtggacccattgggttatattattgggtttacagcttgtgatgaaccattaacccttgttccaccattgcaaaaatcccaccctaagccagggttggtttccaacttgatgtcaaaatctggctctcaatcaagaaatattgaagagaccaaagcagtgagaagaaacatcgctgtcatgacttcaggtggggattctcaaggtatgaatgctgccgttagagctgtcgttagagccacgattttccatggaagcaaggcctttgctgtccaagaaggttatgctggtttggtcaaaggtggtcctgaatacattaaggaaatgaaatggcaagacgtcagaggttttctttcagaagggggtaccaatattggtactgccagatgcatggagtttaaggaacgttggggtagattgaaaggatgtaaaaacttgattgatgctggaattgacgggttgatcgtgtgtggtggtgatggttctttaactggtgctgatttattcagacacgaatggccatcattaattcaagaattgaaagataaaggtgaaatcaccaatgaacaatttgaaagacacaaacacttgtacatttgtggtatggtgggttccattgataatgatatggccatgactgatgctacaattggtggctactctgcattagagagaatttgtcgtgccatcgattacattgatgctactgctaactcccattcgcgtgcctttgttgttgaggtcatgggtagacattgtggttggttagccttgatggccggtattgctaccagtgctgattatatttttattccagagaaacctgcctcctcaaaagattggcaagatcaaatgtgcgacattgttggtaaacatagagctcaaggtaaaagaaagaccattgttattgttgctgaaggtgcaattacctccgatttgaaaccaatcacatctgacgaagttaaagatgttttggtcgacagattagggttggacaccagaatcactgtgttgggacatgttcaaagaggtggtactgctgtagcctttgatagaactttagccactttgcaaggggttgaagcagtgaaagccattttggaattaactcctgatgttccatctccattaattgccattgacgaaaataagatttgtcgccgtccattggttgaagcagttagaatcaccaaatccgtggcttcagctatcgaagctaaagattttgaaaaggcaatgtctttaagggatcacgaattcaaagagcatttggctaatttcatggccatgaacactgccaaccatgaaaagccaactttacctcgtgaaaaacgtaagaagattgccattatcaacatcggtgctcccgctggtggtatgaattctgctgtttatgctatggccacttactgtatgtctcgtggtcacaccccatatgctatccacaatgggtttgctggtttatcaagacacgagtcagtgaaactgattgaatggattgacatcgaagggtggaacagtattggggggtctgaaattggtacgaacagacaaacacctgaagaaactgacattggtatgattgcccattattttgaaaaataccagtttgacgggttaattattgttggaggttttgaagcatttgtttcgttagagcaattggaaagatcaagagctatgtatccatcgttcagaattcctatggttttaatccctgccaccatttcaaataatgttcctggtaccgaatattctttaggggctgatacctgtttgaattcgttaatggaatattgtgacattgtcaagcaatcagcttcagctaccagaggtacagcatttattattgatgttcaaggaggtaattccggatacattgccacatttgcctcattaatcagtggagcacaagcatcctatgttccagaagaaggtatttcattacagcaattggaaatggatatcaattcattgagagaagcatttgccgtggaacaaggaatgacaaagagtggtaaattgatcatcaagtcgagtaatgcatccaaagtactaaccccacacacattggctgacatattcaacgatgaatgtcacggtgactttgacactaagacagctattccgggacacgtccaacaaggtggattaccttcaccaatagatagaagcagaggtgatagatttgccattagagctgttcaatttattgaagaccactgtgatgttttagctccatacagatacgaattggacttcccaattgatgacaagaaaatcttaaacacagcggctgtattaggtatcaagtcttcacgtttgagattcacctctatcagacatttgtttgatttcgaaactgaattgggtagaagaatgccaaagaccatctactggaatacaattagagatatttctgatcaattagttggaagaacaagacttgataagccataa

SEQ ID NO: 112738 - protein, 946 aa, Candida albicans SC5314
MISIVNGTSTLSLVAGSVETLNQAINFYTNILGLSVHSEQNDWTYLSNDDNKMIVKIQLDTKSGLSLDQINDRRTEIIAKLNITDWRSLDTTSVLKVQNLVALIETLTTFNYTLQITPNELYPNEVYCVDPLGYIIGFTACDEPLTLVPPLQKSHPKPGLVSNLMSKSGSQSRNIEETKAVRRNIAVMTSGGDSQGMNAAVRAVVRATIFHGSKAFAVQEGYAGLVKGGPEYIKEMKWQDVRGFLSEGGTNIGTARCMEFKERWGRLKGCKNLIDAGIDGLIVCGGDGSLTGADLFRHEWPSLIQELKDKGEITNEQFERHKHLYICGMVGSIDNDMAMTDATIGGYSALERICRAIDYIDATANSHSRAFVVEVMGRHCGWLALMAGIATSADYIFIPEKPASSKDWQDQMCDIVGKHRAQGKRKTIVIVAEGAITSDLKPITSDEVKDVLVDRLGLDTRITVLGHVQRGGTAVAFDRTLATLQGVEAVKAILELTPDVPSPLIAIDENKICRRPLVEAVRITKSVASAIEAKDFEKAMSLRDHEFKEHLANFMAMNTANHEKPTLPREKRKKIAIINIGAPAGGMNSAVYAMATYCMSRGHTPYAIHNGFAGLSRHESVKSIEWIDIEGWNSIGGSEIGTNRQTPEETDIGMIAHYFEKYQFDGLIIVGGFEAFVSLEQLERSRAMYPSFRIPMVLIPATISNNVPGTEYSLGADTCLNSLMEYCDIVKQSASATRGTAFIIDVQGGNSGYIATFASLISGAQASYVPEEGISLQQLEMDINSLREAFAVEQGMTKSGKLIIKSSNASKVLTPHTLADIFNDECHGDFDTKTAIPGHVQQGGLPSPIDRSRGDRFAIRAVQFIEDHCDVLAPYRYELDFPIDDKKILNTAAVLGIKSSRLRFTSIRHLFDFETELGRRMPKTIYWNTIRDISDQLVGRTRLDKP

SEQ ID NO: 112739 - DNA, 2358 bp, Tribolium castaneum
  CDS (1)..(2358)
atggaaggaaaggccgggcataagtttgtggggcgcggagcccataagggcaaaggcatcgctgtgtttaccagtggaggagattcacaggggatgaatgcggctgtcagggctgtggtcaggatggggatttatttggggtgcaaagtctattttatcaaggaaggctaccaaggcatggttgatggcggcaagtacatcgttgaggccaattggtcctccgtaagctctattattcacaaaggaggcactgtgattggaagcgctcgttgccaagatttccgtgaacgcgctggacgtctcaaagctgcaaaaaacctcgtagaaaacggcattaccaaccttgtagtaattggaggtgatggtagtttaacaggtgctgacctcttccgtcaagaatggagctctctattggaggaattggccaccacaggtcaaatcacgaaagaacagcaacagaaataccgcacgttgcaaattgccggtcttgtgggttcgattgataacgatttttgcggtactgatatgaccattgggacggacagtgcccttcacagaattatcgaagcttgcgatgctatagtcagtacggcttattcgcatcaaaggacttttattatggaggttatgggccggcattgcgggtatttggctcttgtggccgcactcacttccgaggccgattatgtgttcataccagaatcaccaccaccagacgattggcaaaaaaggctatgcgataaattagaacaggaacgccacatgggccaacgtctcaatattattatcgtggctgaaggcgctatcgaccggaatggagacccaatcactgcagaaatgatcaaaaaagtcgtcgttgataatctccaacaggacaccagaatcactgttttggggcacgtgcaacgtgggggcaacccgtctgcttttgataggattctgggctgtcgtatgggggctgaggccgtgatggcgctaatggaggctgatgagaatacagagccgtgtgtgatttccttagacggcaatcaggcgataaggttgccgttaatggattgcgtgaagcggacaaaagccgtctcacaggcaatggctgataagaaatttgatttggcggtggaattacgaggaaagtcatttatgcgcaatttggagacttataagttgttgactcgactcaagcctccaaaggatgcatttgatgagcaaggacatggaagggaaggtttcacagtggccgtaatgcatattggagctcctgcttgtggcatgaatgccgctgtacgttcttttgtacgaaattttatctacagaggagacacagttttgggcattcaggaaggagttgaaggtcttatcgctggcaatataaaacaaatggactgggccgaagtggctggttgggttggcatcgggggtgcaaatctgggcaccaaacgcacccttcctggcaatcgtatgggtttagtagccgcccgattggccgaatttaaaattcaaggtttactcattattggcggttttgaagcatttgcagccgctgtacaatttctagacagccgaaaagatttcccagctctcaatataccaatcgtggtaatccccggaactatcagtaacaatgtaccagggacggaattttcactaggttgtgacacagccttgaacgaaatcacagaaatttgtgatagaatcagacagtcggctcaaggcacgaaaaggagggtttttattattgaaaccatgggcgggtattgcggatatttggccacacttgcaggtctcgctgggggtgcggatgctgcgtacatttacgaggaaaaattcacaattaaagacttgcaacaagatgtctaccacatggctacgaaaatgtccgaaggggtacaacgtggtttaattttgcgtaatgaaaaggcgtcagataactacaataccgactttatctacagattgtattgtgaggaaggaaaaggcttgtttagtgccaggatgaacgttttaggtcacatgcaacaagggggttcccccacaccttttgaccgcaacgttggtaccaaaatggcgtccaaagcggtcgaatggatgatcaaccaattaaaaagcaatatgagttcagacggctcagtcagttgttctagtcaagacagcgtcgttctgttaggaatcgttaaaagacaatacaagtttacaccagtcgctgagttgaaagagcaaaccaactttgacttgcgtatgcctaaagagcaatggtggttgaaactgcgccctctattgcgtattttggcaaaacatgattcgacatatgaggaagaagggatgtatatgacgattgaggatcgcagttttattaattaa

SEQ ID NO: 112740 - protein, 785 aa, Tribolium castaneum
MEGKAGHKFVGRGAHKGKGIAVFTSGGDSQGMNAAVRAVVRMGIYLGCKVYFIKEGYQGMVDGGKYIVEANWSSVSSIIHKGGTVIGSARCQDFRERAGRLKAAKNLVENGITNLVVIGGDGSLTGADLFRQEWSSLLEELATTGQITKEQQQKYRTLQIAGLVGSIDNDFCGTDMTIGTDSALHRIIEACDAIVSTAYSHQRTFIMEVMGRHCGYLALVAALTSEADYVFIPESPPPDDWQKRLCDKLEQERHMGQRLNIIIVAEGAIDRNGDPITAEMIKKVVVDNLQQDTRITVLGHVQRGGNPSAFDRILGCRMGAEAVMALMEADENTEPCVISLDGNQAIRLPLMDCVKRTKAVSQAMADKKFDLAVELRGKSFMRNLETYKLLTRLKPPKDAFDEQGHGREGFTVAVMHIGAPACGMNAAVRSFVRNFIYRGDTVLGIQEGVEGLIAGNIKQMDWAEVAGWVGIGGANLGTKRTLPGNRMGLVAARLAEFKIQGLLIIGGFEAFAAAVQFLDSRKDFPALNIPIVVIPGTISNNVPGTEFSLGCDTALNEITEICDRIRQSAQGTKRRVFIIETMGGYCGYLATLAGLAGGADAAYIYEEKFTIKDLQQDVYHMATKMSEGVQRGLILRNEKASDNYNTDFIYRLYCEEGKGLFSARMNVLGHMQQGGSPTPFDRNVGTKMASKAVEWMINQLKSNMSSDGSVSCSSQDSVVLLGIVKRQYKFTPVAELKEQTNFDLRMPKEQWWLKLRPLLRILAKHDSTYEEEGMYMTIEDRSFIN

SEQ ID NO: 112741 - DNA, 2331 bp, Tribolium castaneum
  CDS (1)..(2331)
atggaaggaaaggccgggcataagtttgtggggcgcggagcccataagggcaaaggcatcgctgtgtttaccagtggaggagattcacaggggatgaatgcggctgtcagggctgtggtcaggatggggatttatttggggtgcaaagtctattttatcaaggaaggctaccaaggcatggttgatggcggcaagtacatcgttgaggccaattggtcctccgtaagctctattattcacaaaggaggcactgtgattggaagcgctcgttgccaagatttccgtgaacgcgctggacgtctcaaagctgcaaaaaacctcgtagaaaacggcattaccaaccttgtagtaattggaggtgatggtagtttaacaggtgctgacctcttccgtcaagaatggagctctctattggaggaattggccaccacaggtcaaatcacgaaagaacagcaacagaaataccgcacgttgcaaattgccggtcttgtgggttcgattgataacgatttttgcggtactgatatgaccattgggacggacagtgcccttcacagaattatcgaagcttgcgatgctatagtcagtacggcttattcgcatcaaaggacttttattatggaggttatgggccggcattgcgggtatttggctcttgtggccgcactcacttccgaggccgattatgtgttcataccagaatcaccaccaccagacgattggcaaaaaaggctatgcgataaattagaacaggaacgccacatgggccaacgtctcaatattattatcgtggctgaaggcgctatcgaccggaatggagacccaatcactgcagaaatgatcaaaaaagtcgtcgttgataatctccaacaggacaccagaatcactgttttggggcacgtgcaacgtgggggcaacccgtctgcttttgataggattctgggctgtcgtatgggggctgaggccgtgatggcgctaatggaggctgatgagaatacagagccgtgtgtgatttccttagacggcaatcaggcgataaggttgccgttaatggattgcgtgaagcggacaaaagccgtctcacaggcaatggctgataagaaatttgatttggcggtggaattacgaggaaagtcatttatgcgcaatttggagacttataagttgttgactcgactcaagcctccaaaggatgaaggtttcacagtggccgtaatgcatattggagctcctgcttgtggcatgaatgccgctgtacgttcttttgtacgaaattttatctacagaggagacacagttttgggcattcaggaaggagttgaaggtcttatcgctggcaatataaaacaaatggactgggccgaagtggctggttgggttggcatcgggggtgcaaatctgggcaccaaacgcacccttcctggcaatcgtatgggtttagtagccgcccgattggccgaatttaaaattcaaggtttactcattattggcggttttgaagcatttgcagccgctgtacaatttctagacagccgaaaagatttcccagctctcaatataccaatcgtggtaatccccggaactatcagtaacaatgtaccagggacggaattttcactaggttgtgacacagccttgaacgaaatcacagaaatttgtgatagaatcagacagtcggctcaaggcacgaaaaggagggtttttattattgaaaccatgggcgggtattgcggatatttggccacacttgcaggtctcgctgggggtgcggatgctgcgtacatttacgaggaaaaattcacaattaaagacttgcaacaagatgtctaccacatggctacgaaaatgtccgaaggggtacaacgtggtttaattttgcgtaatgaaaaggcgtcagataactacaataccgactttatctacagattgtattgtgaggaaggaaaaggcttgtttagtgccaggatgaacgttttaggtcacatgcaacaagggggttcccccacaccttttgaccgcaacgttggtaccaaaatggcgtccaaagcggtcgaatggatgatcaaccaattaaaaagcaatatgagttcagacggctcagtcagttgttctagtcaagacagcgtcgttctgttaggaatcgttaaaagacaatacaagtttacaccagtcgctgagttgaaagagcaaaccaactttgacttgcgtatgcctaaagagcaatggtggttgaaactgcgccctctattgcgtattttggcaaaacatgattcgacatatgaggaagaagggatgtatatgacgattgaggatcgcagttttattaattaa

SEQ ID NO: 112742 - protein, 776 aa, Tribolium castaneum
MEGKAGHKFVGRGAHKGKGIAVFTSGGDSQGMNAAVRAVVRMGIYLGCKVYFIKEGYQGMVDGGKYIVEANWSSVSSIIHKGGTVIGSARCQDFRERAGRLKAAKNLVENGITNLVVIGGDGSLTGADLFRQEWSSLLEELATTGQITKEQQQKYRTLQIAGLVGSIDNDFCGTDMTIGTDSALHRIIEACDAIVSTAYSHQRTFIMEVMGRHCGYLALVAALTSEADYVFIPESPPPDDWQKRLCDKLEQERHMGQRLNIIIVAEGAIDRNGDPITAEMIKKVVVDNLQQDTRITVLGHVQRGGNPSAFDRILGCRMGAEAVMALMEADENTEPCVISLDGNQAIRLPLMDCVKRTKAVSQAMADKKFDLAVELRGKSFMRNLETYKLLTRLKPPKDEGFTVAVMHIGAPACGMNAAVRSFVRNFIYRGDTVLGIQEGVEGLIAGNIKQMDWAEVAGWVGIGGANLGTKRTLPGNRMGLVAARLAEFKIQGLLIIGGFEAFAAAVQFLDSRKDFPALNIPIVVIPGTISNNVPGTEFSLGCDTALNEITEICDRIRQSAQGTKRRVFIIETMGGYCGYLATLAGLAGGADAAYIYEEKFTIKDLQQDVYHMATKMSEGVQRGLILRNEKASDNYNTDFIYRLYCEEGKGLFSARMNVLGHMQQGGSPTPFDRNVGTKMASKAVEWMINQLKSNMSSDGSVSCSSQDSVVLLGIVKRQYKFTPVAELKEQTNFDLRMPKEQWWLKLRPLLRILAKHDSTYEEEGMYMTIEDRSFIN

SEQ ID NO: 112743 - DNA, 975 bp, Clostridium thermocellum ATCC 27405
  CDS (1)..(975): transl_table=11
atgagcagtgtaagaacgattggagttttgacaagcggtggagacgctcccggaatgaatgcggccataaggtcggttgtgagaacaggactgtattatggctttaaggttttgggaataagaaagggttttaacggtcttataaacggagatattgaagaactgacggcaagatcagtgggagatataattcacaggggaggtaccattctccagacagccagatcaccccagtttaagaccgaggaaggacttaaaaaagccatgtccatggcaaaagtatttggtattgacgctcttgtggtaataggcggtgacggttcttacagaggagcaagagacatcagcaaacttggacttaatgtcataggaatacccgggacgattgataatgacattggttgcaccgattataccataggttttgataccgccatgaacactgtccaggatgcgatagacaagatacgcgatactgcatattcccatgaaagatgcagtgtgctggaagttatgggaagacatgccggatatattgctgtgaatgtaagtatttccggaggtgctgaggctgtcgttctgcctgagaaaccttttgatatggataccgatgtcataaagcccataattgagggaaggaacagaggcaaaaagcactaccttgttatagttgccgaagggggagaaggcaaagccatcgagatcgcgaaagagattacggaaaagacgggtattgaagccagagccaccatactgggtcatatacaaaggggaggcagtcccactgtatacgacagagtaatggcaagtcagatgggagcgaaggctgttgaagttttgatggaaaacaagcgtaacagagtaattgtctttaaggacaaccagataggtgatatggatttggaagaagctttgcaggttaaaaagaccatttcggaagatttgattcagcttagcaaaatattagcattataa

SEQ ID NO: 112744 - protein, 324 aa, Clostridium thermocellum ATCC 27405
MSSVRTIGVLTSGGDAPGMNAAIRSVVRTGLYYGFKVLGIRKGFNGLINGDIEELTARSVGDIIHRGGTILQTARSPQFKTEEGLKKAMSMAKVFGIDALVVIGGDGSYRGARDISKLGLNVIGIPGTIDNDIGCTDYTIGFDTAMNTVQDAIDKIRDTAYSHERCSVLEVMGRHAGYIAVNVSISGGAEAVVLPEKPFDMDTDVIKPIIEGRNRGKKHYLVIVAEGGEGKAIEIAKEITEKTGIEARATILGHIQRGGSPTVYDRVMASQMGAKAVEVLMENKRNRVIVFKDNQIGDMDLEEALQVKKTISEDLIQLSKILAL

SEQ ID NO: 112745 - DNA, 960 bp, Clostridium difficile 630
  CDS (1)..(960): transl_table=11
atgaaaactataggattactaacaagtggaggagatgctccaggaatgaatgctgcgattagagcggttgtaagatcagcaatatattatggatgcaaagtatatggaatcaatagaggatataagggattactagaagaagatttaactgaaatgaacttatcttctgttggagatattatacacaggggaggaactatattaaaatcttccagatgtgaagaatttaaaacagaagaaggtagattaaaagcagtaaaaattcttaaaaagtataaaattgattgcttagttgtaattggtggagatggttcatttgcaggagctcaaaaacttagtgacttaggattcccagctataggcataccaggaactatagataacgatttagcatatacagattatactataggatttgatactgcaatgaatactattatagatgctataggtaagataagagatacatcatcatctcatgaaagagttaacatagtagaagttatgggaagacactgtggagatttagccttatatgcaggtcttgcaggaggagcggaaactataatagtaccagaagtagaaattacagtagatgaagttgctctaagattaaagactactcaaaaaagaggtaagagacatagtataatcgttttagcagaaggagtcggaagtgctagtgatttagaaaaggaacttaaaaaagagtcaggagcagatttaagagtcactgtattggggcatgtccaaagaggaggaagcccaactgtatctgatagaatactagcaagtagacttggagtaagagcagtagaattattattagatggaaaatcagctagagttgtaggaataaaagaaaacaaaataattgatttagaaataagtgaagctttagctcaaaagaaagtatttgataaagaagcttatgagatggcaaaaatattatctatataa

SEQ ID NO: 112746 - protein, 319 aa, Clostridium difficile 630
MKTIGLLTSGGDAPGMNAAIRAVVRSAIYYGCKVYGINRGYKGLLEEDLTEMNLSSVGDIIHRGGTILKSSRCEEFKTEEGRLKAVKILKKYKIDCLVVIGGDGSFAGAQKLSDLGFPAIGIPGTIDNDLAYTDYTIGFDTAMNTIIDAIGKIRDTSSSHERVNIVEVMGRHCGDLALYAGLAGGAETIIVPEVEITVDEVALRLKTTQKRGKRHSIIVLAEGVGSASDLEKELKKESGADLRVTVLGHVQRGGSPTVSDRILASRLGVRAVELLLDGKSARVVGIKENKIIDLEISEALAQKKVFDKEAYEMAKILSI

SEQ ID NO: 112747 - DNA, 978 bp, Mycoplasma mobile 163K
  CDS (1)..(978): transl_table=4
atggcaaaaaaaatagcaattttgacctctggaggagattctcctgggatgaataatgcaataagaacaattgttaaaacttctaaaattcacggaattgaagtttttcttgtttataatggttataaaggacttgttgaaaaaacaattaaaaatgcaaatgaaattaatgtagatcaatacattggaagtggtggaacttttataggatctgctcgttacttagaattcaaaaaattagaagtaagacaaaaagctgttcagaacttaaaagaaatgggtattgattcacttgtagttattggtggtgatggaagttatgctggagcacaattattacatgaattaggtgtgaaaacaataggtttacctggaacaattgataatgatattgcttcaacagaatatactattggtttagacacagctctaaatacaattgtagaaaatgttgatagattaagagatacaatgaatagcatgaatatggttgctttagttgaagttatgggacatggagctggagatttagcaatgcttagtggtttagcaacaggagctgaaattattgttacaaatgctcatagaaaatctattgatgaaatgattgaaattgttaaagatcaaatgattgcaaaaacaaaaagatcagtaatcggaattgttagcgaatttatttatgatgatttaaaaaaggtagctaaagaaattgaagataaaaccggaattagaacaagagcaattattttagctcatactcaaagaggcggaaatcctaaagcatacgagagaataaatgcttcatttttaggaattgctgcagtagaatcgttattaaaaaatgaaagtggtgtagctctaggttttaaaggtaataaaattatttcaacaccaattccagaagctttaaaagcacaaaattcagctaaaaatgaaaatgaattagtaactaaaatcaataaaataaatcaatcataa

SEQ ID NO: 112748 - protein, 325 aa, Mycoplasma mobile 163K
MAKKIAILTSGGDSPGMNNAIRTIVKTSKIHGIEVFLVYNGYKGLVEKTIKNANEINVDQYIGSGGTFIGSARYLEFKKLEVRQKAVQNLKEMGIDSLVVIGGDGSYAGAQLLHELGVKTIGLPGTIDNDIASTEYTIGLDTALNTIVENVDRLRDTMNSMNMVALVEVMGHGAGDLAMLSGLATGAEIIVTNAHRKSIDEMIEIVKDQMIAKTKRSVIGIVSEFIYDDLKKVAKEIEDKTGIRTRAIILAHTQRGGNPKAYERINASFLGIAAVESLLKNESGVALGFKGNKIISTPIPEALKAQNSAKNENELVTKINKINQS

SEQ ID NO: 112749 - DNA, 981 bp, Erwinia carotovora subsp. atroseptica SCRI1043
  CDS (1)..(981): transl_table=11
atgaaaattggactagttattagcggcggcgatgttagcggaataaataacttcatcttccaggtgaatagaatgactgcctctgacatcgtcattttcgatggtggaattaatggccttatcgataactgctgtaaagttctcacccgccgcgatctggtggattattcactctcatcaatgcccttggttacatcagggagaaaaaccgggaaatgtagaaaaacagactacgagaaaatcgtcaaaaatatccaaaaacaaaagctcgacgcgctcattatggccggtggagatggctcgttccaatttctaaaaaaattaagttgctatggtatccattgctacggtataggaatgacgattgataatgatatctcaggaaatagctatacgattggtttttctaccgcctgcgaacaggtaatgagtgaagtggaaaaattgcgcaatacgggccgtggattgcaaggtcgggtattcatgattgaattactcggtggttattgcggcgagttaacattacaggcggcattaaagagcaatgcagacatcgcactcattccggagtcaccgtgggatattgatgcattatcacagtgtattttggataaaatcgcagaacaaaacagcgtgatcattttatgctctgaaggctacacccatgaatatacccccggctttcagggcgctatcgacactattatcaagaaactcgaacataagattggaatccgtatccgaaaaaccattttaggatatggcttacgaaatggcgcgcccaccggggaagaaattattcagggcaccctgttagcagaagaagtggttcggtgtattaatgccggactgactaataagatcatcattatcaataataacaacaaagcgattcctatcgacttggaggactctgaacgacgtttggttgatatcgaaagtcatttttataagctcgcgaaatctcatcatcttatatga

SEQ ID NO: 112750 - protein, 326 aa, Erwinia carotovora subsp. atroseptica SCRI1043
MKIGLVISGGDVSGINNFIFQVNRMTASDIVIFDGGINGLIDNCCKVLTRRDLVDYSLSSMPLVTSGRKTGKCRKTDYEKIVKNIQKQKLDALIMAGGDGSFQFLKKLSCYGIHCYGIGMTIDNDISGNSYTIGFSTACEQVMSEVEKLRNTGRGLQGRVFMIELLGGYCGELTLQAALKSNADIALIPESPWDIDALSQCILDKIAEQNSVIILCSEGYTHEYTPGFQGAIDTIIKKLEHKIGIRIRKTILGYGLRNGAPTGEEIIQGTLLAEEVVRCINAGLTNKIIIINNNNKAIPIDLEDSERRLVDIESHFYKLAKSHHLI

SEQ ID NO: 112751 - DNA, 963 bp, Erwinia carotovora subsp. atroseptica SCRI1043
  CDS (1)..(963): transl_table=11
atgattagaagaatcggagtgttgacgagcggtggcgatgcaccaggtatgaatgcggcaattcgaggtgtggttcgtgctgcactgtcggaagggctggaaatctacggcatttatgatggctatcagggcttgtacgaagatcgcatggagcagttggatcgctacagcgtatcggatgtaattaaccgcggcggtacgttccttggttccgcacgcttcccacagttccgtgatgaagcggtgcgtcaggtctgcgtagaaaacatgcagagacgcggtctggatgcgttggtggttatcggcggtgacggttcctacatgggtgctaaacgtctgacggaaatgggttttccctgtatcggcttgccgggcacgatcgataacgacgtggcgggtacagactacaccatcggctactttaccgcgctggaaaccgtgctggaagcgattgaccgcctgcgcgatacctcctcttcccaccagcgtatttcgattgttgaagtcatgggacgccactgtggtgacctgacgctggcggcggcaattgctggcggctgtgaatttatcgtcctgccggaagtgccgtttagcccggaagatctggttagcgaaattaaagcgggtatcgaaaaaggtaaaaagcacgcgattgtggcaatcaccgagctggtgtgcgacgtcgatgagctggcgaaatacattgagaaagagacgggacgtgaaacccgttcgaccgtactcggtcacattcagcgcggcggttcgccggtcgcgtacgatcgtattctggcctcccgtatgggtgcctattcgattgagctgctacagcaaggctacggtggtcgctgtgtcggtatccagaatgaaaaaatggtgcaccacgacatcgtggacgccatcgagaatatgaagcgtcctttcaaaggcgactggttggagacggcgaagaaattgttctga

SEQ ID NO: 112752 - protein, 320 aa, Erwinia carotovora subsp. atroseptica SCRI1043
MIRRIGVLTSGGDAPGMNAAIRGVVRAALSEGLEIYGIYDGYQGLYEDRMEQLDRYSVSDVINRGGTFLGSARFPQFRDEAVRQVCVENMQRRGLDALVVIGGDGSYMGAKRLTEMGFPCIGLPGTIDNDVAGTDYTIGYFTALETVLEAIDRLRDTSSSHQRISIVEVMGRHCGDLTLAAAIAGGCEFIVLPEVPFSPEDLVSEIKAGIEKGKKHAIVAITELVCDVDELAKYIEKETGRETRSTVLGHIQRGGSPVAYDRILASRMGAYSIELLQQGYGGRCVGIQNEKMVHHDIVDAIENMKRPFKGDWLETAKKLF

SEQ ID NO: 112753 - DNA, 972 bp, Mesoplasma florum L1
  CDS (1)..(972): transl_table=4
atgaaaagaattggagttttaacttcaggaggagatgcacctggaatgaataatgccattgctggagttgttaaagcagctgaagcacaaggtattgaagtttatggtgtaagagatgggtataaaggtttaattaatggttgatttgaaaaattagattctaaatttgctttagaaattatttcaaaaggtgggactgttttaggttcagctagattaccagaattcaaagaagaaagtgtaagacaaaaagctgttgatcaattaaaagcacatgacattgaagcattagttgttattggtggagatggaagctacatgggagctcaaagattaactgaaatgggaataaactgtattggtttaccaggaacaatagataatgatattgtttcaagtgattatacaattggatttgatacagcattaaatacagttattgaatcagttgaaaaagtgcgtgatactatgcaatcacacaatcgtgctgccgtaattgaagttatgggaaatggttgtggagatttagttacttatgcagctattgcaactcaagcagaaatattttcaccaagtgaaagtaaattaactgttgaacaaatatgtgaacaagctaaaaaatttgcagaagcaaaccacagaagtttaataatattaattagtgaaaaacaacttgatgctaatgaattagcaaaaaaagttgaagaagcaagtggttatgtaactagagcaacaattttaggacatgttcaaagaggtgggcgcccatcaggtatggatcgctatttagcttttacagcagcaatttatgcagttgaaaaattaattgaaggtaaaggtggactttacattggtctaagtgaaaacaaacttgttgcaagagatattgagtcaacattgaatatgccaaagccagataagacagaatttatcgaaaaaataagattattgaacgcaaagatatcaaaatag

SEQ ID NO: 112754 - protein, 323 aa, Mesoplasma florum L1
MKRIGVLTSGGDAPGMNNAIAGVVKAAEAQGIEVYGVRDGYKGLINGWFEKLDSKFALEIISKGGTVLGSARLPEFKEESVRQKAVDQLKAHDIEALVVIGGDGSYMGAQRLTEMGINCIGLPGTIDNDIVSSDYTIGFDTALNTVIESVEKVRDTMQSHNRAAVIEVMGNGCGDLVTYAAIATQAEIFSPSESKLTVEQICEQAKKFAEANHRSLIILISEKQLDANELAKKVEEASGYVTRATILGHVQRGGRPSGMDRYLAFTAAIYAVEKLIEGKGGLYIGLSENKLVARDIESTLNMPKPDKTEFIEKIRLLNAKISK

SEQ ID NO: 112755 - DNA, 1209 bp, Propionibacterium acnes KPA171202
  CDS (1)..(1209): transl_table=11
atgattgccacaatggaccgcagtgttgtcggcgccatccatggaaggatgggtaccacccgacacagatcaggagtcgtcatgtccaaaaagaagaaggtcggcatcctcaccgcaggcggtgattgccccgggctcaacgccgctatccgcggatttggcaaggctgccatccgccagcacgacatggagctcatcggtattcaggacggctttcttggattggcagggaaccgcaccatctcccttgacccgcgtgccctctcaggcatcttgacggtcggcgggaccatcctgggaactagccgtgacaaggtcaatcacatgattatcgacggcgaggaacgggatatggtccccaccatcgtcgagaattacgagaagctgggacttgacgctttggtgactttgggtggcggtggcaccgccaagaacgcgtacaagctcgctaaggccgggctgaacgtcctgcatctgcccaagacgattgacaacgacatcgtcggaaccgacgactccttcgggttctcgacagcactggagattgccacggaggccatcgaccggctgcactccaccgcccattcccaccaccgcatcatcctcgctgagatcatgggccaccgtgccggctggctggccctcggctcgggcatcgctggtggcgctgacgtcatcctgctgcccgaggtgccctacaagctggactccatcgtccaggcggtggaaaaccggcaaaagcaggggttgaatttctcggtcatcgcggtggctgagggagctcgcgatgaggctgattcggccgcgatggctggagctcaggccctcgttgacgcttccaagacctccgagacaaaggcggctgccaagaaggccaagaaggaccttgagcattccatgcgtgacaacaccctcaaattggctactcagcttgaggaggccaccgggctggaatcgcgagtctcgatcctcggctatgtgcagcgcggtggtatcccgtgcgcccacgaccgtctgctcgcgacccggctgggaaccgtgggtgccaagctcgttgacgacggcgagttcggcatcatggtcgccgctcagggcggagacgccacgaccgttccgttgaaagatgtcgctggcaaggttaaatacgtacctgccgaccacccatgggttaaggcggcccgtcaggtcggaaccggtctaggcgactga

SEQ ID NO: 112756 - protein, 402 aa, Propionibacterium acnes KPA171202
MIATMDRSVVGAIHGRMGTTRHRSGVVMSKKKKVGILTAGGDCPGLNAAIRGFGKAAIRQHDMELIGIQDGFLGLAGNRTISLDPRALSGILTVGGTILGTSRDKVNHMIIDGEERDMVPTIVENYEKLGLDALVTLGGGGTAKNAYKLAKAGLNVLHLPKTIDNDIVGTDDSFGFSTALEIATEAIDRLHSTAHSHHRIILAEIMGHRAGWLALGSGIAGGADVILLPEVPYKLDSIVQAVENRQKQGLNFSVIAVAEGARDEADSAAMAGAQALVDASKTSETKAAAKKAKKDLEHSMRDNTLKLATQLEEATGLESRVSILGYVQRGGIPCAHDRLLATRLGTVGAKLVDDGEFGIMVAAQGGDATTVPLKDVAGKVKYVPADHPWVKAARQVGTGLGD

SEQ ID NO: 112757 - DNA, 2247 bp, Propionibacterium acnes KPA171202
  CDS (1)..(2247): transl_table=11
atgaggctcacccccactctccccgacggtcatggtctgcgcattggcatcctgaccagcggtggcgacgctcagggcatgaacgctgctgtgcgggctgtggtgcgctctgcgctaagtgtgggagccgaggtctatgcgatatacgagggctaccagggaatgatcgatggtggcgatggcatccgtaggttcgggtgggacgacgtcggctcgatcctcaaccgtggcggcaccgtgatcggaaccttccgttgcaaggggatgcgcgaacgtccggggcgcctgaaggctgtcagaaatctcctcgaacacgggatcgatcgtctcgtcgtcatcggcggtgacggttcgctcaccggcctggatgtgctgcgcaccgaatggacagacctggtcgctgaactcgtcgacaccggccaggtgagcgccgaggtagcccgggaacaccccgccctcatgatcgccgggctcgtcggatccatcgacaatgacctcgtcggatccgatatgaccatcggtgccgatactgctctgcaccgtattgtcgatgccatcgacgacctcgcctccaccgcggccagccaccagcgatccttcgtcgttgaggtgatgggccgccactgcggctatctcgcccttatggcagcagttgccggcggagctgactatgttcttattccggaacggccgcccgaggacggttgggaggaccgcatgtgcgccgagctcaaacgtggccgtcaggcgggccgacgcgactcgatcgtcgtcgtcgcggagggcgccaccgatcgttccgggaaccggatctcctcggagtacgtccgccaggtgcttgaggacaaactcggtgaggacgcccgggttaccatcctgggccacgtccagcgcggcggacgaccgtcagcctatgaccgctgggcgtcgacctggttgggttatcacgcggttcacgaggtgctctcgaccactccagaggccgaggggcgcgttatcggcactgggtccaaccgcatacatcgcctccccctggtcaaggccgtcgctgacacgaagtcggtgcccggtctcattacggagggccgttacaacgaggccatgcggatgaggggacgttcctttgtcgagatggacgcgatcttcaccgaactcagtgaaccagctcgtaccacttccgacaccgctggtgacgccgaccgcaagcgcgtcgcgatcatgcacgctggcggtccggccccgggcatgaatactgctgcccgtgctgcagtgcgactggcgatttcccgcggtcataccgttgtgggaatccataacgggttcatcggactagcgaccggggacatgtcggaattggcctggagcgacgtcgagggctgggccggggaaggcggcgctgagctgggtacccgccgcgagatccctagcactcgcgacctttatgctgtcagccgcgctctggaggatcatcacatcgacgcgttgctcgtcattggtggctactcggcctacgaaggtatctacaccatgatgactgagcgggaccggtacccggctttccgtattccgacggtgtgcattccggcttcgatcgacaacaacctccccggttcggaactgtccatcggcaccgacaccgctctcaacgtcattgtcgaggcgatggacaagattaaagagtcgggtatcgcgtccagacgctgcttcgtcgtcgagacgatgggtcgtgactgcggatacctcgcgctgatgtcgggtatcgcagctggcgctgagcggatctataccaacgaggacggcatctccctggacgatctagccaacgacgtccattggttgcgggagtcattcgcccacggacgacgacttttccttgccgtgcgcaacgagaacgcatcgcacaattacaccaccgacttcatcgcgcggctgctggaggaggaatcacacggcatgtatgacgtacgccaggtggtactagggcatatgcagcaaggcggctcaccctcacctttcgaccgcttgctcgccaaccgactcgggtatcgcgctctcaatctcattgacgacgagttggcggcgcatcaggacggttcatggttcattggcgtcaacgagtcgggcatgcggccctgttcgatggacaccatgccctctctcattgacgccgctcatcgtcgtccccgcgaacagtggtggctgcaactgaggactattgccaggatggtctcggacgaggtgcggtaa

SEQ ID NO: 112758 - protein, 748 aa, Propionibacterium acnes KPA171202
MRLTPTLPDGHGLRIGILTSGGDAQGMNAAVRAVVRSALSVGAEVYAIYEGYQGMIDGGDGIRRFGWDDVGSILNRGGTVIGTFRCKGMRERPGRLKAVRNLLEHGIDRLVVIGGDGSLTGLDVLRTEWTDLVAELVDTGQVSAEVAREHPALMIAGLVGSIDNDLVGSDMTIGADTALHRIVDAIDDLASTAASHQRSFVVEVMGRHCGYLALMAAVAGGADYVLIPERPPEDGWEDRMCAELKRGRQAGRRDSIVVVAEGATDRSGNRISSEYVRQVLEDKLGEDARVTILGHVQRGGRPSAYDRWASTWLGYHAVHEVLSTTPEAEGRVIGTGSNRIHRLPLVKAVADTKSVPGLITEGRYNEAMRMRGRSFVEMDAIFTELSEPARTTSDTAGDADRKRVAIMHAGGPAPGMNTAARAAVRLAISRGHTVVGIHNGFIGLATGDMSELAWSDVEGWAGEGGAELGTRREIPSTRDLYAVSRALEDHHIDALLVIGGYSAYEGIYTMMTERDRYPAFRIPTVCIPASIDNNLPGSELSIGTDTALNVIVEAMDKIKESGIASRRCFVVETMGRDCGYLALMSGIAAGAERIYTNEDGISLDDLANDVHWLRESFAHGRRLFLAVRNENASHNYTTDFIARLLEEESHGMYDVRQVVLGHMQQGGSPSPFDRLLANRLGYRALNLIDDELAAHQDGSWFIGVNESGMRPCSMDTMPSLIDAAHRRPREQWWLQLRTIARMVSDEVR

SEQ ID NO: 112759 - DNA, 1077 bp, Leifsonia xyli subsp. xyli str. CTCB07
  CDS (1)..(1077): transl_table=11
atgctcaggggcggcgacaaggccgggggagacgagaaacggagcagcatgaagatcggcatcctgaccagcggcggcgactgcccggggctgaacgcggtcatccgcggcgctgtcctcaagggcgaccgggtcctcgacgcggagttcgccggtttccgctacggctggcgcggcgtggtcgagggcgacatcatgcccctcgaccgccactcggtgcgcggcctctcccggcagggtggcacgatcctcgggtcgagccgcaccaacccgttcgagggggagaagggcggtcccgagaacatccagcggatgatggatgagaacggcatcgacgcgatcatcgcgatcggcggcgagggcacactcacggcggctcgccggctcaccgacgctggtctgcgcatcgtcggcgtcccgaagaccatcgacaacgatctcgccgccaccgactactcgttcggcttcgacacggcggtggagatcgcgaccgaggcgatcgaccggctgcgcacgacggcggagtcgcaccagcgctgcatggtcctggaggtcatgggccgccacgtcggctggatcgccctccattcgggcatggccggtggcgcacacgccatcctcatccccgagctgccgcagtccgtcgaccggatctgtgagtgggtcgagtcggtccgggaccgcggccgtgcgcccgtcatcgtggtctccgagggcttccacctcgacacgatggaggaggcgcactcgcacaagggcctggacgccttcaaccggccgcggctcggcggcatcggcgagatgctcgcccccctcatccaggagcgcaccgggatcgagtcgcgcgcgaccgttctcggccacatgcagcgcggcggtgtcccgagcgcgtacgatcgcgtgctcgccacccgcctcggcatggcggcggtggatgcggcctacgagggccgctggggctcgatggtggcgttgcgcggcaccgatgtcgtgaacgtctcgatcgcggacgcgaccggcgggctgaaaacggtcccgcaggcgcgttatgacgaagcggccctccttttcggctga

SEQ ID NO: 112760 - protein, 358 aa, Leifsonia xyli subsp. xyli str. CTCB07
MLRGGDKAGGDEKRSSMKIGILTSGGDCPGLNAVIRGAVLKGDRVLDAEFAGFRYGWRGVVEGDIMPLDRHSVRGLSRQGGTILGSSRTNPFEGEKGGPENIQRMMDENGIDAIIAIGGEGTLTAARRLTDAGLRIVGVPKTIDNDLAATDYSFGFDTAVEIATEAIDRLRTTAESHQRCMVLEVMGRHVGWIALHSGMAGGAHAILIPELPQSVDRICEWVESVRDRGRAPVIVVSEGFHLDTMEEAHSHKGLDAFNRPRLGGIGEMLAPLIQERTGIESRATVLGHMQRGGVPSAYDRVLATRLGMAAVDAAYEGRWGSMVALRGTDVVNVSIADATGGLKTVPQARYDEAALLFG

SEQ ID NO: 112761 - DNA, 1086 bp, Desulfotalea psychrophila LSv54
  CDS (1)..(1086): transl_table=11
atgaaaaaaatagcgatttctacgggtggtggtgacgcccctggtctcaatgcagttatctacgctgttgtccatgcctgttatcgaaaaggatgggaagtttatggcagtcgcaacggctatgccggatttttagatttagaggaaatgatacagctaagaccccgtgatgtagagggtatttatgcaattggtggaaccattattggttcaactaataagggcaatccctttgcaaatcctgttaaaaatctagcaggcgagacacaggtcatcgatatctctgataaaatcttgcgaaatttcaagagaatgaactttgactgccacatagccatcggtggtgacggtagcatggagattgctcaccaatttgccgaaaagggaatgcctgttatcggtgtacccaaaaccattgataatgatcttgaagagactgacagaacctttggttttgacactgccgtctccactgccaccgaagccctcgacaaattgcactccacggcaaaatcccacgacagagtcatggtggtggaggtcatgggacgtgattccggatggatagccctctactctggtatttccgggggagcggatattattctcattccagaagtaccctttgatatggacaaggtctgtgaaaaaattacagacaatgatctacgcggtaaggattactctattgtggtagtggccgaaggggcacaggcgcttaatggccaacggtttattaagggcggattagaacctggacgtcaggaggttatccttggcggagtaggagaatgggttgccacagagatacagaggcgtaccgacaaagacacccgctcccttgttctgggacatcttcagcgaggcggctctccaaccacctttgacagactattggcacttcgatttggcgcagcagcagtacgactggtggagcaggaaacctttgaccatatggtagccctgaaaaattcagagatgaaagctgttcccatagcagatgcaatcagggcacgtaagaaggttgatctcaccagtgacaaggtgcaaaccgcccgggatattggcatctgcttgggtgattag

SEQ ID NO: 112762 - protein, 361 aa, Desulfotalea psychrophila LSv54
MKKIAISTGGGDAPGLNAVIYAVVHACYRKGWEVYGSRNGYAGFLDLEEMIQLRPRDVEGIYAIGGTIIGSTNKGNPFANPVKNLAGETQVIDISDKILRNFKRMNFDCHIAIGGDGSMEIAHQFAEKGMPVIGVPKTIDNDLEETDRTFGFDTAVSTATEALDKLHSTAKSHDRVMVVEVMGRDSGWIALYSGISGGADIILIPEVPFDMDKVCEKITDNDLRGKDYSIVVVAEGAQALNGQRFIKGGLEPGRQEVILGGVGEWVATEIQRRTDKDTRSLVLGHLQRGGSPTTFDRLLALRFGAAAVRLVEQETFDHMVALKNSEMKAVPIADAIRARKKVDLTSDKVQTARDIGICLGD

SEQ ID NO: 112763 - DNA, 972 bp, Symbiobacterium thermophilum IAM 14863
  CDS (1)..(972): transl_table=11
gtgcccaagattcgcaagatcggcgttctgaccagcggaggcgacgcaccgggcatgaacgccgcagtccgtgccgcggtccggcgcgggatctcgctgggcgcggaggtggtcggcgtccggcgcgggtacgctggtctcattgcaggagagttcgtggatctcggagtcagctccgtcggcgatattatccatcgcggcggcaccttcctgcagacggctcgcagcgaccacttcctcacgccggaagggcaggcgcaggccctggccaaggcgcgggaggccggcatcgaggggctcgtggtgatcggaggcgacgggtcgttccgcggcgcgctgcggctcacggagctggggctgcccgccgtcggcgtgcctgccaccatcgacaacgacatctacgggaccgacctcacaatcggtttcgacaccgcagttaacacgtgtctcgacgcgattcgcaagatccgcgacacggccacctctcatgagcgcaccttcgtgttggaggtcatgggtcgccattccggctggatcgcgctggccgccggcctcgcgggcggcgccgagtcgatcctgctccccgagcgtccgatgcccatggaggaggtcgtgacccgcctgaagcggggcgtggagcggggcaagcggcacaccctgatcatcgtggcggaaggcgtcggctccggtttcgaggtcggtaggcagatccgggagatgaccgggtacgacacgcgggtgatggtgctgggccacatccagcggggcggctcgcccaccgcgctggatgcgatgctggcctcccgcatgggcgccaaggcggccgaggtgctgctggaagagggccggggcgggctcttcatcggcgtggagaacgagcagatggtgacccggccgctggagcaggtgctgggccgccgcaaggagatccccgacgaacttgttgacctggcggagattctggcgatctga

SEQ ID NO: 112764 - protein, 323 aa, Symbiobacterium thermophilum IAM 14863
MPKIRKIGVLTSGGDAPGMNAAVRAAVRRGISLGAEVVGVRRGYAGLIAGEFVDLGVSSVGDIIHRGGTFLQTARSDHFLTPEGQAQALAKAREAGIEGLVVIGGDGSFRGALRLTELGLPAVGVPATIDNDIYGTDLTIGFDTAVNTCLDAIRKIRDTATSHERTFVLEVMGRHSGWIALAAGLAGGAESILLPERPMPMEEVVTRLKRGVERGKRHTLIIVAEGVGSGFEVGRQIREMTGYDTRVMVLGHIQRGGSPTALDAMLASRMGAKAAEVLLEEGRGGLFIGVENEQMVTRPLEQVLGRRKEIPDELVDLAEILAI

SEQ ID NO: 112765 - DNA, 969 bp, Bacillus licheniformis ATCC 14580
  CDS (1)..(969): transl_table=11
gtgaaaaagatgaaacgtatcggagtattgacaagcggcggagattccccgggaatgaacgcggcggtccgcgcggttgtcaggaaagcgatctaccatgacgtagaagtatacggaatttacaacgggtattcaggtttaatcagcggaaaaatagaaaagcttgaaatcggttctgtcggagatatcattcaccgcggaggaacgaagctatatacagcaaggtgtcctgagtttaaaacggtagaaggacgggaaaaaggaatagcgaatttaaaaaaatatggtatagaaggattagtcgtcattggcggcgacggttcttatatgggagccaaaaagctcacagaacacggttttccttgtgtgggagtgccgggaacgatcgacaatgacatcccaggcactgatctgacgatcggattcgatacggcgctaaataccgttattgacgccatcgataaaatcagggatacagctacatcccatgaacgtacatacgtgattgaagtaatgggccgccatgccggggacattgctttatggtcaggtttggccggaggcgcggaatccattttgattcctgaagcagactacgatatggaagaaattattgcaaggctgaaaagagggcatgagcgcggcaagaaacacagcatcatcattgtggcggaaggcgtcggcagcggcgttgaattcggaaaaagaattgaagaagccacaaatctcgaaactagagtatcggtgcttggacatatccagcgcggcggttccccgactgcagcagaccgcgtattggcaagccgtctaggggcatttgcggttgaactgcttcttgaaggaaaaggcggacgttgtgtaggaattcaaaataaccagcttgtgcatcatgatatcattgaaatactcgagcaaaaacatacaattgatcaaagcatgtaccgcttgtctcaagaactgtcaatctag

SEQ ID NO: 112766 - protein, 322 aa, Bacillus licheniformis ATCC 14580
MKKMKRIGVLTSGGDSPGMNAAVRAVVRKAIYHDVEVYGIYNGYSGLISGKIEKLEIGSVGDIIHRGGTKLYTARCPEFKTVEGREKGIANLKKYGIEGLVVIGGDGSYMGAKKLTEHGFPCVGVPGTIDNDIPGTDLTIGFDTALNTVIDAIDKIRDTATSHERTYVIEVMGRHAGDIALWSGLAGGAESILIPEADYDMEEIIARLKRGHERGKKHSIIIVAEGVGSGVEFGKRIEEATNLETRVSVLGHIQRGGSPTAADRVLASRLGAFAVELLLEGKGGRCVGIQNNQLVHHDIIEILEQKHTIDQSMYRLSQELSI

SEQ ID NO: 112767 - DNA, 966 bp, Mannheimia succiniciproducens MBEL55E
  CDS (1)..(966): transl_table=11
atgattaaaaaaattgctgtattgacaagtggtggcgatgcacccggcatgaatgccgcgattcgcggcgttgtgcgttctgcattgtttgaaggattggaagtatttggcgtctatgacggttattatgggctataccataataaaatcaaacaattgaaccgttatagcgtatccgatgttattaccagagggggcactttcttgggttctgcacgtttcccggaatttaaaaatcctgaagtgcgggcaaaatgtgcagaaattttacgttctcatggtattgatgcattagtcgtaatcggcggtgacggttcatataccggggctaaattattaaccgaagaacatggcatccaatgtataggtttgccgggtactattgataatgacgcaccgggtacggactatacgattggttatcaaaccgcattagaaacggcggttgatgcgattgaccgtttacgtgatacctcaagttcgcaccaacgtatttctattgtggagattatggggcgccattgcagcgatttgacgattaatgctgcgcttgccggtggatgtgaatatattgtggcttcggaagtcgaatttgatcaagaggaattaattcaacaaattgagcgcagcattgctaatggtaaacgccacgcaattattgcaataacggaattaattactgatgttcatgagttagctaaaagaattgaagaacgcgttcaccatgaaacccgtgccacagtattaggtcatgttcaacgcggcggttctccttgtgcttttgaccgtattcttgcatcccgtatgggggtttatgcggttgatttgttattacaaggtaaaggcggatattgtgtcggtattcaaaacgagcaattagtccatcatgatatcattgacgcaatcaataacatgagacgttcatttaaggctgaattgttagacatgaacgagagattattctaa

SEQ ID NO: 112768 - protein, 321 aa, Mannheimia succiniciproducens MBEL55E
MIKKIAVLTSGGDAPGMNAAIRGVVRSALFEGLEVFGVYDGYYGLYHNKIKQLNRYSVSDVITRGGTFLGSARFPEFKNPEVRAKCAEILRSHGIDALVVIGGDGSYTGAKLLTEEHGIQCIGLPGTIDNDAPGTDYTIGYQTALETAVDAIDRLRDTSSSHQRISIVEIMGRHCSDLTINAALAGGCEYIVASEVEFDQEELIQQIERSIANGKRHAIIAITELITDVHELAKRIEERVHHETRATVLGHVQRGGSPCAFDRILASRMGVYAVDLLLQGKGGYCVGIQNEQLVHHDIIDAINNMRRSFKAELLDMNERLF

SEQ ID NO: 112769 - DNA, 960 bp, Bacillus clausii KSM-K16
  CDS (1)..(960): transl_table=11
ttgaaacggataggtgtattaacaagtggcggggattctcccggtatgaacgcggccattcgtgcggttgtccggaaagcgatttttcatggtttggaagtgtacggcatttcctatgggtaccaaggtttaattaatggcgacataaaaaaaatggagcttggctctgttggtgatattattcaccgtggcggaacaatgctttacacagctcgctgtgaagaatttaaaacgttggaaggccaacaaaagggcattgaacagctgaagaaatttggaattgaagggctagtcgttattggcggagatggttcttaccgcggcgctcaacaattaacgaaacatggttttccaacaatcggcgttccagggacgattgacaacgatattccaggtactgattttacaattggttttgatacagcattaaatacagtcattgacgcgattgacaaaattcgtgatacggccacttctcatgatcgtacatacgtgattgaagtaatgggccgccatgcaggggatttggctttgtgggctggccttgccgatggtgcagagaccattgtcattcctgaggctgagcataatatggagcaaatactcgcaacgattaaacgtggccaagaacgtggcaagaagcacagcattattgtcgtcgctgaaggggtcggttcaggcatagagttcggcgaccggatcagcaaagaaatgaatatggaaacgagagtaaccgtgctcggccatattcaacgcggaggatcgcccacaggggcagaccgtgttttggcgagcagacttggtgcaaaggcagtcgatctgttgttagaaggcaaggctggcatgacagtcgggattcaaaaaaatgaacttgtttatcacccaattgatgaaattttagaccgcccacacacgattgatcaagaaatgtacaagctatctcaggaattatccatttaa

SEQ ID NO: 112770 - protein, 319 aa, Bacillus clausii KSM-K16
MKRIGVLTSGGDSPGMNAAIRAVVRKAIFHGLEVYGISYGYQGLINGDIKKMELGSVGDIIHRGGTMLYTARCEEFKTLEGQQKGIEQLKKFGIEGLVVIGGDGSYRGAQQLTKHGFPTIGVPGTIDNDIPGTDFTIGFDTALNTVIDAIDKIRDTATSHDRTYVIEVMGRHAGDLALWAGLADGAETIVIPEAEHNMEQILATIKRGQERGKKHSIIVVAEGVGSGIEFGDRISKEMNMETRVTVLGHIQRGGSPTGADRVLASRLGAKAVDLLLEGKAGMTVGIQKNELVYHPIDEILDRPHTIDQEMYKLSQELSI

SEQ ID NO: 112771 - DNA, 1005 bp, Bacillus clausii KSM-K16
  CDS (1)..(1005): transl_table=11
atgtcgacggtccgtaacattgctttaattacaagcggcggcgatgcgccagggctaaatggtgccattgcggcaattgcccaaacgccggatgttaacctttatttctatcatggcggatttgacgggatcattgagcaggaccctatcgccatatcaccaacaacagcgagggaggctgtgcaacagggagagttgttatgtttttctggccgcagcacacatatgctccatgaggcgggacaaaagcgtgtcctcgaaaaattaaagcaagactgcatcgacgccctgattgtgtgcggtggcaacggctcggcacaaggggcaagatcgttaagcgcaggcttgccagttgccgttgtgccaatgacgatcgacaacgacattggcggaagtgaatacacgattggccatgacacagcagtcaatgcgattgccgagtcgctccaccggctccgccaaacagcagccaacttgccaggccggatttttatggtcgaaacctttggtgggcgctgcggccaacttccacttgctgctgctgttgctgccagcgcagatatcgtgctccttcctgaatatgagctcaatatagacaagttcattacagaagtaaatgcccgctcagcacgaggaaagagcgtcattattgtcgtatctgaaggcatctatttgaacaagcgtttttctgctggcgaccagggcgtgtcgtttgcacttgcccgagcgcttgaggaatcaacaggaaagcgagtgcgcctctcaatacttggctacacacaacgggcaggtgacccgacaagctatgactgcctgatggccaagcagatgggccaatgtgcggtcgatgcgttgcttaacggtgaaaaggcgatgcttgtggcgttaaaggaagggcgcgtcaaagccattccccttacagcaattgaacaagcgcctactttggcgaaagagcttctgcaattggcttttaaagaaaaccaactgatccaattggagggataa

SEQ ID NO: 112772 - protein, 334 aa, Bacillus clausii KSM-K16
MSTVRNIALITSGGDAPGLNGAIAAIAQTPDVNLYFYHGGFDGIIEQDPIAISPTTAREAVQQGELLCFSGRSTHMLHEAGQKRVLEKLKQDCIDALIVCGGNGSAQGARSLSAGLPVAVVPMTIDNDIGGSEYTIGHDTAVNAIAESLHRLRQTAANLPGRIFMVETFGGRCGQLPLAAAVAASADIVLLPEYELNIDKFITEVNARSARGKSVIIVVSEGIYLNKRFSAGDQGVSFALARALEESTGKRVRLSILGYTQRAGDPTSYDCLMAKQMGQCAVDALLNGEKAMLVALKEGRVKAIPLTAIEQAPTLAKELLQLAFKENQLIQLEG

SEQ ID NO: 112773 - DNA, 1011 bp, Bacteroides fragilis NCTC 9343
  CDS (1)..(1011): transl_table=11
atgaagatcggaattcttacatcaggcggcgattgccccggtataaacgctacaattcgtggggtatgcaaaacagctattaatcattacgggatggaagttgtagggattcacagtggttttcagggactgttgacgaaagaagtagaatcgtttactgaaaaatctttgtccggattgttgaatttaggcggtaccatgctgggaacttcgcgggagaaaccgtttcgtaagcaaggcattatctcggatgtagataaacctgcgttaatacaacgtaatattgcagaattgggtcttgattgtgtagtgtgtatcggggggaatggtacacagaaaaccgctgcaaagtttgctgcgatgggaatcaatattgtttctgtgcccaaaacaatcgataacgatatctggggtaccgatatctctttcggattcgactcggcagtgagtattgctacggatgctattgaccggcttcattccacggcgagttcgcacaaaagagtgatggtgatcgaggtgatgggacataaagccggttggattgctttatattcgggcatggcaggtggaggcgatgttattctggtaccggagataccttacaatattaaaaatataggagatacgattttaaatcgcttgaagaaaggaaaaccctattcgattgtggtggttgccgagggcatccagaccgatggacgtaaacgtgctgccgaatatattgctcaggagattgaatatgaaacgggtattgagacacgtgaaactgtattaggttatattcagcgtggtgggtcgcctacacctttcgaccgtaacttgtctacccgtatgggaggacatgcaacagaactgatcgctaatggacagttcggtcgtatgattgctttgaaaggggatgagatatcttctgttgcattagaggaggtagccggaaagttgaagttggtgaccgaggaacacgatcttgtggtgcagggacgccggatgggaatctgctttggataa

SEQ ID NO: 112774 - protein, 336 aa, Bacteroides fragilis NCTC 9343
MKIGILTSGGDCPGINATIRGVCKTAINHYGMEVVGIHSGFQGLLTKEVESFTEKSLSGLLNLGGTMLGTSREKPFRKQGIISDVDKPALIQRNIAELGLDCVVCIGGNGTQKTAAKFAAMGINIVSVPKTIDNDIWGTDISFGFDSAVSIATDAIDRLHSTASSHKRVMVIEVMGHKAGWIALYSGMAGGGDVILVPEIPYNIKNIGDTILNRLKKGKPYSIVVVAEGIQTDGRKRAAEYIAQEIEYETGIETRETVLGYIQRGGSPTPFDRNLSTRMGGHATELIANGQFGRMIALKGDEISSVALEEVAGKLKLVTEEHDLVVQGRRMGICFG

SEQ ID NO: 112775 - DNA, 1032 bp, Corynebacterium glutamicum ATCC 13032
  CDS (1)..(1032): transl_table=11
atgcgaattgctactctcacgtcaggcggcgactgccccggactaaacgccgtcatccgaggaatcgtccgcacagccagcaatgaatttggctccaccgtcgttggttatcaagacggttgggaaggactgttaggcgatcgtcgcgtacagctgtatgacgatgaagatattgaccgaatcctccttcgaggcggcaccattttgggcactggtcgcctccatccggacaagtttaaggccggaattgatcagattaaggccaacttagaagacgccggcatcgatgcccttatcccaatcggtggcgaaggaaccctgaagggtgccaagtggctgtctgataacggtatccctgttgtcggtgtcccaaagaccattgacaatgacgtgaatggcactgacttcaccttcggtttcgatactgctgtggcagtggctaccgacgctgttgaccgcctgcacaccaccgctgaatctcacaaccgtgtgatgatcgtggaggtcatgggccgccacgtgggttggattgctctgcacgcaggtatggccggcggtgctcactacaccgttattccagaagtacctttcgatattgcagagatctgcaaggcgatggaacgtcgcttccagatgggcgagaagtacggcattatcgtcgttgcggaaggtgcgttgccacgcgaaggcaccatggagcttcgtgaaggccacattgaccagttcggtcacaagaccttcacgggaattggacagcagatcgctgatgagatccacgtgcgcctcggccacgatgttcgtacgaccgttcttggccacattcaacgtggtggaaccccaactgctttcgaccgtgttctggccactcgttatggtgttcgtgcagctcgtgcgtgccatgagggaagctttgacaaggttgttgctttgaagggtgagagcattgagatgatcacctttgaagaagcagtcggaaccttgaaggaagttccattcgaacgctgggttactgcccaggcaatgtttggatag

SEQ ID NO: 112776 - protein, 343 aa, Corynebacterium glutamicum ATCC 13032
MRIATLTSGGDCPGLNAVIRGIVRTASNEFGSTVVGYQDGWEGLLGDRRVQLYDDEDIDRILLRGGTILGTGRLHPDKFKAGIDQIKANLEDAGIDALIPIGGEGTLKGAKWLSDNGIPVVGVPKTIDNDVNGTDFTFGFDTAVAVATDAVDRLHTTAESHNRVMIVEVMGRHVGWIALHAGMAGGAHYTVIPEVPFDIAEICKAMERRFQMGEKYGIIVVAEGALPREGTMELREGHIDQFGHKTFTGIGQQIADEIHVRLGHDVRTTVLGHIQRGGTPTAFDRVLATRYGVRAARACHEGSFDKVVALKGESIEMITFEEAVGTLKEVPFERWVTAQAMFG

SEQ ID NO: 112777 - DNA, 966 bp, Haemophilus influenzae 86-028NP
  CDS (1)..(966): transl_table=11
atgattaaaaaaattgcagttttaacaagtggtggcgatgcgccgggtatgaatgccgcaattcgtggcgtagtacgctctgcacttgcagaaggcttagaagtgtttggtatctatgatggttaccaaggtttatacaataataaaatcaaacaattaaatcgctatagcgtatctgatgtaattaatcgtggcggtacttttttaggttctgcacgctttcctgaatttaaagatccaaatgttcgtgcaaaatgtgcagaaattttacgttctcacggcattgatgcacttgtggttatcggtggtgacggttcttatatgggagctaaattattaaccgaagaacacggtttcccttgtgttggcttacccggtactattgataatgatgttgcaggtactgactataccatcggctatcaaaccgcattacaaactgcagtggatgcaatcgaccgtttacgtgatacatcaagctcacaccaacgtatttctatcgttgaaattatgggtcgccattgtagtgacttaacgatttctgcgggcattgctggcggttgtgaatatatcgtcgcatcagaaattgaatttaatcgcgaagaattaattcaacaaattgaacgtagcattattcgcggtaaacgccacgctattattgctatcactgaacttttaactgatgttcattctctggcaaaagaaattgaagctcgcgtaggtcacgaaactcgcgcaaccgttttagggcatattcaacgtggtggttctccttgtgcttttgaccgtattcttgcctcacgtatgggcgcatacgcagtagatttattgctacaaggcaaaggcggctattgcgtaggtatccaaaatgaacaactcgttcatcacgatattattgatgccattaataatatgcagcgtgtatttaaggctgattggcttaaagtggcaaaacgtttggaataa

SEQ ID NO: 112778 - protein, 321 aa, Haemophilus influenzae 86-028NP
MIKKIAVLTSGGDAPGMNAAIRGVVRSALAEGLEVFGIYDGYQGLYNNKIKQLNRYSVSDVINRGGTFLGSARFPEFKDPNVRAKCAEILRSHGIDALVVIGGDGSYMGAKLLTEEHGFPCVGLPGTIDNDVAGTDYTIGYQTALQTAVDAIDRLRDTSSSHQRISIVEIMGRHCSDLTISAGIAGGCEYIVASEIEFNREELIQQIERSIIRGKRHAIIAITELLTDVHSLAKEIEARVGHETRATVLGHIQRGGSPCAFDRILASRMGAYAVDLLLQGKGGYCVGIQNEQLVHHDIIDAINNMQRVFKADWLKVAKRLE

SEQ ID NO: 112779 - DNA, 1044 bp, Colwellia psychrerythraea 34H
  CDS (1)..(1044): transl_table=11
atgaataataaaaaaacaacgtcaattaagcgcattgcactattaaccagtggcggtgatgctccagggatgaatgcagcgatacgttcagttgtattagcagctcatcattatcatattgaagtcattggtttttatcatggttataacggcttggtatgtgaagagcatatcgccatggctgaaccgttaaccttgttaaaagtaaatagcattattcacctcggtggtacgatattgaagagtgctcgttgtcagttaatgcatgaagcaaaaggcttacagttagccgcggataccttaaatgataaaaatatcgatgcacttgttgttataggtggtgatggatctttttctggattgctggcgcttcaagcgtattggtcaggtcagatgattggaattccgggaacgatagataatgatcttgatgggactgattacactattggctttgccacagcagtaaacactggcatagaagcaattgacaaaattcgtgataccgcagatgcttttgaacggatatttattgttgagttgatggggcgacattgtggccatataacgttcaatgttggtattgcttgtgcggcagagcaggtattatcttttgaaaattttaacgcgaatgagcagtcgtcaaaattacagcaacttgcgacagaaattaccacagcaaagaaaaatcgtcattcaagttatattattgttatcgcagaaaacctgtggccaggtggcgctgtagaattagcgagacaattgcacctacaagctgatattgagtgcacgccctgtatattaggccatatacagcgaggtggctcacccattgctaaagatagaatactcgcgacaaaaatgggcgtagctgctgtgcaagcacttatagacggtgaatccaatattatggtggcagagcaaaataatgcgatgaattttattacgctggatgaggcaattaagcacaaaaaagtagtaagcaaacagctcattgatgcacaacaaaatatcttggcgttaacagcgcaaacccagtgttaa

SEQ ID NO: 112780 - protein, 347 aa, Colwellia psychrerythraea 34H
MNNKKTTSIKRIALLTSGGDAPGMNAAIRSVVLAAHHYHIEVIGFYHGYNGLVCEEHIAMAEPLTLLKVNSIIHLGGTILKSARCQLMHEAKGLQLAADTLNDKNIDALVVIGGDGSFSGLLALQAYWSGQMIGIPGTIDNDLDGTDYTIGFATAVNTGIEAIDKIRDTADAFERIFIVELMGRHCGHITFNVGIACAAEQVLSFENFNANEQSSKLQQLATEITTAKKNRHSSYIIVIAENLWPGGAVELARQLHLQADIECTPCILGHIQRGGSPIAKDRILATKMGVAAVQALIDGESNIMVAEQNNAMNFITLDEAIKHKKVVSKQLIDAQQNILALTAQTQC

SEQ ID NO: 112781 - DNA, 1026 bp, Thermobifida fusca YX
  CDS (1)..(1026): transl_table=11
atgcgagtcggggtactgaccgggggtggcgactgcccgggcctgaacgcggtcatccgtgcggtggtccgtaagggcatcaaggaatacggatacgagttcgtcggattccgtgacgggtggcgcggccccctggaaggcgacaccatgccgctggacatcgaggcggtccgcggcatcctcccgcgcggcggtaccatcctcggctcctcgcgcaccaacctcatgaagatcgagggcggtgtcgagcgggtcaaggacaacatggccgcgctcggggtggacgcgctcgtcgcaatcggcggtgaggacaccctcggcgtcgcgcgccagctccacgaccacggtgtcaacgtggtcggtgtgcccaagaccatcgacaacgacctcaacgccaccgactacaccttcggcttcgacactgcggtcaacatcgcgaccgaggccatcgaccgcctgcacaccaccgccgagtcgcaccaccgtgccctggtcgtcgaggtcatgggccgccacgcgggctggattgcgctgcacgcgggcatggcggccggcgccaacgtcatcctgatccccgagcgcccattcgacatcgacgaggtcgtcgcctacatcgaaagccgcttcaagaccaactacgcgccgatcatcgtggtcgccgagggcgcccacccgaaggagggccagctcaccctggccagcgcggaacgcgactccttcggccacgtccgcctcggcggcatcggccagcgcctcgccgaagagatcgaggcgcgcaccggcaaggaagcccgctcggtggtcctgggccacgtgcagcgcggcggtacgccgtccgccttcgaccgggtgctggccacccggctgggcctgcacgccatcaccgcggtccacgacaaggacttcggcaagatggtcgccctgcgcggcaccgaaatcgtccgcgttgacctgtccgaagccaccgaccagctcaagactgtcccggtcgagcggtacgaggaagccgaagtcttcttcggctaa

SEQ ID NO: 112782 - protein, 341 aa, Thermobifida fusca YX
MRVGVLTGGGDCPGLNAVIRAVVRKGIKEYGYEFVGFRDGWRGPLEGDTMPLDIEAVRGILPRGGTILGSSRTNLMKIEGGVERVKDNMAALGVDALVAIGGEDTLGVARQLHDHGVNVVGVPKTIDNDLNATDYTFGFDTAVNIATEAIDRLHTTAESHHRALVVEVMGRHAGWIALHAGMAAGANVILIPERPFDIDEVVAYIESRFKTNYAPIIVVAEGAHPKEGQLTLASAERDSFGHVRLGGIGQRLAEEIEARTGKEARSVVLGHVQRGGTPSAFDRVLATRLGLHAITAVHDKDFGKMVALRGTEIVRVDLSEATDQLKTVPVERYEEAEVFFG

SEQ ID NO: 112783 - DNA, 1074 bp, Anabaena variabilis ATCC 29413
  CDS (1)..(1074): transl_table=11
atgcgtaaaaaaattggtatcctcacaagtggtggtgactgtccagggcttaactgcgtgattcgtgcagttgtcagccatgcaacacttacttatgattgggaagtatttggtataccttatgccactcagggtttactagagcgtcaagcgatcgctctgaatatgcacggctgggatttgcggggtattgaccctctgctaaatatgggtggcacgattttaggcactattaataagggtgacaccttagcgcacgtagatgagatgcttgccagttatgaggctttggctttggatgctttgatcgtcattggtggtgatggtagtctgggcattctccatgaactagctagccgaggtaattggaatttagtggcgattcccaaaactatagatagtgatgtggcgttgacagaacgcgctgtgggttttgatacggctgtcaatacaattgtcgatgccctcaatcgtttgacctttacggctgcaagtcacgatcgcgtgatgattgtcgaagttatgggacgcagtgccggacatctagccctacacgcgggtattgccgggggtgcagatgtgattttaatccccgaaatttcatacacaattagtggtttatgtcaatacatagctgagttgcgcgatcgctggcaacgcaaatttgcgatcgtcgttgttgctgaaggtgcgaaactatgtctggaagacgtgcaagaaaatattgcctctgcttgtgtgtctcctaaatgcggtcgtggtcaatatattgcggagcaaattgctcgatgcagtaaaaatctcatcgataccagagtttctgtattgggacacattcagcgtggcggtatcccatcagctttagaccgtttaacagccacagtctttgggaaaacagccgttgatttagtagctcaaggtaaatttgggcagatggtagcctggcaaaatggcgaagctatcccagtacccattcaagacgttgtagctcaaagtcctttacacgtaaatccccaaggttcgttggtacagagcgctcgttgtttgggtatttatgtaggagaaaaaacttaa

SEQ ID NO: 112784 - protein, 357 aa, Anabaena variabilis ATCC 29413
MRKKIGILTSGGDCPGLNCVIRAVVSHATLTYDWEVFGIPYATQGLLERQAIALNMHGWDLRGIDPLLNMGGTILGTINKGDTLAHVDEMLASYEALALDALIVIGGDGSLGILHELASRGNWNLVAIPKTIDSDVALTERAVGFDTAVNTIVDALNRLTFTAASHDRVMIVEVMGRSAGHLALHAGIAGGADVILIPEISYTISGLCQYIAELRDRWQRKFAIVVVAEGAKLCLEDVQENIASACVSPKCGRGQYIAEQIARCSKNLIDTRVSVLGHIQRGGIPSALDRLTATVFGKTAVDLVAQGKFGQMVAWQNGEAIPVPIQDVVAQSPLHVNPQGSLVQSARCLGIYVGEKT

SEQ ID NO: 112785 - DNA, 966 bp, Carboxydothermus hydrogenoformans Z-2901
  CDS (1)..(966): transl_table=11
atgaactccattggggttttaaccagcggtggcgatgcgccaggaatgaacgcagcggttcgggcggtagttagaaaagccctttttcacgggataaaagtttacggaattgaacgaggttatgccggcttaattaataatgagataaaagaaatgagtttgggcagtgttggtgacatcatccaaaggggcggaacggtcttaaaaactgcccgctctttagaatttaaaacttatgaaggcaggttaagagcttttcaaaatttaaaaaaccatggcatcgaaggtttggtggttattggaggagatggctccttccagggagccttaaaactttatgaggaatttggggtaaaggtggtcggtatacccgcaactattgacaatgacatttatggtaccgattattcaattggttttgatacgacggtaaatacggtggtagatgctattaataaaatacgggatactgccttttcccatgaacgtaccttcattgttgaggttatgggaagaaacgccgggtttatagctttagaagcaggaattgctggaggagctgaatcgataattatcccggaaataccttactctatcgaggaaatttgccaaaagttaattaagagccatcagcggggaaaattacatagcataattatcattgctgagggcgcgggaagcggcattaagctgggagaagtaattaaggaaaagaccggttttgagacccgggtaacgattttaggccacatccagcggggtggaagcccttcggcttttgaccgaattttagcaagccggatgggtgctatggcggttgatgccttaagagaggggatttcccaaggggtgatggttgcctttgagaagggcgaatatgttttaaagcccctggaaactgctttttcggggaaaaagcaaattgaccttgaatattatcgtttagccgatattttatcgatttaa

SEQ ID NO: 112786 - protein, 321 aa, Carboxydothermus hydrogenoformans Z-2901
MNSIGVLTSGGDAPGMNAAVRAVVRKALFHGIKVYGIERGYAGLINNEIKEMSLGSVGDIIQRGGTVLKTARSLEFKTYEGRLRAFQNLKNHGIEGLVVIGGDGSFQGALKLYEEFGVKVVGIPATIDNDIYGTDYSIGFDTTVNTVVDAINKIRDTAFSHERTFIVEVMGRNAGFIALEAGIAGGAESIIIPEIPYSIEEICQKLIKSHQRGKLHSIIIIAEGAGSGIKLGEVIKEKTGFETRVTILGHIQRGGSPSAFDRILASRMGAMAVDALREGISQGVMVAFEKGEYVLKPLETAFSGKKQIDLEYYRLADILSI

SEQ ID NO: 112787 - DNA, 1086 bp, Carboxydothermus hydrogenoformans Z-2901
  CDS (1)..(1086): transl_table=11
atggctgtgggtattttaaccggtggtggtgattgcccgggcttaaatgcagtaattcgggctttagtgaaaactcttcaacaaaagcttcccgaagagaaaataatcggctttttagatggttttcgcggggcaattgaaaaccgaagtgtgcctctaacaacgaaagacgtggtaggtttactccctaaaggcggaacgattttgggcacttccaaccgggataatccttttaaatttcccgtatctgttaacggcaccttagaatttcacgatgttagcgatactgtaatcgaaaatttacataaaaacaatattgaggtgttattcgtcattgggggtgatggttctctttctattgcccacgaactctcccaaaagggtgtaaaggttataggaatcccaaaaactatagataatgacctggatgctaccgattttacctttggctttgacagtgcggtaaggaccgcaaccaaagctcttgatatgcttcacaccactgctgaatcccaccaccggatcatggtattggaggttatgggacggtatgccggctggattgccctatattcgggactggccggaggtgcagatgttattttaattcccgaaattccctttaactgggatgccgtttgccgaaaaattcagcaaagaaaagccgaaggaaagcatttttccatagttgtagttgctgaaggagcctatcccgaaggtggggaaagggtaattgcaagatatgttaaggaaagtaccgatccggcccgtttggggggaattggccaggtagtagctgaccatttaagccgctgtacgggcttggaaagcagggtaacggttttaggtcacctgcaaaggggtggaggtcctacaccctttgaccgcatcctggcgactcgctttggggttgctgcagtaaatacatggcttcagggtaattataatgtcatggttgcctttttagggggaagggtaactacggtgcctttaagcgaaggaataaaaaaattaaaattagtccccgttgattcagaattaattgtaaccgctaaagcaataggtataagttttggagatgaatga

SEQ ID NO: 112788 - protein, 361 aa, Carboxydothermus hydrogenoformans Z-2901
MAVGILTGGGDCPGLNAVIRALVKTLQQKLPEEKIIGFLDGFRGAIENRSVPLTTKDVVGLLPKGGTILGTSNRDNPFKFPVSVNGTLEFHDVSDTVIENLHKNNIEVLFVIGGDGSLSIAHELSQKGVKVIGIPKTIDNDLDATDFTFGFDSAVRTATKALDMLHTTAESHHRIMVLEVMGRYAGWIALYSGLAGGADVILIPEIPFNWDAVCRKIQQRKAEGKHFSIVVVAEGAYPEGGERVIARYVKESTDPARLGGIGQVVADHLSRCTGLESRVTVLGHLQRGGGPTPFDRILATRFGVAAVNTWLQGNYNVMVAFLGGRVTTVPLSEGIKKLKLVPVDSELIVTAKAIGISFGDE

SEQ ID NO: 112789 - DNA, 960 bp, Geobacter metallireducens GS-15
  CDS (1)..(960): transl_table=11
atgaaaaagatcggcattctcacgagcggcggcgactgctccggcatgaacgccgccatccgggcggcggtacggaccgcgatccgcctgaacatcgaggtggtgggattcagaaagggatatctggggctcatgaagggggatgccatccccctcgacaccaaggcggtttcgggcatcctccaccggggtgggacgttcctccagtcggcccgctcgccggaattcaagacccccgaggggcagcagaaggccatcgacaacctgaaggagttgggcgtcgaaggactcgtggtgctcggtggcgacggctccctaaccggcgccctggcgctccaccggctcggcctgccggtggtcggcatcccgtccagcattgacaacgacatcccctacaccgacatggccctcggtgttgatacggccctcaacaacatcatctacgccgtcgactgcatcaaggatacggccagctcccacgcccgggcctttgtgatcgaggtcatggggcgcaactcggggtacctggccagcatctccgccatcgccaccggtgccgagttcgccctggtccccgaacgggaatacgacctggccgagatctgccaacagctccgagcacgcttcgaggaggggcgcgataacgccatcatcatcctcgccgaaggcgccggccatgcccgggagatctccgacagcatcaaggacgccatcggcttcgagacgcggatcacggtgctgggccactaccagcgcggcggcgcgccgaccgtcttcgatcggctcctggcaagccgtttcggcaagcgggcggtggaactcctcatctccggcaactccggggtgatggtgggactttcctgcaatgccattctcgccacgcccctggaagacgtcatcaaaggcgagaaacgcccccaggacgaggtattgcggctggcagaggtgttaggtgtttag

SEQ ID NO: 112790 - protein, 319 aa, Geobacter metallireducens GS-15
MKKIGILTSGGDCSGMNAAIRAAVRTAIRLNIEVVGFRKGYLGLMKGDAIPLDTKAVSGILHRGGTFLQSARSPEFKTPEGQQKAIDNLKELGVEGLVVLGGDGSLTGALALHRLGLPVVGIPSSIDNDIPYTDMALGVDTALNNIIYAVDCIKDTASSHARAFVIEVMGRNSGYLASISAIATGAEFALVPEREYDLAEICQQLRARFEEGRDNAIIILAEGAGHAREISDSIKDAIGFETRITVLGHYQRGGAPTVFDRLLASRFGKRAVELLISGNSGVMVGLSCNAILATPLEDVIKGEKRPQDEVLRLAEVLGV

SEQ ID NO: 112791 - DNA, 1092 bp, Geobacter metallireducens GS-15
  CDS (1)..(1092): transl_table=11
atgaaacggaagatcggcatccttacgggagggggagactgtcccggcctcaacgcggtgatacggggcgtggtgaagagcgccatcatcgggaggggatgggaggtggtcggtatcgaggacggattcgacggccttctctacgaccgaacccccagaccactggggcttgaagacgtgaggggaatccttccgcggggaggaacgatccttggcacctccaataggggcaatcccttttcctaccccattgaggttaacggtaaaactgtgctgactgatgtgtccgaccgggttgtggagcgggtcaaggacctcgggatcgacgccatcgtggcagtggggggagatggttccctcaagatcgccctggagttgatgaaaaggggggtgccggtggttggcgtcccgaagacaattgacaacgatctaatggaaaccgatgtcacctttggttacaacacggccctggaaacagccactgatgccctcgacaagctccattcgacggccgagagccatcaccgtatcatgatcatggaggtgatggggcgctatgccggctggatcgcactggagtcgggtatcagcggcggtgcggacgtgatcctgatccccgagatcccctttgaactgaaggccgtctgcaatgccattgaaggccggcgccggcgaggcagcaaattcagcattgtggtggcggccgagggagcctttccccggggcggtacgcgggtcgtccaaaaaaaggccgatgaaaccatggcaatcgagcggctcggcggcatcggcaactttgtggcccacgaacttacctcctgtctcgatatggacatccgggtgacagtgctcggccatctccaacggggagggtccccctcaacctttgatcgctgtctcgggagccgatttggcatcggtgccgttgagcttatcgaaagggagcagtacggagagatgatctgtctcaagggaagagccatccgttccgttcccattgaaaaagctgtccgcaagctcaaacttgtcgatccccgaggacagatggtaaccgctgccaaagagctgggaatcaatgtcggaagggagtga

SEQ ID NO: 112792 - protein, 363 aa, Geobacter metallireducens GS-15
MKRKIGILTGGGDCPGLNAVIRGVVKSAIIGRGWEVVGIEDGFDGLLYDRTPRPLGLEDVRGILPRGGTILGTSNRGNPFSYPIEVNGKTVLTDVSDRVVERVKDLGIDAIVAVGGDGSLKIALELMKRGVPVVGVPKTIDNDLMETDVTFGYNTALETATDALDKLHSTAESHHRIMIMEVMGRYAGWIALESGISGGADVILIPEIPFELKAVCNAIEGRRRRGSKFSIVVAAEGAFPRGGTRVVQKKADETMAIERLGGIGNFVAHELTSCLDMDIRVTVLGHLQRGGSPSTFDRCLGSRFGIGAVELIEREQYGEMICLKGRAIRSVPIEKAVRKLKLVDPRGQMVTAAKELGINVGRE

SEQ ID NO: 112793 - DNA, 1083 bp, Synechococcus elongatus PCC 7942
  CDS (1)..(1083): transl_table=11
atggcggtgcgcaagttaggcgttctcaccagtggcggcgattgcccaggcctcaatgctgtgattcgagcgatcgcccgtcatgccgttggcaattacggctgggagctctgggggattgcctacgccactcaagggctcctcaagcggcaagcgatcgccctgtccccccaccacttcgatcggcagagtcttgacccgttgctctgcagcggtggcaccatcctcgggtccatcaatcggggcgatacccttgcccaccaagccgaaattctggctggctatcaggaacttggcttggatgccctgattggcattggcggcgatggcagtctggccattctgcggcagctagccgaagcgggtcgttggcagttcatcggcatcccaaaaaccatcgacaacgatgtagcgctgactgagcgggcgatcgggtttgataccgccattcacaccgttgcggaagccctgctgagtttgggcagcacagcagccagccacgatcgcatcatgattgccgaggttatgggtcgccagtcggggcatttggccctacagggcggcattgccggaggcgccgacgtcattctcttgccagaaattccctatcgactgctggagctctgtcactacttacagcaactgcgcgatcgctggcagcgtcgctatgccgtgattgcgatcgcggaaggcacccatcatccccccgaggtcactcaaggacctggcagcttgggcgaacaattggttcaggcaatcaccgcccaggatccgacattagatgcccgtgtcaccgtcttgggtcatgtgcagcgcggtggtaaccccgtagcgagcgatcgccttttggctactcagatgggctacgccgctgtagaacggcttgccgcaggtgcctccggcgaaatgatggcttggcagggcgggcgggttgtcagcgttccgctcgaagccgtctgcctccaaagccctaccttggttgatcctcacagtccgctcgtcgataccgctgcagggctgggaatttttctgggcgatcgcagtctgactccttggcggggttcagcgtgccccacccattga

SEQ ID NO: 112794 - protein, 360 aa, Synechococcus elongatus PCC 7942
MAVRKLGVLTSGGDCPGLNAVIRAIARHAVGNYGWELWGIAYATQGLLKRQAIALSPHHFDRQSLDPLLCSGGTILGSINRGDTLAHQAEILAGYQELGLDALIGIGGDGSLAILRQLAEAGRWQFIGIPKTIDNDVALTERAIGFDTAIHTVAEALLSLGSTAASHDRIMIAEVMGRQSGHLALQGGIAGGADVILLPEIPYRLLELCHYLQQLRDRWQRRYAVIAIAEGTHHPPEVTQGPGSLGEQLVQAITAQDPTLDARVTVLGHVQRGGNPVASDRLLATQMGYAAVERLAAGASGEMMAWQGGRVVSVPLEAVCLQSPTLVDPHSPLVDTAAGLGIFLGDRSLTPWRGSACPTH

SEQ ID NO: 112795 - DNA, 1101 bp, Rhodospirillum rubrum ATCC 11170
  CDS (1)..(1101): transl_table=11
atggccgagattagacgcatcggagtactcaccagcggcggcgattgcgccgggctcaacgcggtgatccgggcggttacccaccgcgcccgccgggcctacggctggaaagtgttcggtattctcgacggaaccatggggctgatggaccgccccttgcgctaccgcgagctcgactcggaaatgttttcgggcttcgacattctgcgcgccggcggcaccgttctgggtaccgtcaacaagggcgaccccttcgccttccccatggccgacggttccaagaccgaccgctcgcttgacttcgtcgacggcttccacagcctggaactcgacgccctggtggtggtcggcggcgacggctcgatgcgcattctcaagaagctgtgcgacaagggcagcatcggcatggtcggcgtgcccaagaccatcgacaacgatgttcacggcaccgaatacgccgtcggcttctccaccgccaccaatgtggtgaccgaggccctggaccgtctgcaggcgaccgctgccagtcaccaccgggtgatgatcctggaagtcatgggccgcgacgccggccatatcgccgtcagcgccggcatcgccggcggcgccgatgtcatcttgatccccgagatcccctataccctggaaggcgtggccaagcgcatccgcgaggttcagcaggaaggccgcagccacgccctgatcgtcgtcgccgagggcgtgctgacccccgagggcgagcgcgccaccgtggcctatgccggtggccaaacccgctatggcggcatcagccagtatctgtccgaccgcatcgcccaggacaccggcaccgaaacccgggtgaccatcctcggccacgtccagcgcggcggcattccttcgatgcgcgaccgcctcctcgcctcggccttcggcgtccatgccgtcgatctggtggcggcgcgcaaattcggccgcatggtggcttggcaggaccggggcgtcgtcgacgtgccgctggaagaggtctgcatcggaccgcgcagccttgatcccaatggtaccctggtccatgccgcccgcggcctgggcatctatgtcggcgaaatcggcgccgcgtaa

SEQ ID NO: 112796 - protein, 366 aa, Rhodospirillum rubrum ATCC 11170
MAEIRRIGVLTSGGDCAGLNAVIRAVTHRARRAYGWKVFGILDGTMGLMDRPLRYRELDSEMFSGFDILRAGGTVLGTVNKGDPFAFPMADGSKTDRSLDFVDGFHSLELDALVVVGGDGSMRILKKLCDKGSIGMVGVPKTIDNDVHGTEYAVGFSTATNVVTEALDRLQATAASHHRVMILEVMGRDAGHIAVSAGIAGGADVILIPEIPYTLEGVAKRIREVQQEGRSHALIVVAEGVLTPEGERATVAYAGGQTRYGGISQYLSDRIAQDTGTETRVTILGHVQRGGIPSMRDRLLASAFGVHAVDLVAARKFGRMVAWQDRGVVDVPLEEVCIGPRSLDPNGTLVHAARGLGIYVGEIGAA

SEQ ID NO: 112797 - DNA, 1083 bp, Moorella thermoacetica ATCC 39073
  CDS (1)..(1083): transl_table=11
ttgcgcaaacgcctgggtattctcaccggcggcggcgactgccccggactcaatgccgtcatcagggcggcgacgaagacggccatgagccacggctatgagatgatcggctttctggatggttataccggcgtcgttgaaggccggtatatcaggctggacccagcggctatttccggcctcctccaccggggaggcaccattctgggtaccaataaccgcagcaatcccttttattttcctatccaggaaaatggcgagaccatttaccgggatatgtcggacctggccatcgagcgccttaaggagatgaacatcgaggttctcctggtggttggcggtgatggcaccctggcgggggcccgggactttaaggccaaaggggcgcgagtcatcggcatccccaagaccatcgacaacgacctggcggccaccgaccagaccttcggtttcgatacggccgtcaggacggccaccgacgccctggataaattacataccacggcggaatcccatcaccgggtcatggtcctggagcttatgggtcgttatgccggctggatcgccctgtacagcggcctggctggcggggcggatgtaatcttaattcctgagattccctggaatatagaaagcgtgctggctaaaatagaggcccggcgggccgagggtaagcccttcagcatagtcgttgttgccgaaggggtcaaatcgccggagggtgagctggtcgtccagcgccgggtggaaggtagcgtggaaagggtgcgcctgggtggcatcggccagctggtgggtaaattgatagaagagaagagcggcatcgaaacccgggtgacggtcctgggccatatccagcggggcggctcgccttcctcctacgaccgcgttctggccactcgcttcggggtggcggccgccgaactggccgtcaggggcgtccacggggtcatggtctgcctgcggggcagcgatatctcccatgtccccctggaagaagccgtcggcaagccccggaccatcccaagggaccaccagctcctggccgcagccagggccattggaattagcttcggggagtga

SEQ ID NO: 112798 - protein, 360 aa, Moorella thermoacetica ATCC 39073
MRKRLGILTGGGDCPGLNAVIRAATKTAMSHGYEMIGFLDGYTGVVEGRYIRLDPAAISGLLHRGGTILGTNNRSNPFYFPIQENGETIYRDMSDLAIERLKEMNIEVLLVVGGDGTLAGARDFKAKGARVIGIPKTIDNDLAATDQTFGFDTAVRTATDALDKLHTTAESHHRVMVLELMGRYAGWIALYSGLAGGADVILIPEIPWNIESVLAKIEARRAEGKPFSIVVVAEGVKSPEGELVVQRRVEGSVERVRLGGIGQLVGKLIEEKSGIETRVTVLGHIQRGGSPSSYDRVLATRFGVAAAELAVRGVHGVMVCLRGSDISHVPLEEAVGKPRTIPRDHQLLAAARAIGISFGE

SEQ ID NO: 112799 - DNA, 960 bp, Moorella thermoacetica ATCC 39073
  CDS (1)..(960): transl_table=11
ttgcgcactatcggtgttttgaccagcggtggtgatgccccgggaatgaatgcagctatcagggcggtagtccgccaggctgccgccctgaagatagacgtgatcggcatttcccgggggtacgccgggttgatccagggcgattttcgccgcctgaataccggttcggtagccgggattatccaccggggcgggaccatcttgctgacggcccggtcggaggagttccgcaccgaagccggccgggccacggccctggataacctgcaccgggaaggcattgaaggtctcgtagtcatcggtggagacgggtccttccacggcgctgttcacctggccaaaaagggcctgccggtaatcggcatccccgggaccattgataacgacatagccggcaccgattacaccatcggctttgatacggccgttaatacggccgtagaggccatcagccggatccgggatacggcgacttcccatgaacgcatttttatcatcgaagttatggggcgtcgctcaggccagattgccctggcggcggggatagccgggggcgccgaatctattctcatccccgagtaccccgttaactacgaccgggtggtggagaaattagaacagggccgccaccggggtaaactccatagtattatcgtcgtagccgaaggggtgggcagtgccctggaggtaagcgaagaaatagcccggcgaaccaggctggagagccgcgtgaccatcctgggccatattcagcggggtggagcgcctacggcttttgattgtatgctggccagccggctgggcgcccgggcggtggacctcctggccgacggcgccagcagccgcatggtgggcatcgccgccaacgagctggtggaccgggacctggagacggttctccgggaaaagaagagtatcgatcctgaactgtaccgtttagccgaagtactggcactataa

SEQ ID NO: 112800 - protein, 319 aa, Moorella thermoacetica ATCC 39073
MRTIGVLTSGGDAPGMNAAIRAVVRQAAALKIDVIGISRGYAGLIQGDFRRLNTGSVAGIIHRGGTILLTARSEEFRTEAGRATALDNLHREGIEGLVVIGGDGSFHGAVHLAKKGLPVIGIPGTIDNDIAGTDYTIGFDTAVNTAVEAISRIRDTATSHERIFIIEVMGRRSGQIALAAGIAGGAESILIPEYPVNYDRVVEKLEQGRHRGKLHSIIVVAEGVGSALEVSEEIARRTRLESRVTILGHIQRGGAPTAFDCMLASRLGARAVDLLADGASSRMVGIAANELVDRDLETVLREKKSIDPELYRLAEVLAL

SEQ ID NO: 112801 - DNA, 1215 bp, Syntrophus aciditrophicus SB
  CDS (1)..(1215): transl_table=11
atgttaaaagcttcacgcaaacagatggcccgcgccaggcaaggcacagaggaatattaccaatttatttatttgacaagtgaattcataaatcatgggaggctgcttatgaaaatgaaaattgctgtactgacaggcggtggtgattgtcccggtttgaacggcgcggtaaaatgggttacaaaaagtgcaacagatcaatggttgggatcaaaacgttccatgtcattcgaagtcattgggattacggatggatggcgtggactggttgatgttgatccggacgatcccaaaagcctggcaaaatacactcgtcctcttgatgaagaaatcgttcggacgtgggaccgttatggagggactaacctcggaacttcacgcaccaatcctttcaatcccaaaaatgacagatcggaaatattactggataatattaaaaaactcggaattgatgtagttgtcgccatcggaggggaagatactctgggggcggcttacagtctgcacaaactgggaatcaagaccgttggtattcctaagacaattgataacgacttggttggaacggattattctattggattcgacactgccgtcaatgtgattacggaagaaatcgaccgtctgcggacgacagccggttcacacagccggattttcgttgtggaaaccatgggacgtcacgccggatggcttgcacttcatggcggtgaatgcagtggcgcctatatcattcttattcctgaacatccatttaatctcgatgaaatatgcacgctgctccaggaaagaaaaggaagggaaatccgctatgccattcttgttgtctctgagggagcgaagccggtcggtcagaaagagtttatcacaagttccaaaatagatgaattcggccatgtcgctcttggggggatagccaaattcgtcgctgatgaaattgaaggaagaacgagtctggagaccagacacttaatccttagtcatttgcagcgcggcggtacaccatcagcccatgacagactgatggcaagatggtttggaatcgctgcggtggatatgattattaatgaagattttggccgtatggcaagcctgcagcggggtgaaattaccagtgttcctctgaaggaatgcatcggaaaattaaaacttgtggatactgtaaagtattacgacaaagaacgatataatggacgtcgatccataatcagttaa

SEQ ID NO: 112802 - protein, 404 aa, Syntrophus aciditrophicus SB
MLKASRKQMARARQGTEEYYQFIYLTSEFINHGRLLMKMKIAVLTGGGDCPGLNGAVKWVTKSATDQWLGSKRSMSFEVIGITDGWRGLVDVDPDDPKSLAKYTRPLDEEIVRTWDRYGGTNLGTSRTNPFNPKNDRSEILLDNIKKLGIDVVVAIGGEDTLGAAYSLHKLGIKTVGIPKTIDNDLVGTDYSIGFDTAVNVITEEIDRLRTTAGSHSRIFVVETMGRHAGWLALHGGECSGAYIILIPEHPFNLDEICTLLQERKGREIRYAILVVSEGAKPVGQKEFITSSKIDEFGHVALGGIAKFVADEIEGRTSLETRHLILSHLQRGGTPSAHDRLMARWFGIAAVDMIINEDFGRMASLQRGEITSVPLKECIGKLKLVDTVKYYDKERYNGRRSIIS

SEQ ID NO: 112803 - DNA, 1338 bp, Frankia sp. CcI3
  CDS (1)..(1338): transl_table=11
gtgggtgcaccaatactggtggataatgccgatctggcggtcaagaccctgggggtctgccggattgactccccgctcctgccgctgctgggggagcggccgacgacgcagcattacatcgatgagtcggacaaggtcctctacgacgacaccgccctgatgatctcctcgcgtggtgtcgcgctcgatgacctgcccggattcgagccggccgggccgcgccggaagatctacttcgacccgtcgaagacccgggtgggcatcgtcacctgcggtgggctctgtcccgggttgaacaacgtgatccgcggtctggtgctggagctgacctcgcactaccgggttcggcggatcttcggattccgcaacgggtaccagggcttcatcgcccgctacggccacgacgtcgtcgatctcaccccggagagcgtcgccaacatcgacgaggacggcgggacgatcctcggcagttcccgcggccagcaggatcccgccgagatcgtcgactgcctctcccggatgaacatcaacatcctgttcgtcatcggcggtgacggcaccctgcgcggggccgggcagatcgcccgggaggccgagacgcgcggggagaagatcgccgtggtcggcatcccgaagacgatcgacaatgacatcccctacatcgaccagagcttcggcttccagacggccttcggcaaggccgcggagtccatccgggtcgcgcacgccgaggcgacgtccgcgcccggcgggctcggcgtggtccggctcatgggccgccactcgggattcatcgcctgctacgcgacgctggcgaagagtaacgcggacgtggtgctcatcccggagttgccgttcaagctggagggcgacggcggtctgctgaactacgtgcgtcgccgggtggccgagcgcggccacgccgtcgtcgtcgtcgccgagggtgccggccaggagcttgtcgtcggccagccggagagcaccgacgcgtccgggaaccgcaagctgcacgacatcggcccggagctctcccgccggatcaaggagtacttcgacgccgagggcatcgagctcaacctgaagtacatcgatcccagctacgtgatccgcagcgtgccggcgaacccgtacgacagcgtctacacgatccggctcgcccacgcggccgtgcacgccgcgatgtccggccgcacggagatggtcgtcggccgctggcggcggcggttcatccacatcccgatcccgctcgcgatcagccagcgcaaccaggtcgacccggccggcgatctgtggatgtccgtcctcgaagcgaccggccagcccccccgcttcgaatag

SEQ ID NO: 112804 - protein, 445 aa, Frankia sp. CcI3
MGAPILVDNADLAVKTLGVCRIDSPLLPLLGERPTTQHYIDESDKVLYDDTALMISSRGVALDDLPGFEPAGPRRKIYFDPSKTRVGIVTCGGLCPGLNNVIRGLVLELTSHYRVRRIFGFRNGYQGFIARYGHDVVDLTPESVANIDEDGGTILGSSRGQQDPAEIVDCLSRMNINILFVIGGDGTLRGAGQIAREAETRGEKIAVVGIPKTIDNDIPYIDQSFGFQTAFGKAAESIRVAHAEATSAPGGLGVVRLMGRHSGFIACYATLAKSNADVVLIPELPFKLEGDGGLLNYVRRRVAERGHAVVVVAEGAGQELVVGQPESTDASGNRKLHDIGPELSRRIKEYFDAEGIELNLKYIDPSYVIRSVPANPYDSVYTIRLAHAAVHAAMSGRTEMVVGRWRRRFIHIPIPLAISQRNQVDPAGDLWMSVLEATGQPPRFE

SEQ ID NO: 112805 - DNA, 1026 bp, Frankia sp. CcI3
  CDS (1)..(1026): transl_table=11
atgaggatcggcgtactgaccggcggcggcgactgcccgggactcaacgcggtgatccgggccgtcgtgcgcaagggagagagcgtctacggccacagctttgtcgggtaccgggacggctggcgagggccgctgaccggcgagacggtccccttggacatcgcggccgtgcgggggatcctcccgcgtggcggcacgatcctcggctccagccgcaccaatccctacgccgccgtggacgggccggcgctggtgcgcgagcacctcgccgcagccgaggtggacgcgctcatcgcgatcggcggggaggacaccctgggggtggccgcccaactacacgccgagggactgcccgtggtcggagtgcccaagaccatcgacaacgacctctccgcgacggactacaccttcggtttcgacaccgcggtcaacatcgccacggaggcgatcgaccggctgcacaccaccgcggaaagccatcaccgggtgttgatcgttgaggtcatgggccgtcatgccgggtggatcgctctgcacagcggcatggcggggggagccaacgtcattctcatcccggagcggccgttcgacttcgacaaggtgtgcgccttcgtcgaagcccggttcgccacccactacgcgccgatcatcgtcgcggccgagggtgccgtcccgatcacgggtaccctggtcgccagggagggtgaggtcgatgccttcgggcatgtccgcctgcagggcatcggggcggtcctggagaccgagatccgcgcccgcaccggtcgtgacgcgcgcgcgacggtgctcgggcatctgcagcgcggcggcacgcccacggccttcgatcgatggctcgcgacgcgtttcggactgcacgccgtcgacgccgtgcacgaaggcgacttcggggtgatggtcgccctgcacggcacccgcatcgaccgggttccgctgcaggatgcgacccgcgagctcaagacggtgcccgaggagctctaccacgaggccgagatcttcttcggctga

SEQ ID NO: 112806 - protein, 341 aa, Frankia sp. CcI3
MRIGVLTGGGDCPGLNAVIRAVVRKGESVYGHSFVGYRDGWRGPLTGETVPLDIAAVRGILPRGGTILGSSRTNPYAAVDGPALVREHLAAAEVDALIAIGGEDTLGVAAQLHAEGLPVVGVPKTIDNDLSATDYTFGFDTAVNIATEAIDRLHTTAESHHRVLIVEVMGRHAGWIALHSGMAGGANVILIPERPFDFDKVCAFVEARFATHYAPIIVAAEGAVPITGTLVAREGEVDAFGHVRLQGIGAVLETEIRARTGRDARATVLGHLQRGGTPTAFDRWLATRFGLHAVDAVHEGDFGVMVALHGTRIDRVPLQDATRELKTVPEELYHEAEIFFG

SEQ ID NO: 112807 - DNA, 1200 bp, Acidobacteria bacterium Ellin345
  CDS (1)..(1200): transl_table=11
atggcgaatgtaactaagaagaagggcgtgattggaatcctgaccggcggcggcgatgtgccgggtttaaaccctgcgatccgcggcgtgacgttccgcgcgttgcgcgaggggtatgacgtgatcggcctgcgccgcggttggggtgggctggtggacattgtccgcgacaaggaccacgacaatagcgagaacttcgttcatctttcggagactgtggtgaaccgggcggcgcgtaccggcggcacctttctgcatacctcgcgtaccaacccgagccgcgtggcaaaggacaaggttccggcgcatctccaaggccaattcaacgccgagaagaacgacctcacatcagaaatgttgaagaatctggaatggctggggatcgactacctgattccaatcggcggcgacgacacgttgagctatggcgtgcgcctctatcaagaaggggtgaaggtcgttgcgattccgaagacgatggacaacgatgtcccgggcacggactactgcatcggcttcagcacctgcgttacgcgcaccatacagatggtgaacagcctgcgcacctcggctggttcgcatgagcgctttctcgtggtcgaagtattcggacgctacgccggatttaccgcgctgctgccgacgatggcaggcgccgccaaccgctgcgtcattccggaattcaagttcaatatcgagagcctcgcagaactgatggcgaacgatcgcaagcgcaatccgagccgttactcggtagtgctgatctccgaaggcgcgatgttcgaaggcggcgagatggttttccaaagcgaatccactgacgcattcgggcataagaaactcgggggcattggcgatttaattgccgcgaagctgacagagctctcgccgaaatactgcggcaagaccgtcaactgcctgacgcagaagcttggatatctcgtgcgcggcggcgatccggatgcgatcgactccatcgtgccgatggcgtacggcaacctggcgctcgacctcattctcaataagatccacggacggttggttgtattgaagaatgggcgttacgacaacgtgccggtggatgtggtgacttcttccaagaaagtgatcaaggtgaaggaacactacaacacggagcgtctgcgcccgcactatgagagcttcgagatgaagccgctgttcattatgacgagcgagtag

SEQ ID NO: 112808 - protein, 399 aa, Acidobacteria bacterium Ellin345
MANVTKKKGVIGILTGGGDVPGLNPAIRGVTFRALREGYDVIGLRRGWGGLVDIVRDKDHDNSENFVHLSETVVNRAARTGGTFLHTSRTNPSRVAKDKVPAHLQGQFNAEKNDLTSEMLKNLEWLGIDYLIPIGGDDTLSYGVRLYQEGVKVVAIPKTMDNDVPGTDYCIGFSTCVTRTIQMVNSLRTSAGSHERFLVVEVFGRYAGFTALLPTMAGAANRCVIPEFKFNIESLAELMANDRKRNPSRYSVVLISEGAMFEGGEMVFQSESTDAFGHKKLGGIGDLIAAKLTELSPKYCGKTVNCLTQKLGYLVRGGDPDAIDSIVPMAYGNLALDLILNKIHGRLVVLKNGRYDNVPVDVVTSSKKVIKVKEHYNTERLRPHYESFEMKPLFIMTSE

SEQ ID NO: 112809 - DNA, 969 bp, Acidobacteria bacterium Ellin345
  CDS (1)..(969): transl_table=11
atgagcaggaagatcgcggtgctgaccagcggcggtgatgcccccggaatgaacgccgcaatccggtcggtgactcgctcggcgattgcaaagggctggaccgtaatgggtgtgaaccaaggctacgccggcctggtcgcgggcgactatcgcgaactggcggcgcgcgatgtaggcggtctgctttcaaagggcggcacctttctcgggagtgcgcggtgcccggaattccaaaaagaggacgtgcgcgaaaaggcgttgcgaaacttaaatcgcagcgggattggcgcgctcgtcgtaatcggcggtaacgggtcacaaaccggcggcgcggcgctgaacgatatgggatttccgacgctgggagtcgcttcgacgattgataacgatctcgtcggttcggagatcaccattggcgtagatacggcactgaatatcgccctcgaagcgattgatcgtttgcgcgtgaccgcagcctcgcatcaacgtggctttctgattgaagtgatggggcgcaagtgtggatacctggccttgatggctggaatcgcggggggcgcagaactggtgctggtgcccgagattgacttcgagcctgaccaaatcgccgaagcgatccatgacgcttatcgtcgtgggaaggcgcacgcgatggtggtggtagcggaaggcgcgaagcacaacgccgaacagttggtgagatatttccacgataagaacacgggcttcgaactgcgcgcgaccattctcggacacgtgcagcgcggtggcacgcccacggcctacgatcgtctgctggcgtcgcgtttgggcgctggtgcagtggaagcgctggataaagggatctcgggcgtcgtcgtcggcatgaaccagggcgtggtctcgacaacgccgtatagcgaagtcaccggcaggacgaaggggatttcgccggagctgtaccagttggcgcacgtgctgtcgcgatag

SEQ ID NO: 112810 - protein, 322 aa, Acidobacteria bacterium Ellin345
MSRKIAVLTSGGDAPGMNAAIRSVTRSAIAKGWTVMGVNQGYAGLVAGDYRELAARDVGGLLSKGGTFLGSARCPEFQKEDVREKALRNLNRSGIGALVVIGGNGSQTGGAALNDMGFPTLGVASTIDNDLVGSEITIGVDTALNIALEAIDRLRVTAASHQRGFLIEVMGRKCGYLALMAGIAGGAELVLVPEIDFEPDQIAEAIHDAYRRGKAHAMVVVAEGAKHNAEQLVRYFHDKNTGFELRATILGHVQRGGTPTAYDRLLASRLGAGAVEALDKGISGVVVGMNQGVVSTTPYSEVTGRTKGISPELYQLAHVLSR

SEQ ID NO: 112811 - DNA, 1107 bp, Acidobacteria bacterium Ellin345
  CDS (1)..(1107): transl_table=11
atgagcgacatcaagaagattgcaatcaatacgggcgggggcgatgctcccgggttgaacgccgtcatccacggcgcggtgtatgctgcgcgccgcctcggctgggaagtgttcggcattcgcgacggctacgacggcattcttgaaccacatcgctatcccaatggtgggctgatccagctgaaccgtggtgttgtgcgcgacatctcccacgtcggcggcacgatcctcgggaccactaaccgcggcaaccccttccgccgcgtcatcaccgccgccgatggcacgaagcacgaaaccgattgctccgatcagatcctcaacttcttccgcgatcgcggcatcgacgccctgatttccattggcggcgacggcagcctcaccatcgccaacggcctcgccaagaaaggtctgcgcgtcgttggcgttccaaagaccatcgacaacgatctcgaatccacagcaatgaccttcggcttcaataccgccgtctccttcgccaccgaatgtattgaccgcctgcacagcaccgcgctctcccaccagcgcatcctggtcgtcgaagtaatgggccgctacgccggttggatcgccctgcactgcggtgtcgccggacgcgccgatgccatcctcatccctgagatcccctacaaaatcgaaaacgtggcgaacgccctcaaactccgacaccaggacggcaagccgtactccatcgtcgtagtcgcggaaggcgccaaagctcacggcaaggatgtcaccataagggagcgcgaagtcggcaaagccgagcgcctcggtggcatcggcgagcaggtcacgcaacaattacaaagcctcaccggcaaagagagtcgcaccgttgtcctcggtcacctcctacgcggtggatcgccgacggcactcgaccgcaatttaggagtcaccttcggtgccggcgccgtcgaagccctcgccgaaggccgcagcaccgtgatggtcgcgctccatccgccgcatctagccttcgtcccgctcgaagaggccatcgcgaaactccgcctcgttcctccggacagcgatttggtcctgaccgcgcgcgccattggcatcgccttcggagatgaataa

SEQ ID NO: 112812 - protein, 368 aa, Acidobacteria bacterium Ellin345
MSDIKKIAINTGGGDAPGLNAVIHGAVYAARRLGWEVFGIRDGYDGILEPHRYPNGGLIQLNRGVVRDISHVGGTILGTTNRGNPFRRVITAADGTKHETDCSDQILNFFRDRGIDALISIGGDGSLTIANGLAKKGLRVVGVPKTIDNDLESTAMTFGFNTAVSFATECIDRLHSTALSHQRILVVEVMGRYAGWIALHCGVAGRADAILIPEIPYKIENVANALKLRHQDGKPYSIVVVAEGAKAHGKDVTIREREVGKAERLGGIGEQVTQQLQSLTGKESRTVVLGHLLRGGSPTALDRNLGVTFGAGAVEALAEGRSTVMVALHPPHLAFVPLEEAIAKLRLVPPDSDLVLTARAIGIAFGDE

SEQ ID NO: 112813 - DNA, 1086 bp, Myxococcus xanthus DK 1622
  CDS (1)..(1086): transl_table=11
atgagacttggagtcctgaccggcggtggcgactgccccggcctcaacgcactcattcgcggcctcgtgaagcgaggcacgcacgaattcggctacgagttcgtgggcatcgagaacggctacatggggctggtggagccagggctcgcccacccgctcaccgaggaggacacccgcggcatcctccccaagggcggcaccatcctgggcacgtccaacaaggccaaccccttcagctacgcgacccgtgaggatgggcactgggtggagcgggacgtgtccgatcaggtcctgctccgctgcgaggagctgggcctggacgggctcatcgccgtgggcggcgacgggacgctgtccatcgcccaccggctcgtggagaaggggctcaaggtcgtcggctgtccgaagaccatcgacaacgacctgtccgggacggatcagaccttcggcttcgacaccgcgcggctcatcgtcaccgaggcgctcgaccgcctgcactccaccgccgaggcccacgaccgggtgatggtcgtggagatcatgggccgccacgccggcttcctcaccctggagagcggcatcgccgggggcgcggacgtcatcctgattccggagattccgtacagcgtggagtccgtggtggagaagatccgccgccgctccacccgccgtcgcagcttctccatcatcgccatctccgaaggcgcgttcccccagggcggcgagctggccgtgctggacacggcggaggccattcccggccggggcgtggtgcggctcggcggctcggggaaggcgctggcggacctgctggcccggcacatcgaggcggagattcgcgtgacggtgctgggccacctccagcgcgggggcagccccagcgcggcggaccgggtactggccactcgctacggctgcaaggtgctggacctggtgagcgcgggccagtgggaccacatggtggccctgcgtgcgggcgaaatcatcgcggtccccttgagcgagtcgcgcaaggagcgccgcgtggatccggcgggtgagctggtgcgcttcaccaagagcatgggcatcagcttcggggactga

SEQ ID NO: 112814 - protein, 361 aa, Myxococcus xanthus DK 1622
MRLGVLTGGGDCPGLNALIRGLVKRGTHEFGYEFVGIENGYMGLVEPGLAHPLTEEDTRGILPKGGTILGTSNKANPFSYATREDGHWVERDVSDQVLLRCEELGLDGLIAVGGDGTLSIAHRLVEKGLKVVGCPKTIDNDLSGTDQTFGFDTARLIVTEALDRLHSTAEAHDRVMVVEIMGRHAGFLTLESGIAGGADVILIPEIPYSVESVVEKIRRRSTRRRSFSIIAISEGAFPQGGELAVLDTAEAIPGRGVVRLGGSGKALADLLARHIEAEIRVTVLGHLQRGGSPSAADRVLATRYGCKVLDLVSAGQWDHMVALRAGEIIAVPLSESRKERRVDPAGELVRFTKSMGISFGD

SEQ ID NO: 112815 - DNA, 1038 bp, Myxococcus xanthus DK 1622
  CDS (1)..(1038): transl_table=11
atgaaagtcgccgtgctcaccggcgggggtgactgccccggcctgaacgccgtcatccgcgccgtcgtccgccgcgccaacgcccacggcttcgagatgatgggcctccgagatggttggaaggggttgttggaggacaaccacttccgcctcacgcgtgaaaccacgtccggaatcctccaccggggcggaaccatcctcggcacctcgcgcgtcaacccgttcaaggtcgaaaacgggctggagcgcgtcaagcgcgccatcgaacgcaacggcatccacgccgtcatcgccattggtggcgaaggcacgctgtcggccgccacgcgcatgtcgcaggaaggactgcgcatcgtcggtgtgccgaagaccatcgacaacgacatcaacgccacggacttcaccttcggcttcgacacggccgtcgccatcgccaccgaggccattgaccggctgcactccaccgcggagtcgcacaagcgcgtcatcgtctgcgaggtgatgggccgtcacgtgggctggattgccacctacgcgggcatcgctggcggcgcggacgtcatcctggtgccggagattcccgccgacctcgcgaaggtggccgagcacatccagcgccgccacgcgggcgggcgcaccttctccattgtcgtggtggcggagggtacgcgcatcaagctgtcggcggaccagcaggagcagctcgtcaccagcggcgcactggacgaggcaggcaggccgcggctcggtggcgtgggcaccatcctggcgcacgaaatcgagcggcgcaccggcttcgagacgcgcgtgtccgtgctgggccacatccaacgcggcggcgcccccaccgcgcatgaccgcgtgctcgccacccgctacggcgtccacgcctgcgacatggtggcccgcggcgagttcgggaagatggccgcgctgcgaggcaacgacatcatcagcgtggacctggcggacgccacccgcgagctcaagcgcgtcccgcaggagttcttcgaagtcgcccaggtcttcttcggctga

SEQ ID NO: 112816 - protein, 345 aa, Myxococcus xanthus DK 1622
MKVAVLTGGGDCPGLNAVIRAVVRRANAHGFEMMGLRDGWKGLLEDNHFRLTRETTSGILHRGGTILGTSRVNPFKVENGLERVKRAIERNGIHAVIAIGGEGTLSAATRMSQEGLRIVGVPKTIDNDINATDFTFGFDTAVAIATEAIDRLHSTAESHKRVIVCEVMGRHVGWIATYAGIAGGADVILVPEIPADLAKVAEHIQRRHAGGRTFSIVVVAEGTRIKLSADQQEQLVTSGALDEAGRPRLGGVGTILAHEIERRTGFETRVSVLGHIQRGGAPTAHDRVLATRYGVHACDMVARGEFGKMAALRGNDIISVDLADATRELKRVPQEFFEVAQVFFG

SEQ ID NO: 112817 - DNA, 1050 bp, Rubrobacter xylanophilus DSM 9941
  CDS (1)..(1050): transl_table=11
atggctgaggtacgcagggtaggcatgctcaccggcggcggggatgctccggggttgaacggtgtgatccgggccgtcaccgtcaagtgcgtcgaggactacggctacgaggtcgtcggcataaagcgcggctggagagggctcctggccccccaggaggactcagtggagaagctcaccgtggacggcgtccgctacatcctggacgagggcggcaccgttctcctctcttcccggaccaacccgtacaagaaggagggggacgccgagaaggtcgtaaagaacatgcaggagttcggcatcgacgccctcgtggccatcggcggggacgacaccctgggggtggccagccggctccacaaggacttcggggtgcaggtggtcggctgccccaagaccatagacaacgacctctccggcaccgacatctgcttcggctacgacaccgccgtctccatcgccaccgaggccctcgaccgggtcaggaccaccgcaaagagccacgagcgcatcctggtcgtagagatcatgggccggcacgccggttggatcacctacggggccgggctggccggggcggcaaacgtcaccctcatccccgaggtcgagccggacatcgacgccatcgccgacctcttcaagaagcgggccgagcggggcgagcgctggggcgtcgtcgcggtgagcgagggggtcaccatcggcgaggagtacatcacccagagcgccgagcgcgacgagttcgggcacgtccgcctcggcggcatcggcgagacgctggccaaagagctcaaggagcgcaccggcatagacacccgccacgtcgtcctcgggcacctgcagcgcggcggcacccccaccgcctacgaccgcatcctctccacccgctacggcctgcgggccgccgaggcggtcaagaacggcgagtggggcaagatggtcgccctgcgcggcagcgacatcgtcaccgtcccgctggaggaagccacgggggagacccgcaccgtcccggaagacctctacggggtcctgaagaccttcttcggctag

SEQ ID NO: 112818 - protein, 349 aa, Rubrobacter xylanophilus DSM 9941
MAEVRRVGMLTGGGDAPGLNGVIRAVTVKCVEDYGYEVVGIKRGWRGLLAPQEDSVEKLTVDGVRYILDEGGTVLLSSRTNPYKKEGDAEKVVKNMQEFGIDALVAIGGDDTLGVASRLHKDFGVQVVGCPKTIDNDLSGTDICFGYDTAVSIATEALDRVRTTAKSHERILVVEIMGRHAGWITYGAGLAGAANVTLIPEVEPDIDAIADLFKKRAERGERWGVVAVSEGVTIGEEYITQSAERDEFGHVRLGGIGETLAKELKERTGIDTRHVVLGHLQRGGTPTAYDRILSTRYGLRAAEAVKNGEWGKMVALRGSDIVTVPLEEATGETRTVPEDLYGVLKTFFG

SEQ ID NO: 112819 - DNA, 987 bp, Cytophaga hutchinsonii ATCC 33406
  CDS (1)..(987): transl_table=11
atgaagaaaatagcagtatatacatctgggggcgatgcgccaggaatgaatgcatgtattcgcgcggcggttcgtgcgggtcattaccataatcttgaagtttatggtattgttcgtggatatgacgggatgattaatgggaattttatcgaacttgacaatcgtgctgttagtaacattattcaaaaaggcggaacgattctaaaatctgcgcgcagcgaagaattcagatctccggagggaagacgcaaagcgttcgatcagattcagaaattcggtatcgacggtttggttgccattggcggtaacggaacatttaccggagctgaattattttacaatgaatatcaaatcccttgtgttggcgcaccgggaacaatagataatgatctgtatggttctgattttaccattgggtatgatactgccgtaaacacatgtttagcagcaatcgataagatccgtgatacggcagatgcacacgaacgtgtattctttattgaagtaatgggccgtgatacaggctacatcgctgtacgctcggctatttcaggcggagcagaaatggcgattatacccgagtttccgtatgacaaaaatgttgttatcaaccgtttgaaacatggcacaagtgacactaaagcatctcacattattattgttgctgaaggtcaccaggaaggtcgtgcaagtatgattgcaagagatattaaagaagcgctacctcaattagattgcagagtaaccacattaggacacgtgcaacgtggaggcgggccatcagcggctgatcgcgtattagccagccgtctgggtctggctacggtggaaggcttacttgaaggaagagcaaatgtaatggctggcattatcgatcataaagtagtttatactccttttattgatacaattaccaagagaaagccgatcaatgaagatttactttcattggcagaaaaattaaatggcagaagctataaagtatag

SEQ ID NO: 112820 - protein, 328 aa, Cytophaga hutchinsonii ATCC 33406
MKKIAVYTSGGDAPGMNACIRAAVRAGHYHNLEVYGIVRGYDGMINGNFIELDNRAVSNIIQKGGTILKSARSEEFRSPEGRRKAFDQIQKFGIDGLVAIGGNGTFTGAELFYNEYQIPCVGAPGTIDNDLYGSDFTIGYDTAVNTCLAAIDKIRDTADAHERVFFIEVMGRDTGYIAVRSAISGGAEMAIIPEFPYDKNVVINRLKHGTSDTKASHIIIVAEGHQEGRASMIARDIKEALPQLDCRVTTLGHVQRGGGPSAADRVLASRLGLATVEGLLEGRANVMAGIIDHKVVYTPFIDTITKRKPINEDLLSLAEKLNGRSYKV

SEQ ID NO: 112821 - DNA, 1098 bp, Clostridium perfringens ATCC 13124
  CDS (1)..(1098): transl_table=11
atgcaaccaattaagaaaatagctatactaacaggaggaggagattgtcctggattaaatgcagtaataagagctgtaactagaactgcaatcttaaaatatggatatgaagttataggttataaatttggatatagaggtctatataataatgactttgtaaaattggatcttgattctgtttctggaatacttcatagaggaggaacaatacttcatagttcaaataaggacaacctatttgattatcaagttgaagatgagaatggtaaaatagttaaaaaagatgtttctgatgttggtgttgaaaacttaaagaaagaagaggtagatgctctagttgttattggaggagatggaaccttaacctctgcaagagatttcgcaagaaaaggtgttaatgtaataggtgttcctaaaacaatagataacgatttattagccacagatgtaacctttggatttaatactgccacagaaatagctacagaagctttagatagacttcatactacagctgagtcacatcatagaataatgcttttagaagttatgggaagaaacgctggttggattgctttagaatcaggaatagctggttctgctgatgtaatattattacctgaaataccttacgatataaacaagatagttgaaaaagtaaaagaaagagaagaagccggaaaacagtttacaattattgtagttgcagaaggagcaaaacctaaagatggagaagtagttgtttctaaaatagttgatgatagtccagacccaataagattagggggaatagctaacaaattagctattgacttagaaggattaataaaaaatcatgaaataagaagcactgttcttggacatatacaaagagggggaaatacctctacttatgatagaatactttccactaaatatggagttaaagctgttgaacttataaatagtaatttatttggaaacatggttgcattaaaaggaaataaagtatcctatgaaagcttagaaaatgtaattggacatactaaaaatgtagatccagaaggtgaattagtaaacactgctaaaagtataggaattagtttcgctgattaa

SEQ ID NO: 112822 - protein, 365 aa, Clostridium perfringens ATCC 13124
MQPIKKIAILTGGGDCPGLNAVIRAVTRTAILKYGYEVIGYKFGYRGLYNNDFVKLDLDSVSGILHRGGTILHSSNKDNLFDYQVEDENGKIVKKDVSDVGVENLKKEEVDALVVIGGDGTLTSARDFARKGVNVIGVPKTIDNDLLATDVTFGFNTATEIATEALDRLHTTAESHHRIMLLEVMGRNAGWIALESGIAGSADVILLPEIPYDINKIVEKVKEREEAGKQFTIIVVAEGAKPKDGEVVVSKIVDDSPDPIRLGGIANKLAIDLEGLIKNHEIRSTVLGHIQRGGNTSTYDRILSTKYGVKAVELINSNLFGNMVALKGNKVSYESLENVIGHTKNVDPEGELVNTAKSIGISFAD

SEQ ID NO: 112823 - DNA, 1032 bp, Rhodococcus sp. RHA1
  CDS (1)..(1032): transl_table=11
atgcggatcggaatgctcaccggaggcggcgactgccccggactgaatgcggtgatcagggcggtggttcggaccgccgccggccgatacggcagctcggtggtgggattccgtgacggctggcgcggcctgctcgaggatcgcaaggtcgtgctgtccaacgacgaccggatcgatcgcatcctcacccggggcggcaccatcctcggcaccgcgcgggtcaacccggacaagttgaaggccggtctcgaccagatccggcagactctcgacgacaacgggatcgacgcgctcatcccgatcggcggggagggcacgctcacggccgcgagctggctcgccgagagcggggtgcccgtgatcggggttccgaagacgatcgacaacgacatcgactgcaccgacgtgacgttcggtttcgataccgcgctgtccatcgcgaccgatgcgatcgaccggctgcacaccaccgccgaatcccaccagcgggtgatgctcgtcgaggtgatgggccggcacgcgggctggatcgcgttgcactcggggctcgcgaccggtgcgcatctcactctcgttcccgaggtcccgttcgacgtcggcgaagtctgctccctcgtgaagaaacgtttccagcgcggcgattcgcatttcatctgcgtcgtcgcggaaggcgccactccgactccggagtcgatgagtctgcgggagggcggtatcgacgagttcggccacaaacgatttaccggtgtcgcacagcagctgggcgacgagatcgtccgccgcatcggcaaggaggtgcggacgacggtgctcgggcacgtgcagcggggcggaaccccgacgccgtacgaccgggtgctcgccacccgcttcggggtgcacgccaccgacgccgtccaccgcggcgacttcggcaacatggtggccctgcacggcacgtcgatcgacctcgtgcccctcgaggaggcgacccggcgcctcaagacggtgccgagggagcggtacgaggaggcggccgcatttttcggttga

SEQ ID NO: 112824 - protein, 343 aa, Rhodococcus sp. RHA1
MRIGMLTGGGDCPGLNAVIRAVVRTAAGRYGSSVVGFRDGWRGLLEDRKVVLSNDDRIDRILTRGGTILGTARVNPDKLKAGLDQIRQTLDDNGIDALIPIGGEGTLTAASWLAESGVPVIGVPKTIDNDIDCTDVTFGFDTALSIATDAIDRLHTTAESHQRVMLVEVMGRHAGWIALHSGLATGAHLTLVPEVPFDVGEVCSLVKKRFQRGDSHFICVVAEGATPTPESMSLREGGIDEFGHKRFTGVAQQLGDEIVRRIGKEVRTTVLGHVQRGGTPTPYDRVLATRFGVHATDAVHRGDFGNMVALHGTSIDLVPLEEATRRLKTVPRERYEEAAAFFG

SEQ ID NO: 112825 - DNA, 966 bp, Haemophilus somnus 129PT
  CDS (1)..(966): transl_table=11
atgataaaaaaaattgcagttttaacaagtggcggtgatgcaccggggatgaatgctgcgatacgtggtgttgttcgttcggctttatccgagggcttggaagtttatgggatttatgaaggttattacggtttatatcacaacaagatccaacaattaactcgctatagcgtatcggatattatcaaccggggcggtacattccttggctcagctcgtttccctgagtttaaagatcctgccgtacgtgaaaaatgcgtggaaattttacgttcacatggtattgatgcacttgtcgtcatcgggggagatggttcttatatgggagcaaaattactcactgaagaacatgatttcccttgtgtcggtattcctggaacaattgataatgatgttgctggcactgattatactatcggttatcaaaccgcacttgaaaccgcagttgaggcaattgaccgtttacgtgatacctcaagttcacacaagcgtatttctatcgtggaaattatgggcagacattgtagcgatttgacgatctcggcggctattgcaggtggttgtgaatatattgttgcttctgaaattgaatttaatcgtgaagaattaattaagcaaattgagcgtgccattattaagggtaagcgtcatgcaattattgccatcactgaattattatgtgatgtgaatgagctggctcgagaaattgaagcccgtgtaaaacacgaaactcgagcaactattttaggccatattcaacgtggcggtacgccttgtgcttttgaccgcattttaggttctcgtatgggggtttacgctgtagatcttttattacagggcaaaggtggttattgtgtcggtatccaaaatgaacaattggtgcatcatgatattattgatgcaattaataatatgcgtcgtgaatttaaagccgattggttagctatgtctaaacggttagattga

SEQ ID NO: 112826 - protein, 321 aa, Haemophilus somnus 129PT
MIKKIAVLTSGGDAPGMNAAIRGVVRSALSEGLEVYGIYEGYYGLYHNKIQQLTRYSVSDIINRGGTFLGSARFPEFKDPAVREKCVEILRSHGIDALVVIGGDGSYMGAKLLTEEHDFPCVGIPGTIDNDVAGTDYTIGYQTALETAVEAIDRLRDTSSSHKRISIVEIMGRHCSDLTISAAIAGGCEYIVASEIEFNREELIKQIERAIIKGKRHAIIAITELLCDVNELAREIEARVKHETRATILGHIQRGGTPCAFDRILGSRMGVYAVDLLLQGKGGYCVGIQNEQLVHHDIIDAINNMRREFKADWLAMSKRLD

SEQ ID NO: 112827 - DNA, 969 bp, Pediococcus pentosaceus ATCC 25745
  CDS (1)..(969): transl_table=11
atgaaacgtattggtatcatgacaagtggtggggatgctccagggatgaacttggctatccgcgccgttgcaagaaaggccctaagctctggtcttgaagcttacggaattaactacgggtttgccggtctagttgctggtgatatccacgaattcaaggcagcagatttagacgatatggtttcacaaggtggaacgatgctttattcagctcgttatcctgaatttgcacaagaagaaagccaattgaaaggtattgaacaacttaagaagttcggtatcgatgcattggttgttatcggaggagacggttcatatcatggtgctcttcgtttgacagaacatggatacaacaccattggtcttccaggaacaatcgataatgatattcctttcactgacttcactattggttttgatacagcgttaaacactgcagttgacgcgattgataaaattcgcgatactgctaagagtcatcaacgggtctttgctgtccaagttatgggccgcaatgctgctgatattgctctttgggctggtgttgcttcaggagcagatgcggttatcgcacctggttttgattatgacgttgaagcaattgccaacaagttgaaaaagaaccgtgcaaacggtaaggactacggcattattgtcatcgctgaaggtgatgctaattcagatgcagctcctgaattcattgaccagcttaagcaatacggcgattttgatgcacgtgctactgtaattggacatgtccaacgtggtggtgttccaagtgctaaagatcgcgttttagcaagtaagatgggtgcttacgctgttgagctactccttgaaggtaagggtggtttagcagttggaatcttagaaaataaggttcaagctcataacatgcttgacttgtttgatgcaaaacatcaagcagatgattcactttaccaattaagtgaagatttatcattctag

SEQ ID NO: 112828 - protein, 322 aa, Pediococcus pentosaceus ATCC 25745
MKRIGIMTSGGDAPGMNLAIRAVARKALSSGLEAYGINYGFAGLVAGDIHEFKAADLDDMVSQGGTMLYSARYPEFAQEESQLKGIEQLKKFGIDALVVIGGDGSYHGALRLTEHGYNTIGLPGTIDNDIPFTDFTIGFDTALNTAVDAIDKIRDTAKSHQRVFAVQVMGRNAADIALWAGVASGADAVIAPGFDYDVEAIANKLKKNRANGKDYGIIVIAEGDANSDAAPEFIDQLKQYGDFDARATVIGHVQRGGVPSAKDRVLASKMGAYAVELLLEGKGGLAVGILENKVQAHNMLDLFDAKHQADDSLYQLSEDLSF

SEQ ID NO: 112829 - DNA, 1185 bp, Solibacter usitatus Ellin6076
  CDS (1)..(1185): transl_table=11
atggcaggcaagcgtatcggcatactcacgggcggcggcgatgttccgggactgaattccgtgatcaaaacggtggtataccgtggaagcgaaatcggctgcgaggtgatcggaattcgccgcggctgggaagggctgacccacgtcaacctgcaggatccggcgagccgcacccgctacgtgctgccgttgaatcgcgagaatacccgcaccatcgaccgcaccggcggtacctacctccacagttcgcgcaccaacccctccaaaatgaagaagctgcccccggtgctcgaagggcaggatttccccaaggtcacgtccaccaagaagggcgtcacttccgaagtcttcgacgtctccaaggccgtcctgaagaacatcgaaaccttgaacctggattacctgatcgcgatcggcggcgacgacacgctgagctatgccgccgagttggaccgccagggcttccgcgtaatcgccgtgcccaaaacgatggataacgacgtgcagaataccgagtactgcatcggtttctccaccgccatcacccgcgccatggatgccatcgagcgccagcgcaccaccgtcggctcgcacgagcgcatcggcctcttccgcgtcttcggccgcgacgccggctatactgccctctacaccgcgtatgtcacctccgttcgctgctgcattcccgagcacaaggtggacctccccaagctgatcgatctcctggtcaccgacaagaagaacaatccgagcaactactccctcgccattctgagcgaaggcgccgagtgggttggttacaccgtgaaggaatacggggaagccgacgctttcggacaccgcaagaagatgagcgtggccgaagacctcagcaatgagatcaagaactccaccggcgaggagaccatcgtcagcgacctgacttacgacctccgctccggcagcgccgatttcgtggaccgcatggtcgcctctaccttcgccggcatggccatggacgccatccaggagggcaaacacggcctcatgaccgcgatctccaacggcagctacaccatggtcggtatccccgaccccaaactcggcccgcgccgcgtcgatgtcgcctccatgtacaacaccgaccgctaccgccccgtctacgatcacaaactgggcctgccgatcttcctgacgcgcgcctaa

SEQ ID NO: 112830 - protein, 394 aa, Solibacter usitatus Ellin6076
MAGKRIGILTGGGDVPGLNSVIKTVVYRGSEIGCEVIGIRRGWEGLTHVNLQDPASRTRYVLPLNRENTRTIDRTGGTYLHSSRTNPSKMKKLPPVLEGQDFPKVTSTKKGVTSEVFDVSKAVLKNIETLNLDYLIAIGGDDTLSYAAELDRQGFRVIAVPKTMDNDVQNTEYCIGFSTAITRAMDAIERQRTTVGSHERIGLFRVFGRDAGYTALYTAYVTSVRCCIPEHKVDLPKLIDLLVTDKKNNPSNYSLAILSEGAEWVGYTVKEYGEADAFGHRKKMSVAEDLSNEIKNSTGEETIVSDLTYDLRSGSADFVDRMVASTFAGMAMDAIQEGKHGLMTAISNGSYTMVGIPDPKLGPRRVDVASMYNTDRYRPVYDHKLGLPIFLTRA

SEQ ID NO: 112831 - DNA, 1218 bp, Magnetococcus sp. MC-1
  CDS (1)..(1218): transl_table=11
atgaaaagcggtaaagttctcatcgcacaaggtggcggtcccacggcggtcatcaaccagtccctggtcggggcggtgttggaggcccaacgctatgcccaggttgatcgcatctatggtgcggtacacggggtacggggcattgttgacgaaaattttatggatctctccatggagaccgccggtaatttggagcgggtcgcggcgatgcccagctctgccctaggctccacccgcgacaagcccgaccgcgcctactgcgctgagatgttcaaagtgctcaaggcccatgacatccgcagctttttttattgcggcggcaacgactcttctgacaccgtgcgcatcgttaaagagtttgccgatgaggccaactatgaatttaccgccatgcacatccccaaaaccattgataatgacctcatggccaatgaccacacaccgggctttccatcggcggccaaatttgtcgcctgcgcctttgccggggtcaacatggataaccgggccctgcccggcgtctatgtaggggtggttatggggcgccatgccggttttttaaccggggctgctgccatggcgcgggtatttgccgatgatggccctcacctgatctatgtccccgaacgcacctttgatatgaataccttcttggccgacgtcaaaagcacctacgacaaatatgggcgctgtatcgtcgcggtttctgagggtgtgcatgatgccgaaggcacccccattgtgaccaaattgcaagaaaatgtggagcgggatgcccacggcaacgtgcagctttcgggcaccggtgctttggctgacctgctgtgtgacgaaatcaaggccaaattgggcattaagcgggtacgcggcgacacctttggctatctacagcgcagctttctgggcattgtttctgaggtagatgcccgcgaagcccgcgaagtgggccaaaaagcggtgcaagaggctctccgccacaacgccagcggcaccatcactatcaaacgggttggcaactatgcttcggcctatgagttggccaatgttaaagaggtcgccgcactcaccaaagtgatggccgataactttatcaccaccgccagcaatgacgtgaccgccgactttatccactatctgcgcccgctgctgggcagcaaccccctggagcatgccgcccgcttgatggcacccatggtagaaaaaattctgcataaataa

SEQ ID NO: 112832 - protein, 405 aa, Magnetococcus sp. MC-1
MKSGKVLIAQGGGPTAVINQSLVGAVLEAQRYAQVDRIYGAVHGVRGIVDENFMDLSMETAGNLERVAAMPSSALGSTRDKPDRAYCAEMFKVLKAHDIRSFFYCGGNDSSDTVRIVKEFADEANYEFTAMHIPKTIDNDLMANDHTPGFPSAAKFVACAFAGVNMDNRALPGVYVGVVMGRHAGFLTGAAAMARVFADDGPHLIYVPERTFDMNTFLADVKSTYDKYGRCIVAVSEGVHDAEGTPIVTKLQENVERDAHGNVQLSGTGALADLLCDEIKAKLGIKRVRGDTFGYLQRSFLGIVSEVDAREAREVGQKAVQEALRHNASGTITIKRVGNYASAYELANVKEVAALTKVMADNFITTASNDVTADFIHYLRPLLGSNPLEHAARLMAPMVEKILHK

SEQ ID NO: 112833 - DNA, 987 bp, Magnetococcus sp. MC-1
  CDS (1)..(987): transl_table=11
atgtcccaacctaagcctatgaataccatcgcggttatgaccagtggcggcgatgctccaggcatgaacagcgccattcgtgcggtggtgcgtaccgccatcggtgcagagatggaggtactgggcatccgccgcggctacagtggcctgctggaaggggatcttatccccatggatgccgcctcggtgggtaatattctacaaaagggtggtactgtgctgggcacctcccgctgcgcggagtttcttaaaccggagattcgccaagaagctgccaatattttacgccgtaaacatgtggatggcttggtcgtcatcggtggcaatggctcctttaatggcgcctaccaactgcaccaagagcatgacataccggtggttggcgtaccgggtaccattgataatgatatccaaggtacccactacaccatcggttttgacacggcggtggagaccggggtctatgcggtggataaaatccgcgacaccgccaatgcccacgaccgtatttttttggtggaggtcatggggcgacatagccccgccatcgccatccataccggtgtctgcaccggggctgaacatgtgattcacacccccgaaaataccgactatgacaccttggtctcagggatccggcggggccgtaagcggggcaaaaactcctttattatcatcgtcgctgaggggcaagttcctggttcagcctatcaggtgcaaaagcatctggcggacaattatcaaatcgcctcgcatgtggccattttgggccacctgcaacgcggcggatcgcccaccgcccatgatcgctttattgccgccagcatgggttttcacgctgtccaagccctcaaaaccggcgaagtggccacggttaccgcttgccgtgacggacgtattcagctggtccccttacaagagtgtttggaaaaaaatgatgccatcgacgctttctccttaaacctgacccagcagttggcaatctga

SEQ ID NO: 112834 - protein, 328 aa, Magnetococcus sp. MC-1
MSQPKPMNTIAVMTSGGDAPGMNSAIRAVVRTAIGAEMEVLGIRRGYSGLLEGDLIPMDAASVGNILQKGGTVLGTSRCAEFLKPEIRQEAANILRRKHVDGLVVIGGNGSFNGAYQLHQEHDIPVVGVPGTIDNDIQGTHYTIGFDTAVETGVYAVDKIRDTANAHDRIFLVEVMGRHSPAIAIHTGVCTGAEHVIHTPENTDYDTLVSGIRRGRKRGKNSFIIIVAEGQVPGSAYQVQKHLADNYQIASHVAILGHLQRGGSPTAHDRFIAASMGFHAVQALKTGEVATVTACRDGRIQLVPLQECLEKNDAIDAFSLNLTQQLAI

SEQ ID NO: 112835 - DNA, 1032 bp, Mycobacterium avium 104
  CDS (1)..(1032): transl_table=11
atgcggatcggagtgctcaccggaggcggcgactgccccgggctcaacgccgtcatccgggcggtggtgcggacctgcgactcccggtacggctcgtcggtggtcggattccaggacggctggcgcgggttgctggagaaccggcgcatccagttgcacaacgacgaccgcaacgaccggctgctggccaagggcgggaccatgctgggcaccgcccgcgtgcacccggacaaattgcgggccgggctgaaccagatcaagcagaccctcgacgacaacgggatcgacgtcctcatcccgatcggcggcgaagggacgctgacggccgcgcactggctctccgaggagaacgttcccgtggtcggggtgccgaagaccatcgacaacgacatcgattgcactgacgtgactttcggccacgacaccgccttgaccgtcgccaccgacgcgatcgaccgcctgcacagcacggccgaatcgcatcaacgcgtgatgctggtggaggtgatgggccggcacgccggctggatcgcgctcaacgccggactggcctccggcgcacacatgaccctgatccccgagcagcccttcgacgtcgaagaagtctgccggctcgtcaaacgtcgcttccagcgcggggattcgcatttcatctgcgtcgtcgccgagggtgccaaacccatccccggttcgatttccttgcgggaaggcgggattgacgaattcggccatgagcgcttcaccggggtggccgcgcagctgggtgccgaggtggagaagcggatcaacaaggaggtccgggtgacggtgctgggccacgtgcagcgcggcggcaccccgaccgcctacgaccgggtgctggccacccggttcggtgtgaacgcggccgacgccgcgcacgccggggagtacggccagatggtgtcgctgcgcgggcaggacatcggacgggtgccgctggccgacgcggtgcgtcagctcaagctggtgcccgaaagccgctacgacgacgccgccgcgttcttcggttag

SEQ ID NO: 112836 - protein, 343 aa, Mycobacterium avium 104
MRIGVLTGGGDCPGLNAVIRAVVRTCDSRYGSSVVGFQDGWRGLLENRRIQLHNDDRNDRLLAKGGTMLGTARVHPDKLRAGLNQIKQTLDDNGIDVLIPIGGEGTLTAAHWLSEENVPVVGVPKTIDNDIDCTDVTFGHDTALTVATDAIDRLHSTAESHQRVMLVEVMGRHAGWIALNAGLASGAHMTLIPEQPFDVEEVCRLVKRRFQRGDSHFICVVAEGAKPIPGSISLREGGIDEFGHERFTGVAAQLGAEVEKRINKEVRVTVLGHVQRGGTPTAYDRVLATRFGVNAADAAHAGEYGQMVSLRGQDIGRVPLADAVRQLKLVPESRYDDAAAFFG

SEQ ID NO: 112837 - DNA, 1032 bp, Mycobacterium sp. KMS
  CDS (1)..(1032): transl_table=11
atgcgcataggagttctcaccggcggcggcgactgtcccggcctgaacgcggtgatccgggccgtggtccgcacctgcgacgtccgctacggctcctcggtggtgggtttccaggacggctggcgcggattgctggagaaccggcgcatccagttgcgcaacgacgcccgcaacgaccggctactcgccaagggcggcaccatcctcggcaccgcacgggtgcatccggagaagctgcgcgccgggctcgaccagatcaagcagaccctcgacgacaacggcatcgacgtgctgatcccgatcggcggggagggcacgctgaccgccgcgcactggctgtccgaggagaacgtgccggtcgtcggtgtgccgaagaccatcgacaacgacatcgattgcaccgacgtcactttcggccacgacaccgcgctcacggtcgccagcgaggcgatcgaccgactgcactcgaccgcggaatcgcatcagcgggtgatgctcgtcgaggtgatgggccgccacgccggctggatcgcgctcaacgccggcctggcctccggtgcgcacatgacgctgatccccgaacaacccttcgacgtcgaagaggtgtgccggctggtcaaacagcggttcgtccgcggcgattcgcatttcatctgcgtggtggccgagggggccaaacccgccgagggcaccatgcagctacggcagggcgggatggacgagttcggccacgagaagttcaccggcgtggcccagcagttggcgatcgaggtggagaagcgggtcaaccgcgacgtgcgggtgacggtgctcggccacgtacagcgcggcggtacgcccaccccctacgaccgggtgctggcgacgcggttcggcgtgaacgccgccgacgccgcacacgccggtgagtacgggatgatggtgtcggcgcgcgggcaggagatcggccgggtgtcgttggccgacgcgacccgcaggctcaaactggtgccgcagagccgctacgacgacgccgcggagttcttcggctga

SEQ ID NO: 112838 - protein, 343 aa, Mycobacterium sp. KMS
MRIGVLTGGGDCPGLNAVIRAVVRTCDVRYGSSVVGFQDGWRGLLENRRIQLRNDARNDRLLAKGGTILGTARVHPEKLRAGLDQIKQTLDDNGIDVLIPIGGEGTLTAAHWLSEENVPVVGVPKTIDNDIDCTDVTFGHDTALTVASEAIDRLHSTAESHQRVMLVEVMGRHAGWIALNAGLASGAHMTLIPEQPFDVEEVCRLVKQRFVRGDSHFICVVAEGAKPAEGTMQLRQGGMDEFGHEKFTGVAQQLAIEVEKRVNRDVRVTVLGHVQRGGTPTPYDRVLATRFGVNAADAAHAGEYGMMVSARGQEIGRVSLADATRRLKLVPQSRYDDAAEFFG

SEQ ID NO: 112839 - DNA, 1053 bp, Acidovorax sp. JS42
  CDS (1)..(1053): transl_table=11
atgcgtgtcggcgtactcaccggcgggggcgactgcccggggctgaacgcggtgatccgcgcggtcaccaagtcgctgatccaccacggacactgcgaggtactgggcatcgaagacggcttcgagggcctgaggggcgaagcgtcgcgcgcgcggctgctcacctgggaccaggtctcgggcatcgtgcacatgggcggcaccatcctgggcacgagcaacagcgccaacccgctgaaggacgaagcgacgctggcccaggtggagcgcaacgtgcgcgcgctgggcctggacgtggtggtggccattggcggcgacggcaccatgagcctggcccatggcctggcgcggatcgggctgcaatgcgtgggcgtgcccaagaccatcgacaacgacatcgcgctgtgcgagcgcagcttcggctttgacaccgccgtggccacggccaccgacgcgatgcgccgcatcgagagcacggcttacagccaccaccgcgtcatgatcgtcgagaccatgggccgccatgcaggctggctggccctggaaagcggcattgccgccgcggccgacgtgatcctgctgcccgagatcgactacgacctgcagcccatcatcgagcgctgccgtcggcgcgagcagcgccagcgttacaccgtcatctgcatcggcgaaggcgccaaggagcgcggcgccggcctcacggtgcgcgagcaggtggcccacagccccgaccccgtgcgcctgggtggcgtgggccatgtgctgcgccagcggctgcagccgcacctgcaaagcgaggtgcgcactaccgtgctgggccatgtgcagcgcgggggcgacccgaccgcgttcgatcgtgtgctggccacgcgcttcggtcaccgggcggcgcaactggtgatcgatggccagttcggccacatggtcacgctacagggcgggcacatcgccagtgtccccatcgcccaggtggccaacacccagcgcaaggtgccgctggaccatgaactgatcgccatggcgcgggcgatcgacgtgtgcctgggggagtag

SEQ ID NO: 112840 - protein, 350 aa, Acidovorax sp. JS42
MRVGVLTGGGDCPGLNAVIRAVTKSLIHHGHCEVLGIEDGFEGLRGEASRARLLTWDQVSGIVHMGGTILGTSNSANPLKDEATLAQVERNVRALGLDVVVAIGGDGTMSLAHGLARIGLQCVGVPKTIDNDIALCERSFGFDTAVATATDAMRRIESTAYSHHRVMIVETMGRHAGWLALESGIAAAADVILLPEIDYDLQPIIERCRRREQRQRYTVICIGEGAKERGAGLTVREQVAHSPDPVRLGGVGHVLRQRLQPHLQSEVRTTVLGHVQRGGDPTAFDRVLATRFGHRAAQLVIDGQFGHMVTLQGGHIASVPIAQVANTQRKVPLDHELIAMARAIDVCLGE

SEQ ID NO: 112841 - DNA, 1215 bp, Magnetospirillum magnetotacticum MS-1
  CDS (1)..(1215): transl_table=11
atgctgcatggcaaggttctggtggcccagggcggcggcccgacggcggtgatcaatcaatccatggtcggcgcggtcctcgaatcgcggaaattccgcaatgtggatctggtctacggcgcccatcacggggtgcggggcatcgtcaacgaggatttcctcgacctgacccaggagaccagccacaacctggaaatggtggcgcagactccctcatcgggcctgggctcgacgcgcgacaagccggacctcaaatactgtcacgagatcttcgaggtcttaaaggcgcacggcatcgcctatttcttctatatcggcggcaacgattcctcggacacggtgcgcatcgtctcggaagaggcgcgcaaggcgggctatccactgcgctgcatccatatcccaaagaccatcgacaatgatctggtcctaaacgaccacacgccgggctttccctcggcggcccgcttcgtggcccaggccttcatgggggtcaatctggacaatgcggcgctgcgcggcatctatctcgccgttgtgatggggcgccatgccgggttcctgacggcggcctcggccctgggcaagaagtttcctgaagacggcccccaccttatctatatccccgagcgaacctttcgggtggacagcttcctcaccgacgtgaaggccacctatgacaaatacggtcgctgcgtggtggccctgtcggaaggcattcacgacgaggacggagcgccgatcatcaccaaactgtccaaagccacggaaaaagacgcccacggcaatatccagctttctgggaccggggcgctgtcagaccttttgtgcgaggagatcaagggcaagctgggcatcaaacgggtcagaggcgacacgttcggctatctccagcgctcgttcatcggctgcgtttccgatgtcgaccagcgcgaggcccgcgaagtgggggaaaaggcggtgcagttcgccatgtggggcgatcaggacggctcggtgaccatccagcgcaccggtttttactcggtggattacaagttgctgccgctggcggcggtcgctggcaagaccagggtgatggaggatcacttcatcgccgaatccggcacggatgtcaccgattccttccgcatgtatctgcggccgctcttgggatcgggcatgcccgacgccttccggctgcgcctcaattcggtgccgaggatcctgaagaagtag

SEQ ID NO: 112842 - protein, 404 aa, Magnetospirillum magnetotacticum MS-1
MLHGKVLVAQGGGPTAVINQSMVGAVLESRKFRNVDLVYGAHHGVRGIVNEDFLDLTQETSHNLEMVAQTPSSGLGSTRDKPDLKYCHEIFEVLKAHGIAYFFYIGGNDSSDTVRIVSEEARKAGYPLRCIHIPKTIDNDLVLNDHTPGFPSAARFVAQAFMGVNLDNAALRGIYLAVVMGRHAGFLTAASALGKKFPEDGPHLIYIPERTFRVDSFLTDVKATYDKYGRCVVALSEGIHDEDGAPIITKLSKATEKDAHGNIQLSGTGALSDLLCEEIKGKLGIKRVRGDTFGYLQRSFIGCVSDVDQREAREVGEKAVQFAMWGDQDGSVTIQRTGFYSVDYKLLPLAAVAGKTRVMEDHFIAESGTDVTDSFRMYLRPLLGSGMPDAFRLRLNSVPRILKK

SEQ ID NO: 112843 - DNA, 1083 bp, Nostoc punctiforme PCC 73102
  CDS (1)..(1083): transl_table=11
atgggagaacccaaacgcattggaattcttaccagtggaggtgattgttctggcttaaatgctgtgattagggctgtagtaaattgtgcagtggatacttacggctgggaagttttgggaattcgtcaagcgactctaggattaatggcacgtcccccacaattcacaaaactggaaatcgatcaagttgactcgttattaactgcgggtggcacaatgttggggacaaccaataaaggcgacccctttgcttttccaatgacggatgggagtttatgcgatcgctctgaagaaattattgcaggttatcatgagctaggtttagacgctttgattggtattggcggtgatggtagtttggcaattcttcgccgtctcgcccaacaaggtggcattaatctagtaggtattcccaaaaccattgataacgatattggtgttactgaacatgccatcgggtttgatacagcagtcaatattgccacagaagcattagataggttgcattttactgctgcaagtcatagccgagtcatgattttagaagtgatggggcgtgatgctggacacatagcaatagctgcgggaattgcggggggagcaaatgtaattttaattcccgaaattccttacacagttgagcatatttgccacaaaattaaagaacgccaagagaaaggcaaaaactattgtttgataattgtttctgaagcggttcgtacccacgatggagaaaatgtgacgattacaaatcgcttaggtcaatctcgatacggtggaattggtgagtatttagcagataaaattattgaacacatcggtgtagaaacgcgagttactgttttaggacacattcaacgaggtggaactgcttcaccactggatagattagttgcaacagcctttggcgtagcggcggttaatctaattgccgaggataaatatgatcgcatggtgacttggcaaaatcgccaagtattaagtgtaccaattacagaagcgatcgctcaatatagcgccgtcgatcccaatggtactttagttaaaaccgctcatggtatgggtatttatttaggagactaa

SEQ ID NO: 112844 - protein, 360 aa, Nostoc punctiforme PCC 73102
MGEPKRIGILTSGGDCSGLNAVIRAVVNCAVDTYGWEVLGIRQATLGLMARPPQFTKLEIDQVDSLLTAGGTMLGTTNKGDPFAFPMTDGSLCDRSEEIIAGYHELGLDALIGIGGDGSLAILRRLAQQGGINLVGIPKTIDNDIGVTEHAIGFDTAVNIATEALDRLHFTAASHSRVMILEVMGRDAGHIAIAAGIAGGANVILIPEIPYTVEHICHKIKERQEKGKNYCLIIVSEAVRTHDGENVTITNRLGQSRYGGIGEYLADKIIEHIGVETRVTVLGHIQRGGTASPLDRLVATAFGVAAVNLIAEDKYDRMVTWQNRQVLSVPITEAIAQYSAVDPNGTLVKTAHGMGIYLGD

SEQ ID NO: 112845 - DNA, 984 bp, Fusobacterium nucleatum subsp. vincentii ATCC 49256
  CDS (1)..(984): transl_table=11
gtggaaatagaaaaaatggaaaaaaaattagctatattaacaagtggtggagatgcaccaggaatgaatgctgcaataagagcaacagcaaaaattgcagagtcttatggttttgaagtttatggaataagaagaggatatttaggaatgttaaatgatgaaatattcccaataactggtagatttgtatcaggaattattgataaaggtggtactgttttattaactgctcgttgtgaagaatttaaacaagctagatttagagaaattgcagcaaataatttaaagaaaaaaggaatagagtatttagttgttataggtggagatggttcttatcgtggagctaatttactatataaagaacacggaataaaagtagttggaatacctggaactattgataatgatatttgtggaacagatttcactcttggatttgatacttgtcttaatacaattttagatgcaatgtcaaaaataagagatacagcaacttctcatgaaagaacaattttaattcaagttatgggaagaagagcaggagatttagcactacatgcttgtatagcaggtggtggagatgggataatgatacctgaaatggataatcctattgaaatgttagcattacagctaaaagaaagaagaaaaaatggtaagttgcatgatatagttttagttgcagaaggtgttggaaatgtatttgaaattgaagaaaaattaagaggacatatcaatagtgaaattagatcggttgttttaggacatattcaaagaggaggaacaccatcaggacgtgatagagttcttgcaagtagaatggcagcaaaagcagtagaagtattaagtaaaggggaagcaggagttatggttggaattgaaaaaaatgaaatggtaactcatacacttgaaaaagcttgctctgttgaaaaaagaaagagtattgaaaaagattatgaattagcacttttattatcaaaataa

SEQ ID NO: 112846 - protein, 327 aa, Fusobacterium nucleatum subsp. vincentii ATCC 49256
MEIEKMEKKLAILTSGGDAPGMNAAIRATAKIAESYGFEVYGIRRGYLGMLNDEIFPITGRFVSGIIDKGGTVLLTARCEEFKQARFREIAANNLKKKGIEYLVVIGGDGSYRGANLLYKEHGIKVVGIPGTIDNDICGTDFTLGFDTCLNTILDAMSKIRDTATSHERTILIQVMGRRAGDLALHACIAGGGDGIMIPEMDNPIEMLALQLKERRKNGKLHDIVLVAEGVGNVFEIEEKLRGHINSEIRSVVLGHIQRGGTPSGRDRVLASRMAAKAVEVLSKGEAGVMVGIEKNEMVTHTLEKACSVEKRKSIEKDYELALLLSK

SEQ ID NO: 112847 - DNA, 966 bp, Haemophilus influenzae R2846
  CDS (1)..(966): transl_table=11
atgattaaaaaaattgcagttttaacaagtggtggcgatgcgcctggtatgaatgccgcaattcgtggcgtagtacgttctgcacttgcagaaggcttagaagtatttggtatctatgacggttatcaaggtttatacaataataaaatcaaacaattaaatcgctatagcgtatctgatgtgattaatcgtggcggtacttttttaggctctgcacgttttcctgaatttaaagatcctaatattcgggcaaaatgtgcggaaattttacgttctcacggcattgatgcacttgtggttatcggtggtgacggttcttatatgggggcaaaattattaaccgaagaacacagtttcccttgtgttggcttacccggtactattgataatgatgtggcaggtactgactataccatcggttatcaaaccgcattacaaactgcagtggatgcaatcgaccgtttacgtgatacatcaagctcacaccaacgtatttctatcgttgaaattatgggtcgccactgtagtgacttaaccatttctgcgggcattgctggcggttgtgaatatatcgtcgcatcagaaattgaatttaatcgcgaagaattaattcaacaaattgaacgtagcattattcgcagtaaacgccatgcaattattgcaatcactgaacttttaaccgatgttcattctctggcaaaagaaattgaagctcgcgtaggccacgaaactcgcgcaaccgttttagggcatattcaacgtggtggttctccttgtgcttttgaccgtattcttgcctcacgtatgggcgcatacgcagtagatttattgctacaaggcaagggcggctattgcgtaggtatccaaaatgaacaactcgttcatcacgatattattgatgccattaataatatgcagcgtgtatttaaggctgattggcttaaagtggcaaaacgtttggaataa

SEQ ID NO: 112848 - protein, 321 aa, Haemophilus influenzae R2846
MIKKIAVLTSGGDAPGMNAAIRGVVRSALAEGLEVFGIYDGYQGLYNNKIKQLNRYSVSDVINRGGTFLGSARFPEFKDPNIRAKCAEILRSHGIDALVVIGGDGSYMGAKLLTEEHSFPCVGLPGTIDNDVAGTDYTIGYQTALQTAVDAIDRLRDTSSSHQRISIVEIMGRHCSDLTISAGIAGGCEYIVASEIEFNREELIQQIERSIIRSKRHAIIAITELLTDVHSLAKEIEARVGHETRATVLGHIQRGGSPCAFDRILASRMGAYAVDLLLQGKGGYCVGIQNEQLVHHDIIDAINNMQRVFKADWLKVAKRLE

SEQ ID NO: 112849 - DNA, 969 bp, Exiguobacterium sibiricum 255-15
  CDS (1)..(969): transl_table=11
gtgagtttgaaacggattgctattttaacaagtggtggcgatgcacccggcatgaatgccgcagtgcgtgctgtaacacgtaaggcgatttttcatggactggaagtgtttggtgtctacaacggataccaaggtctgattaacggagatctcgtccaattgaaccttggttcagtcggtgacatcatccaacggggtggaacgttcctgcgttctgcacgttgcccggaattccggactgaagaaggacgcgcgaaagctgtcgtcaatctgaagaaattcgaaatcgatgcactcgtcgtcgttggtggtgacgggtcttatcgtggtgctcaaaaattgacgggactcggtttcccgacgatcggtcttccgggaacgattgataacgacatcccgggtacggattacacgattggtttcgatacagccctcaatacggcactcgaagccatcgataagatccgtgacacggcgtcgtcacatgagcggacatatgtcatcgaagtcatgggacgcgacgcaggggatatcgcactatatgctggattagccggcggagcggaatcaatcctggttccggaacgtccggaagatttaaaagaagtcttgaaccggattcaaagcggtgtcaatcgtggtaagaaacactcgatcgttatcgtagcggaaggtgccggacgtgcgcaggatgttggagacgagattgccaaggaaacaggacttgatacacgtgtcacggtattaggtcatgttcaacgcggcggtgcgccgacagctgctgaccgtgtactggcaagccggatgggtgcctatgcgattgacatcctgcttgaaggtaagcaaggacgtgtcgtaggtgtacgcggcggtaagatggtcgatcttgatatcgacgaagcattggatgaaaacaaacacgaactggatctcgaaatcttagagttgtcaaaacaactatccatctaa

SEQ ID NO: 112850 - protein, 322 aa, Exiguobacterium sibiricum 255-15
MSLKRIAILTSGGDAPGMNAAVRAVTRKAIFHGLEVFGVYNGYQGLINGDLVQLNLGSVGDIIQRGGTFLRSARCPEFRTEEGRAKAVVNLKKFEIDALVVVGGDGSYRGAQKLTGLGFPTIGLPGTIDNDIPGTDYTIGFDTALNTALEAIDKIRDTASSHERTYVIEVMGRDAGDIALYAGLAGGAESILVPERPEDLKEVLNRIQSGVNRGKKHSIVIVAEGAGRAQDVGDEIAKETGLDTRVTVLGHVQRGGAPTAADRVLASRMGAYAIDILLEGKQGRVVGVRGGKMVDLDIDEALDENKHELDLEILELSKQLSI

SEQ ID NO: 112851 - DNA, 1206 bp, Prosthecochloris aestuarii DSM 271
  CDS (1)..(1206): transl_table=11
gtgaaaaaaattggcattctcaccagcggaggagactgcggcggtctcaacgcagtcatcaaaggggcagcattcatggccctctccaaagggattgaaatgtatattatccccaacggctacgcaggactatacaaccttatcgacaatgaaaaactcgtactgctcgaccaggcacgtctggatcagttttccggaaacttcgcaggttcggaagcaggccattcgagggtgaaaatcaaagccatcagtaatcccgagaagtacaaccgcatcaaagagggcatgaaaaagttcgaactcgatggcctcgtggtcagcggaggtgatgattcgggtagtgtcatggtggacctgaacagcaacggaattcactgtatccatgccccaaaaaccatggatctcgacctgcagacctactccgtcggtggagactcgaccatcaaccgtatcgcccagttcgttcaggacctgaaaaccaccggccgtacccataacagaattcttgtcaccgaagtattcggacgttatgccggccacaccgccttccgaagcggtatcgccgccgaagccgactgtatcctcatccctgaaatcccggtcgactgggatgtcgtctacgaacacattgtcggaagattcactcgccgcatccgccagagtgacgtcagcgcaggcacctataccatcgtcgtcgctgaaggcatgaaaaacgccgacggtacggacattatcgatgaatctgcaggtgttgatgcctttggccatcaaaaacttgccggcgccggtaaatatgtgtgccaggagatgaaaaagaggttaaaagccgacccggatatgccaattttcatgaaagaaaccggcatgttcgtcgaaggcatctacgaaatccccgaaatccgtgaaattcatccgggtcatcttgtccgttcaggaaacacctctgcctatgacgtcaacttcggctatgaagcaggagcagcagcggtcatactcctttccgaaggcaaatccggtgtaaccatttccaaagtaaaaggacgcaaaatcgaatacattgaatccaccaaggccatcgaacagcgttttgtcgaccttgaccaggtagcgctgtatgagtcgatcggggtctgtttcgggcgtcatgtcgccgcttatgagcctatcctcagagaggttgacggggtctatgacaggatttactga

SEQ ID NO: 112852 - protein, 401 aa, Prosthecochloris aestuarii DSM 271
MKKIGILTSGGDCGGLNAVIKGAAFMALSKGIEMYIIPNGYAGLYNLIDNEKLVLLDQARLDQFSGNFAGSEAGHSRVKIKAISNPEKYNRIKEGMKKFELDGLVVSGGDDSGSVMVDLNSNGIHCIHAPKTMDLDLQTYSVGGDSTINRIAQFVQDLKTTGRTHNRILVTEVFGRYAGHTAFRSGIAAEADCILIPEIPVDWDVVYEHIVGRFTRRIRQSDVSAGTYTIVVAEGMKNADGTDIIDESAGVDAFGHQKLAGAGKYVCQEMKKRLKADPDMPIFMKETGMFVEGIYEIPEIREIHPGHLVRSGNTSAYDVNFGYEAGAAAVILLSEGKSGVTISKVKGRKIEYIESTKAIEQRFVDLDQVALYESIGVCFGRHVAAYEPILREVDGVYDRIY

SEQ ID NO: 112853 - DNA, 1044 bp, Prosthecochloris aestuarii DSM 271
  CDS (1)..(1044): transl_table=11
atgaccatttcagcaatgagagatctatctatgacacctgcaacagagaacggattacgcagaaaaccaatactacgaaaaataggagtatttacttctggcggggatgctcccggtatgaatgccgctatccgcgcggtcactcgtgcggcaatcgcgaacaagctgaaagtcaccggaattcgccggggataccagggaatgatcgagggcgattttattccgttgcgctcatcggatgtcagcggcatcatccagctgggaggaacaattctcagaacggcacggagcaaggagttcagaactcccgaaggccgggaaaaagcctggcagcagttgcagaacgcgggcatagacgctgttgttgtgatcggtggcgacggctcttttaccggtgcgctgacaatgtctcaggagtacaatatatcgttcgtaggtattccgggcaccatcgacaacgacatatacgggacggactataccatcggatatgaaacggcattgaactccgttgtgtgcgcggtcgacaaaatcagggatacggcagtatcacacggcaggattttcatggttgaggtgatgggccgggaagcaggcctgcttgccctgaacagcggcattgcctgcggggcggaagtcattctgattcctgaatcgaaagagcagcatgatgcgttgaagcggtttctcgacaagggctataagcgcaaggagcgaagcggcatagttatcgttgccgaaggggatgaaccgggaggagcgttgaaacttgccgaaaacgtgcgctgtgagcatcccgaacttgatgttcgcgtttcgatcctgggccatattcagcgaggaggaagcccgacggcaaacgaccgcatcaatgcgacgagaatgggagttgctgctgtcgatgccctgctcgacgatcagaaaagcatcatgatcgggattgacaacggaaggatcgtgcaggtcccgttcaacaaggccgtcaagctgaatcacagtttcgacagggaattactggagatacagaaaatgctcaacatctga

SEQ ID NO: 112854 - protein, 347 aa, Prosthecochloris aestuarii DSM 271
MTISAMRDLSMTPATENGLRRKPILRKIGVFTSGGDAPGMNAAIRAVTRAAIANKLKVTGIRRGYQGMIEGDFIPLRSSDVSGIIQLGGTILRTARSKEFRTPEGREKAWQQLQNAGIDAVVVIGGDGSFTGALTMSQEYNISFVGIPGTIDNDIYGTDYTIGYETALNSVVCAVDKIRDTAVSHGRIFMVEVMGREAGLLALNSGIACGAEVILIPESKEQHDALKRFLDKGYKRKERSGIVIVAEGDEPGGALKLAENVRCEHPELDVRVSILGHIQRGGSPTANDRINATRMGVAAVDALLDDQKSIMIGIDNGRIVQVPFNKAVKLNHSFDRELLEIQKMLNI

SEQ ID NO: 112855 - DNA, 1173 bp, Prosthecochloris aestuarii DSM 271
  CDS (1)..(1173): transl_table=11
atgagaatcggtgttttaactggaggaggagatgctccgggtatcaatgcatgcctcaaaaccatcgttacacagtgtgacgaatacggttttgaggtttttggcattaaacgtggctgggaaggacttctttcgctcaatcctgatgtgccggatgagcgatccctccacattgttcctctgaccaggcatcttgtccgaaaaatcgacaggaccggcggaacttttctgcattccagccgtgtcaaccctggaaatctttcccggaaagaggttcctctgtttctgcagtgcgcactgaagaggatggggcgaggtctgatcaatgcagctcattttgatgcgacctttcatgttctgcgggttctggaacatctgggtcttgatacactcattgttatcggtggcgatgatacgatcagttatgcctggcatctgcagcagcagggagttgctgttgtagcgattccaaaaaccatggataacgacgtttttggaacggattactgcattggattcggtacggctgttacccggagtgtgcagtatatccatcagcttcgtaccagttccggttctcatgagcggattaccatcgttgaactgttcggtcgtcataccggagaagcatgtcttgtcagttcctatcttgcaggtgtagacagaacgctcatacccgaggccccttttgatccggaacgtcttgccgacctcctgatttttgataaggccgccaataccagcaattatgcaatggttgctgtcagcgaaggggctcgcatggttggtggtaaatttatagaatactgtcgccatcatattgatgatcatgtgttgcagcgggatggaatcggtcagttgatccgtgataccatgaccatgcttaccggtgaagaaattatctggcagccgttgggataccttatgcgttccggtattccggatgcgcttgatattatggtcggatgtaatttcgctcagcttgccgtcgaacttatccgtaagaatgtttctggtgttatggttgctctcagtaagggggtttacgatcatgttccgcttgctgttgttgcttcaggtacccaccaggtcgatatcgcagagttatatgatcctgaggagtaccggcccaagatgcgctgtgttctcggcaagccgatgtttttctattaa

SEQ ID NO: 112856 - protein, 390 aa, Prosthecochloris aestuarii DSM 271
MRIGVLTGGGDAPGINACLKTIVTQCDEYGFEVFGIKRGWEGLLSLNPDVPDERSLHIVPLTRHLVRKIDRTGGTFLHSSRVNPGNLSRKEVPLFLQCALKRMGRGLINAAHFDATFHVLRVLEHLGLDTLIVIGGDDTISYAWHLQQQGVAVVAIPKTMDNDVFGTDYCIGFGTAVTRSVQYIHQLRTSSGSHERITIVELFGRHTGEACLVSSYLAGVDRTLIPEAPFDPERLADLLIFDKAANTSNYAMVAVSEGARMVGGKFIEYCRHHIDDHVLQRDGIGQLIRDTMTMLTGEEIIWQPLGYLMRSGIPDALDIMVGCNFAQLAVELIRKNVSGVMVALSKGVYDHVPLAVVASGTHQVDIAELYDPEEYRPKMRCVLGKPMFFY

SEQ ID NO: 112857 - DNA, 1011 bp, Streptococcus suis 89/1591
  CDS (1)..(1011): transl_table=11
atgaaacgtattgctgttttgaccagtggtggtgatgcccctggtatgaacgctgctattcgtgcagttgttcgccaagcaatttcagaaggaatggaagtttatggaatcaacgaaggttacgcaggtatggttgcgggtgatatccatgaattgtctgcacgttctgtaggtgatattatttcacgtggaggaacattccttggttcagctcgttatccagaatttgccaaattagaagggcaacttaaagggattgagcaattgaaaaaacatggtatcgaaggtgtagtggttatcggtggtgacggttcttaccacggagcaatgcgcttgacggagcatggtttcccagctattggtgtacctggtaccattgacaacgacatcgtggggacagattttacaatcggttttgacacagctgtaacaactgccatggatgcgattgataagattcgcgatacttcatcaagtcaccgtcgtactttcgtcattgaagtaatgggacgtcatgcaggagacatcgctctttgggctggtattgcttctggtgcagatgttatcgttgttccagaagaagacttcaatatcaacgatattgttgaccgtattaaagcgggctacgacaatggtaagaaacatagcatcattgttttggctgaaggtgttatgccagctgcacagttcgctgaagaattgaaagcagcaggcgatacaagtgatcttcgtgtgacagaacttggtcatatccaacgtggtggttctccaacagcgcgtgatcgtgtactcgcttctcgtatgggtgctcatgccgttaaattgcttaaagaaggccgtggaggtcttgcagtaggtatccgtaacgagcaaatggttgaaaatccaattcttggaactgcagaagaaggtgccttgtttagcttgactactgatggcaagattgtagttaataatccgcataaagcagatttggagttggctgatttgaaccgtaacttgtcaatctag

SEQ ID NO: 112858 - protein, 336 aa, Streptococcus suis 89/1591
MKRIAVLTSGGDAPGMNAAIRAVVRQAISEGMEVYGINEGYAGMVAGDIHELSARSVGDIISRGGTFLGSARYPEFAKLEGQLKGIEQLKKHGIEGVVVIGGDGSYHGAMRLTEHGFPAIGVPGTIDNDIVGTDFTIGFDTAVTTAMDAIDKIRDTSSSHRRTFVIEVMGRHAGDIALWAGIASGADVIVVPEEDFNINDIVDRIKAGYDNGKKHSIIVLAEGVMPAAQFAEELKAAGDTSDLRVTELGHIQRGGSPTARDRVLASRMGAHAVKLLKEGRGGLAVGIRNEQMVENPILGTAEEGALFSLTTDGKIVVNNPHKADLELADLNRNLSI

SEQ ID NO: 112859 - DNA, 987 bp, Croceibacter atlanticus HTCC2559
  CDS (1)..(987): transl_table=11
atgaaagataaattgaatcatattgctgtcctaacaagtggtggcgatgctccaggaatgaatgcaggaataagagcagttgtacgttcttgtgcatttcacgatattaaatgttctggtatttatagaggttaccaaggtcttatagaaaatgattttgaagttcttaatgcacgttcagtaagaaatattataaatcgaggtggcacctttttaaaatcggcacgttctaaagaatttaggacaaaagaaggacgtcaaaaagcttacgaaaatcttatatctcaaggcgtagatgccttggtggtaattggaggtgatggtacatttaatggtgcagttgtctttaatgaagaacatgattttccaatagtaggaatgccaggtactatagataatgatattaatggaacagatcatactattggttacgatactgcattaaatactgttgttgaagctatagataaaattagagataccgcaaactctcataaccgtttgtttttagttgaggttatgggaagagatgcaggagatattgccttaaatgcaggtattggtgcaggagcagaagagattttaattccggaagaagatttaggaacagatagattgttagagtctttaaaacgaagtaaaaaatctgggaaaacctccagcattattgtggtttctgaaggagataaaataggtaagaatatttttgaactcgcagagtttattgaaaccaacctagaagattacgaagttagagttactgttttaggacacatacaacgtggtggtacgcctagctgttatgatcgtgttttagcaagcaggttaggtattggtgccgtagatgcattattggcaggagagcgagacattatgataggaacagtgcacggtaaagttacatctgtgccatttaaggaagctgttgcaggacgcaataaaatagatttagatttaattagagtggcagatattacttcgacataa

SEQ ID NO: 112860 - protein, 328 aa, Croceibacter atlanticus HTCC2559
MKDKLNHIAVLTSGGDAPGMNAGIRAVVRSCAFHDIKCSGIYRGYQGLIENDFEVLNARSVRNIINRGGTFLKSARSKEFRTKEGRQKAYENLISQGVDALVVIGGDGTFNGAVVFNEEHDFPIVGMPGTIDNDINGTDHTIGYDTALNTVVEAIDKIRDTANSHNRLFLVEVMGRDAGDIALNAGIGAGAEEILIPEEDLGTDRLLESLKRSKKSGKTSSIIVVSEGDKIGKNIFELAEFIETNLEDYEVRVTVLGHIQRGGTPSCYDRVLASRLGIGAVDALLAGERDIMIGTVHGKVTSVPFKEAVAGRNKIDLDLIRVADITST

SEQ ID NO: 112861 - DNA, 1008 bp, Pseudoalteromonas tunicata D2
  CDS (1)..(1008): transl_table=11
atgactactgtaaatttgtttcggctcggtgtattaacctctggcggagatgcaccagggatgaatgcagcaattcgcgctatcactttaaaagggctcagcgctggttttgaaattgtaggcatcaacgctggctacaatggtatttttaaccttgatacacaaatactgagtgctcagtccgttgataatatcattcagcgtggtggtactcttttaaaaacagcccgttgttcacaattacgcgaagaagatggcccgcgcttagcagcagaaaaacttactcaattaaaacttgatgcactcattatcattggcggcgatggcagctttcgtggcgcagtcaaactagctgagttttggccaaagcctattattgggattcctggcaccatagataacgatatcaatggcacagatcaaacgataggcttttggactgcaattgatacagcccttgattcaattgataaaattcgcgataccgccgatgcgtttgagcgcatttttgtagtggaagtcatgggacgcgattgtggttttattgcaatggaatctggcattgcctgcggtgcagagcaaataatttgccatgagttaattgaagacgaagaaacgtatttagcacaactttataacgcaattttgcacgcggtaacatggcgtcaaactcaaagctacgttattgtaattgcagagcattcgttatcaatctgcagtgcagagctggctaaacgcattgccgattttaccggtgtggacaccaaaagtgctattttaggctacattcaacgcggtggcgcaccagttgccatggatcgcgtgcttgcaacccagcttgggatcagcgcagtgaaagcggtatgcgaaggtaaaacgggattaatgattggcatgaaaaacaatgaaatggtcgaaattccatttgcgcaaacaggtcttaaaaatacacataatcaagacctgatcaagcgattaaaacattttaattttgatttaactgattaa

SEQ ID NO: 112862 - protein, 335 aa, Pseudoalteromonas tunicata D2
MTTVNLFRLGVLTSGGDAPGMNAAIRAITLKGLSAGFEIVGINAGYNGIFNLDTQILSAQSVDNIIQRGGTLLKTARCSQLREEDGPRLAAEKLTQLKLDALIIIGGDGSFRGAVKLAEFWPKPIIGIPGTIDNDINGTDQTIGFWTAIDTALDSIDKIRDTADAFERIFVVEVMGRDCGFIAMESGIACGAEQIICHELIEDEETYLAQLYNAILHAVTWRQTQSYVIVIAEHSLSICSAELAKRIADFTGVDTKSAILGYIQRGGAPVAMDRVLATQLGISAVKAVCEGKTGLMIGMKNNEMVEIPFAQTGLKNTHNQDLIKRLKHFNFDLTD

SEQ ID NO: 112863 - DNA, 963 bp, Photobacterium sp. SKA34
  CDS (1)..(963): transl_table=11
atgattaagaagattggtgttttgaccagtggtggtgacgcacctggtatgaatgcagcagttcgcggcgtagttcgagcagcgttaactgaaggtctagaagtgtacggtatttatgatggctaccaaggtctttataacaactgtatcgaaaagctagatcgtcaaagtgtatctgatgtgatcaacaaaggcggtacattcctaggctctgcgcgttttcctgaattccgtgaagtggaagtgcgtgaaaaagcgattgagaacctaaaactgtacggtattgatgcattagtcgtcattggtggtgacggctcatacatgggtgcgaagaagttaactgagatgggttacccatgtatcggtcttcctggcactatcgataatgatgttgctggtactgattacactatcggttacatgacagcaatgaacacggttatcgatgcaattgaccgtttacgtgatacatcatcttcacaccaacgtatctctatcgtagaagtgatgggtcgtcattgtggtgacttaaccctaatgtctgcgattgctggtggttgtgagtacatcatcacgccagaaactgggctagataaagaaaagttacttcagcatatccgtgaaggtattgctaaaggtaaaaagcacgcaattattgctatcactgagctaatgaccgatgtgaatgaactggctaagttcattgaagcagaaacaggtcgtgaaactcgcgcaacagtattgggtcacattcagcgtggtggtcaaccaacagcgtttgaccgtgtacttgcttctcgtatgggcgcatacgcagttgatcttcttcaaaaaggagaaggtggtcgttgtgtaggtattcagtgtgagcaacttgttcaccatgatatcatcgatgcaattgaaaatatgcgtcgtcctgttcgtaacgatctttatgagttagctgagaagttattctaa

SEQ ID NO: 112864 - protein, 320 aa, Photobacterium sp. SKA34
MIKKIGVLTSGGDAPGMNAAVRGVVRAALTEGLEVYGIYDGYQGLYNNCIEKLDRQSVSDVINKGGTFLGSARFPEFREVEVREKAIENLKLYGIDALVVIGGDGSYMGAKKLTEMGYPCIGLPGTIDNDVAGTDYTIGYMTAMNTVIDAIDRLRDTSSSHQRISIVEVMGRHCGDLTLMSAIAGGCEYIITPETGLDKEKLLQHIREGIAKGKKHAIIAITELMTDVNELAKFIEAETGRETRATVLGHIQRGGQPTAFDRVLASRMGAYAVDLLQKGEGGRCVGIQCEQLVHHDIIDAIENMRRPVRNDLYELAEKLF

SEQ ID NO: 112865 - DNA, 1008 bp, Oceanospirillum sp. MED92
  CDS (1)..(1008): transl_table=11
atgtacgaaatccctggtttcacagatgaacatcatattcccagcgctatcgcggtactcactagcggaggggattcacctggaatgaatccggcaatccgcggggttgttcgcgctgcgttacatcgaggaataaaagtttttggaatcaataaaggctatagcggtttaatcattggtgatcttgaagagatgaattcagcttcagtaaccaatattgttcaacgcggtggcactattctcaaaagcgatcgttgcgaagcttttaaagatccagctgtcagacatcaagcagcggaagttcttaaagaaaaggggatcgatactctggttgtgattggtggagatggctcgctcacaggtgctcattatttgactcttgaaaatgacattagagtcattggccttccaggcactattgataacgacatttatggaacggatgacaccatcggttttgatacagccgtaaacaccgcccttgaagctatcgataagattagagacacagccctatctcatgagagcttgtttttagtcgaggtgatggggcgtaactctggattcatcgccacccacgtcgggatcgcctgtggtgccgagatgattgtcattcctgagtatgaagttaaagtcgatgcgatttcatcccaactcgctagtaatcgcgaacaaggaaagggctccagcggcatcatcgttgttgctgaaggaccaaagccgggtctcacctacgatctggccaaacaactgaaaaaccatggccagcagcctaaggtttgcattctcggccatattcaaagaggcggcataccatccgggcacgatagaatactggcatcctgccttggcgcctctgcagtggattacctatgcgcaggttacaatgacattatgattggtgttcgccgaggcaaaatagttgatacacctctggctcaggttattgagaaaagcaaagagttagatgaagcactattccagcgcgcgctcttacttcataaatag

SEQ ID NO: 112866 - protein, 335 aa, Oceanospirillum sp. MED92
MYEIPGFTDEHHIPSAIAVLTSGGDSPGMNPAIRGVVRAALHRGIKVFGINKGYSGLIIGDLEEMNSASVTNIVQRGGTILKSDRCEAFKDPAVRHQAAEVLKEKGIDTLVVIGGDGSLTGAHYLTLENDIRVIGLPGTIDNDIYGTDDTIGFDTAVNTALEAIDKIRDTALSHESLFLVEVMGRNSGFIATHVGIACGAEMIVIPEYEVKVDAISSQLASNREQGKGSSGIIVVAEGPKPGLTYDLAKQLKNHGQQPKVCILGHIQRGGIPSGHDRILASCLGASAVDYLCAGYNDIMIGVRRGKIVDTPLAQVIEKSKELDEALFQRALLLHK

SEQ ID NO: 112867 - DNA, 987 bp, Flavobacteria bacterium BBFL7
  CDS (1)..(987): transl_table=11
atgaatcaaacgattaaaaaaataggtgtcatgacctctggaggtgattctccagggatgaatgctgcattaagatcagtggtacgtacctgtgcatttcacggtgtagaatgtttaggtatttatagaggatatcaaggactgatagaaggtgacttcaaggaaatgacagcacgtagtgtcaataatattattaataaaggaggaactattcttaagagtgcacgttctcaagaattccgtacggtagaaggaagaaaaaaagcttttgaaaaagtaaaagcatctggtatggacgccttagtagtaataggcggtgatggaagttttactggtggaatggtttttaatgaagaatttaattttccggtaatgggtattcctggtactattgataatgatatttatggaaccagttctacattaggttttgatacagcattaaacacagtagtagaatgtatcgataagattagagatacggctagttcacataatagattattctttgtagaagttatgggacgtgatgtaggtcatattgctcttaacgctggagtaggcgctggtgcagaagagattctaattcctgaagaagatatgggaaaggatcgtctagtagaaagtctgaaacgtagtcgcgagtctggaaaatcttctagtatagtagtagtcgccgaaggtgataagaccggtgataacgtgtttgaattaaaagattatgtagagaagaacatgccagaatatgaggtgcgtgtatctgttttaggtcacatgcaacgcggtggttctccatcatgttgggatcgtgtactcgcgagtcgtatgggcgtaaaagcggtagaaagcctactagaaggaaagactaattatatggtcggtatcaataataataaaatagagctttgtcctttagataaagccgttaaaggtaaaactgaaatagatcaagaacttttaagagtttctgatatcatgacagtttaa

SEQ ID NO: 112868 - protein, 328 aa, Flavobacteria bacterium BBFL7
MNQTIKKIGVMTSGGDSPGMNAALRSVVRTCAFHGVECLGIYRGYQGLIEGDFKEMTARSVNNIINKGGTILKSARSQEFRTVEGRKKAFEKVKASGMDALVVIGGDGSFTGGMVFNEEFNFPVMGIPGTIDNDIYGTSSTLGFDTALNTVVECIDKIRDTASSHNRLFFVEVMGRDVGHIALNAGVGAGAEEILIPEEDMGKDRLVESLKRSRESGKSSSIVVVAEGDKTGDNVFELKDYVEKNMPEYEVRVSVLGHMQRGGSPSCWDRVLASRMGVKAVESLLEGKTNYMVGINNNKIELCPLDKAVKGKTEIDQELLRVSDIMTV

SEQ ID NO: 112869 - DNA, 1095 bp, delta proteobacterium MLMS-1
  CDS (1)..(1095): transl_table=11
atgaaaaaaatcgttatttccaccggcggcggtgacgccccggggctcaacgcggtgatctatgcggtcaccaaatccgcctaccggcgaggttgggagatttacggcagcaaaagcggctaccgcggtctgctcgatcccgacgagctgatccggctgaccccggaaaaggtcgaggatatcatgcccctggggggcaccatcctgggctccaccaacaagggcgatccctttgccatgccggtggaaaacctggccggcgagatccagactttggatctttcggatcggatcatgcgtaatttccgccgcctgggctttttctgccatatcgcggtgggcggggacggcagcctggagatcgcccaccggttcgccgtggaaaagggtatgccggtgatcggggtgcccaaaaccatcgacaacgatctggaggccacccagcgcaccttcggttttgacaccgccgtctccaccgccaccgacgccctggacaagctgcactccaccgccaaatcccatgaccgggtgatggtggtggaactgatgggccgggattccggctggatcgccttaaatgccgggatctccggcggggccgacgtgatcctgatcccggaggtcccctttgacatgaacgtggtctgccagaagatcaacgataacgatctgcgcgacaaaaactactccatcgtggtggtggccgaaggggccaaggccgccagcatgaaaaaggcgctgtgcaaaaagaaggtcgaactgggccgcagcgaagaactactgggcggtattggcgactgggtggccgagcagatccgctgccagaccggcaaggacacccgctccctgaccctggggcacctgcagcgcggcggctcgcccaccaccttcgaccggctgctggccctgcgttttggcggcgcggcggtgcgcatggccgaacaggagctttttgaccacatggtagccctgaagaccccggatatggtccccgtacccctggccgaagccatcaagtcccgcaagaaggtgcagttggacagcgacaaactgctgaccgcccgggaaatcggtatttgcttcggcgacgcctga

SEQ ID NO: 112870 - protein, 364 aa, delta proteobacterium MLMS-1
MKKIVISTGGGDAPGLNAVIYAVTKSAYRRGWEIYGSKSGYRGLLDPDELIRLTPEKVEDIMPLGGTILGSTNKGDPFAMPVENLAGEIQTLDLSDRIMRNFRRLGFFCHIAVGGDGSLEIAHRFAVEKGMPVIGVPKTIDNDLEATQRTFGFDTAVSTATDALDKLHSTAKSHDRVMVVELMGRDSGWIALNAGISGGADVILIPEVPFDMNVVCQKINDNDLRDKNYSIVVVAEGAKAASMKKALCKKKVELGRSEELLGGIGDWVAEQIRCQTGKDTRSLTLGHLQRGGSPTTFDRLLALRFGGAAVRMAEQELFDHMVALKTPDMVPVPLAEAIKSRKKVQLDSDKLLTAREIGICFGDA

SEQ ID NO: 112871 - DNA, 972 bp, Desulfitobacterium hafniense DCB-2
  CDS (1)..(972): transl_table=11
atgaccaataccgtcaggaagatcgctgttcttaccagcgggggggatgctccgggaatgaatgcggccattcgggcagtggttcgcaagggaatttatcatggacttgaggtttttgggattcgcaaggggtatgaaggcctgattcatggggaattcataaccatgcatctgggagcagtagcggatatcattcataggggcggtaccatgctcatgaccgcacgttcccaggagatgctcaccccggagggacaaaaaaacgccgcggctcaattgcgttatcgcggtatcgatgcgctgattgtgatcgggggggatggttcttttcggggagcacagaccttgtctgctcaaggaatagccatcgtcggtataccgggtaccattgataacgatattaccggcacggatttaactatcggatttgatactgccgtcaataatgtggttcaagcggttagtaaaatccgggatacggcaacatcccatgatcgaacctttttagtggaagtcatgggacgggattgcggcaacatcgccttgcaatccggcgtagcctgcggtgcagaatccatccttgtgccggaaatcgaaccggatctggatgatattgtcgcgaaattggaacgcggccaccaacggggcaaacatcacagtatcattatggtggcagaaggggctatgagtgcttggaatctgggggaagaactccgtcagagaaccggctttgaaacccgggtcaccatcttaggccatatccaaaggggcggcaatccaagtgccctcgatgtggtcctggcctcgcaaatgggcgggaaagcagtggagatactctgcgccggggaaaccgatcggatgacagcctgtgtcaaccaggaaatccaatccctgcctttggaggtggcttatggtgagcgcaaacccttcaacaaagttctctatgatctggccaatcaattggctatctga

SEQ ID NO: 112872 - protein, 323 aa, Desulfitobacterium hafniense DCB-2
MTNTVRKIAVLTSGGDAPGMNAAIRAVVRKGIYHGLEVFGIRKGYEGLIHGEFITMHLGAVADIIHRGGTMLMTARSQEMLTPEGQKNAAAQLRYRGIDALIVIGGDGSFRGAQTLSAQGIAIVGIPGTIDNDITGTDLTIGFDTAVNNVVQAVSKIRDTATSHDRTFLVEVMGRDCGNIALQSGVACGAESILVPEIEPDLDDIVAKLERGHQRGKHHSIIMVAEGAMSAWNLGEELRQRTGFETRVTILGHIQRGGNPSALDVVLASQMGGKAVEILCAGETDRMTACVNQEIQSLPLEVAYGERKPFNKVLYDLANQLAI

SEQ ID NO: 112873 - DNA, 1122 bp, Desulfitobacterium hafniense DCB-2
  CDS (1)..(1122): transl_table=11
atggaaccaatcaaaggagagcagcgggatggtcaatctgaaatcaggaagctggcgatcttgaccgggggcggagactgcccggggttgaatgcggtgattcgtgccgctgtaaaaacagcttgtcatcgcggtatagcggtggtgggaattcaagatggttttcggggagctgtggaaggggatttccgtcccttagagcttaaggatgtctccgggatcttaccccggggaggaacgattctgggcaccaccaaccgggataatccctttgcctatcctacacaagtcggggaagaacggcaggttcaggatcgttccgctgaagtgctggacagatttaaagcggaaggaattgatgccctgattgcgattgggggtgatgggagcttaagcatcgcttgggaatttgctaagcaagggcttaaggtggtgggtgttcccaaaaccatcgataatgatctgatgtgcacggatttaacctttggctttcagactgctgtggctactgcccaggacgctttggaccggctccacaccacggctgaatcccaccaccgcattatgatcttagaggtcatgggacgctacgccggttggatcgccctctatgccggagtggcagggggagcggatgtcatcttaatcccggaaattccttatcagctggagagtatcgctgaagctgtccagagacgggcccgtttaggcaagcacttcagcatcattgtggtggctgaaggggctaaacccctgggcggagacatggttgtggaacgcactatgtcagggagaacagatcccattaaattaggaggaatcggtgcaaagctggcggcggatttagagaaggtcaccgatatggagaccagggtgactgtgctgggacatttgcagcggggagggtctcccatcgctgtggatcgggtgctgtccacacgctatggggtggctgccgttgaagccgctttggctggtgattttggcatgatggtcgccctgcaggggcaagacatcgtcagagtgccaatggcagaagccgttcacaagctgaagcaggtggaacctgacgatcctgtcttaaatgccgcccgcagcatggggatcgaattcggggactaa

SEQ ID NO: 112874 - protein, 373 aa, Desulfitobacterium hafniense DCB-2
MEPIKGEQRDGQSEIRKLAILTGGGDCPGLNAVIRAAVKTACHRGIAVVGIQDGFRGAVEGDFRPLELKDVSGILPRGGTILGTTNRDNPFAYPTQVGEERQVQDRSAEVLDRFKAEGIDALIAIGGDGSLSIAWEFAKQGLKVVGVPKTIDNDLMCTDLTFGFQTAVATAQDALDRLHTTAESHHRIMILEVMGRYAGWIALYAGVAGGADVILIPEIPYQLESIAEAVQRRARLGKHFSIIVVAEGAKPLGGDMVVERTMSGRTDPIKLGGIGAKLAADLEKVTDMETRVTVLGHLQRGGSPIAVDRVLSTRYGVAAVEAALAGDFGMMVALQGQDIVRVPMAEAVHKLKQVEPDDPVLNAARSMGIEFGD

SEQ ID NO: 112875 - DNA, 963 bp, Vibrio sp. Ex25
  CDS (1)..(963): transl_table=11
atgattaagaagatcggtgttttaacaagtggcggtgacgcacctggtatgaacgcggcgatacgcggcgtagtacgtacagcactatccgagggattggaagtattcggtgtgtacgacggctacctaggcctatacgaaggccgcatcgagaagctagatcgttctagcgtttcagatgtgatcaacaaaggtggtacgttcctaggttctgcacgtttccctgaatttaaagaagtggaagtgcgtgaaaaagcgattgagaacctgaaaaaacatggtatcgatgcgctagtcgtgatcggtggtgacggttcgtacatgggtgcgaagaaactgactgaaatgggttacccatgtatcggtctaccaggcacaatcgacaacgatatcgctggtactgactacacagtgggctacctaagtgcactaaacacagttatcgatgcgatcgaccgtctacgtgatacttcttcatctcaccaacgtatttcaattgtagaaatcatgggtcgtcactgtggtgacctaactctgatgtctgcaatcgcgggtggttgtgagtacatcatcactccagaaactggcctagacaaagacaagctgatcagcaacatccaagacggcattgcaaaaggtaagaaacacgcaatcatcgcgttgactgagctaatgatggatgccaatgaactggctcgtgacatcgaagcggcgacaggtcgtgaaactcgtgcaacagtacttggtcacatccaacgtggtggtcgtccaacggcatttgaccgcgttctagcatctcgtatgggtaactacgctgttcacctattgatcgaaggtcatggtggtcgttgtgtcggtatcgtgaaagagcaacttgttcaccacgacatcatcgacgcgatcgaaaacatgaagcgtccagtacgcaacgatctatacaaagttgctgaagaactgttctaa

SEQ ID NO: 112876 - protein, 320 aa, Vibrio sp. Ex25
MIKKIGVLTSGGDAPGMNAAIRGVVRTALSEGLEVFGVYDGYLGLYEGRIEKLDRSSVSDVINKGGTFLGSARFPEFKEVEVREKAIENLKKHGIDALVVIGGDGSYMGAKKLTEMGYPCIGLPGTIDNDIAGTDYTVGYLSALNTVIDAIDRLRDTSSSHQRISIVEIMGRHCGDLTLMSAIAGGCEYIITPETGLDKDKLISNIQDGIAKGKKHAIIALTELMMDANELARDIEAATGRETRATVLGHIQRGGRPTAFDRVLASRMGNYAVHLLIEGHGGRCVGIVKEQLVHHDIIDAIENMKRPVRNDLYKVAEELF

SEQ ID NO: 112877 - DNA, 1086 bp, Azospirillum brasilense
  CDS (1)..(1086): transl_table=11
atgacagcaggcaagcgcatcggcattctcaccagcggcggcgactgcgccgggctgaacgcggtcatccgcgcggtggtccaccgggccgtcctgacctacggctggcaggtcctgggcatcaaggagggcacccaggggttgctgcagcgtccagtgcagtatcaggtgctcgacctgccgcaggttgacggcaacatgatgcgcatgggcggcacgatcctcggcacgaccaaccgtggcgaccccttcgcctacccgatggccgacggcacccagaaggaccggtcggacgagatcatcggcggttaccgcgagctggggctggacgcgctgatcggcatcggcggcgacggcagcttcgccatcctgaagaagttggccgacaagggcggcttccagatggtcggcatccccaagaccatcgacaacgatctcggcctgaccgaggtgtcggtcggctacgacaccgccgtcggcgtggcggtcgaggcgctcgaccggctccagccgaccgcggcgagccacgcccgcgtcatggtgctggaggtgatgggccgcgacgccggccacatcgccctggccgcgggcatcgccggcggcgccgacgtggtgctgattcccgagatcgcctactcgatcgagaagatcgcccaaaagatcaagcaggtgcgctcgacgggccgcaacttcgccctggtcgtggtgtcggaggcggtgaagaccgtggacggcaccggcgtgcagaagctgttccagggcggccagaagcgctacggcggcattggcgactacatcggcgagaagatcgccgaggcgacgggggcggagacccgcgtcaccgtcctgggccacgtccagcgcggcagcatgcccagcccgcgcgaccgtctggtcgcctcggccttcggcgtgcacgccgtggacctgatcgccgaaggcaagttcgatcgcatggtcgcctggtcggaccgcggcgtcatcgatgtgccgatcaccgaggccatcgccaaatacgcctgcgtggagctggacggcgccatggtcaagaccgcccgcggcctgggcatcagcctgggcgactga

SEQ ID NO: 112878 - protein, 361 aa, Azospirillum brasilense
MTAGKRIGILTSGGDCAGLNAVIRAVVHRAVLTYGWQVLGIKEGTQGLLQRPVQYQVLDLPQVDGNMMRMGGTILGTTNRGDPFAYPMADGTQKDRSDEIIGGYRELGLDALIGIGGDGSFAILKKLADKGGFQMVGIPKTIDNDLGLTEVSVGYDTAVGVAVEALDRLQPTAASHARVMVLEVMGRDAGHIALAAGIAGGADVVLIPEIAYSIEKIAQKIKQVRSTGRNFALVVVSEAVKTVDGTGVQKLFQGGQKRYGGIGDYIGEKIAEATGAETRVTVLGHVQRGSMPSPRDRLVASAFGVHAVDLIAEGKFDRMVAWSDRGVIDVPITEAIAKYACVELDGAMVKTARGLGISLGD

SEQ ID NO: 112879 - DNA, 1500 bp, Spinacia oleracea
  CDS (1)..(1500)
  misc_feature (570)..(570): w is a or t
atggagcccaagattgttactggagaaggcggttatgctcttgatgatgttcctcacttctccgattatctcactaatctccctacgtatccgaatcccttacagaccaatccttcatattcagtgaccaagcaatattttgtagattttgatgacacggttgttcaaaaggctgttcaacataaagatggtccaaggggtatacatttccgacgacaaggtccccggcaaaaggtgtattttaagccagatgaagttacagcatgtattgttacatgtggaggtctatgtcccgggcttaacactgtgatcagagagttagtttgtggcttggattacatgtatggtgttaaaaatatcctgggaattgaatgtggctataaagggttctatgctcggaatacactccctttaacaccaaagactgttgacagcatccacaaacgaggtggaactatcctcggtacatctagaggtggatatgtcacttccaaaattgtggacagcattcaggacaggggaattaatcaggtgtacataattggaggagatggaactcaaaagggtgcwtcagtaatatatcaggaagtaagaaagcgaggtcttaaggttgcagttgtgggaattccaaaaacaattgacaatgacattccgatcatcgacaaatcttttgggtttgacactgctgtggaggaagcacaacgtgtaggaaatgctgcacacactgaagctgaaagtgttgaaaatgggattggtcttgtcaagttgatgggtcgtgacagcggattcattgcaatgtttgcaaccctggctagccgagatgttgactgttgcttgatcccggaatcacccttctatctcgaaggggaaggtgggctctatgagttcattgggagacgactcagagagaacggccacatggttatagtcatagctgaaggagcaggtgagaaggtagaagaaagagacccttctggaaataaggcttttaaagatgttggtctctggctgtctttcatgatcaaggaacactttgctaaaacaaaattgaacattactcttaagtacatagatcctacatatatgatccgagctgttcctgctaacgcatcagacaacgtttactgtacgattcttgctcaaagcgcgattcatggggctatggcgggttacacaggttgtactgtcgggccagtcaacggcagacaatgctacattcctttctatcgagtaatcgagaaaccaaacaaagttgtgataacagatagaatgtgggctaggcttttgtcttcaaccaaccagcctagttttatgcatcctcccaagggtgccattattgaaggaaagcaggacgaggtagtgctatcggaatctgctgctgaagaatcaaatgagaacgaaaagtgtacaccgacatcaacctcgttatcaatccatgataatcatgttgatgatcagtattcgatgagcaatggatcttctgaactgctgctaaagtaa

SEQ ID NO: 112880 - protein, 499 aa, Spinacia oleracea
MEPKIVTGEGGYALDDVPHFSDYLTNLPTYPNPLQTNPSYSVTKQYFVDFDDTVVQKAVQHKDGPRGIHFRRQGPRQKVYFKPDEVTACIVTCGGLCPGLNTVIRELVCGLDYMYGVKNILGIECGYKGFYARNTLPLTPKTVDSIHKRGGTILGTSRGGYVTSKIVDSIQDRGINQVYIIGGDGTQKGASVIYQEVRKRGLKVAVVGIPKTIDNDIPIIDKSFGFDTAVEEAQRVGNAAHTEAESVENGIGLVKLMGRDSGFIAMFATLASRDVDCCLIPESPFYLEGEGGLYEFIGRRLRENGHMVIVIAEGAGEKVEERDPSGNKAFKDVGLWLSFMIKEHFAKTKLNITLKYIDPTYMIRAVPANASDNVYCTILAQSAIHGAMAGYTGCTVGPVNGRQCYIPFYRVIEKPNKVVITDRMWARLLSSTNQPSFMHPPKGAIIEGKQDEVVLSESAAEESNENEKCTPTSTSLSIHDNHVDDQYSMSNGSSELLLK

SEQ ID NO: 112881 - DNA, 1212 bp, Magnetospirillum gryphiswaldense
  CDS (1)..(1212): transl_table=11
ttgcacggtaaggttctggtggcgcaagggggcggccccaccgccgtcatcaatcaatccatgaccggcgtggtgctggaagccaggaagttccgcaacgtcgatctggtttacggcgcctatcacggcgtgcgcggcatcatcaatgaggacttcctcgacctcacccaagagaccagccacaatctggaaatggtcgccgacaccccgtcctcggccctgggctcgacccgcgacaagccggatctgaagtactgtcaggaagtcttcaaggttctgcaggcccacggcatcgcctatttcttctatatcggcggcaatgattcgtcggacaccgtgcgcatcgtctcggaagaggccaggaaggccggctatccgctccggtgcatccacatccccaagaccatcgacaacgatctggtccataacgaccacacgccgggcttcccctccgccgcccgcttcgtcgcccaatcgttcatgggcgccaatctggacaacgcggccctgcccggcgtctatctggccgtggtcatgggccggcacgccggctttttgaccgccgcttcggcgctgggcaagaagtttcccgatgacggcccgcatctgatctatgtgccggaacgtaccttcaaggtcgatggcttcctaagcgacgtcaaggcgaccatggacaagtacggtcgctgcgtcgtcgccgtgtcggaaggcatccacgacgaatcgggcaacccgatcatcacccaattagccaaggaaatcgaaaaggacgcccacggcaatatccagctttccggtaccggcgccctggctgatctattgtgccaggaaatcaaggaccagttgggcatcaaacgggtgcgcggcgacaccttcggctatctgcaacgatccttcgtcggctgcgtctccgacgtcgaccagcgcgaggcgcgcgaggtgggggaaaaggcggtgcaattcgccatgtggggccagcaggacgggtccgtcaccattcagcgcaccggcttctattcggtggattacaagctgctgccgttggaagcggtggccggcaagaccagggtgatggaggacgagttcatctctgcttccggtaccgacgtcaccgacgcctttcgtctgtatctgcgcccgctattgggcaagggcatgcccgacgccttcagattgcgcagcaatcgggtgcccaaggtgctggggcggtag

SEQ ID NO: 112882 - protein, 403 aa, Magnetospirillum gryphiswaldense
MHGKVLVAQGGGPTAVINQSMTGVVLEARKFRNVDLVYGAYHGVRGIINEDFLDLTQETSHNLEMVADTPSSALGSTRDKPDLKYCQEVFKVLQAHGIAYFFYIGGNDSSDTVRIVSEEARKAGYPLRCIHIPKTIDNDLVHNDHTPGFPSAARFVAQSFMGANLDNAALPGVYLAVVMGRHAGFLTAASALGKKFPDDGPHLIYVPERTFKVDGFLSDVKATMDKYGRCVVAVSEGIHDESGNPIITQLAKEIEKDAHGNIQLSGTGALADLLCQEIKDQLGIKRVRGDTFGYLQRSFVGCVSDVDQREAREVGEKAVQFAMWGQQDGSVTIQRTGFYSVDYKLLPLEAVAGKTRVMEDEFISASGTDVTDAFRLYLRPLLGKGMPDAFRLRSNRVPKVLGR

SEQ ID NO: 112883 - DNA, 1014 bp, Thermoproteus tenax
  CDS (1)..(1014): transl_table=11
atgaagataggagttctgacggggggcggcgacgccccgggcctcaacatagcagtctacacgttcgtgaaactcgccgagaggaagcacgaggtgtacgcgatatatcacgggtggagggggctgttgaataaggaggtcaagagggtctcgtcgcgcgacttgttggacttcgccttctccggcgggacgtacataaggacgtccaggaccaacccgttcaaagacgaggagagggcgaggctgcttgagagcaacgtgaaggagcttgggctcgacgtcgtagtggccatagggggcgacgacacgttgggcgccgccggagaggcccagaggaggggcatactcgacgcagtgggtataccgaagacgatagacaacgacgtatacggcaccgactacaccataggcttcgactcggcggtgaacgccgcgatagaggcgactgagtccttcaagaccacgttgatttcccacgaaaggataggcgtcgtcgaagttatgggcagagaggccggctggatagcgctgttcacggggctgtcgacgatggccgacgccgtgttgatacctgagaggccggcgagctgggactcggtggccaagagagtcaaggaggcctacaacgagaggcgctgggcccttgtagtggtctccgaggggatcaaggagtacggagggcccaaggatgaatacggtcactcgaggctggggggcgtcggaaacgagctggcggagtatatagagaggagcaccgggatcgaggcgagggccgtggtgcttgggcacacaatcagaggcgtgccgccgacggcgttcgacagaattttggccgtaaggtacgccacggcggcctacgaggcggtggagaacggcaggtacggagtgatggtcgcctacagcaacggggatatagcctatgttcccatagtggacgtggtgggcaagaacaggctggtcagcgggtattggatgaggctgtacgagacctattggccggacctagcgggctag

SEQ ID NO: 112884 - protein, 337 aa, Thermoproteus tenax
MKIGVLTGGGDAPGLNIAVYTFVKLAERKHEVYAIYHGWRGLLNKEVKRVSSRDLLDFAFSGGTYIRTSRTNPFKDEERARLLESNVKELGLDVVVAIGGDDTLGAAGEAQRRGILDAVGIPKTIDNDVYGTDYTIGFDSAVNAAIEATESFKTTLISHERIGVVEVMGREAGWIALFTGLSTMADAVLIPERPASWDSVAKRVKEAYNERRWALVVVSEGIKEYGGPKDEYGHSRLGGVGNELAEYIERSTGIEARAVVLGHTIRGVPPTAFDRILAVRYATAAYEAVENGRYGVMVAYSNGDIAYVPIVDVVGKNRLVSGYWMRLYETYWPDLAG

SEQ ID NO: 112885 - DNA, 966 bp, Ureaplasma parvum
  CDS (1)..(966): transl_table=4
atgaaccaagtaaattttttaaatttagataaaaatattttaattattacttcaggtggtgatgcaccgggtatgaatgcttcattaatttcattaatccatagattaatgaataataattttaatgtttttataggaattgaaggattattaggactgtacaataatttaattgaaccaattaaagataaacgtgtttttgatgtttattttaacgagcaaggaacagtcattaagacaagtagatttattaaattagatattaatgataaaaaaacacaaattattaaagataatttattaagtcataatattcaaaaaattattatcttaggcggccaaggtagtatgcaagctggtttagtgttaacaaaaatgggctttgaagtctttggaatattacacactattgataatgattttagtgaaacacaaatgtgtataggggccttaagtgctgcttcttttaatcaaaaattattaaagtgcctaaattacacagcaaaagctcattgtgcttttaatttagttgagcttatgggtcgtgaatgttcatgattagtcaataatagtgttggtaaattaaaacctattttaatgttaactaatcaagataataaatatactgttgacgaagtaatagatttaattaaaaataaaataaactcaataaaagaatacgatcctttaatcattgttcaagaattaatctatgatcaaaaatgatacgaattattagtaaaaacttttgagcaaaaattacataaaagtttacgaattacaattttaaattatttacaacgcggagctccagtaagtgattttgatttacaattagcaaaagatagtgcgaatgtattggttgattttattgttaatcaaaatgatataaaaaacacaaataatatgtatgtagttatcaataagtttgataataagttagaagttattaaattcaataaatag

SEQ ID NO: 112886 - protein, 321 aa, Ureaplasma parvum
MNQVNFLNLDKNILIITSGGDAPGMNASLISLIHRLMNNNFNVFIGIEGLLGLYNNLIEPIKDKRVFDVYFNEQGTVIKTSRFIKLDINDKKTQIIKDNLLSHNIQKIIILGGQGSMQAGLVLTKMGFEVFGILHTIDNDFSETQMCIGALSAASFNQKLLKCLNYTAKAHCAFNLVELMGRECSWLVNNSVGKLKPILMLTNQDNKYTVDEVIDLIKNKINSIKEYDPLIIVQELIYDQKWYELLVKTFEQKLHKSLRITILNYLQRGAPVSDFDLQLAKDSANVLVDFIVNQNDIKNTNNMYVVINKFDNKLEVIKFNK

SEQ ID NO: 112887 - DNA, 1428 bp, Medicago truncatula
  CDS (1)..(1428)
atgggttcttctccaaattcaaagcctaaaattgttagaggctccgctggttatatcctcgaagatgttcctcatttaaccgattacattcccgaattaccaacatattctaatccattgcaagacaatcctgcttattcagttgtcaagcaatatttcgtgcatatcgatgacagtgttcctcaaaagattattgctaacaaagatagtccaagagggatacattttcggcgtgccggacctcgtcaaaaggtgtattttaaatcagatgaagttcaggctgccattgtgacatgtggaggtttatgtcctggtctcaacaccgttattagggagttagtatgtggtttataccatatgtatggcgtcaagaaagtattaggaatcagtggaggatacaagggtttctatgctcacaatacaatctctctaactcctaaaactgtaaatgatatacataagcgtggcggaactatccttggttcatcgcgaggtggacatgacaccactaagatagttgacagtattcaagataggggaatcaatcaggtttatataataggaggagatggaactcagaggggcgcttatagaatttttgaggaaattagaaaccgtggtctcaaggttgcagttgtaggaatcccaaaaacgatagataacgacattccggttattgacaagtccttcggctttgacacagctgttgaggaggctcagagagctataaatgcagcacatgttgaagctgaaagtgttgaaaacggaataggtgttgtcaagttgatgggccggtacagtggatttattgcaatgtatgccacccttgcgaatcgggatgtggactgttgcttgattccggagacaccctttttccttgaaggtccaggcggtcttttcgaatatacggagagaaggctaaaagaaaatggccacatggttattgtgattgctgaaggagcaggacaggaacttgttactgagagcatccaatccatgcacaagcagcaggatgcttctggaaacaaacttcttcaagatgttgggctatggatatcccataagttgaaggattattttgctaaacagaagacaatgggtataactctcaaatatatagatcctacctatatgattagagctgttccaagcaatgcttctgacaacgtgtactgtacgcttcttgctcaaagtgccgttcatggagcaatggcaggctacactggttttaccagtgggcttgtgcatggaagacaagcttatatacccttcaatagaatcaatgaaggacagaacacagtagtgataaccgatcgaatgtgggctaggcttttatcttcaacaaatcagcccagttttttgattgcaaagaccgcagttgaagagaagaagaaggaagaagaagaagaagattcatttaatttgtag

SEQ ID NO: 112888 - protein, 475 aa, Medicago truncatula
MGSSPNSKPKIVRGSAGYILEDVPHLTDYIPELPTYSNPLQDNPAYSVVKQYFVHIDDSVPQKIIANKDSPRGIHFRRAGPRQKVYFKSDEVQAAIVTCGGLCPGLNTVIRELVCGLYHMYGVKKVLGISGGYKGFYAHNTISLTPKTVNDIHKRGGTILGSSRGGHDTTKIVDSIQDRGINQVYIIGGDGTQRGAYRIFEEIRNRGLKVAVVGIPKTIDNDIPVIDKSFGFDTAVEEAQRAINAAHVEAESVENGIGVVKLMGRYSGFIAMYATLANRDVDCCLIPETPFFLEGPGGLFEYTERRLKENGHMVIVIAEGAGQELVTESIQSMHKQQDASGNKLLQDVGLWISHKLKDYFAKQKTMGITLKYIDPTYMIRAVPSNASDNVYCTLLAQSAVHGAMAGYTGFTSGLVHGRQAYIPFNRINEGQNTVVITDRMWARLLSSTNQPSFLIAKTAVEEKKKEEEEEDSFNL

SEQ ID NO: 112889 - DNA, 1242 bp, uncultured archaeon GZfos28B8
  CDS (1)..(1242): transl_table=11
atgaacgaaagaaagaagataggcataatcacaagtggcggtgattgcggcggattaaatgcagttatcaaaggagtgagttcaatggcgaattattacggcctggaaaatgttgttatacccaatggctatgccgggctctacaatctaattgattttgaaacagatgatctaatcagtctagattatattcgcatgggtttgtttcattcaaatatagcgggatctgaagcagggcattcacgagtgaaaatctcaaaattagatgatgaaactaaatatgatcggattaagcaaggacttgataaacattctattgacgcattagtagtaagtggcggagacgacaccggctctgttgctctggatttactaaataatggcattgcaataaaccatgttcccaaaacaatggattttgatcttcagtcatatagcgttggcggcgactccgcaattaacgccatatcaaaaatggctgcaaatctcagaaccactgcaagaagccataacaggataatgattttagaagtcttcggcagatatgcagggcatgccgcttttagaggcggtattgcagccgatgcagactgtataattataccggaagttgcccctgatttcgatgttatttatgaggatatgtttgctaaatatacagagcgaataaaaaagtcagacgtaaaagccggcagttatttgattgtcgtttctgaagcactaaaaggtaataagccagaagatgacgttgacgagcgcggatttttaatagataagacaagaggttccgatgcatttgggcactatcctcttgcgggttccggaaagacaatagaagcggaactaaagaaacgaatgaaaaatgatgtgaagatgaaacaattcatggagcaggtgcacatgtatgttcagggccaatatgagatacccgaaatccgggtgatccgaccaacacatctggtacggtgcggcgattcgtccgcttatgatgctaatttcggtaaagaatgcggtgcaggagcagttatattattgatgcaaaatattaccggtgctacagttacaggtgtaagaaatggtgttgtagaatatatggacatctcggaagcgataaaacaaaatacagtaaatcttgatcaggttgcattgcacgaggcacttgggatttgtttcggccggaagacccaaaaaacgggtttcgaaaagaaaatgaaactcgatacggtaaaccggtatttgtag

SEQ ID NO: 112890 - protein, 413 aa, uncultured archaeon GZfos28B8
MNERKKIGIITSGGDCGGLNAVIKGVSSMANYYGLENVVIPNGYAGLYNLIDFETDDLISLDYIRMGLFHSNIAGSEAGHSRVKISKLDDETKYDRIKQGLDKHSIDALVVSGGDDTGSVALDLLNNGIAINHVPKTMDFDLQSYSVGGDSAINAISKMAANLRTTARSHNRIMILEVFGRYAGHAAFRGGIAADADCIIIPEVAPDFDVIYEDMFAKYTERIKKSDVKAGSYLIVVSEALKGNKPEDDVDERGFLIDKTRGSDAFGHYPLAGSGKTIEAELKKRMKNDVKMKQFMEQVHMYVQGQYEIPEIRVIRPTHLVRCGDSSAYDANFGKECGAGAVILLMQNITGATVTGVRNGVVEYMDISEAIKQNTVNLDQVALHEALGICFGRKTQKTGFEKKMKLDTVNRYL

SEQ ID NO: 112891 - DNA, 2970 bp, Pichia pastoris
  CDS (1)..(2970)
atgcccgaaccgtcgataagtgacctatccttcacttcgtttgtcactaacgatgacaacctgtttgaagagaccttcaatttttacacgaagttgggcttccacgcaacacgctcatatgtcaaagacaaccgatcagactttgaattgacggggatttccacggattcaatcaaggagatctggctggaaagcttcccactatccgaggtcgttgaggcttcaggtggcagagagttgagaaaacccttgcaagaatctgtgggctacgaatctgaagctctcctgggatattctccctaccagagtggcggtgttgttataaaattacggttatcgaatcatgaccttgagaagaacaatgacttacccggtgaagttacgtttttcactgctagtattgacaaattaaaggctaaacttattgagattggtgctgagattattccctcaaaaatagatcttgttgaattttcaaccagggatcccatgggcgatgtcatcagcttttcttcttatccttctctaaattcaaaaaagatcacctctccagactttttcctccatcctaagaaggaagtacgctccgaagagtcgatagttgagcaggtcaaatccgaggaaggtaagaaaaagattgccatcataacttcaggtggtgacgccccaggaatgaatgctgcagtaagagctgtgacaagagctggtattttctatggctgtaaagtttatgcttgttatgaaggttacactggactggttaagggtggtgacatgttaaaggaactgcagtggcaagatgtccgtggtttactttccattggtggtactataattggtactgcaagatgtaaggaattcagagaacgatggggccgtcttcaagcttgctacaatatggtcagcaatggtattgatgcgttagttgtttgtggaggtgacggatctcttaccggtgccgatctgtttcgaaaagaatggcctgaactgataaaggaacttttgggcgaggacaaaattacaaaagaacaatatgaaacacacagaaacttgacgatagtaggtctcgttggttctatcgataacgatatgtgcggaactgattccacaattggtgcttattcctcattggagagaattatagaattggtagactacatcgatgctactgccgcttcccattcaagagcctttgtagtggaagtcatgggtagacattgtgggtggttaggtttaatgtccggaatcgccactggagctgactacatttttatccctgagagacctccaagtgaatcaaactggaaggatgacttgaagaaagtctgtttgagacatagagagaaaggacgcagaaagactactgtcatcgtcgctgagggtgctatcgacgaccaactgaaccccatcacatctgaagaggtgaaagatgtgctagtggagatcggtttggacactcgtatcacccgtctaggacacgtccaaagaggtggagcaccatgtgcttttgatagattcctggccactgtgcagggtgttgatgctgttagggctgttttagagagcaccccagcaattccttctcctgttatcagcattttagaaaacaaaattgttcgccaaccgttggtggaatctgttgcgcaaactaagacagtcagtgctgcgatagaagccaaggatttcgataaggctttgcaattgagagatcaagaatttgccacatcgtatgaaaacttcctgtctgtttccaagtacgacgatggatcatacctggtaccggagagctcaagattaaatattgccattatccatgtgggagctccaacatctgctttgaatccagccacaagagttgccaccttgaactcgttggcaaaaggacacagagtctttgctattcgaaacggatttgcaggattaattcgtcatggagctgtacgagagcttaactggattgatgttgaggattggcacaacacgggtggatcagagattggtaccaaccgaagtcttcctagtgatgatatggggactgtggcgtactacttccaacaatacaagtttgatggtcttattattatcggtggatttgaggctttcacggccctatacgagctggatgcagctcgtgctcagtatcctattttcaatattccaatgtgttgtcttccagcaaccgtttctaataacgttcctggtactgagtactcccttggatctgacacatgtttaaacacattgtcgggatactgtgatgctgtgaagcaatctgcttctgctagtagaagaagaacatttgtggtggaagttcaaggtggatactcaggatatcttgccagttacgctggtttgattacaggggctttggctgtttatactcctgaaaacccaatcaaccttcagacagtgcaggaagacattgaattgttgactcggacatacgaggaagacgatggtaagaacagatcgggtaaaatcttcattcataatgaaaaggcttcgaaggtttacactacggatctgattgctgccatcataggtgaagctggaaaaggtaggtttgagagccgtactgctgtgcctggtcatgtgcaacagggtaaatccccatcatccattgatcgggttaatgcctgcagattggcgatcaaatgttgtaatttcattgaggacgccaatttccaggtgaaacacaacgccaatttgagtgccgacgaacgtcatttgagattcttttacgatgacggcgtcaagacatctgcagtgagcggaaaatcttctgtgatagatgataacacgtcagtagtcattggaatccaaggatccgaggttacatttacccctgtcaaacaactatgggagaacgaaactcatcacaagtggcgaaagggtaagaacgttcactgggagcagttgaacattgtctctgatctcttgagtggtcgtttgtctatccgtaccacatag

SEQ ID NO: 112892 - protein, 989 aa, Pichia pastoris
MPEPSISDLSFTSFVTNDDNLFEETFNFYTKLGFHATRSYVKDNRSDFELTGISTDSIKEIWLESFPLSEVVEASGGRELRKPLQESVGYESEALLGYSPYQSGGVVIKLRLSNHDLEKNNDLPGEVTFFTASIDKLKAKLIEIGAEIIPSKIDLVEFSTRDPMGDVISFSSYPSLNSKKITSPDFFLHPKKEVRSEESIVEQVKSEEGKKKIAIITSGGDAPGMNAAVRAVTRAGIFYGCKVYACYEGYTGLVKGGDMLKELQWQDVRGLLSIGGTIIGTARCKEFRERWGRLQACYNMVSNGIDALVVCGGDGSLTGADLFRKEWPELIKELLGEDKITKEQYETHRNLTIVGLVGSIDNDMCGTDSTIGAYSSLERIIELVDYIDATAASHSRAFVVEVMGRHCGWLGLMSGIATGADYIFIPERPPSESNWKDDLKKVCLRHREKGRRKTTVIVAEGAIDDQLNPITSEEVKDVLVEIGLDTRITRLGHVQRGGAPCAFDRFLATVQGVDAVRAVLESTPAIPSPVISILENKIVRQPLVESVAQTKTVSAAIEAKDFDKALQLRDQEFATSYENFLSVSKYDDGSYLVPESSRLNIAIIHVGAPTSALNPATRVATLNSLAKGHRVFAIRNGFAGLIRHGAVRELNWIDVEDWHNTGGSEIGTNRSLPSDDMGTVAYYFQQYKFDGLIIIGGFEAFTALYELDAARAQYPIFNIPMCCLPATVSNNVPGTEYSLGSDTCLNTLSGYCDAVKQSASASRRRTFVVEVQGGYSGYLASYAGLITGALAVYTPENPINLQTVQEDIELLTRTYEEDDGKNRSGKIFIHNEKASKVYTTDLIAAIIGEAGKGRFESRTAVPGHVQQGKSPSSIDRVNACRLAIKCCNFIEDANFQVKHNANLSADERHLRFFYDDGVKTSAVSGKSSVIDDNTSVVIGIQGSEVTFTPVKQLWENETHHKWRKGKNVHWEQLNIVSDLLSGRLSIRTT

SEQ ID NO: 112893 - DNA, 2826 bp, Pichia pastoris
  CDS (1)..(2826)
atgccagatgcttcactctttaacggaacttcgtttataacgttatttgcgcccaacatctctttattacaagcctccattgacttctatacaaatttcttagggtttgctattaggaaaaactctaaccaaaagttattttggctgcagcttgaagaagatcaaaataatgtgtcaatccaattgattctggatccagaacatgctgcttctgtgtctcagattgaccagaatattcgcaacttgaccagatcgttataccgaaaagactggagatcaattcagtctaatattgcgttcaagagctcttcactaagtaaactcgtcaaattgttgaaggatggaggccatccggtgcagcaaagtcccaatgagatttcaccttttgaggtttacacggtagaccccttaggctcattgataggtttcagcggattcaagaatccctttgcagtcaatgagcgttctttgcttccgaaggtttccgaagagaaagcttaccgtgctgaagatgattcagaaaagctcctcaatcctgtccgtaagactatcggagttatgacatccggaggtgactccccagggatgaaccctttcgttagagctgtggttcgggcaggaatctacaagggttgcaaagtattttgtattcacgagggatatgaaggacttgtacgtggaggtgaaaaatacatcaaggagactcaatggcacgacgttcgtggatggcttgttgagggtggtaccaatataggaaccgctcggtgcaaagaattcagagaacgctctggtcgtctcaaagcttgcaaaaatatgatcgatatgggtattgatgcgttaatcgtttgtgggggtgatggttccctgacaggtgcggaccgatttcgctcagaatggccaagtttgattgaggaattattgcaaactgaacaaatctcccagcaacagtttaacactcaccaaaatctgaatatttgtggagctgttggttctatagacaatgatatgtcgtcaacggatgccacgattggagccttctcttccttggatagaatttgccgggctattgattacattgacgctaccgccaattctcattctcgagcgttcattgttgaagtcatgggccgtcattgtggttggttaggtctcttggctggtcttgctacaagtgcagactacattttaatccctgagaaacctgcttcttcaagagaatggcaggatcagatgtgtgatatagttggcaaacatagggcaagaggaaaacgaaagaccattgttattgttgctgaaggtgccattagcaatgatctaagtcctatttcctgcgatcaagtcaaggacgttctggtcaatagattagggcttgataccagagtcaccactcttggccatgtacaacggggcggtactgcggttgcttttgacagaatatacgctacgttgcaaggcgtagaagctgttaatgctgttttggaatgtgatgcagacacgccgtcacccatgattgctattaaggaggatcagattaccagagttcctcttgttgatgctgtagagcttacacagcaagttgcaaagtctatcgaatctcgtaactttaagaaagcgatttcattgcgagattcggagtttgtggaacacatgaaaaactttatttcaactaactccgcggatcatgttccaccttcgttacctctagaaaagcgtaagaaaattgcaattatcaacgttggagctccagcgggaggaatgaacagtgcagtttatagtatggcaacctattgcatgtccagagggcatgttccatatgctattcacaacgggttcagtgggttggctcgtcatgaatctgttagatctataaactggttggacattgaaggctggggttccctaggtggctcagagataggaactaacagaacgcttccaaatgatgctgatatcgggatgattgcatacttctttgaaaagtatggttttgatggcctgattcttgttggtggatttgaagcttttatttcacttcatcaattggaaagggcccgaatcaattatccgtctttaagaatacctttggttcttattcccgccaccatttccaacaatgtgcctggaaccgaatactccttgggttcagacacgtgtcttaactccttcatggaatactgtgatgtaatcaagcaatccgcagctgcaactcgaaacagagtgtttgttgttgaggtccagggtggaaattcaggatacattgcaacccatgcccaactcgcttgtggtgcccagatttcttacgtacctgaagaaggtatttcactggctcagcttgaaatggatattaattcgttgaaagagtcttttgccaatgaccagggaaaaacaaaatcaggcagattgattttgaagtcggagaatgcatcaaaggtactcactacagaagtaatttccactatcatagatgatgaagctagtggcagatttgactccaaaacagctattccggggcatgtccagcagggtggtattccttctccgatggatcgtgtgcgggcctctaggtttgcaattcgtgctgtctcttttattgaaaggcactcggacagatgccaaactttcaaaaattcgattagtttccgacaaactgatgagatcacctccacggctgttgttcttggaattcacaagtcccaactgagattcacaccaattcgacaattatacgattttgagtctgatgtaccccgacgtatgagaaagaatattttctggagtaacgtacgggaaattagcgatatgttaagtggaagaacctctttgtag

SEQ ID NO: 112894 - protein, 941 aa, Pichia pastoris
MPDASLFNGTSFITLFAPNISLLQASIDFYTNFLGFAIRKNSNQKLFWLQLEEDQNNVSIQLILDPEHAASVSQIDQNIRNLTRSLYRKDWRSIQSNIAFKSSSLSKLVKLLKDGGHPVQQSPNEISPFEVYTVDPLGSLIGFSGFKNPFAVNERSLLPKVSEEKAYRAEDDSEKLLNPVRKTIGVMTSGGDSPGMNPFVRAVVRAGIYKGCKVFCIHEGYEGLVRGGEKYIKETQWHDVRGWLVEGGTNIGTARCKEFRERSGRLKACKNMIDMGIDALIVCGGDGSLTGADRFRSEWPSLIEELLQTEQISQQQFNTHQNLNICGAVGSIDNDMSSTDATIGAFSSLDRICRAIDYIDATANSHSRAFIVEVMGRHCGWLGLLAGLATSADYILIPEKPASSREWQDQMCDIVGKHRARGKRKTIVIVAEGAISNDLSPISCDQVKDVLVNRLGLDTRVTTLGHVQRGGTAVAFDRIYATLQGVEAVNAVLECDADTPSPMIAIKEDQITRVPLVDAVELTQQVAKSIESRNFKKAISLRDSEFVEHMKNFISTNSADHVPPSLPLEKRKKIAIINVGAPAGGMNSAVYSMATYCMSRGHVPYAIHNGFSGLARHESVRSINWLDIEGWGSLGGSEIGTNRTLPNDADIGMIAYFFEKYGFDGLILVGGFEAFISLHQLERARINYPSLRIPLVLIPATISNNVPGTEYSLGSDTCLNSFMEYCDVIKQSAAATRNRVFVVEVQGGNSGYIATHAQLACGAQISYVPEEGISLAQLEMDINSLKESFANDQGKTKSGRLILKSENASKVLTTEVISTIIDDEASGRFDSKTAIPGHVQQGGIPSPMDRVRASRFAIRAVSFIERHSDRCQTFKNSISFRQTDEITSTAVVLGIHKSQLRFTPIRQLYDFESDVPRRMRKNIFWSNVREISDMLSGRTSL

SEQ ID NO: 112895 - DNA, 2358 bp, Aspergillus oryzae
  CDS (1)..(2358)
atggctacgacgcacgcccccgcggagcctcccaagcgccgccgtatcggtgtcttgacctctggtggtgatgctcccggtatgaacggcgccgtccgggctgtcgttcggatggctatttactccggatgtgaagcctatgccgtatacgaaggctacgagggtctggtccatggcggagatatgatccgtcaggtacactgggaagatgtccgtggctggctctccaggggtggtaccttaatcggttcagctcgtagcatggctttccgggaacgtgccggtcgtctgaaggccgctaagaacatgattgtccggggtattgatgccctggtggtttgcggtggtgatggaagtttgactggtgccgacctcttccgttctgaatggcctggcttgctggaagagctggtcaagacgggcgaattgactgaggaacagattgtcccttacaaggtgttgaacattgttggtctggtgggctcgattgataacgacatgtccggcacagacgctaccatcggctgttattcctcccttacccgcatctgtgatgcggtcgacgacgttttcgataccgcttattcgcaccagagaggcttcgttattgaagtcatgggacgccattgtggctggctggccttgatgtcggctatcagcactggcgccgactggcttttcatccccgagatgccaccccgcgagggctgggaagatgacatgtgcgatatcatcaccaagaaccgtcaggaacgaggcaagcggagaacgattgtcattgtggccgagggcgctcatgaccgccaactcaacaagatcacgagcagcaagattaaggatattttgaccaaccgacttgatctggacactagggtgaccgtcctaggccacactcaacgaggaggagcagcatgtgcctatgaccgtaccctctcgaccctacagggcgtggaagccgtccgtgccgttttggatatgacacccgaatctccgtcccctgtcatcaccgtccgcgagaacaagttgctgcgcacgccgttgatggatgcagtgaaggccaccaaggaagtcgccgacctcattcatgagcgcaagttcgatgaggctatgcatctgcgcgactctgaattcaaggagtaccatttcgcctacaagaacactgctacccccgaccaccccaagttgatcctcccagaaaacaagcggatgcgcattgccattatacacgtcggtgcacctgccggaggtatgaaccaagccacccgtgctgccgtcgcctactgccagactcgtggacacacggcccttgccgttcacaacggtttccccggcctctgccggcatcatgcagacacccccgttagctctgtgcgcgaggtcagttgggaggagcaggacacctgggtcaacgaaggtggttcagacatcggaaccaaccgaagcctgccgtccgaggacttcgagaccactgccaagtgttttgagaagtttaagttcgatggtttgttcgtggttggtggtttcgaggctttcactgctgttagccaattgcgccaggcccgcgagaaatatccagccttcaagatccccatggtggtcttgccggccaccatttcaaacaacgtcccgggtaccgaatactccctcggcagcgacacctgcttgaacactttgatcgacttctgtgacgctatccgtcaatccgcgtcgtcctcccgccgccgtgtcttcgtcgtcgaaacccagggtggtaagtccggttacgtcgctacgaccgctggtctcgcggtaggtgcctcggccgtctacatcccggaggaaggcatcgatatcaagatgctggcacgcgatatcgatttcctgcgcaacaacttcgctcacgacaagggtgccaaccgtgccggaaagatcatcctgcgcaacgagaccgcttccagcacctacaccacacaagtcattgccgacatgatcaaggaagaagccaagggccgctttgagtcgcgtgcggcggtccctggtcacttccaacagggtggcaagccctctccgatggaccgaatccgtgccctgcgcatggccatccgatgcatgcagcacatcgaaaccttctccggcaagtccgccgacgagattgccgccgacgagctttctgcgaccgtcatcggtgtcaagggatcccaggtactcttctcccagatgggcggtcccaacggcctggaagcgaccgagaccgactgggcccgtcgtcgcccgaaggacgaattctggctcgacttgcagagcaccgtcaacattttgtccggtcgcgccagcttcggcgagggcaagacgggctggtcttgctacgaaaactgttaa

SEQ ID NO: 112896 - protein, 785 aa, Aspergillus oryzae
MATTHAPAEPPKRRRIGVLTSGGDAPGMNGAVRAVVRMAIYSGCEAYAVYEGYEGLVHGGDMIRQVHWEDVRGWLSRGGTLIGSARSMAFRERAGRLKAAKNMIVRGIDALVVCGGDGSLTGADLFRSEWPGLLEELVKTGELTEEQIVPYKVLNIVGLVGSIDNDMSGTDATIGCYSSLTRICDAVDDVFDTAYSHQRGFVIEVMGRHCGWLALMSAISTGADWLFIPEMPPREGWEDDMCDIITKNRQERGKRRTIVIVAEGAHDRQLNKITSSKIKDILTNRLDLDTRVTVLGHTQRGGAACAYDRTLSTLQGVEAVRAVLDMTPESPSPVITVRENKLLRTPLMDAVKATKEVADLIHERKFDEAMHLRDSEFKEYHFAYKNTATPDHPKLILPENKRMRIAIIHVGAPAGGMNQATRAAVAYCQTRGHTALAVHNGFPGLCRHHADTPVSSVREVSWEEQDTWVNEGGSDIGTNRSLPSEDFETTAKCFEKFKFDGLFVVGGFEAFTAVSQLRQAREKYPAFKIPMVVLPATISNNVPGTEYSLGSDTCLNTLIDFCDAIRQSASSSRRRVFVVETQGGKSGYVATTAGLAVGASAVYIPEEGIDIKMLARDIDFLRNNFAHDKGANRAGKIILRNETASSTYTTQVIADMIKEEAKGRFESRAAVPGHFQQGGKPSPMDRIRALRMAIRCMQHIETFSGKSADEIAADELSATVIGVKGSQVLFSQMGGPNGLEATETDWARRRPKDEFWLDLQSTVNILSGRASFGEGKTGWSCYENC

SEQ ID NO: 112897 - DNA, 984 bp, Bacteroides thetaiotaomicron
  CDS (1)..(984): transl_table=11
atggataacaagtatattggaattctgacttccggaggggatgcttcaggaatgaacgcggctatccgtgccgtgacccgcgccgccatttttaacggatttaaagtgaaaggaatttatagaggttacgaggggctgattgccggtgaagtgaaagaactcacgacggaagatgtaagtagcattatccagaggggaggcaccatactgaaaacagctcgctccgagactttcaccactcccgaaggacgcaagaaagcttataaggtcatacagaaagagaacatcaatgctttgataattatcggtggagacggttccctgacgggagcccgtatctttgcggaggagtatgatgtgacgtgcataggattgcccggcaccattgacaatgacctatatggtaccgattttaccataggatatgatacggcattgaacaccattgtggaatgcgtggataaaatcagggacacggcaacctcccatgaccgtatcttctttgtcgaagtgatggggcgtgatgcgggcttcctggcacaaaacagcgcaatagcttccggtgctgaagcggccatcatcccggaggacaggacggacgtggaccagttggaaacattcatcgggcgcggattcagaaagacgaaaaacagcagcatcgtaattgtgaccgaaagtcctgaaaacaagaatggaggtgccatatattacgccgaccgggtaaagaaggaatatcccgggtatgatgtcagggtttctatcctgggccatctgcaacggggtggtgctccgagtgccaatgaccgtatactggcaagccggctgggtgaagccgcaatccaggccttaatggaaggccagcgaaatgttatgataggcatacggaacaacgagattgtttatgttccttttgtccaggcaatcaaaaaggacaagcctattgacaaaagcctgatccgggtccttaacgaattatcgatctaa

SEQ ID NO: 112898 - protein, 327 aa, Bacteroides thetaiotaomicron
MDNKYIGILTSGGDASGMNAAIRAVTRAAIFNGFKVKGIYRGYEGLIAGEVKELTTEDVSSIIQRGGTILKTARSETFTTPEGRKKAYKVIQKENINALIIIGGDGSLTGARIFAEEYDVTCIGLPGTIDNDLYGTDFTIGYDTALNTIVECVDKIRDTATSHDRIFFVEVMGRDAGFLAQNSAIASGAEAAIIPEDRTDVDQLETFIGRGFRKTKNSSIVIVTESPENKNGGAIYYADRVKKEYPGYDVRVSILGHLQRGGAPSANDRILASRLGEAAIQALMEGQRNVMIGIRNNEIVYVPFVQAIKKDKPIDKSLIRVLNELSI

SEQ ID NO: 112899 - DNA, 2964 bp, Candida albicans
  CDS (1)..(2964): transl_table=12
atgcctagctcctccgacgcaatcaataggataagttacatatcccttgtcaccagtgacaatgacaaattcaaccaaacattccaattctacagtcaattgggatttagattgacaaaaagtttctccaaagtttcaagctacggatctggattaggtgccaaccatccagaattccaattgggtgtttctcatgattcacttaaagaagtttggttagaatcttacccattacaaaatgtcgacagtaatggaaaccttcgtccttggcaagaaatggaagtttatgacggtgataattgtgaaagattaaatgaatcaactgtgattaaagttagattacttggcgaaacccctttgaagtcaatttctcaaaaacaatttgtgtttttcaccactcaattgaataaaattgaaaaaatcttgactgatgcaaatgtcaaatatggtaaagttgttgataatgtcattttagctgaggatccattaaacaacattatcagtttttccaatactcaaaatgaattgtgtaaaactagattccaatcaccagaagagtatgttgaaaaaaccactgcagaaatattggctaaaagaaagaaatctcaattgggttctaaatttggttcatttgaagaaatttcaccaagtgaagttggcggtggtaatggtttacgtaaaaagaaaattggggtgatgacatctggtggtgatgctcctggtatgaacccagcagttcgtgctgttgttagagccggtatttattatggttgtgatgtttatgccgtttacgaaggttatgaagggttggttaaaggaggtgatcttttaaagaagatggagtggagtgatgttcgttcttatatgtctcttggtggtacttcaattggtactgctagatgtaaagaatttagagaaagagccggaagattacaaggggcatacaatatgatcaagaatggtattgacgcattagttgtatgtggtggtgacggttcattaactggtgctgatttatttagaagcgaatggccatcacttgtgaaggaattagtagacactggaaaattaactaaagaagaagtttcaccttatgaacatcttaccattgttggattggttggttccattgataatgatatgtctggtaccgatgttaccattggtgcattctctgccttagaaagaatcacagaaatggttgattatattggtgccactgctgcttctcattctcgtgcttttgttgttgaagtcatgggtagacattgtggttggctagcattattgtctggtttggccactggagctgattttgttttcattcctgaaagaccacctaaagccggattatggaaagaacaattgaaagaagtatgtttgagacacagagaatatggtagaagaaaaaccaccgttattgttgctgagggggccattgatgatgaattgaacccaattacttcagaagaagtcaaacaagttttagctgatttaggattggacaccagaaacaccattttgggacatgttcaaagaggtggtactgctgttgcttttgacagaagattggctactttacaaggggttgaagctgttaaagcagttttggaaatgactccagacacaccatcaccaatgattggtatattgaaacacaagattgttagaattccattagttgatgctgttaaacaaactaaagctgtagctgaagccattagcaacaaagattttgataaagctatgagtttaagagacaatagtttctacgatgattatagatatttccgtgatatttctatttatgatgatggtagtaaacaattgagtgaagataagagattaaatattgcaatcgttcacgttggtgccgcatctgctggtttaaatgctgccactcgtgcagtggcattgtacagtctttctcgtggccacaaattgtatgctgtacaagatggatttgctggtttagtcaaaggtgatttgaagaacttgacatggatggatgttgaaggatggcatagtcttggtggttcagaaatcggtaccaatagatccttaccatcacaaaacattggtaaagttgcctacaatttacaaaaattcaatatccaagggttattgattgttggtggatttgaagcttttacttcattgcatgaattatctgaacagaaagccaattatccaatatttgaaattccaatggtggttgttccagcaacagtttccaataatgttcctggtactgagtattctcttggtgctgacacctgtttgaatcaattagtttcatactgtgatgcagttcaacaatcagcatcttcaaccagaagaagagtgtttgtagttgaggtgcaaggtggtcacagtgggtatgttgcctcctactgtggattgataactggtgctttagccacttatacacctgaatcaaacataaacttgagagaattacaaggagatatcgatttattacaaaaagtgtttgccactgaccgtggtgaagatcataatggtactcttatcgttagaaatgaacaagccagtgctgtttattcgactcaattgattgctgatattcttaaagaaaatgccaataaacgatttgaaaccagaacagcaattccaggtcatgttcaacaaggtttcacaccaagtgccaatgatcgtgttatggcagttaaattctcattaaaagccatggaatttattgaaacaagaaatgggtgttatggtaaacacgaccgtaaattctctgatgaagaaatcagtgaacattctcaagttgtcattggtatccatggagatgttgttaaattcacatgtatcaaacatttgtatgataatgaagctaatgttgccttaagaaaaggtaagacagttcattggaccgatatgattgatgtggctaacattttgaacggtaaactgttgttgaaaaaacaagaaagatattag

SEQ ID NO: 112900 - protein, 987 aa, Candida albicans
MPSSSDAINRISYISLVTSDNDKFNQTFQFYSQLGFRLTKSFSKVSSYGSGLGANHPEFQLGVSHDSLKEVWLESYPLQNVDSNGNLRPWQEMEVYDGDNCERLNESTVIKVRLLGETPLKSISQKQFVFFTTQLNKIEKILTDANVKYGKVVDNVILAEDPLNNIISFSNTQNELCKTRFQSPEEYVEKTTAEILAKRKKSQLGSKFGSFEEISPSEVGGGNGLRKKKIGVMTSGGDAPGMNPAVRAVVRAGIYYGCDVYAVYEGYEGLVKGGDLLKKMEWSDVRSYMSLGGTSIGTARCKEFRERAGRLQGAYNMIKNGIDALVVCGGDGSLTGADLFRSEWPSLVKELVDTGKLTKEEVSPYEHLTIVGLVGSIDNDMSGTDVTIGAFSALERITEMVDYIGATAASHSRAFVVEVMGRHCGWLALLSGLATGADFVFIPERPPKAGLWKEQLKEVCLRHREYGRRKTTVIVAEGAIDDELNPITSEEVKQVLADLGLDTRNTILGHVQRGGTAVAFDRRLATLQGVEAVKAVLEMTPDTPSPMIGILKHKIVRIPLVDAVKQTKAVAEAISNKDFDKAMSLRDNSFYDDYRYFRDISIYDDGSKQLSEDKRLNIAIVHVGAASAGLNAATRAVALYSLSRGHKLYAVQDGFAGLVKGDLKNLTWMDVEGWHSLGGSEIGTNRSLPSQNIGKVAYNLQKFNIQGLLIVGGFEAFTSLHELSEQKANYPIFEIPMVVVPATVSNNVPGTEYSLGADTCLNQLVSYCDAVQQSASSTRRRVFVVEVQGGHSGYVASYCGLITGALATYTPESNINLRELQGDIDLLQKVFATDRGEDHNGTLIVRNEQASAVYSTQLIADILKENANKRFETRTAIPGHVQQGFTPSANDRVMAVKFSLKAMEFIETRNGCYGKHDRKFSDEEISEHSQVVIGIHGDVVKFTCIKHLYDNEANVALRKGKTVHWTDMIDVANILNGKSLLKKQERY

SEQ ID NO: 112901 - DNA, 960 bp, Clostridium perfringens
  CDS (1)..(960): transl_table=11
atgaaaaagattgctgttttaacaagtggtggagatgcaccaggaatgaacgctgccttaagagcggttacaagaatggctttacaccatggacttgaagtaatgggagttcaaagaggatacgctggattaataaatggagaactattcaaaatggatagaaaatctgtttcagaaatcataaacagaggtggtacaatcttaagaactgctagatgtttagaattcaaacaagaagaagtaagagaaaaagctgcacaaatattaaaagcttacggtgttgaagctttagtagttataggtggagatggatcattcatgggagctaaacttctttcaaaattaggagttaagactgttggattaccaggaacaatcgataacgacttatcttacacagattacactataggatttgatactgcattaaacacagtagtagatgctataaacaaattaagagatacatcaacttcacacgaaagagtatctatcgtagaagttatgggaagaaactgtggagaccttgctttatatgctggtatcgcaggtggagcagaagctataatagttccagaaatgccatttgataaagatgaattaattaaaactatcttagaaggtagaacaaatggaaaaactcacagcataatagttgttgctgaaggagttggaggatcagctgaattagctaaagaaatagaatctgtaactggtatagaaactagagctacaattttaggtcacatccaaagaggtggatcaccaactgctgatgatatagtattagcatcaagaatgggagctaaagctgtagaagttttattagaaggaaaaacttcaaaggttataggaattaaagaaaatagaatattcgatatggatatagatgaagctttagatatagaaagaagctttgacgaaagtctttacgaaatggctaacgctataaacaaataa

SEQ ID NO: 112902 - protein, 319 aa, Clostridium perfringens
MKKIAVLTSGGDAPGMNAALRAVTRMALHHGLEVMGVQRGYAGLINGELFKMDRKSVSEIINRGGTILRTARCLEFKQEEVREKAAQILKAYGVEALVVIGGDGSFMGAKLLSKLGVKTVGLPGTIDNDLSYTDYTIGFDTALNTVVDAINKLRDTSTSHERVSIVEVMGRNCGDLALYAGIAGGAEAIIVPEMPFDKDELIKTILEGRTNGKTHSIIVVAEGVGGSAELAKEIESVTGIETRATILGHIQRGGSPTADDIVLASRMGAKAVEVLLEGKTSKVIGIKENRIFDMDIDEALDIERSFDESLYEMANAINK

SEQ ID NO: 112903 - DNA, 963 bp, Escherichia coli O157
  CDS (1)..(963): transl_table=11
atgattaagaaaatcggtgtgttgacaagcggcggtgatgcgccaggcatgaacgccgcaattcgcggggttgttcgttctgcgctgacagaaggtctggaagtaatgggcatttatgacggctatctgggtctgtatgaagaccgtatggtacagctagaccgttacagcgtttctgacatgatcaaccgtggcggtacgttcctcggttctgcgcgtttcccggaattccgcgacgagaacatccgcgccgtggctatcgaaaacctgaaaaaacgtgggatcgatgcgctggtggttatcggcggtgacggttcctacatgggtgcaatgcgtctgaccgaaatgggcttcccgtgcatcggcctgccgggcactatcgacaacgacatcaaaggcactgactacactatcggtttcttcactgcgctgagcaccgttgtagaagcgatcgaccgtctgcgtgacacctcttcttctcaccagcgtatttccgtggtggaagtgatgggccgttattgtggcgatctgacgctggctgcggccattgccggtggctgtgaattcgttgtggttccggaagttgaattcagccgtgaagacctggtaaacgaaatcaaagcgggtatcgcgaaaggtaaaaaacacgcgatcgtggcgattaccgaacatatgtgtgatgttgacgaactggcgcatttcatcgagaaagaaaccggtcgtgaaacccgcgcaactgtgctgggccacatccagcgcggtggttctccggtgccttacgaccgtattctggcttcccgtatgggcgcttacgctatcgatctgctgctggcaggttacggcggtcgttgcgtaggtatacagaacgaacagctggttcaccacgacatcatcgacgctatcgaaaacatgaagcgtccgttcaaaggcgactggctggactgcgcgaaaaaactgtactaa

SEQ ID NO: 112904 - protein, 320 aa, Escherichia coli O157
MIKKIGVLTSGGDAPGMNAAIRGVVRSALTEGLEVMGIYDGYLGLYEDRMVQLDRYSVSDMINRGGTFLGSARFPEFRDENIRAVAIENLKKRGIDALVVIGGDGSYMGAMRLTEMGFPCIGLPGTIDNDIKGTDYTIGFFTALSTVVEAIDRLRDTSSSHQRISVVEVMGRYCGDLTLAAAIAGGCEFVVVPEVEFSREDLVNEIKAGIAKGKKHAIVAITEHMCDVDELAHFIEKETGRETRATVLGHIQRGGSPVPYDRILASRMGAYAIDLLLAGYGGRCVGIQNEQLVHHDIIDAIENMKRPFKGDWLDCAKKLY

SEQ ID NO: 112905 - DNA, 2979 bp, Kluyveromyces lactis
  CDS (1)..(2979)
atgaataactcggtctacggcgttgctttccgttcattgagtaccggtgatgaaaagctgtataaggaagctacgagattctaccattctttgggtttccaaacggtaaaactgtacgataattttaagaaccatgacgattcgaatttgatcgttggtacttccaagaactctgttaaggaatgttggttggaatcgttcaagttgtctgaacttgattcacaaggtttcagagttccacaacaggaggcttctaatcagctacaaactgatggtgttatgatcaagttgaggttagtggacactgaacccctaaatcaaactgccgatacagttgtgtattacaccgtcagtttggatgaagtatccaagattggtgaaagagttgatgatcataacgtcaaattagtggatcctttgggtaacgtggttcttgtcactgattcccatgatggtaaggaattaaacgcttcagagttcatcgcacctaaggattcttcagtagaacaaaagatcactgtagaattagtggataaggattccaagaaaaagaaaattgccgtgatgacatctggtggtgattctcaaggtatgaatgccgctgtccgtgcagtggttagatccagtatctattatggatgtgacgtttatgcagtttacgaaggttatgaaggtttggtgaaaggtggagactatttgagaaaaatggaatggaaggacgtccgtggatggctcagtgaaggtggtacattaattggtaccgctcgttccaaggagttcagagaaagatggggccgtaagcaagcttgttctaatttgatagatcaaggtatcgacgctttggttgtaattggtggtgacggttcactaactggtgcagacttgttcagatccgaatggccatctctagttgaagaactagtgaaggacggtaagtttactgaggacgaagttgctctataccaaaacttaaccattgttggtatggtcggctccatcgataacgatatgtctggtactgattctaccattggtgcttactctgctttggaaagaatctgtgagatggttgattacatcgacgctactgctaagtcacattcaagagcatttgttgtggaagtgatgggtaggcattgtggttggttaggtctaatgtctggtatcgctaccgcggctgattacattttcattccagagagagcagctcctcacggcaaatggcaagatgagttgaaacgtgtttgtcaaaggcatagagaaaagggtcgtagaaataacacagttatcgttgcagaaggtgcattggatgatcaattaaacccaattaccgccgaacaagttaaggatgtcttggtagaacttggtttagacaccaaaatcactacattgggacacgttcaaagaggtggtacagctgtggcacatgatagatggttagctactttgcaaggtgttgatgctgtcaaggccatcctgaacatgactccagagactccatctccattgattggtattctcgaaaataaggttatcagaatgcccttggttgaatctgtgaaactcacaaaacaagttgctgcagccatcgaagctaaagatttcgataaagccatttctttacgtgacacagagttcattgaattgtattccaacttcatgtccaccaccgttaatgatgatggatctcagctattgcctgaagcagacagattgaacatcgccattgttcacgttggtgcaccttctgctgctttgaacgcagccactagagcagcaacattatactgtctagctcatggtcatagaccatatgctattacaaatggtttcagtggtctaatacaaacaggtcaagtgaaagaactttcctggatcgatgttgaagactggcataacctcggtgggtcagaaattggtaccaatagatccgtcgcagcagaagatatgggtactatcgcataccatttccaaaagaacaagtttgatggtgtcatcatccttggtggatttgaaggtttcaagtctttgaagcaattaagagatggtcgtgaccaatatccaatcttcaacattccaatgtgtttgatcccagccaccgtgtccaacaacgtgcctggtacagaatactctttgggttccgatacctgtttgaatgcgttagtgaagtacaccgatgctatcaaacaatctgcatcatctaccagacgtagagtgttcgttgttgaggttcaaggtggacactccggttacgttgcatctttcactgggctagttaccggtgctgtctctgtttacactccagaaaatgctattaacttaaagactattcaagaagacttggcattattgaaggaaagtttcaaacatgagcaaggtgaaaccagaaacggtaagcttgtaatcagaaacgaaatggcctctgatgtctataccacggaattgcttgcagatatcatcactgaacaatcaaatgacagatttggtgtcagaaccgctattccaggtcatgttcaacaaggtggtgtaccatcctccaaggatcgtgtcattgcatccagattcgctgtgaagtgtgtcaagttcatcgaacaatggaataagaagaacaccgctgcagacaatgaggatttcaagatcctacgattcaattacgtgaacggtgtgaagcaatacactgtccttgacgaagatctatctgccgctgtgatttgtgtcaatggttccaagatttctttcaagccaatcgctcatatctgggaaaacgaaaccaatatcgaactcagaaagggacaagaaattcactgggaagaatacaacgagatcggagatattctttccggcagaagtatgctaagaagaaagatccaaaaggaacaacaagaagaatcctctttaccaagtgtggcagacactccattgtcatctgtcacagtttctacctctgctgcaaaagaagactcagccttgtatgtttaa

SEQ ID NO: 112906 - protein, 992 aa, Kluyveromyces lactis
MNNSVYGVAFRSLSTGDEKLYKEATRFYHSLGFQTVKLYDNFKNHDDSNLIVGTSKNSVKECWLESFKLSELDSQGFRVPQQEASNQLQTDGVMIKLRLVDTEPLNQTADTVVYYTVSLDEVSKIGERVDDHNVKLVDPLGNVVLVTDSHDGKELNASEFIAPKDSSVEQKITVELVDKDSKKKKIAVMTSGGDSQGMNAAVRAVVRSSIYYGCDVYAVYEGYEGLVKGGDYLRKMEWKDVRGWLSEGGTLIGTARSKEFRERWGRKQACSNLIDQGIDALVVIGGDGSLTGADLFRSEWPSLVEELVKDGKFTEDEVALYQNLTIVGMVGSIDNDMSGTDSTIGAYSALERICEMVDYIDATAKSHSRAFVVEVMGRHCGWLGLMSGIATAADYIFIPERAAPHGKWQDELKRVCQRHREKGRRNNTVIVAEGALDDQLNPITAEQVKDVLVELGLDTKITTLGHVQRGGTAVAHDRWLATLQGVDAVKAILNMTPETPSPLIGILENKVIRMPLVESVKLTKQVAAAIEAKDFDKAISLRDTEFIELYSNFMSTTVNDDGSQLLPEADRLNIAIVHVGAPSAALNAATRAATLYCLAHGHRPYAITNGFSGLIQTGQVKELSWIDVEDWHNLGGSEIGTNRSVAAEDMGTIAYHFQKNKFDGVIILGGFEGFKSLKQLRDGRDQYPIFNIPMCLIPATVSNNVPGTEYSLGSDTCLNALVKYTDAIKQSASSTRRRVFVVEVQGGHSGYVASFTGLVTGAVSVYTPENAINLKTIQEDLALLKESFKHEQGETRNGKLVIRNEMASDVYTTELLADIITEQSNDRFGVRTAIPGHVQQGGVPSSKDRVIASRFAVKCVKFIEQWNKKNTAADNEDFKILRFNYVNGVKQYTVLDEDLSAAVICVNGSKISFKPIAHIWENETNIELRKGQEIHWEEYNEIGDILSGRSMLRRKIQKEQQEESSLPSVADTPLSSVTVSTSAAKEDSALYV

SEQ ID NO: 112907 - DNA, 2973 bp, Pichia pastoris
  CDS (1)..(2973)
atgccagaaccatctataagtgcactttccttcacttcgtttgtcactaatgatgacaaactgtttgaagagactttcaatttttacacgaagttgggcttccacgcaacacgctcatatgttaaagacaaccggtcagactttgaattgacggggatttccacggattcaatcaaggaaatctggctggaaagtttcccactatctgaagtggtcgaaacgtcagctggtagagagttgagaaaaccactgcaagaatctgtgggctaccaatctgaagctcttctgggatattctccctaccagagtgacggtgttgttataaaattaaggttatcaaatcatgaccttcagaaaaacaaagacttgcccggtgaagttacgtttttcaccgctagtatcgacaaattaagagctaaactcattgaaattggtgctgagataattccctcagaaatagaccttgttgaattttcaaccaaggatcctatgggcgacgtcattagcttttcttcttatccctctttgagttccaagaagaagattacctctccagactttttcctccaccctaagaaggaagtacgctcccaagaatcaatagttgagcaggttaaatctgaagaaggtaagaagaagattgccatcataacttcaggtggagacgcaccgggaatgaatgctgcagtaagggctgtgacaagagccggtattttctatggctgtaaagtttacgcttgttatgaaggttacactggactggttaagggtggtgatatgttaaaggaactgcagtggcaagatgtccgtggtttactttccattggtggtaccataattggtactgcaagaagtaaggaattcagagaacgatggggccgtcttcaagcttgctacaatatggtcagcaatggtattgatgcgttagttgtttgtggaggtgacggatctcttacaggtgccgatctatttcgaaatgaatggcctgaactgataaaggaacttttgggtgagggcaaaattacaaaagaacaatatgaaacacacagaaacttgacaatcgtaggtctcgttggttctatcgataacgatatgtgcggaactgattccacaattggtgcttattcctcattggagagaatcatagagctggtagactacatcgatgctactgccgcctcccattcacgagccttcgtggtggaagtcatgggtagacattgtggatggttaggtttaatgtccggaattgctactggagctgattacattttcatccctgaaagacctccaagtgaaacaaactggaaggacgacttgaagaaagtctgtttgagacatagagagaaaggacgcaggaagaccaccgttattgttgctgaaggtgctattgatgaccaactgaaccctatcacttctgaagaggtgaaagatgtactagtggagattggtttggacactcgtattacccgtctaggacatgtccaaagaggtggagctccgtgtgcttttgatagattcttggccactgttcaaggtgttgatgctgttagggctgttttagaaagcaccccagcaattccttctcctgtcatcagcattttggagaacaaaattgttcgccagccgttggtggaatctgttgctcaaacaaagactgtcagtgatgctatcgaggccaaggatttcgataaagctttgaaattaagagagcaagagtttgccacatcatatgagagcttcctgtccgtttccaagtatgacgatggatcatatctagtaccagagagctcaagattaaatattgccatcatccatgtgggagctccaacatctgcgttgaatcctgccacaagagttgctactttgaactcgttggcaaaaggacacagagtttttgctattcgaaacggatttgcaggattaattcgccacggcgctgtacgagagctcaactggattgatgttgaggactggcacaacacaggtgggtcggagattggtaccaacagaagtcttcctagtgatgatatgggcactgtggcgtactacttccagcaatacaagtttgatggtcttattattatcggtggatttgaagctttcacagctctgtaccagctggacgcagctcgtgctcagtatcctatcttcaatattccaatgtgttgtcttccagctactgtttctaataacgttcctggtaccgagtattccttagggtctgacacatgtctaaacaccttgtctggatactgtgatgctgtgaaacaatctgcttctgctagtagaagaagaacatttgttgtggaagttcaaggtggatactcaggatatcttgccagctacgctggtctgatcacaggagctttggctgtttatactcctgaaaacccaatcaaccttcaaacagtgcaggaagacattgaattgttgactcgaacatacgaggaagacgatggtaagaacagatcgggtaaaatctttattcataatgaaaaggcttcaaaggtttacaccacggatctgattgctgctatcataggtgaagctggaaagggtaggtttgagagccgtactgccgtgcctggtcatgtacaacagggtaaatctccctcatctattgaccgggttaatgcctgcagactggctatcaaatgttgtaacttcatcgaggacgccaatttccaggtgaaacacaatgccaatttgagcgccgacgaacgtcatttgagattcttttgcgatgacggagttaagacatctgcagtgagcggcaaatcttccgtgatagatgataacacgtcagtggtcattggaatccaaggttccgaggttacattcactcctgtaaaacagctatgggagaaggaaactcatcataagtggcgaaagggtaagaacgttcattgggagcagttgaacattgtctctgacctcttgagtggtcgtttgtctattcgtaccacgtaa

SEQ ID NO: 112908 - protein, 990 aa, Pichia pastoris
MPEPSISALSFTSFVTNDDKLFEETFNFYTKLGFHATRSYVKDNRSDFELTGISTDSIKEIWLESFPLSEVVETSAGRELRKPLQESVGYQSEALLGYSPYQSDGVVIKLRLSNHDLQKNKDLPGEVTFFTASIDKLRAKLIEIGAEIIPSEIDLVEFSTKDPMGDVISFSSYPSLSSKKKITSPDFFLHPKKEVRSQESIVEQVKSEEGKKKIAIITSGGDAPGMNAAVRAVTRAGIFYGCKVYACYEGYTGLVKGGDMLKELQWQDVRGLLSIGGTIIGTARSKEFRERWGRLQACYNMVSNGIDALVVCGGDGSLTGADLFRNEWPELIKELLGEGKITKEQYETHRNLTIVGLVGSIDNDMCGTDSTIGAYSSLERIIELVDYIDATAASHSRAFVVEVMGRHCGWLGLMSGIATGADYIFIPERPPSETNWKDDLKKVCLRHREKGRRKTTVIVAEGAIDDQLNPITSEEVKDVLVEIGLDTRITRLGHVQRGGAPCAFDRFLATVQGVDAVRAVLESTPAIPSPVISILENKIVRQPLVESVAQTKTVSDAIEAKDFDKALKLREQEFATSYESFLSVSKYDDGSYLVPESSRLNIAIIHVGAPTSALNPATRVATLNSLAKGHRVFAIRNGFAGLIRHGAVRELNWIDVEDWHNTGGSEIGTNRSLPSDDMGTVAYYFQQYKFDGLIIIGGFEAFTALYQLDAARAQYPIFNIPMCCLPATVSNNVPGTEYSLGSDTCLNTLSGYCDAVKQSASASRRRTFVVEVQGGYSGYLASYAGLITGALAVYTPENPINLQTVQEDIELLTRTYEEDDGKNRSGKIFIHNEKASKVYTTDLIAAIIGEAGKGRFESRTAVPGHVQQGKSPSSIDRVNACRLAIKCCNFIEDANFQVKHNANLSADERHLRFFCDDGVKTSAVSGKSSVIDDNTSVVIGIQGSEVTFTPVKQLWEKETHHKWRKGKNVHWEQLNIVSDLLSGRLSIRTT

SEQ ID NO: 112909 - DNA, 1029 bp, Streptomyces coelicolor
  CDS (1)..(1029): transl_table=11
atgaaggtcggagtactgaccggaggcggcgactgccccgggctcaacgccgtcatccgggccgtcgtccgcaagggcgtccaggagtacggctacgacttcaccggtttccgggacggctggcgcggccccctggagggcgacaccgtcccgctcgacatcccggccgtccgcggcatcctgccccgcggcggcaccgtcctcggctcctcccgcaccaacccgctcaagcagcgggacggcatccggcgcatcaaggacaacctcgccgcactcggggtcgaggccctcatcaccatcggcggcgaggacaccctcggcgtcgccacccgcctcgccgacgagtacggcgtgccctgcgtcggcgtccccaagaccatcgacaacgacctgtccgccaccgactacaccttcggtttcgacaccgccgtcggcatcgccaccgaggccatcgaccggctgcacaccaccgcggagtcccacatgcgcgtcctggtcgtcgaggtcatgggccggcacgccggctggatagccctccactcgggcctggccggcggcgccaacgtcatcctcatccccgagcagcgcttcgacgtcgagcaggtgtgctcctgggtgacctcccgcttccgggcctcctacgccccgatcgtggtcgtcgccgagggcgcgatgccgcgcgacggcgacatggtgctcaaggacgagtcgctggactcctacgggcacgtccggctgtccggggtcggcgaatggctggccaagcagatcgagaagcgcaccggcaacgaggcccgcaccaccgtcctcggccacgtccagcgcggcggcacgcccagcgccttcgaccgctggctcgccacccgcttcggactgcacgccgtcgactgcgtgcacgacggggacttcggcaagatggtcgccctgcgcggcacggacatcgtccgcgtcccgatcgccgaggccacggcccggctgaagaccgtcgacccggcgctgtacgaggaggtcggcgtgttcttcggctga

SEQ ID NO: 112910 - protein, 342 aa, Streptomyces coelicolor
MKVGVLTGGGDCPGLNAVIRAVVRKGVQEYGYDFTGFRDGWRGPLEGDTVPLDIPAVRGILPRGGTVLGSSRTNPLKQRDGIRRIKDNLAALGVEALITIGGEDTLGVATRLADEYGVPCVGVPKTIDNDLSATDYTFGFDTAVGIATEAIDRLHTTAESHMRVLVVEVMGRHAGWIALHSGLAGGANVILIPEQRFDVEQVCSWVTSRFRASYAPIVVVAEGAMPRDGDMVLKDESLDSYGHVRLSGVGEWLAKQIEKRTGNEARTTVLGHVQRGGTPSAFDRWLATRFGLHAVDCVHDGDFGKMVALRGTDIVRVPIAEATARLKTVDPALYEEVGVFFG

SEQ ID NO: 112911 - DNA, 2862 bp, Yarrowia lipolytica
  CDS (1)..(2862)
atgattgaaggaatctcctttgcgtcgtttgtgacacacgaaaaacccaagtttgtgcgcgccctggacttctacaaggccctgggcttcctccccaccaaggagtacaagcacggaacagaccaccatgccaccgacgaagaaggcgcgggctcgatccaggaggtctggctcacgtcgtcgcgagccggtgtgccgtctgtgaccgtcaaattgcgactctcccgccacggaaacgaacacgtgtctctccccaacctcaaacacgactggcggtcgctggtgccctcgctggtgtactacgcccccgacctggacgcggtgcgagccgcaatcaccccgttcttacacgaggaccactccacgcttctggaacgcccttcccacacaaacttcatcgagctgtacgccattgaccccatgggaaacctcgtgggcttttcccgacgagaaaacccttactcgtcagcgatgcagaaacccttctctgctgacgacattggcccgcagaacttctcaaagcccaatgaaaccaaaatcaagggcaagaagcgtatcggtgtcatgacctccggaggagacgcccccggcatgtgtgcggccgtgcgagctgtggtccgagccggaattgcccgcggctgcgaggtctacgctgtccgagagggctatgagggtcttgtcaagggtggcgacctcattgagcccctgtcatgggaagacgtacggggctggctctccctgggaggaacccttattggaactgctcgatgcaaggagttccgagaacgagagggccgactggcaggagccctcaacatggtcaagaacggcattgacgcgctcattgtcattggcggagacggctcgttgaccggagccgatctgttccgagaagaatggccgtctctaatcgaggagctagtcaccaatggctccatcaccgccgagcaggccgaacgacaccgacacctcgacatttgcggtatggtaggctccatcgacaacgacatggctaccaccgacgtcaccattggtgcttactcatcgctcgaccgaatctgcgagctggtagacttcatcgatgccaccgcccagtcgcactcgcgagcctttgtcgtcgaggttatgggtcggcactgtggctggctggctctcatggccggcactgctaccggcgccgactacatttttatccccgaggctgctcccgatgctactcagtgggccgagaagatgacccgtgtcgtcaagagacaccgaagccagggcaagcgaaagaccgtggtcattgtcgccgagggcgcaatcgactcggacctcaaccccatcactgccaagatggtcaaggatgtgctagacggcattggactcgatactcgaatctccaccctgggtcacgtacagcgaggaggtcccccagttgccgctgatagagttctggcttcactgcagggtgtggaggctatcgacgccatcctgtctctcaccccagagacgcccagtcccatgattgctctcaacgagaacaaaatcacccgcaagccgctcgtggagtctgtagctctcaccaagaaggttgccgatgccattggcaacaaggactttgccgaggccatgcggcttcgaaaccccgagtttgtggagcaattgcagggtttcctgctcacaaactctgctgacaaggaccggccccaggagcctgccaaggatcccctgcgagtcgccattgtgtgcactggcgctcctgctggcggaatgaacgctgccatccgatctgctgttctgtacggtcttgctcgaggccaccaaatgtttgccatccacaatggatggtccggcctcgtcaagaatggtgacgacgcggtgcgggagctgacttggctcgaggtcgagcccctgtgtcagaagggtggctgtgagattggtactaaccgatctctgcccgaatgtgatcttggaatgattgcataccactttcagcgacaacggtttgacggtctaatcgtcattggtggttttgaggctttccgagcgctgaatcagctcgacgatgcccgtcacgcctaccctgctcttcgaatccccatggttggtattcctgccaccatttcgaacaacgtgcctggaacggactattctcttggagccgacacttgtctcaactctctggttcagtactgcgacgtgctcaagacgtctgcttctgccactcgtctgcgtctgtttgtggtcgaggtgcagggtggaaactctggttacatcgccaccgtggctggtttgatcaccggcgcctatgtggtgtacacacccgagagcggtatcaacctgcgacttcttcagcacgacatttcctaccttaaggatacttttgctcatcaggcggacgtgaaccgaaccggaaagctgcttctgcgaaacgagcggtcatccaacgtgttcaccactgatgtcatcaccggcatcatcaacgaggaggccaagggttcatttgacgcgcgaaccgccatccctggccatgtgcagcagggaggacacccctctcctaccgatcgagtgcgtgctcagcgatttgccatcaaggccgtgcagtttattgaagagcaccacggctccaaaaacaatgccgatcactgtgtgattctcggtgtgcggggctccaagttcaagtacacctctgtgtcgcatctgtacgcccataagactgagcacggggctcgacggcccaagcattcctactggcacgcgattggcgacattgccaacatgctggtgggtcgaaaggcgcctcctctgcccgagactctcaacgacgagattgagaagaacattgcgaaggagcagggtattattgatccttgttag

SEQ ID NO: 112912 - protein, 953 aa, Yarrowia lipolytica
MIEGISFASFVTHEKPKFVRALDFYKALGFLPTKEYKHGTDHHATDEEGAGSIQEVWLTSSRAGVPSVTVKLRLSRHGNEHVSLPNLKHDWRSLVPSLVYYAPDLDAVRAAITPFLHEDHSTLLERPSHTNFIELYAIDPMGNLVGFSRRENPYSSAMQKPFSADDIGPQNFSKPNETKIKGKKRIGVMTSGGDAPGMCAAVRAVVRAGIARGCEVYAVREGYEGLVKGGDLIEPLSWEDVRGWLSLGGTLIGTARCKEFREREGRLAGALNMVKNGIDALIVIGGDGSLTGADLFREEWPSLIEELVTNGSITAEQAERHRHLDICGMVGSIDNDMATTDVTIGAYSSLDRICELVDFIDATAQSHSRAFVVEVMGRHCGWLALMAGTATGADYIFIPEAAPDATQWAEKMTRVVKRHRSQGKRKTVVIVAEGAIDSDLNPITAKMVKDVLDGIGLDTRISTLGHVQRGGPPVAADRVLASLQGVEAIDAILSLTPETPSPMIALNENKITRKPLVESVALTKKVADAIGNKDFAEAMRLRNPEFVEQLQGFLLTNSADKDRPQEPAKDPLRVAIVCTGAPAGGMNAAIRSAVLYGLARGHQMFAIHNGWSGLVKNGDDAVRELTWLEVEPLCQKGGCEIGTNRSLPECDLGMIAYHFQRQRFDGLIVIGGFEAFRALNQLDDARHAYPALRIPMVGIPATISNNVPGTDYSLGADTCLNSLVQYCDVLKTSASATRLRLFVVEVQGGNSGYIATVAGLITGAYVVYTPESGINLRLLQHDISYLKDTFAHQADVNRTGKLLLRNERSSNVFTTDVITGIINEEAKGSFDARTAIPGHVQQGGHPSPTDRVRAQRFAIKAVQFIEEHHGSKNNADHCVILGVRGSKFKYTSVSHLYAHKTEHGARRPKHSYWHAIGDIANMLVGRKAPPLPETLNDEIEKNIAKEQGIIDPC

SEQ ID NO: 112913 - DNA, 2328 bp, Aspergillus oryzae
  CDS (1)..(2328)
atgaccaacactatattagatacttactcttcaagacgcaaaccccgccgcattggcatcctgacatcaggaggggatgccccgggaatgaatggagcgatccgtgcagtcgtccgcacagcaatacagaacggctgtgaagcatgggcaatccacgaaggctacgagggactcatccagggcggtgcaatgatgcatcctttatattgggaagacgttcgaggtttcctatcccgtggagggacactcattggatccgtacgctgtgatcgttttcgcgaacgagaaggtcgtcttcaggcggcaaggaatatggtgcttttcggcatcgacgccctagttgtctgtggtggggatggaagcttgaccggggcagacctcttccgatccgaatggccagagctgctcaatgagctggtctcaacaggtgttttgaccgtggcgcaagtcgcacctcatcagaacctgaatattgtcggactactcggctctatcgacaatgacttttccggcacagatgccaccattggatgctattctgcattaacacggatctgcgaagcagtcgatgcagtgtttgacacggcttcttctcatcgccgagggtttgttgttgaagtcatgggccggcactgtggttggctagcgttgatggctgctattgcaactggggcggattggttgtttatcccggagaggcctccgcgcgacggctgggaggatgatatgtgttcaatcatcaccaagaaccgcaaccgtggcaaacgtcgcactatcgttattctggcagaaggtgcccaggacagcaacttggatcgcatttcgtcatctgccgtgaaagatgttctgagcaagcgcttagggctcgatacccgcgtcactgttctaggtcatatccaacgaggcggatccccatgtgcatacgaccgctggctatcaaccttacaaggcatccacgccgtcaaagcggtgctgtctatgactcctgagtcgccctctccggtggtgattatccaggaaaatagaatcagaacatcgtctctggctgaaactgttgccttaacgaaggaggccaatgccagtatgcacgccaaagaattcgagaaagcagcaacacttcgggatcccgaattcatggaatatcatagcgcctaccgacacctgaacacgagtgaccatcccaagatggtcttacccgaagataagcgcatgcgggttgctatcattcacgttggcgccccagctgcaggcatgaatccagccacacgcgcagtagtcgcctattgcttaaccagaggacataccccgatcgccatccacaacggtttccctggtctctgccgacaccatgacgatacccctggctcggttcgtgaaatgcattggttggaatctggtgactggatcaacgacggcgggtctgacattggtaccaatgcgggactaccattagacgatatcgaaacgacagctcaatgcttcgagcgatataagtttgatgcacttttcgttattggaggcttcgaagcgttcacagccgtcagtcaactgcgcaaggcgcgaaagcaataccttgccttccggattccgctcgtccttctcccagcaagtatgtcaaataatgtccccggcacggaatactcccttggaagcgacaccagtcttaatacccttgtttatttctgcgatgttgttcggcaatctgcgtcctcctccgggcatagcgttttcgtcgtggaagcgcaaggagccgagtaccaggcgacagctgctgcgctggccgcaggagcaatgaccgtgtatacgcctgaacgaggaataactctacaaagcctctccaatgatattgagtacctccgccaacaattctcaaaggatcacggtgccaatcgctcgggcaagctgattatccgcaatgaccagacatccaccatctacagtacaaccgagattgcaaatatcatcaaacatgaggccaagaatcgctttgatgcgcagggcgtagtgcctggacacttccagcaaggcggcaaagtctcacccattgaccgcattcgcgcgttccggttggccgtcaagtgcatggaacatttggaaacatttgcgggccagtctccggaggaaatcatgaacgatgagaactcagctacggtgatcagcatcaaacagtctcgtatccttctgctgccgatgggaggtcctaccggagttgaagcgaccgatactgattggaagcgacagcggccgaagactcagaactggttggagatccaagaagctgtggactccttgtcaggacgctcgtctttatatgcgattccgaactga

SEQ ID NO: 112914 - protein, 775 aa, Aspergillus oryzae
MTNTILDTYSSRRKPRRIGILTSGGDAPGMNGAIRAVVRTAIQNGCEAWAIHEGYEGLIQGGAMMHPLYWEDVRGFLSRGGTLIGSVRCDRFREREGRLQAARNMVLFGIDALVVCGGDGSLTGADLFRSEWPELLNELVSTGVLTVAQVAPHQNLNIVGLLGSIDNDFSGTDATIGCYSALTRICEAVDAVFDTASSHRRGFVVEVMGRHCGWLALMAAIATGADWLFIPERPPRDGWEDDMCSIITKNRNRGKRRTIVILAEGAQDSNLDRISSSAVKDVLSKRLGLDTRVTVLGHIQRGGSPCAYDRWLSTLQGIHAVKAVLSMTPESPSPVVIIQENRIRTSSLAETVALTKEANASMHAKEFEKAATLRDPEFMEYHSAYRHLNTSDHPKMVLPEDKRMRVAIIHVGAPAAGMNPATRAVVAYCLTRGHTPIAIHNGFPGLCRHHDDTPGSVREMHWLESGDWINDGGSDIGTNAGLPLDDIETTAQCFERYKFDALFVIGGFEAFTAVSQLRKARKQYLAFRIPLVLLPASMSNNVPGTEYSLGSDTSLNTLVYFCDVVRQSASSSGHSVFVVEAQGAEYQATAAALAAGAMTVYTPERGITLQSLSNDIEYLRQQFSKDHGANRSGKLIIRNDQTSTIYSTTEIANIIKHEAKNRFDAQGVVPGHFQQGGKVSPIDRIRAFRLAVKCMEHLETFAGQSPEEIMNDENSATVISIKQSRILLLPMGGPTGVEATDTDWKRQRPKTQNWLEIQEAVDSLSGRSSLYAIPN

SEQ ID NO: 112915 - DNA, 981 bp, Bacteroides thetaiotaomicron
  CDS (1)..(981): transl_table=11
atgggaacagttaaatgtatcggtattttgacttcgggaggtgatgctccgggaatgaatgcggccatccgcgcagtaacacgtgcagctatctacaacggactacaagtaaaaggtatatatagaggatacaaaggtctggtgacaggcgaaatcaaagagttcaagagccagaacgtaagtaatatcatccaactgggtggaaccatcctgaaaacagcccgctgtaaggagttcaccacaccggaaggccgccagctggcttatgataatatgaaaagagaaggcatcgatgctttggtgatcatcggtggtgacggttcgctgacaggcgcccgaatcttcgcacaggaattcgatgttccatgtatcggacttccgggaacgattgacaacgacctttacggcacggataccactatcggatatgataccgcattgaacaccattctggatgcagtagataaaatccgtgacaccgccacttcacacgaacgtctgttctttgtagaggtgatgggacgtgacgccggattcctcgctctgaacggcgccattgcttcgggagccgaagcagccattattccggagttcagtacggaagtcgaccaactggaagaatttatcaagaacggattccgcaaatccaagaatagcagtatcgtactggtagcggaaagcgaactgacaggcggtgccatgcactatgcggaacgtgtgaaaaacgaatacccgcaatacgatgtgcgtgtgacgatcttaggacacttgcagcgcggtggaagccctacagctcacgaccgcatcctggcaagccgtttgggtgccgctgccatcgacgctatcatggaagaccagcgcaacgtgatgataggtatcgagcacgatgaaatcgtctacgtaccattcagcaaagctatcaagaatgataagccggtcaagagagatctggtcaatgtattgaaagaactttctatataa

SEQ ID NO: 112916 - protein, 326 aa, Bacteroides thetaiotaomicron
MGTVKCIGILTSGGDAPGMNAAIRAVTRAAIYNGLQVKGIYRGYKGLVTGEIKEFKSQNVSNIIQLGGTILKTARCKEFTTPEGRQLAYDNMKREGIDALVIIGGDGSLTGARIFAQEFDVPCIGLPGTIDNDLYGTDTTIGYDTALNTILDAVDKIRDTATSHERLFFVEVMGRDAGFLALNGAIASGAEAAIIPEFSTEVDQLEEFIKNGFRKSKNSSIVLVAESELTGGAMHYAERVKNEYPQYDVRVTILGHLQRGGSPTAHDRILASRLGAAAIDAIMEDQRNVMIGIEHDEIVYVPFSKAIKNDKPVKRDLVNVLKELSI

SEQ ID NO: 112917 - DNA, 2841 bp, Candida albicans
  CDS (1)..(2841): transl_table=12
atgatttcaattgttaatggtacttccacactttcattggttgctggtagtgtggaaactttaaatcaagcaatcaacttctataccaacatacttgggttgtccgtccattcggaacaaaatgactggacatatttatcaaatgacgacaataaaatgattgtcaagatacaattagacaccaaatctgggttatcgcttgaccaagtcaatgatagaagaacagaaattattgccaaattgaatgtcactgattggagatcattggacaccaccagtgttttgaaagttcaaaatttagttgctttgattgaaactttaaccacattcaactacactttgcaaatcacccctaacgaattgtaccctaatgaagtttattgcgtgggacccattggttatattattgggtttacagcttgtgatgaaccattaacccttgttccaccattgcaaaaatcccaccctaagccagggttggtttccaacttgatgtcaaaatctggctctcaatcaagaaatattgaagagaccaaagcagtgagaagaaacatcgctgtcatgacttcaggtggggattctcaaggtatgaatgctgccgttagagctgtcgttagagccacgattttccatggaagcaaggcctttgctgtccaagaaggttatgctggtttggtcaaaggtggtcctgaatacattaaggaaatgaaatggcaagacgtcagaggttttctttcagaagggggtaccaatattggtactgccagatgcatggagtttaaggaacgttggggtagattgaaaggatgtaaaaacttgattgatgctggaattgacgggttgatcgtgtgtggtggtgatggttctttaactggtgctgatttattcagacacgaatggccatcattaattcaagaattgaaagataaaggtgaaatcaccaatgaacaatttgaaagacacaaacacttgtacatttgtggtatggtgggttccattgataatgatatggccatgactgatgctacaattggtggctactctgcattagagagaatttgtcgtgccatcgattacattgatgctactgctaactcccattcgcgtgcctttgttgttgaggtcatgggtagacattgtggttggttagccttgatggccggtattgctaccagtgctgattatatttttattccagagaaacctgcctcctcaaaagattggcaagatcaaatgtgcgacattgttggtaaacatagagctcaaggtaaaagaaagaccattgttattgttgctgaaggtgcaattacctccgatttgaaaccaatcacatctgacgaagttaaagatgttttggtcgacagattagggttggacaccagaatcactgtgttgggacatgttcaaagaggtggtactgctgtagcctttgatagaactttagccactttgcaaggggttgaagcagtgaaagccattttggaattaactcctgatgttccatctccattaattgccattgacgaaaataagatttgtcgccgtccattagttgaagcagttagaatcaccaaatccgtggcttcagctatcgaagctaaagattttgaaaaggcaatgtctttaagggatcacgaattcaaagagcatttggctaatttcatggccatgaacactgccaaccatgaaaagccaactttacctcgtgaaaaacgtaagaagattgccattatcaacatcggtgctcccgctggtggtatgaattctgctgtttatgctatggccacttactgtatgtctcgtggtcacaccccatatgctatccacaatgggtttgctggtttatcaagacacgagtcagtgaaactgattgaatggattgacatcgaagggtggaacagtattggggggtctgaaattggtacgaacagacaaacacctgaagaaactgacattggtatgattgcccattattttgaaaaataccagtttgacgggttaattattgttggaggttttgaagcatttgtttcgttagagcaattggaaagatcaagagctatgtatccatcgttcagaattcctatggttttaatccctgccaccatttcaaataatgttcctggtaccgaatattctttaggggctgatacctgtttgaattcgttaatggaatattgtgacattgtcaagcaatcagcttcagctaccagaggtacagcatttattattgatgttcaaggaggtaattccggatacattgccacatttgcctcattaatcagtggagcacaagcatcctatgttccagaagaaggtatttcattacagcaattggaaatggatatcaattcattgagagaagcatttgccgtggaacaaggaatgacaaagagtggtaaattgatcatcaagtcgagtaatgcatccaaagtactaaccccacacacattggctgacatattcaacgatgaatgtcacggtgactttgacactaagacagctattccgggacacgtccaacaaggtggattaccttcaccaatagatagaagcagaggtgatagatttgccattagagctgttcaatttattgaagaccactgtgatgtcttagctccatacagatacgaattggacttcccaattgatgacaagaaaatcttaaacacagcggctgtattaggtatcaagtcttcacgtttgagattcacctctatcagacatttgtttgatttcgaaactgaattgggtagaagaatgccaaagaccatctactggaatacaattagagatatttctgatcaattagttggaagaacaagacttgataagccataa

SEQ ID NO: 112918 - protein, 946 aa, Candida albicans
MISIVNGTSTLSLVAGSVETLNQAINFYTNILGLSVHSEQNDWTYLSNDDNKMIVKIQLDTKSGLSLDQVNDRRTEIIAKLNVTDWRSLDTTSVLKVQNLVALIETLTTFNYTLQITPNELYPNEVYCVGPIGYIIGFTACDEPLTLVPPLQKSHPKPGLVSNLMSKSGSQSRNIEETKAVRRNIAVMTSGGDSQGMNAAVRAVVRATIFHGSKAFAVQEGYAGLVKGGPEYIKEMKWQDVRGFLSEGGTNIGTARCMEFKERWGRLKGCKNLIDAGIDGLIVCGGDGSLTGADLFRHEWPSLIQELKDKGEITNEQFERHKHLYICGMVGSIDNDMAMTDATIGGYSALERICRAIDYIDATANSHSRAFVVEVMGRHCGWLALMAGIATSADYIFIPEKPASSKDWQDQMCDIVGKHRAQGKRKTIVIVAEGAITSDLKPITSDEVKDVLVDRLGLDTRITVLGHVQRGGTAVAFDRTLATLQGVEAVKAILELTPDVPSPLIAIDENKICRRPLVEAVRITKSVASAIEAKDFEKAMSLRDHEFKEHLANFMAMNTANHEKPTLPREKRKKIAIINIGAPAGGMNSAVYAMATYCMSRGHTPYAIHNGFAGLSRHESVKSIEWIDIEGWNSIGGSEIGTNRQTPEETDIGMIAHYFEKYQFDGLIIVGGFEAFVSLEQLERSRAMYPSFRIPMVLIPATISNNVPGTEYSLGADTCLNSLMEYCDIVKQSASATRGTAFIIDVQGGNSGYIATFASLISGAQASYVPEEGISLQQLEMDINSLREAFAVEQGMTKSGKLIIKSSNASKVLTPHTLADIFNDECHGDFDTKTAIPGHVQQGGLPSPIDRSRGDRFAIRAVQFIEDHCDVLAPYRYELDFPIDDKKILNTAAVLGIKSSRLRFTSIRHLFDFETELGRRMPKTIYWNTIRDISDQLVGRTRLDKP

SEQ ID NO: 112919 - DNA, 2817 bp, Kluyveromyces lactis
  CDS (1)..(2817)
atgacacaatctttgccattgttgaacggtacggaagcgtacaaattagttacgactcaagggttgtatgataagacagtcaagttttacgaaaagtatttgcaattagttcatgacaagcgagttggcacattgacaaattctttaatcactctaaagctagttgttgataacagcttcaagccattggatgttgttaacgataaagattggagggccattgtgtcatcagcattggttttttcatgtacaaatatccaacatttcagagatttggctgctggtgaaacgattcaggcctatcctaacgaaaccaacccaattgaaatatatttgaaggatccaaacggatatatcattggtatcactgaaacgaaaaatgctatttctatcaaacctacgctgcctaagcaatctgttgaggcctctttgatctcctcaagatcttcaagaatagacattgcttcttctggtgtttccactgacagctcgtatccagcgattccaaagactgcgaaagcgcaaaagtccatcgccgttatgacatccggtggtgatgcgccaggtatgaacgcaaatgtgagagctattgttagaacagctattttcaagggttgtaatgccttcgtagtcatggaaggttacgaaggtcttgtaaaaggtggtccaaattatatcaagcaggtttactgggaaacagtacgtaactggtcttgcgaaggtggtaccaacattggtactgctcgttgtaaagaatttagagagagagagggaaggttacttggtgctcttcacttaatcgaagctggtgtcgacgctttgatcgtgtgtggtggtgacggttccctcactggtgctgatttattcagatctgaatggccttctttgattcgtgaactcttagatcaaggaagaattaacaaagttcaattcgataggtaccagcacttgaatatttgtggtactgttggatccatcgataatgatatgtctactacagatgctaccattggtgcctactcggcattggatcgtatctgtcaagcaattgattacattgaggccaccgctaactcccattccagagcctttgtggtggaagttatgggtagaaattgtggttggttagctttattggctggtatctctacatcagctgattacatcttgattccagagaaacctgcatcatcaagagaatggcaagatcaaatgtgtgatatcatttcaaagcataggtcaagaggtaagagaacaactatcgttattgttgctgaaggtgccatttcagcagacttaactcctatctcatctaaggacgttcataaagtcttagtggacagattgggtctagattgtagaattactacactaggacatgtccagagaggtggtacagccgttgcttatgaccgtattcttgcaacattgcaaggtgtggaagctgtcaatgcagttttggaatcaactccagataccccttctcctttgatcgctatcaatgagaacaagatcactcgtaagcctttggttgaatcagttcaactaaccaaatctgttgcggaagcaatccattccaaggatttcaaaaaggctatgcaattgagagattcggaatttgttgagcatttggataatttcatggcaatcaattctgctgaccatatcgaacctaagttaccagaacacacccatatgaagattgctattgtcaatgtcggtgccccagctggtggtatgaactctgcagtttattcgatggctacgtactgtatgtctcaaggtcacaaaccatatgcaatttacaatggttggactgggttaactagacacgaatccgtgagatctctaaactggaaggatcttttgggatggcaatcccgcggtggttctgaaatcggtaccaacagacatactcctgaagaagctgatatcggtttgattgcttactatttccaaaagtatggattcgatggtatcatcattgtcggtggttttgaagcgtttgtctccttgcatcaattggaaagagcaagagagaactatacagccttcagaatcccaatggttttgattccagccactttatccaacaatgttccgggtaccgagtactccctcggttcggataccgctctgaactctttgatgcaatactgtgatattatcaagcaatctgctgcatcaacccgtggtagagtttttgttgttgatgttcaaggtggtaactctgggtatctagccacacatgccgctgttgctgtgggtgcccaagtttcctatgtcccagaagaaggtataagtttggagcaactaacgcaagatattgaaaacttgacggaatcattcagcgaagctgaaggtagaggtaaattcggacaacttatcttgaagtccaccaatgcctctaaggtgcttactcctgaagtgttggctgaggtcattactcaagaagctgaaggtcacttcgatgccaaatgtgccatcccaggtcatgtccaacaaggtggtctaccttctccaattgatagaacaaggggtactagattcgccatcagagctgttggtttcattgagtctcaacacaaggtattagcagctgaggcaaatctggatgatgacgacttcgactttgatacaccaaagatcatagcaactgcatcagtcttaggtgttaagggatctgacattgtctttagttcaatcagacaattgtacgattttgaaactgaattgaacaagagaaccccaaagactattcactggcaatcgactagaaccattgcggaccatcttgtaggaagaaaaaagctatga

SEQ ID NO: 112920 - protein, 938 aa, Kluyveromyces lactis
MTQSLPLLNGTEAYKLVTTQGLYDKTVKFYEKYLQLVHDKRVGTLTNSLITLKLVVDNSFKPLDVVNDKDWRAIVSSALVFSCTNIQHFRDLAAGETIQAYPNETNPIEIYLKDPNGYIIGITETKNAISIKPTLPKQSVEASLISSRSSRIDIASSGVSTDSSYPAIPKTAKAQKSIAVMTSGGDAPGMNANVRAIVRTAIFKGCNAFVVMEGYEGLVKGGPNYIKQVYWETVRNWSCEGGTNIGTARCKEFREREGRLLGALHLIEAGVDALIVCGGDGSLTGADLFRSEWPSLIRELLDQGRINKVQFDRYQHLNICGTVGSIDNDMSTTDATIGAYSALDRICQAIDYIEATANSHSRAFVVEVMGRNCGWLALLAGISTSADYILIPEKPASSREWQDQMCDIISKHRSRGKRTTIVIVAEGAISADLTPISSKDVHKVLVDRLGLDCRITTLGHVQRGGTAVAYDRILATLQGVEAVNAVLESTPDTPSPLIAINENKITRKPLVESVQLTKSVAEAIHSKDFKKAMQLRDSEFVEHLDNFMAINSADHIEPKLPEHTHMKIAIVNVGAPAGGMNSAVYSMATYCMSQGHKPYAIYNGWTGLTRHESVRSLNWKDLLGWQSRGGSEIGTNRHTPEEADIGLIAYYFQKYGFDGIIIVGGFEAFVSLHQLERARENYTAFRIPMVLIPATLSNNVPGTEYSLGSDTALNSLMQYCDIIKQSAASTRGRVFVVDVQGGNSGYLATHAAVAVGAQVSYVPEEGISLEQLTQDIENLTESFSEAEGRGKFGQLILKSTNASKVLTPEVLAEVITQEAEGHFDAKCAIPGHVQQGGLPSPIDRTRGTRFAIRAVGFIESQHKVLAAEANLDDDDFDFDTPKIIATASVLGVKGSDIVFSSIRQLYDFETELNKRTPKTIHWQSTRTIADHLVGRKKL

SEQ ID NO: 112921 - DNA, 1026 bp, Streptomyces coelicolor
  CDS (1)..(1026): transl_table=11
atgcgtatcggagttctcaccgcaggcggcgactgccccggcctgaacgcagtgatccggtcggtcgtgcaccgagcggtggacaactacggcgacgaggtcatcggcttcgaggacggctacgcggggctgctggacggccgttaccgcgccctggacctcaacgcggtcagcggcatcctcgcccgcggcggcaccatcctcggctcctcccgactggagcgcgaccggctccgcgaggcctgcgagaacgcgggcgacatgatccagaacttcggcatcgacgccctgatcccgatcggcggcgagggcaccctcacggccgcccggatgctgtccgacgccgggctcccggtggtcggcgtgccgaagaccatcgacaacgacatctcctccaccgaccgcaccttcggcttcgacacggcggtcggtgtcgcgaccgaggccatggaccgcctcaagaccaccgccgagtcccaccagcgcgtgatggtcgtcgaggtcatgggccggcacgccggctggatcgccctggagtccggcatggccgccggtgcccacggcatctgcctgcccgagcgccccttcgaccccgccgacctggtcaagatggtcgaggagcgcttctcccgcggcaagaagttcgccgtcgtctgcgtcgccgagggcgcccaccccgccgagggctccatggactacggcaagggcgcgatcgacaagttcggccacgagcgcttccagggcatcggcaccgcgctcgccttcgagctggagcgccggctcggcaaggaggccaagccggtcatcctcggccacgtccagcgcggcggcgtccccaccgcgtacgaccgcgtcctcgccacccgcttcggctggcacgcggtggaggccgcgcaccggggcgacttcggccggatgacggcgctgcgcggcaccgacgtggtgatggtgccgctggcggaggcggtcaccgagctgaagacggtcccgaaggaccggatggacgaggcggagtccgtcttctag

SEQ ID NO: 112922 - protein, 341 aa, Streptomyces coelicolor
MRIGVLTAGGDCPGLNAVIRSVVHRAVDNYGDEVIGFEDGYAGLLDGRYRALDLNAVSGILARGGTILGSSRLERDRLREACENAGDMIQNFGIDALIPIGGEGTLTAARMLSDAGLPVVGVPKTIDNDISSTDRTFGFDTAVGVATEAMDRLKTTAESHQRVMVVEVMGRHAGWIALESGMAAGAHGICLPERPFDPADLVKMVEERFSRGKKFAVVCVAEGAHPAEGSMDYGKGAIDKFGHERFQGIGTALAFELERRLGKEAKPVILGHVQRGGVPTAYDRVLATRFGWHAVEAAHRGDFGRMTALRGTDVVMVPLAEAVTELKTVPKDRMDEAESVF

SEQ ID NO: 112923 - DNA, 2880 bp, Saccharomyces cerevisiae
  CDS (1)..(2880)
atgactgttactactccttttgtgaatggtacttcttattgtaccgtcactgcatattccgttcaatcttataaagctgccatagatttttacaccaagtttttgtcattagaaaaccgctcttctccagatgaaaactccactttattgtctaacgattccatctctttgaagatccttctacgtcctgatgaaaaaatcaataaaaatgttgaggctcatttgaaggaattgaacagtattaccaagactcaagactggagatcacatgccacccaatccttggtatttaacacttccgacatcttggcagtcaaggacactctaaatgctatgaacgctcctcttcaaggctacccaacagaactatttccaatgcagttgtacactttggacccattaggtaacgttgttggtgttacttctactaagaacgcagtttcaaccaagccaactccaccaccagcaccagaagcttctgctgagtctggtctttcctctaaagttcactcttacactgatttggcttaccgtatgaaaaccaccgacacctatccatctctgccaaagccattgaacaggcctcaaaaggcaattgccgtcatgacttccggtggtgatgctccaggtatgaactctaacgttagagccatcgtgcgttccgctatcttcaaaggttgtcgtgcctttgttgtcatggaaggttatgaaggtttggttcgtggtggtccagaatacatcaaggaattccactgggaagacgtccgtggttggtctgctgaaggtggtaccaacattggtactgcccgttgtatggaattcaagaagcgcgaaggtagattattgggtgcccaacatttgattgaggccggtgtcgatgctttgatcgtttgtggtggtgacggttctttgactggtgctgatctgtttagatcagaatggccttctttgatcgaggaattgttgaaaacaaacagaatttccaacgaacaatacgaaagaatgaagcatttgaatatttgcggtactgtcggttctattgataacgatatgtccaccacggatgctactattggtgcttactctgccttggacagaatctgtaaggccatcgattacgttgaagccactgccaactctcactcaagagctttcgttgttgaagttatgggtagaaactgtggttggttagctttattagctggtatcgccacttccgctgactatatctttattccagagaagccagccacttccagcgaatggcaagatcaaatgtgtgacattgtctccaagcacagatcaaggggtaagagaaccaccattgttgttgttgcagaaggtgctatcgctgctgacttgaccccaatttctccaagcgacgtccacaaagttctagttgacagattaggtttggatacaagaattactaccttaggtcacgttcaaagaggtggtactgctgttgcttacgaccgtatcttggctactttacaaggtcttgaggccgttaatgccgttttggaatccactccagacaccccatcaccattgattgctgttaacgaaaacaaaattgttcgtaaaccattaatggaatccgtcaagttgaccaaagcagttgcagaagccattcaagctaaggatttcaagagagctatgtctttaagagacactgagttcattgaacatttaaacaatttcatggctatcaactctgctgaccacaacgaaccaaagctaccaaaggacaagagactgaagattgccattgttaatgtcggtgctccagctggtggtatcaactctgccgtctactcgatggctacttactgtatgtcccaaggtcacagaccatacgctatctacaatggttggtctggtttggcaagacatgaaagtgttcgttctttgaactggaaggatatgttgggttggcaatcccgtggtggttctgaaatcggtactaacagagtcactccagaagaagcagatctaggtatgattgcttactatttccaaaagtacgaatttgatggtttgatcatcgttggtggtttcgaagcttttgaatctttacatcaattagagagagcaagagaaagttatccagctttcagaatcccaatggtcttgataccagctactttgtctaacaatgttccaggtactgaatactctttgggttctgataccgctttgaatgctctaatggaatactgtgatgttgttaaacaatccgcttcttcaaccagaggtagagccttcgttgtcgattgtcaaggtggtaactcaggctatttggccacttacgcttctttggctgttggtgctcaagtctcttatgtcccagaagaaggtatttctttggagcaattgtccgaggatattgaatacttagctcaatcttttgaaaaggcagaaggtagaggtagatttggtaaattgattttgaagagtacaaacgcttctaaggctttatcagccactaaattggctgaagttattactgctgaagccgatggcagatttgacgctaagccagcttatccaggtcatgtacaacaaggtggtttgccatctccaattgatagaacaagagccactagaatggccattaaagctgtcggcttcatcaaagacaaccaagctgccattgctgaagctcgtgctgccgaagaaaacttcaacgctgatgacaagaccatttctgacactgctgctgtcgttggtgttaagggttcacatgtcgtttacaactccattagacaattgtatgactatgaaactgaagtttccatgagaatgccaaaggtcattcactggcaagctaccagactcattgctgaccatttggttggaagaaagagagttgattaa

SEQ ID NO: 112924 - protein, 959 aa, Saccharomyces cerevisiae
MTVTTPFVNGTSYCTVTAYSVQSYKAAIDFYTKFLSLENRSSPDENSTLLSNDSISLKILLRPDEKINKNVEAHLKELNSITKTQDWRSHATQSLVFNTSDILAVKDTLNAMNAPLQGYPTELFPMQLYTLDPLGNVVGVTSTKNAVSTKPTPPPAPEASAESGLSSKVHSYTDLAYRMKTTDTYPSLPKPLNRPQKAIAVMTSGGDAPGMNSNVRAIVRSAIFKGCRAFVVMEGYEGLVRGGPEYIKEFHWEDVRGWSAEGGTNIGTARCMEFKKREGRLLGAQHLIEAGVDALIVCGGDGSLTGADLFRSEWPSLIEELLKTNRISNEQYERMKHLNICGTVGSIDNDMSTTDATIGAYSALDRICKAIDYVEATANSHSRAFVVEVMGRNCGWLALLAGIATSADYIFIPEKPATSSEWQDQMCDIVSKHRSRGKRTTIVVVAEGAIAADLTPISPSDVHKVLVDRLGLDTRITTLGHVQRGGTAVAYDRILATLQGLEAVNAVLESTPDTPSPLIAVNENKIVRKPLMESVKLTKAVAEAIQAKDFKRAMSLRDTEFIEHLNNFMAINSADHNEPKLPKDKRLKIAIVNVGAPAGGINSAVYSMATYCMSQGHRPYAIYNGWSGLARHESVRSLNWKDMLGWQSRGGSEIGTNRVTPEEADLGMIAYYFQKYEFDGLIIVGGFEAFESLHQLERARESYPAFRIPMVLIPATLSNNVPGTEYSLGSDTALNALMEYCDVVKQSASSTRGRAFVVDCQGGNSGYLATYASLAVGAQVSYVPEEGISLEQLSEDIEYLAQSFEKAEGRGRFGKLILKSTNASKALSATKLAEVITAEADGRFDAKPAYPGHVQQGGLPSPIDRTRATRMAIKAVGFIKDNQAAIAEARAAEENFNADDKTISDTAAVVGVKGSHVVYNSIRQLYDYETEVSMRMPKVIHWQATRLIADHLVGRKRVD

SEQ ID NO: 112925 - DNA, 1011 bp, Bacteroides thetaiotaomicron
  CDS (1)..(1011): transl_table=11
atgagaattggaatcctgacttccggaggagactgccccggtataaatgccactatccgtggcgtgtgcaaaactgccatcaatcactatgggatggaagtaataggaattcatagtggttttcaaggtttgctgacaaaagacatcgaatcctttactgataaatccttatccggattgttgaaccaagggggtacaatgctgggtacttcgcgcgagaaaccttttaaaaaaggaggcgtcgtctcggatgtcgacaagccggcactgattcttcagaatattcaggaaatgggactggattgtgtcgtctgcatcggaggaaacggaacgcagaaaactgccgctaaatttgccgcaatgggcgtcaacatcgtatcggtccccaaaaccattgataatgatatttggggaacggatatttcctttggatttgactccgccgtgagcatcgctacggatgccatcgaccgcttgcattctaccgccagctcgcacaaaagggtgatggttattgaagtgatggggcataaagccggctggattgccctgtattcgggcatggcgggtggcggcgacgtcattcttgtccccgaaatcccttacaacatcaagaatataggaaatacaatcctcgaaaggctgaaaaaaggcaaaccctattccatcgtagtggtggcagaaggcatcctgacggatggccggaaacgtgccgcggaatacatcgcacaggaaatagaatatgaaacgggcatcgaaacacgtgaaaccgtattgggatatattcagcgtggcggttcgcctactcctttcgaccgtaacctgtctacccgcatgggaggacacgcgacagaattgattgccaatggacaattcggacgtatgattgccttaaaaggagatgacatttcgtctatccctcttgaagaagttgccggtaaattgaagttggtaactgaagatcacgatttagtgattcagggccgccgcatggggatttgtttcggttaa

SEQ ID NO: 112926 - protein, 336 aa, Bacteroides thetaiotaomicron
MRIGILTSGGDCPGINATIRGVCKTAINHYGMEVIGIHSGFQGLLTKDIESFTDKSLSGLLNQGGTMLGTSREKPFKKGGVVSDVDKPALILQNIQEMGLDCVVCIGGNGTQKTAAKFAAMGVNIVSVPKTIDNDIWGTDISFGFDSAVSIATDAIDRLHSTASSHKRVMVIEVMGHKAGWIALYSGMAGGGDVILVPEIPYNIKNIGNTILERLKKGKPYSIVVVAEGILTDGRKRAAEYIAQEIEYETGIETRETVLGYIQRGGSPTPFDRNLSTRMGGHATELIANGQFGRMIALKGDDISSIPLEEVAGKLKLVTEDHDLVIQGRRMGICFG

SEQ ID NO: 112927 - DNA, 1026 bp, Streptomyces coelicolor
  CDS (1)..(1026): transl_table=11
atgcgcattggtgtcctcacgtccggcggcgactgccccggcctgaacgccgtcatccggtccgtcgtgcaccgcgccgtcgtcgaccacggcgacgaggtcatcggtttccgggacggctggaagggcctcctggagtgcgactacctcaagctcgacctcgacgcggtcggcggcatcctggcgcgcggcggcaccatcctcggctcctcccgggtccgacccgaacacctgcgggacggcgtggagcgggcccggggacacgtcgaggaactcggcctcgacgcgatcatcccgatcggcggcgagggcacgctgaaggcggcccggctgctgtccgacaacggcctgccgatcgtgggcgtgccgaagaccatcgacaacgacatagcggtcaccgacgtcaccttcggcttcgacaccgcggtgaccgtcgccaccgaggccctggaccggctgaagaccaccgccgagtcccaccagcgggtgctgatcgtcgaggtcatgggccggcacaccggctggatcgcgctgcactcgggcatggccgcgggtgcgcacgccgtcgtcgtcccggagcggcccttcgacatcgacgagctgaccgcgaaggtcggggagcgtttctccgcgggcaagcggttcgcgatcgtggtggccgcggagggtgccaagccgaaggccgggaccatggacttcgacgagggcggcaaggacgtctacggccacgagcgcttcgccgggatcgcccgccagctctccatcgagctggaggagcggctcggcaaggaggcccggccggtgatactcgggcacgtccagcgcggcggcacgccgacggcgtacgaccgggtgctggcgacgcggttcgggtggcacgcggtggaggcggtgcaccgcggggagttcgggaagatgacggccctgcgcgggacggacatcgagatggtgtcgctcgccgacgcggtggagtcgttgaagacggtgccggacgcgcggtacgcggaagcggagtgtgttctctga

SEQ ID NO: 112928 - protein, 341 aa, Streptomyces coelicolor
MRIGVLTSGGDCPGLNAVIRSVVHRAVVDHGDEVIGFRDGWKGLLECDYLKLDLDAVGGILARGGTILGSSRVRPEHLRDGVERARGHVEELGLDAIIPIGGEGTLKAARLLSDNGLPIVGVPKTIDNDIAVTDVTFGFDTAVTVATEALDRLKTTAESHQRVLIVEVMGRHTGWIALHSGMAAGAHAVVVPERPFDIDELTAKVGERFSAGKRFAIVVAAEGAKPKAGTMDFDEGGKDVYGHERFAGIARQLSIELEERLGKEARPVILGHVQRGGTPTAYDRVLATRFGWHAVEAVHRGEFGKMTALRGTDIEMVSLADAVESLKTVPDARYAEAECVL

SEQ ID NO: 112929 - DNA, 966 bp, Aquifex aeolicus
  CDS (1)..(966): transl_table=11
atgaggataggaattcttaccgccgggggtgacgcccccggtatgaatgccgtaatcagggctgttgtgaggagcgccgaaagggaaggacacgaagtaatcggcataaagagaggctataaaggattaatagaaggagattttattaaactcacctccagagacgtggggggaattctggacaggggaggaacaatactcctgtcctcaagggaccccagatacaaaaaactcgagtacagggagaaggcttataaaaacctaaatgaacagggtatagaggctttaataattctcgggggtgagggaacacttgcgggtgcaaaactcaccgcggaagaaacgggaattccagtaataggcgttccctgtaccatagacaacgacgttggtggaactgagtactgcataggctacgacacagccctcaggaacgccgttgacgcgatagacaagataagggacaccgcaagctctcacgagaggattttcatagtagaggttatgggaagaaacagagggtttatagcagttgaggctggactcgccacgggtgctgaactcatactcattcccgaagagagattcccgagggaacaaatccccgaggagatagaaaaggctaagaaactggggaaactccacttcataatagtcctcgcagaaggatattgccgtgcaaaggaactggaagacttccttctggaaaagatcggtgataagtacggggagatacgctcaaccgttctgggacatatccagagaggaggaataccaacccactttgacaggataatgggaacaaagttcggagttgtggcttatgagagtctcatcgcaggagaacgctcaggatttgttgcctacgaaaagggcaagttttacatagaggacttcgaaaaagctcaggaatacaaaccaatagacagggaagcttacaaactaaacacgagactggctatataa

SEQ ID NO: 112930 - protein, 321 aa, Aquifex aeolicus
MRIGILTAGGDAPGMNAVIRAVVRSAEREGHEVIGIKRGYKGLIEGDFIKLTSRDVGGILDRGGTILLSSRDPRYKKLEYREKAYKNLNEQGIEALIILGGEGTLAGAKLTAEETGIPVIGVPCTIDNDVGGTEYCIGYDTALRNAVDAIDKIRDTASSHERIFIVEVMGRNRGFIAVEAGLATGAELILIPEERFPREQIPEEIEKAKKLGKLHFIIVLAEGYCRAKELEDFLLEKIGDKYGEIRSTVLGHIQRGGIPTHFDRIMGTKFGVVAYESLIAGERSGFVAYEKGKFYIEDFEKAQEYKPIDREAYKLNTRLAI

SEQ ID NO: 112931 - DNA, 2427 bp, Aspergillus fumigatus
  CDS (1)..(2427)
atgagctcaacacaagcacccgtcgagccacccaagagacgccgcattggtgtcctcacctcgggtggtgatgcccccggtatgaacggagccgtacgggccgttgtccgtatggccatttactccgactgcgaagcgtacgcagtgttcgaaggttatgagggattagttcatggtggccatatgattcgtcagctgcactgggaagatgttcgtggctggctgtccaagggtggtacactgatcggatctgctcggagcatggcttttcgtgaacgtgctggacgtctcaaggctgctaagaacatggtgctccgtggaatcgatgctctggttgtctgcggtggtgacggaagtctgaccggggcagacgtcttccgttcggaatggcccggtttgctggaggagctggtcaagaatggtgaattgacggaggaacagatcgaaccgtacaaggttttgaacattgttggcttggttggttcaattgacaacgacatgtccggcactgacgccacgatcggctgctattcctctctgacacgaatttgcgatgccgtcgatgatgttttcgatactgcgttttcccaccagcgaggtttcgttatcgaggttatggggcgacactgcggttggttagctttgatgtctgcgatcagcaccggcgcggactggttgttcattccggaaatgcctcctcgtgacgggtgggaggatgacatgtgctcgatcatcaccaagaaccgcaaagaacgtggcaagcgtcgcactattgttatcgtcgccgaaggtgctcaggatcgcagtctcaacaagatttccagctcaacggtcaaggacattctcacacagcgacttggactggataccagagttactgtactaggacacactcagagaggaggaccagcatgcgcatatgaccggtggctgtccaccttgcaaggcgttgaagccgtccgggctgttctggatatgaagccggactcgccatcgccagtcattaccattcgtgagaacaagatcatgcggacaccgctggtggacgcagtgcaagaaaccaagcatgtagcgaagctcatccatgacaaggactttgaggcagcgatgagactgcgggacgccgaatttaaagaatatcactttgcctatcgcaacactgccacacctgatcatcccaagatgatcctccctcaagacaagagaatgagaattgccatcatccacgtcggtgccccggctggcggcatgaaccaagccacccgcgccgctgtcggttactgcctcactcgtggacacaccccgcttgcgattcacaacggtttccccggcctttgccgtcaccatgatgatcaacccgtcggctctgttcgtgaagtcaagtggctggagtctgatgcttgggttaacgaaggtggatcggatattggcacaaaccgtagcctaccgtccgaggatttcgagaccactgccatgtgcttcgagaagtacaagtttgacgcactgttcgtggtcggtggtttcgaggcttttacagcagtcagtcagctccgtcaggcccgcgataagtatcccgctttcaagattccgatggttgtgttgcccgctacgatttcgaacaatgtgcctggaaccgagtactcgctgggaagcgacacctgtctcaacactttgattgatttctgcgacgccatccgccagtcagcgtcgtcctctcggcgtcgtgtcttcgtcatcgagacacaaggtggtaagtcgggctacatcgccactaccgctggtctcgccgtcggcgctacagccgtgtacattcccgaagagggcatagacattaagatgctctcgaacgacattgacttcctgcgggagaactttgcccgtgataagggagccaaccgtgcaggaaagctcatcctgcgcaatgaatgtgcctccagcacctataccacacaggtcatcgccgacatcttcaaggaggaggccaagggtcggttcgagtctcggtcggcggtccctggccacttccagcaaggaggtaagccatcgccgatggaccgtatccgcgctctccggatggcggtcaagtgtatgctgcatctcgaaaactacgcaggcaagtcgcgcgacgagatagcagcggacccaatgtcggcggcggtcatcggtatcaagggctcgcaggtgttgttctccgctatgggcggcgaggacggtctggaggcgacggagacggattgggcacgccggcgtcccaagacggagttctggctggagcttcagaactatgttaacgtcctgtctggccgtgcttctgcgggaaagcccttgtggtcatgctatgagagtaagcacttccccagctgttgtcgcctttacaatactgacttgtctatagacattgatccttcggcgctcacttcatcttag

SEQ ID NO: 112932 - protein, 808 aa, Aspergillus fumigatus
MSSTQAPVEPPKRRRIGVLTSGGDAPGMNGAVRAVVRMAIYSDCEAYAVFEGYEGLVHGGHMIRQLHWEDVRGWLSKGGTLIGSARSMAFRERAGRLKAAKNMVLRGIDALVVCGGDGSLTGADVFRSEWPGLLEELVKNGELTEEQIEPYKVLNIVGLVGSIDNDMSGTDATIGCYSSLTRICDAVDDVFDTAFSHQRGFVIEVMGRHCGWLALMSAISTGADWLFIPEMPPRDGWEDDMCSIITKNRKERGKRRTIVIVAEGAQDRSLNKISSSTVKDILTQRLGLDTRVTVLGHTQRGGPACAYDRWLSTLQGVEAVRAVLDMKPDSPSPVITIRENKIMRTPLVDAVQETKHVAKLIHDKDFEAAMRLRDAEFKEYHFAYRNTATPDHPKMILPQDKRMRIAIIHVGAPAGGMNQATRAAVGYCLTRGHTPLAIHNGFPGLCRHHDDQPVGSVREVKWLESDAWVNEGGSDIGTNRSLPSEDFETTAMCFEKYKFDALFVVGGFEAFTAVSQLRQARDKYPAFKIPMVVLPATISNNVPGTEYSLGSDTCLNTLIDFCDAIRQSASSSRRRVFVIETQGGKSGYIATTAGLAVGATAVYIPEEGIDIKMLSNDIDFLRENFARDKGANRAGKLILRNECASSTYTTQVIADIFKEEAKGRFESRSAVPGHFQQGGKPSPMDRIRALRMAVKCMLHLENYAGKSRDEIAADPMSAAVIGIKGSQVLFSAMGGEDGLEATETDWARRRPKTEFWLELQNYVNVLSGRASAGKPLWSCYESKHFPSCCRLYNTDLSIDIDPSALTSS

SEQ ID NO: 112933 - DNA, 2352 bp, Aspergillus niger
  CDS (1)..(2352)
atggctcccccccaagctcccgtgcaaccgcccaagagacgccgcatcggtgtcttgacctctggtggcgatgctcccggtatgaacggtgtcgtccgggccgtcgtccggatggctatccactccgactgtgaggctttcgccgtctacgaaggttacgagggtctcgtcaatggcggcgacatgatccgtcagcttcactgggaggatgttcgcggctggttgtcccgtggtggtaccttgatcggttccgcccgctgcatgaccttccgtgagcgccccggtcgtctgcgggctgccaagaacatggtcctccgtggcattgacgcccttgtcgtctgtggtggtgatggcagtttgactggtgccgacgtttttcgttccgagtggcccggtctgttgaaggaattggtcgagacgggcgagttgaccgaagagcaggtcaagccataccagattctgaacatcgtcggtttggtgggttcgatcgataacgacatgtccggcaccgacgccaccatcggttgctactcctccctcactcgcatctgtgacgccgtcgacgacgtcttcgatactgccttttcccaccagcgtggattcgtcattgaggtcatgggtcgtcactgcggttggctggccttgatgtctgctatcagtaccggtgccgactggctgttcgtgcccgagatgccgcccaaggacggatgggaggatgacatgtgcgctatcattaccaagaacagaaaggagcgtggaaagcgtaggacgatcgtcatcgtggccgagggtgcccaggatcgccatctcaacaagatctcgagttcgaagatcaaggatattttgacggagcggttgaacctggatacccgtgtgactgtgttgggtcacactcagagaggtggagccgcctgtgcgtacgaccgctggctgtccacactgcagggtgtcgaggctgtccgcgcggtgctggacatgaagcccgaagccccgtccccggtcatcaccatccgtgagaacaagatcttgcgcatgccgttgatggacgccgtgcagcacaccaagactgtcaccaagcacattcagaacaaggagttcgccgaagccatggccctccgcgactcggaattcaaagagtaccacttttcctacatcaacacttccacgcccgaccacccgaagctgctcctcccagagaacaagagaatgcgcatcggtattattcacgttggcgcccccgctggtggtatgaaccaggctacccgcgcggccgttgcctactgcctgactcgtggccacacccccctggccattcacaacggtttccccggtctgtgccggcactatgatgacaccccgatctgctctgtgcgcgaggtggcatggcaggaatcggacgcctgggtcaacgagggtggttcggatatcggtaccaaccgtggtctgcccggcgatgacctcgcgaccacggcgaagagcttcaagaagttcggattcgatgcgttgttcgtcgtgggtggatttgaggcgttcaccgccgtcagccagcttcgccaggcgcgcgagaagtaccccgaattcaagattcccatgaccgtgctgccggcgaccatttccaacaacgtgccgggcacagaatactctctgggtagcgacacctgccttaacaccttgatcgacttctgcgacgccatccgccagtcggcctcgtcctctcgtcgccgtgtgttcgtcatcgagacgcagggtggcaagtcgggttacatcgccacgacggctggtctgtcggtgggcgcggtagccgtgtacattcccgaggagggcatcgacattaagatgctggcccgcgacattgacttcctgcgtgacaactttgcgcgcgacaagggagcgaaccgcgccggtaagatcatcctgcgtaacgagtgcgcgtccagcacgtacacgacacaggtggtggccgacatgatcaaggaggaagccaagggacgtttcgagagtcgtgcggcggtgccgggacacttccagcagggtggcaagccgtcgccgatggaccgtatccgggcgttgcggatggccaccaagtgtatgctgcacctggagagctatgcgggcaagtcggcggatgagattgcggccgatgagctgtctgcgtcggtcattggtatcaagggctcgcaggtgttgttctcgccgatgggtggagagaccggcctggaggcgaccgagacggactgggcgcgccgtcgacccaagacggagttctggctggagctgcaggacacggtgaacattctgtcgggacgggcgagcgtgaacaacgcgacgtggagttgctatgagaatgcttaa

SEQ ID NO: 112934 - protein, 783 aa, Aspergillus niger
MAPPQAPVQPPKRRRIGVLTSGGDAPGMNGVVRAVVRMAIHSDCEAFAVYEGYEGLVNGGDMIRQLHWEDVRGWLSRGGTLIGSARCMTFRERPGRLRAAKNMVLRGIDALVVCGGDGSLTGADVFRSEWPGLLKELVETGELTEEQVKPYQILNIVGLVGSIDNDMSGTDATIGCYSSLTRICDAVDDVFDTAFSHQRGFVIEVMGRHCGWLALMSAISTGADWLFVPEMPPKDGWEDDMCAIITKNRKERGKRRTIVIVAEGAQDRHLNKISSSKIKDILTERLNLDTRVTVLGHTQRGGAACAYDRWLSTLQGVEAVRAVLDMKPEAPSPVITIRENKILRMPLMDAVQHTKTVTKHIQNKEFAEAMALRDSEFKEYHFSYINTSTPDHPKLLLPENKRMRIGIIHVGAPAGGMNQATRAAVAYCLTRGHTPLAIHNGFPGLCRHYDDTPICSVREVAWQESDAWVNEGGSDIGTNRGLPGDDLATTAKSFKKFGFDALFVVGGFEAFTAVSQLRQAREKYPEFKIPMTVLPATISNNVPGTEYSLGSDTCLNTLIDFCDAIRQSASSSRRRVFVIETQGGKSGYIATTAGLSVGAVAVYIPEEGIDIKMLARDIDFLRDNFARDKGANRAGKIILRNECASSTYTTQVVADMIKEEAKGRFESRAAVPGHFQQGGKPSPMDRIRALRMATKCMLHLESYAGKSADEIAADELSASVIGIKGSQVLFSPMGGETGLEATETDWARRRPKTEFWLELQDTVNILSGRASVNNATWSCYENA

SEQ ID NO: 112935 - DNA, 960 bp, Bacillus cereus
  CDS (1)..(960): transl_table=11
atgaaacgtattggtgtattaacaagtggtggagattcacctggtatgaatgctgccattcgtgcagttgttcgtaaagcgattttccatgatattgaagtatatggtatttaccatggatacgctggattaatttctggtcacattgaaaaattagaactaggttctgttggcgatattatccaccgcggtggtacgaaattatatacagcaagatgtcctgagtttaaagacccagaagtacgactaaaaggtatcgagcaattaaagaaacacggtatcgaaggacttgttgttattggtggagatggttcttaccaaggcgctaaaaaattaactgaacaaggattcccatgtgttggtgtaccaggtacaattgacaatgatatccctggaacagacttcacaattggtttcgatacagctttaaacactgttattgatgcaattgataaaattcgtgacacagctacatctcatgaacgtacatatgttatcgaagtaatgggacgtcacgctggtgatatcgcattatgggctggtttagctgatggtgcggaaacaatcttaattccagaagaagagtatgacatggaagatgttatcgctcgtctgaagcgcggtagtgaacgtggtaaaaaacacagtattatcgttgtagctgaaggtgttggaagtgcaattgacatcggtaagcacattgaagaagcaacaaactttgatactcgcgtaactgtattaggtcacgtacaacgtggtggatcaccaagtgcacaagaccgtgtattagcaagccgtcttggtgcaagagcagttgaattattaattgctggtaaaggtggacgttgtgtaggtattcaagataacaaacttgttgatcatgatattatcgaagcgttagctcaaaagcatacaatcgataaagatatgtatcaattatctaaagaattatccatctaa

SEQ ID NO: 112936 - protein, 319 aa, Bacillus cereus
MKRIGVLTSGGDSPGMNAAIRAVVRKAIFHDIEVYGIYHGYAGLISGHIEKLELGSVGDIIHRGGTKLYTARCPEFKDPEVRLKGIEQLKKHGIEGLVVIGGDGSYQGAKKLTEQGFPCVGVPGTIDNDIPGTDFTIGFDTALNTVIDAIDKIRDTATSHERTYVIEVMGRHAGDIALWAGLADGAETILIPEEEYDMEDVIARLKRGSERGKKHSIIVVAEGVGSAIDIGKHIEEATNFDTRVTVLGHVQRGGSPSAQDRVLASRLGARAVELLIAGKGGRCVGIQDNKLVDHDIIEALAQKHTIDKDMYQLSKELSI

SEQ ID NO: 112937 - DNA, 960 bp, Bacillus halodurans
  CDS (1)..(960): transl_table=11
atgaagcgaattggagtgttaacgagtggaggggactctcctggcatgaatgccgccatccgtgcggttgtacgtaaggcgatctatcacggagtagaggtttatggcatttaccaagggtatgctggtttaatttcaggagatattcgaaaaatggagcttggttctgtaggtgatattatccatcgcggggggaccattttatatacggcccgttgtgaagaattcaagacacttgaagggcaaaaaaagggaattgagcaactgaagaaatttggcatcgaaggcctagttgttatcggtggggatggttcatttgcaggtgcgcaaaaattaacggagcacggattcccaacagtgggagtgccaggaacgatcgataacgatatccctggaacagactttacaattggttttgacacagctttgaatacggttattgatgcgattgataaaattcgcgatacagcaacatcgcatgatcgtacatatgtcatcgaggtcatgggacgtaatgccggtgatttagcgctttggtctggcttagcagatggagcagaaaccattgtgattcccgaagctgatcatgatattgaccaaatcatttcccgtctgcaacgaggacaagagcgagggaaaaaacatagtataatcgtcgttgctgaaggtgtaggaagtggaatggacttcggaagagaaatttcagaacgaacaggggctgagacaagggtcaccgtgctcggacacattcaacggggaggctcaccaacaggatttgatcgtgttctcgcgagtcgtcttggagcgaaagcggtagacttgcttttagaaggacaagcaggtgtaacggtcgggattgaaaataataagcttgtccatcatgacattacagaagtattgcaacgtaagcattcgattgatttggatatgtatcgtttgtcacaggaactgtccatttaa

SEQ ID NO: 112938 - protein, 319 aa, Bacillus halodurans
MKRIGVLTSGGDSPGMNAAIRAVVRKAIYHGVEVYGIYQGYAGLISGDIRKMELGSVGDIIHRGGTILYTARCEEFKTLEGQKKGIEQLKKFGIEGLVVIGGDGSFAGAQKLTEHGFPTVGVPGTIDNDIPGTDFTIGFDTALNTVIDAIDKIRDTATSHDRTYVIEVMGRNAGDLALWSGLADGAETIVIPEADHDIDQIISRLQRGQERGKKHSIIVVAEGVGSGMDFGREISERTGAETRVTVLGHIQRGGSPTGFDRVLASRLGAKAVDLLLEGQAGVTVGIENNKLVHHDITEVLQRKHSIDLDMYRLSQELSI

SEQ ID NO: 112939 - DNA, 969 bp, Bacillus macquariensis
  CDS (1)..(969): transl_table=11
atgacaattaaaaaaatagcagtattaacaagtggtggcgattctcaaggaatgaatgcagctgtacgcgcggttgttcgtagtggattgttttatggcttagaggtatatggtattcaaagaggatatcaaggacttctaaatgatgatatattctctatggatctaagaagcgtaggtgatatcatccaacgtgggggaacggtacttcaatctgcacgatgtaaagaatttatgactcctgaaggtcagcaaaagggagcggatattttacgtaaacgtggcattgatggcttagtcgttatcggtggcgatggttcttatcatggcgctaataagctaagtaagttgggaatcaatacaatggctctaccgggtaccattgataacgatatttcttatacagatttcacaataggttttgatacatctgtaagtattgttgtggacgcgatcaacaagctgagagatacgatgtcatctcatgaacgttcatccattgtagaagttatgggtagacattgtggcgatatcgcattatatgcaggtcttgcttcaggagcggagacaattattgtacctgaggtaccattcgatatggatgaaattgcagaacgtatgaagcagaatttcgctcatggtaaacgtcatagtatcgtcgtcgttgctgaaggcgcaggtaatggtgagaatgtagcgaaacaactggttgaacgctgcgaaacactagagccaagagttaccgttctcggtcatattcaacgtggaggaacaccaacgccagcagatagaaaccttgcaagccgtctgggtgatttcgctgtacgtatgcttattgcaggggaatcagctaaagcttgtggaattattagtaatgaattggttcttacagatatcgataaggtcgttaacagtaagaaagaatttaatatggaattgtatgaacttgctgcacgtctttctcaataa

SEQ ID NO: 112940 - protein, 322 aa, Bacillus macquariensis
MTIKKIAVLTSGGDSQGMNAAVRAVVRSGLFYGLEVYGIQRGYQGLLNDDIFSMDLRSVGDIIQRGGTVLQSARCKEFMTPEGQQKGADILRKRGIDGLVVIGGDGSYHGANKLSKLGINTMALPGTIDNDISYTDFTIGFDTSVSIVVDAINKLRDTMSSHERSSIVEVMGRHCGDIALYAGLASGAETIIVPEVPFDMDEIAERMKQNFAHGKRHSIVVVAEGAGNGENVAKQLVERCETLEPRVTVLGHIQRGGTPTPADRNLASRLGDFAVRMLIAGESAKACGIISNELVLTDIDKVVNSKKEFNMELYELAARLSQ

SEQ ID NO: 112941 - DNA, 960 bp, Bacillus sphaericus
  CDS (1)..(960): transl_table=11
atgaaaaaaattgctgtattaactagtggtggagatgtgcctggaatgaacgcagctattcgagcggttgttcggaaggcagcattccatggaattaatgttgtcggaattaaacatggttatgagggcttagtaaaaggttatttagaagaacttgatctaggctcagttggtggtattattcagcgtggtggtacccatttaaattctgccagatgtccagaatttaaagaagatgccgtgcaacaacaaggaattgaaaacttacgagctgccggaatagaaggtcttgttgtcattggtggtgatggttcttatagaggggctatggatctagtgaaaaaaggcttccctgctgtaggtgtaccagggactatcgataatgatgttccagggacggaatatacgataggctttgatacggcactcaatacagtagtagaatccatcgataaaatccgagacacagctacttcacatgaaaattccttcatagttgaggttatgggtcgtgatgcaggggatattgctttatgggcagggcttgctgcgggtgctgaaacagttttaattccagaagaggattatgatttagatgatattgtggcacgcttagatcgtggtgcagcacgtgggaagaagcatagtattattattgtggcagaaggtgttatgtctggaaatgaactagctaagctgatcaaagaaaagactggaaaagaaactagagtttcggtgttaggtcatattcagcgtggcggttcaccaactgcacgtgatcgcgtattggcaagtcagtttggcgcacatgcagtggagttactaatggaaggcaagtatggccgagcagtaggtattcgcaatcatcaagttattgattatgatatgcctgaggcctttgaaaagaatcatgaggcagatgtaagtctatacacgcttatgaaagaactatcaatataa

SEQ ID NO: 112942 - protein, 319 aa, Bacillus sphaericus
MKKIAVLTSGGDVPGMNAAIRAVVRKAAFHGINVVGIKHGYEGLVKGYLEELDLGSVGGIIQRGGTHLNSARCPEFKEDAVQQQGIENLRAAGIEGLVVIGGDGSYRGAMDLVKKGFPAVGVPGTIDNDVPGTEYTIGFDTALNTVVESIDKIRDTATSHENSFIVEVMGRDAGDIALWAGLAAGAETVLIPEEDYDLDDIVARLDRGAARGKKHSIIIVAEGVMSGNELAKLIKEKTGKETRVSVLGHIQRGGSPTARDRVLASQFGAHAVELLMEGKYGRAVGIRNHQVIDYDMPEAFEKNHEADVSLYTLMKELSI

SEQ ID NO: 112943 - DNA, 960 bp, Bacillus stearothermophilus
  CDS (1)..(960): transl_table=11
gtgaaacgcattggtgtgttgacaagcggcggcgactcgccgggaatgaatgcggccattcgctcggttgtccgcaaagcgatttaccacggtgtggaagtgtacggcgtttatcacgggtatgccggactgatcgccggcaacattaaaaagctggaagtcggcgatgtcggggatattatccaccgtggcggcacgatactctatacggcccgctgtccggaatttaagacggaagaaggtcagaaaaaagggatcgagcagctgaaaaagcacggcattgaagggctggtcgtcatcggcggcgacggttcgtaccaaggggcgaaaaaactgaccgagcacggctttccgtgcgtcggcgtgccggggacgattgacaacgacattccgggcactgattttacgatcgggtttgacacggcgctcaatacggtcattgatgccatcgacaaaatccgcgacacggcgacgtcgcacgagcggacgtacgtcatcgaagtgatgggccgccatgccggcgacatcgccttatggtcggggctggccggcggggcggaaacgattttaattccggaagccgattatgatatgaacgacgtcatcgcccgcttaaagcgcggccatgagcgcggcaaaaaacatagcatcatcatcgtggcggaaggagttggaagcggcgtcgacttcggccggcaaatccaggaagcgaccggctttgagacgcgtgtgacggtgcttggccacgtgcagcgcggcgggtcgcccacggcgtttgaccgcgtgctcgcgagccgcctcggcgcccgggcggtcgagctgttgctcgaaggaaaaggcgggcgctgcgtcggcatccaaaacaaccagctcgtcgaccatgacatcgcggaggcgctagccaacaaacatacgattgatcagcggatgtacgcattgtcgaaagaattgtccatttaa

SEQ ID NO: 112944 - protein, 319 aa, Bacillus stearothermophilus
MKRIGVLTSGGDSPGMNAAIRSVVRKAIYHGVEVYGVYHGYAGLIAGNIKKLEVGDVGDIIHRGGTILYTARCPEFKTEEGQKKGIEQLKKHGIEGLVVIGGDGSYQGAKKLTEHGFPCVGVPGTIDNDIPGTDFTIGFDTALNTVIDAIDKIRDTATSHERTYVIEVMGRHAGDIALWSGLAGGAETILIPEADYDMNDVIARLKRGHERGKKHSIIIVAEGVGSGVDFGRQIQEATGFETRVTVLGHVQRGGSPTAFDRVLASRLGARAVELLLEGKGGRCVGIQNNQLVDHDIAEALANKHTIDQRMYALSKELSI

SEQ ID NO: 112945 - DNA, 960 bp, Bacillus subtilis
  CDS (1)..(960): transl_table=11
atgaaacgaataggggtattaacgagcggcggggattccccgggaatgaacgcagcagttcgcgcagtagtcagaaaagcgatctatcatgacgttgaagtttacggtatttacaacggatacgcgggattgatcagcggaaagattgaaaagcttgaactcggatcagtaggcgatattatacatcgtggagggactaagctttatacggcgagatgtcctgaattcaaaacagttgaaggccgtgaaaaagggatagcaaacttgaagaagcttggtattgaaggccttgttgttatcggtggagacggttcctatatgggtgcgaaaaaattaacggaacacgggtttccatgtgtaggtgtaccgggtacaattgataatgacattccgggcactgattttacaatcggtttcgatacagctttaaatacagtaattgacgcaattgataagattcgcgatacagcgacttctcatgaacgtacatatgtaatcgaagtaatgggccgtcatgccggcgatatcgcattgtgggccggtcttgcagggggcgcagaatcgatcttaatccctgaggcagactatgacatgcacgaaatcattgcccgcttaaaacgcggccacgaacgcggcaagaagcacagtattattattgttgccgaaggtgtaggcagcggtgttgaattcgggaaacgcattgaagaagaaacaaatcttgaaactagggtatctgtattgggccatatccagcgcggaggttctccgagtgctgctgaccgtgtgttggcaagccgtctcggcgcatatgcagttgaactgctgcttgaaggaaaaggcggacgctgtgtaggtatacaaaacaataagcttgtagaccatgatattatagaaatacttgagacaaaacacacagttgagcaaaacatgtatcagctttcaaaagaactgtctatctaa

SEQ ID NO: 112946 - protein, 319 aa, Bacillus subtilis
MKRIGVLTSGGDSPGMNAAVRAVVRKAIYHDVEVYGIYNGYAGLISGKIEKLELGSVGDIIHRGGTKLYTARCPEFKTVEGREKGIANLKKLGIEGLVVIGGDGSYMGAKKLTEHGFPCVGVPGTIDNDIPGTDFTIGFDTALNTVIDAIDKIRDTATSHERTYVIEVMGRHAGDIALWAGLAGGAESILIPEADYDMHEIIARLKRGHERGKKHSIIIVAEGVGSGVEFGKRIEEETNLETRVSVLGHIQRGGSPSAADRVLASRLGAYAVELLLEGKGGRCVGIQNNKLVDHDIIEILETKHTVEQNMYQLSKELSI

SEQ ID NO: 112947 - DNA, 963 bp, Buchnera aphidicola subsp
  CDS (1)..(963): transl_table=11
atgattaaaaaaattggagttttaactagtggtggcgatgctccagggatgaatgccgcaattagaggggttgttagaacagcacttagtgaaagattagaagtatttggaatttatgatggatatttaggtctatatgaaaaccgtatggtgcaacttgatagatatagtgtatctgacatgattaacagaggtgggacatttttagggtcagctagatttgctagtttttatcaagacaaaatacgctcaattgcagtgcaaaatataaaaaaaagaaaaatagatgctcttgttgtcattggaggtgatggttcttatataggagctcaaaaattaacagaaatgggtattccatgtattagcattccaggtactatcgataatgatgtttcaggtactgattatacaataggttattttacagctttacaaacagtggttgaagctattgatcgattgcgcgacacttcttcttctcaccaacgtatttctattgtagaggtgatgggtagacattgtggagatttaacattagctgcagctattgctggtggatgcgaatttattgttttaccagaaattgactataaaaaagaagatctagttatcgagattcaagctggcattgctaagggcaaaaaacatgctattgttgccataactgaatacatttgtgatgtagaagaattagcacaatatattgaaaaaaaaactaatcgagaaactagagcgacaattcttggacatatccaaagagggggtgcacctgtagtatatgatcgtatattagcatcaagaatgggtgcatattcagttgaattattaataaaaggttatcagggaaaatgtgttggaatacaaaatgaaaaaatggtttttaacgatataaaaaacgcactaaaaaatatgaaacgtacttttaaaaaagattggttgattactgctaaaaagttatactaa

SEQ ID NO: 112948 - protein, 320 aa, Buchnera aphidicola subsp
MIKKIGVLTSGGDAPGMNAAIRGVVRTALSERLEVFGIYDGYLGLYENRMVQLDRYSVSDMINRGGTFLGSARFASFYQDKIRSIAVQNIKKRKIDALVVIGGDGSYIGAQKLTEMGIPCISIPGTIDNDVSGTDYTIGYFTALQTVVEAIDRLRDTSSSHQRISIVEVMGRHCGDLTLAAAIAGGCEFIVLPEIDYKKEDLVIEIQAGIAKGKKHAIVAITEYICDVEELAQYIEKKTNRETRATILGHIQRGGAPVVYDRILASRMGAYSVELLIKGYQGKCVGIQNEKMVFNDIKNALKNMKRTFKKDWLITAKKLY

SEQ ID NO: 112949 - DNA, 963 bp, Buchnera aphidicola subsp
  CDS (1)..(963): transl_table=11
atgataaaaaagatcggagtattaactagtggtggagatgctcctgggatgaatgctgcgattagaggtgtagtaagaacagcattgagtgaaaaattagaagtatttggtatttatgatggatatttaggtctatatgaaaatcgtatgacattgttagatagatatagtgtttctgatatgattaatagaggcggaacatttttaggatctgctcgatttcctggcttttacaaaaatgaaatacgtactattgcagtaaataatttaaataaaagaaatatagatgctcttgttgttatcggcggtgatggatcttatataggagcacaaaaattaacgaaaatgggaattccatgtattagtattccaggtacaatagacaacgatgtagcaggtactgattacacgataggttattttacagccttagagacagtggttgaagcgattgatagattaagagatacttcttcttctcatcaaagaatttctattgtagaagttatggggcgatactgcggagatttaacattagctgctgcaatagcaggtggttgcgaatttattgttcttccagaaattcattataaaaaagaagaattggtttctgaaattcaggcaggaatcgaaaaagggaaaaaacatgcaatagtcgcaataacagaatatatttgtgatgtagaaaaattagcgaaatatattgagaagaaaaccaatagagagacaagagctacaattttaggacatatccagagaggaggagcaccagtagtatatgatagaattcttgcttcaagaatgggagcatatgcagtagaattgctgatagaaggctacaaagggaaatgtgttggaatacaaaatgaaaaaatggtatttaacgacataacagatgcgttaaaaaatatgaaacgtgtttttaaaaaagattggttaattacagctaaaaagttatactaa

SEQ ID NO: 112950 - protein, 320 aa, Buchnera aphidicola subsp
MIKKIGVLTSGGDAPGMNAAIRGVVRTALSEKLEVFGIYDGYLGLYENRMTLLDRYSVSDMINRGGTFLGSARFPGFYKNEIRTIAVNNLNKRNIDALVVIGGDGSYIGAQKLTKMGIPCISIPGTIDNDVAGTDYTIGYFTALETVVEAIDRLRDTSSSHQRISIVEVMGRYCGDLTLAAAIAGGCEFIVLPEIHYKKEELVSEIQAGIEKGKKHAIVAITEYICDVEKLAKYIEKKTNRETRATILGHIQRGGAPVVYDRILASRMGAYAVELLIEGYKGKCVGIQNEKMVFNDITDALKNMKRVFKKDWLITAKKLY

SEQ ID NO: 112951 - DNA, 963 bp, Buchnera aphidicola subsp
  CDS (1)..(963): transl_table=11
atgatcaaaagaattggtgtattaacaagtgggggagatgctccagggatgaatgcagcaattagaggagtcgtaagaactgccctaagtagaaatttagaagtttttggaatatacgacggctatcttggattatatgaaaatagaatgattctgttagatagatatagcgtttctgatataattaacaaaggtggtacatttttaggttcagctcggttttctaatttttttaaaaaagatatacgatcgatagcaattaaaaatatgcaacaaagaaacattgacttcttagtagttattggaggtgatggttcatatgtaggtgcacaaaaattaacagaaatgggtttcccatgtattagcataccaggaaccattgacaatgatgtagctggtacagattatactataggatattttacagcattagaaacagttgtagaagcaattgatagattacgagatacttcttcttctcatcaaagaatttctatagtagaagttatggggcgtaattgcggtgatttaactttatcagcagctatagctggaggatgtgaatttatagtgttaccagaaattgaattcactaaagaagaattagtaaaggaaataaaaaatggtataaaaaaaggaaaaaaacatgctattgtggctattacagaatacatttgtaacgttgaaaaattagccaaatatattcaacgagaaacatgtcgtgaaactagagcaacaattttaggacatatacaaagaggtggggctccagtagtttatgatcgtattttggcatccagaatgggagagtactctgtagatatattattacagggatttcagggccgatgcataggtacgattaatgaaaaaatggtacaccatgatatttcagatgcactcaaaaatatgaaaagaccatttaaatttgattggttaaagactgctaaacagttatactaa

SEQ ID NO: 112952 - protein, 320 aa, Buchnera aphidicola subsp
MIKRIGVLTSGGDAPGMNAAIRGVVRTALSRNLEVFGIYDGYLGLYENRMILLDRYSVSDIINKGGTFLGSARFSNFFKKDIRSIAIKNMQQRNIDFLVVIGGDGSYVGAQKLTEMGFPCISIPGTIDNDVAGTDYTIGYFTALETVVEAIDRLRDTSSSHQRISIVEVMGRNCGDLTLSAAIAGGCEFIVLPEIEFTKEELVKEIKNGIKKGKKHAIVAITEYICNVEKLAKYIQRETCRETRATILGHIQRGGAPVVYDRILASRMGEYSVDILLQGFQGRCIGTINEKMVHHDISDALKNMKRPFKFDWLKTAKQLY

SEQ ID NO: 112953 - DNA, 960 bp, Clostridium acetobutylicum
  CDS (1)..(960): transl_table=11
atgaaaacaatagctgttttaacgagtggtggagatgcaccaggtatgaatgctgctataagagcggtagtaagaactgccattgaaaagggtattaatgttaagggcatacaaagagggtacagtggccttataaatggcgaaatatttgatatgaatagacacagcgtatcagatataatacaacgaggaggcactattttaagaacagcacgttgtccagaatttcttaaagaagaagttagacaaaaggcagcaaatgttttaagggtttttggtatagatggtctcgttgtaataggtggaaatggttcttttatgggagcacaaaagctttctaagcttggagtaaagacggttggacttccgggaacaatcgataatgatcttccatatacagattacaccataggttttgatactacacttaatactgtattagacgcaattaataaacttagagatacttctacttctcatgaaagagtaagtataatcgaggttatgggaagagattgcggtgatatagctctgttttctggaatagctggaggagcagaaagtgtaataatacctgaaattggttatgattttaatgagctttgtaaaaacatcttagaaggaaaattaagaggaaaaatgcataatcttataatacttgcagaaggtgttggaggagcagctgagcttgcaaaaaaagttgaagaagttactggtatagaaaccagatccacaatacttggtcatattcaaagaggaggaagtccatcagcctttgatagaatgcttgcatctagaatgggagtaaaggctgtagaagtcttaatggaaggaaaaacctctagagttataggtattaaagaaggaaaaataatggatcaagatattgatgaggctttagcagttccaagaagttttaataaagagttatatgatatagcaaatatgctttcaaaatag

SEQ ID NO: 112954 - protein, 319 aa, Clostridium acetobutylicum
MKTIAVLTSGGDAPGMNAAIRAVVRTAIEKGINVKGIQRGYSGLINGEIFDMNRHSVSDIIQRGGTILRTARCPEFLKEEVRQKAANVLRVFGIDGLVVIGGNGSFMGAQKLSKLGVKTVGLPGTIDNDLPYTDYTIGFDTTLNTVLDAINKLRDTSTSHERVSIIEVMGRDCGDIALFSGIAGGAESVIIPEIGYDFNELCKNILEGKLRGKMHNLIILAEGVGGAAELAKKVEEVTGIETRSTILGHIQRGGSPSAFDRMLASRMGVKAVEVLMEGKTSRVIGIKEGKIMDQDIDEALAVPRSFNKELYDIANMLSK

SEQ ID NO: 112955 - DNA, 960 bp, Clostridium tetani
  CDS (1)..(960): transl_table=11
atgagaaaaatagctgttttaacaagcggaggagatgcacctggaatgaatgcagccataagagctgtagtaagaacaggtttagataaaggaataacggtattaggaatagagagaggttttgatggtcttttaaatggagaaatatttgaaatgacgagaagaagtgtagcagacataattcaaagaggtggaactatactaagaacggctaggtccgaagaatttaaaacagaagagggtcagaaaaaggccactgatatattaagagtatttggagtagaggggttagttgtaattggaggagatgggtcttttcaaggagcaaaatccttatctgaattaggggtaaaaactataggtataccaggaaccatagacaatgatttagcttacacagattatacaataggatttgatactgctgttaatactgtgttagatgccataaataaattaagagatacttctacatctcatggtagagctagtgtagtggaggtaatgggaagaaattgtggtgatatagcattatacgcaggtctagctggtggtgctgaaagtataattgttccagaattaaggtttgatatagacaaattatgtaaaactatattagaaggtaagaaaaacgggaaaatgcacaatctaataatagtagcagaaggagcaggaaaagctaatgatatagctaaaacaattgaaaaggtaaccggtgttggaacaagagctactgttttaggacacatacaaagaggaggaagccctacagctaacgatagaatattagcctcaagaatgggaaacagggcagtagaattattgttggaagaaaagtcctctagggtagttggaataaatgataatagaattgtggatatggatatacatgaggctttatctattgaaggtaaatttgatgagaaactatatgaaatagctaaggctttatcatattaa

SEQ ID NO: 112956 - protein, 319 aa, Clostridium tetani
MRKIAVLTSGGDAPGMNAAIRAVVRTGLDKGITVLGIERGFDGLLNGEIFEMTRRSVADIIQRGGTILRTARSEEFKTEEGQKKATDILRVFGVEGLVVIGGDGSFQGAKSLSELGVKTIGIPGTIDNDLAYTDYTIGFDTAVNTVLDAINKLRDTSTSHGRASVVEVMGRNCGDIALYAGLAGGAESIIVPELRFDIDKLCKTILEGKKNGKMHNLIIVAEGAGKANDIAKTIEKVTGVGTRATVLGHIQRGGSPTANDRILASRMGNRAVELLLEEKSSRVVGINDNRIVDMDIHEALSIEGKFDEKLYEIAKALSY

SEQ ID NO: 112957 - DNA, 1643 bp, Corynebacterium efficiens
  CDS (326)..(1366): transl_table=11
agcgcgccggcagccaccagtgggatcgtgcccagcggacggatgccggattcacggcggtcagccacccgccgatgagacctgcagcgacaacggtggcggtgctgacctggtcagcgtctttgagtttcatatccatgtcagacagtctaaccactctctccgacgcgtccgaacatgctggggtggcggacaccatgtccgttcgggcgttgccccgacgggggaaaatcgcaggcagatgtgtccgatgtgggataaacccaccggttcgggcgtgtcttcgggatcaatggcacagcattaaccgtgtggggggtttaatatgggagccatgcgaattgccactctcacgtcaggcggcgactgccccggactcaatgctgtcatcaggggaatcgtccgtaccgcaagtaatgaattcggttccaccgtcgtgggttatcaggacggctgggagggcctgctggcggaccgacgtgttcagctctatgacgatgaggacatcgaccgcatcctgctccgcggtggaacaatcctgggcaccggtcgtctccaccccgacaagttcagagccggaatcgaccaggtcaaggcgaatctcgccgatgcgggaattgacgcactcatcccgatcggtggcgagggcaccctcaagggagcgaagtggctcgccgacaacggcatccccgtggtcggtgtcccgaaaaccatcgacaatgatgtcaacggcacggatttcaccttcggtttcgattccgcggtctctgtggccaccgacgccatcgaccggctgcacaccacggcggaatcccacaaccgtgtgatgatcgtcgaggtcatgggccgccacgtcggttggatcgcactgcatgccggcatggccggtggagcccactacaccgtcatccccgaggtgcccttcgacatctcggagatctgcaagcgtatggaacgtcgcttccagatgggggagaagtacggcatcatcgtcgtcgcggagggtgccctgcccaaggagggaaccatggagctgcgtgagggggaggtggatcagttcggtcacaagaccttcaccggcatcggccagcagatcgccgacgaggtgcacaggcgtctgggtcatgatgtccgcaccacggtcctgggccatatccagcgtggtggcacccccaccgccttcgaccgtgtcctggccacccggtacggtgtccgcgccgcgcgtgcctgccacgagggtcagttcaacaccgtggtcgcgctcaagggggagcgcatccggatgatctccttcgatgaggccgtgggcaccctgaagaaggtgccgatggaacgctgggtgaccgcccaggctatgttcggttagtcaggccgcattcccggttccgcgcccgcggggccgggttttttcatgccccggaacacatcggtatgaaatcgtgatatgcattacttgacggggaagtgggggatccgtcacctcgcgttgtccaactacagcccgcagcgcctgcgggaattcttcgagcaatccgccgattccccggcccgtcccgtcgccgtccaaccgcagtacaatctgctggcccgccgggattatgagaccggtatccgcccggtcgtggacgagttcggtcccgcgg

SEQ ID NO: 112958 - protein, 346 aa, Corynebacterium efficiens
MGAMRIATLTSGGDCPGLNAVIRGIVRTASNEFGSTVVGYQDGWEGLLADRRVQLYDDEDIDRILLRGGTILGTGRLHPDKFRAGIDQVKANLADAGIDALIPIGGEGTLKGAKWLADNGIPVVGVPKTIDNDVNGTDFTFGFDSAVSVATDAIDRLHTTAESHNRVMIVEVMGRHVGWIALHAGMAGGAHYTVIPEVPFDISEICKRMERRFQMGEKYGIIVVAEGALPKEGTMELREGEVDQFGHKTFTGIGQQIADEVHRRLGHDVRTTVLGHIQRGGTPTAFDRVLATRYGVRAARACHEGQFNTVVALKGERIRMISFDEAVGTLKKVPMERWVTAQAMFG

SEQ ID NO: 112959 - DNA, 1041 bp, Corynebacterium glutamicum
  CDS (1)..(1041): transl_table=11
atggaagacatgcgaattgctactctcacgtcaggcggcgactgccccggactaaacgccgtcatccgaggaatcgtccgcacagccagcaatgaatttggctccaccgtcgttggttatcaagacggttgggaaggactgttaggcgatcgtcgcgtacagctgtatgacgatgaagatattgaccgaatcctccttcgaggcggcaccattttgggcactggtcgcctccatccggacaagtttaaggccggaattgatcagattaaggccaacttagaagacgccggcatcgatgcccttatcccaatcggtggcgaaggaaccctgaagggtgccaagtggctgtctgataacggtatccctgttgtcggtgtcccaaagaccattgacaatgacgtgaatggcactgacttcaccttcggtttcgatactgctgtggcagtggctaccgacgctgttgaccgcctgcacaccaccgctgaatctcacaaccgtgtgatgatcgtggaggtcatgggccgccacgtgggttggattgctctgcacgcaggtatggccggcggtgctcactacaccgttattccagaagtacctttcgatattgcagagatctgcaaggcgatggaacgtcgcttccagatgggcgagaagtacggcattatcgtcgttgcggaaggtgcgttgccacgcgaaggcaccatggagcttcgtgaaggccacattgaccagttcggtcacaagaccttcacgggaattggacagcagatcgctgatgagatccacgtgcgcctcggccacgatgttcgtacgaccgttcttggccacattcaacgtggtggaaccccaactgctttcgaccgtgttctggccactcgttatggtgttcgtgcagctcgtgcgtgccatgagggaagctttgacaaggttgttgctttgaagggtgagagcattgagatgatcacctttgaagaagcagtcggaaccttgaaggaagttccattcgaacgctgggttactgcccaggcaatgtttggatag

SEQ ID NO: 112960 - protein, 346 aa, Corynebacterium glutamicum
MEDMRIATLTSGGDCPGLNAVIRGIVRTASNEFGSTVVGYQDGWEGLLGDRRVQLYDDEDIDRILLRGGTILGTGRLHPDKFKAGIDQIKANLEDAGIDALIPIGGEGTLKGAKWLSDNGIPVVGVPKTIDNDVNGTDFTFGFDTAVAVATDAVDRLHTTAESHNRVMIVEVMGRHVGWIALHAGMAGGAHYTVIPEVPFDIAEICKAMERRFQMGEKYGIIVVAEGALPREGTMELREGHIDQFGHKTFTGIGQQIADEIHVRLGHDVRTTVLGHIQRGGTPTAFDRVLATRYGVRAARACHEGSFDKVVALKGESIEMITFEEAVGTLKEVPFERWVTAQAMFG

SEQ ID NO: 112961 - DNA, 2367 bp, Drosophila melanogaster
  CDS (1)..(2367)
atgaattccgagattaatcaacgattcctggcccgcggctcgcagaaggacaaaggactggcggtcttcaccagcggcggggattcccagggcatgaatgccgccgtgcgagcctgtgtccgtatggccatctatttgggctgcaaggtctacttcattcgtgaaggctaccagggcatggtggatggtggcgactgcatccaggaagccaactgggcctcagtctcatccattatccatcgtggtggcaccatcattggctccgcccgttgccaggacttccgtgagcgtcagggtcgcttgaaagccgctaacaacctgattcagcgaggaatcaccaatctggtggtcattggaggcgatggctccctcacgggcgccaatctgttccgtcaggagtggtccagcctgttggacgagctggtcaagaacaagaccattaccaccgagcagcaggagaagttcaatgtcctgcacatcgttggattggttggctccatcgacaacgatttctgtggcactgacatgaccatcggcacggacacggcactacatcgcatcatcgaggcaatcgatgccatctccagtacagcctactcccatcagcgcaccttcatcatggaggtcatgggtcgtcattgcggctatttagctcttgtgggtggactggcgtgcgaggcggatttcatattcattcccgaaatgccgcccaaggtcgattggccagacaggctctgctctcagctggcccaggagcgatctgctggccagcgtctgaacatcgtgattgtggccgagggagccatggatcgcgagggtcatcccatcacagccgaggatgtaaagaaggtgatcgacgagcgtctgaagcacgatgcccgcatcactgtcttgggtcacgtgcagcgcggtggcaatcccagtgccttcgatcgtattttggcttgccgcatgggagctgaggccactttggccctgatggaggccaccaaggactcggtgccagtggtcatctctctggacggcaaccaggcggttcgcgtgccgctgatggagtgcgtagagcgcacccaggctgtggccaaggccatggcggagaaacgctgggcggatgccgtcaagctgcgcggacgctccttcgagcggaatctggagacctacaagatgctgacgcgcttgaagccgcccaaggagaacttcgacgccgatggcaagggaatcgaaggataccgcctagctgtgatgcatattggtgctccggcttgcggtatgaatgccgctgtgcgcagcttcgtgcgcaatgccatctaccgcggtgatgtggtttatggaatcaacgacggtgtcgagggtctgattgccggaaatgtccgcgagctgggctggtcggatgtctcaggatgggttggtcagggtggcgcctacttgggtaccaaacgcacactgcctgagggcaagttcaaggagatcgccgctcgtctcaaggagtttaagatccagggtctcctgatcattggtggctttgagagttaccatgccgccggacagatcgccgatcagcgggacaactacccacagttctgcatccccattgtggttattccatcgacgatttcgaacaatgtgcccggcacagaattttctctgggatgcgacaccggtttaaatgagattacggagatttgcgaccgtatccgtcagtcggcacagggaaccaagcgccgagtgttcgtcattgagacgatgggtggctactgtggctatttggccaccttggccggcttggccggcggagctgatgccgcctacatctacgaggagaagttctccatcaaagacctgcagcaggatgtctaccacatggcctccaagatggccgagggcgtctcccgcggtctaatcctgcgaaacgagaaggctagcgagaactacagcacggacttcatttaccgcctgtactcggaggagggcaagggcctcttcacctgccgtatgaacatcctgggtcacatgcagcagggcggctcacccactcccttcgaccgcaacatgggcaccaaaatggccgccaagtgtgtcgactggctggccgcccagatcaaggcgaacatcgacgccaacggcgtagtcaactgcaagtccccggacaccgccacgctgctgggaatcgtgtcgcggcagtaccgcttctcaccgctggtcgacctcattgcagagacgaacttcgatcaacgcatcccgaagaagcagtggtggctgcgcctgcgtcccctgctgcgcatcctggccaagcacgattccgcctacgaggaggagggtatgtacatcaccgtcgaggaggagtgtgacactgacgccgtcgcctaa

SEQ ID NO: 112962 - protein, 788 aa, Drosophila melanogaster
MNSEINQRFLARGSQKDKGLAVFTSGGDSQGMNAAVRACVRMAIYLGCKVYFIREGYQGMVDGGDCIQEANWASVSSIIHRGGTIIGSARCQDFRERQGRLKAANNLIQRGITNLVVIGGDGSLTGANLFRQEWSSLLDELVKNKTITTEQQEKFNVLHIVGLVGSIDNDFCGTDMTIGTDTALHRIIEAIDAISSTAYSHQRTFIMEVMGRHCGYLALVGGLACEADFIFIPEMPPKVDWPDRLCSQLAQERSAGQRLNIVIVAEGAMDREGHPITAEDVKKVIDERLKHDARITVLGHVQRGGNPSAFDRILACRMGAEATLALMEATKDSVPVVISLDGNQAVRVPLMECVERTQAVAKAMAEKRWADAVKLRGRSFERNLETYKMLTRLKPPKENFDADGKGIEGYRLAVMHIGAPACGMNAAVRSFVRNAIYRGDVVYGINDGVEGLIAGNVRELGWSDVSGWVGQGGAYLGTKRTLPEGKFKEIAARLKEFKIQGLLIIGGFESYHAAGQIADQRDNYPQFCIPIVVIPSTISNNVPGTEFSLGCDTGLNEITEICDRIRQSAQGTKRRVFVIETMGGYCGYLATLAGLAGGADAAYIYEEKFSIKDLQQDVYHMASKMAEGVSRGLILRNEKASENYSTDFIYRLYSEEGKGLFTCRMNILGHMQQGGSPTPFDRNMGTKMAAKCVDWLAAQIKANIDANGVVNCKSPDTATLLGIVSRQYRFSPLVDLIAETNFDQRIPKKQWWLRLRPLLRILAKHDSAYEEEGMYITVEEECDTDAVA

SEQ ID NO: 112963 - DNA, 963 bp, Enterobacter cloacae
  CDS (1)..(963): transl_table=11
atgattaagaaaatcggtgtgttgacaagcggcggtgatgcgccgggcatgaacgcggcaattcgtggtgttgtccgtgcagcgctgacggaaggcctggaagtttttggcgtttatgacggttatctgggcctgtatgaagatcgtatggttcagctcgaccgttacagcgtgtctgacatgatcaaccgtggcggtactttcctcggttccgcgcgcttcccggaattccgtgatgaacacgttcgcgaagtggctatcgaaaacatgaagaaacgcggcctggacgccctggtggttatcggtggtgacggctcctacatgggtgcaaaacgtctgaccgaaatgggcttcccgtgcatcggtctgccgggcaccatcgacaacgacatcaaaggtactgactacactatcggcttctttactgcactgggtaccgttgttgaagcgattgaccgtctgcgtgacacctcttcttctcaccagcgtatctctatcgttgaagtgatgggccgttactgcggcgacctgacgctggcggcagccattgcgggcggttgcgaatttatcgtcgtgccggaagtcgaatttagccgtgaagatctggtggctgaaatcaaagcgggcatcgcgaagggtaaaaaacacgcgatcgtggctatcaccgagcacatctgcgacgttgacgagctggcgaagtacatcgaagccgaaaccaaacgcgaaacccgcgcgaccgtactgggtcacatccagcgcggcggttccccaggcccttacgaccgtattctggcgtcccgtatgggcgcgtacgctatcgatctgctgctgcagggtcacggcggccgctgcgtcggtattcagaacgaaaaactggttcaccacgacatcatcgacgcgattgaaaacatgaagcgtccgttcaaaggtgactggctggactgcgcgaaaaaactgtactga

SEQ ID NO: 112964 - protein, 320 aa, Enterobacter cloacae
MIKKIGVLTSGGDAPGMNAAIRGVVRAALTEGLEVFGVYDGYLGLYEDRMVQLDRYSVSDMINRGGTFLGSARFPEFRDEHVREVAIENMKKRGLDALVVIGGDGSYMGAKRLTEMGFPCIGLPGTIDNDIKGTDYTIGFFTALGTVVEAIDRLRDTSSSHQRISIVEVMGRYCGDLTLAAAIAGGCEFIVVPEVEFSREDLVAEIKAGIAKGKKHAIVAITEHICDVDELAKYIEAETKRETRATVLGHIQRGGSPGPYDRILASRMGAYAIDLLLQGHGGRCVGIQNEKLVHHDIIDAIENMKRPFKGDWLDCAKKLY

SEQ ID NO: 112965 - DNA, 975 bp, Haemophilus ducreyi
  CDS (1)..(975): transl_table=11
atggctaaagaaatcaagaaaattgcagtgttgaccagtggtggtgatgctcctggtatgaatgcggcgattcgtggtgtggttcgagcagcattaaatgaaggtctagaaatcttcggtgttcaagatggctattatggtttgtatcacgataaagtgattccattagatcgccgttctgtctcggaaattattaaccgtggtggtacttttttaggttcggcacgttttccacaatttaaagatattgaggttcgcaaacaagcggtcaagattttagcaaaatatgaaattgatgctttggtggtgattggcggtgacggatcttatatgggcgctaaattactcacggaagaatttggttatccgtgtataggcttgccgggcacaattgataatgatattgttggcactgattatactattggttatcaaaccgctttacaaacggccgttgaggcaattgaccgtttacgcgatacttctacctcacaccagcgtatttcgattgtagaaattatgggacgccattgtggtgatttaaccattagtgcagcattagccggtggttgtgaatatattattgtgccagaaaaaggtttagataaagaatcgcttattcatagtattgctgataatttccgcaaaggtaaacgtcacgcaattattgctattacggaattaatgacagatgtgcatcaattggcaagagaattagaagaaaaatttggccatgaaacacgggctaccgtgttaggccatatacaacgagggggttcaccttgtccatttgatcgtattttagcctcccgtatgggagtctatgcggttgatttattacgtcaaggttttggtggtcgttgtgtcggcattcaaaatgagcatttagtgcatcatgatattattgatgcaattaataatatgcgacgtccatttaaacaggatatatttgaagcggctagtaaattagcctaa

SEQ ID NO: 112966 - protein, 324 aa, Haemophilus ducreyi
MAKEIKKIAVLTSGGDAPGMNAAIRGVVRAALNEGLEIFGVQDGYYGLYHDKVIPLDRRSVSEIINRGGTFLGSARFPQFKDIEVRKQAVKILAKYEIDALVVIGGDGSYMGAKLLTEEFGYPCIGLPGTIDNDIVGTDYTIGYQTALQTAVEAIDRLRDTSTSHQRISIVEIMGRHCGDLTISAALAGGCEYIIVPEKGLDKESLIHSIADNFRKGKRHAIIAITELMTDVHQLARELEEKFGHETRATVLGHIQRGGSPCPFDRILASRMGVYAVDLLRQGFGGRCVGIQNEHLVHHDIIDAINNMRRPFKQDIFEAASKLA

SEQ ID NO: 112967 - DNA, 966 bp, Haemophilus influenzae
  CDS (1)..(966): transl_table=11
atgattaaaaaaattgcagttttaacaagtggtggcgatgcgcctggtatgaatgccgcaattcgtggcgtagtacgttctgcacttgcagaaggcttagaagtatttggtatctatgacggttatcaaggtttatacaataataaaatcaaacaattaaatcgctatagcgtatctgatgtgattaatcgtggcggtacttttttaggttctgcacgttttcctgaatttaaagatcctaatattcgggcaaaatgtgcggaaattttacgttctcacggcattgatgcacttgtggttatcggtggtgacggttcttacatgggggcaaaattattaaccgaagaacacagtttcccttgtgttggcttacccggtactattgataatgatgttgcaggtactgactataccatcggttatcaaaccgcattacaaactgcagtggatgcaatcgaccgtttacgtgatacatcaagctcacaccaacgtatttctatcgttgaaattatgggtcgccattgtagtgacttaaccatttctgcgggcattgctggcggttgtgaatatatcgtcgcatcagaaattgaatttaatcgtgaagaattaattcaacaaattgaacgtagcattattcgcggtaaacgccacgctattattgctatcactgaacttttaaccgatgttcattctctggcaaaagaaattgaagctcgcgttggacacgaaactcgtgcaactgttttagggcatattcaacgtggtggttctccttgtgcttttgaccgtattcttgcctcacgtatgggcgcatacgcagtagatttattgctacaaggcaaaggcggctattgcgtaggtatccaaaatgaacaactcgttcatcacgatattattgatgccattaataatatgcagcgtgtatttaaggctgattggcttaaagtggcaaaacgtttggaataa

SEQ ID NO: 112968 - protein, 321 aa, Haemophilus influenzae
MIKKIAVLTSGGDAPGMNAAIRGVVRSALAEGLEVFGIYDGYQGLYNNKIKQLNRYSVSDVINRGGTFLGSARFPEFKDPNIRAKCAEILRSHGIDALVVIGGDGSYMGAKLLTEEHSFPCVGLPGTIDNDVAGTDYTIGYQTALQTAVDAIDRLRDTSSSHQRISIVEIMGRHCSDLTISAGIAGGCEYIVASEIEFNREELIQQIERSIIRGKRHAIIAITELLTDVHSLAKEIEARVGHETRATVLGHIQRGGSPCAFDRILASRMGAYAVDLLLQGKGGYCVGIQNEQLVHHDIIDAINNMQRVFKADWLKVAKRLE

SEQ ID NO: 112969 - DNA, 1023 bp, Lactococcus lactis subsp
  CDS (1)..(1023): transl_table=11
atgaaacgcattgcagttttgacttctggtggtgatgccccagggatgaatgcggctattcgtgcagttgttcgcaaagcaatttctgaaggtatcgaagtttacggtatcaatcacggatatgcgggcatggttgcgggagacattttcccgcttacgtcagcttcagttggtgataaaatcggtcgtggtggtacattcttgtactcagcacgttacccagaatttgctcaagtagaaggacaacttgctgggattgagcaacttaaaaaattcggtatcgaaggtgtcgttgtaatcggtggtgacggatcttaccatggagctatgcgtcttacagaacatggtttcccagctgttggacttccaggcacaatcgataacgatatcgtaggaactgattttacaattggttttgatacagctgtttcgacagtcgtagatgccttggataaaatccgtgatacttcatcatcacataaccgtactttcgttgtagaagtaatgggacgtaatgctggagatatcgctttgaatgctggtatcgctgctggtgcagatgatatttgtattccagaaaaagaatttaagtttgaaaacgtagttaacaacattaacaaaggctacgaaaaaggtaaaaatcaccacatcatcgttcttgctgaaggcgttatgactggtgaagaatttgctacaaaacttaaagaagctggttataaaggagaccttcgtgtttctgttcttggacacatccaacgtggtggttcaccaacagctcgtgaccgtgttcttgcttcacgtatgggagctcgtgccgttgaattgcttcgtgatggaatcggtggcgtagccgttggtatccgtaatgaagaacttgtagaaagtccaattctcggaactgctgaagaaggagcactctttagtttgactactgaaggtggcatcaaagtaaacaacccgcataaagcaggtcttgaactttaccgtcttaactcagcactcaacaatcttaaccttaactaa

SEQ ID NO: 112970 - protein, 340 aa, Lactococcus lactis subsp
MKRIAVLTSGGDAPGMNAAIRAVVRKAISEGIEVYGINHGYAGMVAGDIFPLTSASVGDKIGRGGTFLYSARYPEFAQVEGQLAGIEQLKKFGIEGVVVIGGDGSYHGAMRLTEHGFPAVGLPGTIDNDIVGTDFTIGFDTAVSTVVDALDKIRDTSSSHNRTFVVEVMGRNAGDIALNAGIAAGADDICIPEKEFKFENVVNNINKGYEKGKNHHIIVLAEGVMTGEEFATKLKEAGYKGDLRVSVLGHIQRGGSPTARDRVLASRMGARAVELLRDGIGGVAVGIRNEELVESPILGTAEEGALFSLTTEGGIKVNNPHKAGLELYRLNSALNNLNLN

SEQ ID NO: 112971 - DNA, 963 bp, Lactobacillus plantarum
  CDS (1)..(963): transl_table=11
atgaaacgcattggtattttaaccagtggcggcgacgctcctggtatgaatgcggccgttcgtgcagttgctggtaaagcaatggctgaagggttggaagcatacggcatcaattacggctttgctggattagttgccggtgacattcacaaaatagaagcagccgacttagatggtgtgattcaacgcggcggaactttactatactccgcacgttatccagaatttgcccatgaagaaggtcaattaaaagggatcgaacaattgaagcggtttgggattgatgctttagttgttatcggtggcgacggttcttaccatggcgcattgcgcttaacggaacacggctacaacacgattggtcttccagggacgatcgataatgatattccttacacggacttcacaattggttttgacactgctgtcaacaccaacgtgcaagctcttgaccggatttatgatacggctcatagtcatgaccggactttcgttgtggaagttatgggtcgtggcgctggtgacgtagccttatggtccggtgtttcaatcggcgcgactgctatcgtggtccccgaagttgattgggacatggaagaaatcgccaacaagattaagcataaccgggccaatggtcatcggagcaacttgattgtgttagccgaaggtgtgatgggtgcccaggagtttgttgagaagttatccgaatatggtgactttgatgctcgtgggaataccattgctcatatgcaacgtggtgggaatccaactgctaaagaccgtgtcatggccagcaagatgggtgcctacgctgtggaactcttgcttgccggcaagggtggcttagcggttgggattcaaaacaaccaattagtcaaccacaacatcttagatttatttgaatctaagcatgacgttgaagtgtcattagataagttgaatgaagaaatttcattcaagtaa

SEQ ID NO: 112972 - protein, 320 aa, Lactobacillus plantarum
MKRIGILTSGGDAPGMNAAVRAVAGKAMAEGLEAYGINYGFAGLVAGDIHKIEAADLDGVIQRGGTLLYSARYPEFAHEEGQLKGIEQLKRFGIDALVVIGGDGSYHGALRLTEHGYNTIGLPGTIDNDIPYTDFTIGFDTAVNTNVQALDRIYDTAHSHDRTFVVEVMGRGAGDVALWSGVSIGATAIVVPEVDWDMEEIANKIKHNRANGHRSNLIVLAEGVMGAQEFVEKLSEYGDFDARGNTIAHMQRGGNPTAKDRVMASKMGAYAVELLLAGKGGLAVGIQNNQLVNHNILDLFESKHDVEVSLDKLNEEISFK

SEQ ID NO: 112973 - DNA, 1032 bp, Mycobacterium bovis
  CDS (1)..(1032): transl_table=11
atgcggattggagttcttaccggaggcggcgactgtcccggccttaacgccgtcatccgtgcggtggtgcgtacctgccacgcccgatacggctcgtcggtggtcggatttcagaacggctttcgcgggctgctggagaaccgccgtgttcaactgcacaacgacgaccgcaatgaccggctgctggccaagggcggcacgatgctgggcacggcccgggtgcaccccgacaaactgcgggcggggctgccccaaatcatgcagaccttggacgacaacgggatcgacgtcctgatcccgatcggcggtgagggtacgctgaccgccgcgagttggctctccgaagagaatgtgccggtggtcggggtgccaaagacgatcgacaacgacatcgactgcaccgatgtgaccttcggccacgacaccgcgttgaccgtggccaccgaggccatcgaccggctgcacagcaccgccgaatcccacgagcgggtgatgctggtggaggtgatgggtaggcatgccggctggatcgcgctgaacgccgggctggcctccggtgctcacatgaccctgattcctgagcagccgttcgacatcgaagaggtgtgccgactggtcaaaggccgtttccagcgcggggactcgcatttcatctgcgtggtcgccgaaggcgccaaaccggctccggggacgatcatgctgcgcgagggtggtctcgacgagttcgggcacgagcgtttcacaggtgtagcggcgcagctggcggtcgaggtcgagaagcgcatcaacaaggatgtccgggtgacggtgttgggccacatccagcggggtggtactccgaccgcctacgaccgagtgctggccacccgattcggggtgaacgccgccgacgccgcgcatgcgggcgagtacggccagatggtgacgttgcgcggccaggacatcggtcgggttccgctggcggatgcggttcgcaaactcaaactggtgccgcagagccgttacgacgacgccgccgccttcttcggttga

SEQ ID NO: 112974 - protein, 343 aa, Mycobacterium bovis
MRIGVLTGGGDCPGLNAVIRAVVRTCHARYGSSVVGFQNGFRGLLENRRVQLHNDDRNDRLLAKGGTMLGTARVHPDKLRAGLPQIMQTLDDNGIDVLIPIGGEGTLTAASWLSEENVPVVGVPKTIDNDIDCTDVTFGHDTALTVATEAIDRLHSTAESHERVMLVEVMGRHAGWIALNAGLASGAHMTLIPEQPFDIEEVCRLVKGRFQRGDSHFICVVAEGAKPAPGTIMLREGGLDEFGHERFTGVAAQLAVEVEKRINKDVRVTVLGHIQRGGTPTAYDRVLATRFGVNAADAAHAGEYGQMVTLRGQDIGRVPLADAVRKLKLVPQSRYDDAAAFFG

SEQ ID NO: 112975 - DNA, 972 bp, Mycoplasma genitalium
  CDS (1)..(972): transl_table=4
atggataaaatagctattttaacttcgggtggtgatgctagtgggatgaatgccaccatcgcttatctaaccaaatatgcaattgcaaagcaattggaagttttttatgtaaaaaacggttattatggcttgtatcacaaccattttatcaccagtaaggaacttgatttaactgactttttctttatggggggaacagtaataggatcaagtcgtttcaaacagtttcaagatcctagcttacgaaaacaagcagttttaaacctcaaaaaacgtggtattaacaaccttgttgttattggtggggatgggagttatatgggtgctaaagcactcagtgaattaggattaaactgcttttgtttacctggtacgatcgacaatgatgtcaattccagtgaatttaccattggtttttgaactgctttagaagcaattcgggttaatgttgaagcaatttatcacaccaccaaatcccataaccgcttagcaatcatagaagtgatggggcgtgattgtagtgatctgaccatctttggggggttagctactaatgctagttttgttgttactagcaaaaatagcttggatctcaatggctttgaaaaagcagtgagaaaggtgttgcaattccagaactattgtgttgttttggttagtgaaaacatctatggtaagaacggtttacctagtttagaaatggttaaagagcactttgaaaacaacgcaattaagtgtaacctagtttcactaggacacacccaaaggggctttagtcctaatagtatcgaactctttcagattagtttaatggctaaacacacgattgatctggttgtaaataatgccaacagtcaagtaatagggatgaaaaacaaccaagcagttaactatgattttaacactgcttttaatttaccaaaagctgatagaaccaagttacttaaccaagttaacactgcaattatttaa

SEQ ID NO: 112976 - protein, 323 aa, Mycoplasma genitalium
MDKIAILTSGGDASGMNATIAYLTKYAIAKQLEVFYVKNGYYGLYHNHFITSKELDLTDFFFMGGTVIGSSRFKQFQDPSLRKQAVLNLKKRGINNLVVIGGDGSYMGAKALSELGLNCFCLPGTIDNDVNSSEFTIGFWTALEAIRVNVEAIYHTTKSHNRLAIIEVMGRDCSDLTIFGGLATNASFVVTSKNSLDLNGFEKAVRKVLQFQNYCVVLVSENIYGKNGLPSLEMVKEHFENNAIKCNLVSLGHTQRGFSPNSIELFQISLMAKHTIDLVVNNANSQVIGMKNNQAVNYDFNTAFNLPKADRTKLLNQVNTAII

SEQ ID NO: 112977 - DNA, 1032 bp, Mycobacterium leprae
  CDS (1)..(1032): transl_table=11
atgaggatcggaattctcacggggggcggcgactgtcctggtcttaacgccgttatccgggcgattgtgcgcacctgtgacgcccggtacggttcgtcggtagtcgggtttcaggacggctggcgtgggttgctggagaatcggcgcatgcagctgtgcaacgacgaccggaatgaccgtctgttagccaaaggcggaaccatgctgggcactgcccacgtgcaccccgacaagctgcgggccgggctgcatcagatcaagcagaccctggatgacaatggcatcgacgtgctcatcccgatcggcggcgaaggcacgctgacggccgcgcactggctgtcgcaggaagacgttcctgtggtcggcgtgccgaagacgatcgacaacgacatcgactgcaccgacgtgacctttggccacgacaccgcgctgacggtggctaccgaagccattgaccggttgcacagtaccgccgaatctcaccaacgtgtgatgctggtggaggtgatgggtcggcatgccggctggatagcgctgagttccgggctggcttccggtgcgcacatgacgctgattcccgaacagcccttcgatgtcgaggaagtgtgctgcctcgtgaaacgacgttttcagcgcggggattcgcatttcatttgcgtggtcgctgagggtgccaagccggtcccaggctcgatcacgttgcgccaaggtgggatggatgaatttggtcacgagcgtttcactggggtggcagcgcaattgggcgctgaggtcgagaagcggatcaacaaggacgtgcgagtgactgtgctgggtcatgtccaacgcggtggtacaccgacggccttcgatcgggtgctggccacccggttcggggttaatgctgccgacgcctcgcacgccggcgagtacggccagatggtgtcactgcgtgggcaagacatcggtcgcgtaccgctggaggatgcggtgcgtcagctcaaattggtgcccgaaagccgttacgacgacgccgccgccttcttcggttaa

SEQ ID NO: 112978 - protein, 343 aa, Mycobacterium leprae
MRIGILTGGGDCPGLNAVIRAIVRTCDARYGSSVVGFQDGWRGLLENRRMQLCNDDRNDRLLAKGGTMLGTAHVHPDKLRAGLHQIKQTLDDNGIDVLIPIGGEGTLTAAHWLSQEDVPVVGVPKTIDNDIDCTDVTFGHDTALTVATEAIDRLHSTAESHQRVMLVEVMGRHAGWIALSSGLASGAHMTLIPEQPFDVEEVCCLVKRRFQRGDSHFICVVAEGAKPVPGSITLRQGGMDEFGHERFTGVAAQLGAEVEKRINKDVRVTVLGHVQRGGTPTAFDRVLATRFGVNAADASHAGEYGQMVSLRGQDIGRVPLEDAVRQLKLVPESRYDDAAAFFG

SEQ ID NO: 112979 - DNA, 969 bp, Mycoplasma penetrans
  CDS (1)..(969): transl_table=4
atgaaaaaaatcgcaatattaacatctggtggtgatgcatcaactatgaataaatgtcttagtacatttattacatatgctagtaaatacaattgtgaagttgtatttgtaaaaaatggttataaaggaatttacgataatgaatttgttaaaccggattatactgaaactaaatcttgatgaagtttaccaggaacaaaaatctattcttctagatttccagaaatcttagatgaacaagttagaaaacaaatggttgataacttacataaaaattcgattgatacattagttgtcattggaggagatggaagttataaaggagctagattattatctaaatcaggaattaaggttattggtttaccaggaacaattgataatgatatagcttcaacaagttattcaattggttttgatacatcattaaatgcaattgttaattcaattaaagaaattaaatcatgtatggattctcatgcaaatgttgcaatgattgaaatcatgggaagacattgtattgatttaactgtatttgctggaattgcaactgaagctgatatcataattactcctgaaagtttttatacaccacaacaactattagctaagataaatgaaaaaagaaaaactaattctagaggaattataattctttatgttgaactattattaggtactgaaaatattccaacagttgaagaatacattaaatatattcaagcaaattcaaaagaatcagttaagaaaaatattttaggatatttacaacgtggtgggaatccaactgcaatggatatgataagagcaagtttaatgactgaacatgctttaaaaatgattagtgaaaaccaatataacaaaattattggtgttgatgaatttaaagtagtaagttatgatttagaaactgctatcaatatgaaaaacccaagcagaaaagatttaattgataaattctttaactaa

SEQ ID NO: 112980 - protein, 322 aa, Mycoplasma penetrans
MKKIAILTSGGDASTMNKCLSTFITYASKYNCEVVFVKNGYKGIYDNEFVKPDYTETKSWWSLPGTKIYSSRFPEILDEQVRKQMVDNLHKNSIDTLVVIGGDGSYKGARLLSKSGIKVIGLPGTIDNDIASTSYSIGFDTSLNAIVNSIKEIKSCMDSHANVAMIEIMGRHCIDLTVFAGIATEADIIITPESFYTPQQLLAKINEKRKTNSRGIIILYVELLLGTENIPTVEEYIKYIQANSKESVKKNILGYLQRGGNPTAMDMIRASLMTEHALKMISENQYNKIIGVDEFKVVSYDLETAINMKNPSRKDLIDKFFN

SEQ ID NO: 112981 - DNA, 987 bp, Mycoplasma pneumoniae
  CDS (1)..(987): transl_table=4
atgagtccaaaaacaaccaaaaaaattgccattttaacctctggtggtgatgctccagggatgaatgccacactagtttacctaacgcgttatgccactagttctgaaattgaagttttctttgtgaaaaacggttattatgggctgtaccatgatgagttagtacccgctcatcaattagatttgtcaaacagcttgtttagtgctggcaccgtgattggtagtaagcgctttgtcgaatttaaggagttaaaggtccgcgagcaagcagcacagaatcttaaaaagcgccaaatcgattacctagtggttattggtggtgatggtagttacatgggcgctaaattgctaagcgagttgggcgttaactgttactgtttgccgggtacgattgacaacgacataaattcgagtgagtttacaattggttttctcacggctttggagtcgattaaggtcaatgtccaggccgtgtaccacactacgaaatcacatgaacgggtcgccattgtggaggtgatgggtcgccattgtggtgatttagccatttttggtgccttagccaccaatgctgactttgtggtgactcctagcaataaaatggatttaaagcagctagaaagtgctgtcaaaaagatcttgcaacaccaaaaccactgtgtggtgattgttagtgaaaacatctatggctttgatggttatccctcacttacagcgatcaaacagcactttgatgctaacaacatgaagtgtaacctggtgtccttgggtcacacgcaacgcggatttgcccctaccagcctcgagttagtccaaattagtttaatggcgcaacacacgattaacttaattggacaaaacaaggttaaccaggtcattggtaataaggccaatgtgcccgttaactatgactttgatcaagcctttaacatgccaccggttgatcgcagcgctttaattgcagtcattaataaaaatattatttaa

SEQ ID NO: 112982 - protein, 328 aa, Mycoplasma pneumoniae
MSPKTTKKIAILTSGGDAPGMNATLVYLTRYATSSEIEVFFVKNGYYGLYHDELVPAHQLDLSNSLFSAGTVIGSKRFVEFKELKVREQAAQNLKKRQIDYLVVIGGDGSYMGAKLLSELGVNCYCLPGTIDNDINSSEFTIGFLTALESIKVNVQAVYHTTKSHERVAIVEVMGRHCGDLAIFGALATNADFVVTPSNKMDLKQLESAVKKILQHQNHCVVIVSENIYGFDGYPSLTAIKQHFDANNMKCNLVSLGHTQRGFAPTSLELVQISLMAQHTINLIGQNKVNQVIGNKANVPVNYDFDQAFNMPPVDRSALIAVINKNII

SEQ ID NO: 112983 - DNA, 981 bp, Mycoplasma pulmonis
  CDS (1)..(981): transl_table=4
atgattaaaaaaatagcaattttaacctcaggaggagactctcctggaatgaacaatgccatcagggcaattattaaaaccgcaagattatatgacattgaaacatatcttgtttatgaaggttttttaggtttatataatgggtgaataaaaccctcagaaggaattgatgaagattcttacataaacaagggtggaacatttatcttctcagctagatttgttgaatttgctcaagaaaaatatcgtcaagtagctaaagaaaatcttttaaaattaggcattgaagctcttgttgtaattggaggagatggttcatataaaggagctcaaaaacttcatgaaatgggcattaaaacaattgctcttccaggaacaatagacaatgacataacctcaagtgattttacaattggctacgatacagctttaaatactatagttgaagctgttgataaaattagggacacagcctcaagtcataaaagatgtattatggttgaagtaatgggccatggagcaagtgatttagctctttattcaggaatggcaacaggaagtgaaatcattgtttcaaatgactataaacttagcgttgaagaaatggctaaaattgttaaaaaacaatttgaaaaacctaataaaagaagtgtgattataacagtaagtgagtttgtttttaaagatcttcaacaagttgcaaagcaaattgaagagcttacaaacataacaactaaagctgttgttttagctcacatccaaagaggaggatatccctcagctagagaaagaattaacgctactattttaggaaaacatgcagtgcttcgtcttaaacaaggtcaatcaggaatagctcttggtctaattaaaaatcaagtagctgctactccgattttagaagctcttgctatgcctcaaactagaaaagatttattggaaagaagaaccaaaagttacaacgatataaatcaagcttaa

SEQ ID NO: 112984 - protein, 326 aa, Mycoplasma pulmonis
MIKKIAILTSGGDSPGMNNAIRAIIKTARLYDIETYLVYEGFLGLYNGWIKPSEGIDEDSYINKGGTFIFSARFVEFAQEKYRQVAKENLLKLGIEALVVIGGDGSYKGAQKLHEMGIKTIALPGTIDNDITSSDFTIGYDTALNTIVEAVDKIRDTASSHKRCIMVEVMGHGASDLALYSGMATGSEIIVSNDYKLSVEEMAKIVKKQFEKPNKRSVIITVSEFVFKDLQQVAKQIEELTNITTKAVVLAHIQRGGYPSARERINATILGKHAVLRLKQGQSGIALGLIKNQVAATPILEALAMPQTRKDLLERRTKSYNDINQA

SEQ ID NO: 112985 - DNA, 960 bp, Oceanobacillus iheyensis
  CDS (1)..(960): transl_table=11
atgaaaagaataggagtattaacaagtggcggtgattctcctggtatgaacgctgctatccgtgcggttgttcgtaaggcgatttatcatgacctagaagtttacggtattaaaaatggttatcaaggattaatggatggcaatattgaaaaaatgactttagggtctgtaggtgatattattcatcgaggtggaacaatactgttttctgccagaagtgaagaatttaaaacagatgagggtcaatttcgagctattgaacaacttaataagcataatatagatggtttagttgttattggaggagatggaagcttccaaggtgcaaaaaaattaaccgagaaaggttttccatgtataggtgtaccgggtacgattgataacgatattgcaggtacagattatacaattggttttgatacatcattaaatacaattatagatgctgtcgataaagtacgagatactgctacatctcatgaaagaacttacattattgaagtaatgggaagagatgctggtgacctagcactatgggctgggttagctgttggcgcagaaagtatattgataccggaggaaaaagaagacttctccagtattgttcaacgcttaaaaaatggacatgaccgtggcaaaaaacatagtatcatcttattagctgaaggtgttggtagtggctttgaattcggtaagcgaattgaagaagttgcagaacttgagactagagttacagttttaggtcatattcagcgtggtggatcacccacagggcaagatcgtgttcttgcaagcagattgggagccagagctattgaattgttgattgataatcaaggtggaagaatggttggaattcaaaaaaacgtattagtggattatacatttgatgaagtgttcaatgttgaacatacaatcgataaaggaatgtataaactttcgaaagaattatcaatctaa

SEQ ID NO: 112986 - protein, 319 aa, Oceanobacillus iheyensis
MKRIGVLTSGGDSPGMNAAIRAVVRKAIYHDLEVYGIKNGYQGLMDGNIEKMTLGSVGDIIHRGGTILFSARSEEFKTDEGQFRAIEQLNKHNIDGLVVIGGDGSFQGAKKLTEKGFPCIGVPGTIDNDIAGTDYTIGFDTSLNTIIDAVDKVRDTATSHERTYIIEVMGRDAGDLALWAGLAVGAESILIPEEKEDFSSIVQRLKNGHDRGKKHSIILLAEGVGSGFEFGKRIEEVAELETRVTVLGHIQRGGSPTGQDRVLASRLGARAIELLIDNQGGRMVGIQKNVLVDYTFDEVFNVEHTIDKGMYKLSKELSI

SEQ ID NO: 112987 - DNA, 966 bp, Pasteurella multocida
  CDS (1)..(966): transl_table=11
atgataaaaaaaatagcagtattaaccagtggtggtgacgcaccgggcatgaatgccgccattcgcggcgtggttcgttcagcacttgcggcaggattagaagtatacggtatttatgaaggctattatgggttatatcataataaagtgaaacaaatgacccgttatagtgtttccgacattattaaccgcggcggtacttttttaggatcggcgcgttttcctgaatttaaagatcctgcggttcgcgctaaatgtgctgaaattttacgttcccatggtattgatgcacttgtggtgattggtggggacggttcttacatgggggcaaaattactgacggaagaacatggtttcccttgcgtcggtatcccgggtacgattgataatgatgtggcagggacagactacaccatcggttatcaaaccgcattacagacagccgtcgaagccattgaccgtttacgcgatacctcaagctcgcaccaacgtatttcgattgttgaaatcatgggacgtcattgtagtgatttagctatttcagcgggtattgctggtggttgtgagtatattgtggcatcggaagtagaatttaaccgtgaagagttaattcaacagattgagcgcagtattatcaaaggtaaacgtcatgccattattgcaattactgagttaatttgtgatgtgaatgaattagcccgtgaaattgaatcgcgtgtgaaacatgaaacccgtgctaccattttaggtcatattcaacgtggcggtacgccttgcgcatttgaccgtattttaggttcacgtatgggcgtttatgcggttgatttattaatgcaaggtaaaggtggctattgcgttggtattcaaaatgaacaattagttcaccacgatattattgatgcaatcaacaatatgcgccgtgaatttaaagcggattggttagcattatcgaaacgtttagactaa

SEQ ID NO: 112988 - protein, 321 aa, Pasteurella multocida
MIKKIAVLTSGGDAPGMNAAIRGVVRSALAAGLEVYGIYEGYYGLYHNKVKQMTRYSVSDIINRGGTFLGSARFPEFKDPAVRAKCAEILRSHGIDALVVIGGDGSYMGAKLLTEEHGFPCVGIPGTIDNDVAGTDYTIGYQTALQTAVEAIDRLRDTSSSHQRISIVEIMGRHCSDLAISAGIAGGCEYIVASEVEFNREELIQQIERSIIKGKRHAIIAITELICDVNELAREIESRVKHETRATILGHIQRGGTPCAFDRILGSRMGVYAVDLLMQGKGGYCVGIQNEQLVHHDIIDAINNMRREFKADWLALSKRLD

SEQ ID NO: 112989 - DNA, 2829 bp, Schizosaccharomyces pombe
  CDS (1)..(2829)
atgagtggagaaaccgtgcatggaatttcgtgctactctgttgttgcaaacactgaggacacatataatcagactctcgacttctaccaaaagcttggcttcaagaaggttgccagcttcggtaccagcgattctgacaatgcccgtgtttgcaacgagtctctccgtgaggactggatgcatgtcgctggaaacaactctgctgaaagcgtcaccatcaagttccgtttagtccccggtgaattgagcctttcccccgctgccgaagattctgaatggcgcggacaaaagagttctcttgttttttactatcccaacttgcttgacttgcttaagcaactcagtgccgatgccattaaataccaagctttccccaacgagaagaagcctgatgaggtttatgtcgaggatcccttgggtaatttgattggcttctccgaccgttacaatcctttcgcccatgctaaccttaagaagagcgaggagtctggtgctgcttctaacctcgagagcggtttggctactcccgtcgttgagactctcaagaaagctaccacttctgacaagcctgcaggtgtcaagaagaagattgcagttatgaccagtggtggtgactcccctggtatgaacgctgttgttcgtgccgtcgctcgtattgccattcaccgtggttgtgatgctttcgctatttatgaaggttatgaaggtcttgttcaaggtggtgatatgatcaagcaattgcaatggggtgatgtccgtggttggcttgctgagggtggtactcttattggtaccgctcgttgtatggctttccgtgagcgtcctggtcgtcttcgtgctgccaagaaccttatttccgctggtattgattccattattgtttgcggtggtgatggttctttgaccggtgctgatatcttccgttctgactggcccggtttggttaaagagttggaggacaccaaggctattactcccgagcaagccaagctctaccgccatcttaccattgtcggtttggtcggttcaatcgataacgatatgtcttcaactgacgttactatcggtgccttctcttctcttcaccgtatttgcgaagccgtcgactccatttcttctactgctatttcccattctcgtgctttcatcgttgaagtcatgggtcgtcattgcggttggttggctgttttagctgcattggctaccggtgctgatttcgtctttatccctgagagacctgctgaagtcggcaaatggcaagacgaattgtgcaattctttgagctctgtccgtaagttgggcaagagaaagtcaattgttattgttgcagagggtgctattgactccgagcttaaccacatttctcccgaagacatcaagaacttgttagttgagcgccttcacttggacactcgtgtcaccactctcggtcacgttcaacgtggtggtattccttgtgcttatgaccgtatgcttgctacccttcaaggtgttgatgccgttgatgctgttcttgcctctacccctgatactccatctcccatgattgctatcaatggtaacaagattaaccgcaagcctttgatggaggctgttaagttgactcatgaggttgctgatgctattgagaagaagcagttcgctcatgctatggagctccgtgaccccgaatttgctgattacttacacacttgggaaggtactacctttattgaagacgagtcacacttcgttcccaaggacgagagaatgcgtgtcgccatcatccatgttggtgctcccgctggtggtatgaactctgctactcgtgctgccgttcgatattgtttgaaccgtggtcacactcctcttgccattgacaatggtttctctggcttcttgcgccatgattctattcatgaactttcatggattgatgttgatgagtggtgcattcgtggtggtagtgaaatcggtaccaaccgtgatacccctgatctcgacatgggcttcactgccttcaagttccaacaacataagattgatgctttgattattattggtggtttcgaggctttcaccgccctttctcaacttgagagtgcacgtgttaactacccttcattccgcattcccatggctatcatccctgccaccatttccaacaacgttcccggtaccgaattctctttgggttgcgatacttgtcttaatgccgttatggaatactgtgataccattaagcaaagtgctagtgctagccgtcgtcgtgtcttcgtttgtgaagttcaaggtggccgctctggttatatcgctactgtcggtggtctcattactggtgcctccgccatttacacccccgaggatggtatctccttggatatgttgcgtaaggatattgatcaccttaaggctacattcgccttagaagctggtcgtaaccgtgctggtcaacttatccttcgtaacgaatgtgcttctaaggtttacaccaccgaagttattggaaacatcatcagtgaagaagctcataagcgcttctccgctcgtaccgctgttcccggtcacgttcaacaaggtggtaaccccactcctatggaccgtgctcgtgctgctcgtctggctatgcgtgccattcgtttcttcgaaacttgccgtgccaacgacttgggtaatgaccccagctctgccgttgtcatcggtatccgtggtactggtgtctctttcagctctgttgctgatgttgagaacaacgaaaccgaaattgagatgcgtcgtcctaagaacgcttggtggcgtgatatgcacaacttggttaacatcttggccggcaagacctttgctgattaa

SEQ ID NO: 112990 - protein, 942 aa, Schizosaccharomyces pombe
MSGETVHGISCYSVVANTEDTYNQTLDFYQKLGFKKVASFGTSDSDNARVCNESLREDWMHVAGNNSAESVTIKFRLVPGELSLSPAAEDSEWRGQKSSLVFYYPNLLDLLKQLSADAIKYQAFPNEKKPDEVYVEDPLGNLIGFSDRYNPFAHANLKKSEESGAASNLESGLATPVVETLKKATTSDKPAGVKKKIAVMTSGGDSPGMNAVVRAVARIAIHRGCDAFAIYEGYEGLVQGGDMIKQLQWGDVRGWLAEGGTLIGTARCMAFRERPGRLRAAKNLISAGIDSIIVCGGDGSLTGADIFRSDWPGLVKELEDTKAITPEQAKLYRHLTIVGLVGSIDNDMSSTDVTIGAFSSLHRICEAVDSISSTAISHSRAFIVEVMGRHCGWLAVLAALATGADFVFIPERPAEVGKWQDELCNSLSSVRKLGKRKSIVIVAEGAIDSELNHISPEDIKNLLVERLHLDTRVTTLGHVQRGGIPCAYDRMLATLQGVDAVDAVLASTPDTPSPMIAINGNKINRKPLMEAVKLTHEVADAIEKKQFAHAMELRDPEFADYLHTWEGTTFIEDESHFVPKDERMRVAIIHVGAPAGGMNSATRAAVRYCLNRGHTPLAIDNGFSGFLRHDSIHELSWIDVDEWCIRGGSEIGTNRDTPDLDMGFTAFKFQQHKIDALIIIGGFEAFTALSQLESARVNYPSFRIPMAIIPATISNNVPGTEFSLGCDTCLNAVMEYCDTIKQSASASRRRVFVCEVQGGRSGYIATVGGLITGASAIYTPEDGISLDMLRKDIDHLKATFALEAGRNRAGQLILRNECASKVYTTEVIGNIISEEAHKRFSARTAVPGHVQQGGNPTPMDRARAARLAMRAIRFFETCRANDLGNDPSSAVVIGIRGTGVSFSSVADVENNETEIEMRRPKNAWWRDMHNLVNILAGKTFAD

SEQ ID NO: 112991 - DNA, 984 bp, Spiroplasma citri
  CDS (1)..(984): transl_table=4
atgcttaaaaaaattggaattttaacatctggtggtgattcacaagggatgaatgctgcaattgcgggagttattaaaacagcacatgcaaaaggactagaaacatatattattcgtgatggttatttaggattaattaataattgaatagaagttgttgataataattttgcggatagtattatgcttttagggggaactgtgattggaagtgcacgcttaccggaatttaaagacccagaagtacaaaaaaaagctgttgatattttaaaaaagcaagaaattgcggcattagtagttattggtggtgatggtagttatcaaggtgctcaacggttaacagagctgggaattaattgtattgctttaccgggaacaattgataatgatatcacttcatcagattatacgattgggtttgatactgcaattaatattgttgttgaagcaattgaccgcttgcgtgatacaatgcaatcacataatcgttgttcaattgttgaagtaatgggtcatgcttgcggtgatattgctttatacgctgggattgctggtggagcagatattatttcaattaatgaagctgctttatctgaaacagaaattgctgatcgggttgcaatgttacatcaagcacaaaagcgaagtgtcattgttgttgttagtgaaatgatttatccagatgtgcataaattagcaaaattagttgaaagtaaaagtggttacattactcgtgcaacagttttagggcacactcaacggggtggtaatccaacggcaatggaccgttatcgtgcttttcaaatggcacaatttgctgttgaacaaattattgcaggcgtaggtggtttagcaattggaaatcaaggtgatcaaattattgctcgtccaattatggaagcattaagtattccgcgttcatcacggaaagaaatttgagctaaatttgatcaattaaatcagaatatttatcaaaaatcataa

SEQ ID NO: 112992 - protein, 327 aa, Spiroplasma citri
MLKKIGILTSGGDSQGMNAAIAGVIKTAHAKGLETYIIRDGYLGLINNWIEVVDNNFADSIMLLGGTVIGSARLPEFKDPEVQKKAVDILKKQEIAALVVIGGDGSYQGAQRLTELGINCIALPGTIDNDITSSDYTIGFDTAINIVVEAIDRLRDTMQSHNRCSIVEVMGHACGDIALYAGIAGGADIISINEAALSETEIADRVAMLHQAQKRSVIVVVSEMIYPDVHKLAKLVESKSGYITRATVLGHTQRGGNPTAMDRYRAFQMAQFAVEQIIAGVGGLAIGNQGDQIIARPIMEALSIPRSSRKEIWAKFDQLNQNIYQKS

SEQ ID NO: 112993 - DNA, 969 bp, Staphylococcus aureus
  CDS (1)..(969): transl_table=11
atgaagaaaattgcagttttaactagtggtggagattcacctggaatgaatgctgccgtaagagcagttgttcgtacagcaatttacaatgaaattgaagtttatggtgtgtatcatggttaccaaggattgttaaatgatgatattcataaacttgaattaggatcagttggggatacgattcagcgtggaggtacattcttgtattcagcaagatgtccagagtttaaggagcaagaagtacgtaaagttgcaatcgaaaacttacgtaaaagagggattgagggccttgtagttattggtggtgacggtagttatcgcggtgcacaacgcatcagtgaggaatgtaaagaaattcaaactatcggtattcctggtacgattgacaatgatatcaatggtactgattttacaattggatttgacacagcattaaatacgattattggcttagtcgacaaaattagagatactgcgtcaagtcacgcacgaacatttatcattgaagcaatgggccgtgattgtggagatctagcattatgggctggattatcagttggtgctgagacaattgtagttccagaagtgaaaacagatattaaagaaatagctgataaaattgaacaaggtattaaacgtggtaagaaacactcaatcgttcttgtagcagaaggttgtatgactgcgcaagattgtcaaaaagaattatcacaatacatcaatgttgataatagagtgtctgtgttaggtcacgttcaacgtggtggtagcccaacaggtgcggatagagttttagcatcacgtttaggtggatatgcggtagacttattaatgcaaggtgaaacagctaagggtgttggaattaagaacaataaaattgtagcaacatcttttgatgaaatttttgatggtaaagatcataaatttgattatagtctatatgaacttgctaacaagttatctatataa

SEQ ID NO: 112994 - protein, 322 aa, Staphylococcus aureus
MKKIAVLTSGGDSPGMNAAVRAVVRTAIYNEIEVYGVYHGYQGLLNDDIHKLELGSVGDTIQRGGTFLYSARCPEFKEQEVRKVAIENLRKRGIEGLVVIGGDGSYRGAQRISEECKEIQTIGIPGTIDNDINGTDFTIGFDTALNTIIGLVDKIRDTASSHARTFIIEAMGRDCGDLALWAGLSVGAETIVVPEVKTDIKEIADKIEQGIKRGKKHSIVLVAEGCMTAQDCQKELSQYINVDNRVSVLGHVQRGGSPTGADRVLASRLGGYAVDLLMQGETAKGVGIKNNKIVATSFDEIFDGKDHKFDYSLYELANKLSI

SEQ ID NO: 112995 - DNA, 969 bp, Staphylococcus aureus
  CDS (1)..(969): transl_table=11
atgaagaaaattgcagttttaactagtggtggagattcacctggaatgaatgctgccgtaagagcagttgttcgtacagcaatttacaatgaaattgaagtttatggtgtgtatcatggttaccaaggattgttaaatgatgatattcataaacttgaattaggatcagttggggatacgattcagcgtggaggtacattcttgtattcagcaagatgtccagagtttaaggagcaagaagtacgtaaagttgcaatcgaaaacttacgtaaaagagggattgagggccttgtagttattggtggtgacggtagttatcgcggtgcacaacgcatcagtgaggaatgcaaagaaattcaaactatcggtattcctggtacgattgacaatgatatcaatggtactgattttacaattggatttgacacagcattaaatacgattattggcttagtcgacaaaattagagatactgcgtcaagtcacgcacgaacatttatcattgaagcaatgggccgtgattgtggagatctagcattatgggctggattatcagttggtgctgagacaattgtagttccagaagtgaaaacagatattaaagaaatagctgataaaattgaacaaggtattaaacgtggtaagaaacactcaatcgttcttgtagcagaaggttgtatgactgcgcaagattgtcaaaaagaattatcacaattcatcaatgttgataatagagtgtctgtgttaggtcacgttcaacgtggtggtagcccaacaggtgcggatagagttttagcatcacgattaggtggatatgcggtagacttattaatgcaaggtgaaacagctaaaggtgttggaattaagaacaataaaattgtagcaacatcttttgatgaaatttttgatggtaaagatcataaatttgattatagtctatatgaacttgctaacaagttatctatataa

SEQ ID NO: 112996 - protein, 322 aa, Staphylococcus aureus
MKKIAVLTSGGDSPGMNAAVRAVVRTAIYNEIEVYGVYHGYQGLLNDDIHKLELGSVGDTIQRGGTFLYSARCPEFKEQEVRKVAIENLRKRGIEGLVVIGGDGSYRGAQRISEECKEIQTIGIPGTIDNDINGTDFTIGFDTALNTIIGLVDKIRDTASSHARTFIIEAMGRDCGDLALWAGLSVGAETIVVPEVKTDIKEIADKIEQGIKRGKKHSIVLVAEGCMTAQDCQKELSQFINVDNRVSVLGHVQRGGSPTGADRVLASRLGGYAVDLLMQGETAKGVGIKNNKIVATSFDEIFDGKDHKFDYSLYELANKLSI

SEQ ID NO: 112997 - DNA, 969 bp, Staphylococcus epidermidis
  CDS (1)..(969): transl_table=11
atgaagaagattgcagttttaactagcggaggagattctccgggtatgaacgctgctgttcgtgcagtgactcggacagcaatttacaataatattgaagtttatggtgtttatcaaggttaccaaggtttacttgatgatgatattcataagcttgaattgggttcagtaggggatacaattcaacgaggaggaactttcctcttttccgcaaggtgccctcagttcaaagaagaggatgtacgtaagaaagctattgagaatttacgtaagcgtggtatcgaaggtttagttgttattggaggagatggcagctatagaggggcacaacgaattagtgaggaatgtaaagaaattcaaacaattggtattcctggtacaattgataatgatattaatggtacagattttacaattggttttgatactgcattaaacactattattgaatcagtcgataagattagagatacggcatcaagtcacgcaagaacgtttattgttgaagttatggggcgtgattgtggagatttagctttatgggctggattatctgtaggtgctgaaacgattgttttaccagaagtcaatacagatattaaggatgtagctgaaaagattgaacagggtattaaaagagggaaaaaacattctatcgttatggttgcagaaggttgtatgagcggccaagaatgtgcagatgagttaacgaagtatattaacattgatacacgagtttcagtgttaggtcacattcaacgtggcggtagcccatctggtgctgatcgagtattagcttctcgacttggtggatatgctgttgaactattaaaacaaggcgagacagctaaaggtgttggcattaggaataatcaattaacctctacgccgtttgatgaaatttttgctgaaagtgatcgcaaatttaatagtcaaatgtatgaattagcaaaagaattatcaatttaa

SEQ ID NO: 112998 - protein, 322 aa, Staphylococcus epidermidis
MKKIAVLTSGGDSPGMNAAVRAVTRTAIYNNIEVYGVYQGYQGLLDDDIHKLELGSVGDTIQRGGTFLFSARCPQFKEEDVRKKAIENLRKRGIEGLVVIGGDGSYRGAQRISEECKEIQTIGIPGTIDNDINGTDFTIGFDTALNTIIESVDKIRDTASSHARTFIVEVMGRDCGDLALWAGLSVGAETIVLPEVNTDIKDVAEKIEQGIKRGKKHSIVMVAEGCMSGQECADELTKYINIDTRVSVLGHIQRGGSPSGADRVLASRLGGYAVELLKQGETAKGVGIRNNQLTSTPFDEIFAESDRKFNSQMYELAKELSI

SEQ ID NO: 112999 - DNA, 1023 bp, Streptococcus agalactiae serotype III
  CDS (1)..(1023): transl_table=11
atgaaacgtattgctgttttaactagtggtggtgacgcccctggtatgaacgctgctatccgtgcagttgttcgtaaagcaatttctgaaggtatggaagtttacggcatcaaccaaggttactatggtatggtgacaggggatattttccctttggatgctaattctgttggggatactatcaaccgtggaggaacgtttttacgttcagcacgttatcctgaatttgctgaacttgaaggtcagcttaaagggattgaacagcttaaaaaacacggcattgaaggtgtagtagttatcggtggtgatggttcttatcatggtgctatgcgtctaactgagcacggtttcccagctgttggtttgccgggtacaattgataatgatatcgttggcactgactatactattggttttgacacagcagttgcgacagcagttgagaatcttgaccgtcttcgtgatacatcagcaagtcataaccgtacttttgttgttgaggttatgggaagaaatgcaggagatatcgctctttggtcaggtatcgctgcaggtgcagatcaaattattgttcctgaagaagagttcaatattgatgaagttgtctcaaatgttagagctggctatgcagctggtaaacatcaccaaatcatcgtccttgcagaaggtgttatgagtggtgatgagtttgcaaaaacaatgaaagcagcaggagacgatagcgatcttcgtgtgacgaatttaggacatctgctccgtggtggtagtccgactgctcgtgatcgtgtcttagcatctcgtatgggagcgtacgctgttcaattgttgaaagaaggtcgtggcggtttggccgttggtgtccacaacgaagaaatggttgaaagtccaattttaggtttagcagaagaaggtgctttgttcagcttgactgatgaaggaaaaatcgttgttaataatccgcataaagcggaccttcgcttggcagcacttaatcgtgaccttgccaaccaaagtagtaaataa

SEQ ID NO: 113000 - protein, 340 aa, Streptococcus agalactiae serotype III
MKRIAVLTSGGDAPGMNAAIRAVVRKAISEGMEVYGINQGYYGMVTGDIFPLDANSVGDTINRGGTFLRSARYPEFAELEGQLKGIEQLKKHGIEGVVVIGGDGSYHGAMRLTEHGFPAVGLPGTIDNDIVGTDYTIGFDTAVATAVENLDRLRDTSASHNRTFVVEVMGRNAGDIALWSGIAAGADQIIVPEEEFNIDEVVSNVRAGYAAGKHHQIIVLAEGVMSGDEFAKTMKAAGDDSDLRVTNLGHLLRGGSPTARDRVLASRMGAYAVQLLKEGRGGLAVGVHNEEMVESPILGLAEEGALFSLTDEGKIVVNNPHKADLRLAALNRDLANQSSK

SEQ ID NO: 113001 - DNA, 1014 bp, Streptococcus mutans
  CDS (1)..(1014): transl_table=11
atgaaacgtattgctgttttgaccagtggcggagacgctcctggtatgaatgctgccgttcgtgcagtcgttcgtaaagcaatttctgaaggaatggaagtttgcggaatcaatcgtggttatgctggtatggttgaaggagatatcttcccgcttgacgctaaaggtgtatcaaacatcctttctcgtggagggacatttctccagtccgcacgttaccctgaatttgcaaagcttgaggggcaattaaagggtatcgagcaactcaaaaagcatggcattgaaggagtcgttgttataggtggcgatggttcttatcatggtgcgatgcgcttgactgagcatggttttcctgctgtcggtcttccgggtacaattgataacgatatcgtaggaactgattatacaattggttttgatactgcagtaaacactgctacggatgcacttgataaaattcgtgatacctcatttagtcacggcagaacttttgttgttgaggttatgggacgtaatgcaggagatattgctctttggtctggtattgctgccggtgctgaccaaattattattcctgaagagccctatgatattaaagaggttgtcgccaatgtgaaaaatggctatcttagtaagtctaaaaaccaccatctcattgttcttgccgaaggcgttatgcatggtgaagagtttgctgctcagatgaaggaagcaggagataatagtgatcttcgtgttaccaaccttgggcatatcctgcgcggtggtgcaccaactcctcgtgatcgtgtgattgcttcatggatgggagcccatgccgttgaattgctcagggaaggaaaaggcggtcttgccattggtattcaaaatgaggagttggttgagcatccaattcttggatctgcggaagacggtgcactctttagtttaacagaacaaggcgagatcgttgtaaataatccgcataaagcacgtcttgattttgctgctttgaatcgtgatttgtccaactaa

SEQ ID NO: 113002 - protein, 337 aa, Streptococcus mutans
MKRIAVLTSGGDAPGMNAAVRAVVRKAISEGMEVCGINRGYAGMVEGDIFPLDAKGVSNILSRGGTFLQSARYPEFAKLEGQLKGIEQLKKHGIEGVVVIGGDGSYHGAMRLTEHGFPAVGLPGTIDNDIVGTDYTIGFDTAVNTATDALDKIRDTSFSHGRTFVVEVMGRNAGDIALWSGIAAGADQIIIPEEPYDIKEVVANVKNGYLSKSKNHHLIVLAEGVMHGEEFAAQMKEAGDNSDLRVTNLGHILRGGAPTPRDRVIASWMGAHAVELLREGKGGLAIGIQNEELVEHPILGSAEDGALFSLTEQGEIVVNNPHKARLDFAALNRDLSN

SEQ ID NO: 113003 - DNA, 1008 bp, Streptococcus pneumoniae
  CDS (1)..(1008): transl_table=11
atgaaacgtattgctgttttgactagtggtggagacgcccctggtatgaacgctgccatccgtgcagttgttcgtcaagcaatttcagaaggaatggaagtttttggtatctatgacggatatgctggtatggttgccggtgaaattcatcccctagatgcagcttcagtaggggacatcatttctcgtggtggtactttccttcactcagctcgttacccagagttcgctcaacttgaagggcaacttaaagggattgagcaattgaaaaaacacggaattgaaggtgtagttgttatcggtggtgacggatcttaccacggcgctatgcgtttgactgaacatggcttcccagctattggtcttccaggtacaatcgataacgatatcgttggtactgactttacaatcggttttgacacagcggttactactgccatggacgctatcgataagattcgtgatacatcatcaagtcaccgtcgtacttttgtaatcgaagttatgggacgtaacgctggtgatatcgctctttgggctggtattgcaactggtgctgatgaaatcatcatccctgaagcaggcttcaagatggaagatatcgtagcaagcatcaaagctggttatgaatgtggtaaaaaacacaatattatcgtcttagctgaaggtgtgatgtcagcggctgaatttggtcaaaaacttaaagaagctggagatacaagcgaccttcgtgtaacagaacttggacatattcaacgtggtggttctccaactgcgcgtgaccgtgttttggcgtcacgtatgggtgcacatgctgttaaacttcttaaagaaggtatcggtggtgttgcggttggtattcgtaacgaaaaaatggttgaaaatccaattcttggtactgcagaagaaggggcattgtttagccttactgcagaaggtaagattgtggttaacaacccacacaaagccgatattgagctatctagcttgaataagagcttgtcataa

SEQ ID NO: 113004 - protein, 335 aa, Streptococcus pneumoniae
MKRIAVLTSGGDAPGMNAAIRAVVRQAISEGMEVFGIYDGYAGMVAGEIHPLDAASVGDIISRGGTFLHSARYPEFAQLEGQLKGIEQLKKHGIEGVVVIGGDGSYHGAMRLTEHGFPAIGLPGTIDNDIVGTDFTIGFDTAVTTAMDAIDKIRDTSSSHRRTFVIEVMGRNAGDIALWAGIATGADEIIIPEAGFKMEDIVASIKAGYECGKKHNIIVLAEGVMSAAEFGQKLKEAGDTSDLRVTELGHIQRGGSPTARDRVLASRMGAHAVKLLKEGIGGVAVGIRNEKMVENPILGTAEEGALFSLTAEGKIVVNNPHKADIELSSLNKSLS

SEQ ID NO: 113005 - DNA, 1020 bp, Streptococcus thermophilus
  CDS (1)..(1020): transl_table=11
atgaaacgtattgctgttttgaccagtggtggagatgcccctggtatgaacgctgccgttcgtgcagttgttctcaaagcaatttctgaaggaattgaagtgttcggcattaaccgtggatacgccggtatggttgaaggagatatcttcaaacttgatgccaaacgcgtagaaaacatccttagccgtggtggcactttccttcagtctgctcgctatcccgagtttgcccaacttgaaggtcaacttaaaggtattgagcaacttaaaaaatatggaatcgaaggtgtagttgttattggtggagatggttcttaccatggtgctatgcgtttgactgaacatggtttcccagcagttggtctcccaggaactatcgataacgatatcgttggtacagactatacaattggatttgatacagccgttgcaactgcaacagaagctttggataaaatccaagatacagctttcagtcatggacgtacttttgtcgttgaggtaatgggacgtaacgctggtgatatcgctctttgggctggtattgcttcaggtgctgaccaaattattgtgccagaagaagaatatgacatcaacgaagtggttcgtaaagttaaagaaggttatgaatctggcgaaaaatctcaccacattattgtgcttgctgagggcgttatgggtgctgaagagtttgcagctaaaatgaaagaagctggagatacatcagaccttcgtgctacaaatcttggacacgtaattcgtggtggttcaccaactgcacgtgaccgtgttcttgcttcatggatgggtgcacatgccgttgatcttcttaaagaaggaattggtggtgttgctgtgggtatccataatgaacagcttgttgaaagtccaatccttggtacagcagaagaaggtgctttgttcagtcttactgaagacggtaaaattatcgtaaacaatccacacaaagctcgtcttgattttgcagagcttaaccgttctttagctaacttgaaataa

SEQ ID NO: 113006 - protein, 339 aa, Streptococcus thermophilus
MKRIAVLTSGGDAPGMNAAVRAVVLKAISEGIEVFGINRGYAGMVEGDIFKLDAKRVENILSRGGTFLQSARYPEFAQLEGQLKGIEQLKKYGIEGVVVIGGDGSYHGAMRLTEHGFPAVGLPGTIDNDIVGTDYTIGFDTAVATATEALDKIQDTAFSHGRTFVVEVMGRNAGDIALWAGIASGADQIIVPEEEYDINEVVRKVKEGYESGEKSHHIIVLAEGVMGAEEFAAKMKEAGDTSDLRATNLGHVIRGGSPTARDRVLASWMGAHAVDLLKEGIGGVAVGIHNEQLVESPILGTAEEGALFSLTEDGKIIVNNPHKARLDFAELNRSLANLK

SEQ ID NO: 113007 - DNA, 960 bp, Thermotoga maritima
  CDS (1)..(960): transl_table=11
ttgaagaagatagcagtacttacaagcggcggagacgcacctggaatgaacgcagctgtgagagccgtggtcaggtacggtgtcaggcagggactggaagtgatcggagtgagaagaggttactcaggcctcatcgacggcgattttgtaaaactcgagtacaaagatgtggcaggaatcacagaaaagggaggaacaattctgagaacttccagatgtgaggagttcaagacagaagagggcagggaactcgctgcgaaacagataaaaaaacatggtatagaaggactcgtcgtcataggtggtgaagggagtctcaccggcgctcatcttctttacgaagaacacaaaatacccgttgtcggtataccagcaaccatagacaacgacattgggttgactgacatgtgcataggggtggacacgtgtttgaacacggtgatggatgctgttcaaaagctcaaagacaccgctagctcgcatgagagagctttcattgtggaagtcatggggaggcattccggctacatcgctctcatggcgggactggtgactggtgcagaagccatcatcgtaccagagattccggtggattattcacagctcgccgatagaattctcgaagaaaggagaagaggaaagatcaacagcataatcatagtcgctgaaggggcagcgagtgcctataccgtcgcaagacacctcgaatacaggataggctacgaaacgaggatcaccatactcggacacgtacagagaggtggttctccaacggctttcgacagaagactggcactgagtatgggagttgaagcggtcgatgctcttctggacggagaggtagacgtgatgatagcgctccaagggaacaagttcgtgagagttcctataatggaagcgctctccacaaagaaaacgatcgacaaaaaactttacgaaatagcacatatgctttcatga

SEQ ID NO: 113008 - protein, 319 aa, Thermotoga maritima
MKKIAVLTSGGDAPGMNAAVRAVVRYGVRQGLEVIGVRRGYSGLIDGDFVKLEYKDVAGITEKGGTILRTSRCEEFKTEEGRELAAKQIKKHGIEGLVVIGGEGSLTGAHLLYEEHKIPVVGIPATIDNDIGLTDMCIGVDTCLNTVMDAVQKLKDTASSHERAFIVEVMGRHSGYIALMAGLVTGAEAIIVPEIPVDYSQLADRILEERRRGKINSIIIVAEGAASAYTVARHLEYRIGYETRITILGHVQRGGSPTAFDRRLALSMGVEAVDALLDGEVDVMIALQGNKFVRVPIMEALSTKKTIDKKLYEIAHMLS

SEQ ID NO: 113009 - DNA, 966 bp, Thermoanaerobacter tengcongensis
  CDS (1)..(966): transl_table=11
atgaagacgattggaatacttacaagcggtggagatgctcctggcatgaatgcagctataagggctgtggtgaggacaggaatttactacggccttaaggtaaagggtattatgagaggatttgcaggtcttgtagaagatgaagtgatagatttggggctttcttcagtaggagatattatacaaaaaggtgggacaatcttaaggactgctcgttgcgaggagttcaagcaaaaagaggtgagaaaaaaggcatacgagactttgcagaaacatggaattgaaggattggttgtaatcggaggagatggttccttcagaggtgctcagcttcttagcgaagagtggaatgtcaatacgatttgtatacctggcactattgacaatgacatcccttgtacagattatactattggatttgatacagcctgcaacactgtgattgatgctataaataaaataagagatacagcaacttcccatgagagagcgaatataatagaggtcatgggtagaaattcagggtacatcgccctttacgctggtgtggctggtggagcggagatgataattttgcctgaagtggaatggagtatagatgaattatgtgataaaataacttatggaataaagagaggaaaacttcaccacataatcgtattggcagagggagtaatgagcgccccagaactggcaaaaatgataaaagaaaggcttcccaagttagacttaaggtacaccatattaggacatattcaaagagggggagctcccactgtgatggacagagttttggcaagtcagatgggagcaagggcagtggagcttcttttggagaacaagacgaagagagtaataagcataagaaacaatcaaattgttgacgatgatatagatgaagcgctttcaatgaagaaagagtttaacagaaagctttacgaactcagcaaaatcctctctatataa

SEQ ID NO: 113010 - protein, 321 aa, Thermoanaerobacter tengcongensis
MKTIGILTSGGDAPGMNAAIRAVVRTGIYYGLKVKGIMRGFAGLVEDEVIDLGLSSVGDIIQKGGTILRTARCEEFKQKEVRKKAYETLQKHGIEGLVVIGGDGSFRGAQLLSEEWNVNTICIPGTIDNDIPCTDYTIGFDTACNTVIDAINKIRDTATSHERANIIEVMGRNSGYIALYAGVAGGAEMIILPEVEWSIDELCDKITYGIKRGKLHHIIVLAEGVMSAPELAKMIKERLPKLDLRYTILGHIQRGGAPTVMDRVLASQMGARAVELLLENKTKRVISIRNNQIVDDDIDEALSMKKEFNRKLYELSKILSI

SEQ ID NO: 113011 - DNA, 963 bp, Vibrio cholerae
  CDS (1)..(963): transl_table=11
atgattaaaaaaatcggtgttttgacgagtggtggcgatgccccaggtatgaatgcagctattcgcggcgtggtgcgtacagcacttggcgcaggtttagaagtgtttggtatttacgacggctaccaaggtctgtacgaagatcgtattaagcagctagaccgttcaagcgtgtctgacgtgatcaaccgtggcggtacttttttaggctctgcacgcttcccacaatttcgtgaagttgaagtgcgcgaaaaagcgattgaaaacctgaaaaagcacggcattgaagcgctggttgtgattggtggtgacggctcttacatgggcgccaaaaaactgaccgaaatgggtttcccttgtatcggtctgccaggcacgattgataacgatatcgcgggcaccgactacaccatcggttatttgactgccctgaacaccgttattgaagcgattgaccgtctgcgcgatacctcttcttcacaccaacgtatctctatcgtagaaatcatgggtcgtcactgtggtgacttgacgctgacctctgcgattgcgggtggctgtgaatacatcatcacaccggaaacgggtctgaatatggagcagctgatttccaatatcaaagatggtattgcgaaaggcaaaaagcacgcgatcattgcgctgactgagctgatgatggatgccaacaaactggccaaagagattgaatcggcgacaggccgtgaaactcgcgcaactgtattaggccatattcaacgtggtggtaaacctaccgcatttgaccgtgtactggcatcgcgcatgggtaactacgcggtgcatctattgatggaaggtcacggtggtcgttgtgtgggtatccagaaagagcaactggttcaccacgacatcattgatgcgattgaaaacatgaagcgtcctgtacgcactgacctgtacaaagtcgctgaagagctgttctaa

SEQ ID NO: 113012 - protein, 320 aa, Vibrio cholerae
MIKKIGVLTSGGDAPGMNAAIRGVVRTALGAGLEVFGIYDGYQGLYEDRIKQLDRSSVSDVINRGGTFLGSARFPQFREVEVREKAIENLKKHGIEALVVIGGDGSYMGAKKLTEMGFPCIGLPGTIDNDIAGTDYTIGYLTALNTVIEAIDRLRDTSSSHQRISIVEIMGRHCGDLTLTSAIAGGCEYIITPETGLNMEQLISNIKDGIAKGKKHAIIALTELMMDANKLAKEIESATGRETRATVLGHIQRGGKPTAFDRVLASRMGNYAVHLLMEGHGGRCVGIQKEQLVHHDIIDAIENMKRPVRTDLYKVAEELF

SEQ ID NO: 113013 - DNA, 963 bp, Vibrio parahaemolyticus
  CDS (1)..(963): transl_table=11
atgattaagaagatcggtgttttaacaagtggcggtgacgcacctggtatgaacgctgctatacgcggcgtagtacgtacagcactatccgagggattggaagttttcggtgtgtacgacggctacctaggcctatacgaaggccgcatcgagaagctagatcgttctagcgtttcagatgtgatcaacaaaggtggtacgttcctaggttctgcacgtttccctgaatttaaacaagtggaagtgcgtgaaaaagcgatcgagaacctaaagaaacatggtattgatgcgctagtcgtgatcggtggcgacggttcgtacatgggtgcgaagaaactgactgaaatgggttacccatgtatcggtcttccaggcacaatcgataacgatatcgctggtactgactacacagtgggttacctaagtgcactaaacacagttatcgatgcaatcgaccgtctacgtgatacttcttcttctcaccaacgtatttcaattgtagaaatcatgggccgtcactgtggtgacctaactctgatgtctgcaatcgcgggtggttgtgagtacatcatcactccagaaactggtctagataaagacaagctgatcagcaacatccaagacggcatcgcaaaaggtaagaaacacgcaatcatcgcgcttactgagctaatgatggatgcaaatgaactggctcgtgacattgaagcggctacaggtcgtgaaactcgtgcaacagtacttggtcacatccaacgtggtggtcgtccaactgcatttgaccgcgttttagcatctcgcatgggtaactacgctgttcacctactgcttgaaggtcatggcggtcgctgtgtcggtatcgtgaaagagcaacttgttcaccacgacatcatcgacgcgatcgaaaacatgaagcgtccagtgcgtaacgatctatacaaagttgctgaagaactgttctaa

SEQ ID NO: 113014 - protein, 320 aa, Vibrio parahaemolyticus
MIKKIGVLTSGGDAPGMNAAIRGVVRTALSEGLEVFGVYDGYLGLYEGRIEKLDRSSVSDVINKGGTFLGSARFPEFKQVEVREKAIENLKKHGIDALVVIGGDGSYMGAKKLTEMGYPCIGLPGTIDNDIAGTDYTVGYLSALNTVIDAIDRLRDTSSSHQRISIVEIMGRHCGDLTLMSAIAGGCEYIITPETGLDKDKLISNIQDGIAKGKKHAIIALTELMMDANELARDIEAATGRETRATVLGHIQRGGRPTAFDRVLASRMGNYAVHLLLEGHGGRCVGIVKEQLVHHDIIDAIENMKRPVRNDLYKVAEELF

SEQ ID NO: 113015 - DNA, 984 bp, Yersinia pestis
  CDS (1)..(984): transl_table=11
atggttaagaaaattggtgtcctaacaagtggtggtgatgcacccggtatgaatgctgctattcgcggggttgttcgtgccgctttgtcagcagggttagacgttttcggtattgaagatggctatcttggcttatatgaaaatcgtatgaagaagctggatcgctatagcgtgtcagatatgattaaccgtggcggtactttcctcggatctgctcgtttcccagaattccgcgatccggaagtgcgtaaagttgccctcaagaatatgcatgagcgtggcattgatggcttggttgttatcggtggtgatggttcttatgctggtgcggacctgctgacaaaagaagggggaattcactgtgttggtttaccgggcactatcgataacgatgtggcgggtactgactacaccatcggttttttcaccgcactggaaacggtagtggaagccattgaccgcttacgcgatacctcttcttcccaccaacgtatctctatcgtggaagtgatgggccgctattgcggtgatttaacgttggcagccgcgattgccggtggttgtgagtttattgcgatccctgaagttgaatttaaacgtgatgatctggttgctgaaatcaaagcgggcatcgcgaaaggtaaaaagcacgcgattgttgctattactgaaaagctggatgatatcgattcattggctaagtacattgaaaaagagacgggccgtgaaactcgtggcaccgtgttaggccatatccaacgtggtggtgctccggtggcttatgaccgtattcttgcttcccgtatgggggcttatgctgtcgatttgctgttacaggaccacgattacaaaaaaggtggtttctgcgtcggtgtacagaatgagaagatggtgcatgagttaatttctgtgtgtatcgcgccagagaataagaaaagtaaatttaaagaagattggtacgatacagcgaagaaactgttctaa

SEQ ID NO: 113016 - protein, 327 aa, Yersinia pestis
MVKKIGVLTSGGDAPGMNAAIRGVVRAALSAGLDVFGIEDGYLGLYENRMKKLDRYSVSDMINRGGTFLGSARFPEFRDPEVRKVALKNMHERGIDGLVVIGGDGSYAGADLLTKEGGIHCVGLPGTIDNDVAGTDYTIGFFTALETVVEAIDRLRDTSSSHQRISIVEVMGRYCGDLTLAAAIAGGCEFIAIPEVEFKRDDLVAEIKAGIAKGKKHAIVAITEKLDDIDSLAKYIEKETGRETRGTVLGHIQRGGAPVAYDRILASRMGAYAVDLLLQDHDYKKGGFCVGVQNEKMVHELISVCIAPENKKSKFKEDWYDTAKKLF

SEQ ID NO: 113017 - DNA, 1026 bp, Amycolatopsis mediterranei
  CDS (1)..(1026): transl_table=11
atgcgtgtcggtgtgctgaccggcggcggcgactgcccggggctcaacgcggtgatccgcgcggtggtgcgcaagggcatcgaagtgcacggctgggacttcgtgggcttccgcaacggctggaacggcccgctgaccggcgacagccgcccgctgggcctgaacgacgtcgaggacatcctcacccgcggcggcaccatcctgcggtcctcgcgcaccaacccctacaaggtcgagggcggcgtcgacaagatcaagcaggtcctcgccgatcaaggcgtcgacgcgctgatcgcgatcggcggcgaggacaccctcggcgtcgcgaagcggctgaccgacgacggcatcggcgtcgtgggcgtgcccaagacgatcgacaacgacctgggcgcgaccgactacaccttcggcttcgacaccgcggtctccatcgcgaccgaggcgatcgaccggctgcacaccacggccgagtcgcaccaccgcgcgctcgtcgtcgaggtcatgggccggcacgccggctggatcgcgctgcactccggcctcgccggcggcgccagcgtcatcctggtgccggagcggcacttcaacgtcgaccaggtcgtctcctgggtcgagcgccgcttcgagaaggagttcgcgccgatcatcgtcgtcgccgagggcgcactgcccgagggtggcgaggagaagctgctgaccggcgagaaggacgccttcgggcacgtccgcctcggcggcatcggcacctggctggccgacgagatcgcccaccgcaccggcaaggagtcccgcgcggtcgtgctgggccacgtccagcgcggcggcaccccgacggcctacgaccgcgtcctggccacccgcttcggcctcaacgcggtcgacgcggtcgcggacggcgacttcggtgtgatggtcgccctcaagggcacggacatcgtccgcgtgaagctgtccgaggcgacggccgagctgaagacggtcccggtcgagcgctaccaggaagccgaagtcttcttcggctga

SEQ ID NO: 113018 - protein, 341 aa, Amycolatopsis mediterranei
MRVGVLTGGGDCPGLNAVIRAVVRKGIEVHGWDFVGFRNGWNGPLTGDSRPLGLNDVEDILTRGGTILRSSRTNPYKVEGGVDKIKQVLADQGVDALIAIGGEDTLGVAKRLTDDGIGVVGVPKTIDNDLGATDYTFGFDTAVSIATEAIDRLHTTAESHHRALVVEVMGRHAGWIALHSGLAGGASVILVPERHFNVDQVVSWVERRFEKEFAPIIVVAEGALPEGGEEKLLTGEKDAFGHVRLGGIGTWLADEIAHRTGKESRAVVLGHVQRGGTPTAYDRVLATRFGLNAVDAVADGDFGVMVALKGTDIVRVKLSEATAELKTVPVERYQEAEVFFG

SEQ ID NO: 113019 - DNA, 1026 bp, Amycolatopsis methanolica
  CDS (1)..(1026): transl_table=11
atgcgtgtcggcgtgctgaccggtggcggcgactgccccgggctcaacgcggtcatccgcgcggtggtccgaaagggcatcgaggcgcatgggtgggagatcgtcggcttccgctccggctggcgcggcccgctgaccggggacagccgtccgctcggtctcgacgacgtcgaggagatcctgatccgcggcggcaccatcctcggctcctcgcggaccaacccgtacaaggaggagggtggcgtcgagaagatccgcgccgtcctcgccgaccagggcgtcgacgcgctcatcgcgatcggcggcgaggacaccctcggcgtcgcgaagaagctcaccgacgacggcatcggcgtggtcggcgtgcccaagacgatcgacaacgacctcgcggccaccgactacacgttcggcttcgacaccgcggtgcacatcgccaccgaggcgatcgaccggctgcgcaccaccgccgagtcgcactaccgcgcgatggtcgtcgaggtcatgggccgtcacgcgggctggatcgcactgcacgccggcctggccggtggcgccaacgtcatcctggtcccggagcggccgttctccgtcgagcaggtcgtggagtgggtcgagcgccgcttcgagaagatgtacgcgccgatcatcgtggtcgccgagggcgcggtgccggagggcggcgccgaggtgctccggaccggggagaaggacgcgttcggccacgtccagctcggcggggtcggcacctggctggccgacgagatcgcggagcgcaccggtaaggagtcgcgcgcggtcgtgctcgggcacacccagcgcggcggcacgccgacggcttacgaccgggtgctcgcgacccgcttcggcctgcacgccgtggacgcggtagcggacggcgacttcggcacgatggtcgcgctgcgcggcaccgatatcgtccgggtcaagctcgcggaggcgaccgcggagctgaagaccgtgccgccggagcgctacgaggaggccgaggtcttcttcggctga

SEQ ID NO: 113020 - protein, 341 aa, Amycolatopsis methanolica
MRVGVLTGGGDCPGLNAVIRAVVRKGIEAHGWEIVGFRSGWRGPLTGDSRPLGLDDVEEILIRGGTILGSSRTNPYKEEGGVEKIRAVLADQGVDALIAIGGEDTLGVAKKLTDDGIGVVGVPKTIDNDLAATDYTFGFDTAVHIATEAIDRLRTTAESHYRAMVVEVMGRHAGWIALHAGLAGGANVILVPERPFSVEQVVEWVERRFEKMYAPIIVVAEGAVPEGGAEVLRTGEKDAFGHVQLGGVGTWLADEIAERTGKESRAVVLGHTQRGGTPTAYDRVLATRFGLHAVDAVADGDFGTMVALRGTDIVRVKLAEATAELKTVPPERYEEAEVFFG

SEQ ID NO: 113021 - DNA, 1041 bp, Dictyoglomus thermophilum
  CDS (1)..(1041): transl_table=11
atgagtaaaatgcgtattggtgtattaacaggtggaggcgattgcccaggtctaaacccagctatccgtggtattgtcatgagagcattagattatggagacgaagttataggtttgaagtatggatgggctggtcttcttaaggcagatactatgcctttatccttagaaatggtagaagatattcttgaaatcggcggaacaattcttggaagttctagaacaaacccattcaaaaaagaagaagatgttcaaaaatgtgttgagaacttcaaaaagttaaacttagatgccttaatcgccataggtggagaagacactctaggagttgcatcaaaatttagcaaacttggtcttccaatgatcggagttccaaaaactattgataaagatttagaagaaactgactatactcttggatttgacactgctgttgaagtagtggtagatgcaattaaaagacttagagatactgcaagatctcatgcaagagttatcgtagtagaaataatgggaagacatgcaggatggttagctctttatggtgggcttgcaggaggagcagattatatcttaatccctgaagtagaacctaatcttgaggatctttacaatcacataagaaaactatacgcaagaggaagaaatcacgcagttgtagccatcgctgagggagtacaactaccaggatttacttatcaaaaaggacaagaaggaatggtagatgcctttggtcacattcgcttaggtggtgtaggtaatgtactagccgaagagatacagaagaacttgggaattgaaaccagagccgtaatcttaagccacctacaaaggggaggaagtccatcaataagagatagaatcatggggcttctccttggtaagaaggctgtagacttagtacatgaaggaaaatctggattatttgttgctgtaaaaggaaacgaattagtaccagtagatataactttaattgaagggaaaacaaagaatgttgatcctgccttttatgagagcgtaaaaactttctttaataagtaa

SEQ ID NO: 113022 - protein, 346 aa, Dictyoglomus thermophilum
MSKMRIGVLTGGGDCPGLNPAIRGIVMRALDYGDEVIGLKYGWAGLLKADTMPLSLEMVEDILEIGGTILGSSRTNPFKKEEDVQKCVENFKKLNLDALIAIGGEDTLGVASKFSKLGLPMIGVPKTIDKDLEETDYTLGFDTAVEVVVDAIKRLRDTARSHARVIVVEIMGRHAGWLALYGGLAGGADYILIPEVEPNLEDLYNHIRKLYARGRNHAVVAIAEGVQLPGFTYQKGQEGMVDAFGHIRLGGVGNVLAEEIQKNLGIETRAVILSHLQRGGSPSIRDRIMGLLLGKKAVDLVHEGKSGLFVAVKGNELVPVDITLIEGKTKNVDPAFYESVKTFFNK

SEQ ID NO: 113023 - DNA, 1584 bp, Oryza sativa
  CDS (1)..(1584)
atgaccttttctgggatggacattgctttaaaagcaagcacacactcttctacatcccagcaacactggttgcattcaaccaggtaccggtgtcaatatggtttgggttccactcacttgaatggaagaaagagaagtcctatggtactgtctgtaagagctgtttctgggaaatcagacttagatttcagtgatccttcttggaaggaaaagtatcaagaagactggaataggcgtttcagtttgccgcatattacagatatatatgatttgaagccaaggctaactacattctctctgaagaaaaacaggactgatggtggtagtttatcagcagataagtggaatggctatgtaaataaggatgaccgtgcacttctgaaggtgataaagtatgcctcccctacttctgctggagctgagtgcgtagatcctgactgcagttgggttgaacattggattcatcgtgcagggcctcgtaaggagatatactatgagcctgcagaagtaaaagctgctattgttacctgtggaggcctctgccctggtttaaatgatgtcattagacagatagtatttacattggagatctatggggttaagaacattgttggaattcagtttggttatcgtggattttttgagaaaggcttaaaagaaatgcctctttcacgtaaagtggtggaaaacataaatctttctggtggaagtttcctaggtgtgtctcgtggaggagctaaaactagtgagatcgtcgatagtatacaagccagaagaattgatatgctttttgtaattggtggaaacggtagccatgcaggagctaatgctatccatgaggagtgtcgtaagagaaaactgaaagtgtcagttgtagcagttccaaagacaattgataatgatatactattcatggataagacttttggttttgacacggctgtagaagaagctcagcgtgccatcaattctgcctacatagaggcacgaagtgcatatcatggaattgggttggtcaaattaatgggaagaagtagtgggttcattgccatgcaagcttctctttccagtggacagattgatgtctgcctaatacccgaggtatcttttacactagatggagaacatggtgtcatgcgacaccttgaacatttactggaaaaaaagggattttgcgtggtttgtgttgctgaaggtgcagggcaggatttactgcaaaaatcaaatgcaactgatgcatcaggaaatgtaatacttagtgactttggtgtccacatgcaacagaagattaagagtcatttcaaggacatcggtgttccagctgatgtaaaatacattgatccgacatatatggtccgggcctgtcgtgcgaatgcatctgatgctatcttgtgcactgtacttggacaaaatgctgttcatggagcctttgccgggttcagtggtatcacatctggtatttgcaacacgcactacgctttcctcccgatcacagaagtcatcacaaaaccaaagcgcgtgaaccccaacagcaggatgtggcaccgctgcctcacttccactggccaaccggacttccactga

SEQ ID NO: 113024 - protein, 527 aa, Oryza sativa
MTFSGMDIALKASTHSSTSQQHWLHSTRYRCQYGLGSTHLNGRKRSPMVLSVRAVSGKSDLDFSDPSWKEKYQEDWNRRFSLPHITDIYDLKPRLTTFSLKKNRTDGGSLSADKWNGYVNKDDRALLKVIKYASPTSAGAECVDPDCSWVEHWIHRAGPRKEIYYEPAEVKAAIVTCGGLCPGLNDVIRQIVFTLEIYGVKNIVGIQFGYRGFFEKGLKEMPLSRKVVENINLSGGSFLGVSRGGAKTSEIVDSIQARRIDMLFVIGGNGSHAGANAIHEECRKRKLKVSVVAVPKTIDNDILFMDKTFGFDTAVEEAQRAINSAYIEARSAYHGIGLVKLMGRSSGFIAMQASLSSGQIDVCLIPEVSFTLDGEHGVMRHLEHLLEKKGFCVVCVAEGAGQDLLQKSNATDASGNVILSDFGVHMQQKIKSHFKDIGVPADVKYIDPTYMVRACRANASDAILCTVLGQNAVHGAFAGFSGITSGICNTHYAFLPITEVITKPKRVNPNSRMWHRCLTSTGQPDFH

SEQ ID NO: 113025 - DNA, 1578 bp, Zea mays
  CDS (1)..(1578)
atggcagtagcgcccatggactgcggtgctggttcgattagtctaggccacaaggttttgggccgtttcggagtacccaacagcagtagattgcgatgggtgggatatgacaggaaaccaaggacagatcagttgattgctagagccgtatccgtggatcggacacagctagacttttcgaatccggactggaagaagcagtttcaagaggatttcgataagcgcttcagcttgccacacttgacagatgtaattgatgtggaaccgaggccaactactttttctctcaagagcagagcccctcttgagaacgcgaatggtaccatgcaaggatcatggaacggctatgtcaatgatgatgacagagcacttttgaaggttattaagtttgcctcaccaacttctgctggagctgactgcattgaccctgattgtagctgggttgaacaatgggtgcaccgtgctggtccacgcaaacaaatatattttgagcctcaatatgtgaaggctgggattgtgtcgtgtggtgggctctgcccaggtctcaatgatgtcattcggcagattgtgcttacacttgaaaaatatggggtgaaaaacattgttgggatacagcatggattccgtggattttttgaggatcacttatcagaagtgccactttctaggcatgtagtccaaaatatcaatcttgctggtggtagcttcttaggagtctctcgcggtggtgcaaacatttcagacattgttgacagtattcaggctaggaggcttgatatgctatttgtgcttggtggaaatggaacacatgctggagctaatgctatacatgatgagtgccgcaagagaaaactgcaagtatcgattgtatgtgtccccaaaactattgacaatgacatattactgatggacaagacctttggatttgatactgcagtggaagctgcacaaagagctatcaactctgcatacattgaggcacattctgcatttcatggcattggactggtcaagctgatgggaagaagcagcggcttcatcacaatgcatgcctccctgtcaagtggccaagtagatatctgtctgatacctgaggtaccattcactcttgatggaccgaatggagttcttcgacatctcgaacacctgatagagaccaagggatttgctctggtttgcgttgctgaaggagcaggacaggaatactttcaaaagtcaaatgcaactgatgcatcagggaacatggttcttagtgacattggtgtgcaccttcagcagaagatcaagtcccattttaaggacataggagtccattctgatgtcaagtatattgatccaacatacatgctccgagctgtgcgagccaatgcatccgatgccatcctgtgcaccgtgcttggtcagaatgctgttcatggtgcctttgcgggttttagcggcatcacaaccggggtgtgcaacacacacaatgtgtacttgccgataccggaagtgatcaaatccacgaggtttattgatccaaacagtcggatgtggcaccggtgcctgacctcaaccgggcaaccagacttccattga

SEQ ID NO: 113026 - protein, 525 aa, Zea mays
MAVAPMDCGAGSISLGHKVLGRFGVPNSSRLRWVGYDRKPRTDQLIARAVSVDRTQLDFSNPDWKKQFQEDFDKRFSLPHLTDVIDVEPRPTTFSLKSRAPLENANGTMQGSWNGYVNDDDRALLKVIKFASPTSAGADCIDPDCSWVEQWVHRAGPRKQIYFEPQYVKAGIVSCGGLCPGLNDVIRQIVLTLEKYGVKNIVGIQHGFRGFFEDHLSEVPLSRHVVQNINLAGGSFLGVSRGGANISDIVDSIQARRLDMLFVLGGNGTHAGANAIHDECRKRKLQVSIVCVPKTIDNDILLMDKTFGFDTAVEAAQRAINSAYIEAHSAFHGIGLVKLMGRSSGFITMHASLSSGQVDICLIPEVPFTLDGPNGVLRHLEHLIETKGFALVCVAEGAGQEYFQKSNATDASGNMVLSDIGVHLQQKIKSHFKDIGVHSDVKYIDPTYMLRAVRANASDAILCTVLGQNAVHGAFAGFSGITTGVCNTHNVYLPIPEVIKSTRFIDPNSRMWHRCLTSTGQPDFH

SEQ ID NO: 113027 - DNA, 1584 bp, Zea mays
  CDS (1)..(1584)
atgaccttgtctgggatggctgttgctttcaaagcaagtacaagttctgtcacacagcaacattggtcaagtccaacaaaggaccagtgtcaatatggtttcactcatttaagcaggcaaaagtgcagaaaaagagcactgtgtgtgacagctatatcagggaagctagacctagatttcactgatccttcttggaaccaaaagtaccaggaagactggaacaggcgttttagtttgccacatattaatgatatatatgatttggaaccaagaagaactacattctctttgaagaaaaacagaattcccctgggtgatggtgatggctcatcaactgatatgtggaacggttatgtaaataagaatgatagagcccttttgaaggtgataaagtatgcatctcctacttctgctggagctgagtgcattgatcctgattgtagctgggtggaacactgggttcatcgtgcaggtcctcgtaaggagatatattacgaacctgaagaagtaaaggctgccattgttacctgtggagggctctgtcctggtctaaatgatgtcattaggcagatagtatttactttggagacttatggggtgaagaatattgttggaatcccatttggttatcgtggattttttgagaaaggcttaaaagaaatgccgctctcgcgtgacgtggtggaaaacataaatctttctggaggaagtttcctaggagtctctcgtggaggagctaaaactagtgagattgtagatagcatacaagccagaagaattgacatgctatttgtaattggtggaaatggtagccatgcaggagctaatgctattcatgaggagtgtcgaaagagaaaactgaaagtttcagttgtagcagttccaaagacaattgataatgatatactttttatggataagacgtttggttttgatacagctgtagaagaagctcagcgtgctatcaattctgcctatatagaggcacgtagtgcataccacggaattgggttagtaaaattaatgggaagaagtagtggattcatagccatgcatgcttctctttccagtggacagattgatgtttgcctgatacctgaggtatccttcacacttgatggagaacatggtgtcttgcgacaccttgagcatttacttaatacaaagggattttgtgtggtttgtgttgctgaaggtgcagggcaggatttactgcaaaaatcaaatgcaactgacgcttcaggaaatgtgatacttagtgactttggtgtccacatgcagcagaagatcaagaagcatttcaaggacatcggtgttcccgctgatctaaaatacattgatccaacatatatggttcgggcctgccgggcaaatgcatctgatgctattctctgcaccgtacttgggcaaaatgctgtccatggagcatttgctgggttcagtggcatcacgtcaggtgtttgcaacacacattatgtctaccttcccatcacagaggtcattacaacaccaaagcacgtcaaccccaacagcagaatgtggcaccgctgcctcacatccactggccagccagacttccattga

SEQ ID NO: 113028 - protein, 527 aa, Zea mays
MTLSGMAVAFKASTSSVTQQHWSSPTKDQCQYGFTHLSRQKCRKRALCVTAISGKLDLDFTDPSWNQKYQEDWNRRFSLPHINDIYDLEPRRTTFSLKKNRIPLGDGDGSSTDMWNGYVNKNDRALLKVIKYASPTSAGAECIDPDCSWVEHWVHRAGPRKEIYYEPEEVKAAIVTCGGLCPGLNDVIRQIVFTLETYGVKNIVGIPFGYRGFFEKGLKEMPLSRDVVENINLSGGSFLGVSRGGAKTSEIVDSIQARRIDMLFVIGGNGSHAGANAIHEECRKRKLKVSVVAVPKTIDNDILFMDKTFGFDTAVEEAQRAINSAYIEARSAYHGIGLVKLMGRSSGFIAMHASLSSGQIDVCLIPEVSFTLDGEHGVLRHLEHLLNTKGFCVVCVAEGAGQDLLQKSNATDASGNVILSDFGVHMQQKIKKHFKDIGVPADLKYIDPTYMVRACRANASDAILCTVLGQNAVHGAFAGFSGITSGVCNTHYVYLPITEVITTPKHVNPNSRMWHRCLTSTGQPDFH

SEQ ID NO: 113029 - DNA, 1578 bp, Zea mays
  CDS (1)..(1578)
atggcagtagcgcccatggactgcgctgctggttcgattagtctaggccacaaggttttgggccgtttcggagtacccaacagcagtagattgcgatgggtgggatatgacaggaaaccaaggacagatcagttgattgctagagccgtatccgtggatcggacacagctagacttttcgaatccggactggaagaagcagtttcaagaggatttcgataagcgcttcagcttgccacacttgacagatgtaattgatgtggaaccgaggccaactactttttctctcaagagcagagcccctcttgagaacgcgaatggtaccatgcaaggatcatggaacggctatgtcaatgatgatgacagagcacttttgaaggttattaagtttgcctcaccaacttctgctggagctgactgcattgaccctgattgtagctgggttgaacaatgggtgcaccgtgctggtccacgcaaacaaatatattttgagcctcaatatgtgaaggctgggattgtgtcgtgtggtgggctctgcccaggtctcaatgatgtcattcggcagattgtgcttacacttgaaaaatatggggtgaaaaacattgttgggatacagcatggattccgtggattttttgaggatcacttatcagaagtgccactttctaggcatgtagtccaaaatatcaatcttgctggtggtagcttcttaggagtctctcgcggtggtgcaaacatttcagacattgttgacagtattcaggctaggaggcttgatatgctatttgtgcttggtggaaatggaacacatgctggagctaatgctatacatgatgagtgccgcaagagaaaactgcaagtatcgattgtatgtgtccccaaaactattgacaatgacatattactgatggacaagacctttggatttgatactgcagtggaagctgcacaaagagctatcaactctgcatacattgaggcacattctgcatttcatggcattggactggtcaagctgatgggaagaagcagcggcttcatcacaatgcatgcctccctgtcaagtggccaagtagatatctgtctgatacctgaggtaccattcactgttgatggaccgaatggagttcttcgacatctcgaacacctgatagagaccaagggatttgctctggtttgcgttgctgaaggagcaggacaggaatactttcaaaagtcaaatgcaactgatgcatcagggaacatggttcttagtgacattggtgtgcaccttcagcagaagatcaagtcccattttaaggacataggagtccattctgatgtcaagtatattgatccaacatacatgctccgagctgtgcgagccaatgcatccgatgccatcctgtgcaccgtgcttggtcagaatgctgttcatggtgcctttgcgggttttagcggcatcacaaccggggtgtgcaacacacacaatgtgtacttgccgataccggaagtgatcaaatccacgaggtttattgatccaaacagtcggatgtggcaccggtgcctgacctcaaccgggcaaccagacttccattga

SEQ ID NO: 113030 - protein, 525 aa, Zea mays
MAVAPMDCAAGSISLGHKVLGRFGVPNSSRLRWVGYDRKPRTDQLIARAVSVDRTQLDFSNPDWKKQFQEDFDKRFSLPHLTDVIDVEPRPTTFSLKSRAPLENANGTMQGSWNGYVNDDDRALLKVIKFASPTSAGADCIDPDCSWVEQWVHRAGPRKQIYFEPQYVKAGIVSCGGLCPGLNDVIRQIVLTLEKYGVKNIVGIQHGFRGFFEDHLSEVPLSRHVVQNINLAGGSFLGVSRGGANISDIVDSIQARRLDMLFVLGGNGTHAGANAIHDECRKRKLQVSIVCVPKTIDNDILLMDKTFGFDTAVEAAQRAINSAYIEAHSAFHGIGLVKLMGRSSGFITMHASLSSGQVDICLIPEVPFTVDGPNGVLRHLEHLIETKGFALVCVAEGAGQEYFQKSNATDASGNMVLSDIGVHLQQKIKSHFKDIGVHSDVKYIDPTYMLRAVRANASDAILCTVLGQNAVHGAFAGFSGITTGVCNTHNVYLPIPEVIKSTRFIDPNSRMWHRCLTSTGQPDFH

SEQ ID NO: 113031 - DNA, 1578 bp, Zea mays
  CDS (1)..(1578)
atggcagtagcgcccatggactgcggtgctggttcgattagtctaggccacaaggttttgggccgtttcggagtacccaacagcagtagattgcgatgggtgggatatgacaggaaaccaaggacagatcagttgattgctagagccgtatccgtggatcggacacagctagacttttcgaatccggactggaagaagcagtttcaagaggatttcgataagcgcttcagcttgccacacttgacagatgtaattgatgtggaaccgaggccaactactttttctctcaagagcagagcccctcttgagaacgcgaatggtaccatgcaaggatcatggaacggctatgtcaatgatgatgacagagcacttttgaaggttattaagtttgcctcaccaacttctgctggagctgactgcattgaccctgattgtagctgggttgaacaatgggtgcaccgtgctggtccacgcaaacaaatatattttgagcctcaatatgtgaaggctgggattgtgtcgtgtggtgggctctgcccaggtctcaatgatgtcattcggcagattgtgcttacacttgaaaaatatggggtgaaaaacattgttgggatacagcatggattccgtggattttttgaggatcacttatcagaagtgccactttctaggcatgtagtccaaaatatcaatcttgctggtggtagcttcttaggagtctctcgcggtggtgcaaacatttcagacattgttgacagtattcaggctaggaggcttgatatgctatttgtgcttggtggaaatggaacacatgctggagctaatgctatacatgatgagtgccgcaagagaaaactgcaagtatcgattgtatgtgtccccaaaactattgacaatgacatattactgatggacaagacctttggatttgatactgcagtggaagctgcacaaagagctatcaactctgcatacattgaggcacattctgcatttcatggcattggactggtcaagctgatgggaagaagcagcggcttcatcacaatgcatgcctccctgtcaagtggccaagtagatatctgtctgatacctgaggtaccattcactgttgatggaccgaatggagttcttcgacatctcgaacacctgatagagaccaagggatttgctctggtttgcgttgctgaaggagcaggacaggaatactttcaaaagtcaaatgcaactgatgcatcagggaacatggttcttagtgacattggtgtgcaccttcagcagaagatcaagtcccattttaaggacataggagtccattctgatgtcaagtatattgatccaacatacatgctccgcgctgtgcgagccaatgcatccgatgccatcctgtgcaccgtgcttggtcagaatgctgttcatggtgcctttgcgggttttagcggcatcacaaccggggtgtgcaacacacacaatgtgtacttgccgataccggaagtgatcaaatccacgaggtttattgatccaaacagtcggatgtggcaccggtgcctgacctcaaccgggcaaccagacttccattga

SEQ ID NO: 113032 - protein, 525 aa, Zea mays
MAVAPMDCGAGSISLGHKVLGRFGVPNSSRLRWVGYDRKPRTDQLIARAVSVDRTQLDFSNPDWKKQFQEDFDKRFSLPHLTDVIDVEPRPTTFSLKSRAPLENANGTMQGSWNGYVNDDDRALLKVIKFASPTSAGADCIDPDCSWVEQWVHRAGPRKQIYFEPQYVKAGIVSCGGLCPGLNDVIRQIVLTLEKYGVKNIVGIQHGFRGFFEDHLSEVPLSRHVVQNINLAGGSFLGVSRGGANISDIVDSIQARRLDMLFVLGGNGTHAGANAIHDECRKRKLQVSIVCVPKTIDNDILLMDKTFGFDTAVEAAQRAINSAYIEAHSAFHGIGLVKLMGRSSGFITMHASLSSGQVDICLIPEVPFTVDGPNGVLRHLEHLIETKGFALVCVAEGAGQEYFQKSNATDASGNMVLSDIGVHLQQKIKSHFKDIGVHSDVKYIDPTYMLRAVRANASDAILCTVLGQNAVHGAFAGFSGITTGVCNTHNVYLPIPEVIKSTRFIDPNSRMWHRCLTSTGQPDFH

SEQ ID NO: 113033 - DNA, 20 bp, Artificial sequence
  primer
atgggcacaaaacgtattgg

SEQ ID NO: 113034 - DNA, 22 bp, Artificial sequence
  primer
ttagtcttctcctaggtatatg

SEQ ID NO: 113035 - protein, 407 aa, Artificial sequence
  consensus sequence
  Variant (2)..(2): Xaa in position 2 is any amino acid
  Variant (6)..(6): Xaa in position 6 is any amino acid
  Variant (7)..(7): Xaa in position 7 is any or no amino acid
  Variant (10)..(10): Xaa in position 10 is any amino acid
  Variant (12)..(14): Xaa in position 12 to 14 is any amino acid
  Variant (16)..(29): Xaa in position 16 to 29 is any amino acid
  Variant (30)..(41): Xaa in position 30 to 41 is any or no amino acid
  Variant (43)..(44): Xaa in position 43 to 44 is any amino acid
  Variant (46)..(65): Xaa in position 46 to 65 is any amino acid
  Variant (66)..(81): Xaa in position 66 to 81 is any or no amino acid
  Variant (85)..(89): Xaa in position 85 to 89 is any amino acid
  Variant (91)..(109): Xaa in position 91 to 109 is any amino acid
  Variant (110)..(140): Xaa in position 110 to 140 is any or no amino acid
  Variant (142)..(144): Xaa in position 142 to 144 is any amino acid
  Variant (147)..(147): Xaa in position 147 is any amino acid
  Variant (149)..(152): Xaa in position 149 to 152 is any amino acid
  Variant (154)..(163): Xaa in position 154 to 163 is any amino acid
  Variant (164)..(187): Xaa in position 164 to 187 is any or no amino acid
  Variant (189)..(189): Xaa in position 189 is any amino acid
  Variant (191)..(191): Xaa in position 191 is any amino acid
  Variant (197)..(199): Xaa in position 197 to 199 is any amino acid
  Variant (202)..(202): Xaa in position 202 is any amino acid
  Variant (204)..(204): Xaa in position 204 is any amino acid
  Variant (206)..(208): Xaa in position 206 to 208 is any amino acid
  Variant (210)..(222): Xaa in position 210 to 222 is any amino acid
  Variant (224)..(225): Xaa in position 224 to 225 is any amino acid
  Variant (228)..(228): Xaa in position 228 is any amino acid
  Variant (230)..(233): Xaa in position 230 to 233 is any amino acid
  Variant (234)..(235): Xaa in position 234 to 235 is any or no amino acid
  Variant (237)..(237): Xaa in position 237 is any amino acid
  Variant (241)..(242): Xaa in position 241 to 242 is any amino acid
  Variant (244)..(251): Xaa in position 244 to 251 is any amino acid
  Variant (253)..(259): Xaa in position 253 to 259 is any amino acid
  Variant (260)..(265): Xaa in position 260 to 265 is any or no amino acid
  Variant (268)..(294): Xaa in position 268 to 294 is any amino acid
  Variant (295)..(302): Xaa in position 295 to 302 is any or no amino acid
  Variant (304)..(323): Xaa in position 304 to 323 is any amino acid
  Variant (324)..(376): Xaa in position 324 to 376 is any or no amino acid
  Variant (378)..(380): Xaa in position 378 to 380 is any amino acid
  Variant (384)..(384): Xaa in position 384 is any amino acid
  Variant (388)..(389): Xaa in position 388 to 389 is any amino acid
  Variant (391)..(391): Xaa in position 391 is any amino acid
  Variant (393)..(395): Xaa in position 393 to 395 is any amino acid
  Variant (398)..(403): Xaa in position 398 to 403 is any amino acid
  Variant (405)..(406): Xaa in position 405 to 406 is any amino acid
TXGGDXXPGXNXXXRXXXXXXXXXXXXXXXXXXXXXXXXXXGXXGXXXXXXXXXXXXXXXXXXXXXXXXXXXXXXXXXXXXGGTXXXXXRXXXXXXXXXXXXXXXXXXXXXXXXXXXXXXXXXXXXXXXXXXXXXXXXXXLXXXGGXGXXXXAXXXXXXXXXXXXXXXXXXXXXXXXXXXXXXXXXXGXPXTIDNDXXXTDXTXGXXXAXXXXXXXXXXXXXTXXSHXRXXXXXXEXMGRXXGXXXXXXXXAXXXXXXXXXXXXXPEXXXXXXXXXXXXXXXXXXXXXXXXXXXXXXXXXXXEXXXXXXXXXXXXXXXXXXXXXXXXXXXXXXXXXXXXXXXXXXXXXXXXXXXXXXXXXXXXXXXXXXXXXXXXXRXXXLGHXQRGXXGXPXXXDRXXXXXXGXXA

SEQ ID NO: 113036 - protein, 12 aa, Artificial sequence
  protein pattern
  Variant (2)..(2): Xaa in position 2 is Gly or Ser
  Variant (6)..(6): Xaa in position 6 is Ala, Cys or Ser
  Variant (7)..(7): Xaa in position 7 is any amino acid
  Variant (9)..(9): Xaa in position 9 is Leu or Met
  Variant (11)..(11): Xaa in position 11 is any or no amino acid
TXGGDXXGXNXA

SEQ ID NO: 113037 - protein, 13 aa, Artificial sequence
  protein pattern
  Variant (5)..(5): Xaa in position 5 is Phe, Ile, Leu, Met or Val
  Variant (6)..(7): Xaa in position 6 to 7 is any amino acid
  Variant (9)..(9): Xaa in position 9 is Ala, Asp, Glu, Gln or Ser
  Variant (10)..(10): Xaa in position 10 is any amino acid
  Variant (11)..(11): Xaa in position 11 is Ala, Cys, Ser or Thr
  Variant (12)..(12): Xaa in position 12 is any amino acid
IDNDXXXTXXXXG

SEQ ID NO: 113038 - DNA, 909 bp, Synechocystis sp.
  CDS (1)..(909): transl_table=11
atggtctccctggaatcttcccccccagccctatctccccacactcctcccctgttttggcaatggcgtaaccaggcgatcgcctatcaacaaaggggagatcgagggccagctgtggtactaatccatggctttggggcatcctggggccattggcgcaaaaatatccctgtcctgggggaatattgccgttgctacgccattgatctgttaggctttggtgcttccgccaaacctctccctagtcaagcattgggttacaccttcagcacctggggcgacctggtggcggacttttgccgggaagtaattggtggcccggccgtacttattggcaattccatcggctgtgtggtggccatgcaaactgccaccgaccacccagaattggtcaccggcctgattgctcttaactgttccctgcggttactccatgatcgcaagcggtcagcgttgccttggtaccgtcgggtaggggcaggggtcttgcaaaaggtgctgggctatccccagattggcaaacttttcttccgacaggtggcccgggccaaaaccgttcgtcaggccctctgccaagcctatggggacaaaaatgcggtgaccgatgagttggtggccatgctcctgcggccagcccaggatgaaggggcggcggaagtatttttggctttcaccagctattcccaaggccccctaccggaggatttactaccccgcatccattgcccaacggtgctgatttggggggaggctgatccctgggaaccgatcgccttggggagagctttggcaaaccataactgtgtggagcaattcattagcttaccggggttggggcactgtccccaggacgaagctccggaggtaattaatccaattttgcgacaatggattacagagtggagttag

SEQ ID NO: 113039 - protein, 302 aa, Synechocystis sp.
MVSLESSPPALSPHTPPLFWQWRNQAIAYQQRGDRGPAVVLIHGFGASWGHWRKNIPVLGEYCRCYAIDLLGFGASAKPLPSQALGYTFSTWGDLVADFCREVIGGPAVLIGNSIGCVVAMQTATDHPELVTGLIALNCSLRLLHDRKRSALPWYRRVGAGVLQKVLGYPQIGKLFFRQVARAKTVRQALCQAYGDKNAVTDELVAMLLRPAQDEGAAEVFLAFTSYSQGPLPEDLLPRIHCPTVLIWGEADPWEPIALGRALANHNCVEQFISLPGLGHCPQDEAPEVINPILRQWITEWS

SEQ ID NO: 113040 - DNA, 1192 bp, Arabidopsis thaliana
  CDS (56)..(1120)
aagatcaaaagagaaagagagaaaaaagacgatgagagctctaacatggacggcaatgtcgccgccggtgatgtcacggacggcgacttctacggttaacttacgacgtatcagcctacggagagatcgcgtctgtgttagagccacggcttcgtctagcgccacggtttccggcggaggagtagtagaggcggtagaattggcagagataggagaaagaagcaagaaatggaagtggaaaggagaatattctgttaactactttgtcaaagattcgccggaggaagttactccggcgagtcaaactgttcttttggttcatggctttggtgcttctattcctcactggcgaaggaacataaatgctttgtctaaaaaccatacagtgtatgcaattgatcttctcgggtttggtgcttcggataagccacctggttttagctataccatggagtcatgggctgagttgatactcaacttcttggaggaagtggttcagaaaccgactattttgattggaaactctgttggaagccttgcttgtgtcatcgctgcctcagaatcacgaggagatctggtcaaaggtcttgttctattgaattgtgctggtggtatgaacaacaaagctgtctttgatgactggagaatcaagctactgatgcctttactcttacttatcgacttcttactcaagcaaagaggaattgcttctgcactcttcaaccgtgttaaagacagggaaaatctgaagaacatcttgacaaatgtttacgggaacaaggacaatgtagatgacacccttgtagagatcattgctggaccagcaaataccgaaggtgcactagatgcttttgtttcaatcttaacgggtcctcctggaccaaatccgattaagctgataccggaaataaccaaaccggttcttgtcttatggggagatcaagatggactaacccctcttgatggtccagtaggtaagtacttcacttcccttccggatcagttacctaacttcaacctctatgttctacaaggcgttggacattgcccgcaagatgatcgtccggatcttgtccatgagcgtctccttccatggctggctcaactttcttccacctagtttcgatttgtttagccgtgtacacttgtttataaatgtaaaacaaatctatctaattggaaaaagacagat

SEQ ID NO: 113041 - protein, 354 aa, Arabidopsis thaliana
MSPPVMSRTATSTVNLRRISLRRDRVCVRATASSSATVSGGGVVEAVELAEIGERSKKWKWKGEYSVNYFVKDSPEEVTPASQTVLLVHGFGASIPHWRRNINALSKNHTVYAIDLLGFGASDKPPGFSYTMESWAELILNFLEEVVQKPTILIGNSVGSLACVIAASESRGDLVKGLVLLNCAGGMNNKAVFDDWRIKLLMPLLLLIDFLLKQRGIASALFNRVKDRENLKNILTNVYGNKDNVDDTLVEIIAGPANTEGALDAFVSILTGPPGPNPIKLIPEITKPVLVLWGDQDGLTPLDGPVGKYFTSLPDQLPNFNLYVLQGVGHCPQDDRPDLVHERLLPWLAQLSST

SEQ ID NO: 113042 - DNA, 1194 bp, Arabidopsis thaliana
  CDS (56)..(1120)
aagatccaaagagagagagagaaaaaagacgatgagagctctaacatggacggcaatgtcgccgccggtgatgtcacggacggcgacttctacggttaacttacgacgtatcagcctacggagatatcgcgtctgtgttagagccacggcttcgtctagcgccacggtttccggcggaggagtagtagaggcggtagaattggcagagataggagaaagaagcaagaaatggaagtggaaaggagaatattctgttaactactttgtcaaagattcgccggaggaagttactccggcgagtcaaactgttcttttggttcatggctttggtgcttctattcctcactggcgaaggaacataaatgctttgtctaaaaaccatacagtgtatgcaattgatcttctcgggtttggtgcttcggataagccacctggttttagctataccatggagtcatgggctgagttgatactcaacttcttggaggaagtggttcagaaaccgactattttgattggaaactctgttggaagccttgcttgtgtcatcgctgcctcagaatcacgaggagatctggtcaaaggtcttgttctattgaattgtgctggtggtatgaacaacaaagctgtctttgatgactggagaatcaagctgctgatgcctttactcttacttatcgacttcttactcaagcaaagaggaattgcttctgcactcttcaaccgtgttaaagacagggaaaatctgaagaacatcttgacaaatgtttacgggaacaaggacaatgtagatgacacccttgtagagatcattgctggaccagcaaataccgaaggtgcactagatgcttttgtttcaatcttaacgggtcctcctggaccaaatccgattaagctgataccggaaataaccaaaccggttcttgtcttatggggagatcaagatggactaacccctcttgatggtccagtaggtaagtacttcacttcccttccggatcagttacctaacttcaacctctatgttctacaaggcgttggacattgcccgcaagatgatcgtccggatcttgtccatgagcgtctccttccatggctggctcaactttcttccacctagtttcgatttgtttagccgtgtacacttgtttataaatgtaaaacaaatctatctaattggaaaaagacagattc

SEQ ID NO: 113043 - protein, 354 aa, Arabidopsis thaliana
MSPPVMSRTATSTVNLRRISLRRYRVCVRATASSSATVSGGGVVEAVELAEIGERSKKWKWKGEYSVNYFVKDSPEEVTPASQTVLLVHGFGASIPHWRRNINALSKNHTVYAIDLLGFGASDKPPGFSYTMESWAELILNFLEEVVQKPTILIGNSVGSLACVIAASESRGDLVKGLVLLNCAGGMNNKAVFDDWRIKLLMPLLLLIDFLLKQRGIASALFNRVKDRENLKNILTNVYGNKDNVDDTLVEIIAGPANTEGALDAFVSILTGPPGPNPIKLIPEITKPVLVLWGDQDGLTPLDGPVGKYFTSLPDQLPNFNLYVLQGVGHCPQDDRPDLVHERLLPWLAQLSST

SEQ ID NO: 113044 - DNA, 1383 bp, Glycine max
  CDS (98)..(1132)
gtggcatgaggtagagcaaatgggtcttaatgcgagaaatgagatagaaaggggaagtggcactggcgaatgagaatgagtgtagaaaagaaagtccatggccatgagtgtgggcgtggcattgccatccaccaccaccagtctcagtttccttcgctaccgctctcgctctccaattcaaaataaaatccgttttccccgtcaaattgtttctaaattaaacagtgcagaggtccaggttcaaacctgcgtgtgggattggaggggttactctattcgctatcaacattctggaaatattggccctgcactagttttagtccacggttttggagctaacagtgaccactggaggaataatatttcagttcttgcacaatcccaccgggtgtactccatcgatcttattggatatggatattcagataaaccaaatcctcgtcaaatcggagaccattccttttacacttttgagacctgggccactcaactaaatgagttttgtcttgatgtcatcaaggacgaagcattctttatatgcaattctattggaggagttgttggtcttcaagcggctgtgttagcaccacacatttgccagggtattatccttctcaatatatctctgcgtatgcttcatataaagaagcagccttggtatggaaaacctttcatcagatcgctccagagattgcttagggatactgatgttggcaaattcttctttaaaactatagccacaaaagaatctgtgaggaacattctttgccagtgctatcatgacacctccaaggttacagatgagctagtgcagatcatccttggtccaggtctggaacctggagcagcagaggtctttctcgagtttatttgttactctggtggccctcttcctgaggaactactacctcaagtaaagtgcccgattttgatagcatggggtgacaaggatccttgggaaccaattgatattggaagaaattatgaaaatttcgattctgttgaagacttcattgtccttcccaatgttggacattgcccccaggatgaagcacctcatctcgtgaacccacttgttgagtcatttgtggcacgccatgctaaatcctcaactagtacatcgcattgttaattgattcgccaacagttttttgatgctgctcaactcattgaaattgtgtacatttctccatttgcttccattaagaccgagtttcattttctgttcagtataagcattatgtccttgtatggttacaaattatgagcggttgatacaagaccctgtttccaacatgaatgccagccttagaaccctacatagttttgtaattgtctcctgtttcaatggaatcgtatttctcaatcaagaaaattttgccg

SEQ ID NO: 113045 - protein, 344 aa, Glycine max
MAMSVGVALPSTTTSLSFLRYRSRSPIQNKIRFPRQIVSKLNSAEVQVQTCVWDWRGYSIRYQHSGNIGPALVLVHGFGANSDHWRNNISVLAQSHRVYSIDLIGYGYSDKPNPRQIGDHSFYTFETWATQLNEFCLDVIKDEAFFICNSIGGVVGLQAAVLAPHICQGIILLNISLRMLHIKKQPWYGKPFIRSLQRLLRDTDVGKFFFKTIATKESVRNILCQCYHDTSKVTDELVQIILGPGLEPGAAEVFLEFICYSGGPLPEELLPQVKCPILIAWGDKDPWEPIDIGRNYENFDSVEDFIVLPNVGHCPQDEAPHLVNPLVESFVARHAKSSTSTSHC

SEQ ID NO: 113046 - DNA, 1645 bp, Zea mays
  CDS (103)..(1248)
tgggtacctcgaggccggccgggccgggacttccgttcccctggcctggccccgtcctctgttccagcgtttgccgccgctctgcacaagccctgcctaccgatgtccgtcgcgtccgtggccgccctccggacggccggctccggccgccgccgcggcgcgggttcccagcagaccggccttaacgggggcaggttcctgatgatgcagaggagggagctggtgaccaaggccgggatcccgctcgccgtctcctgctcgatggctacctcaccggcttcagccaacggcgctgctcaagggctggagattttgccgttcaaagctgacgggtacaacttctggacgtggcggggtcgccggatacactacgtcgagcaaggcgcggggcggcccgtcgtgctcatccacggcttcggcgcttccgccttccactggaggtacaacatccctgagctggccaagaagtacaaggtgtacgccatagacctgctggggttcggctggagcgagaaggcgctggtggactacgaggccaccatctggatggagcaggtctccgacttcctccgggagatcgtcaaggagccagccgtccttgtaggcaacagcttgggaggcttcacgacgctgttcacggccaccgaggtgccggagctggtccggggcgtcgtgctcctcaactccgccggccagttcgccgaccccaacaagccggccgccgcgccggccgaggaggaggaggggggcagcgcgctgtccaggtacatcgtgcagccgctcaaggaggccttccagcgggtggtgctggggctcctcttctggcagtccaagcagcccgccagggtcgagaaagtcttgaaaagcgtgtacatagatcccagcaacgtcgacgactacctggtcggctccatcacggcgccggcggcggaccccaacgccggcgaggtgtactacaggctgatgtcgcggttcatgtcgaaccagagccggtacacgctggaccggctgctggggaagatgtcgtgcccgctgctgctgctgtggggggacctggacccgtgggtcggcccggccaaggccgcgcggatccaggagttctacgccgacaccgccgtcgtgcacctgcaggccggccattgcccgcacgacgaggcgccggagcaggccaaccgcgcgctgctcgagtggctcgcggccctcgacgcccgcgccaagtcggccgagcccagcctacagaccgtctgatggatcgagcgcaaggggcttagcgtatgctagtcaaagaatacaatttggtggcctatatctatagtttgatgtagtatgtcctgtagtaggaacagtaatttcttactgtgagttagtttactgttctacagctgttgcacccgtttgatgtagttatagatgaccaataagcacgaggcccgcgagcccggcacgaggcccgcgagcccggcacgaagcccactgtttagcctcgatccgagtccggcacggcacggttctatgcaggcccgggccgggctcggacaggaaactaggcacggtgggctagtccggcacggcccgtttaactctaagcccgttaagcccgctttttgcactaaaacgtgtttaccggcccgtttagcccgttttt

SEQ ID NO: 113047 - protein, 381 aa, Zea mays
MSVASVAALRTAGSGRRRGAGSQQTGLNGGRFLMMQRRELVTKAGIPLAVSCSMATSPASANGAAQGLEILPFKADGYNFWTWRGRRIHYVEQGAGRPVVLIHGFGASAFHWRYNIPELAKKYKVYAIDLLGFGWSEKALVDYEATIWMEQVSDFLREIVKEPAVLVGNSLGGFTTLFTATEVPELVRGVVLLNSAGQFADPNKPAAAPAEEEEGGSALSRYIVQPLKEAFQRVVLGLLFWQSKQPARVEKVLKSVYIDPSNVDDYLVGSITAPAADPNAGEVYYRLMSRFMSNQSRYTLDRLLGKMSCPLLLLWGDLDPWVGPAKAARIQEFYADTAVVHLQAGHCPHDEAPEQANRALLEWLAALDARAKSAEPSLQTV

SEQ ID NO: 113048 - DNA, 1340 bp, Zea mays
  CDS (37)..(1194)
aacccgcgacaaccactgagccgagcgggggtggatatggcagcgctcgccgcccaccaccacctccacccctcctccgtcgctgcccgaactccaacacttggccgacgccaccgtttctcgtcgcttcctctcgccgcgcggccctcctcccaaggccgtttcagctcccgagccgcgacccgtgtcctcacgcgcgccggaagcactggcgccagcagcgccgcctcgcccgccgcgacgacggcgtcgtcgttgtcgctggaggagctgcgcgggggctgcgccacctggacgtggcgagggatgcgcgtgaactacctcgccagaggacaggggccgcccgtactgctcgtccacggcttcggcgcctccgtcgcgcactggcgcaggaacattggggtgttgtctgaatcctataccgtctacgcgatcgatttgctggggtttggcgcgtcggacaagcctcctgggttttcttacacgatggagacatgggccgagctgatactggatttcttggaggaggtggtcaggaggcccacggtgctcgtcgggaactcggttggaagcctcgcgtgcgtcattgctgcatcagagtccagcagagaagccgtccgggggcttgtcctgctgaactgcgccggtggcatgaacaacaaggcgatcgtcgatgactggcggatcaagctgctcctgccactgctctggctgatcgacttccttctgaaacagcggccgatagcatcagcgctctttaaccgcgtgaaaaacagggacaatctgaaggacatcttgctctctgtttatgggaacaaagatgctatggacgatgaattggttgagatcatacgcggaccggctgacacggagggcgccctggacgcgttcgtgtcgacggtgaccggcccgccggggccaagcccgataggcctgatgccgcggctggccgacctgcccgtgctagtgctgtggggcgaccgggaccccttcaccccgatcgacgggcccgtggggaagttcttctcgaagctgccgtcggagctcccgaacgtgacgctctacatgctggagggcgtggggcactgcccgcacgacgaccggccggacctcgtccacgacaagctgctgccgtggcttgaagcgctcccgccgcccgccgccggcgcggtgacgacgacgacggttgtctaaggctaataataatacgccttattgctgactggagcttcgaagtctagctggactcttcatttttaagtctagctggactctttatttttaactctctgtttatctctttataaaaattaaattctatttaaaaaaaaaaaaaaaaa

SEQ ID NO: 113049 - protein, 385 aa, Zea mays
MAALAAHHHLHPSSVAARTPTLGRRHRFSSLPLAARPSSQGRFSSRAATRVLTRAGSTGASSAASPAATTASSLSLEELRGGCATWTWRGMRVNYLARGQGPPVLLVHGFGASVAHWRRNIGVLSESYTVYAIDLLGFGASDKPPGFSYTMETWAELILDFLEEVVRRPTVLVGNSVGSLACVIAASESSREAVRGLVLLNCAGGMNNKAIVDDWRIKLLLPLLWLIDFLLKQRPIASALFNRVKNRDNLKDILLSVYGNKDAMDDELVEIIRGPADTEGALDAFVSTVTGPPGPSPIGLMPRLADLPVLVLWGDRDPFTPIDGPVGKFFSKLPSELPNVTLYMLEGVGHCPHDDRPDLVHDKLLPWLEALPPPAAGAVTTTTVV

SEQ ID NO: 113050 - DNA, 1233 bp, Oryza sativa (japonica cultivar-group)
  CDS (1)..(1233)
atgtcggtcgcgtgcgcggccgccctcccgaccgcctccgcgcgccgccgccaccgcggctccccgcagaccgccctcgaaggtaccgcatcttggttcattttttatttttttccatttttatttgtattttattttaccttgcgggcggctttttttgatttcttggtacgaggaggaggcaagctggtgatgatgcagaggagggacctcgtgaccaagggggtcaccctctccgtctgctgctctatgctctcctcctccaacagctctgcccaagcattggagaggttgccgttcaaggctgatggatacaacttctggacatggaggggtcgccggatacattacgtcgagcaaggcgctggccagcccatcgtgctcatccacggattcggcgcctccgcgttccattggaggtacaatataccagagctggccaagaagtacaaggtgtacgccattgacctgctcggattcggctggagcgagaaggcgctggtggagtacgaggccaccatctggatggagcaggtccgcgacttcctccgggacgtcgtcaaggacccggccgtcatcgtcggcaacagcctcggcggcttcacgacgctgttcgcggcgaccgaggtgccggagctggtccgtggcgtcgtgctgctcaactccgccggacagttcggcgaccccaaccgcccgcccgaggcggcggaggcggcggcgggggaggagagcgcggtgaccaggctcgtcgtgaggccgctcaaggaggcgttccagcgcgtcgtgctcgggttcctcttctggcaggccaagcagccggcgagggtcgagaaggtcctcaagagcgtgtacaaggatgcgaccaacgtcgacgaatacctgatcgggtccatcacggcgccgacggcggacccgaacgccggcgaggtgtactacaggctgatgtcgcggttcatggcgaaccagagccggtacacgctggacaggctgctgggcaagctgtcgtgcccgctgctgctgctgtggggggacctcgacccgtgggtcgggccggcgaaggcggcgcagatcaagaagttctaccaggacaccaccgtcgtcaacctccaggccggccattgcccccacgacgaggcgccggagcagttcaacggggcgctgctcgagtggctcgcctccctcgacgccggcaagccggcggatcagccggagcccgctctccaatccgtgtga

SEQ ID NO: 113051 - protein, 410 aa, Oryza sativa (japonica cultivar-group)
MSVACAAALPTASARRRHRGSPQTALEGTASWFIFYFFPFLFVFYFTLRAAFFDFLVRGGGKLVMMQRRDLVTKGVTLSVCCSMLSSSNSSAQALERLPFKADGYNFWTWRGRRIHYVEQGAGQPIVLIHGFGASAFHWRYNIPELAKKYKVYAIDLLGFGWSEKALVEYEATIWMEQVRDFLRDVVKDPAVIVGNSLGGFTTLFAATEVPELVRGVVLLNSAGQFGDPNRPPEAAEAAAGEESAVTRLVVRPLKEAFQRVVLGFLFWQAKQPARVEKVLKSVYKDATNVDEYLIGSITAPTADPNAGEVYYRLMSRFMANQSRYTLDRLLGKLSCPLLLLWGDLDPWVGPAKAAQIKKFYQDTTVVNLQAGHCPHDEAPEQFNGALLEWLASLDAGKPADQPEPALQSV

SEQ ID NO: 113052 - DNA, 1212 bp, Oryza sativa (japonica cultivar-group)
  CDS (1)..(1212)
atggccgccgcgctcgccgccgccgccgccgccgccgccgcccaccaccaccgcctctcctcctcctccccggccgcgcggacacgagtagttcaccaccaccgccgccgccggtcgtcctccctctccttctccgcgccagcctcttcccacggctgtcccagaggcgcccgtgcgctcaggcgcgccgccgccggcgatggaggcggtaacggcagcggcggcgtcagcaccggcacggtggacccggccgccgcgtcgtcgccgtcgtcgtcgctggaggagctgtaccggagctgcgcgacgtggacgtggagggggatgcgcatgaactacctggtcaggggggagggcccgccgctgctgctcgtccacggcttcggcgcctccgtcggccactggcgcaggaatattggcgtgttgtctgaatcctacaccgtgtacgcgatcgatttgctcgggtttggcgcgtcggacaagcctcctggattctcctacacgatggagacatgggccgagctgatcctggacttcttggacgaggttgtgaggaggcccacggtgctcgttggcaactctgtcggaagcctcgcatgcgtcattgctgcagcagactccagcagagatcttgtccgggggcttgttctactgaattgctcgggcggcatgaacaacaaggccatcgtcgacgattggaggatcaaattgctccttcctctgctatggctgatcgacttcctgctgaagcaaaggcggatagcatcagcgctgttcgagcgtgtaaaagacaggagcaatctgaaggacatcctgctctctgtctacgggaacaaagacgctgtggacgacgaactagtcgagatcatcagggggccggcggacggggagggggctctggacgcgttcgtgtcgacggtgacggggccgccggggccgagcccgatcgcgctgatgccggcggtggcggcgaggtcgccggtgctggtgctgtggggggaccgggaccccttcaccccgatcgacgggccggtggggaggtacttctccgcgctccccagcgagctccccaacgtgacgctccacatgctggagggcgtcggccactgcccccacgacgaccgcccggacctcgtccacgccaagctgctcccatggctcgacaccctcccctccaccaccgcgctgacgccggtatcgtcgccggcggcttaa

SEQ ID NO: 113053 - protein, 403 aa, Oryza sativa (japonica cultivar-group)
MAAALAAAAAAAAAHHHRLSSSSPAARTRVVHHHRRRRSSSLSFSAPASSHGCPRGARALRRAAAGDGGGNGSGGVSTGTVDPAAASSPSSSLEELYRSCATWTWRGMRMNYLVRGEGPPLLLVHGFGASVGHWRRNIGVLSESYTVYAIDLLGFGASDKPPGFSYTMETWAELILDFLDEVVRRPTVLVGNSVGSLACVIAAADSSRDLVRGLVLLNCSGGMNNKAIVDDWRIKLLLPLLWLIDFLLKQRRIASALFERVKDRSNLKDILLSVYGNKDAVDDELVEIIRGPADGEGALDAFVSTVTGPPGPSPIALMPAVAARSPVLVLWGDRDPFTPIDGPVGRYFSALPSELPNVTLHMLEGVGHCPHDDRPDLVHAKLLPWLDTLPSTTALTPVSSPAA

SEQ ID NO: 113054 - DNA, 1137 bp, Arabidopsis thaliana
  CDS (1)..(1137)
atgtctgcttcatgtgctttaacaccgtctgttaggacagagttattcagttcatcatcatctaaaagatcaatctttcctgctagaatttgtcgaccaagaaacaaatgtgaaatcagcagaagggattttgcaattaggggagggattgttgcttctggagtttcagtcatggatacttcttctgcttcttctcagtctgttcaaggtagtgagaggttggcttttaaaccagaaggctataacttttgggaatggagaggtcacaagattcattatgttgttcaaggagaaggctcgcctctagttcttattcatggttttggtgcttctgtctttcattggaggtataacattcctgaattggctaagaaatacaaggtttacgccttggacttactcggtttcggatggagtgacaaagctctcatagagtatgatgccatggtttggacagatcaagttattgatttcatgaaagaggtagtgaaagaaccagctgttgtcgttggaaacagccttgggggatttacggcattgtcagttgcggttggattacccgagcaagtcacgggagttgcacttctgaactctgcgggacaatttgcagccgagagtagaaaacgagaggaagctgatgaaactgtgataaccaagtttatagttaagccgctaaaagagattttccaacgtgtggttcttgggttcttgttctggcaagccaagcaaccttctcgaatcgaatctgtcttaaagagtgtgtacatagactctactaatgtcgatgactacctcgtcgaatccatttcaaaacctgcaacagatccaaatgctggagaagtatactacagattgatgacaaggttcttaacaaaccagagtagatacactctagatagtgttctaagtaagatgacttgtccgcttctgttggtttggggagatcttgatccgtgggtcggtccagctaaagccgagaaaatcaaagcattttactcgaactcatcgctcgttcacttacaagcagggcattgtcctcatgatgaagtcccggaagctgtaaacaaggctttgttggattggttgtccattaatattgcttcaaagccagcttctcctatagtcttggagacgtaa

SEQ ID NO: 113055 - protein, 378 aa, Arabidopsis thaliana
MSASCALTPSVRTELFSSSSSKRSIFPARICRPRNKCEISRRDFAIRGGIVASGVSVMDTSSASSQSVQGSERLAFKPEGYNFWEWRGHKIHYVVQGEGSPLVLIHGFGASVFHWRYNIPELAKKYKVYALDLLGFGWSDKALIEYDAMVWTDQVIDFMKEVVKEPAVVVGNSLGGFTALSVAVGLPEQVTGVALLNSAGQFAAESRKREEADETVITKFIVKPLKEIFQRVVLGFLFWQAKQPSRIESVLKSVYIDSTNVDDYLVESISKPATDPNAGEVYYRLMTRFLTNQSRYTLDSVLSKMTCPLLLVWGDLDPWVGPAKAEKIKAFYSNSSLVHLQAGHCPHDEVPEAVNKALLDWLSINIASKPASPIVLET

SEQ ID NO: 113056 - DNA, 1455 bp, Arabidopsis thaliana
  CDS (1)..(1455)
atggagataatctcactgaacgttgtgccccagtgctctgtggttacttggagtagtaaattagcaacgaaaagattggtcccaaatcggtcaagtttgttattctcaggggtcaaaaaatccagacttgtgattcgaagtggaaattccgatggttatgttgttggtgagaatgatgacttgggtcgtatagccagaagaggagaatcaacgtcaaaggttttgattcctggtttgcctgatgaatcaaatggtgaaattgctgctcgaatcagtcattctcactgcgagtggaagcccaagcttagagtacattatgagaaagccggttgtgacaatctcgatgctcctgcggtgttgtttcttcctggctttggcgttggttcatttcactatgagaagcagcttaccgatttgggaagggattatcgagtatgggctattgattttcttggacagggtttatctctccctactgaagatcctactaccatgactgaagaaaccagttcctcggaagataaggaaccattttggggatttggtgacaaaactgaaccgtgggctgatcaacttgtattctctctggatctctggagggatcaagttcagtattttgtagaagaggttatcggtgagcctgtgtacattgcagggaactcacttggagggtatgtagctctctactttgcagcaacccatcctcacctggttaagggtgttaccttgcttaatgcaacacctttctggggtttcttccctaatccagtaagatccccaaagctagcacgtctctttccatggcccggagcattccctctgccggaaagagtgaaaaaaatcacagaattggtgtggcaaaagataagtgatcctgaaagcatagctgagatacttaaacaggtctacacagaccattctatcaatgtggataaagtattctcacgtattgtggaggtcacacagcatccggctgctgcagcatcgtttgcttcaatcatgcttgctcctggtggagagctatctttctccgaagctttatctaggtgtaaggaaaacaatgttcagatatgtctcatgtatggaagagaagatccatgggtgagaccgttatggggaaagaagataaagaaggaaatccccaacgctccatactacgagatcagcccagcgggtcactgcccacacgatgaagtccctgaggtggtgaactatctgatgcgcgggtggatcaagcacctggagtctggtggttttgaagcgctcccgcttttggaggacactgaagaagattgggaggagtccaggattggtagagaaattgagttcccgagagatggttggaaaaaagcagtgaatctgtggttatatgggtcaaactatacgtactggagaggagttagagaatctttcagatccagttttataagggtgtttggagggaagtctgcatag

SEQ ID NO: 113057 - protein, 484 aa, Arabidopsis thaliana
MEIISLNVVPQCSVVTWSSKLATKRLVPNRSSLLFSGVKKSRLVIRSGNSDGYVVGENDDLGRIARRGESTSKVLIPGLPDESNGEIAARISHSHCEWKPKLRVHYEKAGCDNLDAPAVLFLPGFGVGSFHYEKQLTDLGRDYRVWAIDFLGQGLSLPTEDPTTMTEETSSSEDKEPFWGFGDKTEPWADQLVFSLDLWRDQVQYFVEEVIGEPVYIAGNSLGGYVALYFAATHPHLVKGVTLLNATPFWGFFPNPVRSPKLARLFPWPGAFPLPERVKKITELVWQKISDPESIAEILKQVYTDHSINVDKVFSRIVEVTQHPAAAASFASIMLAPGGELSFSEALSRCKENNVQICLMYGREDPWVRPLWGKKIKKEIPNAPYYEISPAGHCPHDEVPEVVNYLMRGWIKHLESGGFEALPLLEDTEEDWEESRIGREIEFPRDGWKKAVNLWLYGSNYTYWRGVRESFRSSFIRVFGGKSA

SEQ ID NO: 113058 - DNA, 1089 bp, Arabidopsis thaliana
  CDS (1)..(1089)
atgagagctctaacatggacggcaatgtcgccgccggtgatgtcacggacggcgacttctacggttaacttacgacgtatcagcctacggagagatcgcgtctgtgttagagccacggcttcgtctagcgccacggtttccggcggaggagtagtagaggcggtagaattggcagagataggagaaagaagcaagaaatggaagtggaaaggagaatattctgttaactactttgtcaaagattcgccggaggaagttactccggcgagtcaaactgttcttttggttcatggctttggtgcttctattcctcactggcgaaggaacataaatgctttgtctaaaaaccatacagtgtatgcaattgatcttctcgggtttggtgcttcggataagccacctggttttagctataccatggagtcatgggctgagttgatactcaacttcttggaggaagtggttcagaaaccgactattttgattggaaactctgttggaagccttgcttgtgtcatcgctgcctcagaatcacgaggagatctggtcaaaggtcttgttctattgaattgtgctggtggtatgaacaacaaagctgtctttgatgactggagaatcaagctactgatgcctttactcttacttatcgacttcttactcaagcaaagaggaattgcttctgcactcttcaaccgtgttaaagacagggaaaatctgaagaacatcttgacaaatgtttacgggaacaaggacaatgtagatgacacccttgtagagatcattgctggaccagcaaataccgaaggtgcactagatgcttttgtttcaatcttaacgggtcctcctggaccaaatccgattaagctgataccggaaataaccaaaccggttcttgtcttatggggagatcaagatggactaacccctcttgatggtccagtaggtaagtacttcacttcccttccggatcagttacctaacttcaacctctatgttctacaaggcgttggacattgcccgcaagatgatcgtccggatcttgtccatgagcgtctccttccatggctggctcaactttcttccacctag

SEQ ID NO: 113059 - protein, 362 aa, Arabidopsis thaliana
MRALTWTAMSPPVMSRTATSTVNLRRISLRRDRVCVRATASSSATVSGGGVVEAVELAEIGERSKKWKWKGEYSVNYFVKDSPEEVTPASQTVLLVHGFGASIPHWRRNINALSKNHTVYAIDLLGFGASDKPPGFSYTMESWAELILNFLEEVVQKPTILIGNSVGSLACVIAASESRGDLVKGLVLLNCAGGMNNKAVFDDWRIKLLMPLLLLIDFLLKQRGIASALFNRVKDRENLKNILTNVYGNKDNVDDTLVEIIAGPANTEGALDAFVSILTGPPGPNPIKLIPEITKPVLVLWGDQDGLTPLDGPVGKYFTSLPDQLPNFNLYVLQGVGHCPQDDRPDLVHERLLPWLAQLSST

SEQ ID NO: 113060 - DNA, 882 bp, Synechocystis sp. PCC 6803
  CDS (1)..(882): transl_table=11
atgcagtccttttcgccccagatcaccgcacccacaggtaattattggcactggcaagggcatgagatctactatgtccgggccggacaaccccagccggatcgaccttctttacttttagtgcacggctttggtgcttccactgaccattggcgtaaaaacattgaaggactccaagaccagtttcaggtgtgggcgattgatctgttgggcttcgggcgatcggctaaaccggctctggaatatagcggccaactgtgggaacagcagttactggattttattgaccaggtgattggggaaaaaaccgtggtggcgggcaattccctagggggttacgcttccctctgtgcggcggccaacggtggcgacaaaattgccggggtggtgttgctcaatagtgccgggccatttggtgatcaaattagtgagcgcggtattaattttgtgcaaaaagcaattcaaagcttgatgctccagcccctacccagttacttactgtttcaatatttgcggcgcaaacccaccattcggaagaccttacaaaaagtttacgtagatcaaacagcagtgaccgatcgcctggtggaagaaatttatcgtccttcctgtgatgggggggcggcccaggtgtttgcctcggtgtttaaatctccccagggggaaatggtggataaactcctggctaaattacaagcgcccctgttggctatttggggacagggggatccttggatgcgggtcaaggaaaggagtgttaagtttcgacaacattacccccaactaacggagcattttttgccggcgggccactgtccccacgacgaagatccgtccactgtcaatcagttaatgcgggattggttagctaccattggttag

SEQ ID NO: 113061 - protein, 293 aa, Synechocystis sp. PCC 6803
MQSFSPQITAPTGNYWHWQGHEIYYVRAGQPQPDRPSLLLVHGFGASTDHWRKNIEGLQDQFQVWAIDLLGFGRSAKPALEYSGQLWEQQLLDFIDQVIGEKTVVAGNSLGGYASLCAAANGGDKIAGVVLLNSAGPFGDQISERGINFVQKAIQSLMLQPLPSYLLFQYLRRKPTIRKTLQKVYVDQTAVTDRLVEEIYRPSCDGGAAQVFASVFKSPQGEMVDKLLAKLQAPLLAIWGQGDPWMRVKERSVKFRQHYPQLTEHFLPAGHCPHDEDPSTVNQLMRDWLATIG

SEQ ID NO: 113062 - DNA, 927 bp, Nostoc sp. PCC 7120
  CDS (1)..(927): transl_table=11
atgaatacttctacttctacaaaaacctggatttggcgaggcttccccatctgctatcaaacacaaggaactactgggccatctgttgtactcgtacatggttttggtgcttcttggggacactggcgaaaaaatatacccgtactagcggaaaattgccgtgtttatgcaatcgatttaattggttttggtggttcagccaaacctcaaccagatacggaaatggcctatacactagaaacttggggagaacaagtagcggatttttgccgtgagattgtcggtgaaccagcttttttagtgggtaactctattggctgtattgtagtgatgcaagcagcagtcagcaatccagagattagtttaagtgttgccttactcaactgttctctacgattactgcacgatcgcaaacgggaaactctaccttggtcacgtcgttttggcgcgcctgtgctgcaacgcgtactatctattaaagcaattggtcagttttttttccgtcaagtcgcgcaaccaaaaacagtgagaaagattctgctacaagcctacattaatagcgaagcagtgacagaggaactggtagatattttgacagtaccagccagtgatcctggtgctgcggctgtattccttgcctttacttcctattcttctggccccttaccagaagaccttttaccattgctaccctgtccagcattgattgtgtgggggacaaatgatccttgggaaccgatagatttaggtcgagaattagccaactatcctcaagtcctcaagtttattcccttggaaggtgtagggcattgtcctcaagatgaagctcctgaattagttaatccaattttacaagattggatatgggaacaaactaggcttttagaatcccaagaaattgagcataattcccagacaattgggtaa

SEQ ID NO: 113063 - protein, 308 aa, Nostoc sp. PCC 7120
MNTSTSTKTWIWRGFPICYQTQGTTGPSVVLVHGFGASWGHWRKNIPVLAENCRVYAIDLIGFGGSAKPQPDTEMAYTLETWGEQVADFCREIVGEPAFLVGNSIGCIVVMQAAVSNPEISLSVALLNCSLRLLHDRKRETLPWSRRFGAPVLQRVLSIKAIGQFFFRQVAQPKTVRKILLQAYINSEAVTEELVDILTVPASDPGAAAVFLAFTSYSSGPLPEDLLPLLPCPALIVWGTNDPWEPIDLGRELANYPQVLKFIPLEGVGHCPQDEAPELVNPILQDWIWEQTRLLESQEIEHNSQTIG

SEQ ID NO: 113064 - DNA, 939 bp, Nostoc sp. PCC 7120
  CDS (1)..(939): transl_table=11
atgcagataactacagccccttctacaactccaattcctgggcaatattggcagtggcgagggcataagatttactacgttcgtgcgggggaaaagcaaccgcagcgcccacctttgttattggtgcatggctttggtgcttctacagaccactggcgtaagaatatcacaggactgtgtgatgattttgaagtatttgcgatcgaccttttggggtttgggcgttccgctaaacctaaattacaatatggcggcgacttgtggcgtgaccaactccatgattttatcagtgaagtcattggtcaaaaagcagtattagcaggtaattcccttggtggctatgcttgcttgtgtgttgctgctcaacttcctgagagcgcagctggtgtagttttactcaatagcgctgggccatttagtgaaactcaagccacaccagaaccagaggctttacaatcacaaattcagccccccaaacaatcctcacctttacaaaaaagatttggtaatagtgttaagtggatttttcgacaacctttagcccaatttttattatttcaatacgtgcgccaaggttgggtcattcgtcgaactttagaaaaggtatatcttgataaaagtgcaattacaaaccaattagttgaagaaattgctcgtcctgcttacgatgttggtgcgctggatgtatttgtctcagtttttagcagtcctcaaggagaaaaagttgatgtgctattaaagcaattaacttgtcctttattaatgttatggggtgaagctgatccttggatgaatgctagagaacgttctcaaaagtttcgcttatattatccagaactcactgaacattttcttagggctggtcattgtcctcatgatgaagtacccaatcaagtaaacccacttttacaagaatgggttttgtcaattgctcgatga

SEQ ID NO: 113065 - protein, 312 aa, Nostoc sp. PCC 7120
MQITTAPSTTPIPGQYWQWRGHKIYYVRAGEKQPQRPPLLLVHGFGASTDHWRKNITGLCDDFEVFAIDLLGFGRSAKPKLQYGGDLWRDQLHDFISEVIGQKAVLAGNSLGGYACLCVAAQLPESAAGVVLLNSAGPFSETQATPEPEALQSQIQPPKQSSPLQKRFGNSVKWIFRQPLAQFLLFQYVRQGWVIRRTLEKVYLDKSAITNQLVEEIARPAYDVGALDVFVSVFSSPQGEKVDVLLKQLTCPLLMLWGEADPWMNARERSQKFRLYYPELTEHFLRAGHCPHDEVPNQVNPLLQEWVLSIAR

SEQ ID NO: 113066 - DNA, 918 bp, Nostoc sp. PCC 7120
  CDS (1)..(918): transl_table=11
atgactttaaaggctcaaccgccagcagcgatagactacgccacacaggtgatcgctaattttgataaactagtgtggacttggcgcaatcacaaaattcagtacacagtcatgggtactggacagccattagtactagttcacggctttggtgcttccatcggacattggcgcaagaacattccagttttggcaaatgctggctaccaaatctttgctattgatttgttgggttttggtggttctgagaaagcagcaattgactacagtgtagatgtttgggtagaactgctcaaagacttttggacagcccatattcaacaaccagccgtatttgtcggtaactccattggtgcgcttttaagcctgataatattggcaaaacatccagagattacatctggtggtgttttaatcaactcagcaggtggtttgagccatcgtccccatgaactgaacccaccactacggattgtgatggcaacatttaatagagtagtgcgatcgcccattacaggtaaatttgtctttaaccgtatccgccaaaaatctcaaattcgccgcactctctaccaagtttaccgcgatcgtacagccgtcactgatgaattagttgatttactttataccccatcctgtgatcctggagcgcagcaagttttcgcctccatcctcacagcacctcctggccccacaccagaggaactattaccccaagtagagcgtcctttactagtaatttggggtgctgatgacccctggacaccaattacaggggcgaagatttacgaacaagcccaggagaatggcaaagacataacaattattcccattcctggtgctggtcattgtccccacgatgaagttccaaatgtcgtcaacgcccagattattgattggcttgcacggagaaaataa

SEQ ID NO: 113067 - protein, 305 aa, Nostoc sp. PCC 7120
MTLKAQPPAAIDYATQVIANFDKLVWTWRNHKIQYTVMGTGQPLVLVHGFGASIGHWRKNIPVLANAGYQIFAIDLLGFGGSEKAAIDYSVDVWVELLKDFWTAHIQQPAVFVGNSIGALLSLIILAKHPEITSGGVLINSAGGLSHRPHELNPPLRIVMATFNRVVRSPITGKFVFNRIRQKSQIRRTLYQVYRDRTAVTDELVDLLYTPSCDPGAQQVFASILTAPPGPTPEELLPQVERPLLVIWGADDPWTPITGAKIYEQAQENGKDITIIPIPGAGHCPHDEVPNVVNAQIIDWLARRK

SEQ ID NO: 113068 - DNA, 939 bp, Nostoc sp. PCC 7120
  CDS (1)..(939): transl_table=11
gtgaccatgactgtacactggcgggagcgggttgggaatcaaagggattgggtttggcggggttggcggactcgttacacctacattcgtcctagcagaggagaccaggaaaaaacccctttaattttactgcatggttttggtgcttctattggtcattggcggcataatttagaagttttgggcgaatctcatacagtctatgcgttggatatgctcggttttggtggttcagaaaaagccccagcaaattacagcattgaactttgggtggagcaagtttacgatttttggcaagcttttatccgtcaaccagtggtattgattggaaattccaatggttctttgatttctttagcggcggcggcggctcaccccgatatggttaaggggattgtgatgatgagtttaccagacccatcattagagcaagagatgattccgccttttttaagacctgtagtgaggacaatcaaaaatattgtcgcttctccaatacttttaaaaccggtgttttatttcgtgcgccgtcctagcgttctccgccgttgggctggtcttgcttacgccaatcccgcagccatcaccgacgagctggtggatattttagccgggcctccccaagataggggttcagcccgtgcttttagtgctttgtttaaagcggcgatcggtgttaactttagtcctagtgtcaaagctatattgccaactttacaaatacccatgctgctgatttgggggaacaaagataggtttgtcccgccgattctggctaaccaattcgctcaatacaacgaaaagttgcaattacttaacctagaggatgtagggcattgtccccatgatgaatgcccagaacaggtaaacaaggctattttggcatggatggacaagtccttgggagattgccaaaacctagttatctcccagaaatga

SEQ ID NO: 113069 - protein, 312 aa, Nostoc sp. PCC 7120
MTMTVHWRERVGNQRDWVWRGWRTRYTYIRPSRGDQEKTPLILLHGFGASIGHWRHNLEVLGESHTVYALDMLGFGGSEKAPANYSIELWVEQVYDFWQAFIRQPVVLIGNSNGSLISLAAAAAHPDMVKGIVMMSLPDPSLEQEMIPPFLRPVVRTIKNIVASPILLKPVFYFVRRPSVLRRWAGLAYANPAAITDELVDILAGPPQDRGSARAFSALFKAAIGVNFSPSVKAILPTLQIPMLLIWGNKDRFVPPILANQFAQYNEKLQLLNLEDVGHCPHDECPEQVNKAILAWMDKSLGDCQNLVISQK

SEQ ID NO: 113070 - DNA, 1080 bp, Arabidopsis thaliana
  CDS (1)..(1080)
atggcgaagactagcatttttgcagctctaccctttaccaacttcgaattcccgtcgctgttccgtgtcaagaactcttcgattatcagtttcagcgaaacccattttctccgacaatcaatttcgaccgcaatcgtaagatctccgactaagaggggaattgtgtccgtctcatgttcttccgtcacggacgaagcttcttctgaagagctacaagttcgaaccttgacatggaagtggaaaggttattcgataagatatcaatgtgctggaaccagtggccctgctttggtcttggttcatggtttcggtgctaacagtgaccattggaggaagaacacacctattcttgggaaaacacatagggtgtactcaatcgatcttatcggatatggatactccgataaaccgaatcctcgtgagtttggtggagaaccattctacacttttgagacatggggtgagcaactcaatgatttctgtctggatgtggtcaaagatgaagctttctttatttgcaactctataggaggacttgttggtcttcaggcagcagtaagtaagccagagatatgcagagggcttatgcttattaacatatccctccggatgcttcatatcaagaaacaaccattcattggaagacctttcatcaaatcattccagaatttacttaggaacactccggttggaaaattatttttcaagagcattgctaaaccagagacagtaaagagcattctttgccagtgttaccatgatagctcgcaagtgacagatgaactagttgaggcaattctacgtccagggcttgagcctggtgcagttgatgtcttccttgaatttatctgttactccggaggaccacttccagaggatttactcccactagtcaagtgcccggttctaattgcatggggagagaaagatccatgggagcccatcgagcttggacgagcatatagcaattttgacgcggttgaagatttcgttgttcttccagatgccggccactgtcctcaggacgagaagccggagatggtgaacccacttattgaatcattcgttgcgagacattga

SEQ ID NO: 113071 - protein, 359 aa, Arabidopsis thaliana
MAKTSIFAALPFTNFEFPSLFRVKNSSIISFSETHFLRQSISTAIVRSPTKRGIVSVSCSSVTDEASSEELQVRTLTWKWKGYSIRYQCAGTSGPALVLVHGFGANSDHWRKNTPILGKTHRVYSIDLIGYGYSDKPNPREFGGEPFYTFETWGEQLNDFCLDVVKDEAFFICNSIGGLVGLQAAVSKPEICRGLMLINISLRMLHIKKQPFIGRPFIKSFQNLLRNTPVGKLFFKSIAKPETVKSILCQCYHDSSQVTDELVEAILRPGLEPGAVDVFLEFICYSGGPLPEDLLPLVKCPVLIAWGEKDPWEPIELGRAYSNFDAVEDFVVLPDAGHCPQDEKPEMVNPLIESFVARH

SEQ ID NO: 113072 - DNA, 927 bp, Thermosynechococcus elongatus BP-1
  CDS (1)..(927): transl_table=11
atgaataggtacaggagacaactggtggagccctatcgctatggcgtccagcgggaatggtgctggcggggctggcagagtcgctatggtttttggcgacccgcttctgaggggcatcgggggtctcctgtgatcttgctgcacggctttggggcatctctacggcactggcggtacaatttacggctgctaggagagtatcagccaacgtatgcccttgatttgatggggttgggggcagccgaaaagcccgttgctgcctatggtgctgagttttgggcggctcaggtgcacgccttttggcaaggaattgttgggcaaccagcagtgatggttggcaactccattggcgccttgattgccctcacctgtgcctaccactacccgcagatggcggcgggagtagtgatgttgagtctgccggatccagccgtgcgcgaagagttgattccacgggcgatcgcgccccttgtgggggcaattgaacagatttttaccgccccttggctgctgcgggccctgttttacaccattcgccaacccgccattgtcaagcgctgggcacagttggcctacgccaaccccgcctgtgtggatgatgaattgctggaaattctgcttagcccggcctacgaccgccatagcgatcgcgcctttgtgcaaatcattcgcgccatgagccgtccagacttcggacccagcgccaagaggatgctcaacagtgtgtcccaacccctattactgatttggggaaaacaggatcgcttcattcccccaatgcttagccggcagtttccacaggtccaaccaagactggaagtggtggagctagatcacagcgggcactgcccccacgatgaacagcccgatcgcctcaatggcctacttttggattggttgcgccgccacgaacttttgaggggttga

SEQ ID NO: 113073 - protein, 308 aa, Thermosynechococcus elongatus BP-1
MNRYRRQLVEPYRYGVQREWCWRGWQSRYGFWRPASEGHRGSPVILLHGFGASLRHWRYNLRLLGEYQPTYALDLMGLGAAEKPVAAYGAEFWAAQVHAFWQGIVGQPAVMVGNSIGALIALTCAYHYPQMAAGVVMLSLPDPAVREELIPRAIAPLVGAIEQIFTAPWLLRALFYTIRQPAIVKRWAQLAYANPACVDDELLEILLSPAYDRHSDRAFVQIIRAMSRPDFGPSAKRMLNSVSQPLLLIWGKQDRFIPPMLSRQFPQVQPRLEVVELDHSGHCPHDEQPDRLNGLLLDWLRRHELLRG

SEQ ID NO: 113074 - DNA, 885 bp, Thermosynechococcus elongatus BP-1
  CDS (1)..(885): transl_table=11
atgactgtctctctcccatcgcaaacatggcagtggcaaggatacccaattctctatcgccatcaaggtagccaaggtccccccctgcttctgattcacggctttggtgcctctagtttgcattggcgcaaaaatattcctgcccttgccgctgaccatcgagtctacgccattgatttgttgggctttgggggctccgctaaacccgctccctccgcgattccctacacctttgagacgtgggcaaccttggttttggccttttgccgtgaggtgattggccagcctaccgtttttattggtaactctattggctgcgtggtcgctttacaggcagctgttttccagccagcgtgggtcagtcaattgatcctgctcaactgctctctgcggcagcttcacgatcgcaaacaacagcaactcccttggtaccgccgctggggaacccgcctactccagcgacttttagccaatcgcacccttggcacctactttttccgccaaattgctcaaccccgtgttgtgcgccgcattctccaccaagcctatgccaacgctgctgcggtcaccgatgaactagtggagatattactcacccctgcccaagacgctggggctgccgatgtcttcctagcctttgttcgttattcccagggccccttacccgaagacctgctaccgcagatcacctgccccacctatttcctttggggcgctgccgatccttgggaaccgatggatgaaggtcaaaagttagctgagtttccctgtgtgcgggagtttgttgccttaccagagattggccattgcccccaagatgaagcacctgagcaggtgaatgcccacattctgaaatggttgggcaaaatttccgtcagcacctag

SEQ ID NO: 113075 - protein, 294 aa, Thermosynechococcus elongatus BP-1
MTVSLPSQTWQWQGYPILYRHQGSQGPPLLLIHGFGASSLHWRKNIPALAADHRVYAIDLLGFGGSAKPAPSAIPYTFETWATLVLAFCREVIGQPTVFIGNSIGCVVALQAAVFQPAWVSQLILLNCSLRQLHDRKQQQLPWYRRWGTRLLQRLLANRTLGTYFFRQIAQPRVVRRILHQAYANAAAVTDELVEILLTPAQDAGAADVFLAFVRYSQGPLPEDLLPQITCPTYFLWGAADPWEPMDEGQKLAEFPCVREFVALPEIGHCPQDEAPEQVNAHILKWLGKISVST

SEQ ID NO: 113076 - DNA, 891 bp, Thermosynechococcus elongatus BP-1
  CDS (1)..(891): transl_table=11
atgacctcgacgctctcagccacggcagcttttcccaccgcagactggacttggcgcggccatcgcattcgctacagcgtcaatggcagtggtgccccagtagtcttggttcatggatttggtgcctccattggtcactggcgcaaaaatatccccgcccttactgccgcaggctaccgtgtctatgcccttgatttactgggctttggtgcatcggcaaagccagatttagcctacagcttggatctgtgggcagagctactggcggattttgggcaagcccatgttggggaaccggtggtttgggtaggcaactccattgggggtctgttgtgtttgatgatggccgcgcgctatggccacacctgccgtggggtcagtgttctcaactgtgccggcggactcaaccaccgtcccaatgaactcaactggacacagagtctatttacagcgatttttcgggcgttggtggcctccccgatcattggtcatctcattttccatcagattcgacagccagagcgcatccgcaaaaccctaacccaagtctatgccaatcccgaagccattaccgatgaattggtggagctgctgcatcgaccggcgatggatgcgggtgcgaaggaggtctttgcccgcgtcatttcggcaccccctggacccaaaattgttgatttgctgccccacattcaagtgccaattctagtgctgtggggggaagtggatccttggacaccagtgtcgggaacaaagcactttgaggctcaccaggaacgtttacccattcgcattgaacggctcccccataccggccactgtccccatgatgatcgccccgaacttgtcaacccgatcttaattgagtggctgcaacagttaactcaaggctag

SEQ ID NO: 113077 - protein, 296 aa, Thermosynechococcus elongatus BP-1
MTSTLSATAAFPTADWTWRGHRIRYSVNGSGAPVVLVHGFGASIGHWRKNIPALTAAGYRVYALDLLGFGASAKPDLAYSLDLWAELLADFGQAHVGEPVVWVGNSIGGLLCLMMAARYGHTCRGVSVLNCAGGLNHRPNELNWTQSLFTAIFRALVASPIIGHLIFHQIRQPERIRKTLTQVYANPEAITDELVELLHRPAMDAGAKEVFARVISAPPGPKIVDLLPHIQVPILVLWGEVDPWTPVSGTKHFEAHQERLPIRIERLPHTGHCPHDDRPELVNPILIEWLQQLTQG

SEQ ID NO: 113078 - DNA, 966 bp, Arabidopsis thaliana
  CDS (1)..(966)
atggatacttcttctgcttcttctcagtctgttcaaggtagtgagaggttggcttttaaaccagaaggctataacttttgggaatggagaggtcacaagattcattatgttgttcaaggagaaggctcgcctctagttcttattcatggttttggtgcttctgtctttcattggaggtataacattcctgaattggctaagaaatacaaggtttacgccttggacttactcggtttcggatggagtgacaaagctctcatagagtatgatgccatggtttggacagatcaagttattgatttcatgaaagaggtagtgaaagaaccagctgttgtcgttggaaacagccttgggggatttacggcattgtcagttgcggttggattacccgagcaagtcacgggagttgcacttctgaactctgcgggacaatttgcagccgagagtagaaaacgagaggaagctgatgaaactgtgataaccaagtttatagttaagccgctaaaagagattttccaacgtgtggttcttgggttcttgttctggcaagccaagcaaccttctcgaatcgaatctgtcttaaagagtgtgtacatagactctactaatgtcgatgactacctcgtcgaatccatttcaaaacctgcaacagatccaaatgctggagaagtatactacagattgatgacaaggttcttaacaaaccagagtagatacactctagatagtgttctaagtaagatgacttgtccgcttctgttggtttggggagatcttgatccgtgggtcggtccagctaaagccgagaaaatcaaagcattttactcgaactcatcgctcgttcacttacaagcagggcattgtcctcatgatgaagtcccggaagctgtaaacaaggctttgttggattggttgtccattaatattgcttcaaagccagcttctcctatagtcttggagacgtaa

SEQ ID NO: 113079 - protein, 321 aa, Arabidopsis thaliana
MDTSSASSQSVQGSERLAFKPEGYNFWEWRGHKIHYVVQGEGSPLVLIHGFGASVFHWRYNIPELAKKYKVYALDLLGFGWSDKALIEYDAMVWTDQVIDFMKEVVKEPAVVVGNSLGGFTALSVAVGLPEQVTGVALLNSAGQFAAESRKREEADETVITKFIVKPLKEIFQRVVLGFLFWQAKQPSRIESVLKSVYIDSTNVDDYLVESISKPATDPNAGEVYYRLMTRFLTNQSRYTLDSVLSKMTCPLLLVWGDLDPWVGPAKAEKIKAFYSNSSLVHLQAGHCPHDEVPEAVNKALLDWLSINIASKPASPIVLET

SEQ ID NO: 113080 - DNA, 912 bp, Prochlorococcus marinus subsp. marinus str. CCMP1375
  CDS (1)..(912): transl_table=11
ttgactaacacgaaaacccatttttcaaactggaataaattggaagttgcttggaaaaaagaaggaactgaaaacaacgagcctttttcaattttgttaattcatggttttggagctaataaagaacattggcgaaaaaaccaaactattctaggaacaattgcgccatgttattcaattgatttaattgggtttggagaaagtagtcagccaccttcaaagctattgggggaaaaaaaaacaaacaacaatttttgttataacttcgacaattggggcgaacaaattgcagatttttcacgttcaattataaagaaacctgttttattaattggtaattccattggtggagtcattgctctaagagcagctcaaattttaggtaatcattgtaaaggtgttattttaattaattgtgctcaacgtttaatggatgataaacaactattaaataagccagtttgggaaagatctataagacctatacttaaattaataactaggcaaaggtggctaagtagaaacttgttcaaaaatgcggcaaggcaatcatttattaaaaaagttcttcaaatagcctacccaagtggtaaaaatatcgatgaagagttaattaatatgctttatagacctactaagagggcaggagcatcagaagcatttcatggttttataaatatatttaatgattacttagcacctgaattaatggaacaactttcattgcctgtttatttaatatggggaaaagatgatccttgggaaccaattgccgaagcagagaattggtactcttctattaaatgtattcaatcaataacaataatcaaagaatgtgggcattgccctcacgatgagaaccctgaagaagtcaatcctgttttaatcaagattattcaacaggctacatag

SEQ ID NO: 113081 - protein, 303 aa, Prochlorococcus marinus subsp. marinus str. CCMP1375
MTNTKTHFSNWNKLEVAWKKEGTENNEPFSILLIHGFGANKEHWRKNQTILGTIAPCYSIDLIGFGESSQPPSKLLGEKKTNNNFCYNFDNWGEQIADFSRSIIKKPVLLIGNSIGGVIALRAAQILGNHCKGVILINCAQRLMDDKQLLNKPVWERSIRPILKLITRQRWLSRNLFKNAARQSFIKKVLQIAYPSGKNIDEELINMLYRPTKRAGASEAFHGFINIFNDYLAPELMEQLSLPVYLIWGKDDPWEPIAEAENWYSSIKCIQSITIIKECGHCPHDENPEEVNPVLIKIIQQAT

SEQ ID NO: 113082 - DNA, 915 bp, Prochlorococcus marinus subsp. pastoris str. CCMP1986
  CDS (1)..(915): transl_table=11
atgtcctttaaaaaatccgaaaattggaaatggaaaaattgggacatatcatggtcttcaacaaaacaatcctctaacaatagtgatttaaatattttattaattcatggttttggagcatcaaaacgacattggagacataatcaagattttctcggaaataatcataattgctattcaattgacctactaggctttggagaaagtagccaacctggagcttcattagattatgagtcttacaaagataattatgttaaatattcctttgacttatggggaagtcaggtagctactttttgtaatgaggtaattaaatctcctgtttatctagtaggcaactcaatcggtggagttgtatctttaaaagctgctgaaattctcaaagaaaattgtaatggccttgttttaattgactgtgcccaaagaacaatggatgataagagacttaaaagaagcgatgtattaatgaacttattgcgtccggtaataaaaacattagtaagtaaaagaattattagtaacaccctttttgagagagctgccaatccagcagttattaaacaaatccttaaaaaagcatatccctcaggaaaaaatattgatgaagaattaatagaaattttatataatccttctcaaagaaaaaattcaaaagaggcttttcgtggttttattaatttattcgatgactatctcgctacagacctattttatagggttaattctccaattcagttgatttggggagaaaaagatccttgggaatctctaaatgaagcaaaatcttggaagaaaaactataaaaatataaaaagactagatgttattaaagaggctggacattgtcctcacgatgaaaatcctgaggagactaacaatttaatttgtcaatttattcaagagacgaaataa

SEQ ID NO: 113083 - protein, 304 aa, Prochlorococcus marinus subsp. pastoris str. CCMP1986
MSFKKSENWKWKNWDISWSSTKQSSNNSDLNILLIHGFGASKRHWRHNQDFLGNNHNCYSIDLLGFGESSQPGASLDYESYKDNYVKYSFDLWGSQVATFCNEVIKSPVYLVGNSIGGVVSLKAAEILKENCNGLVLIDCAQRTMDDKRLKRSDVLMNLLRPVIKTLVSKRIISNTLFERAANPAVIKQILKKAYPSGKNIDEELIEILYNPSQRKNSKEAFRGFINLFDDYLATDLFYRVNSPIQLIWGEKDPWESLNEAKSWKKNYKNIKRLDVIKEAGHCPHDENPEETNNLICQFIQETK

SEQ ID NO: 113084 - DNA, 912 bp, Prochlorococcus marinus str. MIT 9313
  CDS (1)..(912): transl_table=11
ttgacaaacgccgaaaatcacatttggacttggcaggattggcaggtggcttggagcagatcaggcactgcagatcatgccaattcagcaacgctgctcatccacggctttggagcctgcaaggagcattggcgccataaccaatcggtgttggcccaaataagcccctgctacgccatcgatctcctcggctttggtagcagcagccaaccaagggcacgactgcggggtgaagccccccatcaaggtgatttctgctacgactttgatggctggggagcccaggtcgccgccttctgccgcgaagtggtgcagatacctgtgcgcattgtgggcaattcaatcggcggagtgattgcgttacgtgccgcccagctcctcgaagaggcttgcgaaggcgtcgttctgatcaactgcgcccaacgcaccttggacgacaagcgattagacgaacagcccagcctgatgcgctggactcgtccctggctgaaaagtctggttcagcagcgctggctaagcaacagcctcttccgcaacgcagcaaacccgatgatgatcaagcgggtactgaagcaggcctaccccagcggaaacaatctcgatcgatccttggtgagcatgctgcaaaaaccagccgatagaccaggtgctgcagaagccttccacggtttcatcaacatcttcgacgactacctggcgccagaactgatggctgatctcaacatgccagtggatctgatctggggggcagccgatccatgggaaccgttacaggaagcccgtcgctgggctgcgttgctgccttgtatccgctccatatcagtagtcgatggtgcagggcattgcccacacgacgaagctcctgaagaggtcaatccgctactgctcagcatcattcagcaagccgcatag

SEQ ID NO: 113085 - protein, 303 aa, Prochlorococcus marinus str. MIT 9313
MTNAENHIWTWQDWQVAWSRSGTADHANSATLLIHGFGACKEHWRHNQSVLAQISPCYAIDLLGFGSSSQPRARLRGEAPHQGDFCYDFDGWGAQVAAFCREVVQIPVRIVGNSIGGVIALRAAQLLEEACEGVVLINCAQRTLDDKRLDEQPSLMRWTRPWLKSLVQQRWLSNSLFRNAANPMMIKRVLKQAYPSGNNLDRSLVSMLQKPADRPGAAEAFHGFINIFDDYLAPELMADLNMPVDLIWGAADPWEPLQEARRWAALLPCIRSISVVDGAGHCPHDEAPEEVNPLLLSIIQQAA

SEQ ID NO: 113086 - DNA, 936 bp, Synechococcus sp. WH 8102
  CDS (1)..(936): transl_table=11
gtgaccgaagagcacgatcgatggcgctggaatcgtcacaccatcggctggtcgctgattggtaacacagatgctccgcttgcggtaattctgatccatggatttggcgccaatacagagcactggcgtttcaaccaaccagtgctggcgaaagcaacggccacctatgcgatcgacttgctgggattcggccgcagtgatcaacccaaagcacacctgaaagacgaagtgggcgagtctggctcagtccagtacggctttgacctatggggccggcaggtcgcggacttctgccgcgaggtggtcggtcgaccagtgctgctggtgggcaactcgattggtggggtcgtggccctgagggcagcccagatgctggaggagacgccgggtctcagcccctgccgttcagtcgtgctgatcgactgtgcccagcggctgatggacgacaaacagctggccagccaacccgcctggatgacctgggtgcggccgctgttgaaaacgatggtgcgacagcgctggctcagcacagccctcttccgtaatgccgcccgtccgggggtgatccgaagcgttctgaaacaggcttatcccagtggagccaacatcgatgacgcactggtgaatctgctgtatcaacctacccagcgtgatggtgcagctgaagcgttccgcggcttcatcaatctgtttgatgaccacttagcaccacaattgatgggcaatctcacggtgcctgttgatctgatctggggcgaaaaggatccctgggagccactcgctgaagcgatgaactgggccgaaaccatccccactgtgcgatcactacaggtgatcactggtgcagggcattgtccccatgatgaagctccggaaacggttaatcagcagctgttgcggcgagttcaggaacacgcttcagcagcgcctgattga

SEQ ID NO: 113087 - protein, 311 aa, Synechococcus sp. WH 8102
MTEEHDRWRWNRHTIGWSLIGNTDAPLAVILIHGFGANTEHWRFNQPVLAKATATYAIDLLGFGRSDQPKAHLKDEVGESGSVQYGFDLWGRQVADFCREVVGRPVLLVGNSIGGVVALRAAQMLEETPGLSPCRSVVLIDCAQRLMDDKQLASQPAWMTWVRPLLKTMVRQRWLSTALFRNAARPGVIRSVLKQAYPSGANIDDALVNLLYQPTQRDGAAEAFRGFINLFDDHLAPQLMGNLTVPVDLIWGEKDPWEPLAEAMNWAETIPTVRSLQVITGAGHCPHDEAPETVNQQLLRRVQEHASAAPD

SEQ ID NO: 113088 - DNA, 894 bp, Gloeobacter violaceus PCC 7421
  CDS (1)..(894): transl_table=11
atgcaatcttccgtaacacagtggtcctggcacggttacccggtggcctaccgcagcgccggggaggcccacagcgaccggccgccgatggtgctcatccacggcttcggcgcctcgctgggccactggcgccgcaacctgccggtcctggcgcaggagcatcctgtttttgcgctggatctggtgggctttggggcgagtgccaaaccgagccctgccgaactggcctacaccttcgagacctggggtcggcaggtcggcgattttgtgcgcgaagtggtgggccggccggccatcctggtcggcaactcgatcggcgccatcgtggcgctgcaggcggcggtgggtgctcccgagcggaccgacagcgttgtactgatcaactgttcgctgcgactcctgcacgagcgcaagcgccggacgctcccctggctgcgccgcgccgggacgccgctattgcagcggttgctctcggtaccggcggtggggcgcttcttttttaaccggctgcgccgccccgagagcgtgcgcaagatcctccagcaagcctacgtgcgccgcgaggcggttaccgacgaactggtggaaatgctcacccgcccggctgccgatccaggggcaacggcggtgtttctggcttttatcaactacgcgagcgggccgctcgccgaggacttgctgcccgaggtgcgctcgccggtgctcatcctctggggtaaagacgacccctgggagccctgtgccctgggccgcgctctcgcggactacccgtgcgtcgagaaatttgtgcccatcgagcgggcgggccactgtccgcaggacgaagcacccgaagaagtcaacgcccacctgctcgcctggggcgcccggcggtcttcggcgctgagccagtag

SEQ ID NO: 113089 - protein, 297 aa, Gloeobacter violaceus PCC 7421
MQSSVTQWSWHGYPVAYRSAGEAHSDRPPMVLIHGFGASLGHWRRNLPVLAQEHPVFALDLVGFGASAKPSPAELAYTFETWGRQVGDFVREVVGRPAILVGNSIGAIVALQAAVGAPERTDSVVLINCSLRLLHERKRRTLPWLRRAGTPLLQRLLSVPAVGRFFFNRLRRPESVRKILQQAYVRREAVTDELVEMLTRPAADPGATAVFLAFINYASGPLAEDLLPEVRSPVLILWGKDDPWEPCALGRALADYPCVEKFVPIERAGHCPQDEAPEEVNAHLLAWGARRSSALSQ

SEQ ID NO: 113090 - DNA, 867 bp, Gloeobacter violaceus PCC 7421
  CDS (1)..(867): transl_table=11
atggcaacatctttggcgagcaccagtaaaagatggacctggcgcggctggcaggttcactacgtcgaagccggcaccgaccgacccggagtgcctctgctgttggtgcatggcttcggagcctccaccgaccactggcgcaagaacatcgggccgctcagtgagcaccatccggtctgggctgtcgatctattggggtttggccgcacccaaaagcccaacatcgcctacagcggcgagttgtggcgcgatcaactgcgcgattttacaagcgagattatcggccggccgccggtggtggcgggcaattccctgggcggctacgcggccctggtgctggccgcggaccacccggaatgggtaaagggcctggtgctcatcaatggtgcggggccgttttcgggagccccccagccgaatgcgtttcagaaattgaccggcgaggtggccaagggctttttctcccagagttgggcaagctggctgctgtttcagtattttcgccaaccctcgaacatccggcgagtgctgggccaggtctaccacgaccagggtgcggtgacagacgagctggtcgccgacatttatcgcccttcgtgcgatccgggggcggcggtagtgtttgcctcggtcttccagactccccagggccgctacgtcgacgaattgctgggaagcctccggcgaccgctgttgttgctgtggggcgagagcgatccctggatgaacgtcgatcgggcaaagcgctttctcgaggcgtacccgagcggtcaattgcagttgattccagcgggccattgcccccacgacgagcggcccgaactggtcaacgcttacttgagcgagtgggccgagcaaatttcctag

SEQ ID NO: 113091 - protein, 288 aa, Gloeobacter violaceus PCC 7421
MATSLASTSKRWTWRGWQVHYVEAGTDRPGVPLLLVHGFGASTDHWRKNIGPLSEHHPVWAVDLLGFGRTQKPNIAYSGELWRDQLRDFTSEIIGRPPVVAGNSLGGYAALVLAADHPEWVKGLVLINGAGPFSGAPQPNAFQKLTGEVAKGFFSQSWASWLLFQYFRQPSNIRRVLGQVYHDQGAVTDELVADIYRPSCDPGAAVVFASVFQTPQGRYVDELLGSLRRPLLLLWGESDPWMNVDRAKRFLEAYPSGQLQLIPAGHCPHDERPELVNAYLSEWAEQIS

SEQ ID NO: 113092 - DNA, 1050 bp, Gloeobacter violaceus PCC 7421
  CDS (1)..(1050): transl_table=11
gtgatcacagtgtcgaaatattcgttgcccatcgccgattctcccagcccagagcgccatcctagcttccggcttcccccacgccgcagcccgtggacgggtagaatcagaaataaatcttcacgaccgacaggagcccggatgcgcgccgatctcaagcccccctcgaccaccgaagcgtactggacctggcggggccatcgcatctgctactgggtggccgagccgaatgccgcccctgagcgcccgccgatcgtgctgttgcacggctttggcgcctcggcgggccattggcgcaaaaatattgccgaactggcggcccaccgccgggtctatgccctcgactggctgggtttcggcgcttcggccaaaccggcccttccttacagtctggagctgtgggaggcacaactggtcgatttttgcactgaggtggtcggtgccccggcggtgctggtcggcaattcgatcggcgccctcgaagcgctgatggtcaccgcccgccaccccgagcgggcgacggccacggtgctgctcaactgtgcaggcgggctcacccaccgccccgaggaactgccgctggtcacccggccggtgatggcggcgatgcagatggtcctgcgcgtgcccggtcttgccgagcgcttttttgatttcgcccgctccaaacgcaacatccgcaacaccctgcgccaggtctacggcaacgccgaggcggtcaccgaagaactggtcgaactgctgtacactccctcgagcgatccgggtgccgccgccgtgttcgtctcggtgctcaccgccgaggccggcccccgtcccgaagaactgctgcccctggtgcgcacgcccctactggtcctctggggcgacaaagacccctggacacctatcggccgcggtcgcaccttcgcccgctacgccccccagtcccagttcgtggccctcgaaggtcttggccactgcccccacgacgaggacccccggcgggtcaatgccgctatccgcgagtggctggcgaccaccgagtgcctacatgacaatcgggcgtga

SEQ ID NO: 113093 - protein, 349 aa, Gloeobacter violaceus PCC 7421
MITVSKYSLPIADSPSPERHPSFRLPPRRSPWTGRIRNKSSRPTGARMRADLKPPSTTEAYWTWRGHRICYWVAEPNAAPERPPIVLLHGFGASAGHWRKNIAELAAHRRVYALDWLGFGASAKPALPYSLELWEAQLVDFCTEVVGAPAVLVGNSIGALEALMVTARHPERATATVLLNCAGGLTHRPEELPLVTRPVMAAMQMVLRVPGLAERFFDFARSKRNIRNTLRQVYGNAEAVTEELVELLYTPSSDPGAAAVFVSVLTAEAGPRPEELLPLVRTPLLVLWGDKDPWTPIGRGRTFARYAPQSQFVALEGLGHCPHDEDPRRVNAAIREWLATTECLHDNRA

SEQ ID NO: 113094 - DNA, 912 bp, Prochlorococcus marinus str. NATL1A
  CDS (1)..(912): transl_table=11
atggtttcctcagtggtagatacaaaactttctgattggaaattcttaggtcatcccgttcatagtctgagcattattcctgaagctcataaaaccaagactgatgaagacaaaggtccagcaattcttttaattcatggctttggtgcctctacaattcattggaggtacaacttaccagtactaggaaagcagtatgaagttcacgctttagatcttctcgggtttggtaaaagctccaaacctagtggtcttgcttatggaggcccactttggaaagatcaaatagttgcttacgtaaaagaaaaaattgggagacctacaattcttgtaggtaactctctagggggatatgctgcgcttgctagtggtgcggcgatgggtccagaagcagcaggtgtggttttattaaatgctgcgggttatttcagtgaagacaagaaaacaactaaaggaacttgggcgacagcaagaaaaactgttgctggtatctttctcaaaaatgctctgttgcaaagaataatttttgaaaaccttagacagccttcaacaattaaacgtactttaaatcaagtttatattgatacatctaacgttgatgatgaactagtagaagcgattcgaaaaccatctttggataagggtgcttttaatgtcttcaaaagtgttttcgatccagcaggacctcagggaaaaccacttgatgagttattttctcagttgaaggcaccattgttattgctttggggtaatagagatccttggatgaatgcccctggtaaaagggctacttataaaaaacacactcctacaaatacaaaagaagttgttttagacgctggtcattgtcctcatgatgaagtgcccgatcaggttaattccgctcttttagaatggattaatcagctctaa

SEQ ID NO: 113095 - protein, 303 aa, Prochlorococcus marinus str. NATL1A
MVSSVVDTKLSDWKFLGHPVHSLSIIPEAHKTKTDEDKGPAILLIHGFGASTIHWRYNLPVLGKQYEVHALDLLGFGKSSKPSGLAYGGPLWKDQIVAYVKEKIGRPTILVGNSLGGYAALASGAAMGPEAAGVVLLNAAGYFSEDKKTTKGTWATARKTVAGIFLKNALLQRIIFENLRQPSTIKRTLNQVYIDTSNVDDELVEAIRKPSLDKGAFNVFKSVFDPAGPQGKPLDELFSQLKAPLLLLWGNRDPWMNAPGKRATYKKHTPTNTKEVVLDAGHCPHDEVPDQVNSALLEWINQL

SEQ ID NO: 113096 - DNA, 900 bp, Prochlorococcus marinus str. NATL1A
  CDS (1)..(900): transl_table=11
atgaagcaattctggaattggaaaaattatcaaattgcatggcaagtagaagaaacaagtaatgattcaggaatcgctatagtattaattcatggttttggagcatgtaaagagcattggagattcaatcaaaaaactattagctcaattgcaccatgctatgcattagatttaataggttttggagacagcagtaagccaaattcacagatttcatatgaaaagaaaacctatcagaatttcaattattgttttgatagttggagtcagctagtttatgatttttgcaacgaaatagttaaaaaacctgtcttattaattggaaattcgattgggggagttattgcattaaatacatcgaagaaattatctcaaaaagcactaggggtaatattaattgattgtgctcaaaggacaatggatgataagcgcttagctgaacaatcgttattaatgagatttttaagaccagtgattaaaacttttgtaagacaaagacttttaagttccaacatttttaacatcgcagcaaaaccaaagtttattgcgaaaattttaaaagtagcttatccaagtgaaaagaatgttgatgaagagttaatagacacactcttcaagccaacccaaagcaaaggagctccggaggcttttagaggatttattaacctatttgatgattacctagcaccaaatttactaaaggaaatgcatacttctgttcacttaatttggggagaaaaagatccttgggaaccagtgaaagaagctcaaaaatggtttaaaacttttgaatgtataaaatctttagatgttatttcagacgcagggcattgtccccatgatgaaatgccagaaaaagttaatcctgttctaataaggataattcaagaagccatataa

SEQ ID NO: 113097 - protein, 299 aa, Prochlorococcus marinus str. NATL1A
MKQFWNWKNYQIAWQVEETSNDSGIAIVLIHGFGACKEHWRFNQKTISSIAPCYALDLIGFGDSSKPNSQISYEKKTYQNFNYCFDSWSQLVYDFCNEIVKKPVLLIGNSIGGVIALNTSKKLSQKALGVILIDCAQRTMDDKRLAEQSLLMRFLRPVIKTFVRQRLLSSNIFNIAAKPKFIAKILKVAYPSEKNVDEELIDTLFKPTQSKGAPEAFRGFINLFDDYLAPNLLKEMHTSVHLIWGEKDPWEPVKEAQKWFKTFECIKSLDVISDAGHCPHDEMPEKVNPVLIRIIQEAI

SEQ ID NO: 113098 - DNA, 867 bp, Prochlorococcus marinus str. MIT 9303
  CDS (1)..(867): transl_table=11
gtggcttggagcagatcaggcactgcagatcatgccaattcagcaacgctgctcatccacggctttggagcctgcaaggagcattggcgccataaccaatcggtgttggcccaaataagcccctgctacgccatcgatctcctcggatttggtggcagcagccaaccaagggcacgactgcggggtgaagccccccatcaaggcgatttctgctacgactttgatggctggggagcccaggtcgccgccttctgccgcgaagtggtgcagatccctgtgcgcattgtgggcaattcaatcggcggagtgattgcgttacgtgccgcccagctcctcgaagaagcttgcgaaggtgtcgttctgatcaactgcgcccagcgcaccttggacgacaagcgattagacgaacagcccagcctgatgcgctggactcgtccctggctgaaaagtctggtgcaacagcgctggctaagcagcagcctcttccgcaacgcagcaaacccgatggtgatcaagcgggtgctgaagcaggcttaccccagcggtaacaatctagatagatccttggtgagcatgctgcaaaaaccagccgatagaccaggtgctgcagaagccttccacggtttcatcaacatcttcgacgactacctggcgccagaactgatggctgatctaaacatgccagtggatctgatctggggggcagccgatccatgggaaccgttgcaggaagcccgtcgctgggctgcgttgctgccttgtatccgctccctatcagtggtcaatggtgcagggcattgcccacacgacgaagcgcctgaagaagtcaatccgctgctgctcagaatcattcagcaagccgcatag

SEQ ID NO: 113099 - protein, 288 aa, Prochlorococcus marinus str. MIT 9303
MAWSRSGTADHANSATLLIHGFGACKEHWRHNQSVLAQISPCYAIDLLGFGGSSQPRARLRGEAPHQGDFCYDFDGWGAQVAAFCREVVQIPVRIVGNSIGGVIALRAAQLLEEACEGVVLINCAQRTLDDKRLDEQPSLMRWTRPWLKSLVQQRWLSSSLFRNAANPMVIKRVLKQAYPSGNNLDRSLVSMLQKPADRPGAAEAFHGFINIFDDYLAPELMADLNMPVDLIWGAADPWEPLQEARRWAALLPCIRSLSVVNGAGHCPHDEAPEEVNPLLLRIIQQAA

SEQ ID NO: 113100 - DNA, 960 bp, Prochlorococcus marinus str. MIT 9303
  CDS (1)..(960): transl_table=11
gtgacgtcagctccatctgccgtgcttaatgcttcctggagccatctggggcacgatgttcattgcctacaacgcatcccagaacaggatgttgagcatggggggcgccaacggccggcactgttgttggtgcatggctttggagcttctaccgatcactggcgccacaacattccgaagctctctctcacccatgaggtgcatgccatagacctgcttggttttggccgtagtgccaaacctggcgggctggattatggcggggacctttggaaagaccagttggtttcctatgtcaacgagcgcattggaaggcccactgtgattgttggcaattcgctgggaggttatgccgccttggctgcagctgctgctcttgaatcgcaatcggccggagtggttttactgaatgctgctggttatttcagcgatgagaagttttctccaaaaccaaaagatatgagttcgaggcttcgccagatgattgggcaaggtctttcaagggatcttgtggtgaagtggttgatatatcccttgatacagagaatgatctttgagaatctgcgcaggcctggtgtcattcgcaggactctccagcaggtttatatcgatcctgccaatgttgatgatgatctaattgagtcgattcgtaggccttctctggatccaggcgcattccaagtgtttcgcaatgtttttcaggcacgtgggcttaggggtaaggctattgatgaattgtttaatgatttgcaagctcctctgttattgctctggggtgatggtgatccttggttgaggaatgcaaaagccaagcaagataagtttcgcacatatgccaaagaagcttctttggaagtgaaagaggtgcttttaaatgctggacattgccctcatgatgaggtgcctgacttggtgaattctgaattgctggagtggctaaatggtttgagtattgcttga

SEQ ID NO: 113101 - protein, 319 aa, Prochlorococcus marinus str. MIT 9303
MTSAPSAVLNASWSHLGHDVHCLQRIPEQDVEHGGRQRPALLLVHGFGASTDHWRHNIPKLSLTHEVHAIDLLGFGRSAKPGGLDYGGDLWKDQLVSYVNERIGRPTVIVGNSLGGYAALAAAAALESQSAGVVLLNAAGYFSDEKFSPKPKDMSSRLRQMIGQGLSRDLVVKWLIYPLIQRMIFENLRRPGVIRRTLQQVYIDPANVDDDLIESIRRPSLDPGAFQVFRNVFQARGLRGKAIDELFNDLQAPLLLLWGDGDPWLRNAKAKQDKFRTYAKEASLEVKEVLLNAGHCPHDEVPDLVNSELLEWLNGLSIA

SEQ ID NO: 113102 - DNA, 900 bp, Prochlorococcus marinus str. MIT 9301
  CDS (1)..(900): transl_table=11
atggaaaaatcagctctgatagatagtgatgtaaattatgactggaattttttaaattacccaatacatactatttctgccaagcctgagcaaacatcaaaagaatgtgcaattttattaattcatggtttcggtgcctctacggatcattggagattcaatatccctattttgagtagcaaatatgaagttcatgcgatggatcttcttggatttggaaaaagtcctaagccccaagatgttgaatactcaggatctttatggaaagatcaggttgttgcttatgtacaagagaaaataaaaaaacctacaattgtcgttggaaattcattaggtggttatgcagcattagcagctggtgcagaattaaatgatctaaatgcaggggtgatattactgaatgctgcaggatattttagtgaagaaaaaactatcaaaaagaatatgttgcaaacttcaattgaaacagttgctggcatatttttgaaaaatattgttcttcaacgtttgatttttgagaatatgagaaatccaaaaaatataaaaaaaactttaaatcaagtgtatgttgataaaaaaaatgttgatgattttttagttgagtcaataaggaagccttcattagatttcggagcttttaatgtttttaggagtgtatttaacccatcaggtcctcaggggttgccgttggataagctattcgcaaaactaaatgcaccattattacttctttggggagggaaagatccctggatgaacactccaaaaaaaagaaatctatataaaaaatttacaccaaagaatacaaaagaaattattcttgacgcaggacattgccctcatgatgagatacctgaattagttaatcagcatattttagattgggttgattctctttaa

SEQ ID NO: 113103 - protein, 299 aa, Prochlorococcus marinus str. MIT 9301
MEKSALIDSDVNYDWNFLNYPIHTISAKPEQTSKECAILLIHGFGASTDHWRFNIPILSSKYEVHAMDLLGFGKSPKPQDVEYSGSLWKDQVVAYVQEKIKKPTIVVGNSLGGYAALAAGAELNDLNAGVILLNAAGYFSEEKTIKKNMLQTSIETVAGIFLKNIVLQRLIFENMRNPKNIKKTLNQVYVDKKNVDDFLVESIRKPSLDFGAFNVFRSVFNPSGPQGLPLDKLFAKLNAPLLLLWGGKDPWMNTPKKRNLYKKFTPKNTKEIILDAGHCPHDEIPELVNQHILDWVDSL

SEQ ID NO: 113104 - DNA, 915 bp, Prochlorococcus marinus str. MIT 9301
  CDS (1)..(915): transl_table=11
gtgtctttgaataaatctgaaacttggaaatggaaaaattgggaaatttcttggtctttgtcaaaaaatagtacttctgaaaaaaatactaaaattttattagttcatggattcggggcatcaaaaaaacattggagacataatcaagattttctcggtaaattttctaactgctacgcaattgacctattaggatttgggaaaagcagtcagcccagtgctttattaaattacgaacctgataaaaaaaactcaattaaatattcatttgacttatggggcaatcaaatatcaacattttgtgcagaggtcataaaatctcctgtttacttggtaggaaattcaattggtggggttattgcattgaaagctgctgaaatccttaaagataattgcaaaggtgtcattttgattgattgcgcacaaagaactatggatgataaacgtttaaaacaaagcgatatcttaatgaatctactgagacccgtccttaaaacgatcgtcagacaaagagtaattagtaatacactttttacaagggctgctaatccaaaagttataaaaaaaatacttgaacaagcttacccttcaggaaaaaatatcgatgaagaattaattgaaatactttataaaccttcacaaaggaaaaactctaaagaagcatttcgtggttttatcaacttatttgatgactatcttgctactgaccttttcgataaggttgatgctcctatccaattgatttggggagaaaaagatccttgggaatcgttaaatgaagcaaaagagtggaagcaacaattcagtaatattcaaagattagatattattcatggtgctggtcattgtcctcatgatgaagaacccgaacaaacaaatgaattaataaatgaatttattcaagaaacgaagtaa

SEQ ID NO: 113105 - protein, 304 aa, Prochlorococcus marinus str. MIT 9301
MSLNKSETWKWKNWEISWSLSKNSTSEKNTKILLVHGFGASKKHWRHNQDFLGKFSNCYAIDLLGFGKSSQPSALLNYEPDKKNSIKYSFDLWGNQISTFCAEVIKSPVYLVGNSIGGVIALKAAEILKDNCKGVILIDCAQRTMDDKRLKQSDILMNLLRPVLKTIVRQRVISNTLFTRAANPKVIKKILEQAYPSGKNIDEELIEILYKPSQRKNSKEAFRGFINLFDDYLATDLFDKVDAPIQLIWGEKDPWESLNEAKEWKQQFSNIQRLDIIHGAGHCPHDEEPEQTNELINEFIQETK

SEQ ID NO: 113106 - DNA, 960 bp, Synechococcus elongatus PCC 6301
  CDS (1)..(960): transl_table=11
atgctcagtgactccagccctagacaggttgcgatcgcgaactcacaggaatctcgtagtgaaggagtccccaagcgaatggcagtctggcagtggcgaggacaggcgattcgctatcagcaatttggcagcgcaggagcgccagttctgctgattcatggctttggtgccagcagtgaccattggcggcagaacagtccggttttggcggagcaacagcgggtctttgcaattgacctactcggttttggaggttccgccaagccccagcccagtcaggacttgccctatcggtttgaaacttggtcggcccaggttcgcgactttatccgcgaggtaattggggaaccagccgatttggtaggcaattcgatcggctgtgtggtggcgctgcaagccgctgtcgatgaacctgcgctcgtgcgatcgctcgcgctcttggattgctccctgcgtctcctacacgagcgttatctggcgcagtccgcctggccgcgccgttttggggtgccaattttccagcaactcctcgcttggaagccgttcggaggcttcttcttccaacgcttggctcaaccgcgatcgctgcgtcggattttgcagcaggcctacgccgacaaaaccgccgtcactgatgagttgattgagctgttactcgctcccgcccgtgatccgggtgcggtggatgttttcctagcgtttgtcacctattcccaagggccgctaccgcaggatttgctgccgttggtcacttgcccaacgttgattctctggggagaagcggacccgtgggagccgatcgcccaaggacgggagctggcaaactatcctgccgtgcgtgaatttattgcgctaccgggcgttgggcattgcccgatggatgaagcccccgatcaggtcaatccgatcctgcaacgctggttgcaaaccgcagccaacccggcccctgcaattccctaa

SEQ ID NO: 113107 - protein, 319 aa, Synechococcus elongatus PCC 6301
MLSDSSPRQVAIANSQESRSEGVPKRMAVWQWRGQAIRYQQFGSAGAPVLLIHGFGASSDHWRQNSPVLAEQQRVFAIDLLGFGGSAKPQPSQDLPYRFETWSAQVRDFIREVIGEPADLVGNSIGCVVALQAAVDEPALVRSLALLDCSLRLLHERYLAQSAWPRRFGVPIFQQLLAWKPFGGFFFQRLAQPRSLRRILQQAYADKTAVTDELIELLLAPARDPGAVDVFLAFVTYSQGPLPQDLLPLVTCPTLILWGEADPWEPIAQGRELANYPAVREFIALPGVGHCPMDEAPDQVNPILQRWLQTAANPAPAIP

SEQ ID NO: 113108 - DNA, 948 bp, Synechococcus elongatus PCC 6301
  CDS (1)..(948): transl_table=11
atggtgcgatcgctaggatcaaatcagccattgtggagtgaggagatcatgccgatcgcagcagtacccggtcaggtttggacttggcagggtcaccagatctattacgtgcaagctggggagacagcaggcgatcgcccgcctttattgttggtgcatggctttggtgcctcaaccgaccactggtggaaaaatattgcagacctacaggcagacttccaagtctgggccattgacctgctgggctttggtcgctccgccaaaccggcgattgactacagcggtcaactctggcaacagcagctcacggattttattcaaaccgtcatcggtcagcctgcgatcgtggcgggtaactctctgggaggatacgctgccctctgtgcggctgccgctgcttcagattgggtcaagggggttgtgttgctgaatagtgctggccccttcacgcccgatgcgccgccccccgagccctcgcccttgcaaaaattctggcgatcgctgctgcgtggcctcacccgccagccctgggccgtttggttagtcttcaagaatttgcagcgcccccaaacgattcgccgcaccctcgaaaaggtctactgcgatcgcagtgccgtcaccgatgatctcgttgaagcgattcgccgtccttccctcgatccgggcgcctttgaggtgtttcgctcggtcttccgaacgccccaaggtgaacccgttgatcagctcctagcacgactcacctgtccgttgctcttgatctgggggagcggcgatccctggatgaattgccagcagcgcagtcagcagttccagcgctatgctcgcaacctgacagagcattttctcgaagcgggccattgcccccacgatgaagtacctgaccaagtcgatcgcttgattcgggagtgggtagagcaggcgatcacgccgcagtcactgtgctgttag

SEQ ID NO: 113109 - protein, 315 aa, Synechococcus elongatus PCC 6301
MVRSLGSNQPLWSEEIMPIAAVPGQVWTWQGHQIYYVQAGETAGDRPPLLLVHGFGASTDHWWKNIADLQADFQVWAIDLLGFGRSAKPAIDYSGQLWQQQLTDFIQTVIGQPAIVAGNSLGGYAALCAAAAASDWVKGVVLLNSAGPFTPDAPPPEPSPLQKFWRSLLRGLTRQPWAVWLVFKNLQRPQTIRRTLEKVYCDRSAVTDDLVEAIRRPSLDPGAFEVFRSVFRTPQGEPVDQLLARLTCPLLLIWGSGDPWMNCQQRSQQFQRYARNLTEHFLEAGHCPHDEVPDQVDRLIREWVEQAITPQSLCC

SEQ ID NO: 113110 - DNA, 921 bp, Synechococcus elongatus PCC 6301
  CDS (1)..(921): transl_table=11
atgagtttgcgatcgctgacggtggcgactagccaagactggatctggcggggcttacgggttcgctatgctttccggcgatcgccccagccaacgggcgcggtacccgtgattttcctgcacggctttggagcgggttggcggcactggcgtgacaacattccagcgctggcagaggagcgcgacgtctacgcgatcgatctggtcggctttggggactccgaaaagggctatttgcactacggccctgctttctggtcggagctggtgcgggatttttgccagcagtttgtgggcagcgccgctgttttaatcggcaattctctcggttccgtagtggcgatggtgacggcgcatcgctttcccgagcaagttcatggcttaattctgctgaatctgccagataccagcctgctgcgatcgcctgctgctcacgatcgcttcaagagcctccggcaagcactgctctgggcactgaccccaccctggctgatcgagcctttgctgctctggttgcgatcgcccaaacgactcaaaccttggttggcgttggcctacagcgatcgcgatcgcattgatgcagatttactcgatctgattgcccgtccagcgcgatcggaggaggcaggcccagccttgcgggcgatgactcgcttcaatgcagaagttccccgcgactggcgggccgatcgcgtcttgccgcagttgagtcagccgattttgttgatctggggggagagcgatcgcctcgtgcccttcagtttggcgaagcgttgtcagcagctcaatccccaactggattggttgccaatgcctgccacaggccattgtccccacgacgatcgaccggctttcgtcaatcaaagcctcaacaattggttatcgcagcacgacccaggcgacgttaagatcaaggcttag

SEQ ID NO: 113111 - protein, 306 aa, Synechococcus elongatus PCC 6301
MSLRSLTVATSQDWIWRGLRVRYAFRRSPQPTGAVPVIFLHGFGAGWRHWRDNIPALAEERDVYAIDLVGFGDSEKGYLHYGPAFWSELVRDFCQQFVGSAAVLIGNSLGSVVAMVTAHRFPEQVHGLILLNLPDTSLLRSPAAHDRFKSLRQALLWALTPPWLIEPLLLWLRSPKRLKPWLALAYSDRDRIDADLLDLIARPARSEEAGPALRAMTRFNAEVPRDWRADRVLPQLSQPILLIWGESDRLVPFSLAKRCQQLNPQLDWLPMPATGHCPHDDRPAFVNQSLNNWLSQHDPGDVKIKA

SEQ ID NO: 113112 - DNA, 900 bp, Prochlorococcus marinus str. NATL2A
  CDS (1)..(900): transl_table=11
atgaagcaattctggaattggaaaaattatcaaattgcatggcaagtagaagaaacaagtaatgattcaggaatcgctatagtattaattcatggttttggagcatgtaaagagcattggagattcaatcaaaaaactattagctcaattgcaccatgctatgcattagatttaataggttttggagacagcagtaagccaaattcacagattccatatgaaaagaaaacctatcagaatttcaattattgttttgataattggagtcagctagtttatgatttttgtaacgaaatagttaaaaaacctgtcttattaattggaaattcgattgggggagttattgcattaaatacatcgaaaaaattatctcaaaaagccttaggggtcatattaattgattgtgctcaaaggacaatggatgataaacgcctagctgaacaatcgttattaatgagatttttaagaccagtgattaaaacttttgtaagacaaagacttttaagttccaacatttttaacatcgcagcacaaccaaaatttattgcgaaaattttaaaagtagcttatccaagtcgaaataatgttgatgaagagttaatagacacactcttcaagccaacccaaagcaaaggagctccggaggcttttagaggatttattaacctatttgatgattatctagcaccaaatttactaaaggaaatgaatacttcagttcacttaatttggggagaaaaagatccttgggaacctgtgaaagaagctcaaaaatggtttaaaacttttgaatgtataaaatctttagatgttatttcagacgcaggacattgtccccatgatgaaatgccagaaaaagttaatcctattcttataaagataattcaagaagccatataa

SEQ ID NO: 113113 - protein, 299 aa, Prochlorococcus marinus str. NATL2A
MKQFWNWKNYQIAWQVEETSNDSGIAIVLIHGFGACKEHWRFNQKTISSIAPCYALDLIGFGDSSKPNSQIPYEKKTYQNFNYCFDNWSQLVYDFCNEIVKKPVLLIGNSIGGVIALNTSKKLSQKALGVILIDCAQRTMDDKRLAEQSLLMRFLRPVIKTFVRQRLLSSNIFNIAAQPKFIAKILKVAYPSRNNVDEELIDTLFKPTQSKGAPEAFRGFINLFDDYLAPNLLKEMNTSVHLIWGEKDPWEPVKEAQKWFKTFECIKSLDVISDAGHCPHDEMPEKVNPILIKIIQEAI

SEQ ID NO: 113114 - DNA, 903 bp, Anabaena variabilis ATCC 29413
  CDS (1)..(903): transl_table=11
atgactttaaagactcaaccgctagcagcgacggcgatcgctaattttgataaactggtgtggaattggcgtaattacaaaattcagtacacagtcatgggtactggacagccattagtcctagttcacggttttggtgcttccatcggacattggcgcaagaacattccagttttggcgaatgctggctaccaagtctttgcgattgatttgctgggttttggcggctctgacaaagcggtaatcgattacagtgtagatgtttgggtagaactgctaaaagacttttggacagcccatattcaacaaccagccgtatttgtcggtaattccattggcgcacttttaagcctgatagtattggcaaaacatccagagattacatctggtggtgttttaatcaactcagcaggtggtttaagccatcgcccccatgaactaaacccaccactacggattgtgatggccacatttaatcgagtagtgcgatcgcccattacaggcaaatttgtctttaaccgtatcagacaaaaagctcaaattcgccgcacactctaccaagtttaccgcgatcgtacagccgtcaccgatgagttagtcgatttactttacaccccatcctgcgaccctggagcgcagcaagttttcgcctccatcctcacagcacctcctggccccacaccagaggaactattaccccaaatagaacgtcctttactagtgatttggggcgctgacgacccgtggacaccaattacaggggcgaagatttacgagcaagcccaggagagtggtcaagacataacaattattcccattcctggtgctggtcattgtccccacgatgaagtccccaatgtagtcaatgcccagattattgattggttggcgcaaaggaaataa

SEQ ID NO: 113115 - protein, 300 aa, Anabaena variabilis ATCC 29413
MTLKTQPLAATAIANFDKLVWNWRNYKIQYTVMGTGQPLVLVHGFGASIGHWRKNIPVLANAGYQVFAIDLLGFGGSDKAVIDYSVDVWVELLKDFWTAHIQQPAVFVGNSIGALLSLIVLAKHPEITSGGVLINSAGGLSHRPHELNPPLRIVMATFNRVVRSPITGKFVFNRIRQKAQIRRTLYQVYRDRTAVTDELVDLLYTPSCDPGAQQVFASILTAPPGPTPEELLPQIERPLLVIWGADDPWTPITGAKIYEQAQESGQDITIIPIPGAGHCPHDEVPNVVNAQIIDWLAQRK

SEQ ID NO: 113116 - DNA, 927 bp, Anabaena variabilis ATCC 29413
  CDS (1)..(927): transl_table=11
atgaatacttctacttctacaaaaacctggatttggcgaggcttttccatctgttatcaaactcaaggaactaccgggccatccgttgtactagtacatggttttggtgcttcttggagccactggcgaaaaaatatacccatcctggcgaaaaattgccgtgtttatgcaattgatttaattggttttggtggttcagctaaacctcaaccagatacggaaatggcatatacattagaaacttggggagaacaagtagctgatttttgccgtgaggttgtcggtgaaccagcttttttagtgggtaactctattggctgtattgtagtcatgcaagcagcagtcagcaatccagaaattagtttaagtgttgccctactcaactgttctctacgattactgcatgatcgcaaacgggaaactctaccttggtcgcgtcgttttggcgcacctatgctgcaacgtgtactatctattaaagcaattggtcagttctttttccgtcaaatcgcccaaccaaaaacagtgagaaaaattctgctacaagcctatgttaatagtgaggcagtgacagaggaactggtagatattttgacagtgccagcaagtgatcctggtgctgcggctgtattccttgcctttacttcttattcatccggccctctaccagaagaccttttacctttgttgccttgtccagcattgattgtgtgggggacagatgacccttgggaaccagtagacttaggtcgagaattagccaactatcctcaagtactcaagtttattcccttggaaggtgtagggcattgtcctcaagatgaagctcctgaattagttaatccgattttacaagattggatatgggaaaaaactagacttttagaagcccaagaaattgagcataattcccagacaattgggtag

SEQ ID NO: 113117 - protein, 308 aa, Anabaena variabilis ATCC 29413
MNTSTSTKTWIWRGFSICYQTQGTTGPSVVLVHGFGASWSHWRKNIPILAKNCRVYAIDLIGFGGSAKPQPDTEMAYTLETWGEQVADFCREVVGEPAFLVGNSIGCIVVMQAAVSNPEISLSVALLNCSLRLLHDRKRETLPWSRRFGAPMLQRVLSIKAIGQFFFRQIAQPKTVRKILLQAYVNSEAVTEELVDILTVPASDPGAAAVFLAFTSYSSGPLPEDLLPLLPCPALIVWGTDDPWEPVDLGRELANYPQVLKFIPLEGVGHCPQDEAPELVNPILQDWIWEKTRLLEAQEIEHNSQTIG

SEQ ID NO: 113118 - DNA, 909 bp, Anabaena variabilis ATCC 29413
  CDS (1)..(909): transl_table=11
atgacggtacactggcgggaacgggtagggaatcaacgagattgggtttggcgggggtggcggactcgttatacttacattcgtcctagccaagaaggccaggaaaaaacccctctaattttactgcacggttttggtgcttctattggtcattggcgacataatttggaggttttgggcgaatctcatacagtctatgcgctggatatgcttggttttggtggttcggaaaaagcccctgcaaattacagtattgaactttgggtggagcaagtttacgatttttggcgagcttttatccgtcaaccagtggtattgattggaaattctaatggttctttgatttctttagcggcggcggcggctcaccccgatatggttaaggggattgtgatgatgagtttaccagacccatcattagagcaagaaatgattccaccttttttaaggcctgtagtcacgacaatcaaaaatattgtcgcttctccaatatttttaaagccagtgttttatttcgtgcgccgtcccagcattctccgccgttgggctggtattgcttacgccaatcccgcagccatcaccgacgagctggtggatattttagctgggcctccccaggataggggttcagcccgtgcttttagtgctttgtttaaagcggcgatcggtgttaactttagtcctagtgtcaaagctatattgccaactctacaaattcccatgctgttgatttggggaaacaaagataggtttgttccgccgattttggctaaccaattcgctcaatacaacgaaaagttgcaattgctcaacctagacgatgtagggcattgtccccatgatgaatgcccagaacaggtaaacaaggcgattttggcatggatggataagtccttgggagattactaa

SEQ ID NO: 113119 - protein, 302 aa, Anabaena variabilis ATCC 29413
MTVHWRERVGNQRDWVWRGWRTRYTYIRPSQEGQEKTPLILLHGFGASIGHWRHNLEVLGESHTVYALDMLGFGGSEKAPANYSIELWVEQVYDFWRAFIRQPVVLIGNSNGSLISLAAAAAHPDMVKGIVMMSLPDPSLEQEMIPPFLRPVVTTIKNIVASPIFLKPVFYFVRRPSILRRWAGIAYANPAAITDELVDILAGPPQDRGSARAFSALFKAAIGVNFSPSVKAILPTLQIPMLLIWGNKDRFVPPILANQFAQYNEKLQLLNLDDVGHCPHDECPEQVNKAILAWMDKSLGDY

SEQ ID NO: 113120 - DNA, 939 bp, Anabaena variabilis ATCC 29413
  CDS (1)..(939): transl_table=11
atgcaggcaactacagtcccttctacaactccaattcctggacaatattggcagtggcgagggcataagatttactacgttcgtgcaggagaaaagcgcccacagcgtccaccattgttattggtacatggctttggtgcttctacagaccactggcgtaagaatattacaggactgtgtgatgattttgaagtatttgccatcgaccttttggggtttgggcgttccgctaaacctaaattacaatatggcggcgacttgtggcgtgaccaactccatgatttcatcagtgaagtcattggtcaaaaaacagtattagcaggtaattcccttggtggctatgcttgcttgtgtgttgctgctcaacgtccggagagtgcagctggtgtagttttactcaatagcgctgggccatttagcgaaactcaaaccacaccagagccagaggctttacaatcacaaattcagccgcccaaacaatcctcacctttacagaaaatatttggtgatagtgttaagtggatttttcaacaacctttagcccaatttttattatttcaatacgtgcgccaaggttgggtaattcggcaaactttagaaaaggtttatcttgataaaagtgcaattacaaaccaattagttgaagaaattgctcgtcctgcttacgatgttggtgcgctggatgtatttgtctcagtttttagcagtcctcaaggcgaaaaagttgatgtgctattaaagcaattaacttgtcctttattaatgttatggggtgaagctgatccttggataaatgctagagaacgttctcaaaagtttcgtctatattatccagaactcacagaatattttctcaaggctggtcattgccctcatgatgaagtacccaatcaagtaaacccacttttacaagaatgggttctgtcaattgctcgataa

SEQ ID NO: 113121 - protein, 312 aa, Anabaena variabilis ATCC 29413
MQATTVPSTTPIPGQYWQWRGHKIYYVRAGEKRPQRPPLLLVHGFGASTDHWRKNITGLCDDFEVFAIDLLGFGRSAKPKLQYGGDLWRDQLHDFISEVIGQKTVLAGNSLGGYACLCVAAQRPESAAGVVLLNSAGPFSETQTTPEPEALQSQIQPPKQSSPLQKIFGDSVKWIFQQPLAQFLLFQYVRQGWVIRQTLEKVYLDKSAITNQLVEEIARPAYDVGALDVFVSVFSSPQGEKVDVLLKQLTCPLLMLWGEADPWINARERSQKFRLYYPELTEYFLKAGHCPHDEVPNQVNPLLQEWVLSIAR

SEQ ID NO: 113122 - DNA, 903 bp, Synechococcus sp. CC9605
  CDS (1)..(903): transl_table=11
gtgagcccaagccacaacctctggagctggaacgagcgatccattggctggagcctgatgggcgaccccaatgccgaagtggccgtgctcctgattcatggcttcggggccaacaccaatcactggcgtttcaaccaaccggtgctggccgaactgctgcccacctacgccatcgatctgctcggtttcgggcgcagcgatcagcctcgggctcgcttgaaggatgagtccgtttcagcggatgccgttcattacggctttgatctgtggggccaacaggtggctgacttctgccgccaagtcatcgatcgcccggtgcgactggtgggcaactcgattggcggggtcgttgccctgcgagccgcacaactgctgggcgagcgctgccgtggcgtggtgctgatcgactgcgcccagcgcttgatggacgacaagcaactggccacacaaccagcctggatggcctggattcggccgctgttgaaaacaatggtgcggcagcgttggctcagcactgcgctgttccgcaatgcagcgcggcccggcgtgatccgcagcgtgttgaagcaggcctatcccagtggcgccaacatcgacgacgacctggtgaatctgttgttccaacccacccaacgcgaaggtgccgccgaagcctttcgcggattcatcaatcttttcgacgattacttggcaccacaactgatggaagagctcaagctccccgtcgatctgatctggggcgaacttgatccctgggagccaattgctgaagccgagcgctgggcccagacgctgaactgcgttcaatccctgtcagtggttcaaaacgcaggccactgtccccacgacgaagcaccggataaggtcaatccggtgctgcaaaggctgatcaacaagaattga

SEQ ID NO: 113123 - protein, 300 aa, Synechococcus sp. CC9605
MSPSHNLWSWNERSIGWSLMGDPNAEVAVLLIHGFGANTNHWRFNQPVLAELLPTYAIDLLGFGRSDQPRARLKDESVSADAVHYGFDLWGQQVADFCRQVIDRPVRLVGNSIGGVVALRAAQLLGERCRGVVLIDCAQRLMDDKQLATQPAWMAWIRPLLKTMVRQRWLSTALFRNAARPGVIRSVLKQAYPSGANIDDDLVNLLFQPTQREGAAEAFRGFINLFDDYLAPQLMEELKLPVDLIWGELDPWEPIAEAERWAQTLNCVQSLSVVQNAGHCPHDEAPDKVNPVLQRLINKN

SEQ ID NO: 113124 - DNA, 900 bp, Prochlorococcus marinus str. MIT 9312
  CDS (1)..(900): transl_table=11
atggaaaaatcagctctgttagatagtgatgttaattatgactggaatttcttaaattacccaatacatactgtttctgctaagcctgagcaaacatcaaaagaatatgcaattttactaattcatggttttggggcctctacggatcattggagattcaatatccctattttgagtaataaatacgaagttcatgcgatggatttacttggttttggaaaaagtcctaagcctcaagatgttgaatactcaggatctttatggaaagatcaggttgtcgcttatgtaaaagagaaaataaaaaaacctacaattattgttggaaattcattaggtggttatgcggcattagcagctggttcagaattaaatgaactaaacgcaggagtgatattacttaatgctgcaggatattttagtgaagaaaaaactatcaagaagaatatactgcaaacttcaattgaaacagttgcaggcatatttttaaaaaatgttgttcttcaacgtttgatttttgagaatatgagaaatccaaaaaatataaaaaaaactttgaatcaagtttatgttgataagaaaaatgttgatgattttttagttgagtcaataagaaagccttcgctagattacggcgcttttaatgtttttagaagtgtatttaacccctcgggtcctcagggattgccgttggataagttatttgcaaaacttgattcaccattattactcctttggggtggcaaagatccttggatgaatactccaaaaaaaagaaatctatataaaaagtttactccgaagtatacaaaagaaattattcttgatgctggacattgtcctcatgatgaaatacctgaattagtgaatcagcatattttggattgggttgattctctttaa

SEQ ID NO: 113125 - protein, 299 aa, Prochlorococcus marinus str. MIT 9312
MEKSALLDSDVNYDWNFLNYPIHTVSAKPEQTSKEYAILLIHGFGASTDHWRFNIPILSNKYEVHAMDLLGFGKSPKPQDVEYSGSLWKDQVVAYVKEKIKKPTIIVGNSLGGYAALAAGSELNELNAGVILLNAAGYFSEEKTIKKNILQTSIETVAGIFLKNVVLQRLIFENMRNPKNIKKTLNQVYVDKKNVDDFLVESIRKPSLDYGAFNVFRSVFNPSGPQGLPLDKLFAKLDSPLLLLWGGKDPWMNTPKKRNLYKKFTPKYTKEIILDAGHCPHDEIPELVNQHILDWVDSL

SEQ ID NO: 113126 - DNA, 915 bp, Prochlorococcus marinus str. MIT 9312
  CDS (1)..(915): transl_table=11
gtgtctttaaataaatctgaaacttggaagtggaaaaattgggaaatttcttggtctttatcaaaagaatctacttctgaaaaaaatattaaaattttattagttcatggatttggggcatcaaaaaaccactggagacataatcaagatttccttgggaaattttctaactgcttcgcaattgacttactaggattcggagaaagcagtcagcctagtgctttattaaattacgaaccttataaagagaattcaattaaatattcatttgatttatggagtgatcaaatatcgaccttttgttcagaagtaataaaatctcctgtttacttggtagggaactcaattggtggtgttattgcattgaaagctgctgaaattctcaaagataattgtaaaggtgtcattttaattgattgtgcgcaaagaactatggatgataaacgcttgaaaaaaagtgatgttttaatgaatttacttaggcccgtattaaaaacattagtaagacaaagaataattagtaatacactttttatgagagctgctaatccaaaagttataaaacaaatcctaagaaaagcttacccctcaggaaaaaatatcgatgaagaattaattgaaattctatatcaaccctctaaaaggaaaaactctaaagaagcatttcgtggctttattaacttatttgatgactatcttgctccagacctgttcgataaggttgatactccaatccaattgatttggggagaaaaagatccttgggaatccttaaatgaagcaaaagagtgggagaaaaaattcaggaatatcaaaagattagatattattaaagatgctggtcattgtccccatgatgaaaaacctgaagaaaccaataagttaatatgtgaatttcttcaggaaacaaaatag

SEQ ID NO: 113127 - protein, 304 aa, Prochlorococcus marinus str. MIT 9312
MSLNKSETWKWKNWEISWSLSKESTSEKNIKILLVHGFGASKNHWRHNQDFLGKFSNCFAIDLLGFGESSQPSALLNYEPYKENSIKYSFDLWSDQISTFCSEVIKSPVYLVGNSIGGVIALKAAEILKDNCKGVILIDCAQRTMDDKRLKKSDVLMNLLRPVLKTLVRQRIISNTLFMRAANPKVIKQILRKAYPSGKNIDEELIEILYQPSKRKNSKEAFRGFINLFDDYLAPDLFDKVDTPIQLIWGEKDPWESLNEAKEWEKKFRNIKRLDIIKDAGHCPHDEKPEETNKLICEFLQETK

SEQ ID NO: 113128 - DNA, 993 bp, Synechococcus elongatus PCC 7942
  CDS (1)..(993): transl_table=11
atgaatcgtgaaggcttactgagtaccgaggaccagcaaccggcagttgcaggaacgcgacactataatgcggcattccccttggagatggtagtcgtggttctggcagcacacgatccaatcgatcgcttctgggattggcaagggcagtccattcgctattggcagcttggcgatcgcggagccccagtcttgctcgttcatggcttcggagcctgttgcgaacattggcgccagaatgtcgaggcgatcgcgcagcactctacggtctatgtaattgacctgttggggtttgggcaatcagccaaaccagacccgatcgcggtgaactatggcattgagctgtgggcacagcagattgaagcgtttcggcaagcagtgattgggcagccgactcgtttgatcgccaactcgatcggctgtgtggttgccttgcaagcggccgttgaccagccagaggggtatgcggccctgctgttgattgactgtgccctgcggcagattgacgacaagaaattggctcagcagcccttgggtcgtcgcctcggtcggcccttactcaaggctgcagtacggcagcgcggtctttccaattggctctatcgccagctcgccaaaccctcgatcattgagcgcatccttaaactggcctaccccagcagtgaacgcattgatccagcgctggtggaagccctctatgcggcgacccaatcacctggcgcagcgggcgtgttttgggctttcatcaatttgtttgatgcgcccttagctgagcagttgctgccccaagtgcaagcaccagtgacgttcttctggggcgatcgcgatccttgggagccgatcgcgcttggacgtcagctcgcagattttcctagtgtgaaagccttcgtgccgctggcaggtttggggcattgtccccacgatgaagcacccaagcaggtcaatccccagatcgtggcgtggttgcaggagggagtagctgcagcaggctaa

SEQ ID NO: 113129 - protein, 330 aa, Synechococcus elongatus PCC 7942
MNREGLLSTEDQQPAVAGTRHYNAAFPLEMVVVVLAAHDPIDRFWDWQGQSIRYWQLGDRGAPVLLVHGFGACCEHWRQNVEAIAQHSTVYVIDLLGFGQSAKPDPIAVNYGIELWAQQIEAFRQAVIGQPTRLIANSIGCVVALQAAVDQPEGYAALLLIDCALRQIDDKKLAQQPLGRRLGRPLLKAAVRQRGLSNWLYRQLAKPSIIERILKLAYPSSERIDPALVEALYAATQSPGAAGVFWAFINLFDAPLAEQLLPQVQAPVTFFWGDRDPWEPIALGRQLADFPSVKAFVPLAGLGHCPHDEAPKQVNPQIVAWLQEGVAAAG

SEQ ID NO: 113130 - DNA, 882 bp, Synechococcus elongatus PCC 7942
  CDS (1)..(882): transl_table=11
atggcagtctggcagtggcgaggacaggcgattcgctatcagcaatttggcagcgcaggagcgccagttctgctgattcatggctttggtgccagcagtgaccattggcggcagaacagtccggttttggcggagcaacagcgggtctttgcaattgacctactcggttttggaggttccgccaagccccagcccagtcaggacttgccctatcggtttgaaacttggtcggcccaggttcgcgactttatccgcgaggtaattggggaaccagccgatttggtaggcaattcgatcggctgtgtggtggcgctgcaagccgctgtcgatgaacctgcgctcgtgcgatcgctcgcgctcttggattgctccctgcgtctcctacacgagcgttatctggcgcagtccgcctggccgcgccgttttggggtgccaattttccagcaactcctcgcttggaagccgttcggaggcttcttcttccaacgcttggctcaaccgcgatcgctgcgtcggattttgcagcaggcctacgccgacaaaaccgccgtcactgatgagttgattgagctgttactcgctcccgcccgtgatccgggtgcggtggatgttttcctagcgtttgtcacctattcccaagggccgctaccgcaggatttgctgccgttggtcacttgcccaacgttgattctctggggagaagcggacccgtgggagccgatcgcccaaggacgggagctggcaaactatcctgccgtgcgtgaatttattgcgctaccgggcgttgggcattgcccgatggatgaagcccccgatcaggtcaatccgatcctgcaacgctggttgcaaaccgcagccaacccggcccctgcaattccctaa

SEQ ID NO: 113131 - protein, 293 aa, Synechococcus elongatus PCC 7942
MAVWQWRGQAIRYQQFGSAGAPVLLIHGFGASSDHWRQNSPVLAEQQRVFAIDLLGFGGSAKPQPSQDLPYRFETWSAQVRDFIREVIGEPADLVGNSIGCVVALQAAVDEPALVRSLALLDCSLRLLHERYLAQSAWPRRFGVPIFQQLLAWKPFGGFFFQRLAQPRSLRRILQQAYADKTAVTDELIELLLAPARDPGAVDVFLAFVTYSQGPLPQDLLPLVTCPTLILWGEADPWEPIAQGRELANYPAVREFIALPGVGHCPMDEAPDQVNPILQRWLQTAANPAPAIP

SEQ ID NO: 113132 - DNA, 957 bp, Synechococcus elongatus PCC 7942
  CDS (1)..(957): transl_table=11
atggaggcattgcgatcgcagggcagggagagtgcgtcagaatgcgaaagcacctttcgagaccaagactgcatgactgtcgccatggctgccgcgatcgcccaggattggcaatggcaagggcacaagattcgctggacggtggcgggcgaaggtcaaccgctgatcctgctccatggttttggagccaatctcggccactggcgcaaaaatattcctgcgatcgctgcggggggctaccgagtctacgccttggatctactcggttttggcgcgtccgataaacctgatcgcgactacagcctcgacctctgggcagaattggtcaacgacttttggacgacgcacatccagcagccggcttgggtggtcggcaattcgattggcgccctgctgagcctgatgttgttggtggatcagcccgatcgctggcggggcggcgtcttgctcaactgtgctggtggtctcaaccatcgccccgaggaaatgatctggcccttgggttgggtgatgagcagttttgccaaagtcgtcaatacgcccaagattggcccatttttgttcaatcaagtccgccagcgctttcgcatccggcagacgctgcggcaggtttacggcaatcgcaacgcagtgaccgaggagctggttgacttgctctacggcccctcctgcgatcccggagcttacgaagtctttgccgcaattttgcgatcgcccgctggcccctcgcctcaagagctgttgccacaactacagcggccgttgttggtgatttggggtgaggcagatccttggacgcccgtctctgcgagcaaaattttccagacggcggacagcgaggcggtgattgagtacctaacgttgccggcgacggggcattgcccccacgatgagcgaccggagttggtcaatccgctgattttgaattggctggatcgccaagcgatcgcggcttaa

SEQ ID NO: 113133 - protein, 318 aa, Synechococcus elongatus PCC 7942
MEALRSQGRESASECESTFRDQDCMTVAMAAAIAQDWQWQGHKIRWTVAGEGQPLILLHGFGANLGHWRKNIPAIAAGGYRVYALDLLGFGASDKPDRDYSLDLWAELVNDFWTTHIQQPAWVVGNSIGALLSLMLLVDQPDRWRGGVLLNCAGGLNHRPEEMIWPLGWVMSSFAKVVNTPKIGPFLFNQVRQRFRIRQTLRQVYGNRNAVTEELVDLLYGPSCDPGAYEVFAAILRSPAGPSPQELLPQLQRPLLVIWGEADPWTPVSASKIFQTADSEAVIEYLTLPATGHCPHDERPELVNPLILNWLDRQAIAA

SEQ ID NO: 113134 - DNA, 921 bp, Synechococcus elongatus PCC 7942
  CDS (1)..(921): transl_table=11
atgagtttgcgatcgctgacggtggcgactagccaagactggatctggcggggcttacgggttcgctatgctttccggcgatcgccccagccaacgggcgcggtacccgtgattttcctgcacggctttggagcgggttggcggcactggcgtgacaacattccagcgctggcagaggagcgcgacgtctacgcgatcgatctggtcggctttggggactccgaaaagggctatttgcactacggccctgctttctggtcggagctggtgcgggatttttgccagcagtttgtgggcagcgccgctgttttaatcggcaattctctcggttccgtagtggcgatggtgacggcgcatcgctttcccgagcaagttcatggcttaattctgctgaatctgccagataccagcctgctgcgatcgcctgctgctcacgatcgcttcaagagcctccggcaagcactgctctgggcactgaccccaccctggctgatcgagcctttgctgctctggttgcgatcgcccaaacgactcaaaccttggttggcgttggcctacagcgatcgcgatcgcattgatgcagatttactcgatctgattgcccgtccagcgcgatcggaggaggcaggcccagccttgcgggcgatgactcgcttcaatgcagaagttccccgcgactggcgggccgatcgcgtcttgccgcagttgagtcagccgattttgttgatctggggggagagcgatcgcctcgtgcccttcagtttggcgaagcgttgtcagcagctcaatccccaactggattggttgccaatgcctgccacaggccattgtccccacgacgatcgaccggctttcgtcaatcaaagcctcaacaattggttatcgcagcacgacccagccgacgttaagatcaaggcttag

SEQ ID NO: 113135 - protein, 306 aa, Synechococcus elongatus PCC 7942
MSLRSLTVATSQDWIWRGLRVRYAFRRSPQPTGAVPVIFLHGFGAGWRHWRDNIPALAEERDVYAIDLVGFGDSEKGYLHYGPAFWSELVRDFCQQFVGSAAVLIGNSLGSVVAMVTAHRFPEQVHGLILLNLPDTSLLRSPAAHDRFKSLRQALLWALTPPWLIEPLLLWLRSPKRLKPWLALAYSDRDRIDADLLDLIARPARSEEAGPALRAMTRFNAEVPRDWRADRVLPQLSQPILLIWGESDRLVPFSLAKRCQQLNPQLDWLPMPATGHCPHDDRPAFVNQSLNNWLSQHDPADVKIKA

SEQ ID NO: 113136 - DNA, 900 bp, Synechococcus elongatus PCC 7942
  CDS (1)..(900): transl_table=11
atgccgatcgcagcagtacccggtcaggtttggacttggcagggtcaccagatctattacgtgcaagctggggagacagcaggcgatcgcccgcctttattgttggtgcatggctttggtgcctcaaccgaccactggtggaaaaatattgcagacctacaggcagacttccaagtctgggccattgacctgctgggctttggtcgctccgccaaaccggcgattgactacagcggtcaactctggcaacagcagctcacggattttattcaaaccgtcatcggtcagcctgcgatcgtggcgggtaactctctgggaggatacgctgccctctgtgcggctgccgctgcttcagattgggtcaagggggttgtgttgctgaatagtgctggccccttcacgcccgatgcgccgccccccgagccctcgcccttgcaaaaattctggcgatcgctgctgcgtggcctcacccgccagccctgggccgtttggttagtcttcaagaatttgcagcgcccccaaacgattcgccgcaccctcgaaaaggtctactgcgatcgcagtgccgtcaccgatgatctcgttgaagcgattcgccgtccttccctcgatccgggcgcctttgaggtgtttcgctcggtcttccgaacgccccaaggtgaacccgttgatcagctcctagcacgactcacctgtccgttgctcttgatctgggggagcggcgatccctggatgaattgccagcagcgcagtcagcagttccagcgctatgctcgcaacctgacagagcattttctcgaagcgggccattgcccccacgatgaagtacctgaccaagtcgatcgcttgattcgggagtgggtagagcaggcgatcacgccgcagtcactgtgctgttag

SEQ ID NO: 113137 - protein, 299 aa, Synechococcus elongatus PCC 7942
MPIAAVPGQVWTWQGHQIYYVQAGETAGDRPPLLLVHGFGASTDHWWKNIADLQADFQVWAIDLLGFGRSAKPAIDYSGQLWQQQLTDFIQTVIGQPAIVAGNSLGGYAALCAAAAASDWVKGVVLLNSAGPFTPDAPPPEPSPLQKFWRSLLRGLTRQPWAVWLVFKNLQRPQTIRRTLEKVYCDRSAVTDDLVEAIRRPSLDPGAFEVFRSVFRTPQGEPVDQLLARLTCPLLLIWGSGDPWMNCQQRSQQFQRYARNLTEHFLEAGHCPHDEVPDQVDRLIREWVEQAITPQSLCC

SEQ ID NO: 113138 - DNA, 825 bp, Trichodesmium erythraeum IMS101
  CDS (1)..(825): transl_table=11
atggaaggccagaatctacaaaaccctcctatactgcttttacatggttttggtgcatcaataggccattggcgacacaacataaatgtattaagtcaaaaacatacagtctatgcactagatttattgggctttggtgcttcggaaaaggcgatcgccaactacaatagtaacttttgggtagagcaaatatatgatttttggcaggcttttattcaagtaccagtaatattagtaggtaactctattggttcattaatatccctagttgttactgctacacataaagatatggttgcaggactagtaatgattagtttaccagacccaactgctcaagcagaagtaattccaagttggtgtttacctactgttgagttgattcaaaatattgttgcttccccactattgttaaggggtttgttttttatccttcgcagaagctcaataattcgtcgctgggttaaacttgcctatagtaatcccgatctagttacagaagaactagtggatatattggcaggaccgccgagggatcagggtgctgctcgtgctttttgtattttatttaaaattatgggtagcactaagttcggtcctagtgtcaaagctatacttcctactctggaacttcctatgttgttaatttggggcaagcaagatttattcattcctgccaagtttgctaatcctagtcagtttagtaaacttaattcccgtttagagtttatagaattagataacgctggtcattgtgcccacgatgaatgtcccgaaatagttaatcgtctaattcttgattggattgttaaacaaaaatactga

SEQ ID NO: 113139 - protein, 274 aa, Trichodesmium erythraeum IMS101
MEGQNLQNPPILLLHGFGASIGHWRHNINVLSQKHTVYALDLLGFGASEKAIANYNSNFWVEQIYDFWQAFIQVPVILVGNSIGSLISLVVTATHKDMVAGLVMISLPDPTAQAEVIPSWCLPTVELIQNIVASPLLLRGLFFILRRSSIIRRWVKLAYSNPDLVTEELVDILAGPPRDQGAARAFCILFKIMGSTKFGPSVKAILPTLELPMLLIWGKQDLFIPAKFANPSQFSKLNSRLEFIELDNAGHCAHDECPEIVNRLILDWIVKQKY

SEQ ID NO: 113140 - DNA, 906 bp, Trichodesmium erythraeum IMS101
  CDS (1)..(906): transl_table=11
atgttgactaaatctataactactacaatttcagttcctggaagttattggctatggaagaatcagcaaatctactacttatgtgcaggtaagtctaaccctacccatccacccttactattaatacatggctttggaggctctacagaccattggcgcaaaaatattgcagctctcagcgagttttttcaagtttgggctattgacttattaggatttggacgttcaggtaaaccaaactggcaatatagtggtaagctatggcaacaacagatcaatgactttattacccaagttataggtagatcagtagtcttagtaggaaattctcttggaggttatgtagcattgtgcgtagcagctgaatatccaacttctacagcaggtttgatacttcttaacagtgctggaccatttagcgaatctcaacctactcctaagcccccaatatttagacaatttatttctcggatcacaaagtggttatttctgcaaaccctacctagttttttattatttcaatggacccgacgacgtagcactattagaaaaatattacaaaaagtttatttggatcaaagtgctattacagaccaattaatagaagatatatatcgaccttcttgtgaccccggtgcagctcaagtctttgcttctatttttaaggcaccatctggtaagaaagtagatgagttgttgggtgacttagagtctcctctacttatgctttcgggagaagctgacccttggatcaatacaagaagccggagtgtccaatttcgtaaatattatcctcagttaacagaatacttcttaaaagcaggtcattgtccccatgacgaagctcctgatcttgttaataagttaattcaggaatgggttttctcaacagttaaaaggttctag

SEQ ID NO: 113141 - protein, 301 aa, Trichodesmium erythraeum IMS101
MLTKSITTTISVPGSYWLWKNQQIYYLCAGKSNPTHPPLLLIHGFGGSTDHWRKNIAALSEFFQVWAIDLLGFGRSGKPNWQYSGKLWQQQINDFITQVIGRSVVLVGNSLGGYVALCVAAEYPTSTAGLILLNSAGPFSESQPTPKPPIFRQFISRITKWLFLQTLPSFLLFQWTRRRSTIRKILQKVYLDQSAITDQLIEDIYRPSCDPGAAQVFASIFKAPSGKKVDELLGDLESPLLMLSGEADPWINTRSRSVQFRKYYPQLTEYFLKAGHCPHDEAPDLVNKLIQEWVFSTVKRF

SEQ ID NO: 113142 - DNA, 903 bp, Trichodesmium erythraeum IMS101
  CDS (1)..(903): transl_table=11
atgaacgtaattacatcaaacccaactttagataaccagctaaggcagtataactggagttggaaaaaccataatatccaatataccatgatgggaactggacaacctttactattaacccatggttttggtgcatccataaatcactggcgtaataatatccctctcctcgctaaatctggttaccaagtatttgccctggacttactaggatttggagcatcttctaagccttccatagattattcaatggaactctgggaagaactaatatacgacttctggagcgcacatattcgccaacctactgtctttgtaggcaattcaataggtgcattactcagtctaatgatactagcgagttacccagaaattgccacaggaggaattctcattaattgtgcaggaggtttaaaccatcgaccccaagaattaaatctgcccctaagattcatcatggggatgtttaccaaattagtaagctccccagttttaggaccatttatttttaaccaagtccgtcaaaaacatcgcatccgtaatactctcaaacaagtctatataaataaagaagctgtcacagaagaattagtagaaataattcatcgtccctcttgcgatgctggagcccaaaaagtttttgcttcaattctcaccgcaccggctggacctcatccctcagaattgttaccaaaaattaaagctccattgttagtgatctggggagaaaaagacccttggacaccaatatctggtgcccaaatttatcaagacttagcagacaaaagtggagttattcaatttgaacccataccaaacacaggtcattgtgcccatgatgaaaggcctacaatagttaactctttgattttagattggttagctaaaatgattaatatgtaa

SEQ ID NO: 113143 - protein, 300 aa, Trichodesmium erythraeum IMS101
MNVITSNPTLDNQLRQYNWSWKNHNIQYTMMGTGQPLLLTHGFGASINHWRNNIPLLAKSGYQVFALDLLGFGASSKPSIDYSMELWEELIYDFWSAHIRQPTVFVGNSIGALLSLMILASYPEIATGGILINCAGGLNHRPQELNLPLRFIMGMFTKLVSSPVLGPFIFNQVRQKHRIRNTLKQVYINKEAVTEELVEIIHRPSCDAGAQKVFASILTAPAGPHPSELLPKIKAPLLVIWGEKDPWTPISGAQIYQDLADKSGVIQFEPIPNTGHCAHDERPTIVNSLILDWLAKMINM

SEQ ID NO: 113144 - DNA, 882 bp, Trichodesmium erythraeum IMS101
  CDS (1)..(882): transl_table=11
atgatgactacaaaaagttggacatggcgaagctggccgatatgctaccaaagccaaggagaagagggacctcctgtgatattaatacatggttttggagcttctttggggcattggcgcaaaaatattcctgtattagctgcaagctgtcgctgttatgctattgacttacttggttttggtggttcagctaaacctaccccaaatcaagatgttacctacacatttgaaacctggagtcaacaaattagtgatttttgtagagaaatagttggggcccctgcttttcttgtcggaaattctattggttgtattgtggcaatgcaaacagcagttgatcatcccaatattgttttaggggtaggaattatcaattgttctttgaggcttctacacgaaaggaaacgatctaatcttccttggtatcgtagtcaaggagcatctttactacaaaacctattaaaagtcaagtggataagtcagttattttttaaccagttggcgacaaagaaaactgttaaacgagtattattacaggcatataaacgttctgaagcggttactgacgaattaattgatttattattaaaacctgcaaaagatgagggagcagttgacatttttgttgcttttaccggttattctcaaggacctttaccggaagatttattacccatattaccctgttcagccataattttatggggggaagaagacccttgggaaaatattgaattgggaaaagaatttgccaattttaaaaatgtagaaaaatttattcctttgcctggagttggccattgtcctcaagacgaagcaccagagttagtcaaccctattttacaagaatggatattagaaaagtgggagtctaaagtttag

SEQ ID NO: 113145 - protein, 293 aa, Trichodesmium erythraeum IMS101
MMTTKSWTWRSWPICYQSQGEEGPPVILIHGFGASLGHWRKNIPVLAASCRCYAIDLLGFGGSAKPTPNQDVTYTFETWSQQISDFCREIVGAPAFLVGNSIGCIVAMQTAVDHPNIVLGVGIINCSLRLLHERKRSNLPWYRSQGASLLQNLLKVKWISQLFFNQLATKKTVKRVLLQAYKRSEAVTDELIDLLLKPAKDEGAVDIFVAFTGYSQGPLPEDLLPILPCSAIILWGEEDPWENIELGKEFANFKNVEKFIPLPGVGHCPQDEAPELVNPILQEWILEKWESKV

SEQ ID NO: 113146 - DNA, 897 bp, Synechococcus sp. CC9311
  CDS (1)..(897): transl_table=11
atgctttggacctggaagtctcatcaaattggctggtcattggtgggagatcgaacggcaccaacagccgtgctcctgatccatggctttggagccaatacaaatcattggcgcttcaaccaaccagtcctcggcaagcaagttcccacctatgccatcgatctactgggtttcggcaggagtgatcagccacaggcacggctgaacgatgaacccgctactgcaaaaacagttcaatactgttttgatctatgggcccaacaggtcgcagatttttgtcacaacgtgatcgatcgccccgtggttctcgttggcaattcaatcggtggtgttgtagcgctaagagctgctcaacttcttggagaggaacactgcaaagaagtggtgttaatcgactgcgctcagcgactgatggatgacaaacagttagcgacacaaccggtctggatggcctggattcgccccctccttaaaactctggtgagtcagcgctggctgagtacaacccttttccgaaacgcggcccgcccagctctcatccgtagcgtgctcaaacaggcctatccgagtggtagcaatgtggatgatgagttggtgtctcttctactgagacccagccaacggcatggagcttcagaagccttccgcgggtttatcaacttattcaatgatcacttagcaccggacttactcaaaaatctgtcgattccggtccatatgatttggggcgaagctgacccatgggaaccagttaaagaagccaaagaatggaaggaaaaatatgaatgtattcaatcacttttggtgattccccatgcaggacattgcccccatgacgaatcgccaaaaccagtgaacaaacaattgctgctaatagtcaatcagcaggcaacgtag

SEQ ID NO: 113147 - protein, 298 aa, Synechococcus sp. CC9311
MLWTWKSHQIGWSLVGDRTAPTAVLLIHGFGANTNHWRFNQPVLGKQVPTYAIDLLGFGRSDQPQARLNDEPATAKTVQYCFDLWAQQVADFCHNVIDRPVVLVGNSIGGVVALRAAQLLGEEHCKEVVLIDCAQRLMDDKQLATQPVWMAWIRPLLKTLVSQRWLSTTLFRNAARPALIRSVLKQAYPSGSNVDDELVSLLLRPSQRHGASEAFRGFINLFNDHLAPDLLKNLSIPVHMIWGEADPWEPVKEAKEWKEKYECIQSLLVIPHAGHCPHDESPKPVNKQLLLIVNQQAT

SEQ ID NO: 113148 - DNA, 939 bp, Nostoc punctiforme PCC 73102
  CDS (1)..(939): transl_table=11
atgcaggcaactacagccccctctacaaccccaattcctggtaaatattggcagtggcgcgggcacaacgtttactatgtgcgtgcgggagagaagcaagcgcaacgtccgccgttgcttttggtacatggatttggtgcttccacagaccactggcgcaagaatatcaccggattgtgtcaagattttgaagtatttgcgatcgatcttttaggatttgggcgatcggcaaaaccaaaattgcagtacagtggcgacttgtggcgcaaccaactccatgattttatcagtgaagtaattggtcaaaaagcagtattagcgggtaattcccttggtggctacgctggcttgtgtgttgcagcacagcgtcctgacagtgctgctggtttagttttgctcaatagcgccgggccttttagcgaaaggcagcctacatctgagcctgaagctttacaatcagaaattcaggttcccaaacaatcggctaatttgcaaaaacttcttggtgacggcactaagtggatttttcaacaacctttagcgcagtttttgttatttcagtacgtgcgacaacgttgggtaattcgccaaactctagaaaaagtttatcttgacaagagtgccattacagaccaattaatagaagaaatttctcgccctgcttacgatcctggtgcgttggatgtctttgtttcagtctttagcactcctcaaggggaaaaagttgatgtgctactaaagcaattaacttgtcctctattaatgttgtggggagaagctgacccttggatgaatgctagagaacgttctcaaaaatttcgtcaatattatcctgaactcagggaacactttttaacagccggtcattgtccccatgatgaagtaccggatagagtaaatcaacttttaggcgattgggttttatctatcaacaattaa

SEQ ID NO: 113149 - protein, 312 aa, Nostoc punctiforme PCC 73102
MQATTAPSTTPIPGKYWQWRGHNVYYVRAGEKQAQRPPLLLVHGFGASTDHWRKNITGLCQDFEVFAIDLLGFGRSAKPKLQYSGDLWRNQLHDFISEVIGQKAVLAGNSLGGYAGLCVAAQRPDSAAGLVLLNSAGPFSERQPTSEPEALQSEIQVPKQSANLQKLLGDGTKWIFQQPLAQFLLFQYVRQRWVIRQTLEKVYLDKSAITDQLIEEISRPAYDPGALDVFVSVFSTPQGEKVDVLLKQLTCPLLMLWGEADPWMNARERSQKFRQYYPELREHFLTAGHCPHDEVPDRVNQLLGDWVLSINN

SEQ ID NO: 113150 - DNA, 903 bp, Nostoc punctiforme PCC 73102
  CDS (1)..(903): transl_table=11
atgacaacctcaagttcaaaaacagcatttacctctacagaaacctggatttggcaagatttccctatctgctatcaaacccaaggaaccactggacctgctgttgtcctcgtgcatggatttggcgcttcttggtggcattggcggaaaaatattcccgtgttagcacaaaattgccgagtttatgctattgatttgattggttttggcggttccgcaaaacctaaacctggtgaaaaaattacctacactctagaaacatggggacaacaaatagcagatttttgccgtgaagttgtcggcgaacctgcttttttagttggaaattctattggctgtattgtagctatgcaagcagctgttagcaacccagatattgccttgggagttgcattgctcaactgttctttacggctgttgcacgatcgcaaacgggtaactttaccttggactcgtcgtgtcggagcgcccttactgcaacgcttgctttctatcaaaccagttggtgatttctttttcaatcaacttgccaaaccgaaaacagtacggaagattttactaaaagcttatgcgaatcctgagatggtaacagatgagttggtggatattctcacttcaccagcaagcgatccgggggctgtagctgttttccttgccttcacttcttattctacagggcctctaccagaagaccttttaccgctgctaccttgtccggcaattatcttgtggggaacggccgatccctgggaaccaattaagttaggtagagaattggctaatttcccacaggtacaaaagtttattcctttagaaggagttgggcattgtccccaagatgaagcaccagagttagtcaatccgattttacttgattggatttgggagcgatcggcagtgtga

SEQ ID NO: 113151 - protein, 300 aa, Nostoc punctiforme PCC 73102
MTTSSSKTAFTSTETWIWQDFPICYQTQGTTGPAVVLVHGFGASWWHWRKNIPVLAQNCRVYAIDLIGFGGSAKPKPGEKITYTLETWGQQIADFCREVVGEPAFLVGNSIGCIVAMQAAVSNPDIALGVALLNCSLRLLHDRKRVTLPWTRRVGAPLLQRLLSIKPVGDFFFNQLAKPKTVRKILLKAYANPEMVTDELVDILTSPASDPGAVAVFLAFTSYSTGPLPEDLLPLLPCPAIILWGTADPWEPIKLGRELANFPQVQKFIPLEGVGHCPQDEAPELVNPILLDWIWERSAV

SEQ ID NO: 113152 - DNA, 894 bp, Nostoc punctiforme PCC 73102
  CDS (1)..(894): transl_table=11
atgactgtaactacacagcagcttgcaacccaagacgcttttgaaaaattcttttggacttggcagggttacaaaattcagtacactgtcatgggtactggacgacctctggtactggttcacggcttcggtgcttccattggacactggcgtaaaaatatcccagttttagctgatgctggctaccaggtatatgccatagaccttttaggctttggtggttccgataaagcgcttattgattacagtgtggaagtttggatggaactgctgaaagatttctgtacagcacatatacacgaacctgctgtatttattggcaactccatcggcgcacttttgagcttgattgtactggtagaacatccagaaattgctgctggtggtattttgattaactctgcgggtggtttaagtcatcgtccccacgaattgaacccgccgctacggatggtgatggcagcttttaatcggtttgtgcgatcgccaattacaggtaaatttgtctataaccgcatccggcaaaaagcccagattcggcgcactctctaccaagtttaccgcgatcgtcaagccgtcaccgatgaattagttgatttactttatacaccctcttgtgacccaggagcgcaacaagtcttcgcctccattctcacagcccctcctggtccaagtccagaggaacttttgcccaaagtagaacgtcctctattagtaatttggggtgctgatgatccctggacaccaattaccggggcaaagatttacgaagaggcgcgtgagaatggcaaagaaatcaaaatagtccccattccgaatgccggtcattgtccgcacgatgaagttccagatgttgtcaatgctcagattatcgattggctaacgcaaaattag

SEQ ID NO: 113153 - protein, 297 aa, Nostoc punctiforme PCC 73102
MTVTTQQLATQDAFEKFFWTWQGYKIQYTVMGTGRPLVLVHGFGASIGHWRKNIPVLADAGYQVYAIDLLGFGGSDKALIDYSVEVWMELLKDFCTAHIHEPAVFIGNSIGALLSLIVLVEHPEIAAGGILINSAGGLSHRPHELNPPLRMVMAAFNRFVRSPITGKFVYNRIRQKAQIRRTLYQVYRDRQAVTDELVDLLYTPSCDPGAQQVFASILTAPPGPSPEELLPKVERPLLVIWGADDPWTPITGAKIYEEARENGKEIKIVPIPNAGHCPHDEVPDVVNAQIIDWLTQN

SEQ ID NO: 113154 - DNA, 918 bp, Crocosphaera watsonii WH 8501
  CDS (1)..(918): transl_table=11
gtgagtcagcaacaagcttgggagaggcgcatcggaaggcaacgacaatggatttggcgtggttggccaattcgttacacttttgtaccgggagaaataccgcaagatgccgagacaaaaccccctttaatcttaatacatggttttggggctggggttgagcattggcgacacaatatccccaccctacggcaatactatcgagtttatgctttagatttattagggtttggtcgatcgcataaagcggcaacggattacactgcttatttatgggctgagcaaatttattatttttggcgatcttttatcggaaaacctgttgttttggtgggtaattccattggttctttggtatgtttaaccgccgcgtttaaatatcctgaaatggtaagcggtttagtgatgttgagtttacctgacgtttctttgagacaggaagcaattcccaagggattacgacctattgttaatactattgaaggcttatttagcccccctttattattaagaacattattcaatattattcgtcgtcctggggtgattcgtccttgggttggggttgcttaccatgataaatcagctattaatgatgagttattagatatgattactattcctccccaagaacggggggctgcgagaaccttttgtctcttatttgaggggctaaaaaaacctcattattccccttctgtcaaggttattttaccaaagttaactatttccattttattagtttggggtcgtcaagataaaatgattcctgttagtttagcatcggtattttctaagttaaacgagcagataactttaaaagaattagataatgctggtcattgtcttcacgatgaatgtccggatcgctttaatcctattttattagattggttaaaaacagttaacagtgaatag

SEQ ID NO: 113155 - protein, 305 aa, Crocosphaera watsonii WH 8501
MSQQQAWERRIGRQRQWIWRGWPIRYTFVPGEIPQDAETKPPLILIHGFGAGVEHWRHNIPTLRQYYRVYALDLLGFGRSHKAATDYTAYLWAEQIYYFWRSFIGKPVVLVGNSIGSLVCLTAAFKYPEMVSGLVMLSLPDVSLRQEAIPKGLRPIVNTIEGLFSPPLLLRTLFNIIRRPGVIRPWVGVAYHDKSAINDELLDMITIPPQERGAARTFCLLFEGLKKPHYSPSVKVILPKLTISILLVWGRQDKMIPVSLASVFSKLNEQITLKELDNAGHCLHDECPDRFNPILLDWLKTVNSE

SEQ ID NO: 113156 - DNA, 897 bp, Crocosphaera watsonii WH 8501
  CDS (1)..(897): transl_table=11
atgatcactacagaatcctcatcaagcaaacccctagaaacctactattggtattggcaaggtcatcgcatcaagtataccgtcaaaggacaaggaaaacccttactattgattcatggttttggtgcatccctcggtcattggcgcaaaaatatttctcatttagcccaagaaaattatcgcgtttatgccctagacttattgggttttgggggttccgataaacctccattagactataccatagaattatggcgggatctaattaaagatttctggcaagaccatatcaatgaaccaacagtttttgtaggcaactccatcggtggtttattagtattaatgattttggctgattatccccagattagtcaagggggtgtcttaattaactgtgccggtggcttgaaccatcgtcccgatgagttgaatcttcccctcagatttattatgggaagctttacgaaattagtcaattcatccctgacgggaaactttatttttaaccgtattcgtcaaaaacaccgcattcgtcgcacccttcaccaagtttatagcgatcgcaacgcagtcactgatgaattagtcgacattctctatgaaccctcttgtgatcctggggcgcaaaaagtgtttgcttcggtattaactgctcctcctgggccccatcctaacagtttattaccccacatcaaccaacctcttttggttttatggggaagtgatgatccttggactcctattgctgggtcaaaaatttaccaggaacgggcagaaaatggacagaataccatttttcatcccatcgaaaacgctggccattgtccccacgacgaaagaccacaacaagtcaatgaattaattttaaactggctaaactctcttctttttcaataa

SEQ ID NO: 113157 - protein, 298 aa, Crocosphaera watsonii WH 8501
MITTESSSSKPLETYYWYWQGHRIKYTVKGQGKPLLLIHGFGASLGHWRKNISHLAQENYRVYALDLLGFGGSDKPPLDYTIELWRDLIKDFWQDHINEPTVFVGNSIGGLLVLMILADYPQISQGGVLINCAGGLNHRPDELNLPLRFIMGSFTKLVNSSLTGNFIFNRIRQKHRIRRTLHQVYSDRNAVTDELVDILYEPSCDPGAQKVFASVLTAPPGPHPNSLLPHINQPLLVLWGSDDPWTPIAGSKIYQERAENGQNTIFHPIENAGHCPHDERPQQVNELILNWLNSLLFQ

SEQ ID NO: 113158 - DNA, 906 bp, Crocosphaera watsonii WH 8501
  CDS (1)..(906): transl_table=11
atggtgcagtcttctatcacaaaccccactactccgaacaatgagaaaacctggtattggcgaggttatcccattacctataatcattgtggagacacaggtcctgctgttttattggtgcatggttttggcgcatcttggaggcattggcggaaaaatctccccgttttaggcaactcctgtcaatgttatgccctggacttaatcgggtttggtggttcggctaaacctaccccaaaacaggaaattgactatacatttgagacatggggacagcaagtggttgatttttgccgagaggtgatcggtagtcctgctatcttagtgggtaattctataggttgtgtggtggtaatgcaaaccgctgtagatcatcccgaatgggttttaggagtagctgcccttaattgttctttaagattactgcacgaacgtaaacaggcaagtttaccctggtatcgtcgggttggtgccaatgctatgcagcgtgttttaaccaataaggctatcggttctttcttttttcaacaagttgctaaaccaaatactgtcaaaaacattcttttacaggcttatcatcgttctgaggcggttacagatgaattagttgaactgttactcaaaccggcccaagatcagggggcagcagaggtatttttagcgtttacgggttattctcaagggcctttaccagaagacttattaccccgtttaacctgtccaaccattcttttatggggagataaagacccttgggaaaagattgaaataggtcaagaatgggcaaactatcctacagtggaccagtttattcccttagaaggtgtcggccattgccctcaagatgaagccccagaattagttaatcctattttagaagagtttattgttaagttgaaagattaa

SEQ ID NO: 113159 - protein, 301 aa, Crocosphaera watsonii WH 8501
MVQSSITNPTTPNNEKTWYWRGYPITYNHCGDTGPAVLLVHGFGASWRHWRKNLPVLGNSCQCYALDLIGFGGSAKPTPKQEIDYTFETWGQQVVDFCREVIGSPAILVGNSIGCVVVMQTAVDHPEWVLGVAALNCSLRLLHERKQASLPWYRRVGANAMQRVLTNKAIGSFFFQQVAKPNTVKNILLQAYHRSEAVTDELVELLLKPAQDQGAAEVFLAFTGYSQGPLPEDLLPRLTCPTILLWGDKDPWEKIEIGQEWANYPTVDQFIPLEGVGHCPQDEAPELVNPILEEFIVKLKD

SEQ ID NO: 113160 - DNA, 882 bp, Crocosphaera watsonii WH 8501
  CDS (1)..(882): transl_table=11
atgcaaacagttgatctttcttccaacacctcccccaatggacaatactggcaatggaaaggccataatatctactatgtccaagccggaaaacaacagtccaaccatcctcctttattattaatacatgggtttggtgcatctacagatcattggcagaaaaatattgctcaattacaagaacattttgaagtctgggccattgacttattaggttttggtcgctctggaaaacccgagttacaatatagtggggatctttggcgagatcaattgaaggattttattacagaaattatcgggcaacctgttgtcttagcaggtaactctttaggggggtatgctgccctttgcgttgcttctcaatgtccagaaacctcgaaaggactgattttactcaacagtgctggaccctttagtgatactcaaaaagccagcaaacccaacataattcaaaaaaccatccgctctgtcttattacaaccttgggcgagtaatttactgtttcaatatatgcgccgtcctaaaaatattcgtaagacactgaacaaagtttattacaatcaagaagcggttacagacaagttagttgatgatattcatcgtccttcttgtgacccaggggcagcacaagtattcgcctcagtttttaagacaccacaaggagaaaccgttgacaaattattagaacaactatcccatcccttattaatgttgtggggagaaaaagatccttggatgaatacacaagaaagaggggaaaaataccgtcaatattaccccaacttaacagaacactatctagaagctggtcattgtccccacgatgaaatacccgatcgcattaaccaattaattaaagattgggcgacaaaacagtga

SEQ ID NO: 113161 - protein, 293 aa, Crocosphaera watsonii WH 8501
MQTVDLSSNTSPNGQYWQWKGHNIYYVQAGKQQSNHPPLLLIHGFGASTDHWQKNIAQLQEHFEVWAIDLLGFGRSGKPELQYSGDLWRDQLKDFITEIIGQPVVLAGNSLGGYAALCVASQCPETSKGLILLNSAGPFSDTQKASKPNIIQKTIRSVLLQPWASNLLFQYMRRPKNIRKTLNKVYYNQEAVTDKLVDDIHRPSCDPGAAQVFASVFKTPQGETVDKLLEQLSHPLLMLWGEKDPWMNTQERGEKYRQYYPNLTEHYLEAGHCPHDEIPDRINQLIKDWATKQ

SEQ ID NO: 113162 - DNA, 912 bp, Prochlorococcus marinus str. MIT 9211
  CDS (1)..(912): transl_table=11
ttgactaaagccaacagccatatttgggagtggaatgacttaaatgtctcgtggaaagtagaaggatctaaaattgaaaaaaactttgcaacattattagttcatggttttggtgcttctaaagagcattggcgacaaaaccaaaaaatccttggagaacaatctccttgctattcaattgatttaattggttttggttccagtagtcaacctcgtgcaaaactagacggtgacttaagttcgcaaaacgatttttcttataactttgataattggagtcatcaaatagcagaattttcgcaatctgttattaaaaaaccagtaattttaattggtaattctattggaggcgttatcgcacttcgagcagctcaaattatgaaatcttcttgtaaaggggtgatattaattaattgtgcccaaagaacaatggacgataaaaggctatatgaacaaccgaaatttatgcgacatatccgaccattattaaaagcactcattagaaagcgatggctaagcaaaaatctctttaaaaatgctgcaaatccaaaatttattagaaaggttctcgaaaaagcttatccaagtggggcaaatatagatacagagctaataaacatgattcattcgccaactcaaagagaaggggcttcagaagctttccatggttttgtaaatatcttcaatgattatcttgctacagagctaatggaaaatcttgatttacctgttgatttaatttggggagaaagtgatccatgggaagcaatagacgaagcaagatactgggcttcatccataaattgtgtgcgatctttagaagttattaatggagctggacattgtcctcatgacgaatgtcctgaaaaagtaaacaatcgtttgttaaagattattcaagatgcgacataa

SEQ ID NO: 113163 - protein, 303 aa, Prochlorococcus marinus str. MIT 9211
MTKANSHIWEWNDLNVSWKVEGSKIEKNFATLLVHGFGASKEHWRQNQKILGEQSPCYSIDLIGFGSSSQPRAKLDGDLSSQNDFSYNFDNWSHQIAEFSQSVIKKPVILIGNSIGGVIALRAAQIMKSSCKGVILINCAQRTMDDKRLYEQPKFMRHIRPLLKALIRKRWLSKNLFKNAANPKFIRKVLEKAYPSGANIDTELINMIHSPTQREGASEAFHGFVNIFNDYLATELMENLDLPVDLIWGESDPWEAIDEARYWASSINCVRSLEVINGAGHCPHDECPEKVNNRLLKIIQDAT

SEQ ID NO: 113164 - DNA, 948 bp, Synechococcus sp. RS9917
  CDS (1)..(948): transl_table=11
gtgacccttgctccagatgctgctccgacccgccaggtcgagccctggcgcttccgcggccatgccgtgcacagtctcagctgcggccccagtgcctcctccggtgctgaaccaggccaaccggccctgctgctggtgcatggcttcggtgcctccactgagcactggcgccacaacatccccgtgctcagccgcagccatgaggtgcatgccatcgatctgctcggcttcggccgcagtgccaagccgtcggagctcgcctacggcggtgccctctggcgcgatcagctggtggcctatgtgcaggagcggatcggccgccccacggtgatcgccggcaactccctcggtggcttcgcggctctggccgccggcgctgcccttggcccggaggccgccggcgtggtgctgctcaatgcggctggaccgttcagcgacgagcagcaacccgccaagggctggggcgcgatcgcccgccagacgatcggtgcggcgctgctcaggagtccggtgctgcagcgcttgttgtttgagaacctgcgccggccgcgcacgatccggcgcaccctcaaccaggtgtatctcgatcgcaccaacgtcgatgacgccctggtggaggcgatccgccgcccctcgcttgatcccggagccttcggggtgttccgcaccgtgttcgacatcccccgcggtcagccccttgatgagctgtttgcgcagttgcaggctccgctgctgttgctctggggcatccgcgatccctggatcaacgccgccggccggcgcgccagttttcagcgccatgccccggcggccaccacggaggtggtgctggaggcgggccattgcccccacgatgaggtgccggatcaggtgaatgcggccctgctcgagtggctggcgagcctgccgagccagtcgtcaggtccatgtcggccagaacaccggtga

SEQ ID NO: 113165 - protein, 315 aa, Synechococcus sp. RS9917
MTLAPDAAPTRQVEPWRFRGHAVHSLSCGPSASSGAEPGQPALLLVHGFGASTEHWRHNIPVLSRSHEVHAIDLLGFGRSAKPSELAYGGALWRDQLVAYVQERIGRPTVIAGNSLGGFAALAAGAALGPEAAGVVLLNAAGPFSDEQQPAKGWGAIARQTIGAALLRSPVLQRLLFENLRRPRTIRRTLNQVYLDRTNVDDALVEAIRRPSLDPGAFGVFRTVFDIPRGQPLDELFAQLQAPLLLLWGIRDPWINAAGRRASFQRHAPAATTEVVLEAGHCPHDEVPDQVNAALLEWLASLPSQSSGPCRPEHR

SEQ ID NO: 113166 - DNA, 996 bp, Synechococcus sp. RS9917
  CDS (1)..(996): transl_table=11
atgagcggcctctggcgctggccccgcccgcagggacagggacctgagctggaggtgagctggacgggcggtcataacgcgcctgatgccgctgaacccaacgctgttgagcccggcgacaagctgccagctgtggtgttgatccatggcttcggcgcctgcaaggagcactggcgccacaccctgcccgcgcttggggctcacctgcccacctacgcgctcgacctggtggggttcggcgccagcagccagccgcgggcacggctcgccgatgaagcagcggatgatcccgcaaacgaggcgatccactacggcttcgagctctggggggcccaggtggccgcgttctgccgggagatcgtgggccggccggtgctgctcgtgggcaattcgatcggcggcgtcgtggccctgcgagcggcccagctgctgaacgcggatgcggggccgagcccatgctgcggcctggtgttgatcgactgtgcccagcggctgatggacgacaaacaactgagccggcagccagcctggatggcctggatccggccgctgctgaagacgatggtgcggcagcgctggctgagcacggccctgttccgcaacgccgcccgaccggcactgatccggcaggtgctgcggcaggcctaccccagcggcgcccatgtggatgacgagctggtgcaactgctctacaaacccagccgccgaccaggcgccgccgaagcgtttcgcggtttcatcaacctgtttgatgactatctcgccccggctctcctggccgatctggctctgccggtgcatctgatctggggtgaagccgatccgtgggagccggtggcggaagcccgggcctgggctgggcgtttcccctgcattcgttcgcttcagatccttcccggcgttggtcactgcccccacgacgaagcgccggagctggtgaatccgctgctcctcgccatcgccaagcaaaccagccgcactcagcaggcgatgtag

SEQ ID NO: 113167 - protein, 331 aa, Synechococcus sp. RS9917
MSGLWRWPRPQGQGPELEVSWTGGHNAPDAAEPNAVEPGDKLPAVVLIHGFGACKEHWRHTLPALGAHLPTYALDLVGFGASSQPRARLADEAADDPANEAIHYGFELWGAQVAAFCREIVGRPVLLVGNSIGGVVALRAAQLLNADAGPSPCCGLVLIDCAQRLMDDKQLSRQPAWMAWIRPLLKTMVRQRWLSTALFRNAARPALIRQVLRQAYPSGAHVDDELVQLLYKPSRRPGAAEAFRGFINLFDDYLAPALLADLALPVHLIWGEADPWEPVAEARAWAGRFPCIRSLQILPGVGHCPHDEAPELVNPLLLAIAKQTSRTQQAM

SEQ ID NO: 113168 - DNA, 945 bp, Synechococcus sp. WH 5701
  CDS (1)..(945): transl_table=11
gtggtgacagctccagcccagcctgtcgcaggggatggcatcgactggggcctgcatggcacctggcactggcgcggcctggcctgtcactggcgtgtgctcggtgaccccgcccatccgccgctgctgctgctgcatggcttcgccgccagcagcggccactggcgccacaacgtggccggcctggtggcgtcgggctggtgtgtctatggccttgatctgatcggcttcggtgcctccgaccagccggccctgcccctcgacaaccggctctgggcccgccagagcacggcgttcctgcagcaggtggtgcaacggcccgccgtgctgctgggccactccctcggtgggctggtggctctgaccacggcggtgttcagcccggcctgggtgcgggcagtggcggcggtgcccctgcctgatcccagcctggtgatggccgtgccacggcggcgtcccccctggcgtcggcgcctgcagcggttgctggtgcaggtgctctgccggctgctgcccctggagcttgtggtacccctgatcgcccgcactcctctgctggatctggggctgcagtcggcctacaaccaaccggtgatcggtgacgcggaactgcgccggctgttcgcccgccccgctcgccgggccaccgccgcctggtctctgcggggcatgagcatcggcatggccctgcggccgaggggtgccacggccgaggcgctgctggcgcgcctggtgcagccccttctgctgatctggggcgaggccgaccggctggtgccgatcgaggtgggggagctgatcgcgcgcctcagaccggacctgcagctggagcggctggagggagtcggccactgcccccacgacgaggccccagaagcctttgaggcgctgctgctgagctggctggagcggctggatgccgagccgcaggaggccggcacgtaa

SEQ ID NO: 113169 - protein, 314 aa, Synechococcus sp. WH 5701
MVTAPAQPVAGDGIDWGLHGTWHWRGLACHWRVLGDPAHPPLLLLHGFAASSGHWRHNVAGLVASGWCVYGLDLIGFGASDQPALPLDNRLWARQSTAFLQQVVQRPAVLLGHSLGGLVALTTAVFSPAWVRAVAAVPLPDPSLVMAVPRRRPPWRRRLQRLLVQVLCRLLPLELVVPLIARTPLLDLGLQSAYNQPVIGDAELRRLFARPARRATAAWSLRGMSIGMALRPRGATAEALLARLVQPLLLIWGEADRLVPIEVGELIARLRPDLQLERLEGVGHCPHDEAPEAFEALLLSWLERLDAEPQEAGT

SEQ ID NO: 113170 - DNA, 882 bp, Synechococcus sp. WH 5701
  CDS (1)..(882): transl_table=11
ttgatcggcccccgctccgagccctggacctatggcggccatggggtccacgccctggccagtcgaccgccgcagccccagggcccggcgattttgctggtgcacggcttcggcgcctccaccgaccactggcgctacaacattcctgcgctggcggagcaccatgaggttcacgcccttgacctgctgggctttggccgcagcgccaagcccgaggggctggcctacgggggagggctgtggcgtgatcagctggtggcctacgtgcgcgagcggatcgggcggcccacggtgctggtgggcaattccctcggcggctttgccgccctggcggccggggcggccctgggcagcgaggcggccggggtggtgctgatcaatgccgccggccccttcagcgacgagcaggccgagccgaagggctggggcgcgatcacgaagcgcacgatcggcggtgccctgttgcgcagtccagtgcttcagcgcctgctgttcgagaacctgcggcgcccggccacgatccggcgcaccctcaatcaggtctacatcgatcgcagcaacgtggatgacgcgctggtggaggcgatccggcggccctcgctggatccaggggccttcggggtgtttcgcacggtctttgacattccccgtggccagcccctggacgaactctttgcccagctcaaggcccccctgctgctgctctgggggatccgcgacccctggatcaatgccgccggccgtcgcgccgccttccagcgccacgcaccagccgccaccactgaggtggtgctcgacgccggccactgcccccacgatgaagtgcccgagcaggtgaacgccgccctgctggagtggctctcgagcctgccggatgcctga

SEQ ID NO: 113171 - protein, 293 aa, Synechococcus sp. WH 5701
MIGPRSEPWTYGGHGVHALASRPPQPQGPAILLVHGFGASTDHWRYNIPALAEHHEVHALDLLGFGRSAKPEGLAYGGGLWRDQLVAYVRERIGRPTVLVGNSLGGFAALAAGAALGSEAAGVVLINAAGPFSDEQAEPKGWGAITKRTIGGALLRSPVLQRLLFENLRRPATIRRTLNQVYIDRSNVDDALVEAIRRPSLDPGAFGVFRTVFDIPRGQPLDELFAQLKAPLLLLWGIRDPWINAAGRRAAFQRHAPAATTEVVLDAGHCPHDEVPEQVNAALLEWLSSLPDA

SEQ ID NO: 113172 - DNA, 960 bp, Synechococcus sp. WH 7805
  CDS (1)..(960): transl_table=11
atgaatcctttgccagtgccacctgactcggcccactggacctggcagcagcccgatggctgcgatctcgatgtggcctggtgccggcagggccaagacaacagtgcatcgccggcggtggtgctggtgcatggtttcggtgccagcagcggccactggcgtcacaccatgccgtcgctggcagagcgaacccccaccttcgccctcgatctgatcggcttcggcggcagcagtcagccaagggccgtgctgcccagcgatcccgatgccgacctccaagcaccgagcgatgaagcgcttgtgtatggcttcgatctctgggctgagcaggtggaggccttctgccggcagatcgtgcagcgcccggtgctgctggtgggcaattcgatcggcggtgtagtggtgctccgcgcagcccaacggctgggggtgcactgcaagggcgtggtactgatcgactgcgcccagcggctgatggatgacaaacagctggccagccaaccggcctggatggcttggatccggccgttgctgaaagccctggtgagccaacgctggctgagcacagccctgttccgcaacgcggccaggccccgggtgatccgcagcgtgctcggccaggcctacccgagcggagccaatgttgacgaccaactggttgacctgctgtaccaaccaacgcagcgccccggggccgccgaggctttccgaggctttatcaacctcttcgatgaccacctggctccagagctgctggcgaaccttgaacagccggtgcatctgatctggggggaacgggatccctgggaacccgtggcagaagcccgcgattgggctgagcgctttgcctgcgtcgaatcactcacggtgcttcctctggtgggacactgtccgcacgacgaagcaccgcaggctgtcaacgaccggttgctggagattctccaggcgcagggagcatga

SEQ ID NO: 113173 - protein, 319 aa, Synechococcus sp. WH 7805
MNPLPVPPDSAHWTWQQPDGCDLDVAWCRQGQDNSASPAVVLVHGFGASSGHWRHTMPSLAERTPTFALDLIGFGGSSQPRAVLPSDPDADLQAPSDEALVYGFDLWAEQVEAFCRQIVQRPVLLVGNSIGGVVVLRAAQRLGVHCKGVVLIDCAQRLMDDKQLASQPAWMAWIRPLLKALVSQRWLSTALFRNAARPRVIRSVLGQAYPSGANVDDQLVDLLYQPTQRPGAAEAFRGFINLFDDHLAPELLANLEQPVHLIWGERDPWEPVAEARDWAERFACVESLTVLPLVGHCPHDEAPQAVNDRLLEILQAQGA

SEQ ID NO: 113174 - DNA, 972 bp, Synechococcus sp. RS9916
  CDS (1)..(972): transl_table=11
gtgctgaagaaagccatgccagctgaacagatctggcagtggagcaactccacagggcgaatgctggaggtgggctggagccatgccggcactgacgcactgaccacaacgaccaaccccgcggcggtgctgattcatgggtttggcgccaacaccgaccactggcgccacaccatgccgaccctgagcgccgagacccccacctatgccctcgacctgatcggcttcggacgcagcagtcagccccaagcactgctgaagggagaaccatccacaagcgccacccaagacgggctccactacagctttgacctttggggtgagcaagtggccagcttctgccggcaggtggtgaacaggcccgtgctgttggtgggcaattccatcggcggcgttgtggcactgagggcagcccagctgcttgccgccaatccggacggcagcacctgcaagggagtcgtgctgatcgactgcgcccagcggttgatggatgacaagcaattggccacccaaccggcctggatggcctggatcagacctctgctgaaaaccctggtgagccagcgctggctgagctccgccctgttccgcaacgccgcccgcccctccgtcatccgcagcgtgctgaaacaggcataccccagcggctgcaacgtcgatgacgagctggtgcagctgctatttcagccgacccaacgcgctggtgccgcagaagcgttccgcggtttcatcaatctgttcgacgattacctcgcacccgatctgttgaacgagctgtcggtgcccgtcgatctgatctggggcgaaaacgacccctgggagcccctaccggaagcacagcgatgggcggatcgctacgcgacggtccgctcgctctcggtggtggccggtggggggcattgcccccacgacgaacatccggatcaagtcaatcccctgctgctgaggtgcctgaatcagcaggcgacgtag

SEQ ID NO: 113175 - protein, 323 aa, Synechococcus sp. RS9916
MLKKAMPAEQIWQWSNSTGRMLEVGWSHAGTDALTTTTNPAAVLIHGFGANTDHWRHTMPTLSAETPTYALDLIGFGRSSQPQALLKGEPSTSATQDGLHYSFDLWGEQVASFCRQVVNRPVLLVGNSIGGVVALRAAQLLAANPDGSTCKGVVLIDCAQRLMDDKQLATQPAWMAWIRPLLKTLVSQRWLSSALFRNAARPSVIRSVLKQAYPSGCNVDDELVQLLFQPTQRAGAAEAFRGFINLFDDYLAPDLLNELSVPVDLIWGENDPWEPLPEAQRWADRYATVRSLSVVAGGGHCPHDEHPDQVNPLLLRCLNQQAT

SEQ ID NO: 113176 - DNA, 963 bp, Synechococcus sp. RS9916
  CDS (1)..(963): transl_table=11
gtgacccttgctccagaagccgctccggaagtggtcagcgacctggtcagccagcggctgccccagaccgtgtgtgaaccctgggaacacctgggcgcgtttgtgcattgcctgcactgcgcccccaccgaccctgctgctgcggccttggcgaaggagcgtccggccctgttgttggtccatggcttcggggcctccaccgatcactggcgacacaacatcccagtgctggcgcgcacccacgaggtgcatgcccttgacctgctcgggtttggtcgcagcgccaagccggccggcctcacctatggcggtgccctctggcgggatcagctcgtggcctacgtcaaggaacggatcggtcgccccatcgtgatcgccgggaattccctgggtggtttcgcggccctcgctgctggtgctgcactggggaatgactgcgctggcgtggtgctgctcaatgccgcaggcccgttcagtgatgagcagcgggaacctaaaggttggggtgccattgcccgtcagaccatcggcatggctctgctgaagagtccggtgctgcagcgtctgctgttcgagaacatgcgccgcccggccaccgttcgacgcaccctcaatcaggtgtatgtcgatcgcaccaatgtggatgaggaactggtggaggcgatccttctcccatcccgtgatcccggcgcctttggcgtgttccgcactgtgttcgacattccccgcgggcaacccctcgatgaattgttcgcggatttgactgctcctctgctgttgctctggggaattcgcgacccctggatcaatgcggcgggccggcgcgccagttttcaacgtcatgcaccggaggcgacgacggaagtggtgctggaggcgggccattgcccccacgatgaggtgccggagcaggtgaatgctgccctgctggagtggctcaaaaccttggaacagtgggcatga

SEQ ID NO: 113177 - protein, 320 aa, Synechococcus sp. RS9916
MTLAPEAAPEVVSDLVSQRLPQTVCEPWEHLGAFVHCLHCAPTDPAAAALAKERPALLLVHGFGASTDHWRHNIPVLARTHEVHALDLLGFGRSAKPAGLTYGGALWRDQLVAYVKERIGRPIVIAGNSLGGFAALAAGAALGNDCAGVVLLNAAGPFSDEQREPKGWGAIARQTIGMALLKSPVLQRLLFENMRRPATVRRTLNQVYVDRTNVDEELVEAILLPSRDPGAFGVFRTVFDIPRGQPLDELFADLTAPLLLLWGIRDPWINAAGRRASFQRHAPEATTEVVLEAGHCPHDEVPEQVNAALLEWLKTLEQWA

SEQ ID NO: 113178 - DNA, 1038 bp, Ostreococcus tauri
  CDS (1)..(1038)
atgacgacgacggagggattttatcgctggcgtggacacgacgcgcactacgcgcgatgcggcgcgacgacggcgacgacgcacgtggtgttcctcccgggattcggtgtcgggacgtttcattacgaagcacagctcagagagggggcgctgggggaggacgcgtgcgcgtgggcgttggatttcgtcggacaaggaaagtcgtggccgcgcggcgaggaagcgatcgatgggttcgcgtactcggtggacgcgtggagggaacaggtggaatatttcttgcgagaggttgtcgggagggaggcgtacgtgtgtgggaactcgttgggcgggtacgtggcgacgtacgtcgccgcggcggaatcgagcagagatttagtgaaaggattgatattgatgaacgcgacgccgttttgggcgttcgttccgagcgatgaggagtctttggggtacaagttggcgccatggcgcggttcgttgcccgtgccgggttggattcgcgcgccgattaagcaatactgggaaagctttcgatcgcgggcgaacgtcagaggcttgctctcgctcgtgtacgccaacgccgaggcgatcgatgacagattgattcgcgacatcattgaaccgacggagaataaaaacgcgctgtcgacgttttgctcggtcgtgtggtcaccgaagagcgcgatgtcgttcgatgacatgacggaacggattcgagactcaaacattcccgtcgcgctcgtgtacggcaaagaggatccatgggtcgttccgctgtggggacaaagattgaagcgcgcgatacctcgcgcacattactacgagctcagccccgtcgggcactgtcccgcgcacgaggcgccggagacggtgaactcaattctctcgcgataccttcaattttgcgaatcaaccgccgaggaaactcaaccgccgagtggaagcgccgacggccgcgcgaaactcatcgacggcgcgccgagaaatattttcgagcgcatcgacgcctatcgcgcctctagatctccgaccatgtaa

SEQ ID NO: 113179 - protein, 345 aa, Ostreococcus tauri
MTTTEGFYRWRGHDAHYARCGATTATTHVVFLPGFGVGTFHYEAQLREGALGEDACAWALDFVGQGKSWPRGEEAIDGFAYSVDAWREQVEYFLREVVGREAYVCGNSLGGYVATYVAAAESSRDLVKGLILMNATPFWAFVPSDEESLGYKLAPWRGSLPVPGWIRAPIKQYWESFRSRANVRGLLSLVYANAEAIDDRLIRDIIEPTENKNALSTFCSVVWSPKSAMSFDDMTERIRDSNIPVALVYGKEDPWVVPLWGQRLKRAIPRAHYYELSPVGHCPAHEAPETVNSILSRYLQFCESTAEETQPPSGSADGRAKLIDGAPRNIFERIDAYRASRSPTM

SEQ ID NO: 113180 - DNA, 987 bp, Terrabacter sp
  CDS (1)..(987): transl_table=11
gtgacgagcgctgaagggggaacggcccagccccaggggaactcgttctgggtggacctgctgggaaccgaggtccggtaccgccaggcgagctcttaccgcacccgcagcatcgaggcaggcgccggtgagccggtagtcctgctgcacggcgtgagcgggcacgccgagacctgggtgcgcaacgtcgccgtcctcggccgggacttccgcgtgcatgccattgacatgctgggtcacggcttcaccgacaagccgcagatcgagtactcgatccgcgcgctcgccgagcacgtgctcggcttcctcgacgagatcggcgcctcgcgagcccacctggtcgggcagtctctcggtggctgggtcgcggcgtttctcgccgtccaccaccccgagcgggtcgcctcgctcgtcagcgtcaccggggcggggctgcaggtggacgccgacggtgccacgctgaccgagaacgtcggccgacaggtcgcggaggccaccaccaaggctctggacaccccgacccgggagaaggtccggactcggctggaatggctggtgcatgacccgtccgtggtcaccgacgaactggtggagacccggtaccggatctacgccagcccggacttcgccgccaccgccggtgacatggtcgccgcattcacctcccggccccggccggaggaactgctgaccgccgagcggctcgcgacgatcaactgcccgacgctcgtgctgtggacccggcagaacccgaccatgccgtggccggtgggggaggcggccagccggatcattcccgatgcaacgttccgtctgatggaggacgctggtcactggccgcagttcgagaagccggcggagttccacgctgtcgtcggcggtttcctgcgttcggtcaccgcggggcgccgaggtgggcgcaccgacggcgacggcgacggcggccccacggatccggccaccaaccggcaacgggcggcccgctga

SEQ ID NO: 113181 - protein, 328 aa, Terrabacter sp
MTSAEGGTAQPQGNSFWVDLLGTEVRYRQASSYRTRSIEAGAGEPVVLLHGVSGHAETWVRNVAVLGRDFRVHAIDMLGHGFTDKPQIEYSIRALAEHVLGFLDEIGASRAHLVGQSLGGWVAAFLAVHHPERVASLVSVTGAGLQVDADGATLTENVGRQVAEATTKALDTPTREKVRTRLEWLVHDPSVVTDELVETRYRIYASPDFAATAGDMVAAFTSRPRPEELLTAERLATINCPTLVLWTRQNPTMPWPVGEAASRIIPDATFRLMEDAGHWPQFEKPAEFHAVVGGFLRSVTAGRRGGRTDGDGDGGPTDPATNRQRAAR

SEQ ID NO: 113182 - DNA, 1113 bp, Arabidopsis thaliana
  CDS (1)..(1113)
atggcgaagactagcatttttgcagctctaccctttaccaacttcgaattcccgtcgctgttccgtgtcaagaactcttcgattatcagtttcagcgaaacccattttctccgacaatcaatttcgaccgcaatcgtaagatctccgactaagaggggaattgtgtccgtctcatgttcttccgtcacggacgaagcttcttctgaagagctacaagttcgaaccttgacatggaagtggaaaggttattcgataagatatcaatgtgctggaaccagtggccctgctttggtcttggttcatggtttcggtgctaacagtgaccattggaggaagaacacacctattcttgggaaaacacatagggtgtactcaatcgatcttatcggatatggatactccgataaaccgaatcctcgtgagtttggtggagaaccattctacacttttgagacatggggtgagcaactcaatgatttctgtctggatgtggtcaaagatgaagctttctttatttgcaactctataggaggacttgttggtcttcaggcagcagtaagtaagccagagatatgcagagggcttatgcttattaacatatccctccggatgcttcatatcaagaaacaaccattcattggaagacctttcatcaaatcattccagaatttacttaggaacactccggttggaaaattatttttcaagagcattgctaaaccagagacagtaaagagcattctttgccagtgttaccatgatagctcgcaagtgacagatgaactagttgagacaattctacgtccagggcttgagcctggtgcagttgatgtcttccttgaatttatctgttactccggaggaccacttccagaggatttactcccactagtcaagtgcccggttctaattgcatggggagagaaagatccatgggagcccatcgagcttggacgagcatatagcaattttgacgcggttgaagatttcgttgttcttccagatgccggccactgtcctcaggacgagaagccggagatggtgaacccacttattgaatcattcgttgcgagacatcgaaagtccaatacatccatctccccagacatttga

SEQ ID NO: 113183 - protein, 370 aa, Arabidopsis thaliana
MAKTSIFAALPFTNFEFPSLFRVKNSSIISFSETHFLRQSISTAIVRSPTKRGIVSVSCSSVTDEASSEELQVRTLTWKWKGYSIRYQCAGTSGPALVLVHGFGANSDHWRKNTPILGKTHRVYSIDLIGYGYSDKPNPREFGGEPFYTFETWGEQLNDFCLDVVKDEAFFICNSIGGLVGLQAAVSKPEICRGLMLINISLRMLHIKKQPFIGRPFIKSFQNLLRNTPVGKLFFKSIAKPETVKSILCQCYHDSSQVTDELVETILRPGLEPGAVDVFLEFICYSGGPLPEDLLPLVKCPVLIAWGEKDPWEPIELGRAYSNFDAVEDFVVLPDAGHCPQDEKPEMVNPLIESFVARHRKSNTSISPDI

SEQ ID NO: 113184 - DNA, 981 bp, Rhodococcus sp
  CDS (1)..(981): transl_table=11
gtgacgagcactgaagagggaatggcccagccccaggggaactcgttctgggtggacctgctgggaaccgaggtccggtaccgccaggcgagctcttaccgcacccgcagcatcgaggcaggcgccggtgagccggtagtcctgctgcacggcgtgagcgggcacgccgagacctgggtgcgcaacgtcgccgtcctcggccgagacttccgcgtgcatgccattgacatgctgggtcacggcttcaccgacaagccgcagatcgagtactcgatccgcgcgctcgccgagcacgtgctcggcttcctcgacgagatcggcgcctcgcgagcccacctggtcgggcagtctctcggtggctgggtcgcggcgtttctcgccgtccaccaccccgagcgggtcgcctcgctcgtcagcgtcaccggggcggggctgcagctggacgccgacggtgccacgctgaccgagaacgtcggccggcaggtcgcggaggccaccaccaaggctctggacaccccgacccgggagaaggtccggactcggctggaatggctggtccatgacccgtccgtggtcaccgacgaactggtggagacccggtaccggatctacgccagcccggacttcgccgccaccgccggtgacatggtcgccgcattcacctcccgggcccggccggaggaactgctgaccgccgagcggctcgcgacgatcaactgcccgacgctcgtgctgtggacccgacagaacccgaccatgccgtggccggtgggggaggcggccagccggatcattcccgatgcaacgttccgtctgatggaggacgccggtcactggccgcagttcgagaagccggcggaattccacgctgtcgtcggcgggttcgtgcgttcggtcaccgcggggcgccaaggtgggcgcaccgacggcgacggcggccccacggatccggccaccaaccggcaacgggcggcccgctga

SEQ ID NO: 113185 - protein, 326 aa, Rhodococcus sp
MTSTEEGMAQPQGNSFWVDLLGTEVRYRQASSYRTRSIEAGAGEPVVLLHGVSGHAETWVRNVAVLGRDFRVHAIDMLGHGFTDKPQIEYSIRALAEHVLGFLDEIGASRAHLVGQSLGGWVAAFLAVHHPERVASLVSVTGAGLQLDADGATLTENVGRQVAEATTKALDTPTREKVRTRLEWLVHDPSVVTDELVETRYRIYASPDFAATAGDMVAAFTSRARPEELLTAERLATINCPTLVLWTRQNPTMPWPVGEAASRIIPDATFRLMEDAGHWPQFEKPAEFHAVVGGFVRSVTAGRQGGRTDGDGGPTDPATNRQRAAR

SEQ ID NO: 113186 - DNA, 1194 bp, Arabidopsis thaliana; identical to SEQ ID NO: 113042
  CDS (32)..(1120)

SEQ ID NO: 113187 - protein, 362 aa, Arabidopsis thaliana
MRALTWTAMSPPVMSRTATSTVNLRRISLRRYRVCVRATASSSATVSGGGVVEAVELAEIGERSKKWKWKGEYSVNYFVKDSPEEVTPASQTVLLVHGFGASIPHWRRNINALSKNHTVYAIDLLGFGASDKPPGFSYTMESWAELILNFLEEVVQKPTILIGNSVGSLACVIAASESRGDLVKGLVLLNCAGGMNNKAVFDDWRIKLLMPLLLLIDFLLKQRGIASALFNRVKDRENLKNILTNVYGNKDNVDDTLVEIIAGPANTEGALDAFVSILTGPPGPNPIKLIPEITKPVLVLWGDQDGLTPLDGPVGKYFTSLPDQLPNFNLYVLQGVGHCPQDDRPDLVHERLLPWLAQLSST

SEQ ID NO: 113188 - DNA, 1461 bp, Oryza sativa
  CDS (1)..(1461)
atggaagtggtttcttccagccactcctgcttggcatttaaccgaacacctagcagtgcttggaggtttccggggaatggtcttggtccagggcatgcaaagctcactcggccaagaagtgcaattctttgtgtgcggtcagggacagcttcgaatcctgctgattctgggaaagttcatgcgagccatgggttctatgtaagtgatgtcgatgcagctctccaagggatcccgaagaaagtcggtgagatcgagaagatgatcattccgagcttgccagaaggacctgaaagctctctaattagtactggtttctgggaatggaagccgaagctgagtgtatattatgaaaagtctggcatagacaatagcaaggcaccgtctgtgctctttctaccaggttttggagtgggaacgttccattttgagaagcaattgaaggatcttggccgtgattacaaagtatggacaatggattttctagggcagggcatgtcgttgccatgtgaagatcctgctcctaagagcacatcaggagagctagatgaggacacatattggggttttggacaagaattacaaccatgggcggaggagttggtgtattcgatagatttgtggcgtgaccaagttcagcattttattgaagaggttattggtgaaccagtatatattgtggggaactctctgggaggttttgtttctctatatcttgctgcatcctgtccacaccttgtaaagggtgtcacattacttaatgcaaccccattttggggattccttcccaaccctgctacatctcctcgcttgtcgaagatttttccatgggctgggacatttccacttccatcgtttgtgaggaaacttactgaaacagtgtggcagaaaataagtgatccaagaagtatacagggcatactcaagcaagtatatgctgaccactcaacgaatgtggacatggtgttctcgcgtattatagagacaacacaacatccagcagctgctgcatcatttgcatccattatgtgtgctccaaagggacaaatatccttcgaagaagctctatctaggtgccaaaggcagggtattcccatatctcttatgtatgggagagaagatccttgggttagacctatttggggtattaaagtgaaacagcaggtgccagaatcaccgtattacgaaatcagtcctgctggtcactgccctcatgatgaggttcctgaggttataaactacttactcagaggatggctaaagaatgtcgaatctgagggttcagttgcagttccatttcttgaagaacccagctatgctgaaaatggtgtatcaagggagctggaatttgttaggggaggatcaaaaaaatctgtccatgtgcgactctttggttctaaaatttccttatggagccaacttcgttcgcttttgaagtccaacacatgggtaatatctagataa

SEQ ID NO: 113189 - protein, 486 aa, Oryza sativa
MEVVSSSHSCLAFNRTPSSAWRFPGNGLGPGHAKLTRPRSAILCVRSGTASNPADSGKVHASHGFYVSDVDAALQGIPKKVGEIEKMIIPSLPEGPESSLISTGFWEWKPKLSVYYEKSGIDNSKAPSVLFLPGFGVGTFHFEKQLKDLGRDYKVWTMDFLGQGMSLPCEDPAPKSTSGELDEDTYWGFGQELQPWAEELVYSIDLWRDQVQHFIEEVIGEPVYIVGNSLGGFVSLYLAASCPHLVKGVTLLNATPFWGFLPNPATSPRLSKIFPWAGTFPLPSFVRKLTETVWQKISDPRSIQGILKQVYADHSTNVDMVFSRIIETTQHPAAAASFASIMCAPKGQISFEEALSRCQRQGIPISLMYGREDPWVRPIWGIKVKQQVPESPYYEISPAGHCPHDEVPEVINYLLRGWLKNVESEGSVAVPFLEEPSYAENGVSRELEFVRGGSKKSVHVRLFGSKISLWSQLRSLLKSNTWVISR

SEQ ID NO: 113190 - DNA, 1281 bp, Oryza sativa
  CDS (1)..(1281)
atggaagtggtttcttccagccactcctgcttggcatttaaccgaacacctagcagtgcttggaggtttccggggaatggtcttggtccagggcatgcaaagctcactcggccaagaagtgcaattctttgtgtgcggtcagggacagcttcgaatcctgctgattctgggaaagttcatgcgagccatgggttctatgtaagtgatgtcgatgcagctctccaagggatcccgaagaaagtcggtgagatcgagaagatgatcattccgagcttgccagaaggacctgaaagctctctaattagtactggtttctgggaatggaagccgaagctgagtgtatattatgaaaagtctggcatagacaatagcaaggcaccgtctgtgctctttctaccaggttttggagtgggaacgttccattttgagaagcaattgaaggatcttggccgtgattacaaagtatggacaatggattttctagggcagggcatgtcgttgccatgtgaagatcctgctcctaagagcacatcaggagagctagatgaggacacatattggggttttggacaagaattacaaccatgggcggaggagttggtgtattcgatagatttgtggcgtgaccaagttcagcattttattgaagaggttattggtgaaccagtatatattgtggggaactctctgggaggttttgtttctctatatcttgctgcatcctgtccacaccttgtaaagggtgtcacattacttaatgcaaccccattttggggattccttcccaaccctgctacatctcctcgcttgtcgaagatttttccatgggctgggacatttccacttccatcgtttgtgaggaaacttactgaaacagtgtggcagaaaataagtgatccaagaagtatacagggcatactcaagcaagtatatgctgaccactcaacgaatgtggacatggtgttctcgcgtattatagagacaacacaacatccagcagctgctgcatcatttgcatccattatgtgtgctccaaagggacaaatatccttcgaagaagctctatctaggtgccaaaggcagggtattcccatatctcttatgtatgggagagaagatccttgggttagacctatttggggtattaaagtgaaacagcaggtgccagaatcaccgtattacgaaatcagtcctgctggtcactgccctcatgatgaggttcctgaggttccaggaaaaagccttgcctggtggatcactgggcgccttcaggcatcgtaa

SEQ ID NO: 113191 - protein, 426 aa, Oryza sativa
MEVVSSSHSCLAFNRTPSSAWRFPGNGLGPGHAKLTRPRSAILCVRSGTASNPADSGKVHASHGFYVSDVDAALQGIPKKVGEIEKMIIPSLPEGPESSLISTGFWEWKPKLSVYYEKSGIDNSKAPSVLFLPGFGVGTFHFEKQLKDLGRDYKVWTMDFLGQGMSLPCEDPAPKSTSGELDEDTYWGFGQELQPWAEELVYSIDLWRDQVQHFIEEVIGEPVYIVGNSLGGFVSLYLAASCPHLVKGVTLLNATPFWGFLPNPATSPRLSKIFPWAGTFPLPSFVRKLTETVWQKISDPRSIQGILKQVYADHSTNVDMVFSRIIETTQHPAAAASFASIMCAPKGQISFEEALSRCQRQGIPISLMYGREDPWVRPIWGIKVKQQVPESPYYEISPAGHCPHDEVPEVPGKSLAWWITGRLQAS

SEQ ID NO: 113192 - DNA, 1146 bp, Oryza sativa
  CDS (1)..(1146)
atggcgacgagcggcgcggcggcacgtcctccagtggccaccaccctctccgcgcgccgtggcacggctccctccgccaccgccgccgccgcctcctgccccgcgtcgtcggcgcggcgcactacctggaggccgcgggcgaggctctcctcggggaacgcggcgcgggcgcgggcgcggctgctgcgtgtcgaggcctcctccatggccgacccggtcgaggagagcctccccgcggcgccgcacacggccacggatgctccgttggagactcagccccaggtgcgcaccagcatgtggaattggaagggctacaacattcggtaccagtacgcgggaacttctggccctgcattggttctaattcatggtttcggagcaaacagtgaccattggcggaaaaatattcctgttcttgctctgaaaaacagagtatatgcaattgatcttattggttatggctattctgataagcctaatccacgtgagcttggtgagagcttttatacttttgagacatggggagaacagctgaatacgttttgtgctgaagttattaagagcgaagctttcttcatatgcaattcaattggagggcttgttggtctacaggcagctgctatggaaccacagaagtgcaagggtatctttttattgaatatttcattgaggatgcttcatatcagtaagcagccatggtttggaaggcctttcatcaaatcattccaaagtctgctacggaatactgttattgggaagctgttcttcagcgctgttgctacaccagaatctgtgaaaaatattctctgtcagtgctaccatgacacatccgcagtgacagatgagctagttcagtttattctgcagccagggcttgaccctggtgctgtggatgtattccttgagttcatctgctactcaggaggtcctctacctgaagaattacttcccagagtgaagtgtccagttttggtagcttggggtgagaaggacccatgggagcctgtggagcttggaagagcttacgcatcttttgatactgttgaagattttgttgtcttgccaaatgttggacactgcccacaggatgaagcacctgaccttgtaaatccacttgtcgaatcatttgttacacgccatagttag

SEQ ID NO: 113193 - protein, 381 aa, Oryza sativa
MATSGAAARPPVATTLSARRGTAPSATAAAASCPASSARRTTWRPRARLSSGNAARARARLLRVEASSMADPVEESLPAAPHTATDAPLETQPQVRTSMWNWKGYNIRYQYAGTSGPALVLIHGFGANSDHWRKNIPVLALKNRVYAIDLIGYGYSDKPNPRELGESFYTFETWGEQLNTFCAEVIKSEAFFICNSIGGLVGLQAAAMEPQKCKGIFLLNISLRMLHISKQPWFGRPFIKSFQSLLRNTVIGKLFFSAVATPESVKNILCQCYHDTSAVTDELVQFILQPGLDPGAVDVFLEFICYSGGPLPEELLPRVKCPVLVAWGEKDPWEPVELGRAYASFDTVEDFVVLPNVGHCPQDEAPDLVNPLVESFVTRHS

SEQ ID NO: 113194 - DNA, 1104 bp, Brassica napus
  CDS (1)..(1104)
atgagagccctgacatggacaggattatctccgccgccgccggctatggtggcgcgaatgacgatgacttcgaagatggttgccttacgacggatgaacctccgaaaaggtcgtgtcagtgttagagccacggcgtcgtctagcgcggctgtttcaagcggaggagtagtggaagcggtggagttggctgagataggagaaaagagtaagaagtggaagtggaagggagaatactcaatcaattactttgtcaagagttcgccggaggaagtaactccggcgagtcagactgttctcttagttcacggctttggcgcctctattcctcactggcgaaggaatataaatgctctgtctaaacaccatacagtgtatgccattgatcttcttgggtttggtgcttcagagaagccacctggttttagctacactatggagtcatgggctgaattgataatcaacttcttagaggaagtggttcagaaaccgacagttttgattggtaactctgttggaagccttgcttgcgttatagctgcttcagaatcgcagcgagatcttgttagaggtcttgttctgttgaattgtgctggtggtatgaacaacaaagcggtgtttgacgactggagaatcaagctgctgatgccattgctcttgcttattgacttcttactcaagcaaagaggaattgcttctgctctcttcaaccgtgttaaagacagggagaatctcaagaacatcttgacaaatgtatatggcaacaaagacaatgtagatgataccctagtagaggttatcgctggaccagcaaacagcgaaggtgcgctagatgcatttgtttccatattaacgggtccacctggaccaaacccggttacgctgattcctgaaataaccaaaccggttcttgtcttatggggagaccaagatggattaattcctctcgacggtcctgtaggtaagtacttcacgtcccttccgggtcagttacctaacttcaacctatatgttctagaaggtgttggacattgcccacaagatgatcgtccggatcttgtccatgagcgtctccttccatggctggctcagctttcttccacatag

SEQ ID NO: 113195 - protein, 367 aa, Brassica napus
MRALTWTGLSPPPPAMVARMTMTSKMVALRRMNLRKGRVSVRATASSSAAVSSGGVVEAVELAEIGEKSKKWKWKGEYSINYFVKSSPEEVTPASQTVLLVHGFGASIPHWRRNINALSKHHTVYAIDLLGFGASEKPPGFSYTMESWAELIINFLEEVVQKPTVLIGNSVGSLACVIAASESQRDLVRGLVLLNCAGGMNNKAVFDDWRIKLLMPLLLLIDFLLKQRGIASALFNRVKDRENLKNILTNVYGNKDNVDDTLVEVIAGPANSEGALDAFVSILTGPPGPNPVTLIPEITKPVLVLWGDQDGLIPLDGPVGKYFTSLPGQLPNFNLYVLEGVGHCPQDDRPDLVHERLLPWLAQLSST

SEQ ID NO: 113196 - DNA, 1128 bp, Brassica napus
  CDS (1)..(1128)
atggcgaacattagagcgttaccactcacaagtttggaaacaacatcgctgctcttcagtaaaagagttcttgtcaagaacacttcgattatcagtttcacagaaacccaatttctccgacaatcgattccgacaagcatcacacgatctccgactccaaggggaagtgggtccgtctcatgttcttcggtaacagacaaagcttctaccttggaagatgtttgtccagaagttcgaaccttgacatggaactggaaaggctattcgataagatatcagtgcgctggaaccagtggccctgccttagtcttggttcatggcttcggtgctaacagtgaccattggaggaagaacacacctattctcggcaaatcatatagagtctactcaatcgatctaatcggatacggatactcagataaaccaaaccctaacgagtttggaggagaaccgttctacacttttgagacatggggtgagcagctcaatgacttctgtcttgatgtggtcaaagatgaagccttttttatatgcaactctatcggaggacttgttggtcttcaggcagcagtaagtaagccagagatatgcagagggcttatgcttattaacatatctctccgtatgctccatatcaagaagcaaccgttgattggaagacctttcatcagatcattccagaacttacttaggaatactccggttgggaaactatttttcaagagcattgctaaaccggagacagtaagaagcattcttagccagtgctatcatgatagctctcaagtgactgatgagctagttgaagcaattctaaggccaggtcttgagcctggtgctgttgatgtatttctcgaattcatctgttactctggtggaccgcttcctgaggatttactcccactggtcaagtgtccggttctaattgcgtggggagaaaaagatccatgggagccaattgagcttggacgagcttatggtgattttgatgcggttgaagagtttgttgttctccctgaagccggccactgtcctcaggatgagaagccggaaatggtgaacccacttatcgaatcattcgttgcaagacattcaaattcaagtgcagcccttgctccaggcatttga

SEQ ID NO: 113197 - protein, 375 aa, Brassica napus
MANIRALPLTSLETTSLLFSKRVLVKNTSIISFTETQFLRQSIPTSITRSPTPRGSGSVSCSSVTDKASTLEDVCPEVRTLTWNWKGYSIRYQCAGTSGPALVLVHGFGANSDHWRKNTPILGKSYRVYSIDLIGYGYSDKPNPNEFGGEPFYTFETWGEQLNDFCLDVVKDEAFFICNSIGGLVGLQAAVSKPEICRGLMLINISLRMLHIKKQPLIGRPFIRSFQNLLRNTPVGKLFFKSIAKPETVRSILSQCYHDSSQVTDELVEAILRPGLEPGAVDVFLEFICYSGGPLPEDLLPLVKCPVLIAWGEKDPWEPIELGRAYGDFDAVEEFVVLPEAGHCPQDEKPEMVNPLIESFVARHSNSSAALAPGI

SEQ ID NO: 113198 - DNA, 1128 bp, Brassica napus
  CDS (1)..(1128)
atggcgaacattagagcgttaccactcacaagtttggaaacaacatcgctgctcttcagtaaaagagttcttttcaagaacacttcgattatcagtttcacagaaacccaatttctccgacaatcggttccgacaagcatcacacgatctccgactccaaggggaagtgggtccgtctcatgttcttctgtaacagacaaagcttctaccttggaagatgtttgtccagaagttcgaaccttgacatggaactggaaaggctattcgataagatatcagtgcgctggaaccagtggcccttccttagtcttggttcatggcttcggtgctaacagtgaccattggaggaagaacacacctattctcggcaaatcatatagagtctactcaatcgatcttatcggatacggatactcagataaaccaaaccctaacgagtttggaggagaaccgttctacacttttgagacatggggtgagcagctcaatgacttctgtcttgatgtggtcaaagatgaagccttttttatatgcaactctatcggaggacttgttggtcttcaggcagcagtaagtaagccagagatatgcagagggcttatgcttattaacatatctctccgtatgctccatatcaagaagcaaccgttgattggaagacctttcatcagatcattccagaacttacttaggaatactccggttgggaaactatttttcaagagcattgctaaaccggagacagtaagaagcattcttagccagtgctatcatgatagctctcaagtgactgatgagctagttgaagcaattctaaggccaggtcttgagcctggtgctgttgatgtatttctcgaattcatctgttactctggtggaccgcttcctgaggatttactcccactggtcaagtgtccggttctaattgcgtggggagaaaaagatccatgggagccaattgagcttggacgagcttatggtgattttgatgcggttgaagagtttgttgttctccctgaagccggccactgtcctcaggatgagaagccggaaatggtgaacccacttatcgaatcattcgttgcaagacattcaaattcaagtgcagcccttgctccaggcatttga

SEQ ID NO: 113199 - protein, 375 aa, Brassica napus
MANIRALPLTSLETTSLLFSKRVLFKNTSIISFTETQFLRQSVPTSITRSPTPRGSGSVSCSSVTDKASTLEDVCPEVRTLTWNWKGYSIRYQCAGTSGPSLVLVHGFGANSDHWRKNTPILGKSYRVYSIDLIGYGYSDKPNPNEFGGEPFYTFETWGEQLNDFCLDVVKDEAFFICNSIGGLVGLQAAVSKPEICRGLMLINISLRMLHIKKQPLIGRPFIRSFQNLLRNTPVGKLFFKSIAKPETVRSILSQCYHDSSQVTDELVEAILRPGLEPGAVDVFLEFICYSGGPLPEDLLPLVKCPVLIAWGEKDPWEPIELGRAYGDFDAVEEFVVLPEAGHCPQDEKPEMVNPLIESFVARHSNSSAALAPGI

SEQ ID NO: 113200 - DNA, 1128 bp, Brassica napus
  CDS (1)..(1128)
atgtctgcttcatgtgctgtaacaccgtctgttaggacagaactaagtaaaagactcacctttcctgctcaaactcgtcgaccaagaaacaaatgcgaaatcagcagaaggggctttgcagtgagagggatcgttgcttctggagtttcagtcatgggcactcctcctccttcagctgcttctcagccaatccaaggtggtgagaggttaacttttaagccagaaggatacaacttttgggaatggagaggtcacaagattcattacgtggttcaaggagaaggcttgcctcttgttcttatccatggctttggtgcttctgtctttcactggaggtataacatccctgagctggctaagaagtacaaagtgtacgcattggacttactcggtttcggatggagtgacaaagccctcatagagtatgacgccatggtttggactgatcaagttattgacttcatcaaagaggttgtcaaagagccaaccgttgtggttggaaacagccttggagggttcacagctttgtctgttgcggtgggattgccagagcaggtcacaggagttgcgcttctcaactctgcaggacagtttgcatccgagagtagtaaaaagcaagaggaagaagctgaggaaaccgttttaaccaagtttgtagttaagccgctcaaagaggttttccaacgagtggttcttgggttcttgttctggcaagctaagcagccttctcgaatcgaatctgtgttaaagagtgtgtacgtaaacgctgctaatgtagatgactacctcgttgaatccatctcaaaacctgcaacagacccaaatgctggagaagtttactacagattgatgacaaggttcttgacgaaccagagtagatacactttggacagtgttctaagtaagatgacttgcccgctactgttgctttggggtgatcttgacccgtgggttggtcctgctaaagcggagaagatcaaagcgttttactcgaagtcatcgctggtgcacttacaagcagggcattgtcctcatgacgaagtccctgaagctgtaaacgttactttgttggattggctgtctaatgtagttaccgagccatcgtcccctgaactctcagaggtgtga

SEQ ID NO: 113201 - protein, 375 aa, Brassica napus
MSASCAVTPSVRTELSKRLTFPAQTRRPRNKCEISRRGFAVRGIVASGVSVMGTPPPSAASQPIQGGERLTFKPEGYNFWEWRGHKIHYVVQGEGLPLVLIHGFGASVFHWRYNIPELAKKYKVYALDLLGFGWSDKALIEYDAMVWTDQVIDFIKEVVKEPTVVVGNSLGGFTALSVAVGLPEQVTGVALLNSAGQFASESSKKQEEEAEETVLTKFVVKPLKEVFQRVVLGFLFWQAKQPSRIESVLKSVYVNAANVDDYLVESISKPATDPNAGEVYYRLMTRFLTNQSRYTLDSVLSKMTCPLLLLWGDLDPWVGPAKAEKIKAFYSKSSLVHLQAGHCPHDEVPEAVNVTLLDWLSNVVTEPSSPELSEV

SEQ ID NO: 113202 - DNA, 1464 bp, Brassica napus
  CDS (1)..(1464)
atggagataatctcacataacttcctgcctcactgctctgtggtcacttggggtactaaacctgacaagaacacattggtcccaaatcgatcacacatcgtaatatctattggtggtctcacgaagttcatacttgtggttcgaaatggaacttcagatggttatgtggttggtgagaatgatgacttcggtagtagtatagctacaagaagaggagactcaaagtcaaagattttgattcctggtttgcctgaggaagctgctgctcgaatcactccttctcagtgcgagtggaagcctaacctcacggtacactacgagaaatctggatgtgaaaacgtggaggctcccgcggtgttgtttcttcctgggtttggtgttggttcgtttcactacgagaagcagcttactgatttgggaagggattatcgagtgtgggcggttgattttgttggtcagggttcatctctccccactcaagatcctactaccactactatgtctgaagaaacaagttccttggaagatagtgaatcgttttgggggtttggtaatgaagctcaaccatgggctgatcaacttgtatactcacttgatctctggagggaacaagttcaatatattgtagaagaggttatcggtgagccagtgtacattgcagggaactcacttggaggctatgtagctctctactttgcggcaacccatcctcatctggtgaaaggtgttacgttgcttaacgcgacacctttctggggtttcttccctaatccagtaagatccccaaagctagcacgtctctttccatggtccggaacattccctctaccgccaagagtgaaaaaactcacagagttggtgtggcaaaagataagtgatcctgaaagcatagctgagatactcaaacaggtctacaaagaccattctactgatgtggataaagtattctcacgtattgtggagatcacgcagcatcctgctgctgcagcgtcgtttgcttcaatcatgtttgctcctggtggactgctatctttctccgaagcgttatctaggtgtaagaaaaacaatgttcagatatgtctaatgtatggaaaagaagatccatgggtgggacctatatggggaaagaagataaagaaggaaatccccaacgctccttactacgagatcagcccagcgggtcactgcccacacgatgaagtccctgaggtggtgaactatctgatgcgcgggtggatcaagcacctggagtctggtgggtttgaaggcgtgccgcttttggaagacggtgaagaagactgggagcagtccagcattgctagggagatggagtttccgagaggagaaggttggaagaagtcagtgaagctttggttgtacgggtcaaagtattcgttctggggtggagttggagaatccttcagagccagtttagtaaaggttctccgagggaagtctgtatag

SEQ ID NO: 113203 - protein, 487 aa, Brassica napus
MEIISHNFLPHCSVVTWGTKPDKNTLVPNRSHIVISIGGLTKFILVVRNGTSDGYVVGENDDFGSSIATRRGDSKSKILIPGLPEEAAARITPSQCEWKPNLTVHYEKSGCENVEAPAVLFLPGFGVGSFHYEKQLTDLGRDYRVWAVDFVGQGSSLPTQDPTTTTMSEETSSLEDSESFWGFGNEAQPWADQLVYSLDLWREQVQYIVEEVIGEPVYIAGNSLGGYVALYFAATHPHLVKGVTLLNATPFWGFFPNPVRSPKLARLFPWSGTFPLPPRVKKLTELVWQKISDPESIAEILKQVYKDHSTDVDKVFSRIVEITQHPAAAASFASIMFAPGGLLSFSEALSRCKKNNVQICLMYGKEDPWVGPIWGKKIKKEIPNAPYYEISPAGHCPHDEVPEVVNYLMRGWIKHLESGGFEGVPLLEDGEEDWEQSSIAREMEFPRGEGWKKSVKLWLYGSKYSFWGGVGESFRASLVKVLRGKSV

SEQ ID NO: 113204 - DNA, 1095 bp, Brassica napus
  CDS (1)..(1095)
atgagagctctgacatggacagcattatctccgccgccgctgccggctatggtggcgcgaatgacgacgacttcgaagatggttgccttacaacggatgaacctccgaaaagatcgtgtctgtgttagcgccacggcggtttcaagcggaggaggagtagtggaagcggtggagttggctgagataggagagaagagtaagaagtggaagtggaagggagaatactcaatcaattactttgtcaagagttcgccggaggaagtaaccccggctagtcagactgttctcttagttcacggctttggcgcctctattcctcactggcgaaggaatataaatgctctgtccaaacaccatacagtgtatgccattgatcttcttgggtttggtgcttcagagaagccacctggttttagctacactatggagtcatgggctgaattgatactcaacttcttggaggaagtggttcagaaaccgacagttttgattggtaactctgttggaagccttgcttgcgttatagctgcttcagaatcgcagcgagatcttgttagaggtcttgttctgttgaattgtgctggtggtatgaacaacaaagcggtgtttgacgactggagaatcaagctgctgatgccattgctcttgcttattgacttcttactcaagcaaagaggaattgcttctgcactcttcaaccgcgttaaagacagggagaatctcaagaacattttgacaaatgtatatggcaacaaagacaatgtagatgatacccttgtagagattatcgctggaccagcaaacagcgaaggtgcgctagatgcatttgtttccatactaacgggtccacctggaccaaacccgattacgctgattcctgaaataaccaaaccggttcttgtcttatggggagaccaagatggattaactcctctcgacggtcctgtaggtaaatacttcacgtcccttccgggtcagttacctaacttcaacctctatgttctagaaggtgttggacattgcccacaagatgatcgtccggatcttgtccatgagcgtctccttccatggctggctcagctttcttccacatag

SEQ ID NO: 113205 - protein, 364 aa, Brassica napus
MRALTWTALSPPPLPAMVARMTTTSKMVALQRMNLRKDRVCVSATAVSSGGGVVEAVELAEIGEKSKKWKWKGEYSINYFVKSSPEEVTPASQTVLLVHGFGASIPHWRRNINALSKHHTVYAIDLLGFGASEKPPGFSYTMESWAELILNFLEEVVQKPTVLIGNSVGSLACVIAASESQRDLVRGLVLLNCAGGMNNKAVFDDWRIKLLMPLLLLIDFLLKQRGIASALFNRVKDRENLKNILTNVYGNKDNVDDTLVEIIAGPANSEGALDAFVSILTGPPGPNPITLIPEITKPVLVLWGDQDGLTPLDGPVGKYFTSLPGQLPNFNLYVLEGVGHCPQDDRPDLVHERLLPWLAQLSST

SEQ ID NO: 113206 - DNA, 1116 bp, Glycine max
  CDS (1)..(1116)
atggcttcttccatctgtgctctctcgccttccgtccaatcacagctcactaaaaccaccctcgttgctccaatccctctctatcaacgaagcaagtgcgaaatgagcaggaggagttttgcgtttaagggaattgtggcctctggcgtttcggtcgcggcttctactctcacagccgaagcagaaccatcttccaaaggttttgaaagattgccgtacaagccggaagggtacaattattggacatggaggggtcataaaatacattatgtagtgcaaggagaaggctctcccattgttcttattcatggttttggggcctctgcattccactggaggtacaacattccagaattggctaagaaacacaaggtatatgccttagacttgctcggttttgggtggagtgacaaagcacttatagattatgatgctatggtgtggagagatcaagttgttgactttgtgaaggaaatagtaaaagaaccaaccgttttagttggaaacagccttggaggatttactgctttggttgcagcaactgggttgcctgatcttgtcaatggtgttgctcttctaaattctgccggacaatttggcgatgggaaaagggaaagtgaaacttctgaagaaacagctctacaaaagtttctcctaaagccattgaaggaagttttccagcgtgtagttcttggatttttattctggcaggcaaagcaaccagctcgggttctgtcagtcctaaaaagtgtgtatataaattcttccaatgtggatgactatcttgtggaatctataacaaggccagctcaagatccaaatgccggagaagtctactacaggttaatgacgcgcttcatgatgaatcagagcaagtacactctagatgctgtcttaagtgaactctcatgcccgttgttgctgctttggggtgaccttgacccatgggttggtccagccaaagcgaatcgaatcaaagagttctatccaaaaactactcttgtgaacttgcaggctgggcattgtccacatgatgagacaccagagcttgtgaacaaggctttattggattggttgaccaccctcactcctgaagtgactctccaaacagtttga

SEQ ID NO: 113207 - protein, 371 aa, Glycine max
MASSICALSPSVQSQLTKTTLVAPIPLYQRSKCEMSRRSFAFKGIVASGVSVAASTLTAEAEPSSKGFERLPYKPEGYNYWTWRGHKIHYVVQGEGSPIVLIHGFGASAFHWRYNIPELAKKHKVYALDLLGFGWSDKALIDYDAMVWRDQVVDFVKEIVKEPTVLVGNSLGGFTALVAATGLPDLVNGVALLNSAGQFGDGKRESETSEETALQKFLLKPLKEVFQRVVLGFLFWQAKQPARVLSVLKSVYINSSNVDDYLVESITRPAQDPNAGEVYYRLMTRFMMNQSKYTLDAVLSELSCPLLLLWGDLDPWVGPAKANRIKEFYPKTTLVNLQAGHCPHDETPELVNKALLDWLTTLTPEVTLQTV

SEQ ID NO: 113208 - DNA, 1467 bp, Triticum aestivum
  CDS (1)..(1467)
atggaagtggtttcttccagtcactcttgcttggcatttcatcaaacccctaccagtgcgcggaggtctctgggcactggtcttggtccgcggcataccaagcttgctcggccaagaaaaagctcagttctctgtgttgggagagcttcaaatcctggtgattcaggaaagcttaatgtcagccgcagcttcggtgtaagcgatgtcgatgctgccctccagggcatctccaagaaggtaggccagatcgagaaagtggcgattcctggcctgccagaagggccagacagttctcaaatcagcactggtttgtgggagtggaagccgaagctgacggtatactacgagaagtctggcaccaagaatagcaaggcgccagcagtgctttttctaccaggttttggggtgggcacgttccattttgagaagcaattgatggatcttggccgtgattacaaggtgtggacgatggattttctgggacagggaatgtcattgccgtgtgaagaccctgctcctaaggccatggcaggggaggaggatgaggaatcatattggggttttggacaagattcgcaaccatgggcagatgaattggtgtactctgtagacttgtggcgtgaccaggtccagcacttcattgaagaggttatcggtgagccagtttatatcgtgggaaactctcttggaggttttgttgctctatatttagctgcatccagcccacaccttgtaaagggggtcacattgcttaacgcaacgccattttggggtttccttcccaatcctgcaagatctcctcgtttgtcaaagatttttccatgggctgggacatttcctcttccatcagttgtgaggaaacttactgaaacagtgtggcagaagataagcgacccaagaagtatacagaagatactcaggcaagtatatgctgaccactcaacaaatgttgacaaggtgttctcgcgtattatagagacaacagaacacccggcagctgctgcatcatttgcctccattatgtttgctccaatgggccagatatcctttcaggaggcactatctaggtgccaaaggcaggacattcccatttcccttatgtatgggaaagaagacccgtgggttacaccttattggggtatcagagtcaagcaacaggtgccagaagcaccctattatgaaattagccctgccggtcactgtcctcacgacgaggttcctgaggttataaactatttgctccgaggatggcttaagaatgtggagtctgagggttcagttgacctcccatttcttgaagattccagctttgaagaacatggtgtgtcgaaggagctggagtttgtcaggacagggtccaagaaatcagttagtgtgcggctcttcggttcccaaatttccctgtggagccaactgagctcattcttgaagcggcatgcctccaacataagggtagtgtccagatga

SEQ ID NO: 113209 - protein, 488 aa, Triticum aestivum
MEVVSSSHSCLAFHQTPTSARRSLGTGLGPRHTKLARPRKSSVLCVGRASNPGDSGKLNVSRSFGVSDVDAALQGISKKVGQIEKVAIPGLPEGPDSSQISTGLWEWKPKLTVYYEKSGTKNSKAPAVLFLPGFGVGTFHFEKQLMDLGRDYKVWTMDFLGQGMSLPCEDPAPKAMAGEEDEESYWGFGQDSQPWADELVYSVDLWRDQVQHFIEEVIGEPVYIVGNSLGGFVALYLAASSPHLVKGVTLLNATPFWGFLPNPARSPRLSKIFPWAGTFPLPSVVRKLTETVWQKISDPRSIQKILRQVYADHSTNVDKVFSRIIETTEHPAAAASFASIMFAPMGQISFQEALSRCQRQDIPISLMYGKEDPWVTPYWGIRVKQQVPEAPYYEISPAGHCPHDEVPEVINYLLRGWLKNVESEGSVDLPFLEDSSFEEHGVSKELEFVRTGSKKSVSVRLFGSQISLWSQLSSFLKRHASNIRVVSR

SEQ ID NO: 113210 - DNA, 1110 bp, Triticum aestivum
  CDS (1)..(1110)
atggcgtgcgcggccccacccagccccctccccgtggtctccctgcccgcgcgccgccgcagcgcgactgccgtcgcgcccgcctcctaccacgccccctctacccggttctcgaggcgttcgtggctgtcctctggaaactcgccccgctctcggctgcggacccaggcctccaaggccgagccagccgaggagggcgttcccgccgcgccgggcccgtctgccccgtcggagcccctgccccagccgcgtaccagcatatggaattggaagggctacaacattcgctatcagtacgccggaacttctggccctgcactggttctaattcatggtttcggggcaaacagtgaccattggcggaaaaatattcctgttcttgccatggcaaatagagtttatgcaattgatctaattggctatggctactctgataaacctaatccacgcgagttcgaagagagcttttatacttttgagacttggggagaacagttgaatacattttgtgctgaagttgtcaagagtgatgctttcttcatatgcaattcaattggagggcttgttggtctgcaggcagctgttatgaaaccccaaacatgcaaaggtattgttttattggatatttcattaaggatgcttcatatcaataagcagccatggtttggaaggcctttcatcagatcatttcaaaatctcctaaggaacactgttattgggaagctcttctttaatgctgttgcaacaccagaatccgtgaaaaatattctttgtcagtgttaccatgacacgtccgctgtcacagatgaattggttcagatgatcttgcagccagggcttgatcccggtgctgtggatgtattccttgagttcatctgctattctggaggtcctctacctgaagacttactaccaatggtgaagtgtccagttttggtagcttggggagagaaggacccatgggagcctgtggaacttggaagagcctacgggtcttttgatgctgtcgaagattttgttgtcctcccgaacgttggacactgccctcaggatgaagcacctgagcttgtaaatccacttgttgaatcatttgttaagctccatagttag

SEQ ID NO: 113211 - protein, 369 aa, Triticum aestivum
MACAAPPSPLPVVSLPARRRSATAVAPASYHAPSTRFSRRSWLSSGNSPRSRLRTQASKAEPAEEGVPAAPGPSAPSEPLPQPRTSIWNWKGYNIRYQYAGTSGPALVLIHGFGANSDHWRKNIPVLAMANRVYAIDLIGYGYSDKPNPREFEESFYTFETWGEQLNTFCAEVVKSDAFFICNSIGGLVGLQAAVMKPQTCKGIVLLDISLRMLHINKQPWFGRPFIRSFQNLLRNTVIGKLFFNAVATPESVKNILCQCYHDTSAVTDELVQMILQPGLDPGAVDVFLEFICYSGGPLPEDLLPMVKCPVLVAWGEKDPWEPVELGRAYGSFDAVEDFVVLPNVGHCPQDEAPELVNPLVESFVKLHS

SEQ ID NO: 113212 - DNA, 1146 bp, Zea mays
  CDS (1)..(1146)
atgtccgtcgcgtccgtggccgccctccggacggccggctccggccgccgccgcggcgcgggttcccagcagaccggccttaacgggggcaggttcctgatgatgcagaggagggagctggtgaccaaggccgggatcgcgctcgccgtctcctgctcgatggctacctcacccgcttcagccaacggcgctgctcaagggctggagattttgccgttcaaagctgacgggtacaacttctggacgtggcggggtcgccggatacactacgtcgagcaaggcgcggggcggcccgtcgtgctcatccacggcttcggcgcttccgccttccactggaggtacaacatccctgagctggccaagaagtacaaggtgtacgccatagacctgctggggttcggctggagcgagaaggcgctggtggactacgaggccaccatctggatggagcaggtctccgacttcctccgggagatcgtcaaggaaccagccgtccttgtaggcaacagcttgggaggcttcacgacgctgttcacggccaccgaggtgccggagctggtccggggcgtcgtgctcctcaactccgccggccagttcgccgaccccaacaagccggccgccgcgccggccgaggaggaggaggggggcagcgcgctgtccaggtacatcgtgcagccgctcaaggaggccttccagcgggtggtgctggggctcctcttctggcagtccaagcagcccgccagggtcgagaaagtcttgaaaagcgtgtacatagatcccagcaacgtcgacgactacctggtcggctccatcacggcgccggcggcggaccccaacgccggcgaggtgtactacaggctgatgtcgcggttcatgtcgaaccagagccggtacacgctggaccggctgctggggaagatgtcgtgcccgctgctgctgctgtggggcgacctggacccgtgggtcggcccggccaaggccgcgcggatccaggagttctacgccgacaccgccgtcgtgcacctgcaggccggccactgcccgcacgacgaggcgccggagcaggccaaccgcgcgctgctcgagtggctcgcggccctcgacgcccgcgccaagtcggccgagcccagcctacagaccgtctga

SEQ ID NO: 113213 - protein, 381 aa, Zea mays
MSVASVAALRTAGSGRRRGAGSQQTGLNGGRFLMMQRRELVTKAGIALAVSCSMATSPASANGAAQGLEILPFKADGYNFWTWRGRRIHYVEQGAGRPVVLIHGFGASAFHWRYNIPELAKKYKVYAIDLLGFGWSEKALVDYEATIWMEQVSDFLREIVKEPAVLVGNSLGGFTTLFTATEVPELVRGVVLLNSAGQFADPNKPAAAPAEEEEGGSALSRYIVQPLKEAFQRVVLGLLFWQSKQPARVEKVLKSVYIDPSNVDDYLVGSITAPAADPNAGEVYYRLMSRFMSNQSRYTLDRLLGKMSCPLLLLWGDLDPWVGPAKAARIQEFYADTAVVHLQAGHCPHDEAPEQANRALLEWLAALDARAKSAEPSLQTV

SEQ ID NO: 113214 - DNA, 20 bp, Artificial sequence
  primer
atggtctccctggaatcttc

SEQ ID NO: 113215 - DNA, 20 bp, Artificial sequence
  primer
ctaactccactctgtaatcc

SEQ ID NO: 113216 - protein, 356 aa, Artificial sequence
  consensus sequence
  Variant (2)..(2): Xaa in position 2 is any amino acid
  Variant (4)..(15): Xaa in position 4 to 15 is any amino acid
  Variant (16)..(42): Xaa in position 16 to 42 is any or no amino acid
  Variant (44)..(44): Xaa in position 44 is any amino acid
  Variant (50)..(52): Xaa in position 50 to 52 is any amino acid
  Variant (56)..(56): Xaa in position 56 is any amino acid
  Variant (58)..(60): Xaa in position 58 to 60 is any amino acid
  Variant (61)..(61): Xaa in position 61 is any or no amino acid
  Variant (63)..(69): Xaa in position 63 to 69 is any amino acid
  Variant (70)..(70): Xaa in position 70 is any or no amino acid
  Variant (72)..(72): Xaa in position 72 is any amino acid
  Variant (75)..(75): Xaa in position 75 is any amino acid
  Variant (79)..(79): Xaa in position 79 is any amino acid
  Variant (81)..(86): Xaa in position 81 to 86 is any amino acid
  Variant (87)..(119): Xaa in position 87 to 119 is any or no amino acid
  Variant (121)..(124): Xaa in position 121 to 124 is any amino acid
  Variant (126)..(131): Xaa in position 126 to 131 is any amino acid
  Variant (133)..(139): Xaa in position 133 to 139 is any amino acid
  Variant (141)..(144): Xaa in position 141 to 144 is any amino acid
  Variant (148)..(148): Xaa in position 148 is any amino acid
  Variant (150)..(156): Xaa in position 150 to 156 is any amino acid
  Variant (158)..(165): Xaa in position 158 to 165 is any amino acid
  Variant (166)..(170): Xaa in position 166 to 170 is any or no amino acid
  Variant (172)..(173): Xaa in position 172 to 173 is any amino acid
  Variant (175)..(203): Xaa in position 175 to 203 is any amino acid
  Variant (204)..(227): Xaa in position 204 to 227 is any or no amino acid
  Variant (229)..(237): Xaa in position 229 to 237 is any amino acid
  Variant (238)..(240): Xaa in position 238 to 240 is any or no amino acid
  Variant (242)..(244): Xaa in position 242 to 244 is any amino acid
  Variant (246)..(254): Xaa in position 246 to 254 is any amino acid
  Variant (256)..(261): Xaa in position 256 to 261 is any amino acid
  Variant (263)..(267): Xaa in position 263 to 267 is any amino acid
  Variant (269)..(271): Xaa in position 269 to 271 is any amino acid
  Variant (273)..(286): Xaa in position 273 to 286 is any amino acid
  Variant (287)..(290): Xaa in position 287 to 290 is any or no amino acid
  Variant (292)..(297): Xaa in position 292 to 297 is any amino acid
  Variant (298)..(302): Xaa in position 298 to 302 is any or no amino acid
  Variant (304)..(307): Xaa in position 304 to 307 is any amino acid
  Variant (310)..(311): Xaa in position 310 to 311 is any amino acid
  Variant (314)..(337): Xaa in position 314 to 337 is any amino acid
  Variant (338)..(343): Xaa in position 338 to 343 is any or no amino acid
  Variant (348)..(348): Xaa in position 348 is any amino acid
  Variant (351)..(351): Xaa in position 351 is any amino acid
  Variant (353)..(354): Xaa in position 353 to 354 is any amino acid
WXWXXXXXXXXXXXXXXXXXXXXXXXXXXXXXXXXXXXXXXXLXHGFGAXXXHWRXNXXXXLXXXXXXXXAXDLXGFGXSXXXXXXXXXXXXXXXXXXXXXXXXXXXXXXXXXXXXXXXYXXXXWXXXXXXFXXXXXXXPXXXXGNSXGXXXXXXXAXXXXXXXXXXXXXGXXLXXXXXXXXXXXXXXXXXXXXXXXXXXXXXXXXXXXXXXXXXXXXXXXXXXXXXFXXXXXXXXXXXXLXXXYXXXXXXXXXLXXXXXXPXXXXXAXXXFXXXXXXXXXXXXXXXXXXLXXXXXXXXXXXPXXXXWGXXDPXXXXXXXXXXXXXXXXXXXXXXXXXXXXXXGHCPXDEXPXXVN

SEQ ID NO: 113217 - protein, 15 aa, Artificial sequence
  protein pattern
  Variant (2)..(2): Xaa in position 2 is Ile, Leu or Val
  Variant (8)..(8): Xaa in position 8 is Cys, Asn or Ser
  Variant (9)..(10): Xaa in position 9 to 10 is any amino acid
  Variant (14)..(14): Xaa in position 14 is any amino acid
  Variant (15)..(15): Xaa in position 15 is Asn or Thr
LXHGFGAXXXHWRXX

SEQ ID NO: 113218 - protein, 20 aa, Artificial sequence
  protein pattern
  Variant (5)..(5): Xaa in position 5 is any amino acid
  Variant (8)..(8): Xaa in position 8 is any amino acid
  Variant (10)..(14): Xaa in position 10 to 14 is any amino acid
  Variant (15)..(19): Xaa in position 15 to 19 is any or no amino acid
GHCPXDEXPXXXXXXXXXXL

SEQ ID NO: 113219 - protein, 16 aa, Artificial sequence
  protein pattern
  Variant (2)..(2): Xaa in position 2 is Ala, Gly, Gln or Ser
  Variant (3)..(6): Xaa in position 3 to 6 is any amino acid
  Variant (7)..(7): Xaa in position 7 is Cys, Thr or Val
  Variant (8)..(8): Xaa in position 8 is Phe, His, Trp or Tyr
  Variant (9)..(9): Xaa in position 9 is Ala, Ser or Thr
  Variant (10)..(10): Xaa in position 10 is Ile, Leu, Met or Val
  Variant (12)..(12): Xaa in position 12 is any or no amino acid
  Variant (14)..(14): Xaa in position 14 is any amino acid
  Variant (15)..(15): Xaa in position 15 is any or no amino acid
LXXXXXXXXXDXLXXG

SEQ ID NO: 113220 - DNA, 939 bp, Saccharomyces cerevisiae
  CDS (1)..(939)
atgtttagtaaatacctcgtaactgcatcttccctctttgtggctttgacctctgcagcatctaccgttgatctagatgctctgcttcttctaccaggggtcgagtcccacgacggcgttgatactgtattttcgaccaaagacttttatcaagtgtcattcgtcaaatccattgctcctgctatcgtaaacagctccgtaatcttccacgatgtttctcgtggtgtggctatgggcaatgtcaagagcagagcaagtatcttcaacccagaggaaacgtattacgattgggaacagtaccaagtagtaaataacggagactggcgaaccgaatgggcacctgcctctgactgcatttggagggaggagaaggataacagcgacgaaacaccggacagattccccatctcggtgccatataattggacgtcacagtactcaattgtagattatgacacagacgctaacgaagacaatttagatttcaggtttattaaatcattgctagataagaaaaattggttgaaaaaaattaaccagactgtttcccaatccagtattatggtagcaccaatgattaggccatacaatgtggtccagctttggtattcaaaagatatggtttgggcaaacgtccaaagacaatattgtagcggtgtttatccaggagggactcaatgtagcgcttggtccaggtactaccatgttgatgcacccacctgcgatgagcctgtcgcctcttacatgaccaaaatgttggaaaatgaggttcagtgtcccaatgagagaaacgcaactaccctagagcctctccgcctgaataagcagggagactctgatttttctttgactttcgaggaagaggaagaggaagagacaggatctaaatctctttggagtacattgaaaaaaattttctctaaaagaagtataagttga

SEQ ID NO: 113221 - protein, 312 aa, Saccharomyces cerevisiae
MFSKYLVTASSLFVALTSAASTVDLDALLLLPGVESHDGVDTVFSTKDFYQVSFVKSIAPAIVNSSVIFHDVSRGVAMGNVKSRASIFNPEETYYDWEQYQVVNNGDWRTEWAPASDCIWREEKDNSDETPDRFPISVPYNWTSQYSIVDYDTDANEDNLDFRFIKSLLDKKNWLKKINQTVSQSSIMVAPMIRPYNVVQLWYSKDMVWANVQRQYCSGVYPGGTQCSAWSRYYHVDAPTCDEPVASYMTKMLENEVQCPNERNATTLEPLRLNKQGDSDFSLTFEEEEEEETGSKSLWSTLKKIFSKRSIS

SEQ ID NO: 113222 - DNA, 26 bp, Artificial sequence
  primer
atgtttagtaaatacctcgtaactgc

SEQ ID NO: 113223 - DNA, 28 bp, Artificial sequence
  primer
tcaacttatacttcttttagagaaaatt

SEQ ID NO: 113224 - DNA, 1323 bp, Saccharomyces cerevisiae; identical to SEQ ID NO: 13266
  CDS (1)..(1323)

SEQ ID NO: 113225 - protein, 440 aa, Saccharomyces cerevisiae; identical to SEQ ID NO: 13267

SEQ ID NO: 113226 - DNA, 2047 bp, Oryza sativa; identical to SEQ ID NO: 12976
  CDS (243)..(1712)

SEQ ID NO: 113227 - protein, 489 aa, Oryza sativa; identical to SEQ ID NO: 12977

SEQ ID NO: 113228 - DNA, 1182 bp, Deinococcus radiodurans R1; identical to SEQ ID NO: 12990
  CDS (1)..(1182): transl_table=11

SEQ ID NO: 113229 - protein, 393 aa, Deinococcus radiodurans R1; identical to SEQ ID NO: 12991

SEQ ID NO: 113230 - DNA, 1458 bp, Magnaporthe grisea 70-15; identical to SEQ ID NO: 13010
  CDS (1)..(1458)

SEQ ID NO: 113231 - protein, 485 aa, Magnaporthe grisea 70-15; identical to SEQ ID NO: 13011

SEQ ID NO: 113232 - DNA, 1296 bp, Candida glabrata CBS 138; identical to SEQ ID NO: 13014
  CDS (1)..(1296)

SEQ ID NO: 113233 - protein, 431 aa, Candida glabrata CBS 138; identical to SEQ ID NO: 13015

SEQ ID NO: 113234 - DNA, 1314 bp, Candida glabrata CBS 138; identical to SEQ ID NO: 13016
  CDS (1)..(1314)

SEQ ID NO: 113235 - protein, 437 aa, Candida glabrata CBS 138; identical to SEQ ID NO: 13017

SEQ ID NO: 113236 - DNA, 1182 bp, Kluyveromyces lactis NRRL Y-1140; identical to SEQ ID NO: 13018
  CDS (1)..(1182)

SEQ ID NO: 113237 - protein, 393 aa, Kluyveromyces lactis NRRL Y-1140; identical to SEQ ID NO: 13019

SEQ ID NO: 113238 - DNA, 1326 bp, Kluyveromyces lactis NRRL Y-1140; identical to SEQ ID NO: 13020
  CDS (1)..(1326)

SEQ ID NO: 113239 - protein, 441 aa, Kluyveromyces lactis NRRL Y-1140; identical to SEQ ID NO: 13021

SEQ ID NO: 113240 - DNA, 1320 bp, Debaryomyces hansenii CBS767; identical to SEQ ID NO: 13022
  CDS (1)..(1320)

SEQ ID NO: 113241 - protein, 439 aa, Debaryomyces hansenii CBS767; identical to SEQ ID NO: 13023

SEQ ID NO: 113242 - DNA, 1263 bp, Debaryomyces hansenii CBS767; identical to SEQ ID NO: 13024
  CDS (1)..(1263)

SEQ ID NO: 113243 - protein, 420 aa, Debaryomyces hansenii CBS767; identical to SEQ ID NO: 13025

SEQ ID NO: 113244 - DNA, 1338 bp, Aspergillus nidulans FGSC A4; identical to SEQ ID NO: 13026
  CDS (1)..(1338)

SEQ ID NO: 113245 - protein, 445 aa, Aspergillus nidulans FGSC A4; identical to SEQ ID NO: 13027

SEQ ID NO: 113246 - DNA, 1254 bp, Candida albicans SC5314
  CDS (1)..(1254): transl_table=12
atgtctgttgcttctaatccatatggtccaaatccatctgatttcttatctaatgtgaataaatttgaagtcattgaatcaactttaagagaaggtgaacaatttgccaatgcctttttcaccactgaaaaaaaaattgaaattgctaaagctttagatgattttggggttgattatattgaattgacttcaccagtggcatctgaacaatcaagaagagattgtgaagccatttgtaaattgggtttaaaagccaaaatattgacacatattagatgtcatatggatgatgcccgtgttgccgttgaaactggggttgatggggttgatgtggttattggaacttcacaatttttaagacaatattctcatggtaaagatatgaattatattgctcaaagtgctattgaagtcattgaatttgttaaatctaaaggtattgaaattcgttttagttctgaagattcttttagatcagatattgttgatttattaaacatttatcgtactgttgataaaatcggagtgaatagagttggtattgccgatactgttggttgtgctaacccaagacaagtttatgaattggttaaaactttgaaatcggtggtttcttgtgatattgaatgtcatttccataacgatactggttgtgccattgctaatgcttatactgccttggaagccggtgctaaattgattgatgtttctgtgttgggtattggtgaaaggaatggtattactccattgggggcattaatggcaagaatgattactgctgatcgtgattatgtgttatctaaatataaattacacaaattgagagatttagaaaatttggttgctgatgccgtacaaattaatattccattcaataatccaattactggattctgtgcttttactcataaagctggtattcatgctaaagccatcttggccaatccatcaacatatgaaatcttgaatccaaatgatttcggtttaaccagatatattcactttgctaatagattgactggttggaatgccattaaatcaagagttgatcaattgaatttacatttgactgatgatcaagttaaagaagttacaaataaaattaaaaaattgggtgatgttagacaattgaacattgatgatgtcgattcaattattaaagatttccatgctgaacaaagcactaccaatactcctcttttaaaaccagtagaggatgatgaaggtccagaaattaaaaaacaaaaagtatag

SEQ ID NO: 113247 - protein, 417 aa, Candida albicans SC5314; identical to SEQ ID NO: 13029

SEQ ID NO: 113248 - DNA, 1287 bp, Candida albicans SC5314; identical to SEQ ID NO: 13030
  CDS (1)..(1287): transl_table=12

SEQ ID NO: 113249 - protein, 428 aa, Candida albicans SC5314; identical to SEQ ID NO: 13031

SEQ ID NO: 113250 - DNA, 1344 bp, Ustilago maydis 521; identical to SEQ ID NO: 13032
  CDS (1)..(1344)

SEQ ID NO: 113251 - protein, 447 aa, Ustilago maydis 521; identical to SEQ ID NO: 13033

SEQ ID NO: 113252 - DNA, 1398 bp, Aspergillus niger
  CDS (1)..(1398)
atgtgccccggtgcagaccacgagcccaatgggcaggccaacgtcgccaatggcaatggcaacaacggtgaacaccccggcttcactgccgttgagactcgccagaacccccacccctccgtctctcggaacccctacggccacaacgtcggtgtcaccgacttcctgagcaacgtctctcgcttccagatcatcgagagtaccctgcgtgagggtgagcagttcgccaacgctttcttcgacactgagaagaagatcgaaatcgccaaggccctcgatgagttcggtgttgactacattgagcttaccagcccctgcgcttccgagcagtcgagaaaggactgtgaggccatctgcaagcttggcctgaaggctaagatccttactcacatccgttgccacatggacgatgctcgcattgctgtcgagaccggtgtcgatggagtcgatgttgtcattggaacctcctcttacctccgtgagcactcccacggcaaggacatgacctacatcaagaacaccgccatcgaagtcatcgaattcgtcaagtccaagggcattgagatccgtttctccagtgaggactctttccgctctgacctcgtcgatctcctgtccatctactcggccgtcgacaaggtcggtgttaaccgtgttggtatcgccgataccgtcggctgcgcttctccccgtcaggtctacgagcttgtccgtgtcctgaggggtgttgttagctgtgacatcgaaacccacttccacaacgacactggttgcgctattgccaacgcttactgtgccctggaggctggtgccacccacattgacacctccgtcctcggtatcggtgagcgtaacggtatcactcccctcggtggtctcatggcccgcatgatggttgccgaccccgagtacgtcaagagcaagtacaggttggagaagctcaaggatatcgaggacctcgttgccgaggccgttgaggtcaacatccccttcaacaactacatcaccggtttctgcgctttcacccacaaggccggtatccacgccaaggccatcctcaacaaccccagcacctacgagatcatcaaccccgccgacttcggcatgtctcgttatgtccacttcgcttctcgtctgaccggctggaacgccatcaagtcgcgtgcccagcagctcaagatcgagatgaccgatgaccagtacaaggagtgcacggccaagatcaaggctctggccgatatccgccccattgctgtcgatgatgccgacagtatcatccgtgcctactaccgcaacctcaagctgggcgagaacaagcccctcctggacctcacggccgacgagcaggctcagttcgctgccaaggagaaggagctcgctgctcaggcttctgcctaa

SEQ ID NO: 113253 - protein, 465 aa, Aspergillus niger
MCPGADHEPNGQANVANGNGNNGEHPGFTAVETRQNPHPSVSRNPYGHNVGVTDFLSNVSRFQIIESTLREGEQFANAFFDTEKKIEIAKALDEFGVDYIELTSPCASEQSRKDCEAICKLGLKAKILTHIRCHMDDARIAVETGVDGVDVVIGTSSYLREHSHGKDMTYIKNTAIEVIEFVKSKGIEIRFSSEDSFRSDLVDLLSIYSAVDKVGVNRVGIADTVGCASPRQVYELVRVLRGVVSCDIETHFHNDTGCAIANAYCALEAGATHIDTSVLGIGERNGITPLGGLMARMMVADPEYVKSKYRLEKLKDIEDLVAEAVEVNIPFNNYITGFCAFTHKAGIHAKAILNNPSTYEIINPADFGMSRYVHFASRLTGWNAIKSRAQQLKIEMTDDQYKECTAKIKALADIRPIAVDDADSIIRAYYRNLKLGENKPLLDLTADEQAQFAAKEKELAAQASA

SEQ ID NO: 113254 - DNA, 1311 bp, Aspergillus oryzae; identical to SEQ ID NO: 13204
  CDS (1)..(1311)

SEQ ID NO: 113255 - protein, 436 aa, Aspergillus oryzae; identical to SEQ ID NO: 13205

SEQ ID NO: 113256 - DNA, 1326 bp, Aspergillus oryzae; identical to SEQ ID NO: 13206
  CDS (1)..(1326)

SEQ ID NO: 113257 - protein, 441 aa, Aspergillus oryzae; identical to SEQ ID NO: 13207

SEQ ID NO: 113258 - DNA, 1512 bp, Arabidopsis thaliana; identical to SEQ ID NO: 13222
  CDS (1)..(1512)

SEQ ID NO: 113259 - protein, 503 aa, Arabidopsis thaliana; identical to SEQ ID NO: 13223

SEQ ID NO: 113260 - DNA, 1131 bp, Thermus thermophilus
  CDS (1)..(1131): transl_table=11
atgcgggagtggaagattattgactccaccttacgggaaggggaacagtttgaaaaggcgaacttctccacccaagacaaggtggagatcgccaaggccctggacgagttcggcattgagtacattgaggtcaccaccccggtggcctccccccagtcccgcaaggacgccgaggtcctcgcctccttgggcctcaaggccaaggtggtgacccacatccagtgccgcctggacgcggccaaggtggcggtggagacgggagtccaggggattgacctcctcttcggcacgagcaagtacctccgggccgcccatgggcgggacatccccaggatcattgaggaggccaaagaggtgatcgcctacatccgcgaggcggccccccacgtggaggtgcgcttctccgccgaggacaccttccgctccgaggagcaggacctcctcgccgtctacgaggccgtggccccctacgtggaccgggtgggcctggcggacaccgtgggcgtggccacgccccggcaggtctacgccctggtgcgggaggtgcggcgggtggtggggcccagggtggacattgagttccacggccacaacgacaccgggtgcgccatcgccaacgcgtatgaggccattgaggccggggccacccacgtggacaccaccatcctggggatcggggagaggaacgggatcacgcctttgggggggttcctcgcccgcatgtacaccctccagcctgagtacgtgcgcaggaagtacaagctggagatgctccccgagctggaccggatggtggcccggatggtgggggtggagattcccttcaacaactacatcaccggggagacggccttcagccacaaggcggggatgcacctcaaggccatctacatcaaccccgaggcctacgagccctaccccccggaggtcttcggggtgaagcggaagctcatcatcgcctcgaggctcaccgggcggcacgccatcaaggcgcgggcggaggagctcggcctccactacggggaggaggagctccaccgggtcacccagcacatcaaggccctggccgaccggggccagctcaccctggaggagctggaccggatcctccgggagtggatcacggcgtga

SEQ ID NO: 113261 - protein, 376 aa, Thermus thermophilus; identical to SEQ ID NO: 12975

SEQ ID NO: 113262 - DNA, 1287 bp, Saccharomyces cerevisiae; identical to SEQ ID NO: 13258
  CDS (1)..(1287)

SEQ ID NO: 113263 - protein, 428 aa, Saccharomyces cerevisiae; identical to SEQ ID NO: 13259

SEQ ID NO: 113264 - DNA, 1425 bp, Penicillium chrysogenum; identical to SEQ ID NO: 13260
  CDS (1)..(1425)

SEQ ID NO: 113265 - protein, 474 aa, Penicillium chrysogenum; identical to SEQ ID NO: 13261

SEQ ID NO: 113266 - DNA, 1257 bp, Schizosaccharomyces pombe; identical to SEQ ID NO: 13262
  CDS (1)..(1257)

SEQ ID NO: 113267 - protein, 418 aa, Schizosaccharomyces pombe; identical to SEQ ID NO: 13263

SEQ ID NO: 113268 - DNA, 1341 bp, Yarrowia lipolytica; identical to SEQ ID NO: 13264
  CDS (1)..(1341)

SEQ ID NO: 113269 - protein, 446 aa, Yarrowia lipolytica; identical to SEQ ID NO: 13265

SEQ ID NO: 113270 - DNA, 1386 bp, Sulfolobus solfataricus; identical to SEQ ID NO: 13276
  CDS (1)..(1386): transl_table=11

SEQ ID NO: 113271 - protein, 461 aa, Sulfolobus solfataricus; identical to SEQ ID NO: 13277

SEQ ID NO: 113272 - DNA, 1557 bp, Methanococcus jannaschii; identical to SEQ ID NO: 13280
  CDS (1)..(1557): transl_table=11

SEQ ID NO: 113273 - protein, 518 aa, Methanococcus jannaschii; identical to SEQ ID NO: 13281

SEQ ID NO: 113274 - DNA, 1383 bp, Sulfolobus tokodaii; identical to SEQ ID NO: 13284
  CDS (1)..(1383): transl_table=11

SEQ ID NO: 113275 - protein, 460 aa, Sulfolobus tokodaii; identical to SEQ ID NO: 13285

SEQ ID NO: 113276 - DNA, 1908 bp, Oryza sativa; identical to SEQ ID NO: 13344
  CDS (1)..(1908)

SEQ ID NO: 113277 - protein, 635 aa, Oryza sativa; identical to SEQ ID NO: 13345

SEQ ID NO: 113278 - DNA, 1908 bp, Oryza sativa; identical to SEQ ID NO: 13346
  CDS (1)..(1908)

SEQ ID NO: 113279 - protein, 635 aa, Oryza sativa; identical to SEQ ID NO: 13347

SEQ ID NO: 113280 - DNA, 1770 bp, Oryza sativa; identical to SEQ ID NO: 13348
  CDS (1)..(1770)

SEQ ID NO: 113281 - protein, 589 aa, Oryza sativa; identical to SEQ ID NO: 13349

SEQ ID NO: 113282 - DNA, 1881 bp, Zea mays; identical to SEQ ID NO: 13352
  CDS (1)..(1881)

SEQ ID NO: 113283 - protein, 626 aa, Zea mays; identical to SEQ ID NO: 13353

SEQ ID NO: 113284 - DNA, 1518 bp, Brassica napus; identical to SEQ ID NO: 13354
  CDS (1)..(1518)

SEQ ID NO: 113285 - protein, 505 aa, Brassica napus; identical to SEQ ID NO: 13355

SEQ ID NO: 113286 - DNA, 1518 bp, Brassica napus; identical to SEQ ID NO: 13350
  CDS (1)..(1518)

SEQ ID NO: 113287 - protein, 505 aa, Brassica napus; identical to SEQ ID NO: 13351

SEQ ID NO: 113288 - DNA, 1698 bp, Glycine max
  CDS (1)..(1698)
atgccaaccaaaacctccactccaagttctcaatccccaaaactctctcatctccgccctcaatacattcccaaccacatccccgactcctcctacgtccgcatcttggacaccaccctccgcgacggcgaacaatccccgggagccaccatgacagcaaaggagaagctcgacatcgcacggcagctggtgaagctgggcgtggacatcatccagcccggcttcccttctgcgtcgaacagcgacttcatggccgtcaaaatgatagcacaagaggttggcaatgctgttgatgatgatggttatgtgcctgtcattgctggcttctgtcggtgcgttgagaaggacatttctactgcatgggaggctgtgaagtatgctaagaggccacggctttgtacttccatagctacgagccctattcacatggagcacaagctgagaaagagtaaagatcaggtgattcagattgccagggatatggtcaagtttgcacggagtttgggttgcaatgatattcagttcggtgctgaagatgctactagatcagatagagaatttctctatgaaattcttggagtagttattgaagccggggcaacaacagtgaacatagccgacactgtaggtatagtaatgccattggagttaggaaaattaattgttgatataaaagacaataccccaggaattgcgaatgttattatttcgactcattgccataatgatcttgggcttgctacggctaacaccatcgagggtgctcgtacaggtgcacggcaattagaagtaaccattaatgggattggggaaagggctggaaatgcgtcgttagaagaggttgtgatggccttggcatccaagggagatcatgccttaaatggtctatatacaagaatcaatacaagacacatattagagacaagcaagatggtcgaagaatactctggtatgcatttacaacctcacaagcctcttgttggagctaatgcatttgtccatgcaagtggcattcatcaggatggaatgcttaaacataaaggtacatatgaaacaatatctcctgaggaaattggacataaaagaaccaccagaattggtattgtgctagggaagcttagtggaagccaagctttgagaaagagacttgaagagcttggttatgatcttaaggaagatgaagttgatagtgtgttttggcaattcaaagcaatggctgagaaaaaaaaggttgtaactgatgttgacctcaaagcattagtatcatataaagcttttcatgcagaatctatctggaagcttggtgatttacaagtgacttgtggaactattggtctttctacagcaacagtaaaacttgttaatattgatggtagcacacatgttgcttgttctattggtataggagcagtggattcaacttacaaggccattaatctcattgtgaaggaacctacaaaacttttggattactcattgaattcagttacagaaggcattggtgtaaatgtcacagcacgtgttgtaatttgtagggagaacaatcatacatctacttatgctttcactgaagatgctaattatccaacatttagtgggattgcagcagaaatggatgttgttgtttccactgttaaggcttatctggttgcactaaacaagttgttacgatggaaggaatcatttagatgtgcttaa

SEQ ID NO: 113289 - protein, 565 aa, Glycine max; identical to SEQ ID NO: 13317

SEQ ID NO: 113290 - DNA, 1875 bp, Glycine max; identical to SEQ ID NO: 13356
  CDS (1)..(1875)

SEQ ID NO: 113291 - protein, 624 aa, Glycine max; identical to SEQ ID NO: 13357

SEQ ID NO: 113292 - DNA, 1875 bp, Glycine max; identical to SEQ ID NO: 13358
  CDS (1)..(1875)

SEQ ID NO: 113293 - protein, 624 aa, Glycine max; identical to SEQ ID NO: 13359

SEQ ID NO: 113294 - DNA, 1674 bp, Glycine max; identical to SEQ ID NO: 13360
  CDS (1)..(1674)

SEQ ID NO: 113295 - protein, 557 aa, Glycine max; identical to SEQ ID NO: 13361

SEQ ID NO: 113296 - DNA, 1881 bp, Zea mays; identical to SEQ ID NO: 13362
  CDS (1)..(1881)

SEQ ID NO: 113297 - protein, 626 aa, Zea mays; identical to SEQ ID NO: 13363

SEQ ID NO: 113298 - DNA, 1881 bp, Zea mays; identical to SEQ ID NO: 13364
  CDS (1)..(1881)

SEQ ID NO: 113299 - protein, 626 aa, Zea mays; identical to SEQ ID NO: 13365

SEQ ID NO: 113300 - DNA, 1926 bp, Zea mays; identical to SEQ ID NO: 13366
  CDS (1)..(1926)

SEQ ID NO: 113301 - protein, 641 aa, Zea mays; identical to SEQ ID NO: 13367

SEQ ID NO: 113302 - DNA, 1881 bp, Zea mays; identical to SEQ ID NO: 13368
  CDS (1)..(1881)

SEQ ID NO: 113303 - protein, 626 aa, Zea mays; identical to SEQ ID NO: 13369

SEQ ID NO: 113304 - DNA, 26 bp, Artificial sequence
  primer
atgtctgaaaataacgaattccagag

SEQ ID NO: 113305 - DNA, 25 bp, Artificial sequence
  primer
ctatttggtgacctttgccttttta

SEQ ID NO: 113306 - protein, 389 aa, Artificial sequence
  consensus sequence
  Variant (4)..(4): Xaa in position 4 is any amino acid
  Variant (8)..(10): Xaa in position 8 to 10 is any amino acid
  Variant (12)..(17): Xaa in position 12 to 17 is any amino acid
  Variant (19)..(21): Xaa in position 19 to 21 is any amino acid
  Variant (23)..(24): Xaa in position 23 to 24 is any amino acid
  Variant (26)..(28): Xaa in position 26 to 28 is any amino acid
  Variant (32)..(32): Xaa in position 32 is any amino acid
  Variant (35)..(37): Xaa in position 35 to 37 is any amino acid
  Variant (39)..(40): Xaa in position 39 to 40 is any amino acid
  Variant (42)..(50): Xaa in position 42 to 50 is any amino acid
  Variant (52)..(59): Xaa in position 52 to 59 is any amino acid
  Variant (60)..(73): Xaa in position 60 to 73 is any or no amino acid
  Variant (75)..(78): Xaa in position 75 to 78 is any amino acid
  Variant (81)..(83): Xaa in position 81 to 83 is any amino acid
  Variant (85)..(87): Xaa in position 85 to 87 is any amino acid
  Variant (89)..(89): Xaa in position 89 is any amino acid
  Variant (91)..(99): Xaa in position 91 to 99 is any amino acid
  Variant (100)..(103): Xaa in position 100 to 103 is any or no amino acid
  Variant (105)..(105): Xaa in position 105 is any amino acid
  Variant (108)..(115): Xaa in position 108 to 115 is any amino acid
  Variant (116)..(116): Xaa in position 116 is any or no amino acid
  Variant (118)..(125): Xaa in position 118 to 125 is any amino acid
  Variant (127)..(127): Xaa in position 127 is any amino acid
  Variant (129)..(134): Xaa in position 129 to 134 is any amino acid
  Variant (136)..(136): Xaa in position 136 is any amino acid
  Variant (138)..(141): Xaa in position 138 to 141 is any amino acid
  Variant (142)..(143): Xaa in position 142 to 143 is any or no amino acid
  Variant (146)..(146): Xaa in position 146 is any amino acid
  Variant (149)..(150): Xaa in position 149 to 150 is any amino acid
  Variant (153)..(156): Xaa in position 153 to 156 is any amino acid
  Variant (158)..(159): Xaa in position 158 to 159 is any amino acid
  Variant (161)..(163): Xaa in position 161 to 163 is any amino acid
  Variant (165)..(165): Xaa in position 165 is any amino acid
  Variant (167)..(167): Xaa in position 167 is any amino acid
  Variant (169)..(173): Xaa in position 169 to 173 is any amino acid
  Variant (175)..(175): Xaa in position 175 is any amino acid
  Variant (180)..(182): Xaa in position 180 to 182 is any amino acid
  Variant (184)..(188): Xaa in position 184 to 188 is any amino acid
  Variant (190)..(200): Xaa in position 190 to 200 is any amino acid
  Variant (201)..(204): Xaa in position 201 to 204 is any or no amino acid
  Variant (206)..(207): Xaa in position 206 to 207 is any amino acid
  Variant (209)..(210): Xaa in position 209 to 210 is any amino acid
  Variant (213)..(213): Xaa in position 213 is any amino acid
  Variant (215)..(215): Xaa in position 215 is any amino acid
  Variant (217)..(217): Xaa in position 217 is any amino acid
  Variant (220)..(226): Xaa in position 220 to 226 is any amino acid
  Variant (229)..(236): Xaa in position 229 to 236 is any amino acid
  Variant (242)..(242): Xaa in position 242 is any amino acid
  Variant (244)..(246): Xaa in position 244 to 246 is any amino acid
  Variant (248)..(260): Xaa in position 248 to 260 is any amino acid
  Variant (261)..(265): Xaa in position 261 to 265 is any or no amino acid
  Variant (267)..(277): Xaa in position 267 to 277 is any amino acid
  Variant (278)..(280): Xaa in position 278 to 280 is any or no amino acid
  Variant (282)..(294): Xaa in position 282 to 294 is any amino acid
  Variant (296)..(296): Xaa in position 296 is any amino acid
  Variant (298)..(299): Xaa in position 298 to 299 is any amino acid
  Variant (302)..(302): Xaa in position 302 is any amino acid
  Variant (304)..(305): Xaa in position 304 to 305 is any amino acid
  Variant (309)..(312): Xaa in position 309 to 312 is any amino acid
  Variant (314)..(317): Xaa in position 314 to 317 is any amino acid
  Variant (322)..(323): Xaa in position 322 to 323 is any amino acid
  Variant (325)..(325): Xaa in position 325 is any amino acid
  Variant (327)..(327): Xaa in position 327 is any amino acid
  Variant (329)..(337): Xaa in position 329 to 337 is any amino acid
  Variant (338)..(341): Xaa in position 338 to 341 is any or no amino acid
  Variant (343)..(343): Xaa in position 343 is any amino acid
  Variant (345)..(346): Xaa in position 345 to 346 is any amino acid
  Variant (348)..(354): Xaa in position 348 to 354 is any amino acid
  Variant (356)..(360): Xaa in position 356 to 360 is any amino acid
  Variant (362)..(371): Xaa in position 362 to 371 is any amino acid
  Variant (372)..(375): Xaa in position 372 to 375 is any or no amino acid
  Variant (377)..(387): Xaa in position 377 to 387 is any amino acid
  Variant (388)..(388): Xaa in position 388 is any or no amino acid
TLRXGEQXXXAXXXXXXKXXXAXXLXXXGVDXIEXXXPXXSXXXXXXXXXIXXXXXXXXXXXXXXXXXXXXXXIXXXXRCXXXDXXXAXEXXXXXXXXXXXXXIXTSXXXXXXXXXKXXXXXXXXAXEXXXXXXSXGXXXXXXFSXEDXXRSXXXXLXXIXXXVXKXGXXXXXIXDTVGXXXPXXXXXLXXXXXXXXXXXXXXXIXXHXXNDXGXAXANXXXXXXXGAXXXXXXXXGIGERXGXXXLXXXXXXXXXXXXXXXXXXYXXXXXXXXXXXXXXVXXXXXXXXXXXXXIXGXXAFXHXXGIHXXXXLXXXXTYEIXXPXDXGXXXXXXXXXXXXXLXGXXAXXXXXXXLXXXXXDXXXXXXXXXXXXXXKXXXXXXXXXXXXD

SEQ ID NO: 113307 - protein, 32 aa, Artificial sequence
  protein pattern
  Variant (2)..(4): Xaa in position 2 to 4 is any amino acid
  Variant (6)..(6): Xaa in position 6 is Ala, Thr or Val
  Variant (8)..(8): Xaa in position 8 is Glu or Lys
  Variant (9)..(9): Xaa in position 9 is Ala or Ser
  Variant (13)..(13): Xaa in position 13 is Ala or Gln
  Variant (14)..(14): Xaa in position 14 is Asp or Lys
  Variant (15)..(15): Xaa in position 15 is Ala or Gly
  Variant (16)..(16): Xaa in position 16 is Ile or Met
  Variant (18)..(20): Xaa in position 18 to 20 is any amino acid
  Variant (21)..(21): Xaa in position 21 is Gly or Ser
  Variant (26)..(26): Xaa in position 26 is Ile or Leu
  Variant (27)..(27): Xaa in position 27 is any amino acid
  Variant (29)..(29): Xaa in position 29 is any amino acid
  Variant (31)..(31): Xaa in position 31 is Phe, Ile or Val
  Variant (32)..(32): Xaa in position 32 is Gly or Ser
GXXXFXHXXGIHXXXXLXXXXTYEIXXPXDXX

SEQ ID NO: 113308 - protein, 54 aa, Artificial sequence
  protein pattern
  Variant (2)..(3): Xaa in position 2 to 3 is any amino acid
  Variant (4)..(5): Xaa in position 4 to 5 is any or no amino acid
  Variant (7)..(8): Xaa in position 7 to 8 is any amino acid
  Variant (11)..(11): Xaa in position 11 is any amino acid
  Variant (13)..(13): Xaa in position 13 is any amino acid
  Variant (15)..(15): Xaa in position 15 is any amino acid
  Variant (18)..(18): Xaa in position 18 is Ala, Ser or Thr
  Variant (19)..(20): Xaa in position 19 to 20 is any amino acid
  Variant (21)..(21): Xaa in position 21 is Ala or Gly
  Variant (22)..(22): Xaa in position 22 is Ala, Ile, Leu or Val
  Variant (23)..(23): Xaa in position 23 is any amino acid
  Variant (24)..(24): Xaa in position 24 is Ala, Gly, Ser or Thr
  Variant (27)..(28): Xaa in position 27 to 28 is any amino acid
  Variant (29)..(29): Xaa in position 29 is Ile, Leu or Val
  Variant (30)..(30): Xaa in position 30 is Asp, Glu or His
  Variant (31)..(31): Xaa in position 31 is Cys, Thr or Val
  Variant (32)..(32): Xaa in position 32 is Ala, Ser or Thr
  Variant (33)..(33): Xaa in position 33 is Ile or Val
  Variant (34)..(34): Xaa in position 34 is any amino acid
  Variant (36)..(36): Xaa in position 36 is Ile or Leu
  Variant (40)..(40): Xaa in position 40 is Ala, Gly, Asn or Ser
  Variant (42)..(42): Xaa in position 42 is any amino acid
  Variant (43)..(43): Xaa in position 43 is Ala, Pro or Thr
  Variant (44)..(44): Xaa in position 44 is Ala, Pro or Ser
  Variant (46)..(46): Xaa in position 46 is Glu or Gly
  Variant (47)..(47): Xaa in position 47 is Ala, Glu or Gly
  Variant (48)..(48): Xaa in position 48 is Phe, Leu or Val
  Variant (49)..(49): Xaa in position 49 is Ile, Leu, Met or Val
  Variant (50)..(51): Xaa in position 50 to 51 is any amino acid
  Variant (52)..(52): Xaa in position 52 is Ile, Leu or Met
  Variant (53)..(53): Xaa in position 53 is any amino acid
  Variant (54)..(54): Xaa in position 54 is Ala, Cys, Ser, Thr or Val
IXXXXHXXNDXGXAXANXXXXXXXGAXXXXXXXXGXGERXGXXXLXXXXXXXXX

SEQ ID NO: 113309 - protein, 54 aa, Artificial sequence
  protein pattern
  Variant (4)..(5): Xaa in position 4 to 5 is any or no amino acid
  Variant (7)..(8): Xaa in position 7 to 8 is any or no amino acid
  Variant (10)..(10): Xaa in position 10 is any amino acid
  Variant (11)..(11): Xaa in position 11 is Ala or Pro
  Variant (12)..(12): Xaa in position 12 is Gly, Asn or Ser
  Variant (14)..(14): Xaa in position 14 is any amino acid
  Variant (15)..(15): Xaa in position 15 is Phe or Met
  Variant (16)..(16): Xaa in position 16 is Asp, Ser, Thr or Val
  Variant (17)..(17): Xaa in position 17 is Ala, Ser or Thr
  Variant (18)..(19): Xaa in position 18 to 19 is any amino acid
  Variant (21)..(21): Xaa in position 21 is Ile or Leu
  Variant (22)..(22): Xaa in position 22 is any amino acid
  Variant (23)..(23): Xaa in position 23 is Ile or Val
  Variant (25)..(25): Xaa in position 25 is Lys or Arg
  Variant (26)..(26): Xaa in position 26 is Ala or Gln
  Variant (28)..(28): Xaa in position 28 is Ala, Asp or Val
  Variant (29)..(29): Xaa in position 29 is any amino acid
  Variant (30)..(30): Xaa in position 30 is Phe or Leu
  Variant (34)..(34): Xaa in position 34 is any amino acid
  Variant (36)..(36): Xaa in position 36 is Glu or Gln
  Variant (37)..(37): Xaa in position 37 is Ala, Gly, Leu or Pro
  Variant (38)..(38): Xaa in position 38 is Gly or Thr
  Variant (39)..(39): Xaa in position 39 is any amino acid
  Variant (41)..(41): Xaa in position 41 is Ala, Cys, Ser or Val
  Variant (42)..(42): Xaa in position 42 is Ala or Ser
  Variant (44)..(44): Xaa in position 44 is any amino acid
  Variant (45)..(45): Xaa in position 45 is Asp, Glu, Gln or Ser
  Variant (46)..(46): Xaa in position 46 is Asp or Ser
  Variant (47)..(48): Xaa in position 47 to 48 is any amino acid
  Variant (49)..(49): Xaa in position 49 is Ala or Asp
  Variant (50)..(50): Xaa in position 50 is Cys or Val
  Variant (51)..(52): Xaa in position 51 to 52 is any amino acid
  Variant (54)..(54): Xaa in position 54 is Ala or Cys
TLRXXEXXQXXXAXXXXXXKXXXAXXLXXXGVDXIXXXXPXXSXXXXXXXXXIX

SEQ ID NO: 113310 - protein, 26 aa, Artificial sequence
  protein pattern
  Variant (2)..(3): Xaa in position 2 to 3 is any amino acid
  Variant (4)..(4): Xaa in position 4 is Ala, Ile, Leu or Val
  Variant (6)..(6): Xaa in position 6 is Ala or Val
  Variant (7)..(8): Xaa in position 7 to 8 is any amino acid
  Variant (9)..(9): Xaa in position 9 is Leu or Val
  Variant (10)..(10): Xaa in position 10 is Gly or Asn
  Variant (11)..(11): Xaa in position 11 is Ile or Leu
  Variant (12)..(12): Xaa in position 12 is Ala, Gly or Pro
  Variant (17)..(17): Xaa in position 17 is any amino acid
  Variant (18)..(18): Xaa in position 18 is Ala, Asn, Thr or Val
  Variant (19)..(19): Xaa in position 19 is any amino acid
  Variant (21)..(21): Xaa in position 21 is any amino acid
  Variant (22)..(22): Xaa in position 22 is Glu or Gln
  Variant (23)..(23): Xaa in position 23 is Phe, Ile, Leu or Val
  Variant (24)..(25): Xaa in position 24 to 25 is any amino acid
VXXXGXXXXXXXDTVGXXXPXXXXXL

SEQ ID NO: 113311 - protein, 17 aa, Artificial sequence
  protein pattern
  Variant (2)..(3): Xaa in position 2 to 3 is any or no amino acid
  Variant (6)..(6): Xaa in position 6 is Ala, Pro, Ser or Thr
  Variant (9)..(9): Xaa in position 9 is Ala, Ser or Thr
  Variant (10)..(10): Xaa in position 10 is any amino acid
  Variant (13)..(13): Xaa in position 13 is Asp, Glu or Asn
  Variant (14)..(16): Xaa in position 14 to 16 is any amino acid
EXXFSXEDXXRSXXXXL

SEQ ID NO: 113312 - protein, 20 aa, Artificial sequence
  protein pattern
  Variant (2)..(2): Xaa in position 2 is Ser or Thr
  Variant (4)..(5): Xaa in position 4 to 5 is any amino acid
  Variant (7)..(7): Xaa in position 7 is Ile or Val
  Variant (8)..(8): Xaa in position 8 is Lys or Arg
  Variant (9)..(9): Xaa in position 9 is Ala, Asp, Gly or Ser
  Variant (10)..(10): Xaa in position 10 is Lys or Arg
  Variant (11)..(12): Xaa in position 11 to 12 is any amino acid
  Variant (13)..(13): Xaa in position 13 is Glu or Gln
  Variant (15)..(18): Xaa in position 15 to 18 is any amino acid
  Variant (19)..(19): Xaa in position 19 is Gly, Ser or Thr
  Variant (20)..(20): Xaa in position 20 is Asp or Glu
LXGXXAXXXXXXXLXXXXXX

SEQ ID NO: 113313 - DNA, 504 bp, Saccharomyces cerevisiae
  CDS (1)..(504)
atgtctactattccctcagaaatcatcaattggaccatcttaaatgaaattatatctatggatgacgatgattccgatttttctaaaggtctaattattcaatttatcgaccaggcacaaacaacttttgctcaaatgcaacgacagctggacggtgaaaaaaatcttaccgaattagacaatctgggccattttttaaagggttcttctgctgcattaggcttacaaagaattgcctgggtttgtgaaagaattcaaaacttgggaagaaaaatggaacatttcttccccaacaagaccgaattggtcaacactctgagcgataaatcgattattaatggaatcaatattgatgaagatgacgaggaaataaagatacaagtggacgataaagacgaaaattccatatatctcatcttgatagcaaaagctttgaaccagtctaggttggagttcaaactggcgagaattgagttatctaaatattacaacacaaacctataa

SEQ ID NO: 113314 - protein, 167 aa, Saccharomyces cerevisiae
MSTIPSEIINWTILNEIISMDDDDSDFSKGLIIQFIDQAQTTFAQMQRQLDGEKNLTELDNLGHFLKGSSAALGLQRIAWVCERIQNLGRKMEHFFPNKTELVNTLSDKSIINGINIDEDDEEIKIQVDDKDENSIYLILIAKALNQSRLEFKLARIELSKYYNTNL

SEQ ID NO: 113315 - DNA, 486 bp, Candida glabrata CBS 138
  CDS (1)..(486)
atgacgacagtgccttctgagatcattgattggactatattgaatgagattgtttctatggatgaagatgatccagacttctccaaaggattgattattcagtacattgatcaagcaacaacaacgtttagtgagatggataatcttctaggaagtatagataatttgaaggaactagataatttgggtcactttttgaaggggtcatcggcagccttgggacttcaaagaattgcctgggcttgtgaacgtattcaaaatttgggtcgtaaagctgaagatagtttcccagagaggaccgatatcttgaagaatcttcctgacaaggtctcagtggatgaagaagacaagaaagaagagaaagaagaagtgcctcaagatgacaagaagtacttgtatctgataaagaaagcactagcgcaagcgagaatagagtttaagctagcacgtagggaactttcagattactataagactgagttgtaa

SEQ ID NO: 113316 - protein, 161 aa, Candida glabrata CBS 138
MTTVPSEIIDWTILNEIVSMDEDDPDFSKGLIIQYIDQATTTFSEMDNLLGSIDNLKELDNLGHFLKGSSAALGLQRIAWACERIQNLGRKAEDSFPERTDILKNLPDKVSVDEEDKKEEKEEVPQDDKKYLYLIKKALAQARIEFKLARRELSDYYKTEL

SEQ ID NO: 113317 - DNA, 408 bp, Kluyveromyces lactis NRRL Y-1140
  CDS (1)..(408)
atgtcccaaacacctagaattccagataaagtgatcaattgggatattctcaatgaaattgtttccatggatgaagatgatgctggcttttcacaatccttactaatacaattctttgagcaagcgacttctacctttaaccaaatcgaacagcacatcaaaactgataagaacttggatcaactgggacagctgggacactttttgaaaggatcttcggcatccctaggtctacagaggattgcatgggtttgtgagagaattcaaaattacggacagaaaagagaaggatccggtattacagacgataattatatacaattgattcaaaattctctggatctggcaaggaaagagtttgactcggccaagagcgaactagggcagtactacaaaactcaattttaa

SEQ ID NO: 113318 - protein, 135 aa, Kluyveromyces lactis NRRL Y-1140
MSQTPRIPDKVINWDILNEIVSMDEDDAGFSQSLLIQFFEQATSTFNQIEQHIKTDKNLDQLGQLGHFLKGSSASLGLQRIAWVCERIQNYGQKREGSGITDDNYIQLIQNSLDLARKEFDSAKSELGQYYKTQF

SEQ ID NO: 113319 - DNA, 441 bp, Debaryomyces hansenii CBS767
  CDS (1)..(441)
atgtcagaagcaaaaacaaaggaattacaagattcagggttaattgagtggtctgttttctccgaattagtggccatggatgaagatgaagaaggattttccaaatcattatttcaaaccttcgttgatcaagtgttagaaacatttaaagaaattgatgagaatttgaaaactaagaatttcgacaaaatttcaggattaggccattacttgaagggatcggctgctgcgttagggttggaaaagatttcatctcagtgtgaaaggatccaaaattacggtcataaggttaactttgataattttaaattaaaggacaatgatgaccagaaggatgacgaattttggattaagttgatcgaggatgcattaaataaggccagagatggtttcgccaaatcgagaaaggttttaaacaactattttgatgatgaattttaa

SEQ ID NO: 113320 - protein, 146 aa, Debaryomyces hansenii CBS767
MSEAKTKELQDSGLIEWSVFSELVAMDEDEEGFSKSLFQTFVDQVLETFKEIDENLKTKNFDKISGLGHYLKGSAAALGLEKISSQCERIQNYGHKVNFDNFKLKDNDDQKDDEFWIKLIEDALNKARDGFAKSRKVLNNYFDDEF

SEQ ID NO: 113321 - DNA, 555 bp, Candida albicans SC5314
  CDS (1)..(555): transl_table=12
atgtcagaagataaattacaaaaattacaagactcaggacttgtcgactgggcagtgtttagtgaaatagtgaccatggacgaggatgaagaagggttttccaaatcactagtagaagtctttgttagccaagtggaagaaacatttgaagaaattgataaatatttaaaggaaaagaatttggagaaattgtcatcgtcgggtcattttttgaaaggatctgctgctgctttggggttgaccaaaatttcaaatcaatgcgaacgaattcaaaactatggccataagatcaactttgacaattttcaattggaagatataaaaactaaaggcgattcggccgtaagtgcggaaaatgtggccgttaatgatggtgaaactaatccagaaaatggatccaatggcaacgaaacaagtaataacaaaacaaatactagcaatataccggatgaatcaagcgatgacttttggatagcattaattgaggatgcattagccaaggcgagagatggattcgaccaatctagaagagcattggacgaatattacgaatag

SEQ ID NO: 113322 - protein, 184 aa, Candida albicans SC5314
MSEDKLQKLQDSGLVDWAVFSEIVTMDEDEEGFSKSLVEVFVSQVEETFEEIDKYLKEKNLEKLSSSGHFLKGSAAALGLTKISNQCERIQNYGHKINFDNFQLEDIKTKGDSAVSAENVAVNDGETNPENGSNGNETSNNKTNTSNIPDESSDDFWIALIEDALAKARDGFDQSRRALDEYYE

SEQ ID NO: 113323 - DNA, 618 bp, Ustilago maydis 521
  CDS (1)..(618)
atgtcgtccccgatcgtcactttggcgactcttcccgctgcgttccgttgcgacatgcgattgatgctcaaacagggcgtcgacgcagccagcggctcagcaggcgacctttcgccattgatcatcgacatggacatcttctcgcaattgctcgagatggacgacgaggacgaccgcgaattctccaagagcatcgtgtggaactactttgaccaagccatcaccactttcaaagagatggacgtggcgctagacacaaaaaatcttacggagctgtcgacgctcggtcactttctcaaaggctcctccgcagccgtgggcgtaatcaaggtgcgcgatagctgcgagcacatgcagcactatggcaagtgccatggcgaggatggtatcagcgatttgactgaagatgaggcgctcaagaagctcactgcaacgcttagggatgttaaggtacagtacagggaggcggctaaggcgttgaaggcgttttacgacgagcaggatgcggaggaggctaacgaagccaacgacgacgacgacgacgacgaggaacagcagcaagacgtaccaaaacatgacgcagagtcaaatgatcctgacgtcgcaccgcccgcttaa

SEQ ID NO: 113324 - protein, 205 aa, Ustilago maydis 521
MSSPIVTLATLPAAFRCDMRLMLKQGVDAASGSAGDLSPLIIDMDIFSQLLEMDDEDDREFSKSIVWNYFDQAITTFKEMDVALDTKNLTELSTLGHFLKGSSAAVGVIKVRDSCEHMQHYGKCHGEDGISDLTEDEALKKLTATLRDVKVQYREAAKALKAFYDEQDAEEANEANDDDDDDEEQQQDVPKHDAESNDPDVAPPA

SEQ ID NO: 113325 - DNA, 25 bp, Artificial sequence
  primer
atgtctactattccctcagaaatca

SEQ ID NO: 113326 - DNA, 28 bp, Artificial sequence
  primer
ttataggtttgtgttgtaatatttagat

SEQ ID NO: 113327 - protein, 184 aa, Artificial sequence
  consensus sequence
  Variant (2)..(8): Xaa in position 2 to 8 is any amino acid
  Variant (9)..(14): Xaa in position 9 to 14 is any or no amino acid
  Variant (16)..(16): Xaa in position 16 is any amino acid
  Variant (18)..(21): Xaa in position 18 to 21 is any amino acid
  Variant (23)..(25): Xaa in position 23 to 25 is any amino acid
  Variant (28)..(28): Xaa in position 28 is any amino acid
  Variant (31)..(33): Xaa in position 31 to 33 is any amino acid
  Variant (37)..(37): Xaa in position 37 is any amino acid
  Variant (39)..(44): Xaa in position 39 to 44 is any amino acid
  Variant (46)..(48): Xaa in position 46 to 48 is any amino acid
  Variant (51)..(56): Xaa in position 51 to 56 is any amino acid
  Variant (58)..(59): Xaa in position 58 to 59 is any amino acid
  Variant (60)..(60): Xaa in position 60 is any or no amino acid
  Variant (64)..(65): Xaa in position 64 to 65 is any amino acid
  Variant (67)..(68): Xaa in position 67 to 68 is any amino acid
  Variant (77)..(77): Xaa in position 77 is any amino acid
  Variant (83)..(84): Xaa in position 83 to 84 is any amino acid
  Variant (86)..(88): Xaa in position 86 to 88 is any amino acid
  Variant (95)..(95): Xaa in position 95 is any amino acid
  Variant (97)..(97): Xaa in position 97 is any amino acid
  Variant (99)..(105): Xaa in position 99 to 105 is any amino acid
  Variant (106)..(125): Xaa in position 106 to 125 is any or no amino acid
  Variant (127)..(131): Xaa in position 127 to 131 is any amino acid
  Variant (132)..(161): Xaa in position 132 to 161 is any or no amino acid
  Variant (164)..(166): Xaa in position 164 to 166 is any amino acid
  Variant (168)..(170): Xaa in position 168 to 170 is any amino acid
  Variant (172)..(173): Xaa in position 172 to 173 is any amino acid
  Variant (175)..(180): Xaa in position 175 to 180 is any amino acid
  Variant (182)..(183): Xaa in position 182 to 183 is any amino acid
MXXXXXXXXXXXXXIXWXXXXEXXXMDXEDXXXFSKXLXXXXXXQXXXTFXXXXXXLXXXKNLXXLXXLGHFLKGSXAALGLXXIXXXCERIQNXGXKXXXXXXXXXXXXXXXXXXXXXXXXXXXDXXXXXXXXXXXXXXXXXXXXXXXXXXXXXXXXXXXLIXXXLXXXRXXFXXXXXXLXXY

SEQ ID NO: 113328 - protein, 39 aa, Artificial sequence
  protein pattern
  Variant (2)..(2): Xaa in position 2 is Phe or Leu
  Variant (3)..(4): Xaa in position 3 to 4 is any amino acid
  Variant (5)..(5): Xaa in position 5 is Ile or Leu
  Variant (6)..(6): Xaa in position 6 is Asp, Gly or Ser
  Variant (7)..(7): Xaa in position 7 is Gly, Asn, Gln or Ser
  Variant (8)..(8): Xaa in position 8 is any amino acid
  Variant (11)..(11): Xaa in position 11 is Phe or Tyr
  Variant (16)..(16): Xaa in position 16 is Ala or Ser
  Variant (18)..(18): Xaa in position 18 is Ala or Ser
  Variant (22)..(22): Xaa in position 22 is Glu, Gln or Thr
  Variant (23)..(23): Xaa in position 23 is Lys or Arg
  Variant (25)..(25): Xaa in position 25 is Ala or Ser
  Variant (26)..(27): Xaa in position 26 to 27 is any amino acid
  Variant (34)..(34): Xaa in position 34 is any amino acid
  Variant (36)..(36): Xaa in position 36 is any amino acid
  Variant (38)..(38): Xaa in position 38 is any amino acid
  Variant (39)..(39): Xaa in position 39 is Glu or Asn
NXXXXXXXGHXLKGSXAXLGLXXIXXXCERIQNXGXKXX

SEQ ID NO: 113329 - protein, 26 aa, Artificial sequence
  protein pattern
  Variant (2)..(3): Xaa in position 2 to 3 is any or no amino acid
  Variant (5)..(6): Xaa in position 5 to 6 is any amino acid
  Variant (7)..(7): Xaa in position 7 is Ala or Ser
  Variant (9)..(9): Xaa in position 9 is Ala, Asp or Asn
  Variant (10)..(10): Xaa in position 10 is any amino acid
  Variant (11)..(11): Xaa in position 11 is Ala or Ser
  Variant (13)..(13): Xaa in position 13 is any amino acid
  Variant (14)..(14): Xaa in position 14 is Glu or Gly
  Variant (16)..(17): Xaa in position 16 to 17 is any amino acid
  Variant (18)..(18): Xaa in position 18 is Ala or Ser
  Variant (19)..(19): Xaa in position 19 is Lys or Arg
  Variant (20)..(21): Xaa in position 20 to 21 is any amino acid
  Variant (23)..(23): Xaa in position 23 is Asp, Gly, Asn or Ser
  Variant (24)..(24): Xaa in position 24 is any amino acid
  Variant (26)..(26): Xaa in position 26 is Phe or Tyr
LXXIXXXLXXXRXXFXXXXXXLXXYX

SEQ ID NO: 113330 - DNA, 1113 bp, Saccharomyces cerevisiae; identical to SEQ ID NO: 75774
  CDS (1)..(1113)

SEQ ID NO: 113331 - protein, 370 aa, Saccharomyces cerevisiae; identical to SEQ ID NO: 75775

SEQ ID NO: 113332 - DNA, 1092 bp, Mesorhizobium loti MAFF303099; identical to SEQ ID NO: 75292
  CDS (1)..(1092): transl_table=11

SEQ ID NO: 113333 - protein, 363 aa, Mesorhizobium loti MAFF303099; identical to SEQ ID NO: 75293

SEQ ID NO: 113334 - DNA, 1086 bp, Pasteurella multocida subsp. multocida str. Pm70; identical to SEQ ID NO: 75296
  CDS (1)..(1086): transl_table=11

SEQ ID NO: 113335 - protein, 361 aa, Pasteurella multocida subsp. multocida str. Pm70; identical to SEQ ID NO: 75297

SEQ ID NO: 113336 - DNA, 1056 bp, Neisseria meningitidis MC58; identical to SEQ ID NO: 75308
  CDS (1)..(1056): transl_table=11

SEQ ID NO: 113337 - protein, 351 aa, Neisseria meningitidis MC58; identical to SEQ ID NO: 75309

SEQ ID NO: 113338 - DNA, 1056 bp, Neisseria meningitidis Z2491; identical to SEQ ID NO: 75310
  CDS (1)..(1056): transl_table=11

SEQ ID NO: 113339 - protein, 351 aa, Neisseria meningitidis Z2491; identical to SEQ ID NO: 75311

SEQ ID NO: 113340 - DNA, 1071 bp, Escherichia coli O157:H7 EDL933; identical to SEQ ID NO: 88899
  CDS (1)..(1071): transl_table=11

SEQ ID NO: 113341 - protein, 356 aa, Escherichia coli O157:H7 EDL933; identical to SEQ ID NO: 88900

SEQ ID NO: 113342 - DNA, 1071 bp, Yersinia pestis CO92; identical to SEQ ID NO: 75322
  CDS (1)..(1071): transl_table=11

SEQ ID NO: 113343 - protein, 356 aa, Yersinia pestis CO92; identical to SEQ ID NO: 75323

SEQ ID NO: 113344 - DNA, 1110 bp, Caulobacter crescentus CB15; identical to SEQ ID NO: 75324
  CDS (1)..(1110): transl_table=11

SEQ ID NO: 113345 - protein, 369 aa, Caulobacter crescentus CB15; identical to SEQ ID NO: 75325

SEQ ID NO: 113346 - DNA, 1053 bp, Salmonella typhimurium LT2; identical to SEQ ID NO: 75326
  CDS (1)..(1053): transl_table=11

SEQ ID NO: 113347 - protein, 350 aa, Salmonella typhimurium LT2; identical to SEQ ID NO: 75327

SEQ ID NO: 113348 - DNA, 1179 bp, Ralstonia solanacearum GMI1000; identical to SEQ ID NO: 75330
  CDS (1)..(1179): transl_table=11

SEQ ID NO: 113349 - protein, 392 aa, Ralstonia solanacearum GMI1000; identical to SEQ ID NO: 75331

SEQ ID NO: 113350 - DNA, 1080 bp, Ralstonia solanacearum GMI1000; identical to SEQ ID NO: 75332
  CDS (1)..(1080): transl_table=11

SEQ ID NO: 113351 - protein, 359 aa, Ralstonia solanacearum GMI1000; identical to SEQ ID NO: 75333

SEQ ID NO: 113352 - DNA, 1119 bp, Schizosaccharomyces pombe 972h-; identical to SEQ ID NO: 75334
  CDS (1)..(1119)

SEQ ID NO: 113353 - protein, 372 aa, Schizosaccharomyces pombe 972h-; identical to SEQ ID NO: 75335

SEQ ID NO: 113354 - DNA, 1074 bp, Xanthomonas campestris pv. campestris str. ATCC 33913; identical to SEQ ID NO: 75336
  CDS (1)..(1074): transl_table=11

SEQ ID NO: 113355 - protein, 357 aa, Xanthomonas campestris pv. campestris str. ATCC 33913; identical to SEQ ID NO: 75337

SEQ ID NO: 113356 - DNA, 1074 bp, Xanthomonas axonopodis pv. citri str. 306; identical to SEQ ID NO: 75338
  CDS (1)..(1074): transl_table=11

SEQ ID NO: 113357 - protein, 357 aa, Xanthomonas axonopodis pv. citri str. 306; identical to SEQ ID NO: 75339

SEQ ID NO: 113358 - DNA, 1053 bp, Yersinia pestis KIM; identical to SEQ ID NO: 75346
  CDS (1)..(1053): transl_table=11

SEQ ID NO: 113359 - protein, 350 aa, Yersinia pestis KIM; identical to SEQ ID NO: 75347

SEQ ID NO: 113360 - DNA, 1053 bp, Shigella flexneri 2a str. 301; identical to SEQ ID NO: 75354
  CDS (1)..(1053): transl_table=11

SEQ ID NO: 113361 - protein, 350 aa, Shigella flexneri 2a str. 301; identical to SEQ ID NO: 75355

SEQ ID NO: 113362 - DNA, 1059 bp, Shewanella oneidensis MR-1; identical to SEQ ID NO: 75358
  CDS (1)..(1059): transl_table=11

SEQ ID NO: 113363 - protein, 352 aa, Shewanella oneidensis MR-1; identical to SEQ ID NO: 75359

SEQ ID NO: 113364 - DNA, 1113 bp, Pseudomonas putida KT2440; identical to SEQ ID NO: 75372
  CDS (1)..(1113): transl_table=11

SEQ ID NO: 113365 - protein, 370 aa, Pseudomonas putida KT2440; identical to SEQ ID NO: 75373

SEQ ID NO: 113366 - DNA, 1062 bp, Pseudomonas putida KT2440; identical to SEQ ID NO: 75374
  CDS (1)..(1062): transl_table=11

SEQ ID NO: 113367 - protein, 353 aa, Pseudomonas putida KT2440; identical to SEQ ID NO: 75375

SEQ ID NO: 113368 - DNA, 1053 bp, Escherichia coli CFT073; identical to SEQ ID NO: 75376
  CDS (1)..(1053): transl_table=11

SEQ ID NO: 113369 - protein, 350 aa, Escherichia coli CFT073; identical to SEQ ID NO: 75377

SEQ ID NO: 113370 - DNA, 1053 bp, Vibrio vulnificus CMCP6; identical to SEQ ID NO: 75386
  CDS (1)..(1053): transl_table=11

SEQ ID NO: 113371 - protein, 350 aa, Vibrio vulnificus CMCP6; identical to SEQ ID NO: 75387

SEQ ID NO: 113372 - DNA, 1086 bp, Bradyrhizobium japonicum USDA 110; identical to SEQ ID NO: 75390
  CDS (1)..(1086): transl_table=11

SEQ ID NO: 113373 - protein, 361 aa, Bradyrhizobium japonicum USDA 110; identical to SEQ ID NO: 75391

SEQ ID NO: 113374 - DNA, 1095 bp, Xylella fastidiosa Temecula1; identical to SEQ ID NO: 75392
  CDS (1)..(1095): transl_table=11

SEQ ID NO: 113375 - protein, 364 aa, Xylella fastidiosa Temecula1; identical to SEQ ID NO: 75393

SEQ ID NO: 113376 - DNA, 1074 bp, Vibrio parahaemolyticus RIMD 2210633; identical to SEQ ID NO: 75398
  CDS (1)..(1074): transl_table=11

SEQ ID NO: 113377 - protein, 357 aa, Vibrio parahaemolyticus RIMD 2210633; identical to SEQ ID NO: 75399

SEQ ID NO: 113378 - DNA, 1053 bp, Vibrio parahaemolyticus RIMD 2210633; identical to SEQ ID NO: 75402
  CDS (1)..(1053): transl_table=11

SEQ ID NO: 113379 - protein, 350 aa, Vibrio parahaemolyticus RIMD 2210633; identical to SEQ ID NO: 75403

SEQ ID NO: 113380 - DNA, 1053 bp, Salmonella enterica subsp. enterica serovar Typhi Ty2; identical to SEQ ID NO: 75404
  CDS (1)..(1053): transl_table=11

SEQ ID NO: 113381 - protein, 350 aa, Salmonella enterica subsp. enterica serovar Typhi Ty2; identical to SEQ ID NO: 75405

SEQ ID NO: 113382 - DNA, 1083 bp, Coxiella burnetii RSA 493; identical to SEQ ID NO: 75406
  CDS (1)..(1083): transl_table=11

SEQ ID NO: 113383 - protein, 360 aa, Coxiella burnetii RSA 493; identical to SEQ ID NO: 75407

SEQ ID NO: 113384 - DNA, 1179 bp, Nitrosomonas europaea ATCC 19718; identical to SEQ ID NO: 75408
  CDS (1)..(1179): transl_table=11

SEQ ID NO: 113385 - protein, 392 aa, Nitrosomonas europaea ATCC 19718; identical to SEQ ID NO: 75409

SEQ ID NO: 113386 - DNA, 1053 bp, Rhodopirellula baltica SH 1; identical to SEQ ID NO: 75410
  CDS (1)..(1053): transl_table=11

SEQ ID NO: 113387 - protein, 350 aa, Rhodopirellula baltica SH 1; identical to SEQ ID NO: 75411

SEQ ID NO: 113388 - DNA, 1080 bp, Haemophilus ducreyi 35000HP; identical to SEQ ID NO: 75414
  CDS (1)..(1080): transl_table=11

SEQ ID NO: 113389 - protein, 359 aa, Haemophilus ducreyi 35000HP; identical to SEQ ID NO: 75415

SEQ ID NO: 113390 - DNA, 1113 bp, Haemophilus ducreyi 35000HP; identical to SEQ ID NO: 75416
  CDS (1)..(1113): transl_table=11

SEQ ID NO: 113391 - protein, 370 aa, Haemophilus ducreyi 35000HP; identical to SEQ ID NO: 75417

SEQ ID NO: 113392 - DNA, 1119 bp, Bordetella parapertussis 12822; identical to SEQ ID NO: 75422
  CDS (1)..(1119): transl_table=11

SEQ ID NO: 113393 - protein, 372 aa, Bordetella parapertussis 12822; identical to SEQ ID NO: 75423

SEQ ID NO: 113394 - DNA, 1074 bp, Bordetella parapertussis 12822; identical to SEQ ID NO: 75424
  CDS (1)..(1074): transl_table=11

SEQ ID NO: 113395 - protein, 357 aa, Bordetella parapertussis 12822; identical to SEQ ID NO: 75425

SEQ ID NO: 113396 - DNA, 1068 bp, Synechococcus sp. WH 8102; identical to SEQ ID NO: 75434
  CDS (1)..(1068): transl_table=11

SEQ ID NO: 113397 - protein, 355 aa, Synechococcus sp. WH 8102; identical to SEQ ID NO: 75435

SEQ ID NO: 113398 - DNA, 1059 bp, Chromobacterium violaceum ATCC 12472; identical to SEQ ID NO: 75436
  CDS (1)..(1059): transl_table=11

SEQ ID NO: 113399 - protein, 352 aa, Chromobacterium violaceum ATCC 12472; identical to SEQ ID NO: 75437

SEQ ID NO: 113400 - DNA, 1095 bp, Photorhabdus luminescens subsp. laumondii TTO1; identical to SEQ ID NO: 75442
  CDS (1)..(1095): transl_table=11

SEQ ID NO: 113401 - protein, 364 aa, Photorhabdus luminescens subsp. laumondii TTO1; identical to SEQ ID NO: 75443

SEQ ID NO: 113402 - DNA, 1053 bp, Photorhabdus luminescens subsp. laumondii TTO1; identical to SEQ ID NO: 75444
  CDS (1)..(1053): transl_table=11

SEQ ID NO: 113403 - protein, 350 aa, Photorhabdus luminescens subsp. laumondii TTO1; identical to SEQ ID NO: 75445

SEQ ID NO: 113404 - DNA, 1095 bp, Rhodopseudomonas palustris CGA009; identical to SEQ ID NO: 75456
  CDS (1)..(1095): transl_table=11

SEQ ID NO: 113405 - protein, 364 aa, Rhodopseudomonas palustris CGA009; identical to SEQ ID NO: 75457

SEQ ID NO: 113406 - DNA, 1068 bp, Geobacter sulfurreducens PCA; identical to SEQ ID NO: 75458
  CDS (1)..(1068): transl_table=11

SEQ ID NO: 113407 - protein, 355 aa, Geobacter sulfurreducens PCA; identical to SEQ ID NO: 75459

SEQ ID NO: 113408 - DNA, 1113 bp, Magnaporthe grisea 70-15; identical to SEQ ID NO: 75462
  CDS (1)..(1113)

SEQ ID NO: 113409 - protein, 370 aa, Magnaporthe grisea 70-15; identical to SEQ ID NO: 75463

SEQ ID NO: 113410 - DNA, 1152 bp, Magnaporthe grisea 70-15; identical to SEQ ID NO: 75464
  CDS (1)..(1152)

SEQ ID NO: 113411 - protein, 383 aa, Magnaporthe grisea 70-15; identical to SEQ ID NO: 75465

SEQ ID NO: 113412 - DNA, 1128 bp, Gibberella zeae PH-1; identical to SEQ ID NO: 75466
  CDS (1)..(1128)

SEQ ID NO: 113413 - protein, 375 aa, Gibberella zeae PH-1; identical to SEQ ID NO: 75467

SEQ ID NO: 113414 - DNA, 1098 bp, Gibberella zeae PH-1; identical to SEQ ID NO: 75468
  CDS (1)..(1098)

SEQ ID NO: 113415 - protein, 365 aa, Gibberella zeae PH-1; identical to SEQ ID NO: 75469

SEQ ID NO: 113416 - DNA, 1071 bp, Candida glabrata CBS 138; identical to SEQ ID NO: 75470
  CDS (1)..(1071)

SEQ ID NO: 113417 - protein, 356 aa, Candida glabrata CBS 138; identical to SEQ ID NO: 75471

SEQ ID NO: 113418 - DNA, 1119 bp, Candida glabrata CBS 138; identical to SEQ ID NO: 75472
  CDS (1)..(1119)

SEQ ID NO: 113419 - protein, 372 aa, Candida glabrata CBS 138; identical to SEQ ID NO: 75473

SEQ ID NO: 113420 - DNA, 1095 bp, Kluyveromyces lactis NRRL Y-1140; identical to SEQ ID NO: 75474
  CDS (1)..(1095)

SEQ ID NO: 113421 - protein, 364 aa, Kluyveromyces lactis NRRL Y-1140; identical to SEQ ID NO: 75475

SEQ ID NO: 113422 - DNA, 1119 bp, Kluyveromyces lactis NRRL Y-1140; identical to SEQ ID NO: 75476
  CDS (1)..(1119)

SEQ ID NO: 113423 - protein, 372 aa, Kluyveromyces lactis NRRL Y-1140; identical to SEQ ID NO: 75477

SEQ ID NO: 113424 - DNA, 1107 bp, Debaryomyces hansenii CBS767; identical to SEQ ID NO: 75478
  CDS (1)..(1107)

SEQ ID NO: 113425 - protein, 368 aa, Debaryomyces hansenii CBS767; identical to SEQ ID NO: 75479

SEQ ID NO: 113426 - DNA, 1122 bp, Debaryomyces hansenii CBS767; identical to SEQ ID NO: 75480
  CDS (1)..(1122)

SEQ ID NO: 113427 - protein, 373 aa, Debaryomyces hansenii CBS767; identical to SEQ ID NO: 75481

SEQ ID NO: 113428 - DNA, 1089 bp, Yarrowia lipolytica CLIB122; identical to SEQ ID NO: 75482
  CDS (1)..(1089)

SEQ ID NO: 113429 - protein, 362 aa, Yarrowia lipolytica CLIB122; identical to SEQ ID NO: 75483

SEQ ID NO: 113430 - DNA, 1074 bp, Yarrowia lipolytica CLIB122; identical to SEQ ID NO: 75484
  CDS (1)..(1074)

SEQ ID NO: 113431 - protein, 357 aa, Yarrowia lipolytica CLIB122; identical to SEQ ID NO: 75485

SEQ ID NO: 113432 - DNA, 1143 bp, Aspergillus nidulans FGSC A4; identical to SEQ ID NO: 75486
  CDS (1)..(1143)

SEQ ID NO: 113433 - protein, 380 aa, Aspergillus nidulans FGSC A4; identical to SEQ ID NO: 75487

SEQ ID NO: 113434 - DNA, 1089 bp, Aspergillus nidulans FGSC A4; identical to SEQ ID NO: 75488
  CDS (1)..(1089)

SEQ ID NO: 113435 - protein, 362 aa, Aspergillus nidulans FGSC A4; identical to SEQ ID NO: 75489

SEQ ID NO: 113436 - DNA, 1182 bp, Ustilago maydis 521; identical to SEQ ID NO: 75490
  CDS (1)..(1182)

SEQ ID NO: 113437 - protein, 393 aa, Ustilago maydis 521; identical to SEQ ID NO: 75491

SEQ ID NO: 113438 - DNA, 1560 bp, Ustilago maydis 521; identical to SEQ ID NO: 75492
  CDS (1)..(1560)

SEQ ID NO: 113439 - protein, 519 aa, Ustilago maydis 521; identical to SEQ ID NO: 75493

SEQ ID NO: 113440 - DNA, 1131 bp, Cryptococcus neoformans var. neoformans B-3501A; identical to SEQ ID NO: 75494
  CDS (1)..(1131)

SEQ ID NO: 113441 - protein, 376 aa, Cryptococcus neoformans var. neoformans B-3501A; identical to SEQ ID NO: 75495

SEQ ID NO: 113442 - DNA, 1065 bp, Herminiimonas arsenicoxydans; identical to SEQ ID NO: 75508
  CDS (1)..(1065): transl_table=11

SEQ ID NO: 113443 - protein, 354 aa, Herminiimonas arsenicoxydans; identical to SEQ ID NO: 75509

SEQ ID NO: 113444 - DNA, 1131 bp, Burkholderia vietnamiensis G4; identical to SEQ ID NO: 75510
  CDS (1)..(1131): transl_table=11

SEQ ID NO: 113445 - protein, 376 aa, Burkholderia vietnamiensis G4; identical to SEQ ID NO: 75511

SEQ ID NO: 113446 - DNA, 1074 bp, Burkholderia vietnamiensis G4; identical to SEQ ID NO: 75512
  CDS (1)..(1074): transl_table=11

SEQ ID NO: 113447 - protein, 357 aa, Burkholderia vietnamiensis G4; identical to SEQ ID NO: 75513

SEQ ID NO: 113448 - DNA, 1086 bp, Bradyrhizobium sp. ORS278
  CDS (1)..(1086): transl_table=11
gtgctgagtacgacagacgatcttcgcatcaaggaaatcaaggaattgagcctgcccgtggaggtgatgggcgagattccgcgcaccctcaccgccacgcgcgtcgtgatggccgcgcgcaatgccatccacgccatcctgaccggcaccgacgaccgccttctggtcatcgtcggcccctgctccatccatgatcccaaagccgcgctggactacgccggccgcctcgctgccttgcgcgagcgcctcggtgatcggctggagatcgtgatgcgggtgtatttcgagaagccgcgcacgacggtcggctggaagggcctgatcaacgatcccgacctcgacaattccttcgacatcaacaagggcctgcggctggcgcgcaacgtgctctcggccgtgaacaatctcggcctgccggcgggctgcgaattcctcgacatgaccacgccgcaatacatcgccgacctcgtcgcctgggccgcgatcggcgcgcgcaccaccgagagccagatccatcgcgagctcgcctcaggcctgtcctgcccggtgggcttcaagaacggtaccgacggcaacatccgcatcgccgccgacgccgtaaaatcggccgcgcatccgcatcatttcatggcggtgaccaagggcggccgctcaggcatcgcggcgaccaccggcaacgaggactgccacatcatcctgcgcggcggcgccggcccgaactacgacgcggcccatgtcgagcaggcctccgctgagctcgtgaaagccggcctgccggcgcggctgatgatcgacaccagccacgccaattcgagcaagaagccggagaaccagccgctggtggccgccgacatcgccggccagctggcgaatggcgagcagcgcatcatgggcgtgatgatcgagagccatctcgtcgccggccgtcaggacgtcaagccgggcgtgccgctgacctatggccagagcatcaccgacggctgcatcggctgggacacgacggtggacgtcttggagcaactggcccaggctgtcgccgcgcggcgggtaaagcgtcgcgattccctgcgcgagcgctcggcttag

SEQ ID NO: 113449 - protein, 361 aa, Bradyrhizobium sp. ORS278
MLSTTDDLRIKEIKELSLPVEVMGEIPRTLTATRVVMAARNAIHAILTGTDDRLLVIVGPCSIHDPKAALDYAGRLAALRERLGDRLEIVMRVYFEKPRTTVGWKGLINDPDLDNSFDINKGLRLARNVLSAVNNLGLPAGCEFLDMTTPQYIADLVAWAAIGARTTESQIHRELASGLSCPVGFKNGTDGNIRIAADAVKSAAHPHHFMAVTKGGRSGIAATTGNEDCHIILRGGAGPNYDAAHVEQASAELVKAGLPARLMIDTSHANSSKKPENQPLVAADIAGQLANGEQRIMGVMIESHLVAGRQDVKPGVPLTYGQSITDGCIGWDTTVDVLEQLAQAVAARRVKRRDSLRERSA

SEQ ID NO: 113450 - DNA, 1113 bp, Acinetobacter sp. ADP1; identical to SEQ ID NO: 75522
  CDS (1)..(1113): transl_table=11

SEQ ID NO: 113451 - protein, 370 aa, Acinetobacter sp. ADP1; identical to SEQ ID NO: 75523

SEQ ID NO: 113452 - DNA, 1056 bp, Erwinia carotovora subsp. atroseptica SCRI1043; identical to SEQ ID NO: 75524
  CDS (1)..(1056): transl_table=11

SEQ ID NO: 113453 - protein, 351 aa, Erwinia carotovora subsp. atroseptica SCRI1043; identical to SEQ ID NO: 75525

SEQ ID NO: 113454 - DNA, 1074 bp, Erwinia carotovora subsp. atroseptica SCRI1043; identical to SEQ ID NO: 75528
  CDS (1)..(1074): transl_table=11

SEQ ID NO: 113455 - protein, 357 aa, Erwinia carotovora subsp. atroseptica SCRI1043; identical to SEQ ID NO: 75529

SEQ ID NO: 113456 - DNA, 1056 bp, Mannheimia succiniciproducens MBEL55E; identical to SEQ ID NO: 75532
  CDS (1)..(1056): transl_table=11

SEQ ID NO: 113457 - protein, 351 aa, Mannheimia succiniciproducens MBEL55E; identical to SEQ ID NO: 75533

SEQ ID NO: 113458 - DNA, 1155 bp, Mannheimia succiniciproducens MBEL55E; identical to SEQ ID NO: 75534
  CDS (1)..(1155): transl_table=11

SEQ ID NO: 113459 - protein, 384 aa, Mannheimia succiniciproducens MBEL55E; identical to SEQ ID NO: 75535

SEQ ID NO: 113460 - DNA, 1074 bp, Burkholderia mallei ATCC 23344; identical to SEQ ID NO: 75536
  CDS (1)..(1074): transl_table=11

SEQ ID NO: 113461 - protein, 357 aa, Burkholderia mallei ATCC 23344; identical to SEQ ID NO: 75537

SEQ ID NO: 113462 - DNA, 1074 bp, Burkholderia pseudomallei K96243; identical to SEQ ID NO: 75538
  CDS (1)..(1074): transl_table=11

SEQ ID NO: 113463 - protein, 357 aa, Burkholderia pseudomallei K96243; identical to SEQ ID NO: 75539

SEQ ID NO: 113464 - DNA, 1092 bp, Methylococcus capsulatus str. Bath; identical to SEQ ID NO: 75540
  CDS (1)..(1092): transl_table=11

SEQ ID NO: 113465 - protein, 363 aa, Methylococcus capsulatus str. Bath; identical to SEQ ID NO: 75541

SEQ ID NO: 113466 - DNA, 1083 bp, Azoarcus sp. EbN1; identical to SEQ ID NO: 75542
  CDS (1)..(1083): transl_table=11

SEQ ID NO: 113467 - protein, 360 aa, Azoarcus sp. EbN1; identical to SEQ ID NO: 75543

SEQ ID NO: 113468 - DNA, 1089 bp, Haemophilus influenzae 86-028NP; identical to SEQ ID NO: 75552
  CDS (1)..(1089): transl_table=11

SEQ ID NO: 113469 - protein, 362 aa, Haemophilus influenzae 86-028NP; identical to SEQ ID NO: 75553

SEQ ID NO: 113470 - DNA, 1059 bp, Colwellia psychrerythraea 34H; identical to SEQ ID NO: 75560
  CDS (1)..(1059): transl_table=11

SEQ ID NO: 113471 - protein, 352 aa, Colwellia psychrerythraea 34H; identical to SEQ ID NO: 75561

SEQ ID NO: 113472 - DNA, 1080 bp, Dechloromonas aromatica RCB; identical to SEQ ID NO: 75572
  CDS (1)..(1080): transl_table=11

SEQ ID NO: 113473 - protein, 359 aa, Dechloromonas aromatica RCB; identical to SEQ ID NO: 75573

SEQ ID NO: 113474 - DNA, 1062 bp, Thermobifida fusca YX; identical to SEQ ID NO: 75574
  CDS (1)..(1062): transl_table=11

SEQ ID NO: 113475 - protein, 353 aa, Thermobifida fusca YX; identical to SEQ ID NO: 75575

SEQ ID NO: 113476 - DNA, 1080 bp, Ralstonia eutropha JMP134; identical to SEQ ID NO: 75578
  CDS (1)..(1080): transl_table=11

SEQ ID NO: 113477 - protein, 359 aa, Ralstonia eutropha JMP134; identical to SEQ ID NO: 75579

SEQ ID NO: 113478 - DNA, 1134 bp, Ralstonia eutropha JMP134; identical to SEQ ID NO: 75580
  CDS (1)..(1134): transl_table=11

SEQ ID NO: 113479 - protein, 377 aa, Ralstonia eutropha JMP134; identical to SEQ ID NO: 75581

SEQ ID NO: 113480 - DNA, 1074 bp, Burkholderia sp. 383; identical to SEQ ID NO: 75592
  CDS (1)..(1074): transl_table=11

SEQ ID NO: 113481 - protein, 357 aa, Burkholderia sp. 383; identical to SEQ ID NO: 75593

SEQ ID NO: 113482 - DNA, 1131 bp, Burkholderia sp. 383; identical to SEQ ID NO: 75594
  CDS (1)..(1131): transl_table=11

SEQ ID NO: 113483 - protein, 376 aa, Burkholderia sp. 383; identical to SEQ ID NO: 75595

SEQ ID NO: 113484 - DNA, 1068 bp, Geobacter metallireducens GS-15; identical to SEQ ID NO: 75598
  CDS (1)..(1068): transl_table=11

SEQ ID NO: 113485 - protein, 355 aa, Geobacter metallireducens GS-15; identical to SEQ ID NO: 75599

SEQ ID NO: 113486 - DNA, 1119 bp, Burkholderia thailandensis E264; identical to SEQ ID NO: 75604
  CDS (1)..(1119): transl_table=11

SEQ ID NO: 113487 - protein, 372 aa, Burkholderia thailandensis E264; identical to SEQ ID NO: 75605

SEQ ID NO: 113488 - DNA, 1074 bp, Burkholderia thailandensis E264; identical to SEQ ID NO: 75606
  CDS (1)..(1074): transl_table=11

SEQ ID NO: 113489 - protein, 357 aa, Burkholderia thailandensis E264; identical to SEQ ID NO: 75607

SEQ ID NO: 113490 - DNA, 1386 bp, Syntrophus aciditrophicus SB; identical to SEQ ID NO: 75608
  CDS (1)..(1386): transl_table=11

SEQ ID NO: 113491 - protein, 461 aa, Syntrophus aciditrophicus SB; identical to SEQ ID NO: 75609

SEQ ID NO: 113492 - DNA, 1113 bp, Francisella tularensis subsp. holarctica; identical to SEQ ID NO: 75610
  CDS (1)..(1113): transl_table=11

SEQ ID NO: 113493 - protein, 370 aa, Francisella tularensis subsp. holarctica; identical to SEQ ID NO: 75611

SEQ ID NO: 113494 - DNA, 1062 bp, Saccharophagus degradans 2-40; identical to SEQ ID NO: 75614
  CDS (1)..(1062): transl_table=11

SEQ ID NO: 113495 - protein, 353 aa, Saccharophagus degradans 2-40; identical to SEQ ID NO: 75615

SEQ ID NO: 113496 - DNA, 1119 bp, Burkholderia xenovorans LB400; identical to SEQ ID NO: 75618
  CDS (1)..(1119): transl_table=11

SEQ ID NO: 113497 - protein, 372 aa, Burkholderia xenovorans LB400; identical to SEQ ID NO: 75619

SEQ ID NO: 113498 - DNA, 1080 bp, Ralstonia metallidurans CH34; identical to SEQ ID NO: 75622
  CDS (1)..(1080): transl_table=11

SEQ ID NO: 113499 - protein, 359 aa, Ralstonia metallidurans CH34; identical to SEQ ID NO: 75623

SEQ ID NO: 113500 - DNA, 1143 bp, Ralstonia metallidurans CH34; identical to SEQ ID NO: 75624
  CDS (1)..(1143): transl_table=11

SEQ ID NO: 113501 - protein, 380 aa, Ralstonia metallidurans CH34; identical to SEQ ID NO: 75625

SEQ ID NO: 113502 - DNA, 1056 bp, Acidobacteria bacterium Ellin345; identical to SEQ ID NO: 75626
  CDS (1)..(1056): transl_table=11

SEQ ID NO: 113503 - protein, 351 aa, Acidobacteria bacterium Ellin345; identical to SEQ ID NO: 75627

SEQ ID NO: 113504 - DNA, 1095 bp, Silicibacter sp. TM1040; identical to SEQ ID NO: 75628
  CDS (1)..(1095): transl_table=11

SEQ ID NO: 113505 - protein, 364 aa, Silicibacter sp. TM1040; identical to SEQ ID NO: 75629

SEQ ID NO: 113506 - DNA, 1062 bp, Rubrobacter xylanophilus DSM 9941; identical to SEQ ID NO: 75630
  CDS (1)..(1062): transl_table=11

SEQ ID NO: 113507 - protein, 353 aa, Rubrobacter xylanophilus DSM 9941; identical to SEQ ID NO: 75631

SEQ ID NO: 113508 - DNA, 1080 bp, Haemophilus somnus 129PT; identical to SEQ ID NO: 75634
  CDS (1)..(1080): transl_table=11

SEQ ID NO: 113509 - protein, 359 aa, Haemophilus somnus 129PT; identical to SEQ ID NO: 75635

SEQ ID NO: 113510 - DNA, 1059 bp, Shewanella sp. MR-7; identical to SEQ ID NO: 75644
  CDS (1)..(1059): transl_table=11

SEQ ID NO: 113511 - protein, 352 aa, Shewanella sp. MR-7; identical to SEQ ID NO: 75645

SEQ ID NO: 113512 - DNA, 1062 bp, Rhizobium leguminosarum bv. viciae 3841; identical to SEQ ID NO: 75650
  CDS (1)..(1062): transl_table=11

SEQ ID NO: 113513 - protein, 353 aa, Rhizobium leguminosarum bv. viciae 3841; identical to SEQ ID NO: 75651

SEQ ID NO: 113514 - DNA, 1059 bp, Shewanella sp. ANA-3; identical to SEQ ID NO: 75660
  CDS (1)..(1059): transl_table=11

SEQ ID NO: 113515 - protein, 352 aa, Shewanella sp. ANA-3; identical to SEQ ID NO: 75661

SEQ ID NO: 113516 - DNA, 1086 bp, Azoarcus sp. BH72; identical to SEQ ID NO: 75668
  CDS (1)..(1086): transl_table=11

SEQ ID NO: 113517 - protein, 361 aa, Azoarcus sp. BH72; identical to SEQ ID NO: 75669

SEQ ID NO: 113518 - DNA, 1101 bp, Acidovorax sp. JS42; identical to SEQ ID NO: 75674
  CDS (1)..(1101): transl_table=11

SEQ ID NO: 113519 - protein, 366 aa, Acidovorax sp. JS42; identical to SEQ ID NO: 75675

SEQ ID NO: 113520 - DNA, 1119 bp, Acidovorax sp. JS42; identical to SEQ ID NO: 75676
  CDS (1)..(1119): transl_table=11

SEQ ID NO: 113521 - protein, 372 aa, Acidovorax sp. JS42; identical to SEQ ID NO: 75677

SEQ ID NO: 113522 - DNA, 1089 bp, Haemophilus influenzae R2866; identical to SEQ ID NO: 75682
  CDS (1)..(1089): transl_table=11

SEQ ID NO: 113523 - protein, 362 aa, Haemophilus influenzae R2866; identical to SEQ ID NO: 75683

SEQ ID NO: 113524 - DNA, 1164 bp, Xylella fastidiosa Ann-1; identical to SEQ ID NO: 75688
  CDS (1)..(1164): transl_table=11

SEQ ID NO: 113525 - protein, 387 aa, Xylella fastidiosa Ann-1; identical to SEQ ID NO: 75689

SEQ ID NO: 113526 - DNA, 1068 bp, Oceanospirillum sp. MED92; identical to SEQ ID NO: 75706
  CDS (1)..(1068): transl_table=11

SEQ ID NO: 113527 - protein, 355 aa, Oceanospirillum sp. MED92; identical to SEQ ID NO: 75707

SEQ ID NO: 113528 - DNA, 1068 bp, gamma proteobacterium HTCC2207; identical to SEQ ID NO: 75708
  CDS (1)..(1068): transl_table=11

SEQ ID NO: 113529 - protein, 355 aa, gamma proteobacterium HTCC2207; identical to SEQ ID NO: 75709

SEQ ID NO: 113530 - DNA, 1053 bp, Oceanobacter sp. RED65; identical to SEQ ID NO: 75710
  CDS (1)..(1053): transl_table=11

SEQ ID NO: 113531 - protein, 350 aa, Oceanobacter sp. RED65; identical to SEQ ID NO: 75711

SEQ ID NO: 113532 - DNA, 1077 bp, Vibrio sp. Ex25; identical to SEQ ID NO: 75716
  CDS (1)..(1077): transl_table=11

SEQ ID NO: 113533 - protein, 358 aa, Vibrio sp. Ex25; identical to SEQ ID NO: 75717

SEQ ID NO: 113534 - DNA, 1050 bp, marine gamma proteobacterium HTCC2143; identical to SEQ ID NO: 75718
  CDS (1)..(1050): transl_table=11

SEQ ID NO: 113535 - protein, 349 aa, marine gamma proteobacterium HTCC2143; identical to SEQ ID NO: 75719

SEQ ID NO: 113536 - DNA, 1071 bp, marine gamma proteobacterium HTCC2080; identical to SEQ ID NO: 75724
  CDS (1)..(1071): transl_table=11

SEQ ID NO: 113537 - protein, 356 aa, marine gamma proteobacterium HTCC2080; identical to SEQ ID NO: 75725

SEQ ID NO: 113538 - DNA, 1062 bp, Pseudomonas putida GB-1; identical to SEQ ID NO: 75726
  CDS (1)..(1062): transl_table=11

SEQ ID NO: 113539 - protein, 353 aa, Pseudomonas putida GB-1; identical to SEQ ID NO: 75727

SEQ ID NO: 113540 - DNA, 1077 bp, Pseudomonas putida GB-1; identical to SEQ ID NO: 75728
  CDS (1)..(1077): transl_table=11

SEQ ID NO: 113541 - protein, 358 aa, Pseudomonas putida GB-1; identical to SEQ ID NO: 75729

SEQ ID NO: 113542 - DNA, 1074 bp, Herbaspirillum seropedicae; identical to SEQ ID NO: 75734
  CDS (1)..(1074): transl_table=11

SEQ ID NO: 113543 - protein, 357 aa, Herbaspirillum seropedicae; identical to SEQ ID NO: 75735

SEQ ID NO: 113544 - DNA, 1089 bp, Amycolatopsis orientalis; identical to SEQ ID NO: 75736
  CDS (1)..(1089): transl_table=11

SEQ ID NO: 113545 - protein, 362 aa, Amycolatopsis orientalis; identical to SEQ ID NO: 75737

SEQ ID NO: 113546 - DNA, 1014 bp, Phaeosphaeria nodorum
  CDS (1)..(1014)
atgtctttccacatcgagaaccccgccgtcggtgatccgcacaactcggaggactggcgcattcgcggctacaaccccctcacaccccccgaccttctgcagagcgagattcctcagtcggccaagtcaagagagactgtcctgcaaggccgcgatgaagccgtcgccgtcgtccagggcaaagatgccaatggcagactgctggtcgtcattggcccgtgctccatccacgaccccaaagccgctctcgaatactgcgaccggctgatggcgctgaaggacaagtacaaggatgacttgctcattgtcatgcgctcgtacctcgagaagccacgcacgaccgtcggctggaagggcctgatcaacgaccctgacatcgacaactcgttcaagatcaacaagggcctgcgcgtgtcacggcagctcttcctagatctgactgagaggggcatgccgcttgccagcgagatgctcgacacaatctcgccccagttcttggctgatatgctgagtgtgggagccatcggcgcgaggaccacagagtcgcaactccaccgcgagcttgcctcgggtctctccttccctgtaggtttcaagaacggtaccgacggcagcctcgacgttgccattgacgccattggctctgtcaagcacccacatcacttcctttctgttaccaagcccggtgttgtcgccatcgtcggcaccattggcaacgatgactgctttgtaattctccgcggtggaaagaagggcacaaactttgacgcgaagagcgtcaaggaggcgcgcgagaaactcgaggccaagggcttgaacgcgcggtttgatgatcgactgcataacatcaacgagggcaaccagaaggtgcccaaggaaggcaaggagggtctcaagtatggtgtctccatcacagatgcatgcatcaactgggaagacacggaaaaggtgcttgagcatcttgcacaagcagtcgcgaagaggaggtcgaagaacggcatgaacggtcactaa

SEQ ID NO: 113547 - protein, 337 aa, Phaeosphaeria nodorum
MSFHIENPAVGDPHNSEDWRIRGYNPLTPPDLLQSEIPQSAKSRETVLQGRDEAVAVVQGKDANGRLLVVIGPCSIHDPKAALEYCDRLMALKDKYKDDLLIVMRSYLEKPRTTVGWKGLINDPDIDNSFKINKGLRVSRQLFLDLTERGMPLASEMLDTISPQFLADMLSVGAIGARTTESQLHRELASGLSFPVGFKNGTDGSLDVAIDAIGSVKHPHHFLSVTKPGVVAIVGTIGNDDCFVILRGGKKGTNFDAKSVKEAREKLEAKGLNARFDDRLHNINEGNQKVPKEGKEGLKYGVSITDACINWEDTEKVLEHLAQAVAKRRSKNGMNGH

SEQ ID NO: 113548 - DNA, 1104 bp, Phaeosphaeria nodorum
  CDS (1)..(1104)
atgccttccttcgacgagccaaaaaacgtcgatgacgtacgcgtcctcggctacgatcctctgatccccccggcgttactgtcagacgagctgcctatccccgcacatgccgagcagacagtcgtccaagggcgcaaagacgccgtaaagatcatcacacaggaagatgaccgtctcctcgtcatggtcggaccttgctccatccacgaccctgagacggccattgagtactgcaagcgcctcaaggagctcgccgacaagctccaagacaacatatgcatcatcatgcgcgcctacctcgagaagccccgcacaactgttggctggaaaggcctgatcaacgacccagatatcgacgagagctacaagatcaacaagggtcttcgcgtctcgcgcaagctctacattgatcttacatcgcaaggcatgcccattgcctctgagatgcttgacactatctcccctcaattcctcgcagacctcatctctctaggtgcaatcggggcacgaacaactgagtctcagttgcaccgcgagcttgcttctggtctctctttccccatcggcttcaaaaacggcactgatggaggtctgaccgtcgcagtcgatgccattggcgctgcaaaggctaaacaccacttcatgggtgtgaccaagcagggtctggctgccatcacaagaacgagcggcaacgaacactgcttcgtcatcctccgtggtggatcccgtggtactaacttcgattccgaaagcatcaagggcgcgcgggaagctctgaggaagaagggtcttcctgaggtcctcatggtcgactgctctcacggcaactccaacaaggaccaccgcaatcagcccaaggtcgccaaggtcatcgccgaccaaatccgcgagggagagactggcattgtcgccgtcatgattgagtccaacatccacgagggcaaccagaaggtccccgccgagggccccagcggactcaagaagggtgtctccatcaccgacgcttgcatcgactgggagagcaccgtcaccgtgcttgaggatctctctgccgctgttgcggagcgccgatcaaaggctaccaagcagaccaacggagcgtaa

SEQ ID NO: 113549 - protein, 367 aa, Phaeosphaeria nodorum
MPSFDEPKNVDDVRVLGYDPLIPPALLSDELPIPAHAEQTVVQGRKDAVKIITQEDDRLLVMVGPCSIHDPETAIEYCKRLKELADKLQDNICIIMRAYLEKPRTTVGWKGLINDPDIDESYKINKGLRVSRKLYIDLTSQGMPIASEMLDTISPQFLADLISLGAIGARTTESQLHRELASGLSFPIGFKNGTDGGLTVAVDAIGAAKAKHHFMGVTKQGLAAITRTSGNEHCFVILRGGSRGTNFDSESIKGAREALRKKGLPEVLMVDCSHGNSNKDHRNQPKVAKVIADQIREGETGIVAVMIESNIHEGNQKVPAEGPSGLKKGVSITDACIDWESTVTVLEDLSAAVAERRSKATKQTNGA

SEQ ID NO: 113550 - DNA, 1182 bp, Ustilago hordei; identical to SEQ ID NO: 75742
  CDS (1)..(1182)

SEQ ID NO: 113551 - protein, 393 aa, Ustilago hordei; identical to SEQ ID NO: 75743

SEQ ID NO: 113552 - DNA, 1137 bp, Aspergillus oryzae; identical to SEQ ID NO: 75746
  CDS (1)..(1137)

SEQ ID NO: 113553 - protein, 378 aa, Aspergillus oryzae; identical to SEQ ID NO: 75747

SEQ ID NO: 113554 - DNA, 1095 bp, Aspergillus oryzae; identical to SEQ ID NO: 75748
  CDS (1)..(1095)

SEQ ID NO: 113555 - protein, 364 aa, Aspergillus oryzae; identical to SEQ ID NO: 75749

SEQ ID NO: 113556 - DNA, 1173 bp, Paxillus involutus
  CDS (1)..(1173)
atgcagtcgtacaacgttactccagttcctgaggatgacaagcaacttctagagtacatgcaagacagacgtgtcctcgggtacgaccccctagtccagcctgctttgctcagacacgaagttactcctaccgaatactcgcgtctcattattgcctctgcccgctataactccgctcgcgtagttgccggacaagatgacagagttctcgtgatcgtcggtccttgctcaatccactccccagagcaagccatcgagtatgccaaactgctccaagctaaaattcccacttgggaaaacctagtcatcgttatgcgggcttacttcgaaaaaccaaggacaaccgtcggctggaaaggcttgattaatgaccctgacatcgatggatccttccacatcaacaagggtcttcgggtcgccagacagctcctttgtgacttaaccaaccttggtatcccagtcggctccgagttactcgataccatctccccacagtacatcgcagatcttatctcttggggtgccatcggtgcccgaacaacggaatcccaactccaccgagagcttgcttctggtgtctccttccccattgggttcaagaacggcactgatggaagtgtgtcggtcgccattgatgccatgcgctcgtcttccaatcctcatgctttcatgggtgtgaccgagcggggtctagccgctattgtcaagactcggggtaaccaggatgttcatgtcatcctccgtggagggaccaagggcccgaactacgcgtctgagcacgtcaagtcggccgcaaaagctatcgagaaggctcgaccacagagccacccaagtctcatgattgactgtagccacggtaactcgcaaaagaatcataacaatcagcccaaggttgtcgatgacatttgcacacagctcgctgctggtgaccgaaccatcacgggtgtcatgatcgagtcgcacatcaacgctggtcgtcaggacgttcctgcagaaggccctggtggactcaagtacggcgtcagtatcaccgacgcttgcgttgactgggaggttaccgttggtatgctcgacaggcttaatgaggcagttggccaacgccgcgcctacctcgttgaacagggtttccagagacctgctgggttccaacgagagacacctttgacgccttga

SEQ ID NO: 113557 - protein, 390 aa, Paxillus involutus; identical to SEQ ID NO: 75751

SEQ ID NO: 113558 - DNA, 1572 bp, Xanthomonas oryzae pv
  CDS (1)..(1572): transl_table=11
gtgtcgaaacacgcgcggccgtttgaagtggcgatgcgccgggcggactgtgagatttaccgaggcggccggtgcgatcattgcttgattgtttgttcgcatcgagccgattggctgcagcgatgtcgccgctcgacaggggggcatcggccctgcaacctgtgcccaaatcactgctgcaacggtaattgcgctcctctgtacgtgtctgccagcagctgcaaaggacggttgcccaaccccgtccccggttccgttgccgatgaaacagtagcaacgcgcaaatgtgcgtggtatcaatgcacgcatgaacgcaccccgcagccagttttatttttggtactacggttttccaatgccgctggcggaggaaggattgcgctcaccctgaaggacacttcagcagcattcccaaaaagccgccagcgcacactggcggcttttttgttgccgccttgcctggctccccgatgcaacaccgcccaccgagacactgttatgccgcctgtgaccgatgacctgcgtatccgcaagatcgaagccctcgcaccgccttcgcagctgctgtcgctgctgccctgcgatgagcgcgcctccgaaaccgtgaccaacgcgcgcgctgcgctgcacaagatcctgcacgggcgcgacgaccgcctggcggtggtgatcgggccctgctcgatccacgacccggtggcggcgatggagtacgcgcagcgcctgcgcccattgcgtgaccaattcggcgacgcgctggagatcgtgatgcgggtgtacttcgaaaagccgcgcaccaccatcggctggaagggcctgatcaacgacccggatctggatggcagcttccagatcaacaaaggcctacgcgtagcgcgcggcttgctgcgcgacatcaacaatctcggcttgccggccggcgtggaatttctcgacatcatttcgccgcaatacatcgccgatctggtggcctggggcgcgatcggtgcccgcaccaccgagagccaggtgcatcgcgaaatggcgtccggcctgtcgtgcccggtgggcttcaagaacggcaccagcggcgacgtcaagattgcggtggacgcggtaggcgcggcctcgcatccgcatcatttcctggccgtgaccaaggacggacataccgccgtggcagccacggcaggcaatccggattgccacgtgattctgcgcggcggcaagcagcccaacttcgatgcagccaatgtggaagcggccagccaggtgctcaacaagtcgggcttgccggcgcgcctgatgatcgatgccagccacgccaacagcagcaagaaccccgagaaccagcccaaggtcatcgacgacatcagcaatcagctggaagcaggcgaaacgcgcatcgttggcgtgatggtggaaagtcaccttgtcggagggcgccaggaattgctgccgggttgcgcgctgacctacgggcagagcatcaccgatggctgcatcggttgggatacgtcggtgcaggtgctggaacgtctggcgacagcagtgcgcgcgcggcgtgcgcgacggattgccgaggctgcgtga

SEQ ID NO: 113559 - protein, 523 aa, Xanthomonas oryzae pv
MSKHARPFEVAMRRADCEIYRGGRCDHCLIVCSHRADWLQRCRRSTGGHRPCNLCPNHCCNGNCAPLYVSASSCKGRLPNPVPGSVADETVATRKCAWYQCTHERTPQPVLFLVLRFSNAAGGGRIALTLKDTSAAFPKSRQRTLAAFLLPPCLAPRCNTAHRDTVMPPVTDDLRIRKIEALAPPSQLLSLLPCDERASETVTNARAALHKILHGRDDRLAVVIGPCSIHDPVAAMEYAQRLRPLRDQFGDALEIVMRVYFEKPRTTIGWKGLINDPDLDGSFQINKGLRVARGLLRDINNLGLPAGVEFLDIISPQYIADLVAWGAIGARTTESQVHREMASGLSCPVGFKNGTSGDVKIAVDAVGAASHPHHFLAVTKDGHTAVAATAGNPDCHVILRGGKQPNFDAANVEAASQVLNKSGLPARLMIDASHANSSKNPENQPKVIDDISNQLEAGETRIVGVMVESHLVGGRQELLPGCALTYGQSITDGCIGWDTSVQVLERLATAVRARRARRIAEAA

SEQ ID NO: 113560 - DNA, 1035 bp, Escherichia coli; identical to SEQ ID NO: 75752
  CDS (1)..(1035): transl_table=11

SEQ ID NO: 113561 - protein, 344 aa, Escherichia coli; identical to SEQ ID NO: 75753

SEQ ID NO: 113562 - DNA, 1098 bp, Amycolatopsis balhimycina; identical to SEQ ID NO: 75756
  CDS (1)..(1098): transl_table=11

SEQ ID NO: 113563 - protein, 365 aa, Amycolatopsis balhimycina; identical to SEQ ID NO: 75757

SEQ ID NO: 113564 - DNA, 1143 bp, Xylella fastidiosa; identical to SEQ ID NO: 75758
  CDS (1)..(1143): transl_table=11

SEQ ID NO: 113565 - protein, 380 aa, Xylella fastidiosa; identical to SEQ ID NO: 75759

SEQ ID NO: 113566 - DNA, 1083 bp, Amycolatopsis mediterranei; identical to SEQ ID NO: 75762
  CDS (1)..(1083): transl_table=11

SEQ ID NO: 113567 - protein, 360 aa, Amycolatopsis mediterranei; identical to SEQ ID NO: 75763

SEQ ID NO: 113568 - DNA, 1125 bp, Emericella nidulans; identical to SEQ ID NO: 75764
  CDS (1)..(1125)

SEQ ID NO: 113569 - protein, 374 aa, Emericella nidulans; identical to SEQ ID NO: 75765

SEQ ID NO: 113570 - DNA, 1107 bp, Candida albicans; identical to SEQ ID NO: 75766
  CDS (1)..(1107): transl_table=12

SEQ ID NO: 113571 - protein, 368 aa, Candida albicans; identical to SEQ ID NO: 75767

SEQ ID NO: 113572 - DNA, 1071 bp, Escherichia coli; identical to SEQ ID NO: 75768
  CDS (1)..(1071): transl_table=11

SEQ ID NO: 113573 - protein, 356 aa, Escherichia coli; identical to SEQ ID NO: 75769

SEQ ID NO: 113574 - DNA, 1107 bp, Schizosaccharomyces pombe; identical to SEQ ID NO: 75772
  CDS (1)..(1107)

SEQ ID NO: 113575 - protein, 368 aa, Schizosaccharomyces pombe; identical to SEQ ID NO: 75773

SEQ ID NO: 113576 - DNA, 1113 bp, Candida albicans
  CDS (1)..(1113): transl_table=12
atgagtaaaactcctgttcctaccgaatacgacgacacaagaatattgggttacgatcctttagttccaccagccttattacaacacgaaataaaggcatctgccgaatcattggatgttgttataaaaggccgttacgattctgcccaaatccttaagggtaatgatgacagatgtattgtaattgttggtccatgttcaattcacgatcctccacaagccttagaatatggtaaacgtttgaagaaattggctgatgaattaaaagatgacttggtgattatcatgagagcttatttggaaaaaccaagaactaccgttggttggaaaggtttgatcaatgatcctgatgttgataattcttttgatattaaccgtgggttgaagatatctcgtcaattatattccgatttgactagtgttgttggattaccaattggatcagaaatgttagacaccatttctccacaatacttttccgatttcttgagttttggggccattggagctagaaccaccgaatcacaattacacagagaattagcttctggtttaagcttcccaattggatttaaaaatggtaccgatggtggtttagccgttgccttggatgccgtgcaagcttcttcaaaaggacatcacttcatgggtgtcaccaaaaacggtatggctgccattaccactactaaaggtaacgattgttgtttcattatattaagaggtggtaaaaaaatcaccaattacgatgttgaatcagttaaagctgctaaagaagctattgccaaatgtaccgatccaagtatcaagttgatggttgattgctctcacgacaactcaagaaaagactacagaaaccaacctcaagtattagacagtgttgctgaacaaataagtaatggtgaagactccattattggggttatgattgaatccaatattcatgaaggtaaacaaccaatgcccccagcaggtagtggtaaagaagcattgaaatacggtgtgtctatcaccgatggatgtgtttcttgggaaaccactgttgaaatgttgaccaaattgagtcaagcagtccaaactagaagaagtttaaagaaacaaaaagtttccaattaa

SEQ ID NO: 113577 - protein, 370 aa, Candida albicans; identical to SEQ ID NO: 75777

SEQ ID NO: 113578 - DNA, 1053 bp, Escherichia coli O157
  CDS (1)..(1053): transl_table=11
atgaattatcagaacgacgatttacgcatcaaagaaatcaaagagttacttcctcctgtcgcattgctggaaaaattccccgctactgaaaatgccgcgaatacggttgcccatgcccgaaaagcgatccataagatcctgaaaggtaatgatgatcgcctgttggtggtgattggcccgtgctcaattcatgatcctgtcgcggctaaagagtatgccactcgcttgctggcgctgcgtgaagagctgaaagatgagctggaaatcgtaatgcgcgtctattttgaaaagccgcgtactacggtgggctggaaagggctgattaacgatccgcatatggataacagcttccagatcaacgacggtctgcgtatagcccgtaaattgctgcttgatattaacgacagcggtctgccagcggcgggtgaattcctcgatatgatcactcctcagtatctcgctgacctgatgagctggggcgcaattggtgcacgtaccacggaatcgcaggtgcaccgcgaactggcgtctggtctttcttgtccggtaggttttaaaaatggcacagacggtacgattaaagtggctatcgatgccattaatgccgccggtgcgccgcactgcttcctgtccgtaactaaatgggggcattcggcgattgtgaataccagcggtaacggcgattgccatatcattctgcgcggcggtaaagagcctaactacagcgcgaagcacgttgctgaagtgaaagaagggctgaacaaagcaggtctgccagctcaggtgatgatcgatttcagccatgctaattcgtccaaacaattcaaaaagcagatggatgtttgtgctgacgtttgccagcagattgccggtggcgaaaaggccattatcggtgtgatggtggaaagtcatctggtggaaggcaatcagagcctggagagcggggagccgctggcctatggtaagagcatcaccgatgcctgcattggctgggaagataccgatgctctgttacgtcaactggcgaacgcagtgaaagcgcgtcgcgggtaa

SEQ ID NO: 113579 - protein, 350 aa, Escherichia coli O157; identical to SEQ ID NO: 75287

SEQ ID NO: 113580 - DNA, 1113 bp, Saccharomyces cerevisiae; identical to SEQ ID NO: 75780
  CDS (1)..(1113)

SEQ ID NO: 113581 - protein, 370 aa, Saccharomyces cerevisiae; identical to SEQ ID NO: 75781

SEQ ID NO: 113582 - DNA, 1047 bp, Escherichia coli O157; identical to SEQ ID NO: 75784
  CDS (1)..(1047): transl_table=11

SEQ ID NO: 113583 - protein, 348 aa, Escherichia coli O157; identical to SEQ ID NO: 75785

SEQ ID NO: 113584 - DNA, 1047 bp, Escherichia coli; identical to SEQ ID NO: 75788
  CDS (1)..(1047): transl_table=11

SEQ ID NO: 113585 - protein, 348 aa, Escherichia coli; identical to SEQ ID NO: 75789

SEQ ID NO: 113586 - DNA, 1047 bp, Enterobacter agglomerans; identical to SEQ ID NO: 75790
  CDS (1)..(1047): transl_table=11

SEQ ID NO: 113587 - protein, 348 aa, Enterobacter agglomerans; identical to SEQ ID NO: 75791

SEQ ID NO: 113588 - DNA, 1047 bp, Salmonella typhimurium; identical to SEQ ID NO: 75792
  CDS (1)..(1047): transl_table=11

SEQ ID NO: 113589 - protein, 348 aa, Salmonella typhimurium; identical to SEQ ID NO: 75793

SEQ ID NO: 113590 - DNA, 25 bp, Artificial sequence
  primer
atgttcattaaaaacgatcacgccg

SEQ ID NO: 113591 - DNA, 25 bp, Artificial sequence
  primer
ctattttttcaaggcctttcttctg

SEQ ID NO: 113592 - protein, 364 aa, Artificial sequence
  consensus sequence
  Variant (2)..(2): Xaa in position 2 is any amino acid
  Variant (4)..(9): Xaa in position 4 to 9 is any amino acid
  Variant (11)..(12): Xaa in position 11 to 12 is any amino acid
  Variant (14)..(15): Xaa in position 14 to 15 is any amino acid
  Variant (17)..(20): Xaa in position 17 to 20 is any amino acid
  Variant (22)..(33): Xaa in position 22 to 33 is any amino acid
  Variant (34)..(34): Xaa in position 34 is any or no amino acid
  Variant (36)..(40): Xaa in position 36 to 40 is any amino acid
  Variant (42)..(43): Xaa in position 42 to 43 is any amino acid
  Variant (45)..(45): Xaa in position 45 is any amino acid
  Variant (46)..(48): Xaa in position 46 to 48 is any or no amino acid
  Variant (50)..(50): Xaa in position 50 is any amino acid
  Variant (53)..(53): Xaa in position 53 is any amino acid
  Variant (55)..(56): Xaa in position 55 to 56 is any amino acid
  Variant (64)..(66): Xaa in position 64 to 66 is any amino acid
  Variant (68)..(69): Xaa in position 68 to 69 is any amino acid
  Variant (72)..(73): Xaa in position 72 to 73 is any amino acid
  Variant (75)..(83): Xaa in position 75 to 83 is any amino acid
  Variant (84)..(86): Xaa in position 84 to 86 is any or no amino acid
  Variant (88)..(89): Xaa in position 88 to 89 is any amino acid
  Variant (93)..(93): Xaa in position 93 is any amino acid
  Variant (95)..(95): Xaa in position 95 is any amino acid
  Variant (112)..(113): Xaa in position 112 to 113 is any amino acid
  Variant (115)..(115): Xaa in position 115 is any amino acid
  Variant (117)..(121): Xaa in position 117 to 121 is any amino acid
  Variant (124)..(126): Xaa in position 124 to 126 is any amino acid
  Variant (128)..(128): Xaa in position 128 is any amino acid
  Variant (130)..(136): Xaa in position 130 to 136 is any amino acid
  Variant (137)..(137): Xaa in position 137 is any or no amino acid
  Variant (139)..(139): Xaa in position 139 is any amino acid
  Variant (141)..(143): Xaa in position 141 to 143 is any amino acid
  Variant (145)..(145): Xaa in position 145 is any amino acid
  Variant (148)..(150): Xaa in position 148 to 150 is any amino acid
  Variant (154)..(155): Xaa in position 154 to 155 is any amino acid
  Variant (157)..(159): Xaa in position 157 to 159 is any amino acid
  Variant (172)..(172): Xaa in position 172 is any amino acid
  Variant (176)..(176): Xaa in position 176 is any amino acid
  Variant (182)..(182): Xaa in position 182 is any amino acid
  Variant (184)..(184): Xaa in position 184 is any amino acid
  Variant (193)..(196): Xaa in position 193 to 196 is any amino acid
  Variant (198)..(198): Xaa in position 198 is any amino acid
  Variant (201)..(203): Xaa in position 201 to 203 is any amino acid
  Variant (205)..(207): Xaa in position 205 to 207 is any amino acid
  Variant (209)..(209): Xaa in position 209 is any amino acid
  Variant (211)..(216): Xaa in position 211 to 216 is any amino acid
  Variant (218)..(219): Xaa in position 218 to 219 is any amino acid
  Variant (222)..(223): Xaa in position 222 to 223 is any amino acid
  Variant (225)..(225): Xaa in position 225 is any amino acid
  Variant (228)..(230): Xaa in position 228 to 230 is any amino acid
  Variant (232)..(232): Xaa in position 232 is any amino acid
  Variant (238)..(240): Xaa in position 238 to 240 is any amino acid
  Variant (241)..(241): Xaa in position 241 is any or no amino acid
  Variant (244)..(247): Xaa in position 244 to 247 is any amino acid
  Variant (249)..(259): Xaa in position 249 to 259 is any amino acid
  Variant (260)..(270): Xaa in position 260 to 270 is any or no amino acid
  Variant (272)..(272): Xaa in position 272 is any amino acid
  Variant (274)..(274): Xaa in position 274 is any amino acid
  Variant (277)..(277): Xaa in position 277 is any amino acid
  Variant (280)..(280): Xaa in position 280 is any amino acid
  Variant (282)..(285): Xaa in position 282 to 285 is any amino acid
  Variant (287)..(288): Xaa in position 287 to 288 is any amino acid
  Variant (290)..(295): Xaa in position 290 to 295 is any amino acid
  Variant (297)..(299): Xaa in position 297 to 299 is any amino acid
  Variant (301)..(302): Xaa in position 301 to 302 is any amino acid
  Variant (303)..(306): Xaa in position 303 to 306 is any or no amino acid
  Variant (308)..(308): Xaa in position 308 is any amino acid
  Variant (310)..(310): Xaa in position 310 is any amino acid
  Variant (312)..(312): Xaa in position 312 is any amino acid
  Variant (315)..(318): Xaa in position 315 to 318 is any amino acid
  Variant (320)..(320): Xaa in position 320 is any amino acid
  Variant (322)..(324): Xaa in position 322 to 324 is any amino acid
  Variant (325)..(333): Xaa in position 325 to 333 is any or no amino acid
  Variant (335)..(335): Xaa in position 335 is any amino acid
  Variant (338)..(338): Xaa in position 338 is any amino acid
  Variant (340)..(340): Xaa in position 340 is any amino acid
  Variant (343)..(343): Xaa in position 343 is any amino acid
  Variant (345)..(346): Xaa in position 345 to 346 is any amino acid
  Variant (348)..(353): Xaa in position 348 to 353 is any amino acid
  Variant (355)..(356): Xaa in position 355 to 356 is any amino acid
  Variant (358)..(363): Xaa in position 358 to 363 is any amino acid
DXRXXXXXXLXXPXXLXXXXPXXXXXXXXXXXXXRXXXXXIXXGXXXXDXRLXVXXGPCSIHDXXXAXXYAXXLXXXXXXXXXXXXLXXVMRXYXEKPRTTVGWKGLINDPXXDXSXXXXXGLXXXRXLXXXXXXXXGXPXXXEXLDXXXPQYXXDXXXWGAIGARTTESQXHREXASGLSXPXGFKNGTDGXXXXAXDAXXXAXXXHXFXXXXXXGXXAIXXTXGNXXXHXILRGGXXXXNYXXXXVXXXXXXXXXXXXXXXXXXXXXXMXDXSHXNSXKXXXXQXXVXXXXXXQXXXGXXXXXXIXGXMXESXXXXGXQXXXXXXXXXXXXLXYGXSXTDXCXXWXXXXXXLXXLXXXXXXR

SEQ ID NO: 113593 - protein, 37 aa, Artificial sequence
  protein pattern
  Variant (2)..(2): Xaa in position 2 is any amino acid
  Variant (3)..(3): Xaa in position 3 is Ala, Cys, Asp or Ser
  Variant (4)..(5): Xaa in position 4 to 5 is any amino acid
  Variant (6)..(6): Xaa in position 6 is Ala or Ser
  Variant (7)..(7): Xaa in position 7 is any amino acid
  Variant (8)..(8): Xaa in position 8 is Ala, Gly or Ser
  Variant (10)..(12): Xaa in position 10 to 12 is any or no amino acid
  Variant (19)..(19): Xaa in position 19 is any amino acid
  Variant (23)..(23): Xaa in position 23 is Leu or Met
  Variant (24)..(24): Xaa in position 24 is Ala, Ser or Val
  Variant (26)..(26): Xaa in position 26 is Ala or Gly
  Variant (27)..(27): Xaa in position 27 is any amino acid
  Variant (29)..(29): Xaa in position 29 is any amino acid
  Variant (30)..(30): Xaa in position 30 is Ala, Pro or Ser
  Variant (31)..(31): Xaa in position 31 is Ile or Val
  Variant (33)..(33): Xaa in position 33 is Phe or Tyr
  Variant (36)..(36): Xaa in position 36 is Ala, Gly or Ser
LXXXXXXXAXXXRTTESQXHREXXSXXSXXXGXKNXT

SEQ ID NO: 113594 - protein, 42 aa, Artificial sequence
  protein pattern
  Variant (2)..(2): Xaa in position 2 is any amino acid
  Variant (4)..(4): Xaa in position 4 is Phe or Leu
  Variant (11)..(11): Xaa in position 11 is Ile, Leu or Val
  Variant (21)..(21): Xaa in position 21 is any amino acid
  Variant (22)..(22): Xaa in position 22 is Ile, Leu, Met or Val
  Variant (23)..(23): Xaa in position 23 is Asp or Asn
  Variant (24)..(24): Xaa in position 24 is any amino acid
  Variant (25)..(25): Xaa in position 25 is Ser or Thr
  Variant (26)..(26): Xaa in position 26 is Phe, His or Tyr
  Variant (27)..(27): Xaa in position 27 is any amino acid
  Variant (28)..(28): Xaa in position 28 is Ile, Leu or Val
  Variant (29)..(30): Xaa in position 29 to 30 is any amino acid
  Variant (32)..(32): Xaa in position 32 is Ile, Leu or Val
  Variant (33)..(34): Xaa in position 33 to 34 is any amino acid
  Variant (35)..(35): Xaa in position 35 is Ala, Gly or Ser
  Variant (37)..(37): Xaa in position 37 is any amino acid
  Variant (38)..(38): Xaa in position 38 is Phe, Ile, Leu, Met or Val
  Variant (39)..(41): Xaa in position 39 to 41 is any amino acid
  Variant (42)..(42): Xaa in position 42 is Ile, Leu or Val
RXYXEKPRTTXGWKGLINDPXXXXXXXXXXGXXXXRXXXXXX

SEQ ID NO: 113595 - protein, 46 aa, Artificial sequence
  protein pattern
  Variant (2)..(5): Xaa in position 2 to 5 is any amino acid
  Variant (6)..(6): Xaa in position 6 is any or no amino acid
  Variant (8)..(8): Xaa in position 8 is any or no amino acid
  Variant (11)..(12): Xaa in position 11 to 12 is any amino acid
  Variant (13)..(13): Xaa in position 13 is Ala, Ser or Thr
  Variant (14)..(14): Xaa in position 14 is Ala, Ser or Val
  Variant (15)..(17): Xaa in position 15 to 17 is any amino acid
  Variant (19)..(19): Xaa in position 19 is any amino acid
  Variant (21)..(21): Xaa in position 21 is any amino acid
  Variant (22)..(22): Xaa in position 22 is Ala, Gly or Ser
  Variant (23)..(26): Xaa in position 23 to 26 is any amino acid
  Variant (27)..(27): Xaa in position 27 is Ala, Asp or Gly
  Variant (28)..(29): Xaa in position 28 to 29 is any amino acid
  Variant (30)..(30): Xaa in position 30 is Ala, Gly, Ser or Thr
  Variant (31)..(33): Xaa in position 31 to 33 is any amino acid
  Variant (35)..(35): Xaa in position 35 is any amino acid
  Variant (38)..(40): Xaa in position 38 to 40 is any amino acid
  Variant (41)..(41): Xaa in position 41 is Phe or His
  Variant (42)..(42): Xaa in position 42 is Ala, Ile, Leu or Val
  Variant (43)..(43): Xaa in position 43 is Ile or Val
  Variant (44)..(44): Xaa in position 44 is any amino acid
GXXXXXAXDAXXXXXXXHXFXXXXXXXXXXXXXTXGNXXXXXXXRG

SEQ ID NO: 113596 - protein, 19 aa, Artificial sequence
  protein pattern
  Variant (3)..(3): Xaa in position 3 is any amino acid
  Variant (5)..(5): Xaa in position 5 is Ile or Val
  Variant (8)..(8): Xaa in position 8 is Ala, Gly or Pro
  Variant (10)..(10): Xaa in position 10 is Ile, Leu or Val
  Variant (11)..(11): Xaa in position 11 is any amino acid
  Variant (13)..(14): Xaa in position 13 to 14 is any amino acid
  Variant (15)..(15): Xaa in position 15 is Ser or Thr
  Variant (16)..(18): Xaa in position 16 to 18 is any amino acid
YGXSXTDXCXXWXXXXXXL

SEQ ID NO: 113597 - protein, 19 aa, Artificial sequence
  protein pattern
  Variant (2)..(2): Xaa in position 2 is Ile or Val
  Variant (4)..(4): Xaa in position 4 is any amino acid
  Variant (7)..(7): Xaa in position 7 is Ala or Gly
  Variant (10)..(10): Xaa in position 10 is any amino acid
  Variant (12)..(15): Xaa in position 12 to 15 is any amino acid
  Variant (17)..(18): Xaa in position 17 to 18 is any amino acid
MXDXSHXNSXKXXXXQXXV

SEQ ID NO: 113598 - DNA, 564 bp, Saccharomyces cerevisiae
  CDS (1)..(564)
atgctacctttatatcttttaacaaatgcgaagggacaacaaatgcaaatagaattgaaaaacggtgaaattatacaagggatattgaccaacgtagataactggatgaaccttactttatctaatgtaaccgaatatagtgaagaaagcgcaattaattcagaagacaatgctgagagcagtaaagccgtaaaattgaacgaaatttatattagagggacttttatcaagtttatcaaattgcaagataatataattgacaaggtcaagcagcaaattaactccaacaataactctaatagtaacggccctgggcataaaagatactacaacaatagggattcaaacaacaatagaggtaactacaacagaagaaataataataacggcaacagcaaccgccgtccatactctcaaaaccgtcaatacaacaacagcaacagcagtaacattaacaacagtatcaacagtatcaatagcaacaaccaaaatatgaacaatggtttaggtgggtccgcccaacatcattttaacagctcttctccacaaaaggtcgaattttaa

SEQ ID NO: 113599 - protein, 187 aa, Saccharomyces cerevisiae
MLPLYLLTNAKGQQMQIELKNGEIIQGILTNVDNWMNLTLSNVTEYSEESAINSEDNAESSKAVKLNEIYIRGTFIKFIKLQDNIIDKVKQQINSNNNSNSNGPGHKRYYNNRDSNNNRGNYNRRNNNNGNSNRRPYSQNRQYNNSNSSNINNSINSINSNNQNMNNGLGGSAQHHFNSSSPQKVEF

SEQ ID NO: 113600 - DNA, 465 bp, Drosophila melanogaster
  CDS (1)..(465)
atgctgccactttcacttttaaaaacagcacagagccatcccatgttggtggagctgaaaaatggtgaaacatacaatggtcacctggttagttgcgactcgtggatgaatattaatctgcgcgatgttatttgcacctcaaaggatggcgatcggttttggcgcatgcccgaatgttatatccgcgggagcaccatcaaatatctgcgaatccccgacgaagtaatcgacatggtcaaggaggacgcgcaggccaagtcaaggaatcgcacagagatgaacaaaaaccgcggcggcaactcgtcgcaaaatcagcgcggcggacgtcctggtggcggcaaccgcaacaatgtcggcaatcgtcccggccagggatacggaggtgctgctaacaacgcgatgcgcctgggtggcgctgctggccaagggaaccgtctgccccacgccgccaaaaataggaaatag

SEQ ID NO: 113601 - protein, 154 aa, Drosophila melanogaster
MLPLSLLKTAQSHPMLVELKNGETYNGHLVSCDSWMNINLRDVICTSKDGDRFWRMPECYIRGSTIKYLRIPDEVIDMVKEDAQAKSRNRTEMNKNRGGNSSQNQRGGRPGGGNRNNVGNRPGQGYGGAANNAMRLGGAAGQGNRLPHAAKNRK

SEQ ID NO: 113602 - DNA, 599 bp, Anopheles gambiae str. PEST
  CDS (81)..(554)
gttttgtaaacagaagttccatttgccgcgcagcgttttgcggaaatttctactagaacctttcttatttagcttatacaatgctaccactatctctactcaaaacggcacagagtcatcctatgttggtggagttaaagaatggcgaaacatacaacggacacctggtgagctgtgacacctggatgaatattaatctgcgggaggtcatctgcacttcaaaggatggtgataagttttggcgcatgccggaatgctacatccggggcagcacgatcaagtatctccgcataccggatgaagtgatcgacatggtgaaggaggacatgcagtcgaagtcgcgcagccgcgccgacatgaacaagggcggccggaaccagaaccagggcggtcgcggaggcggcggtggcatgggcggtggcggcggcggtggcggcggtggtggtgggcgaaacaatatgaacgccaacaatcggaacaccttcggcggcaaccgcggcggcaatcgggccggactgggcaacccgaaccgaaacgcaccgaacaagaagtaataataaagtcgactcaatcgcgcttggaattggtttagtctcgtg

SEQ ID NO: 113603 - protein, 157 aa, Anopheles gambiae str. PEST
MLPLSLLKTAQSHPMLVELKNGETYNGHLVSCDTWMNINLREVICTSKDGDKFWRMPECYIRGSTIKYLRIPDEVIDMVKEDMQSKSRSRADMNKGGRNQNQGGRGGGGGMGGGGGGGGGGGGRNNMNANNRNTFGGNRGGNRAGLGNPNRNAPNKK

SEQ ID NO: 113604 - DNA, 519 bp, Candida glabrata CBS 138
  CDS (1)..(519)
atgctaccactttacttgttaactaatgccaagggacagcagatgcgtatagagctgaagaatggtgatatagtggagggtgagctgactaatgtggataattggatgaatctgactcttgccaatgtgaatgaatacaaaggtagtgagaacaacacaaacttgcctcaagttaaagttgttaagtctaaagaaatctacgtcaggggtgtttatataaaatatatcacacttcaagatgatatcatagagaaggtcaagcaacaaatcaacaacaataataataataacaataatagaaagtttaacaacagaaatcatcaaaacaactacggatataggaggaataacactggtggtaattacaacaatggcaacaacaacaataataataataacaataataataacaggagaaactacaacaaccgtcgctactacaacaaccaaaaccaaaaccaaaaccaaaaccaaagccaaggtcaaagtcagggtcaaaagaatcaacaatttgagtag

SEQ ID NO: 113605 - protein, 172 aa, Candida glabrata CBS 138
MLPLYLLTNAKGQQMRIELKNGDIVEGELTNVDNWMNLTLANVNEYKGSENNTNLPQVKVVKSKEIYVRGVYIKYITLQDDIIEKVKQQINNNNNNNNNRKFNNRNHQNNYGYRRNNTGGNYNNGNNNNNNNNNNNNRRNYNNRRYYNNQNQNQNQNQSQGQSQGQKNQQFE

SEQ ID NO: 113606 - DNA, 552 bp, Kluyveromyces lactis NRRL Y-1140
  CDS (1)..(552)
atgcttccattatatttattgaccaatgcaaagggtcaaacaatgcatgttgaactaaaaaatggagaaactgtggaaggtacgctatctgatgtagacaattggatgaacttgacactttccaatgtcactcatgtagctagtggagagactttgaaattaccaagcttctatttgaaaggttctttcatcaagtatgttaatttgcaagatgatatcatagacaaggtaaaacaacaatggggtcaaaacagaggcggtaaagacgatagaagaagaaataacaactacaataataacaataattattatcagaatagggatggtaacagaagaggtggtagaagaaactatcaaaactcaggtaacagaagggattacaacaacaacaataataataataataataataataacaatactcacagccataacaatgcaggatctcgtcgttataatattcaaaatagatcacaatacgatgcatcatccaatccacagctttcgtattcgcaggcgtcaaacaatagtaatcaaactccacaattttga

SEQ ID NO: 113607 - protein, 183 aa, Kluyveromyces lactis NRRL Y-1140
MLPLYLLTNAKGQTMHVELKNGETVEGTLSDVDNWMNLTLSNVTHVASGETLKLPSFYLKGSFIKYVNLQDDIIDKVKQQWGQNRGGKDDRRRNNNYNNNNNYYQNRDGNRRGGRRNYQNSGNRRDYNNNNNNNNNNNNNTHSHNNAGSRRYNIQNRSQYDASSNPQLSYSQASNNSNQTPQF

SEQ ID NO: 113608 - DNA, 498 bp, Debaryomyces hansenii CBS767
  CDS (1)..(498)
atgttgccattatatttgttgacatcagctaagaatcaacctattttagttgaattaaagaatggggagagtttaaacggacaattagttaattgcgactcatggatgaacttaactttaaaggacgtaattcagtcatcttcaaatggagaaacatttgtcaaattaccagaatgctacattagaggtaaccatattaaatatttgagattaccagaagagattatggattatgccaaggaacaaaatattttgaatatggaacaaagaaacagaaatcaaaggagaagaacggggggtggaaactacaataacaggagaaactacaacaatcaaaataataacagaaatggtggatacaataaccgtcgtcaaaatcaaaatcaaaaccaaaatcaaaaccaaaaccaaaatcaaggtcatagttatagtagtcatggtcatggacaaggtcacggacaaggccaaggtaatggtgctaaccaaagcaaattttag

SEQ ID NO: 113609 - protein, 165 aa, Debaryomyces hansenii CBS767
MLPLYLLTSAKNQPILVELKNGESLNGQLVNCDSWMNLTLKDVIQSSSNGETFVKLPECYIRGNHIKYLRLPEEIMDYAKEQNILNMEQRNRNQRRRTGGGNYNNRRNYNNQNNNRNGGYNNRRQNQNQNQNQNQNQNQGHSYSSHGHGQGHGQGQGNGANQSKF

SEQ ID NO: 113610 - DNA, 396 bp, Yarrowia lipolytica CLIB122
  CDS (1)..(396)
atgaatgtcctacccttatccctactcaacgcagcacagggtcagcccatgctggtggagctcaaatcgggcgagtccctgagaggccacctgttgaaatgtgaccactggatgaacctcacgctcaaggaggtcgaagagttttctgcatcgggcgaaaacaccgccaccgtgtccgagtactatgtacgaggctccaacatcaaggctctccagctgccagacgagctactgcacagcatcaagcaacaatacagccagcagcgggaacagcgacagcgacagcagcagctggagcagggcggccagtttggcaaccgacgaggcaaccgaaactacaacaaccagagcaacaaccccaaccagcgacagcgaggtggaggacgacgatattag

SEQ ID NO: 113611 - protein, 131 aa, Yarrowia lipolytica CLIB122
MNVLPLSLLNAAQGQPMLVELKSGESLRGHLLKCDHWMNLTLKEVEEFSASGENTATVSEYYVRGSNIKALQLPDELLHSIKQQYSQQREQRQRQQQLEQGGQFGNRRGNRNYNNQSNNPNQRQRGGGRRY

SEQ ID NO: 113612 - DNA, 685 bp, Apis mellifera
  CDS (1)..(423)
atgtcaatattacctttatcattattaagaacagctcaaaaccatcctatgctagttgaacttaagaatggtgaaacatataatggacatttagttagttgtgatagttggatgaatataaatctcagagaggttatatgtacatctagggatggtgataaattttggagaatgcctgaatgttatattcgaggtagtacaattaaatatttacgaattcctgatgaagttatagatatggtaaaagaagatgtacaaatgaaatcaagaggacgtggagaaatgaaaggaagaggacaaagccaacgaggtcgtggtagtggcagaggtacttttggtcgtggtggaagaggtcctgcagctcttggtcgtggcggaggtaatcaaggaaataaatctcaaaataaagcaagaacaaaataaagttatattattttatttcgtgtagttaaattaataattcccattttattttttttttgaaaatatattcgtaatattcatataaaacaaaattatttcttttattttataagaaatttcatttgagattgcaatgttacaactatattttatttttcatagttaatttatactgaattagtaaaattaacatcaatttttatatcaaatttaatatcaaaatttataaaaggcaaatatttatttcacttacatgaaatag

SEQ ID NO: 113613 - protein, 140 aa, Apis mellifera
MSILPLSLLRTAQNHPMLVELKNGETYNGHLVSCDSWMNINLREVICTSRDGDKFWRMPECYIRGSTIKYLRIPDEVIDMVKEDVQMKSRGRGEMKGRGQSQRGRGSGRGTFGRGGRGPAALGRGGGNQGNKSQNKARTK

SEQ ID NO: 113614 - DNA, 2328 bp, Aspergillus nidulans FGSC A4
  CDS (1)..(2328)
atggtaaacactaatccgaagtgccagctctgtctccccctaggtcttctaacagccgctcaaggccacccgatgctcgtcgagctcaagaacggcgaaactctgaacggccaccttgccaactgtgacaactggatgaatttaatactcagagaggtcgtccaaacgagccccgagggagaccgttttttcaagctgcctgaagtctatgtccgcgggaacaacatcaaatatctgcgaattccagaagaaatcatcgatatggttaaggaacagcagcaaaaccagtctcagaatcgcaaccgcgggcctcgcgatggtggacggggcgaccggggaggtcgtgccatgatgtctcgcaagagacttggggcgggtcaattacgccactatttcagttcagagctgcgatcccatgcctccgagcgccttctccatacagtttcggcaacgcgacgccctttctgcccttcattccttcagcgtgatacattacagcgaagtctcgagaaatgcaacagcaccattcctgctggacaattgcaaaacggaactcaacataatggggattttagcggccaattaaatgacgagctgaaagatgcgcctggagagaaatcggaaaagaaccacgagaggcgacatgagaagaagcctggatcataccggggtcaccggccaggacaggagttgcctccgcctcctgaagcacctaacagcatgaaggctcttccgacaaacgagctagaggacttgctcacaagacgaagcaacacgcgtgtgaggctggccaatgcgatgcagccactatacgtcctgttacgggaccgtcgaattcgaccgaatacacggcattataaggcggttatacagagcaactcagatcctgagcatggatcgtctaaaacagtgcggaagttgcttgtggaaatggaaaagtataacattcccgttgacgctggcccactccgtgcagcactgctggcgcttgctgttcatcccgactatctcctgcggcaggacgtgttgcgagccctacgggatcgatgggtcaccctcagcgaggatgactggcattatgtggtggcgggcttgatcagggagcagcaatttgagctggcgctcgatcatattgcgcatatggagaggaagcgtattgtggtcaaggactggcttcacagtcttttgatttacaatctctgtgacttcaacgagtttgacctggttcgcgagctgatggtggttcgcttgaaccaggggcatgttatgagccgagagcttcgcacgtatgttctcgactcagcgagcaaggctcaccactatgatttgacatcctttatctggaggagaatagtggaactaaagaacgctgccccaccacgtggcatctgcgagcaggttctcgaggtggctgcgcgccatggagatacgcagctcaagaacgctgtagtcaatatgctcgaacacaatgagctggaacttggatataaagatttcttgagcttggtcaggggacaccttgcggccggcgatctgtattccgcgttagaaatatgtacggggactgcccgcggtgcgcgaatgaggtgtttcaagtcgatccgagtccattgtcgcgagaataacatccacccgcgagatatctggaacacgatcaaggcgttgaaggcatcgggaaaagttatccagctcgaatatgccgccttagtaatcgaactgtgcgagaaggccgcggcccgggatccgttcgttgttgacgacggagtcaacatctacaagggaatctacgccctctgcggtcggaacccgactctgccgatgttcaactctctgctcgccatgtgccgagccggcaacaacgtccagtctgccgtatttttcgtgaaggaaatggcgaaactcggcctggtcccgaacggggagacctttgagcatctgctatttctttgcttgaaaaccggcaacttcaagtccgcctatctctatttggatgacctatacaaacgcgggttcaaagtccgaatccgcctacgtaatgagatgctgcgtctgtgtgcggaatcggacgacgagtatgctgccaagctattggaacacaaggaacacccgcagcttggaaaaaccgctgcacagagagaacggtacaagagacagagggcgaaatacaaggagaggagaaaggagaagagaaaggcgacgagcattgcgaaggcgggtgaggaggaaggctgggaagactacgagcccagtctcagcacgccagaggatctggtggccaagaccgagaaggtcaagacggcggtggagcagaagcctacagagacttga

SEQ ID NO: 113615 - protein, 775 aa, Aspergillus nidulans FGSC A4
MVNTNPKCQLCLPLGLLTAAQGHPMLVELKNGETLNGHLANCDNWMNLILREVVQTSPEGDRFFKLPEVYVRGNNIKYLRIPEEIIDMVKEQQQNQSQNRNRGPRDGGRGDRGGRAMMSRKRLGAGQLRHYFSSELRSHASERLLHTVSATRRPFCPSFLQRDTLQRSLEKCNSTIPAGQLQNGTQHNGDFSGQLNDELKDAPGEKSEKNHERRHEKKPGSYRGHRPGQELPPPPEAPNSMKALPTNELEDLLTRRSNTRVRLANAMQPLYVLLRDRRIRPNTRHYKAVIQSNSDPEHGSSKTVRKLLVEMEKYNIPVDAGPLRAALLALAVHPDYLLRQDVLRALRDRWVTLSEDDWHYVVAGLIREQQFELALDHIAHMERKRIVVKDWLHSLLIYNLCDFNEFDLVRELMVVRLNQGHVMSRELRTYVLDSASKAHHYDLTSFIWRRIVELKNAAPPRGICEQVLEVAARHGDTQLKNAVVNMLEHNELELGYKDFLSLVRGHLAAGDLYSALEICTGTARGARMRCFKSIRVHCRENNIHPRDIWNTIKALKASGKVIQLEYAALVIELCEKAAARDPFVVDDGVNIYKGIYALCGRNPTLPMFNSLLAMCRAGNNVQSAVFFVKEMAKLGLVPNGETFEHLLFLCLKTGNFKSAYLYLDDLYKRGFKVRIRLRNEMLRLCAESDDEYAAKLLEHKEHPQLGKTAAQRERYKRQRAKYKERRKEKRKATSIAKAGEEEGWEDYEPSLSTPEDLVAKTEKVKTAVEQKPTET

SEQ ID NO: 113616 - DNA, 657 bp, Oryza sativa subsp
  CDS (1)..(657)
atgcttccgctctcgctcctcaagaccgcccaggggcatcccatgctcgtggagcttaagaacggcgagacgtacaacgggcacttggtgaactgcgacacgtggatgaacatccacctccgggaggttatttgcacctcaaaggatggtgataagttttggaggatgccagaatgttacatccgtgggaacaccatcaagtatcttcgggttcctgatgaggtgattgacaaggtccaggaagagacttcaaagagcagatcagataggaggccaccaggtgtaggccgcggaagaggaagaggtgatataggtactaagcctggaggcagaggcattgggcgtggccaggatgatggtggcagcaaaggcggtggtggccgtggaaggggaggaattggaggtaaaggtggcatcaaagtagttaccagtgaagaggcagcggttggcctgtctcgaaacaatttgtttgatgtctggaccctcgactatattgaatattattgtggttattactttgacctgttcatcgcagagagccagggaggaattaagtctcagacagtcgcaccattttaccataaaatggtgaccactctcgcaactgctgccctgataaacggaacggccagcccgaatgcatttacatataactaa

SEQ ID NO: 113617 - protein, 218 aa, Oryza sativa subsp
MLPLSLLKTAQGHPMLVELKNGETYNGHLVNCDTWMNIHLREVICTSKDGDKFWRMPECYIRGNTIKYLRVPDEVIDKVQEETSKSRSDRRPPGVGRGRGRGDIGTKPGGRGIGRGQDDGGSKGGGGRGRGGIGGKGGIKVVTSEEAAVGLSRNNLFDVWTLDYIEYYCGYYFDLFIAESQGGIKSQTVAPFYHKMVTTLATAALINGTASPNAFTYN

SEQ ID NO: 113618 - DNA, 706 bp, Aedes aegypti
  CDS (84)..(548)
aacattcatacaatttctcaaacactttaaaacgtatttagttcttgtaaaatatttccaattttagataatacctcagcaatatgctacccttatcgcttctcaaaacggcacagagtcatcctatgttggtggaactcaaaaatggcgaaacctacaacggccacttggtaagctgcgacacctggatgaacataaatcttcgtgaggtcatctgcacatcaaaggatggcgataaattttggcgaatgcccgaatgttacatccgtggcagtacgatcaagtatctgcgcattccggacgaggtgatcgacatggtgaaggaggacgtgcaggccaaatcgcggaatcgaaccgagctgaacaagggaggtggccgcggccaaggtggaggcggtggaggccagcagggaggacgaggaggacccgggggagccggtgggggacgcaataatgccaacgccaataataggaacacctttggaaatcgcgcgggcaatcggtccggacttggcaatccgaatcggaacgcgctcaacaagaagtaatcggcaccacaatcggccatcgggtgtcgtctgttgcctaaagtgtgaaaaaagaaaagccaagcattttggacgaggaacgttttcagagaaaacatgaataaaaaatatgcttttctgtgtttgttggtggacgacgcgctccgcttgggaagaaa

SEQ ID NO: 113619 - protein, 154 aa, Aedes aegypti
MLPLSLLKTAQSHPMLVELKNGETYNGHLVSCDTWMNINLREVICTSKDGDKFWRMPECYIRGSTIKYLRIPDEVIDMVKEDVQAKSRNRTELNKGGGRGQGGGGGGQQGGRGGPGGAGGGRNNANANNRNTFGNRAGNRSGLGNPNRNALNKK

SEQ ID NO: 113620 - DNA, 402 bp, Aspergillus oryzae
  CDS (1)..(402)
atgtcctgcaaccttgggattaatttcttttctggaaggttacccctaggactgctcacggccgcccagggccatccaatgctcgtggaacttaagaacggcgaaacgctgaatggacatcttgccaattgcgataactggatgaacttaatactcaaagaggttgttcaaaccagcccagagggtgatcggttctttaggctgccggaagtctatatcagaggaaacaatatcaaatatttacggatccctgaagagattatagagatggttaaggaacaaccgcaaaaccagccttcgaaccgcaatcgtggtggacactctcaccggggcgacagaggtgatcggggtggacgtggtggacgtggtcgtggccgcggacgcggccggggtggcaactga

SEQ ID NO: 113621 - protein, 133 aa, Aspergillus oryzae
MSCNLGINFFSGRLPLGLLTAAQGHPMLVELKNGETLNGHLANCDNWMNLILKEVVQTSPEGDRFFRLPEVYIRGNNIKYLRIPEEIIEMVKEQPQNQPSNRNRGGHSHRGDRGDRGGRGGRGRGRGRGRGGN

SEQ ID NO: 113622 - DNA, 465 bp, Drosophila melanogaster
  CDS (1)..(465)
atgctgccactttcacttttaaaaacagcacagagccatcccatgttggtggagctgaaaaatggtgaaacatacaatggtcacctggttagttgcgactcgtggatgaatattaatctgcgcgatgttatttgcacctcaaaggatggcgatcggttttggcgcatgcccgaatgttatatccgcgggagcaccatcaaatatctgcgaatccccgacgaagtaatcgacatggtcaaggaggacgcgcaggccaagtcaaggaatcgcacagagatgaacaaaaaccgcggcggcaactcgtcgcaaaatcagcgcggcggacgtcctggtggcggcaaccgcaacaatgtcggcaatcgtcccggccagggataccgaggtgctgctaacaacgcgatgcgcctgggtggcgctgctggccaagggaaccgtctgccccacgccgccaaaaataggaaatag

SEQ ID NO: 113623 - protein, 154 aa, Drosophila melanogaster
MLPLSLLKTAQSHPMLVELKNGETYNGHLVSCDSWMNINLRDVICTSKDGDRFWRMPECYIRGSTIKYLRIPDEVIDMVKEDAQAKSRNRTEMNKNRGGNSSQNQRGGRPGGGNRNNVGNRPGQGYRGAANNAMRLGGAAGQGNRLPHAAKNRK

SEQ ID NO: 113624 - DNA, 447 bp, Fagus sylvatica
  CDS (1)..(447)
atgcttcctctttcattgctcaagactgctcaagggcatcctatgttagtggagctgaaaagtggggagacttacaatgggcatttggtgaattgtgatacatggatgaatatccatcttcgagaggtcatatgtacctcaaaggatggagatagattttggagaatgcctgactgttacattcgggggaatactattaagtatcttcgtgtcccagatgaggtaattgataaagttcaagaggagaccaagagccgtgcagatagaaagccacctggtgtggggcgtggaaggggaaggggtagagaggaaggtagtggtgcaaggcaagtgagaggcgccgggcgtgatgtaatgatgcaggtggcaaaggcatgggtggaggtccggggtagaggagcttctgcaggcaagagtggtggcagaggtggacgtggacgtggttga

SEQ ID NO: 113625 - protein, 148 aa, Fagus sylvatica
MLPLSLLKTAQGHPMLVELKSGETYNGHLVNCDTWMNIHLREVICTSKDGDRFWRMPDCYIRGNTIKYLRVPDEVIDKVQEETKSRADRKPPGVGRGRGRGREEGSGARQVRGAGRDVMMQVAKAWVEVRGRGASAGKSGGRGGRGRG

SEQ ID NO: 113626 - DNA, 366 bp, Schizosaccharomyces pombe
  CDS (1)..(366)
atgcttccattaacattattgaatgcaactcaaggtcgtcccatacttgttgagttaaaaaacggtgaaacgtttaatggtcatttagagaattgtgataattacatgaacctcacactgcgcgaagtcattcgtactatgcctgatggtgataaatttttccgtcttcctgagtgctatattcgtggaaataatatcaaatacctgcgtattcaagatgaggtgcttagtcaagtagctaaacaacaagcgcagcaaagagaaaatcgcggatcgcgatttcgcggacgtggtcaacgcggtcgtggaaactatggtcacacagcaccaaaccgtcgtggccgtggtagaggtggacacatgtaa

SEQ ID NO: 113627 - protein, 121 aa, Schizosaccharomyces pombe
MLPLTLLNATQGRPILVELKNGETFNGHLENCDNYMNLTLREVIRTMPDGDKFFRLPECYIRGNNIKYLRIQDEVLSQVAKQQAQQRENRGSRFRGRGQRGRGNYGHTAPNRRGRGRGGHM

SEQ ID NO: 113628 - DNA, 441 bp, Nicotiana tabacum
  CDS (1)..(441)
atgctcccactctcactgctcaagactgcacaggggcatcccatgttggtggaactaaaaaatggggaaacgtataatggtcatttggtcaactgtgatacctggatgaatatccatcttcgtgaagttatctgtacttcaaaggatggagatagattttggagaatgccagaatgttacgttcgtgggaatacaataaaataccttcgagtacctgatgaggtgattgataaggttcaggaggaggcaaaaagccgtacagatagaaaaccgcctggtgtaggacgcgcaagggcaagaggaggtagagatgacagtgctgtggggagacaaccaaaaggaattgggcgtgggatggatgatggaggtgccaaaggccggggcaaaggaggacctagtgccaagtctggtggcagaggtggaggtcgcggacgtggctga

SEQ ID NO: 113629 - protein, 146 aa, Nicotiana tabacum
MLPLSLLKTAQGHPMLVELKNGETYNGHLVNCDTWMNIHLREVICTSKDGDRFWRMPECYVRGNTIKYLRVPDEVIDKVQEEAKSRTDRKPPGVGRARARGGRDDSAVGRQPKGIGRGMDDGGAKGRGKGGPSAKSGGRGGGRGRG

SEQ ID NO: 113630 - DNA, 444 bp, Oryza sativa
  CDS (1)..(444)
atgcttccgctctcgctcctcaagaccgcccaggggcatcccatgctcgtggagcttaagaacggcgagacgtacaacgggcacttggtgaactgcgacacgtggatgaacatccacctccgggaggttatttgcacctcaaaggatggtgataagttttggaggatgccagaatgttacatccgtgggaacaccatcaagtatcttcgggttcctgatgaggtgattgacaaggtccaggaagagacttcaaagagcagatcagataggaggccaccaggtgtaggccgcggaagaggaagaggtgatataggtactaagcctggaggcagaggcattgggcgtggccaggatgatggtggcagcaaaggcggtggtggccgtggaaggggaggaattggaggtaaaggtggcatcaaaggtgggggccgcggacgtgggtga

SEQ ID NO: 113631 - protein, 147 aa, Oryza sativa
MLPLSLLKTAQGHPMLVELKNGETYNGHLVNCDTWMNIHLREVICTSKDGDKFWRMPECYIRGNTIKYLRVPDEVIDKVQEETSKSRSDRRPPGVGRGRGRGDIGTKPGGRGIGRGQDDGGSKGGGGRGRGGIGGKGGIKGGGRGRG

SEQ ID NO: 113632 - DNA, 28 bp, Artificial sequence
  primer
atgctacctttatatcttttaacaaatg

SEQ ID NO: 113633 - DNA, 26 bp, Artificial sequence
  primer
ttaaaattcgaccttttgtggagaag

SEQ ID NO: 113634 - protein, 125 aa, Artificial sequence
  consensus sequence
  Variant (4)..(4): Xaa in position 4 is any amino acid
  Variant (7)..(8): Xaa in position 7 to 8 is any amino acid
  Variant (10)..(12): Xaa in position 10 to 12 is any amino acid
  Variant (23)..(25): Xaa in position 23 to 25 is any amino acid
  Variant (27)..(27): Xaa in position 27 is any amino acid
  Variant (29)..(30): Xaa in position 29 to 30 is any amino acid
  Variant (33)..(33): Xaa in position 33 is any amino acid
  Variant (37)..(38): Xaa in position 37 to 38 is any amino acid
  Variant (40)..(41): Xaa in position 40 to 41 is any amino acid
  Variant (43)..(46): Xaa in position 43 to 46 is any amino acid
  Variant (47)..(58): Xaa in position 47 to 58 is any or no amino acid
  Variant (60)..(65): Xaa in position 60 to 65 is any amino acid
  Variant (68)..(68): Xaa in position 68 is any amino acid
  Variant (70)..(70): Xaa in position 70 is any amino acid
  Variant (73)..(74): Xaa in position 73 to 74 is any amino acid
  Variant (79)..(81): Xaa in position 79 to 81 is any amino acid
  Variant (84)..(84): Xaa in position 84 is any amino acid
  Variant (86)..(87): Xaa in position 86 to 87 is any amino acid
  Variant (89)..(103): Xaa in position 89 to 103 is any amino acid
  Variant (104)..(124): Xaa in position 104 to 124 is any or no amino acid
LPLXLLXXAXXXPMLVELKNGEXXXGXLXXCDXWMNXXLXXVXXXXXXXXXXXXXXXXGXXXXXXPEXYXRGXXIKYLXXXDEXIXXVXXXXXXXXXXXXXXXXXXXXXXXXXXXXXXXXXXXXG

SEQ ID NO: 113635 - protein, 43 aa, Artificial sequence
  protein pattern
  Variant (4)..(4): Xaa in position 4 is any amino acid
  Variant (7)..(7): Xaa in position 7 is any or no amino acid
  Variant (9)..(9): Xaa in position 9 is any or no amino acid
  Variant (11)..(11): Xaa in position 11 is any amino acid
  Variant (12)..(12): Xaa in position 12 is Gly, Asn or Ser
  Variant (13)..(13): Xaa in position 13 is any amino acid
  Variant (14)..(14): Xaa in position 14 is Pro, Gln or Thr
  Variant (16)..(16): Xaa in position 16 is any amino acid
  Variant (17)..(17): Xaa in position 17 is Ile or Val
  Variant (21)..(21): Xaa in position 21 is Asn or Ser
  Variant (23)..(23): Xaa in position 23 is Asp or Glu
  Variant (24)..(25): Xaa in position 24 to 25 is any amino acid
  Variant (26)..(26): Xaa in position 26 is Glu, Asn or Gln
  Variant (28)..(28): Xaa in position 28 is any amino acid
  Variant (30)..(30): Xaa in position 30 is Ala, Ser, Thr or Val
  Variant (31)..(31): Xaa in position 31 is Asp, Asn or Ser
  Variant (32)..(32): Xaa in position 32 is Cys or Val
  Variant (34)..(34): Xaa in position 34 is Asn, Ser or Thr
  Variant (38)..(38): Xaa in position 38 is Ile or Leu
  Variant (39)..(39): Xaa in position 39 is any amino acid
  Variant (41)..(41): Xaa in position 41 is any amino acid
  Variant (42)..(42): Xaa in position 42 is Asp, Glu or Asn
LPLXLLXTXAXXXXMXXELKXGXXXXGXLXXXDXWMNXXLXXV

SEQ ID NO: 113636 - DNA, 3417 bp, Saccharomyces cerevisiae
  CDS (1)..(3417)
atgaggattattaagggcagaaagcgaggcaagaacaagaagccaacgctaattttaaaaattcatgtcattcaagctgaaaatattgaagccttgaagacattcaattgtaacccggtatgttttgttaccactaatacattttatagtcaaaagacgaacaagctcaagaactcaaatacacactggaatcaaaccttgaggatcaaacttccgagaaatccaacatctgaatggttaaggattatagtatacgacgccctaccaaccggagctccccctactacccccagtagaccaaggacaaccactgcaaatacatcttcatcgacactgtcaaattcagggctaagttctcactctcattcgtcgagaaatttgaatgttacgtccaaaggtaatcaaacttcaacatcaattaattcagtatcatcttcagctacaccggccccttcacattcttcctcttctctctcaacaacaggtcccgggtccacacacaaaaataggattaatagctatctatatttgggtgaagcaaaaatttcattactggatttattcaagaggaaggacaccacgacgagctataaattttcaattgaagctcagcggtaccatctatacgatatgaaaggagggaaagaccaagattccttgaactgcaactttctagtgggcgatattttgcttggatttaagctagaatgtaacgttaaaagaaccccgacttttcaggctttcaatgcttggagaaatgagttgaacacttacttgggcagaatagatagaaataaggcccgcatgagatcttctagttctttgccacctccactagaagatatgttgagcaatagttcagctgttagtggaaatgaaatacgacgcgagaaaccatatagcgatactgatctagcccacgatgaagaggtcaatgccgaggatgaaatagatgctgaggaatctattgaagatatgaatagcagcggcagcatttgtacggagaggaggtacgatatagacaatgatactatattcgactctatatctgaggttgtttcgctaaatgatgaagaactagatattctaaatgattttgaagaagcagatcatccaaatgtgccagacataaatgtgcatgacatcgacgaagatacccgtatcagtctatcttcaatgataacagctttagatgaatatgatatcgtagaaccagaagatgttgcaaaattacctgcagtgtcggaaaatgacataacatcagtggatgacgaagaatctgaaaaccaacaggaaagtgatgaggagtttgatatatataatgaggatgagcgtgaagattctgattttcaatcaaaagaatacattgggagtcggcttttacacctgcaaaggggtaaacataataaatcatatgcaaattacttatacagaagagcaaaaagtaacttttttatatcgaaaaaggaacatgcgatgggggtagtatttatgcatattggggctatcaaaaatttacctgcattaaggaatcggttgtccaagactaattatgaaatggatccatttatcgttatttcgtttggtagaagagtattcaagacatcttggagaaaacatactttaaacccagaatttaatgaatatgccgctttcgaagtttttccccatgaaacgaattttgctttcagtatcaaagttgttgataaagactcattttcattcaatgatgacgttgcaaaatgcgaactggcttggtttgatatgctgcaacagcaacaacatgaaaacgaatggataccttatgagataccattggatctcactgttgagccagcacatgctcctaagcaaccggtattatattcgagcttcaaatatgtttcatatccgttcttaaaaaagagcttttggaaagaagctgttgacacatcagtcaacttagagagactcgacattattcaagtaatgctctatcttgaacgtcttggttcattcacgatggccgattcttttgaactctttcagcatttcaataaatctgcttgggccggccagagcattactagatcacaattagttgaagggctacagtcatggagaaaatccactaattttaaacgcatctggacatgtcctagatgcatgcgttcatgcaaaccaactagaaatgctagacgttctaaactggttctagaaaatgacttgataacccattttgccatatgtacgttttcaaaagaacacaaaactttaaagccgtcgtacgtctcatctgcatttgcatccaagagatggttctctaaggttttgataaaattaacttatggtaaatatgctttgggatctaacaatgcaaacatcttggttcaagaccgagacacagggataattattgaggaaaaaataagcgcacacgtaaagttgggaatgaggattatatacaatggtaaaagtcccgagtctaaaaaatttagatccctcttgaagactttatcaatcaggcaaggcaaaaaatttgacagcactgcatctgccaaacaaattgaacctttcataaagtttcactcgctagacctttcacaatgccgagataaagattttaaaacattcaatgaatttttttacaggaaactaaaaccaggaagccggctgcctgaaagtaataataaagaaatattgttttcaccagcagattcaagatgcacagtgttcccaactatacaagaatcgaaggaaatatgggtgaaaggaagaaaattttctattaagaaactagccaataactataatccggaaacatttaatgacaataactgcagtattggtatatttagactggcgccacaagattatcaccggtttcactcaccatgtaatggtacgattggaaaacctgtatatgtggatggagagtattatactgtaaatccaatggccgttcgtagtgagttagacgtctttggtgaaaatatcagagttattatccccatcgattctcctcaatttggcaaactactgtacatacctattggtgcaatgatggttggatccatactattgacctgcaaagaaaacgatgtagttgagagtggacaggagctgggctattttaaatttggaggttctactataataatcattatcccgcacaacaacttcatgtttgattccgaccttgtgaaaaactcttcagaacgcattgaaacgttagtcaaagtcgggatgagtataggacacacatcaaatgtgaatgaattgaagagaatccgtattaaagtagacgacccaaagaaaattgaacggatcaagagaacaattagtgttagcgatgaaaatgccaagagtacaggaaatgtaacatgggaatatcatactttacgggaaatgatgaataaagattttgctgggctatga

SEQ ID NO: 113637 - protein, 1138 aa, Saccharomyces cerevisiae
MRIIKGRKRGKNKKPTLILKIHVIQAENIEALKTFNCNPVCFVTTNTFYSQKTNKLKNSNTHWNQTLRIKLPRNPTSEWLRIIVYDALPTGAPPTTPSRPRTTTANTSSSTLSNSGLSSHSHSSRNLNVTSKGNQTSTSINSVSSSATPAPSHSSSSLSTTGPGSTHKNRINSYLYLGEAKISLLDLFKRKDTTTSYKFSIEAQRYHLYDMKGGKDQDSLNCNFLVGDILLGFKLECNVKRTPTFQAFNAWRNELNTYLGRIDRNKARMRSSSSLPPPLEDMLSNSSAVSGNEIRREKPYSDTDLAHDEEVNAEDEIDAEESIEDMNSSGSICTERRYDIDNDTIFDSISEVVSLNDEELDILNDFEEADHPNVPDINVHDIDEDTRISLSSMITALDEYDIVEPEDVAKLPAVSENDITSVDDEESENQQESDEEFDIYNEDEREDSDFQSKEYIGSRLLHLQRGKHNKSYANYLYRRAKSNFFISKKEHAMGVVFMHIGAIKNLPALRNRLSKTNYEMDPFIVISFGRRVFKTSWRKHTLNPEFNEYAAFEVFPHETNFAFSIKVVDKDSFSFNDDVAKCELAWFDMLQQQQHENEWIPYEIPLDLTVEPAHAPKQPVLYSSFKYVSYPFLKKSFWKEAVDTSVNLERLDIIQVMLYLERLGSFTMADSFELFQHFNKSAWAGQSITRSQLVEGLQSWRKSTNFKRIWTCPRCMRSCKPTRNARRSKLVLENDLITHFAICTFSKEHKTLKPSYVSSAFASKRWFSKVLIKLTYGKYALGSNNANILVQDRDTGIIIEEKISAHVKLGMRIIYNGKSPESKKFRSLLKTLSIRQGKKFDSTASAKQIEPFIKFHSLDLSQCRDKDFKTFNEFFYRKLKPGSRLPESNNKEILFSPADSRCTVFPTIQESKEIWVKGRKFSIKKLANNYNPETFNDNNCSIGIFRLAPQDYHRFHSPCNGTIGKPVYVDGEYYTVNPMAVRSELDVFGENIRVIIPIDSPQFGKLLYIPIGAMMVGSILLTCKENDVVESGQELGYFKFGGSTIIIIIPHNNFMFDSDLVKNSSERIETLVKVGMSIGHTSNVNELKRIRIKVDDPKKIERIKRTISVSDENAKSTGNVTWEYHTLREMMNKDFAGL

SEQ ID NO: 113638 - DNA, 3702 bp, Candida glabrata CBS 138
  CDS (1)..(3702)
atgggtattgggaagaggaagaggagaggtgagaaggaggaccggatgcgtaatgggttgttcttggaggtccaccttgttggcactaagaagatagagcttttccagcgattccagtgttgtcccacctgttttgtgaccactaatacattttttgtgaaaaggtcatcgcggctgaagaattccaataccaggtggaaccagatagtaaagttgaagctgccggccaggccagtgtcgccgtatgtagacttggttgtttacgattgcatttcttctaaacattctcacggagtgaatgatgaaagtgatttgaatagtggttccgaggtggaaaataagagaaagagaggttactcttcgagttctgcgctgacgccatactcaagaacaaacctcagtgttagcggtgaaagcatttctgatgcatcgatatatggaaactcaacagcggaaggaaccaggtcgaacgtaacgtccaaaaacttgccatacttgacaattgacaataacaaaagctctacaacagcacatagacattctagatctttcggaaatttgagtctacagagacttagtatcccaagtccaagtgtgagttcttctcccagtggttatagtccatcagggcaaaagcgaaatttcacgtctgatagtaataatcaaggtagcttgggcacaaggaataagtcttcctatctctacgttggtgaaactagagtttctctgactgacatattcaaagtaaaagatacagctactggatacaatttctttcaacctccgcaatggttcccgctttatgataagaaaagacaaaaatcagatgattttggtaaagaacaaatcattggagagatccaagtgggatttcggttgaagtgtaataacagaagccattcaattgtacaggaatttaacgaatggaacaaatacctgcatgagaataagaaaagtaaccttgatttaagaaatgtttacagttcatcagcttatctggatgatgaaaacgaagatcttttatcaatgaaggaccccgatgctagagacttgtgtgacgagtttatcgaagaaaacattaaccttgatgaagagcaagtggtcatggatgaagatgatgatgatgaacttgaagatgatgtattggctatacccaatgaattgattgaaccacttggtcttttgcatctaagttctaataactctgatgattcaacaagccccgatgcatctggcaaaaatgatagtgatccaagtaacgatgcatttgatgaattagaaaacggttatgaagatgacgttgaatcattttcagatgaactaaaagatatcgactattttccagatgagccattaatatctgaaaatttggaaaattcaagtatcttgactataccgacaatggtgacagctctagatgaatacgaagttgtcctgcccagtagtgatgaagttatgaccttggatgatgtcatagcatctagaaacagctcaccggacacgcctacagatggtttatccaggattaagagcggaagtccacatatcagatctactggttcttttaaggatgatagaaatgaagaatctgaaaatagttcagatctgaacagtacaattttgaaaatgaacagaaagaaattatttccaatgctgaaaaggaagagaacaagagctaactactcttcgttctctaactattatgagacactgctaagtagaaaatttcagctctcaaagagagaacatgcacttggtgtaatgtttgtgcattttgagtccatagaaggtttgccagaattaaagaataagatatctaaaacatactacgcaatggatccatttattattatgacatttggtcggagagtgtttaaaacttcgtggagaaagcacacgttaaaccctgtgtttgatgaacgcgctgctttcgaaatttatccaaacgaaaagcattacgatatacatctaagtgttatggacaaagattctttttcatataatgatatgatagctaagtatgaattaacactgcaagaagtaatgcagaaacaaactccagatcatgattggaaggttattgaaattcctctaaaattgacattacgagattctgaaaattttgattctccagttttaagattaggaattagatatgtaccctattcgcatttgaagagttatttctggaaaagggctgtatctctttctacagatagagagacttttgacctcgttcaaaccctgttatttttgcaaagattaggctctttttccgagtttgatgtcttggagtttttttcttattacaaaaaattgccctggagtggagaaacattaacacaggatgaactagtgaatgggcttcaacaatggacaaaatcaggagattttaaaaatatctggaagtgtccatcctgttttagatcatttcgcccttctaataatgatatgaattcaaaattaatactggaaaatgatttgataacccattttgctctttgtagtttcaaaaaatgtggaaaagttctaaagccatcatatgtttcatctcaatttgcttccaaaaggtggttcagtaagttattgattaagctaacttatggtaagtatgcagttgggtcaaataatgccaatattttagtacaggacagagatactggtattgttttggaagaaaagataagtgcacatgtaaaggtgggtatgagaataatatataatgggaaaggtaaagaatcaaaaaagtttaaaacgctattgaaaacgctatccgtgagacaaggcaaaaaatttgataatcccttatccgctaaacaaattgactccttcattaaatttcatgacttggatatgagtcagtgtgaacctacagaatatcgtacctttaatgaatttttttaccggaagctaaaaccagggagtaggccacctgaaggtgatacttctgaggtgatggtttcggcagcagattctagatgtactgtttattctactattcaaaaatctaaagaaatctggatcaaaggaagtaagttcagcttgaatagattaacaggtggttatcgtccagaaatctttaacgattcttcatgcagcatagcaatttttagattggcaccgcaagactatcataggatacattgtcctgtagatggtgtggttggaaagcctatatttattaaaggagaatattacacagttaatccaatggctgtcagaagtgaattagacgtctttggtgaaaatgtaagagttattgtaccaatagaaactaaggagtttggtcctttattatatattgcagtcggtgctatgatggtcgggtcaataattttaacgtgtcaagaaggtgattttaagagacgaggtgacgaaatgggctatttcaagtttggaggctcgacagtaatattggttatgcaatcgaagaagttaatatttgattctgatctagttagcaactctttagagggcatagaaactttggttaaagttgggatgagcattggacatactcctaatattaaagaaataaaaagaagaaaagtgaaacccacggatgaaaagcaaatagaaaaaattaagagaagtatatcagtagccgaacataaagctgaaaatgctggcaatattccctggcagatgcagcttctcgagaaagatatcagagaaggtaatttatggggaaccgacacttga

SEQ ID NO: 113639 - protein, 1233 aa, Candida glabrata CBS 138
MGIGKRKRRGEKEDRMRNGLFLEVHLVGTKKIELFQRFQCCPTCFVTTNTFFVKRSSRLKNSNTRWNQIVKLKLPARPVSPYVDLVVYDCISSKHSHGVNDESDLNSGSEVENKRKRGYSSSSALTPYSRTNLSVSGESISDASIYGNSTAEGTRSNVTSKNLPYLTIDNNKSSTTAHRHSRSFGNLSLQRLSIPSPSVSSSPSGYSPSGQKRNFTSDSNNQGSLGTRNKSSYLYVGETRVSLTDIFKVKDTATGYNFFQPPQWFPLYDKKRQKSDDFGKEQIIGEIQVGFRLKCNNRSHSIVQEFNEWNKYLHENKKSNLDLRNVYSSSAYLDDENEDLLSMKDPDARDLCDEFIEENINLDEEQVVMDEDDDDELEDDVLAIPNELIEPLGLLHLSSNNSDDSTSPDASGKNDSDPSNDAFDELENGYEDDVESFSDELKDIDYFPDEPLISENLENSSILTIPTMVTALDEYEVVLPSSDEVMTLDDVIASRNSSPDTPTDGLSRIKSGSPHIRSTGSFKDDRNEESENSSDLNSTILKMNRKKLFPMLKRKRTRANYSSFSNYYETLLSRKFQLSKREHALGVMFVHFESIEGLPELKNKISKTYYAMDPFIIMTFGRRVFKTSWRKHTLNPVFDERAAFEIYPNEKHYDIHLSVMDKDSFSYNDMIAKYELTLQEVMQKQTPDHDWKVIEIPLKLTLRDSENFDSPVLRLGIRYVPYSHLKSYFWKRAVSLSTDRETFDLVQTLLFLQRLGSFSEFDVLEFFSYYKKLPWSGETLTQDELVNGLQQWTKSGDFKNIWKCPSCFRSFRPSNNDMNSKLILENDLITHFALCSFKKCGKVLKPSYVSSQFASKRWFSKLLIKLTYGKYAVGSNNANILVQDRDTGIVLEEKISAHVKVGMRIIYNGKGKESKKFKTLLKTLSVRQGKKFDNPLSAKQIDSFIKFHDLDMSQCEPTEYRTFNEFFYRKLKPGSRPPEGDTSEVMVSAADSRCTVYSTIQKSKEIWIKGSKFSLNRLTGGYRPEIFNDSSCSIAIFRLAPQDYHRIHCPVDGVVGKPIFIKGEYYTVNPMAVRSELDVFGENVRVIVPIETKEFGPLLYIAVGAMMVGSIILTCQEGDFKRRGDEMGYFKFGGSTVILVMQSKKLIFDSDLVSNSLEGIETLVKVGMSIGHTPNIKEIKRRKVKPTDEKQIEKIKRSISVAEHKAENAGNIPWQMQLLEKDIREGNLWGTDT

SEQ ID NO: 113640 - DNA, 3111 bp, Kluyveromyces lactis NRRL Y-1140
  CDS (1)..(3111)
atgcctcgtttgctccgtaggaaaagggggaaagatgaagtattggatgttaaccattcccgcaattcattaactttacaagttcaagtgcatcaagctcggaatttcacgataaatgaagctgtttgcaatccattgtgcttggtaacgttcaataacgttaccaagaccactaaaaaagtaaagaatagcactcaaccacaatggaaatcgactttgaaattgaagctatcgaattctccgttatctcaatacctacggttaattatttatgattctgataacactaatttcctatacttggcagaatgtaagatttcaattctaactttgttcaggactagtagaacccattttaaattcactaaagatgcacagtggtatcctatgttcaataggaacattttgagggagaagaatttgtcatggatggatccgaaggcactgccgtataattttggggaattgcaattatctttcaaattgacttctagtaacaatgatgactcggatacattgacaagcttccatctgtggaacacgaaattgatgcataatgttgattatgaaattatgaagaagggtgtatttagcgatgatgttatagaggatgaattggactttcaggacgtcttagatgagaatgaccttctggacgttttaaaggttgatgatttggatcaagatatggaacttgccatggatattagtaatgaggatgcgttgagcgtagatgaggaaggggatattatgggagaagaggaggaagcagcactcatagaagatcctgaaatattcgacaccatcggtgccgtatatggacttgataccgtttcgttatcttcaaatgcctccgtatcttcttcctcatcttctacttcgtcatcgatttcagaaacaccttcgatatcatctctgtattctgttgaaaagggtatggatgaaaacctagcctcgttgaacgagtttcatatttacaatggtttcgattctactccatcattccctcgtgaatatagtacgccgaacgaatcatctgcatcattgactcaagatcaagatggcttcagggatgaagatgataaaaagttactaagtagaagaaggaaacgaataccaaaaagaaaaagatctatccatagttttgaagtatcaaagagagaacattcattgggtgtagtagttatgaccttgaagagtattacaaaccttccattggttaagaagaaaatgtcaaaaacaggctatgatatggatccgttcgttataattacatttggtaggagagtgtttaaaagctcttacaagagacatactttgaacccggagtacaacgaagtttgtgcatttgaagtatatccagaggaaagacacttcgaacttgtccttaaagtacttgataaggatgccttttcattccatgacaaaattgccactgcttcaatatcttggacttcattggtgggaaagtaccaaataggtgaaatcatgaatatagacttacctttgaacctaaacaagacatcagacgaacataattctgttgcctccttgaatttccagtttttgccatacagcgagttgaaaagacacttctggacgaactcattagattcacttacaactcaaaaagattttgacatagtggaacttggtatgttgttggaacaaataggacaattcacatctaatgaaattaatgagttctttcatttttacaacaaagtgccctggtctcgtgagaaacttacaatatctgagcttgttgtctatttagagaattggactgaaaataataaaacttcttctccgttcaacaatatacaaacgtgtcccctgtgtggtagaaaagttcacaaatctagaaatgttgtgaattctaaactaaacaaggaaaacgacttgattgcccactttgcgatttgtcaattaaaaagagcacactcaagaagaacatttttgacaccatcatacgtctccattaactcagcatcgcgcaggtggttctcaaagttcttaatcaaattaacctatgggaagtacgctttgggttcaaataatgcaaatatcttggttcaggatagagattcgggcatcattatagaggagaaaattagtgcacatgtcaaggtcggaattcgaattatctataatggaaaaggtgttagatcaaagaaattcaagaacttgttgcgtaaacaaactatcaaacaggggaaaaagtttgatgcaccatcttcggtaaaatatattccatcattcatcaggttccattcgcttgatatgagtgaatgtttagaagtcgaatacaaatcatttaatgacttcttctacaggaaactaaaacctggtagcagaataccagaatccacaattccaggtatcctgctttcaccagcagattgcagggcaacagtgtttcccacagttcataaagcacaagaaatttggatcaaaggaagacagtttagcgtctccaaacttcttggagattgtcctcataaaccgcagtttaccgagcacaactctagtattgcgatcttcagattagcaccacaggattaccaccgtttccatgcaccatgcgatggtgttgttggaaaagtatataacatctccggggaatactacaccgtcaatccaatggctattagaactaaacttgatgttttcggtgaaaatatccgttgcatagtgccaatcacgtctcctgaatttggaactattctatatatagcagttggtgccatgatggttggttcgatcatattaacttgtaaagaaggtgacacaatcgtgagaggccaagaaatggggtatttcaaatttggcggttctaccattatcgttctcgtccctcatcaaaaaatcttctttgattcagatcttatcaaaaattccgatgagatggtagaaacattgttgaaagtcggaatgagtgttggccatatcccatctcaaccagagcatccaagaataaagaaacacattgaagacaaagtagaaatcgaaaggatcaaaaggatcattactgtcactgacgaaaatgtgtctgctttaggatcagttccttgggaatacgatcagctcaaaaatctctcaaccagctaa

SEQ ID NO: 113641 - protein, 1036 aa, Kluyveromyces lactis NRRL Y-1140
MPRLLRRKRGKDEVLDVNHSRNSLTLQVQVHQARNFTINEAVCNPLCLVTFNNVTKTTKKVKNSTQPQWKSTLKLKLSNSPLSQYLRLIIYDSDNTNFLYLAECKISILTLFRTSRTHFKFTKDAQWYPMFNRNILREKNLSWMDPKALPYNFGELQLSFKLTSSNNDDSDTLTSFHLWNTKLMHNVDYEIMKKGVFSDDVIEDELDFQDVLDENDLLDVLKVDDLDQDMELAMDISNEDALSVDEEGDIMGEEEEAALIEDPEIFDTIGAVYGLDTVSLSSNASVSSSSSSTSSSISETPSISSLYSVEKGMDENLASLNEFHIYNGFDSTPSFPREYSTPNESSASLTQDQDGFRDEDDKKLLSRRRKRIPKRKRSIHSFEVSKREHSLGVVVMTLKSITNLPLVKKKMSKTGYDMDPFVIITFGRRVFKSSYKRHTLNPEYNEVCAFEVYPEERHFELVLKVLDKDAFSFHDKIATASISWTSLVGKYQIGEIMNIDLPLNLNKTSDEHNSVASLNFQFLPYSELKRHFWTNSLDSLTTQKDFDIVELGMLLEQIGQFTSNEINEFFHFYNKVPWSREKLTISELVVYLENWTENNKTSSPFNNIQTCPLCGRKVHKSRNVVNSKLNKENDLIAHFAICQLKRAHSRRTFLTPSYVSINSASRRWFSKFLIKLTYGKYALGSNNANILVQDRDSGIIIEEKISAHVKVGIRIIYNGKGVRSKKFKNLLRKQTIKQGKKFDAPSSVKYIPSFIRFHSLDMSECLEVEYKSFNDFFYRKLKPGSRIPESTIPGILLSPADCRATVFPTVHKAQEIWIKGRQFSVSKLLGDCPHKPQFTEHNSSIAIFRLAPQDYHRFHAPCDGVVGKVYNISGEYYTVNPMAIRTKLDVFGENIRCIVPITSPEFGTILYIAVGAMMVGSIILTCKEGDTIVRGQEMGYFKFGGSTIIVLVPHQKIFFDSDLIKNSDEMVETLLKVGMSVGHIPSQPEHPRIKKHIEDKVEIERIKRIITVTDENVSALGSVPWEYDQLKNLSTS

SEQ ID NO: 113642 - DNA, 3474 bp, Debaryomyces hansenii CBS767
  CDS (1)..(3474)
atgagacttcgttctaagagaaaggattcaaactcatcagatataccagttactcaaggcggatcaaattatcacttaaatcttaaaataaatgctgatagagcagcagatttggtaccgaaggttgatgccgacaacatcaatgaatcgggttcagctacaccttcttcaacatcgagtaaaaagaatgtaaatccagttctagtggctgtgcttaataatgtgaaaaagaaaacgaagagaagggtgaacacaagtcaaccatcttgggatgcagcattacaattcccattgaaatcgaatgattactctcaggtctttagtttgacggtatgggataaacataaaagatacaagaactaccttggagaattgagattgaatttgaacgatattttcttcacggatgggaaatttcagtcgaaatctgatcttaagtggtacaagttatattctaataaagaatatcatagttttgtcactggatcattgttattatcgtttgaattggaagtaaaagggataagacaaaagaagtccagaaagacgaaagagcagatacaaaccccttcgcaaacaccggtacctgagtctgcttcagaaattgagaccttcaatgctgttagtagctctcctgggattgttgtcaacgtggtacctccttcaagaaaagcgagtgggaatttgcataagaaagtggattctctaagtatttcagatacagaaacagggatgctgtcaactatagaagaaaataaagagaaattattcacagattggaggaaactgttgatatactccgatcctgatcaaaatattacaaagcccgatgagcaaggattttattctgatactggggaagtgcttagtttgctggcggacttatccgatattgattctatcagttctacggcagtatcaaacccggatgccagggaatcggcagatatgcaacaaagtcctgtctcatcattgcaaaagcaaacttttttgactgttggagcagacgatgttagttccttatctgatggatctgtattttcgagtgatagtgctttgaattatgatagtgatgcattgtcaaatgataaacccctgaatttaggtagtgaagcgtctagatcaaaaagaggttttggattaaagagattaaggaaaaagaaggaaaaagagcaatttaatttgagcaagagggctgtcttaggtgttttatttctcgaaattgtgtcctgttctgacttacctccaaataagagctttaatcgtgcaacttttgatatggacccattcgtagtgataacattcgggaaaaagaccttcagaagtagctggaaacgtcatacattgaatccaatatttaatgaacgattagcgtttgaaattttaccacatgagagtaattttaacattcaattttttgtcttagataaggatcaattttcttacaatgacaatgttgccaatatctctttaagaatgaaggacgttacgaatatggcaaccgcacctcctgctacaacatatgagaacaagcatctgtctccttcttcattttcattattgcctaatgctctggatactgcactttcaacaggagaaaatgattcacaaaattcgagtattaggatacttgatgatgataatatggtacattcagttcgaaagaaaaaattcactaataggagaaaagttaccgttctgcatactgatacttctagatttaagaccatgaacttaacattggatttgcataaatctaagaatattggaaagtacaatcctacattgaaggtacgtgttaggtttgagccatatgagagtttaagaagacaattctggagtatattattagaacaatatgaattgaatgaatctgaggataaatatgactttattgagttaatttcatttttggatacattaggctgcgagaatagtgatcagattgttagtaacttttttgataagtataaaaaactggcttggggaggtgatttattatcaatcagtgaaattgtcgatgcacttgaagatcatgtcaaattttcgactggtattgatgataaactttttgatattgaaaaatgtccgttatgttgtcagaaacggttatctaagaagcaagactgtgatataattacgcatgtagcaatttgtgcttcaaaagattggagtattgttaataagttattagtttcatcttatgttactccacaaattgctactaaaagatggttcacaaaggttctaatcaagttaacctatggaaagtatacattaggcagtaattcagctaatatcttggttcaagatagaaccacaggtatcattttggaagagaaaatgggaatttatgttcggttaggaataagattattatacaaaggttttgataaagccaagtcgagaagaattagacaagtattgaaaaaattaagtgttaagcaaggcatcaaatttgattctccgcaactgaaaaatgatattgagtctttcgttaaatttcataaattggacttatcacagtgtctcgagcccaatttagagaagtatgcaactttcaatgagtttttctatagaaagttgaagccagaagctaggccgaacgaatctcccggtgataatagagttgttgtatcacctgctgattgtcgttgtaccgcttttgcaactgttaaacaagctaccgaagtttgggttaagggacgaaactttacgatagccaaactttttaacggtaatttcaataatttacaagagaccgatcttttcaaggctgaatgttgttcgttaggtatttttagattggctccacaagattatcacagatttcattcgcctgtagatggcgttattaaaaatattaaatacattgatggggaatattatacagttaaccccatggctattagatcagaattagatgtatttggagaaaacgtgcgtgccatcattcctatagaaaccaaggaatttggtactgttattatggttgctgttggtgcaatgatggtaggatcgattgttcttacaaaaggtgaaaatgatgtagtcaaaagaggtgatgaaattggttactttaaatttggcggctcaactattttgttgttatttaacaataaaatgtttaaatttgattccgatttggttaataattccaatacatcggtagaaacattgattcgcatgggtgagagtatcggccatgcaccagagattgaagagtacaagagagatcatatcgattttggagctcaatccaaggatttcaagttgaatttaatcagagcccttactggtggcgacttaagcaattccaaggagttaagtaattgggaaagtgcccatacgaatattgaagatttggtagatgttgtaaaagaggacaacattatcgaaaacgaagaagaggatgatgaattagatgaagaaggtctgttctatagtaacgaaagcgatgcatacgatttataa

SEQ ID NO: 113643 - protein, 1157 aa, Debaryomyces hansenii CBS767
MRLRSKRKDSNSSDIPVTQGGSNYHLNLKINADRAADLVPKVDADNINESGSATPSSTSSKKNVNPVLVAVLNNVKKKTKRRVNTSQPSWDAALQFPLKSNDYSQVFSLTVWDKHKRYKNYLGELRLNLNDIFFTDGKFQSKSDLKWYKLYSNKEYHSFVTGSLLLSFELEVKGIRQKKSRKTKEQIQTPSQTPVPESASEIETFNAVSSSPGIVVNVVPPSRKASGNLHKKVDSLSISDTETGMLSTIEENKEKLFTDWRKLLIYSDPDQNITKPDEQGFYSDTGEVLSLLADLSDIDSISSTAVSNPDARESADMQQSPVSSLQKQTFLTVGADDVSSLSDGSVFSSDSALNYDSDALSNDKPLNLGSEASRSKRGFGLKRLRKKKEKEQFNLSKRAVLGVLFLEIVSCSDLPPNKSFNRATFDMDPFVVITFGKKTFRSSWKRHTLNPIFNERLAFEILPHESNFNIQFFVLDKDQFSYNDNVANISLRMKDVTNMATAPPATTYENKHLSPSSFSLLPNALDTALSTGENDSQNSSIRILDDDNMVHSVRKKKFTNRRKVTVLHTDTSRFKTMNLTLDLHKSKNIGKYNPTLKVRVRFEPYESLRRQFWSILLEQYELNESEDKYDFIELISFLDTLGCENSDQIVSNFFDKYKKLAWGGDLLSISEIVDALEDHVKFSTGIDDKLFDIEKCPLCCQKRLSKKQDCDIITHVAICASKDWSIVNKLLVSSYVTPQIATKRWFTKVLIKLTYGKYTLGSNSANILVQDRTTGIILEEKMGIYVRLGIRLLYKGFDKAKSRRIRQVLKKLSVKQGIKFDSPQLKNDIESFVKFHKLDLSQCLEPNLEKYATFNEFFYRKLKPEARPNESPGDNRVVVSPADCRCTAFATVKQATEVWVKGRNFTIAKLFNGNFNNLQETDLFKAECCSLGIFRLAPQDYHRFHSPVDGVIKNIKYIDGEYYTVNPMAIRSELDVFGENVRAIIPIETKEFGTVIMVAVGAMMVGSIVLTKGENDVVKRGDEIGYFKFGGSTILLLFNNKMFKFDSDLVNNSNTSVETLIRMGESIGHAPEIEEYKRDHIDFGAQSKDFKLNLIRALTGGDLSNSKELSNWESAHTNIEDLVDVVKEDNIIENEEEDDELDEEGLFYSNESDAYDL

SEQ ID NO: 113644 - DNA, 25 bp, Artificial sequence
  primer
atgaggattattaagggcagaaagc

SEQ ID NO: 113645 - DNA, 25 bp, Artificial sequence
  primer
tcatagcccagcaaaatctttattc

SEQ ID NO: 113646 - protein, 1299 aa, Artificial sequence
  consensus sequence
  Variant (2)..(18): Xaa in position 2 to 18 is any amino acid
  Variant (19)..(25): Xaa in position 19 to 25 is any or no amino acid
  Variant (27)..(44): Xaa in position 27 to 44 is any amino acid
  Variant (45)..(65): Xaa in position 45 to 65 is any or no amino acid
  Variant (67)..(72): Xaa in position 67 to 72 is any amino acid
  Variant (74)..(89): Xaa in position 74 to 89 is any amino acid
  Variant (91)..(97): Xaa in position 91 to 97 is any amino acid
  Variant (99)..(103): Xaa in position 99 to 103 is any amino acid
  Variant (105)..(112): Xaa in position 105 to 112 is any amino acid
  Variant (114)..(120): Xaa in position 114 to 120 is any amino acid
  Variant (121)..(258): Xaa in position 121 to 258 is any or no amino acid
  Variant (260)..(261): Xaa in position 260 to 261 is any amino acid
  Variant (263)..(270): Xaa in position 263 to 270 is any amino acid
  Variant (272)..(299): Xaa in position 272 to 299 is any amino acid
  Variant (300)..(312): Xaa in position 300 to 312 is any or no amino acid
  Variant (314)..(318): Xaa in position 314 to 318 is any amino acid
  Variant (320)..(320): Xaa in position 320 is any amino acid
  Variant (322)..(464): Xaa in position 322 to 464 is any amino acid
  Variant (465)..(499): Xaa in position 465 to 499 is any or no amino acid
  Variant (501)..(513): Xaa in position 501 to 513 is any amino acid
  Variant (514)..(515): Xaa in position 514 to 515 is any or no amino acid
  Variant (517)..(567): Xaa in position 517 to 567 is any amino acid
  Variant (568)..(603): Xaa in position 568 to 603 is any or no amino acid
  Variant (605)..(606): Xaa in position 605 to 606 is any amino acid
  Variant (609)..(612): Xaa in position 609 to 612 is any amino acid
  Variant (613)..(613): Xaa in position 613 is any or no amino acid
  Variant (616)..(625): Xaa in position 616 to 625 is any amino acid
  Variant (628)..(638): Xaa in position 628 to 638 is any amino acid
  Variant (639)..(639): Xaa in position 639 is any or no amino acid
  Variant (644)..(647): Xaa in position 644 to 647 is any amino acid
  Variant (650)..(652): Xaa in position 650 to 652 is any amino acid
  Variant (654)..(655): Xaa in position 654 to 655 is any amino acid
  Variant (657)..(659): Xaa in position 657 to 659 is any amino acid
  Variant (665)..(667): Xaa in position 665 to 667 is any amino acid
  Variant (669)..(670): Xaa in position 669 to 670 is any amino acid
  Variant (674)..(675): Xaa in position 674 to 675 is any amino acid
  Variant (677)..(677): Xaa in position 677 is any amino acid
  Variant (679)..(686): Xaa in position 679 to 686 is any amino acid
  Variant (688)..(688): Xaa in position 688 is any amino acid
  Variant (692)..(692): Xaa in position 692 is any amino acid
  Variant (695)..(696): Xaa in position 695 to 696 is any amino acid
  Variant (698)..(699): Xaa in position 698 to 699 is any amino acid
  Variant (701)..(722): Xaa in position 701 to 722 is any amino acid
  Variant (723)..(793): Xaa in position 723 to 793 is any or no amino acid
  Variant (795)..(795): Xaa in position 795 is any amino acid
  Variant (797)..(817): Xaa in position 797 to 817 is any amino acid
  Variant (819)..(820): Xaa in position 819 to 820 is any amino acid
  Variant (822)..(824): Xaa in position 822 to 824 is any amino acid
  Variant (827)..(839): Xaa in position 827 to 839 is any amino acid
  Variant (840)..(842): Xaa in position 840 to 842 is any or no amino acid
  Variant (844)..(850): Xaa in position 844 to 850 is any amino acid
  Variant (852)..(854): Xaa in position 852 to 854 is any amino acid
  Variant (856)..(865): Xaa in position 856 to 865 is any amino acid
  Variant (866)..(866): Xaa in position 866 is any or no amino acid
  Variant (868)..(871): Xaa in position 868 to 871 is any amino acid
  Variant (873)..(874): Xaa in position 873 to 874 is any amino acid
  Variant (876)..(885): Xaa in position 876 to 885 is any amino acid
  Variant (887)..(888): Xaa in position 887 to 888 is any amino acid
  Variant (890)..(900): Xaa in position 890 to 900 is any amino acid
  Variant (901)..(905): Xaa in position 901 to 905 is any or no amino acid
  Variant (907)..(908): Xaa in position 907 to 908 is any amino acid
  Variant (911)..(911): Xaa in position 911 is any amino acid
  Variant (913)..(923): Xaa in position 913 to 923 is any amino acid
  Variant (924)..(931): Xaa in position 924 to 931 is any or no amino acid
  Variant (933)..(933): Xaa in position 933 is any amino acid
  Variant (935)..(935): Xaa in position 935 is any amino acid
  Variant (937)..(937): Xaa in position 937 is any amino acid
  Variant (939)..(939): Xaa in position 939 is any amino acid
  Variant (941)..(948): Xaa in position 941 to 948 is any amino acid
  Variant (949)..(951): Xaa in position 949 to 951 is any or no amino acid
  Variant (953)..(954): Xaa in position 953 to 954 is any amino acid
  Variant (958)..(961): Xaa in position 958 to 961 is any amino acid
  Variant (963)..(964): Xaa in position 963 to 964 is any amino acid
  Variant (968)..(968): Xaa in position 968 is any amino acid
  Variant (970)..(970): Xaa in position 970 is any amino acid
  Variant (980)..(981): Xaa in position 980 to 981 is any amino acid
  Variant (985)..(985): Xaa in position 985 is any amino acid
  Variant (994)..(995): Xaa in position 994 to 995 is any amino acid
  Variant (998)..(999): Xaa in position 998 to 999 is any amino acid
  Variant (1003)..(1006): Xaa in position 1003 to 1006 is any amino acid
  Variant (1008)..(1009): Xaa in position 1008 to 1009 is any amino acid
  Variant (1011)..(1011): Xaa in position 1011 is any amino acid
  Variant (1013)..(1014): Xaa in position 1013 to 1014 is any amino acid
  Variant (1016)..(1016): Xaa in position 1016 is any amino acid
  Variant (1018)..(1021): Xaa in position 1018 to 1021 is any amino acid
  Variant (1022)..(1022): Xaa in position 1022 is any or no amino acid
  Variant (1024)..(1029): Xaa in position 1024 to 1029 is any amino acid
  Variant (1031)..(1036): Xaa in position 1031 to 1036 is any amino acid
  Variant (1039)..(1039): Xaa in position 1039 is any amino acid
  Variant (1043)..(1049): Xaa in position 1043 to 1049 is any amino acid
  Variant (1051)..(1052): Xaa in position 1051 to 1052 is any amino acid
  Variant (1054)..(1055): Xaa in position 1054 to 1055 is any amino acid
  Variant (1058)..(1058): Xaa in position 1058 is any amino acid
  Variant (1061)..(1061): Xaa in position 1061 is any amino acid
  Variant (1063)..(1063): Xaa in position 1063 is any amino acid
  Variant (1065)..(1071): Xaa in position 1065 to 1071 is any amino acid
  Variant (1072)..(1074): Xaa in position 1072 to 1074 is any or no amino acid
  Variant (1077)..(1077): Xaa in position 1077 is any amino acid
  Variant (1086)..(1087): Xaa in position 1086 to 1087 is any amino acid
  Variant (1089)..(1090): Xaa in position 1089 to 1090 is any amino acid
  Variant (1092)..(1099): Xaa in position 1092 to 1099 is any amino acid
  Variant (1100)..(1100): Xaa in position 1100 is any or no amino acid
  Variant (1102)..(1102): Xaa in position 1102 is any amino acid
  Variant (1105)..(1105): Xaa in position 1105 is any amino acid
  Variant (1107)..(1107): Xaa in position 1107 is any amino acid
  Variant (1109)..(1111): Xaa in position 1109 to 1111 is any amino acid
  Variant (1113)..(1117): Xaa in position 1113 to 1117 is any amino acid
  Variant (1119)..(1119): Xaa in position 1119 is any amino acid
  Variant (1121)..(1121): Xaa in position 1121 is any amino acid
  Variant (1124)..(1125): Xaa in position 1124 to 1125 is any amino acid
  Variant (1127)..(1130): Xaa in position 1127 to 1130 is any amino acid
  Variant (1132)..(1139): Xaa in position 1132 to 1139 is any amino acid
  Variant (1140)..(1144): Xaa in position 1140 to 1144 is any or no amino acid
  Variant (1146)..(1150): Xaa in position 1146 to 1150 is any amino acid
  Variant (1152)..(1153): Xaa in position 1152 to 1153 is any amino acid
  Variant (1165)..(1165): Xaa in position 1165 is any amino acid
  Variant (1167)..(1167): Xaa in position 1167 is any amino acid
  Variant (1169)..(1170): Xaa in position 1169 to 1170 is any amino acid
  Variant (1172)..(1180): Xaa in position 1172 to 1180 is any amino acid
  Variant (1191)..(1191): Xaa in position 1191 is any amino acid
  Variant (1193)..(1194): Xaa in position 1193 to 1194 is any amino acid
  Variant (1202)..(1202): Xaa in position 1202 is any amino acid
  Variant (1204)..(1204): Xaa in position 1204 is any amino acid
  Variant (1206)..(1206): Xaa in position 1206 is any amino acid
  Variant (1209)..(1212): Xaa in position 1209 to 1212 is any amino acid
  Variant (1215)..(1221): Xaa in position 1215 to 1221 is any amino acid
  Variant (1230)..(1230): Xaa in position 1230 is any amino acid
  Variant (1233)..(1234): Xaa in position 1233 to 1234 is any amino acid
  Variant (1236)..(1236): Xaa in position 1236 is any amino acid
  Variant (1238)..(1241): Xaa in position 1238 to 1241 is any amino acid
  Variant (1243)..(1243): Xaa in position 1243 is any amino acid
  Variant (1245)..(1245): Xaa in position 1245 is any amino acid
  Variant (1255)..(1265): Xaa in position 1255 to 1265 is any amino acid
  Variant (1271)..(1272): Xaa in position 1271 to 1272 is any amino acid
  Variant (1275)..(1278): Xaa in position 1275 to 1278 is any amino acid
  Variant (1282)..(1284): Xaa in position 1282 to 1284 is any amino acid
  Variant (1286)..(1286): Xaa in position 1286 is any amino acid
  Variant (1288)..(1288): Xaa in position 1288 is any amino acid
  Variant (1291)..(1295): Xaa in position 1291 to 1295 is any amino acid
  Variant (1297)..(1298): Xaa in position 1297 to 1298 is any amino acid
MXXXXXXXXXXXXXXXXXXXXXXXXLXXXXXXXXXXXXXXXXXXXXXXXXXXXXXXXXXXXXXXXPXXXXXXNXXXXXXXXXXXXXXXXWXXXXXXXLXXXXXSXXXXXXXXDXXXXXXXXXXXXXXXXXXXXXXXXXXXXXXXXXXXXXXXXXXXXXXXXXXXXXXXXXXXXXXXXXXXXXXXXXXXXXXXXXXXXXXXXXXXXXXXXXXXXXXXXXXXXXXXXXXXXXXXXXXXXXXXXXXXXXXXXXXXXXXXXXYXXEXXXXXXXXFXXXXXXXXXXXXXXXXXXXXXXXXXXXXXXXXXXXXXXXXXGXXXXXFXLXXXXXXXXXXXXXXXXXXXXXXXXXXXXXXXXXXXXXXXXXXXXXXXXXXXXXXXXXXXXXXXXXXXXXXXXXXXXXXXXXXXXXXXXXXXXXXXXXXXXXXXXXXXXXXXXXXXXXXXXXXXXXXXXXXXXXXXXXXXXXXXXXXXXXXXXXXXXXXXXXXXXXXXXXXXXXXXXXXLXXXXXXXXXXXXXXXLXXXXXXXXXXXXXXXXXXXXXXXXXXXXXXXXXXXXXXXXXXXXXXXXXXXXXXXXXXXXXXXXXXXXXXXXXXXXXXXXXXXXXXXFXXSKXXXXXGVXXXXXXXXXXLPXXXXXXXXXXXXMDPFXXXXFGXXXFXXSXXXHTLNPXXXEXXAFEXXPXEXXXXXXXXVXDKDXFSXXDXXAXXXXXXXXXXXXXXXXXXXXXXXXXXXXXXXXXXXXXXXXXXXXXXXXXXXXXXXXXXXXXXXXXXXXXXXXXXXXXXXXXXXXXXXXXXXXXLXLXXXXXXXXXXXXXXXXXXXXXYXXLXXXFWXXXXXXXXXXXXXXXXDXXXXXXXLXXXGXXXXXXXXXXXFXXXXKXXWXXXXXXXXXXVXXLXXXXXXXXXXXXXXXXIXXCPXCXXXXXXXXXXXXXXXXXXXDXIXHXAXCXXXXXXXXXXXLXXSYVXXXXAXXRWFXKXLIKLTYGKYXXGSNXANILVQDRXXGIXXEEKXXXXVXXGXRXXYXGXXXXXSXXXXXXLXXXXXXQGXKFDXXXXXXXIXXFXXFHXLDXSXCXXXXXXXXXXFNXFFYRKLKPXXRXXEXXXXXXXXXSXADXRXTXXXTXXXXXEXWXKGXXFXXXXLXXXXXXXXXXXXXFXXXXXSXXIFRLAPQDYHRXHXPXXGXXXXXXXXXGEYYTVNPMAXRXXLDVFGENXRXIXPIXXXXFGXXXXXXXGAMMVGSIXLTXXEXDXXXXGXEXGYFKFGGSTXXXXXXXXXXXFDSDLXXNSXXXXETLXXXGXSXGHXXXXXEXXR

SEQ ID NO: 113647 - DNA, 336 bp, Saccharomyces cerevisiae
  CDS (1)..(336)
atgacggaaagaattactacaccaaatgccgataggacggtacaacaccatgccttaccagtggatacaacgggtctcattttttttgcggtgtttgcttctagctttgtcctttatcgtagaggttcttgctttgaaagctacctattcttttcttttcccttaagctatttttcaaataatagaaaaaagagtcgcgtgcaaagcgataagcaatttttttcagtctttaaaaaaaatgatcctgaacagcagcatctttattatgcagcgttgatgcagtttctaactcaattagttgaatcacctacgctcttctgtgtttgcactcagtag

SEQ ID NO: 113648 - protein, 111 aa, Saccharomyces cerevisiae
MTERITTPNADRTVQHHALPVDTTGLIFFAVFASSFVLYRRGSCFESYLFFSFPLSYFSNNRKKSRVQSDKQFFSVFKKNDPEQQHLYYAALMQFLTQLVESPTLFCVCTQ

SEQ ID NO: 113649 - DNA, 25 bp, Artificial sequence
  primer
atgacggaaagaattactacaccaa

SEQ ID NO: 113650 - DNA, 24 bp, Artificial sequence
  primer
ctactgagtgcaaacacagaagag

SEQ ID NO: 113651 - DNA, 975 bp, Arabidopsis thaliana
  CDS (1)..(975)
atggcggcgatagaggacagtccaacgttttcctctgtggtaactccggcggcttttgagataggcagcctcccgacaaccgagataccggtggatccggtggaaaatgattcaacagcaccgccaaaaccggtgagaatcacctgtccaacagtcgccggaacttatcccgtcgttttattcttccatggcttttatcttcgcaactacttctactctgacgttcttaaccacatcgcttcgcatggttacattcttgtagccccacagttgtgcaaattattgccgccgggagggcaagtggaagtggacgatgctggaagtgtgataaactgggcatcggaaaacctcaaagctcacctaccaacttcggtaaatgctaatggaaaatacacctcactcgtgggccacagccgcggtgggaaaacggcgtttgcggttgcgctaggccatgccgcaacattagacccatccatcacgttttcagctctaataggaattgatccagtcgcaggaactaacaaatacattagaaccgatccgcatatcttaacgtataaaccggaatctttcgagctggacataccggttgcagtggtgggaaccggactcggaccgaagtggaacaacgtgatgccaccatgcgcaccaacggacttaaaccatgaggagttttacaaagagtgtaaggcgacgaaagcccatttcgtggctgcggattacggacatatggatatgttggacgatgatttgcccggttttgttgggtttatggccggttgtatgtgtaagaatgggcaaagaaaaaagtctgagatgaggagctttgtaggtggaattgtggttgcgtttctcaagtatagtttgtggggtgaaaaagcggagattcgattgattgtgaaggatccttccgtttctccggccaagcttgatccttcacctgagttggaagaagcttctggtatcttcgtctag

SEQ ID NO: 113652 - protein, 324 aa, Arabidopsis thaliana
MAAIEDSPTFSSVVTPAAFEIGSLPTTEIPVDPVENDSTAPPKPVRITCPTVAGTYPVVLFFHGFYLRNYFYSDVLNHIASHGYILVAPQLCKLLPPGGQVEVDDAGSVINWASENLKAHLPTSVNANGKYTSLVGHSRGGKTAFAVALGHAATLDPSITFSALIGIDPVAGTNKYIRTDPHILTYKPESFELDIPVAVVGTGLGPKWNNVMPPCAPTDLNHEEFYKECKATKAHFVAADYGHMDMLDDDLPGFVGFMAGCMCKNGQRKKSEMRSFVGGIVVAFLKYSLWGEKAEIRLIVKDPSVSPAKLDPSPELEEASGIFV

SEQ ID NO: 113653 - DNA, 1188 bp, Glycine max
  CDS (18)..(959)
gtgagaagagtggtgtgatggcgcagagagctcaaccagtattggccacagatgttttccaaatgggaaacatccaatggaagcaattcaatgttgatacatccagtgcttccttctcacctccaaaaccattgctaatttttacaccaactgttcctggcgcataccctgtaatattgttcgtccatggctttttcattcgcaatttctactactcaaagctcctagcccacatagtctcacatggattcataatcgttgctcctcaactgttttccaatgggcttcctatgtatggacccactgaagtggaatatgcaggaaaagttgcggattggatagctgaggagcttcaacatttgcttccagagaacgttgaagccaatttggacaaactggttctatcaggtcacagtaggggtgggaaaactgtatttgctgtggctcttggtcatgcaaaaactaatctcaagttttcagcacttgtaggcatagaccctgtggctggcacatctaaatattgtagaacacgtcctcatattctcactggcaagccacggtcctttgatttgaaaatgccagttgaagtaattggcactggattgggcccagagaagcttaattgttgtactccaccgtgtgctcctgatggggtgaactataaggagttcttcaacgagtgcaaacccccttgtgctaaatttgttgtagcaaagtatggtcacatggacatgttgaatgatgacacaccagggctaattgggacattggtgtcaaagtgtatgtgtaagaatgggacgacgggtcctagggacttgatgagaaggaccactggagggttggttgtgtccttcttgagggcacaattgaatgacctatggaaggattttgatgctattttaaaggaccctaatcttgctcccactgaagtcgatggtgtagactacataccagcatgaattgatcaacactcaacgttcttttgcgcttttatttccctgaaaggcctataaatgtctttcgaaataatcgtctatggttatttatgtattctcgctatcctgtcatagtataagaaaaaaaaaattaaaatattatcgttttaattttttaatgtaattaatttttttcacttatatttatatctattaataataagaattatctcatatacatttttatttgacc

SEQ ID NO: 113654 - protein, 313 aa, Glycine max
MAQRAQPVLATDVFQMGNIQWKQFNVDTSSASFSPPKPLLIFTPTVPGAYPVILFVHGFFIRNFYYSKLLAHIVSHGFIIVAPQLFSNGLPMYGPTEVEYAGKVADWIAEELQHLLPENVEANLDKLVLSGHSRGGKTVFAVALGHAKTNLKFSALVGIDPVAGTSKYCRTRPHILTGKPRSFDLKMPVEVIGTGLGPEKLNCCTPPCAPDGVNYKEFFNECKPPCAKFVVAKYGHMDMLNDDTPGLIGTLVSKCMCKNGTTGPRDLMRRTTGGLVVSFLRAQLNDLWKDFDAILKDPNLAPTEVDGVDYIPA

SEQ ID NO: 113655 - DNA, 1188 bp, Glycine max; identical to SEQ ID NO: 113653
  CDS (63)..(959)

SEQ ID NO: 113656 - protein, 298 aa, Glycine max
MGNIQWKQFNVDTSSASFSPPKPLLIFTPTVPGAYPVILFVHGFFIRNFYYSKLLAHIVSHGFIIVAPQLFSNGLPMYGPTEVEYAGKVADWIAEELQHLLPENVEANLDKLVLSGHSRGGKTVFAVALGHAKTNLKFSALVGIDPVAGTSKYCRTRPHILTGKPRSFDLKMPVEVIGTGLGPEKLNCCTPPCAPDGVNYKEFFNECKPPCAKFVVAKYGHMDMLNDDTPGLIGTLVSKCMCKNGTTGPRDLMRRTTGGLVVSFLRAQLNDLWKDFDAILKDPNLAPTEVDGVDYIPA

SEQ ID NO: 113657 - DNA, 1154 bp, Zea mays subsp. mays
  CDS (73)..(1074)
attgcctatcaaccgctactcacgccgtactgtctgatcggcaacacctcgtgtacacgtaggcccggagatatggcggcatcgccggtggccatcggcacggcggtgttccagcgggggccactccgcgtggaggcgaggcacgtcgactacagccaggtccccagcgtgcccaagccgctcatggtggtcgcccccaccgacgccggcgtctaccccgtggccgtcttcctgcacggctgcaacacggtcaacagctggtatgagagcctcctgtcgcacgtcgcgtcccacgggttcatcgccgtggcgccccagctctactgcgtgacgctcaacatgaacgacttgaaggacatcgacgccaccaggcaggtcaccgcctggctcgccgacaagcagcaaggcctggcgcacgtgctcgccaacatcctccagctccacggcgtgaggccggacctctccaggctggcgctggccggccacagccgcggcggcgacacggccttcgccgtggcactcgggctcggacccgccgcctcggacgacgacgacaacaacgcagacgcaggcacatcgccggcggcgttgccactcaagttctccgcgctgatcggcgtggaccccgtggcggggctatccaagcaggcgcaggtggagccgaaggtgctgaccttccggccccggtccctcgacccggggatgccggcgctggtcgtcggcacggggctcggccccaagcacgtgggcgggccgccgtgcgcccccgcgggcgtcaaccacgccgagttctacgacgagtgcgcgccgccgcggtaccacgtcgtgctgagggactacgggcacatggacatgctggacgacgacggcgtgccctacgtcatcaacaactgcatgtgcatgaggaacaccaaggacaccaaggacctcgccaggagggccatcgggggagccgtggtggcgttcctcagggccacgctggaggacgacgacgaggatctcaaggtcgtgctcgagaaccgccctggcctctcgccggcggtgctggacccagttgggcatgacttggcttgaatagcaaggctggcggagtgtgctacattgtcgctccttatttacacacacataccacatgtttcttttccattttgtgc

SEQ ID NO: 113658 - protein, 333 aa, Zea mays subsp. mays
MAASPVAIGTAVFQRGPLRVEARHVDYSQVPSVPKPLMVVAPTDAGVYPVAVFLHGCNTVNSWYESLLSHVASHGFIAVAPQLYCVTLNMNDLKDIDATRQVTAWLADKQQGLAHVLANILQLHGVRPDLSRLALAGHSRGGDTAFAVALGLGPAASDDDDNNADAGTSPAALPLKFSALIGVDPVAGLSKQAQVEPKVLTFRPRSLDPGMPALVVGTGLGPKHVGGPPCAPAGVNHAEFYDECAPPRYHVVLRDYGHMDMLDDDGVPYVINNCMCMRNTKDTKDLARRAIGGAVVAFLRATLEDDDEDLKVVLENRPGLSPAVLDPVGHDLA

SEQ ID NO: 113659 - DNA, 1300 bp, Chenopodium album
  CDS (31)..(1095)
aaaacactgtaatacataccaaaaagaaaaatggctaagttgttttggtttactttaggggtgttattagccacctcccaagctcaaacattcttagacagtagcactaaatctcattatgtttctgtttctgacaattcttcttttgtaatcggaaatttcagtgttacaccattttatccagatgctactgagtattctactccagtgcctttgttcattgtttcaccaataaaaccaggaaactaccctgtactcttgttcatccatggcttcgccttgtccaataaatactattctcaactctttaatcatatcgcttcacatggcttcatcgtcgtagctcctcaggtaactcctgttacacttattacaatatttacatcactcaatcaacaacctgagatagatacggcagcaaaagtggcaaactggatgcctatacatcttccaatggtgttgcaaaattacgttaccggagttgaaggtgatctcgacaagctcgccatatccggtcatagtagaggtggaaagtcagcatttgctcttgcacttggtttctccaatatcaaactacaagttacattttcagcactgattggtgtagaccctgttgctggagtatcagtattccgtcataattggcaaacatatccttatgttctaaccaacaaacccaactctttcaatttatcaattccaactactgtaattggctccggtttgggtgatcacggccactttccatgcgccccaaacggtctaagccacaaggaattctacaacgagtgcaagaaaagttcgcattttgttataacaaagtatggtcatttgcaaatgttggatgattatacactcccgtttactaaaatattttgtgaatattgttcagactctaatgataagatgataaaaacagttggtggaatcatggtggcatttcttgacaatgcttatggcatcgacgatggtgggcaatacgatggcttgttgaatggacgactgccgtttcctactgatgtctccgtcgataacaagaacggttaccggcaagcgtacgacccaggatttgtagcaagttatgctcaagcttaataataatgttagctagctagctgcttaaggtcatatatgtactactcagtagtacagtcttgttttaaattagctacatactgtattaaataagtaattagtgatggtgtaatttgctttataactaagtgcgtatgtgtaattacaatgtcaataatcaaggccggcagctagaattatctattctaaaaaaaaaaaaaaaaaa

SEQ ID NO: 113660 - protein, 354 aa, Chenopodium album
MAKLFWFTLGVLLATSQAQTFLDSSTKSHYVSVSDNSSFVIGNFSVTPFYPDATEYSTPVPLFIVSPIKPGNYPVLLFIHGFALSNKYYSQLFNHIASHGFIVVAPQVTPVTLITIFTSLNQQPEIDTAAKVANWMPIHLPMVLQNYVTGVEGDLDKLAISGHSRGGKSAFALALGFSNIKLQVTFSALIGVDPVAGVSVFRHNWQTYPYVLTNKPNSFNLSIPTTVIGSGLGDHGHFPCAPNGLSHKEFYNECKKSSHFVITKYGHLQMLDDYTLPFTKIFCEYCSDSNDKMIKTVGGIMVAFLDNAYGIDDGGQYDGLLNGRLPFPTDVSVDNKNGYRQAYDPGFVASYAQA

SEQ ID NO: 113661 - DNA, 1302 bp, Zea mays
  CDS (72)..(1112)
tcggccacgattcccagtcatcaccaattattactgcctttcgtccacaactactcatcaatccgatcgacatgaacctcgcgtccgcggtgcgagtgttcttgtcctactacctgctggtccaacggtggatggggtccgagcagggcggaggcgtgttcgatcaggggggccatagcgtcagcctcacccgcctcgacgaagcaagggcgccgccgaggtgcgccgtgcggtcgtccccgtccagcgcggccagcctgccgccgaagccgctgctcgtcgccgcgccgcgcgagactggggagtacccggtgatcctgttcctacacggctacctcgccgtcaactccttctactcccagctgttcgagcacgtcgcctcccatggctttatcgtcgtcggacctcagctgtacaccatatctggggccgacaccaccgaggagatcaactcagcggcggccgtcatcgactggctagccaccgggctgccgtcaactctgccactcggcgtccgcgcgaacctaaccaaggtgtccatctccggccacagtcgcggcgggaaggtggcgttcgcgctggcgttgggccacgccaaggccaagctcgctgtccctctcgccgccgtcgtcgccgtggacccggtggacggcatgggcgtgggcaagcagacaccgccgccgatcctcacgggcaggcacggctcgctgcacgtgggtgcccccgccatggtcatcggcacggggctcggcgagctgccccgcggctcactgctcccgccgtgcgcgccccggggcgtcagtcacgcggccttctacgacgagctggacggcgcggcgccagcgtgccacctggtggtcagggactacgggcacacggacatgatggacgacgacacgccgggcgccagggggatgctcacgcgcaccatctgcaggagcggcggggccagggcgcccatgcgccgcttcgtggccggcgccaccgtcgcgttcctcaagaaatgggtggctggggacgccgcggcgatggacagcatcacggcgcggccggaccaggcccccgtcgcgctgtccgtggtggagtttggagatgagaaagcgatagcttagctgctagagaatatgtgatatctgcaggcactagccactcaggcaggttggtgacgacgttgaaattgcagatgaaattaactagagtctagagatggcacatggcagattggcagtgagtttcgaaactagctaatttcctctctcttggcaaatcaaataaaaaaaaaaaaaaaaaaaaaaaaaaaaa

SEQ ID NO: 113662 - protein, 346 aa, Zea mays
MNLASAVRVFLSYYLLVQRWMGSEQGGGVFDQGGHSVSLTRLDEARAPPRCAVRSSPSSAASLPPKPLLVAAPRETGEYPVILFLHGYLAVNSFYSQLFEHVASHGFIVVGPQLYTISGADTTEEINSAAAVIDWLATGLPSTLPLGVRANLTKVSISGHSRGGKVAFALALGHAKAKLAVPLAAVVAVDPVDGMGVGKQTPPPILTGRHGSLHVGAPAMVIGTGLGELPRGSLLPPCAPRGVSHAAFYDELDGAAPACHLVVRDYGHTDMMDDDTPGARGMLTRTICRSGGARAPMRRFVAGATVAFLKKWVAGDAAAMDSITARPDQAPVALSVVEFGDEKAIA

SEQ ID NO: 113663 - DNA, 1174 bp, Glycine max
  CDS (12)..(959)
ggaaagtgttgatggcgcagagagctgaaccaatattggtcaccacagatgttttccaaatgggaaatatcaaatggaagcaattcaacattgatacatccaatgcttcctcctcacctccaaaaccattgttaatctttacaccaaccgtgcctggctcataccctgtaatattgttctgccatggattttcccttcgcaatagctactactctgagctcctaggccacatagcttcacatggattcataattgttgctcctcagctgtgttggagtgtacggtctatgttggaacctggtgatgaagttaaatttgcagggaaagttgtggattggctagccgaggaggggcttcaacctctgcttccagagaatgttgaagccaaattggataaattggttttatcaggtcacagcaagggtggcaaaactgtatttgctgtggcacttggttatgctaaaactaacctcaagttttcagcactagtaggcatagaccctgtggctggcccatgtaaatcttgcgaaacatttcctcctattctcactggcatgtcccaatccttcaatttgaacatacccattgttgtaattggcactgggctaggcccagagaaggctaatttttttattccaccatgtgctcctgatggggtgaaccataaggagtttttcaataagtgcaaacccccttgtgcacattttgttgcaactgagtatggtcacatggacatgttggatgatgtgacacctggcttaattgggtcaatattgtcaaattgtatatgcaaggatgggaagggtcctagggacttgatgagaaggaccgtgggagggttggttgtggccttcttaagggcacagttgaatggcctatggaaggattttaatgctgttttggcgaatcctaatcttgctcctactaaactggatgatgtagtgtacgtacccgcatgaagtccatactcaatattaaaggctctttggttcgatgctgaattgctttcaatgccaaagtttcttttcaaagaaatcaagtttctttcgatgatgtttgtttttgtttccataaaaggcttgtaaatggaattttaaaataatcttctattgtttacattctctgtcgagtttttacgtgggataatgtttattcaaaaaaaaaaaaaaaaaaa

SEQ ID NO: 113664 - protein, 315 aa, Glycine max
MAQRAEPILVTTDVFQMGNIKWKQFNIDTSNASSSPPKPLLIFTPTVPGSYPVILFCHGFSLRNSYYSELLGHIASHGFIIVAPQLCWSVRSMLEPGDEVKFAGKVVDWLAEEGLQPLLPENVEAKLDKLVLSGHSKGGKTVFAVALGYAKTNLKFSALVGIDPVAGPCKSCETFPPILTGMSQSFNLNIPIVVIGTGLGPEKANFFIPPCAPDGVNHKEFFNKCKPPCAHFVATEYGHMDMLDDVTPGLIGSILSNCICKDGKGPRDLMRRTVGGLVVAFLRAQLNGLWKDFNAVLANPNLAPTKLDDVVYVPA

SEQ ID NO: 113665 - DNA, 1125 bp, Glycine max
  CDS (42)..(992)
tagaacatagaagcaaagtgtttggtgtgagaagagagataatggcgcagagagctcaaccagcgttggccaccacggatgtttttcagaagggagatattcattggaagcaattcaatgttgaaacatccactgcttcttcctcacctccaaaaccattgcttatttttacaccaaccgtgcctggcttataccctgtaatattgttttgccatggcttttgtattcgcactagctactactctaagctcctagcccacatagtttcacatggattcatacttgttgctcctcagctgttttccattggggtgcctatgtttggaccagaagaagttaagtgtgaaggaagagttgtggattggctagataacgggcttcaaccattgcttcccgagagcgttgaagccaaactggagaaactggttctagtaggtcacagcaagggtggaaaaacagcatttgctgtggcacttggttactgtaaaacaaagctcaagttttcagcactcataggcatagatcctgtggctggcgtatcaaagtgtaagccttgtcgatcacttcctgatatcctcacaggtgtgccacggtcctttaatctgaacatacctgttgctgtaattggaactgggttgggcccagagaaggctaattctctttttccaccatgtgctccaaatggggtgaaccataaagagtttttctctgagtgcaaaccacctagtgcatattttgttgcaacggattatggtcacatggacatgttggatgatgaaacaccaggggtaattgggacaatgatgtcaaagtgtatgtgcaagaatgggaagaagggtcctagggacttgatgagaaggactgtgggagggttggttgtggccttcttgagagcacagttgaatgagcagtggaaggattttgatgctattttagcgagtcctaatctagctcccgccaaacttgatgatgtgcgatacttaccaacatgaagtcatcacacaaacattcatttatgcagtttttattctatttctatgaaaggcctataatgtctttcaaatttgtctatataatgatgtgattcacattgcacttttcaaaaaaaaaaaaaaaaaactcgag

SEQ ID NO: 113666 - protein, 316 aa, Glycine max
MAQRAQPALATTDVFQKGDIHWKQFNVETSTASSSPPKPLLIFTPTVPGLYPVILFCHGFCIRTSYYSKLLAHIVSHGFILVAPQLFSIGVPMFGPEEVKCEGRVVDWLDNGLQPLLPESVEAKLEKLVLVGHSKGGKTAFAVALGYCKTKLKFSALIGIDPVAGVSKCKPCRSLPDILTGVPRSFNLNIPVAVIGTGLGPEKANSLFPPCAPNGVNHKEFFSECKPPSAYFVATDYGHMDMLDDETPGVIGTMMSKCMCKNGKKGPRDLMRRTVGGLVVAFLRAQLNEQWKDFDAILASPNLAPAKLDDVRYLPT

SEQ ID NO: 113667 - DNA, 1444 bp, Tulipa gesneriana
  CDS (97)..(1107)
gcacgaggcagaatagacattgttttttttcttttttgaaaattgccaaccctgggaggtgttgacggggttaagtccagactagacattgttatcatggcatcttctccttgctccgtttttgtgcctgggaagtacacggtccaactgaaaagcgtcgaggccggcactaagaaggccaggcatgttagctctgtctccgcaccacctcggaagccaccactgatcgcaactccatttgaggaaggcgagtacccaacgcttctactccttcatggattcatgcttcacaacactttctactctgagcttatccagcacatcgcatcccatggctttattgttgttgtacctcagttatatcttgtagctacatgtgatagtacgaatggcatcaagtctgctgcaaaaacaacagattggttgaaggatggactgcaagatgttctcccaacaaaagtcagaccagacctaaagaaactcggactgagcggacatagccgtggcggcaaagatgcatttgctcttgcactaggatatgcgaagactacattaagcttctcagcgctgatcgggatcgatcctgttgacggagtacgaaagggacaccaaaccaatcctcctgtactgaattatatccctcactctttggaactcaagatgccgtcattagttatcggaacaggtttaggtgaattgaagaggaacctatttgcctgtgcccctaagggagtaaatcaccaagatttttacgatgagtgttcttccccgtcttgccattttgttgctaaggactatggtcacatggacatgctagatgatcatactgacggacctagaggtattgtgtcatactgcatgtgtcgaaatggagaatcaagaacacccatgcgactgtttgtaggtgggatcgtggttgcttttctgaaagcctgcttacaaggtgataaacaggatttgcgagctctgaaggataaccccgagatttcaaatattaacttatcaattgtcgacttctatgatcctgatgggacattgacgaaatattttgatggtggttcaatttccacaccacattacgcagtccaagaaagccatcaacaatgatatttcaatgcagagacgcacaactaatgattgcctgcaaatatgaagttccgtattagattcatataatgaactaggatatctctttcatctaaatagtccatgtattttatttcatgcagagtatgtttaatctatgtaataagagacactactagtatctatcgtcagcagcatggcaatttaaaactctgtaaactctcagaattatgattgtatcttggcggttagccttgacaaaaaagagaggcactattagcaagtggaaaaaaaaaaaaaaaaaaaaaaaaaaaaaaaaaaaaaaaaaaaaaaaaaaaaaaaaaaaaaaaaaaaaaaa

SEQ ID NO: 113668 - protein, 336 aa, Tulipa gesneriana
MASSPCSVFVPGKYTVQLKSVEAGTKKARHVSSVSAPPRKPPLIATPFEEGEYPTLLLLHGFMLHNTFYSELIQHIASHGFIVVVPQLYLVATCDSTNGIKSAAKTTDWLKDGLQDVLPTKVRPDLKKLGLSGHSRGGKDAFALALGYAKTTLSFSALIGIDPVDGVRKGHQTNPPVLNYIPHSLELKMPSLVIGTGLGELKRNLFACAPKGVNHQDFYDECSSPSCHFVAKDYGHMDMLDDHTDGPRGIVSYCMCRNGESRTPMRLFVGGIVVAFLKACLQGDKQDLRALKDNPEISNINLSIVDFYDPDGTLTKYFDGGSISTPHYAVQESHQQ

SEQ ID NO: 113669 - DNA, 1242 bp, Triticum aestivum
  CDS (47)..(1006)
gcacgaggttaagacagagagttggtgccctgagcttgagtgagagatggcagcagcagcacccgcagagacgatgaacaagtccgccgccggcgccgaggttcccgaggcgttcacatcggtgttccagccggggaagcttgcggtcgaggcgattcaggtggatgagaatgcggcgccgacaccaccgatcccggtgctgatcgtcgcacccaaggatgcaggaacctaccccgtggccatgctcttgcacggcttcttcctccataaccacttctacgaacaccttctccggcacgtcgcatcccacggcttcatcattgtcgcgccccagttcagcatcagtatcataccttcgggtgacgcagaggacatcgccgcggcagccaaggtggcagactggctccccgacggcctcccgtccgtgctgcccaaaggcgtcgagccggagctctcgaagctcgccttggccggccacagccgaggaggccacacggctttctccctggccttggggcacgccaagacccagctaaccttctccgcgctcatcggactcgaccccgtcgccggcacggggaagtcctcccagctccagcccaagatcctcacctacgagccgtcctccttcggcatggcgatgccggtgctggtcatcggcaccgggctcggcgaggagaagaagaacatattcttccctccctgcgcacccaaggacgtgaaccacgccgagttctaccgcgagtgcaggccgccctgctactactttgtgaccaaggactacgggcatctggacatgctggacgacgacgcccccaagttcatcacctgcgtctgcaaggatgggaacgggtgcaagggcaagatgcggaggtgcgttgctgggatcatggtggcatttcttaatgctgccttgggtgagaaagatgcagatcttgaggccatactgagagacccggcggttgcacccaccacgcttgatccggttgagcaccgcgtggcgtgaagcagcagctggctcatgccaaaagttaaccagccgcaggttggtccactaaataaagtacagatgtactgtacctctgagcaatttgcttcacttgttcatgcaagctaaaactgctgctgctttacttcttgctcctgcgagcctgcaatggtacttctgctctgtttccagatgtatactactcctgtgagtataatcttgtttttcgtgtctaaaaaaaaaaaaaaaaaaaa

SEQ ID NO: 113670 - protein, 319 aa, Triticum aestivum
MAAAAPAETMNKSAAGAEVPEAFTSVFQPGKLAVEAIQVDENAAPTPPIPVLIVAPKDAGTYPVAMLLHGFFLHNHFYEHLLRHVASHGFIIVAPQFSISIIPSGDAEDIAAAAKVADWLPDGLPSVLPKGVEPELSKLALAGHSRGGHTAFSLALGHAKTQLTFSALIGLDPVAGTGKSSQLQPKILTYEPSSFGMAMPVLVIGTGLGEEKKNIFFPPCAPKDVNHAEFYRECRPPCYYFVTKDYGHLDMLDDDAPKFITCVCKDGNGCKGKMRRCVAGIMVAFLNAALGEKDADLEAILRDPAVAPTTLDPVEHRVA

SEQ ID NO: 113671 - DNA, 1156 bp, Triticum aestivum
  CDS (57)..(1028)
gcacgaggccatctccgcgctgcttccgctctagcttctagctagctaagtaagatatggctgcaatggcgacgacggtgttccaggcggggccaatggaggtggatgtgaagcacgtggacaagagtatgatcccgaacctggccaggccgttgatggtggtggcgcccaaggagaccggcgcgtaccccgtcatcgtcttcctgcacggctggaacatgctcaacagctggtacgagcagctcctcacacacgtcgcctcccatggtttcatcgccgtcgcaccacagctctactggatggtgtccgagcccgatgcggacgacatagacgccacaaagcgaatcaccaactggcttgcagatcatgacaaggggctcgcccacgtcctcaaggacgtgctcaaacttgagcatgtcgagcctgacctgtccaagctggccctagccggccatagccgaggcggccagacggccttcgccgtcgccctgggactaggggacgccaagaccaagctggagctcaagttctccgccctcatcggcgtcgaccccgtggccggggtttccagagcccaacagttggagcccaaggtgctcacttttgaacctgactgtctcgacgtggggatgccggtgctggtcatggggactgggctgggtcccaagcacatcggcggatttccatgcgccccggtgggcgtgaaccacgccgaattctacaaggagtgcgcgccgcctcgctaccacctcgtggtcaaggactacgggcatctcgacatgctggatgacaatgtgccctatatcatcaacaactgcatgtgcatgaggaaccaacacgacaccaaagatcttgctaggaggaccatgggaggagccatggttgccttcctcagggctaaattgcgaatcgatgttcgtgatctcatcgccatatatcataatcctgagatcgcgccagccgtcctggaccaagttgatgagtttcttccttgcttcgttggacggccaaatccgtcgtctgtgtgagagttatattacgtgcctatgcctatctattactcctaaataaggtgtgttggtgcatggccttgtcatggctcatgactactatagcacgtccagtcttcctaattactaaaaaaaaaaaaaaaaaa

SEQ ID NO: 113672 - protein, 323 aa, Triticum aestivum
MAAMATTVFQAGPMEVDVKHVDKSMIPNLARPLMVVAPKETGAYPVIVFLHGWNMLNSWYEQLLTHVASHGFIAVAPQLYWMVSEPDADDIDATKRITNWLADHDKGLAHVLKDVLKLEHVEPDLSKLALAGHSRGGQTAFAVALGLGDAKTKLELKFSALIGVDPVAGVSRAQQLEPKVLTFEPDCLDVGMPVLVMGTGLGPKHIGGFPCAPVGVNHAEFYKECAPPRYHLVVKDYGHLDMLDDNVPYIINNCMCMRNQHDTKDLARRTMGGAMVAFLRAKLRIDVRDLIAIYHNPEIAPAVLDQVDEFLPCFVGRPNPSSV

SEQ ID NO: 113673 - DNA, 978 bp, Oryza sativa subsp
  CDS (1)..(978)
atgatcgcatttgcggcgcaaatcttggcgttctgcctcctcctgctgctgctgttgctgctccagttgcagacaaccatggcgggtgattcttctttcagcggcgtgttcgaccatgggagccatggcgtcacccttgtcaaggtcgacgaggcgcccaggaagtgctcgtcggcggcggcggcgaagaagacggatgatgatactgctccggccggtggagcgccgccgaagccgctgctggtggcggcgccgtgcgacgccggggtgtacccggtggtggtgttcttgcatggatacctcgcctataattccttctactcgcagctgttcgagcatgtcgcctcccatggcttcgtcgtcgttggcccccagctgccacccaacgtccgcgccgacgcgaccaagatctccatctccggccacagccgcggcggcaaggtggcgttcgcgctggcgctgggccacgccaacgtctccctccggggcggcgccggcggcgccaccatcgccgccctcgtcgccgtcgaccccgtggacggcttcgccaccgggaagcagacgccgccgccgatcctcacctacggcggcgccaactccctgcgcgtgccggcgccggtgatggtcatcggcacgggcctcggcggcctcgcccgggcggcgccgctgctcccggcgtgcgcgccgcccggggtgagccacggcgagttctacggcgagtgcgcggcgccggcgtgccacctggtggcgagggactacggccacaccgacatggtggtcgacgtgactcccgggagcgtcggcgccagggcgcccatgcgtcggttcgtcgtcggcgccatggtcgcgttcgtgaagagttggttggaaggggagccggagctcctggagtgcgtcagggcgcgtccggagacggcgccgttggtgctgtccgccgtggagttccgcgacgaggcgatagctaaccactcttattaa

SEQ ID NO: 113674 - protein, 325 aa, Oryza sativa subsp
MIAFAAQILAFCLLLLLLLLLQLQTTMAGDSSFSGVFDHGSHGVTLVKVDEAPRKCSSAAAAKKTDDDTAPAGGAPPKPLLVAAPCDAGVYPVVVFLHGYLAYNSFYSQLFEHVASHGFVVVGPQLPPNVRADATKISISGHSRGGKVAFALALGHANVSLRGGAGGATIAALVAVDPVDGFATGKQTPPPILTYGGANSLRVPAPVMVIGTGLGGLARAAPLLPACAPPGVSHGEFYGECAAPACHLVARDYGHTDMVVDVTPGSVGARAPMRRFVVGAMVAFVKSWLEGEPELLECVRARPETAPLVLSAVEFRDEAIANHSY

SEQ ID NO: 113675 - DNA, 948 bp, Vitis vinifera
  CDS (1)..(948)
  misc_feature (418)..(418): s is g or c
  misc_feature (685)..(685): r is g or a
  misc_feature (722)..(722): m is a or c
atggcagcgttagaagctaggcctgcaccggcggcagcaacagatgtttttaagcgaggaaagtacacagcgaaacccataacaacttgtaacgctccaaagacattgtttattgtaacaccagacactgaaggaacatacccagttctcctgtttcttcatggctacaacatctgcccctgctgctatacgaacctccttgagcatatttcttctcatggatatattgttgtggctcctaggttactcagcctatgttctttgtacggccgaccggatatcaactctgcagcggaagtcgccaactggttaagctcaggccttcaacctgtgctcccagaaaatgttgttccagacctaagcaggctcgcccttgcaggccatagcagagggggttatctagcatttgctcttgcastggggaatgccaacgtatccatgaatctcaagttcttaaccctaataggtatagacccggttgctggggcaaataaatgcatgaaaatgtgtccaaagatcctaactggtgtccctcattccttcaatctggatatcccggttatggtaatcggtacgggtcttgggggcgagtctgtcatcggctgcataccatgttcttgtgctcctgatgggctcaactacgcggagtttttcaacgagtgcaaggataattgccttggctttrttattccagattatggtcacatggacatgttagatgmtgattattgcaccaattgcattggaacatccattggggcgattatgggttccatgtgcaagagtgggaagggtgataaaacatcgatgatggagtgtgtaggtgggcttgtcgtggccatgctgatggctcatttggaaggggagactggagacctggacgccattgttgatgaacctggtattgctcctgtcaagcttgaggttgtggaggactcagaaccataa

SEQ ID NO: 113676 - protein, 315 aa, Vitis vinifera
  misc_feature (140)..(140): The Xaa at location 140 stands for Leu, or Val.
  misc_feature (229)..(229): The Xaa at location 229 stands for Ile, or Val.
  misc_feature (241)..(241): The Xaa at location 241 stands for Ala, or Asp.
MAALEARPAPAAATDVFKRGKYTAKPITTCNAPKTLFIVTPDTEGTYPVLLFLHGYNICPCCYTNLLEHISSHGYIVVAPRLLSLCSLYGRPDINSAAEVANWLSSGLQPVLPENVVPDLSRLALAGHSRGGYLAFALAXGNANVSMNLKFLTLIGIDPVAGANKCMKMCPKILTGVPHSFNLDIPVMVIGTGLGGESVIGCIPCSCAPDGLNYAEFFNECKDNCLGFXIPDYGHMDMLDXDYCTNCIGTSIGAIMGSMCKSGKGDKTSMMECVGGLVVAMLMAHLEGETGDLDAIVDEPGIAPVKLEVVEDSEP

SEQ ID NO: 113677 - DNA, 921 bp, Piper betle
  CDS (1)..(921)
atggcagcaagtagtgtctttgaaatggggaagctagaggtacatgtgaagagcgtaaatcagtcaaattcatcttctcctcccaagtcactcctcattagctatccatcccagaagggagattatggcgtcgttttattccttcatggcttcctcatctccaactccttctacaaagaactcatctcccacatctcttctcatggatacatcgtcgttgcccccaggatcatatacccatgcttgcaagacgagatcaattctgcagcacaagtagcaaattggctacccgaaggcctccaagcagcactgccacccaatgttcagcccaatacctcaaagctcactcttgctggccacagccggggtggtaaggcagccttctgcatgctacttggccttgccggcagcccactcaccgttcaattctccggtctcattggcgtcgatccagtggccggatttcaaatccctggtataaattacaaaatggagattccgcccaagataatcactaataactctaagccattcgacattaatgttccaacgttgataattggcaccgagctgggcgaagaggcaaagggctgcttggctcctccttgtgccccggccgggcttaactatgaacaattttatgaaaagtccaaggagccaagctatcaatttgtagccaaaggatacggtcacgtggacatgttggacgatatcagcaagaacgatttaatggggaagctaacttattgtgtgtgcaagaatggcaaagaaagagagccaatgaggagaactgcagggggattgatggttgcatttcttaaggctttttcagacggccagagagatgatcttgatgccatactcaatgatccggagctcgcaccaatccagcttgatgcagaggccaaactgagctcgtga

SEQ ID NO: 113678 - protein, 306 aa, Piper betle
MAASSVFEMGKLEVHVKSVNQSNSSSPPKSLLISYPSQKGDYGVVLFLHGFLISNSFYKELISHISSHGYIVVAPRIIYPCLQDEINSAAQVANWLPEGLQAALPPNVQPNTSKLTLAGHSRGGKAAFCMLLGLAGSPLTVQFSGLIGVDPVAGFQIPGINYKMEIPPKIITNNSKPFDINVPTLIIGTELGEEAKGCLAPPCAPAGLNYEQFYEKSKEPSYQFVAKGYGHVDMLDDISKNDLMGKLTYCVCKNGKEREPMRRTAGGLMVAFLKAFSDGQRDDLDAILNDPELAPIQLDAEAKLSS

SEQ ID NO: 113679 - DNA, 1029 bp, Ginkgo biloba
  CDS (1)..(1029)
atggttttagtgaaggatgtgttcagcgaaggtcctttacctgttcaaatcctcgcaattccacaagccaactcatctccatgctcaaaattagcagacaaaaacggaactgcaaccacgccttctccttgtcggcctcctaaacccctgctgatcgctcttccttcccaacatggagattatcctctcatcctctttttccacggctatgtactcctcaattccttctattctcaactcttgcgccatgttgcttcccatggatacatcgccatagctcctcagatgtacagtgtaattggcccaaatacgactccagaaatagccgatgcagcggccattacagactggttacgagatggactctcggataatcttccgcaagctttaaacaatcatgtgaggcccaattttgagaaatttgtgctagcggggcactcgcgcgggggtaaagtggcatttgcacttgccctaggtcgagtctcgcagccatctttaaagtactcggcccttgtaggtcttgatccagtcgatggaatgggaaaagatcaacaaaccagtcatcctattctgtcatacagagagcattcctttgatttgggtatgccaacattagtggtaggttcgggcctgggtccgtgcaaaagaaaccctctcttccctccctgtgctccccaaggtgttaaccaccatgatttcttctacgaatgtgtcgctcctgcctatcattttgttgcctctgattatgggcatcttgatttcttagacgacgacaccaaaggaataagaggaaaggctacttattgcctctgtaagaatggggaagcaagagagccaatgcggaagtttagcggtggaattgtggttgcatttcttcaagcatttcttggtgataatcgtggagccctgaatgatattatggtttatccttcacatgctccagtcaagattgagcctccagagtctttggttacagaagatgtaaaatccccagaagtcgaattattacgccgggcagtttgcagatga

SEQ ID NO: 113680 - protein, 342 aa, Ginkgo biloba
MVLVKDVFSEGPLPVQILAIPQANSSPCSKLADKNGTATTPSPCRPPKPLLIALPSQHGDYPLILFFHGYVLLNSFYSQLLRHVASHGYIAIAPQMYSVIGPNTTPEIADAAAITDWLRDGLSDNLPQALNNHVRPNFEKFVLAGHSRGGKVAFALALGRVSQPSLKYSALVGLDPVDGMGKDQQTSHPILSYREHSFDLGMPTLVVGSGLGPCKRNPLFPPCAPQGVNHHDFFYECVAPAYHFVASDYGHLDFLDDDTKGIRGKATYCLCKNGEAREPMRKFSGGIVVAFLQAFLGDNRGALNDIMVYPSHAPVKIEPPESLVTEDVKSPEVELLRRAVCR

SEQ ID NO: 113681 - DNA, 966 bp, Brassica oleracea
  CDS (1)..(966)
atgtcatcttcttcatcaagaaacgcctttgtggatggcaaatacaaaccagatcttttaacagtggatttagcatctcgctgtcgctgctacaaaacgacgccatcttcttctctgactccgccgcctcctcccaagtcgcttttggtggcaacgccggtggaggaaggagaatatccggtggtgatgctcctccatggttaccttctctacaactcattttactcccagcttatgttgcatgtctcttcctatggcttcattgtcatcgctccgcagttatataacattgccggaccagacacgatagacgagataaaatcaacggcggagattattgattggttatcagtcggacttaaccactttcttccaccacaagtaacacccaacctatctaaattcgcactcaccggccatagccgcggcggcaaaaccgcattcgccgtggccttaaagaaatttggatactcatcggaactaaagatctcagcaattatcggtgtagatccggtggatgggacagggaaaggtaaacaaacccctcctccggttttaacctatgaaccaaactcatttaacctagaaaagatgcctgttctagttattggttcgggacttggtgaacttgcccggaacccattgtttccaccgtgtgcacctacgggagtgaaccaccgagagtttttccaggaatgtcaaggtccagcgtggcattttgtcgcaaaggattacggacatttggacatgcttgatgatgatacaaaagggcttagagggaagagttcttattgtttgtgtaagaatggtgaagagagaaaaccaatgaggagatttattggtggaattgttgtgtcgtttttgatggcttatctggaagatgatgattgtgaattggtgaagatcaaagctgggtgtcatgaaggtgttcctgttgaaattcaagagtttgaggttaaaaagtaa

SEQ ID NO: 113682 - protein, 321 aa, Brassica oleracea
MSSSSSRNAFVDGKYKPDLLTVDLASRCRCYKTTPSSSLTPPPPPKSLLVATPVEEGEYPVVMLLHGYLLYNSFYSQLMLHVSSYGFIVIAPQLYNIAGPDTIDEIKSTAEIIDWLSVGLNHFLPPQVTPNLSKFALTGHSRGGKTAFAVALKKFGYSSELKISAIIGVDPVDGTGKGKQTPPPVLTYEPNSFNLEKMPVLVIGSGLGELARNPLFPPCAPTGVNHREFFQECQGPAWHFVAKDYGHLDMLDDDTKGLRGKSSYCLCKNGEERKPMRRFIGGIVVSFLMAYLEDDDCELVKIKAGCHEGVPVEIQEFEVKK

SEQ ID NO: 113683 - DNA, 975 bp, Brassica oleracea
  CDS (1)..(975)
atggcggggaaggaggacagtgagacgtttttctcggcggcaactcctttggcgtttgagttaggcagccttccaacaaccgtgatccccgcagacccgtcggcaaccgatttgaccgcacctccaaagcctgtaataatcacctccccaaccgtcgccggaacttaccccgtcgtcttattcttccatggattctatcttcgtaactacttctactctgatgttattaaccacgtagcttctcatggctacattgttgtagccccacagctttgcaagattttgccgccgggagggcaagtggaagtggacgatgctggaaaagtgataaactggacttcgaaaaacctcaaagctcacctcccaagttcagtaaacgctaatggcaactacaccgcactcgtgggtcatagccgcggtggtaaaaccgcgtttgcggttgcgttaggccacgccgcaacactagacccatccatcaagttttcagctcttgtaggaatagatccagttgcaggaatcagcaaatgcataagaaccgatcccgaaatcttaacgtacaaaccggaatcattcgacctggacatgccggttgcagtgatcggtacgggtctcggaccgaagagtaacatgctgatgccaccatgcgcaccagcggaagtgaaccatgaggagttttatattgagtgtaaggctacgaagggacatttcgtggctgcggattacggacatatggatatgttggacgataatttgcccggttttgtcgggtttatggcgggttgtatgtgtaagaacggtaaacgcaaaaagagtgagatgagaagctttgttggtggaattgtggttgcgtttctaaagtatagtatatggggtgaaatgtcagagattcgacagattttgaaggatccttctgtttctccagcgaggcttgatccttcgccggagctggaagaggcttctggttatctcgtctag

SEQ ID NO: 113684 - protein, 324 aa, Brassica oleracea
MAGKEDSETFFSAATPLAFELGSLPTTVIPADPSATDLTAPPKPVIITSPTVAGTYPVVLFFHGFYLRNYFYSDVINHVASHGYIVVAPQLCKILPPGGQVEVDDAGKVINWTSKNLKAHLPSSVNANGNYTALVGHSRGGKTAFAVALGHAATLDPSIKFSALVGIDPVAGISKCIRTDPEILTYKPESFDLDMPVAVIGTGLGPKSNMLMPPCAPAEVNHEEFYIECKATKGHFVAADYGHMDMLDDNLPGFVGFMAGCMCKNGKRKKSEMRSFVGGIVVAFLKYSIWGEMSEIRQILKDPSVSPARLDPSPELEEASGYLV

SEQ ID NO: 113685 - DNA, 1044 bp, Chenopodium album
  CDS (1)..(1044)
atggcaaagttattattattaatttttggggtgttcatctttgttaactcccaagctcaaactttcccaacaattttagaaaaacataattctgaaaaaattactgatgttttccataagggtaattttcaagtgacaaataatccaataagggtgaaaagatatgaattttctgctccagagcctttgatcattatttcacctaaagaagcaggagtttatcctgttcttttgtttattcatggcaccatgctttctaatgaagactactctctattctttaattatattgcttctcatggcttcatcgtcgttgctcctaagttgttccggttattcccgcctaaactacctagtcaacaagacgagatagacatggcagcatccgtagcaaactggatgcctctatatctacaagtggtgttacaaagatacgttaccggagttgaaggtgatctcgaaaaactcgcaatctccggtcatagtagaggaggaaaatcggcgtttgctcttgcacttggtttctccaatatcaagctagacgttacattttcagcactaattggtgtagaccctgttgctggtagaagtgtagatgatcgaacattgcctcatgttctaacttacaaacccaactcgtttaatctatcgattccagtcacggtaattggttcgggattgggtaaccacaccatctcatgtgctccgaatcacgtgagccatcaacaattttacgacgagtgtaaggaaaattcgtcgcattttgttattacaaagtatggtcacatggatatgttgaatgagtttagattaagtcctatagccgtgactatgtcacttatgtgtgcacaaagtttccgtccgaaagctactatgagaagaacactaggtggaatcatggtagcttttcttaacgcctattttcgagacgatggaaggcaatactacgccattattgctaatagatccttggctcctactaacctctttgctgagaaaaagggattcaactttgggtttgcaacaacttatgctcaactttaa

SEQ ID NO: 113686 - protein, 347 aa, Chenopodium album
MAKLLLLIFGVFIFVNSQAQTFPTILEKHNSEKITDVFHKGNFQVTNNPIRVKRYEFSAPEPLIIISPKEAGVYPVLLFIHGTMLSNEDYSLFFNYIASHGFIVVAPKLFRLFPPKLPSQQDEIDMAASVANWMPLYLQVVLQRYVTGVEGDLEKLAISGHSRGGKSAFALALGFSNIKLDVTFSALIGVDPVAGRSVDDRTLPHVLTYKPNSFNLSIPVTVIGSGLGNHTISCAPNHVSHQQFYDECKENSSHFVITKYGHMDMLNEFRLSPIAVTMSLMCAQSFRPKATMRRTLGGIMVAFLNAYFRDDGRQYYAIIANRSLAPTNLFAEKKGFNFGFATTYAQL

SEQ ID NO: 113687 - DNA, 990 bp, Citrus sinensis
  CDS (1)..(990)
atggcagcaatggtggacgccaagcctgcagcttcagtgcaaggcactccccttttggctacggccacacttccggtatttacaagaggaatttattccacaaaacgcatcacgctggagacatcatctccatcctcaccacctcctccaaagccattgattatcgtcacgccagccggaaaaggaacttttaatgtcatcttgttccttcatggcacttctctcagcaacaaaagctattcgaagatctttgaccacatagcgtcccatggattcatcgttgttgctcctcagctatacaccagtatcccgccaccaagtgcaaccaatgaacttaacagcgcagcagaagtcgcggagtggctaccccaaggcctgcagcaaaatctcccagaaaatactgaagcgaacgtaagcttggttgctgttatggggcacagtcgcggaggacaaacggcttttgctctatcactacgctatggattcggtgcagtaatagggctagaccccgttgctgggactagtaaaaccactggacttgatccctcgattctttctttcgactctttcgacttctcgattcccgttactgtgattggcaccggactcggcggcgtggctaggtgcatcaccgcttgtgcacctgaaggagcaaaccatgaagagtttttcaacagatgcaagaactcttctcgtgctcattttgttgctacagattatggtcacatggacattttggatgataatccatcagacgtaaagtcttgggcgctttcgaaatacttttgcaaaaatggaaacgaatcgagggatccaatgagaagatgtgtgagtgggattgtggtggcgtttctgaaggattttttttatggtgatgctgaggattttaggcaaatcctgaaagacccttcttttgctcctataaagcttgattctgttgagtacattgatgcatcaagcatgcttacgacaactcatgtaaaagtttaa

SEQ ID NO: 113688 - protein, 329 aa, Citrus sinensis
MAAMVDAKPAASVQGTPLLATATLPVFTRGIYSTKRITLETSSPSSPPPPKPLIIVTPAGKGTFNVILFLHGTSLSNKSYSKIFDHIASHGFIVVAPQLYTSIPPPSATNELNSAAEVAEWLPQGLQQNLPENTEANVSLVAVMGHSRGGQTAFALSLRYGFGAVIGLDPVAGTSKTTGLDPSILSFDSFDFSIPVTVIGTGLGGVARCITACAPEGANHEEFFNRCKNSSRAHFVATDYGHMDILDDNPSDVKSWALSKYFCKNGNESRDPMRRCVSGIVVAFLKDFFYGDAEDFRQILKDPSFAPIKLDSVEYIDASSMLTTTHVKV

SEQ ID NO: 113689 - DNA, 957 bp, Arabidopsis thaliana
  CDS (1)..(957)
atgtcctcttcttcatcaagaaacgcctttgaagatggcaaatacaaatcaaatctcttaaccttggactcatcatctcgttgctgcaaaataacaccgtcttctagagcttcaccgtctccgccaaagcagctgttggtggctacgccggtggaggaaggagattatccggtggtgatgctcctccatggttaccttctctacaactccttctattctcagcttatgttgcatgtctcttctcatggcttcatcctcatcgctcctcagttatatagtatcgccggaccagacacaatggatgagattaaatcaacggcggagattatggattggttatcagtaggacttaatcactttcttccagcgcaagtaacaccaaacctatccaaatttgccctctccggccatagccgcggtggcaaaaccgcgtttgcggtcgccttaaagaaatttgggtactcctcgaatctaaagatctcgacattgatcggtatagatccagtcgatggaacagggaaagggaaacaaacccctcctccggtgttggcttaccttccaaactcatttgacctagacaaaacgcctatacttgtgatcggttcggggcttggtgaaaccgctcggaacccattattcccaccgtgtgcacctcccggagtgaatcaccgagagttctttcgggaatgtcaaggtccagcatggcatttcgttgcgaaggattatgggcatttggacatgcttgatgatgatacaaaagggattagagggaagagttcttattgtttgtgtaagaatggtgaagagaggagaccaatgaggagattcgttggtggacttgttgtatcatttttgaaggcttatttggaaggagatgatcgtgaattagttaagatcaaagatgggtgtcacgaggatgttcccgttgaaattcaagagtttgaggttatcatgtaa

SEQ ID NO: 113690 - protein, 318 aa, Arabidopsis thaliana
MSSSSSRNAFEDGKYKSNLLTLDSSSRCCKITPSSRASPSPPKQLLVATPVEEGDYPVVMLLHGYLLYNSFYSQLMLHVSSHGFILIAPQLYSIAGPDTMDEIKSTAEIMDWLSVGLNHFLPAQVTPNLSKFALSGHSRGGKTAFAVALKKFGYSSNLKISTLIGIDPVDGTGKGKQTPPPVLAYLPNSFDLDKTPILVIGSGLGETARNPLFPPCAPPGVNHREFFRECQGPAWHFVAKDYGHLDMLDDDTKGIRGKSSYCLCKNGEERRPMRRFVGGLVVSFLKAYLEGDDRELVKIKDGCHEDVPVEIQEFEVIM

SEQ ID NO: 113691 - DNA, 1104 bp, Oryza sativa
  CDS (1)..(1104)
atgatcgcatttgcggcgcaaatcttggcgttctgcctcctcctgctgctgctgttgctgctccagttgcagacaaccatggcgggtgattcttctttcagcggcgtgttcgaccatgggagccatggcgtcacccttgtcaaggtcgacgaggcgcccaggaagtgctcgtcggcggcggcggcgaagaagacggatgatgatactgctccggccggtggagcgccgccgaagccgctgctggtggcggcgccgtgcgacgccggggtgtacccggtggtggtgttcttgcatggatacctcgcctataattccttctactcgcagctgttcgagcatgtcgcctcccatggcttcgtcgtcgttggcccccagctatatacgatgtctggaccggataccaccgacgagatcaactcggcggcggccgtcatcaactggctcgccgccggcggcctcacctcgaagctgccacccaacgtccgcgccgacgcgaccaagatctccatctccggccacagccgcggcggcaaggtggcgttcgcgctggcgctgggccacgccaacgtctccctccggggcggcgccggcggcgccaccatcgccgccctcgtcgccgtcgaccccgtggacggcttcgccgccgggaagcagacgccgccgccgatcctcacctacggcggcgccaactccctgcgcgtgccggcgccggtgatggtcatcggcacgggcctcggcggcctcgcccgggcggcgccgctgctcccggcgtgcgcgccgcccggggtgagccacggcgagttctacggcgagtgcgcggcgccggcgtgccacctggtggcgagggactacggccacaccgacatgatggacgacgtgacgcccggggccaggggcctcgcgacgcgcgccgtgtgcaggagcggcggcgccagggcgcccatgcggcggttcttcggcggcgccatggtcgcgttcgtgaagaggtgggtggaaggggagccggagctcctggactgcgtcagggcgcggccggagacggcgccggtggtgctgtccgccgtggagttccgcgacgaggcgatagctaaccactcttattaa

SEQ ID NO: 113692 - protein, 367 aa, Oryza sativa
MIAFAAQILAFCLLLLLLLLLQLQTTMAGDSSFSGVFDHGSHGVTLVKVDEAPRKCSSAAAAKKTDDDTAPAGGAPPKPLLVAAPCDAGVYPVVVFLHGYLAYNSFYSQLFEHVASHGFVVVGPQLYTMSGPDTTDEINSAAAVINWLAAGGLTSKLPPNVRADATKISISGHSRGGKVAFALALGHANVSLRGGAGGATIAALVAVDPVDGFAAGKQTPPPILTYGGANSLRVPAPVMVIGTGLGGLARAAPLLPACAPPGVSHGEFYGECAAPACHLVARDYGHTDMMDDVTPGARGLATRAVCRSGGARAPMRRFFGGAMVAFVKRWVEGEPELLDCVRARPETAPVVLSAVEFRDEAIANHSY

SEQ ID NO: 113693 - DNA, 1002 bp, Brassica napus
  CDS (1)..(1002)
atgtccccctcttttcttttctttattttgtttttgataaaggaaatgtcctcttcatcatcagcaaactcctttgaggatggcaaattcaaaacagatctcttaacagtaggcttatcatcttgctgctggaaaacgccctcttcttctccgactccgcagtctccgccgaagaggcttttggtggcaacgccggtggaggaaggagaatatccggtggtgatgctcctccatggttaccttctgtacaactcattttattcccagcttatgttgcatgtctcttcccatggcttcattgtcatcgctccgcagttatatagcattgccggaccagacacgatggacgagattaaatcaactgtggagattattgattggttatcagccggactaaaccactttcttccaccacaagtaacaccaaacctatctaaactcgcactctccggccatagccgtggcggtaaaaccgcatttgccgtggccttaaagaaatttggatactcgtccgacctaaagatctcggcattgatcggtatagatccggtcgatgggatgaggaaagggaaacaaacccctcctccagttttaacctatgaaccaaactcatttgacctagacaaaatgcctgttctagtgatcggttcgggacttggtgaaattagcccgaacctgttatttcctccgtgcgcgcctcccggagtgaaccaccgagatttcttccgggaatgtcaaggtccagcgtggcattttgtcgcaaaggattacgggcatttagacatgcttgatgatgatacagaagggattagaggcaagatttctcactatttgtgtaagaatggtgaagagagaagaccaatgaggagatttgttggtggaagtattgtggcgtttttgatggcttatttggaaggagatgatagtgaattggttaaaatcaaagataagtctcacgagggtgttcctgtcgaaattcaggagtttgaggttaaaaactag

SEQ ID NO: 113694 - protein, 333 aa, Brassica napus
MSPSFLFFILFLIKEMSSSSSANSFEDGKFKTDLLTVGLSSCCWKTPSSSPTPQSPPKRLLVATPVEEGEYPVVMLLHGYLLYNSFYSQLMLHVSSHGFIVIAPQLYSIAGPDTMDEIKSTVEIIDWLSAGLNHFLPPQVTPNLSKLALSGHSRGGKTAFAVALKKFGYSSDLKISALIGIDPVDGMRKGKQTPPPVLTYEPNSFDLDKMPVLVIGSGLGEISPNLLFPPCAPPGVNHRDFFRECQGPAWHFVAKDYGHLDMLDDDTEGIRGKISHYLCKNGEERRPMRRFVGGSIVAFLMAYLEGDDSELVKIKDKSHEGVPVEIQEFEVKN

SEQ ID NO: 113695 - DNA, 894 bp, Brassica napus
  CDS (1)..(894)
atgtcatcttcttcatcaagaaacgcctttgtggatggcaaatacaaaccagatcttttaacagtggatttagcatctcgctgtcgctgctacaaaacgacgccatcttcttctctgactccgccgtctcctcccaagtcgcttttggtggcaacgccggtggaggaaggagaatatccggtggtgatgctcctccatggttaccttctctacaactcattttactcccagcttatgttgcatgtctcttcctatggcttcattgtcatcgctccgcagttatataacattgccggaccagacacgatggacgagataaaatcaacggcggagattattgattggttatcagtcggacttaaccactttcttccaccacaagtaacacccaacctatctaaattcgcactcaccggccatagccgcggcggcaaaaccgcattcgccgtggccttaaagaaatttggatactcatcggaactaaagatctcagcaattatcggtgtagatccggtggatgggacagggaaagttattggttcgggacttggtgaacttgcccggaacccattgtttccaccgtgtgcacctacgggagtgaaccaccgagagtttttccaggaatgtcaaggtccagcgtggcattttgtcgcaaaggattacggacatttggacatgcttgatgatgatacaaaagggcttagagggaagagttcttattgtttgtgtaagaatggtgaagagagaaaaccaatgaggagatttattggtggaattgttgtgtcgtttttgatggcttatctggaagatgatgattgtgaattggtgaagatcaaagatgggtgtcatgaaggtgttcctgttgaaattcaagagtttgaggttaaaaagtaa

SEQ ID NO: 113696 - protein, 297 aa, Brassica napus
MSSSSSRNAFVDGKYKPDLLTVDLASRCRCYKTTPSSSLTPPSPPKSLLVATPVEEGEYPVVMLLHGYLLYNSFYSQLMLHVSSYGFIVIAPQLYNIAGPDTMDEIKSTAEIIDWLSVGLNHFLPPQVTPNLSKFALTGHSRGGKTAFAVALKKFGYSSELKISAIIGVDPVDGTGKVIGSGLGELARNPLFPPCAPTGVNHREFFQECQGPAWHFVAKDYGHLDMLDDDTKGLRGKSSYCLCKNGEERKPMRRFIGGIVVSFLMAYLEDDDCELVKIKDGCHEGVPVEIQEFEVKK

SEQ ID NO: 113697 - DNA, 957 bp, Linum usitatissimum
  CDS (1)..(957)
atgtctacttccactagtactgatgtatttcagagtggcagctacaaaacccatctccaaaacgtccaaccatcatcatgttgtaaaagcaatccaaacaaacccaattcttcttctcctccgccaccaaaggcactcttgatcgcctctccaaccgaagcaggtgaattcccagtcctcttgttcctccatggctacctcctctgcaacaccttctactctcagctcatccaccacatcgcctcccatggcttcatcgtcatcgcccctcagctctacacagtggcgggtccggattgtacagaggagattaaatccgttgctgaaataaccaattggctatccgaaggattacagcaactcctcccagttcatataaatcccgacttaaccaagctctgcctatccggtcacagccgaggaggcaaaaccgcttttgcccttgcattgaacaaggcggcagcagcatcgaccactacattgagattctcagcactaattggtgttgacccagttgatggaatggacatggggaagcaaacccctccgcccgtgctcacctacgttcctcgatcttttgatctcgagatggcggtgatggtgatcgggtctggtctgggtgaggtcaggaggaacccgatgttccctccttgtgctcccaagggggtgaaccatgaagagttctttagggaatgcagagagcctgcttgctatttcgtggttaaagattatggacatgtggatatgctggatgatgaaactaaaggggttagagggaaagctagctattgcttgtgcaagaatggggagtccagagagcccatgaggaggtttgttgcaggtgctacggttgcgtttatgagagcttacttggaaggaaatggtgatgatttggcagtgatcagaggtggggattctggtcccgttgagcttgccactgttgagtttctgctttga

SEQ ID NO: 113698 - protein, 318 aa, Linum usitatissimum
MSTSTSTDVFQSGSYKTHLQNVQPSSCCKSNPNKPNSSSPPPPKALLIASPTEAGEFPVLLFLHGYLLCNTFYSQLIHHIASHGFIVIAPQLYTVAGPDCTEEIKSVAEITNWLSEGLQQLLPVHINPDLTKLCLSGHSRGGKTAFALALNKAAAASTTTLRFSALIGVDPVDGMDMGKQTPPPVLTYVPRSFDLEMAVMVIGSGLGEVRRNPMFPPCAPKGVNHEEFFRECREPACYFVVKDYGHVDMLDDETKGVRGKASYCLCKNGESREPMRRFVAGATVAFMRAYLEGNGDDLAVIRGGDSGPVELATVEFLL

SEQ ID NO: 113699 - DNA, 975 bp, Brassica napus
  CDS (1)..(975)
atggcggggaaggaggacagtgagacgttttactcggcggcaactcctttggcgtttgagttaggcagccttccaacaaccgtgatccccgcagacccgtcggcaaccgatttgaccgcacctccaaagcctgtaataatcacctccccaaccgtcgccggaacttaccccgtcgtcttattcttccatggattctatcttcgtaactacttctactctgatgttattaaccacgtagcttctcatggctacattgttgtagccccacagctgtgcaagattttgccgccgggagggcaagtggaagtggacgatgctggaaaagtgataaactggacttcgaaaaacctcaaagctcacctcccaagctcagtaaacgctaatggcaactacaccgcactcgtgggccatagccgcggtggtaaaaccgcgtttgcggttgcgttaggccacgccgcaacactagacccatccatcaagttttcagctcttgtaggaatagatccagttgcaggaatcagcaaatgcataagaaccgatcccgaaatcttaacgtacaaaccggaatcattcgacctggacatgccggttgcagtgatcggtacgggtctcggaccgaagagtaacatgctgatgccaccatgcgcaccagcggaagtgaaccatgaggagttttatattgagtgtaaggctaccaaggggcatttcgtggctgcggattacggacatatggatatgttggacgataatttgcccggttttgtcgggtttatggcgggttgtatgtgtaagaacagtaaacgcaaaaagagtgagatgagaagctttgttggtggaattgtggttgcgtttctaaagtatagtctattgggtgaaaagtcagagattcgacagattgtgaaggatccctctgtttctccggcgaggcttgatcctttgccggagctggaagaggcttctggttatctcgtctag

SEQ ID NO: 113700 - protein, 324 aa, Brassica napus
MAGKEDSETFYSAATPLAFELGSLPTTVIPADPSATDLTAPPKPVIITSPTVAGTYPVVLFFHGFYLRNYFYSDVINHVASHGYIVVAPQLCKILPPGGQVEVDDAGKVINWTSKNLKAHLPSSVNANGNYTALVGHSRGGKTAFAVALGHAATLDPSIKFSALVGIDPVAGISKCIRTDPEILTYKPESFDLDMPVAVIGTGLGPKSNMLMPPCAPAEVNHEEFYIECKATKGHFVAADYGHMDMLDDNLPGFVGFMAGCMCKNSKRKKSEMRSFVGGIVVAFLKYSLLGEKSEIRQIVKDPSVSPARLDPLPELEEASGYLV

SEQ ID NO: 113701 - DNA, 1002 bp, Brassica napus
  CDS (1)..(1002)
atgtccccctcttttcttttctttattttgtttttgataaaggaaatgtcctcttcatcatcagcaaactcctttgaggatggcaaattcaaaacagatctcttaacagtaggcttatcatcttgctgctggaaaacgccctcttcttctccgactccgcagtctccgccgaagaggcttttggtggcaacgccggtggaggaaggagaatatccggtggtgatgctcctccatggttaccttctctacaactcattttattcccagcttatgttgcatgtctcttcccatggcttcattgtcatcgctccgcagttatatagcattgccggaccagacacgatggacgagataaaatcaacggcggagattattgattggttatcagccggactaaaccactttcttccaccacaagtaacaccaaacctatctaaactcgcactcaccggccatagccgcggcggcaaaaccgcattcgccgtggccttaaagaaatttggatactcatccgaactaaagatctcagcactgatcggtatagatccggtcgatgggacaaggaaagggaaacaaacccctcctccagttttaacctatgaaccaaactcatttaacctagaaaaaatgcctgttctagtgatcggttcgggacttggtgaaattagcccgaacctgttatttcctccgtgcgcgcctcccggagtgaaccaccgagatttcttccgggaatgtcaaggtccagcgtggcattttgtcgcaaaggattacgggcatttagacatgcttgatgatgatacagaagggattagaggcaagatttctcactatttgtgtaagaatggtgaagagagaagaccaatgaggagatttgttggtggaagtattgtggcgtttttgatggcttatttggaaggagatgatagtgaattggttaaaatcaaagataagtctcacgagggtgttcctgtcgaaattcaggagtttgaggttaaaaactag

SEQ ID NO: 113702 - protein, 333 aa, Brassica napus
MSPSFLFFILFLIKEMSSSSSANSFEDGKFKTDLLTVGLSSCCWKTPSSSPTPQSPPKRLLVATPVEEGEYPVVMLLHGYLLYNSFYSQLMLHVSSHGFIVIAPQLYSIAGPDTMDEIKSTAEIIDWLSAGLNHFLPPQVTPNLSKLALTGHSRGGKTAFAVALKKFGYSSELKISALIGIDPVDGTRKGKQTPPPVLTYEPNSFNLEKMPVLVIGSGLGEISPNLLFPPCAPPGVNHRDFFRECQGPAWHFVAKDYGHLDMLDDDTEGIRGKISHYLCKNGEERRPMRRFVGGSIVAFLMAYLEGDDSELVKIKDKSHEGVPVEIQEFEVKN

SEQ ID NO: 113703 - DNA, 957 bp, Zea mays
  CDS (1)..(957)
atggcagcaccggtgcagacgacagccacgacgcctcaggtccctgctgctgcggtagtcacgtcggtgttccagccagggaagcttgcggtcgaggtgatcacagtggatcacgatgcacagccaacaccgccgatcccgatcctgatcgctgctcccaaggatgccggaacctaccccgtcgccatgctactgcacggcttcttcctccagaaccgctactacgagcagctcctcaagcatgttgcctcttttggcttcatcatggtcgcaccacagttccacaccagcctcatatccaatagcgacaacaacgacatcgcggcggcagccaaggcgacggactggctccccgagggcctgccatccgtcctcccgacaggcgtcgaggccgacctttccaagcttgtcttggcgggccacagccgaggtggccacacggccttctccctggccctggggtacgccaagatcagcagcagcctgagcttctccgcgctcatcgggctcgaccccgtcgccggcacgggcaagaactcgcaactcccgccggcgatcctcacctacgcgccctcgtctttcgacatcgccatgccggtgctggtcatcgggaccgggctgggcgacgagagggagaacgtgctgttcccgccctgcgcccccgtggatgtgaaccacaccgagttctatcgcgagtgcagggctccgtgctaccacctggtgaccaaaaactatggccacctcgacatgttggacgacgacgctcccaagcttgtcacctgcctctgcaaggaagggaacagctgcaaggacgtgatgaggaggaccgtcgccggtatcatggtggccttcttgaaggccgtcatgggcgaggaggatggtgatctcaaggccatactcacagaccctgggctcgcaccaaccactctggaccctgtcgagtaccggttggcatga

SEQ ID NO: 113704 - protein, 318 aa, Zea mays
MAAPVQTTATTPQVPAAAVVTSVFQPGKLAVEVITVDHDAQPTPPIPILIAAPKDAGTYPVAMLLHGFFLQNRYYEQLLKHVASFGFIMVAPQFHTSLISNSDNNDIAAAAKATDWLPEGLPSVLPTGVEADLSKLVLAGHSRGGHTAFSLALGYAKISSSLSFSALIGLDPVAGTGKNSQLPPAILTYAPSSFDIAMPVLVIGTGLGDERENVLFPPCAPVDVNHTEFYRECRAPCYHLVTKNYGHLDMLDDDAPKLVTCLCKEGNSCKDVMRRTVAGIMVAFLKAVMGEEDGDLKAILTDPGLAPTTLDPVEYRLA

SEQ ID NO: 113705 - DNA, 20 bp, Artificial sequence
  primer
atggcggcgatagaggacag

SEQ ID NO: 113706 - DNA, 20 bp, Artificial sequence
  primer
ctagacgaagataccagaag

SEQ ID NO: 113707 - protein, 375 aa, Artificial sequence
  consensus sequence
  Variant (2)..(3): Xaa in position 2 to 3 is any amino acid
  Variant (5)..(15): Xaa in position 5 to 15 is any amino acid
  Variant (16)..(39): Xaa in position 16 to 39 is any or no amino acid
  Variant (43)..(48): Xaa in position 43 to 48 is any amino acid
  Variant (50)..(52): Xaa in position 50 to 52 is any amino acid
  Variant (54)..(54): Xaa in position 54 is any amino acid
  Variant (58)..(61): Xaa in position 58 to 61 is any amino acid
  Variant (64)..(67): Xaa in position 64 to 67 is any amino acid
  Variant (69)..(70): Xaa in position 69 to 70 is any amino acid
  Variant (72)..(73): Xaa in position 72 to 73 is any amino acid
  Variant (75)..(76): Xaa in position 75 to 76 is any amino acid
  Variant (78)..(79): Xaa in position 78 to 79 is any amino acid
  Variant (83)..(83): Xaa in position 83 is any amino acid
  Variant (85)..(86): Xaa in position 85 to 86 is any amino acid
  Variant (91)..(107): Xaa in position 91 to 107 is any amino acid
  Variant (108)..(116): Xaa in position 108 to 116 is any or no amino acid
  Variant (118)..(121): Xaa in position 118 to 121 is any amino acid
  Variant (122)..(125): Xaa in position 122 to 125 is any or no amino acid
  Variant (127)..(129): Xaa in position 127 to 129 is any amino acid
  Variant (132)..(133): Xaa in position 132 to 133 is any amino acid
  Variant (134)..(138): Xaa in position 134 to 138 is any or no amino acid
  Variant (140)..(149): Xaa in position 140 to 149 is any amino acid
  Variant (156)..(157): Xaa in position 156 to 157 is any amino acid
  Variant (161)..(161): Xaa in position 161 is any amino acid
  Variant (164)..(168): Xaa in position 164 to 168 is any amino acid
  Variant (169)..(190): Xaa in position 169 to 190 is any or no amino acid
  Variant (194)..(194): Xaa in position 194 is any amino acid
  Variant (196)..(196): Xaa in position 196 is any amino acid
  Variant (200)..(200): Xaa in position 200 is any amino acid
  Variant (202)..(204): Xaa in position 202 to 204 is any amino acid
  Variant (205)..(214): Xaa in position 205 to 214 is any or no amino acid
  Variant (216)..(217): Xaa in position 216 to 217 is any amino acid
  Variant (220)..(227): Xaa in position 220 to 227 is any amino acid
  Variant (228)..(230): Xaa in position 228 to 230 is any or no amino acid
  Variant (232)..(233): Xaa in position 232 to 233 is any amino acid
  Variant (237)..(237): Xaa in position 237 is any amino acid
  Variant (241)..(245): Xaa in position 241 to 245 is any amino acid
  Variant (246)..(251): Xaa in position 246 to 251 is any or no amino acid
  Variant (255)..(256): Xaa in position 255 to 256 is any amino acid
  Variant (260)..(261): Xaa in position 260 to 261 is any amino acid
  Variant (263)..(264): Xaa in position 263 to 264 is any amino acid
  Variant (267)..(272): Xaa in position 267 to 272 is any amino acid
  Variant (273)..(275): Xaa in position 273 to 275 is any or no amino acid
  Variant (277)..(279): Xaa in position 277 to 279 is any amino acid
  Variant (283)..(283): Xaa in position 283 is any amino acid
  Variant (288)..(292): Xaa in position 288 to 292 is any amino acid
  Variant (293)..(306): Xaa in position 293 to 306 is any or no amino acid
  Variant (308)..(314): Xaa in position 308 to 314 is any amino acid
  Variant (315)..(317): Xaa in position 315 to 317 is any or no amino acid
  Variant (320)..(323): Xaa in position 320 to 323 is any amino acid
  Variant (325)..(326): Xaa in position 325 to 326 is any amino acid
  Variant (331)..(350): Xaa in position 331 to 350 is any amino acid
  Variant (351)..(374): Xaa in position 351 to 374 is any or no amino acid
FXXGXXXXXXXXXXXXXXXXXXXXXXXXXXXXXXXXXXXPPKXXXXXXPXXXGXYPVXXXXHGXXXXNXXYXXLXXHXXSHGXIXXAPQLXXXXXXXXXXXXXXXXXXXXXXXXXXWXXXXXXXXLXXXLPXXXXXXXVXXXXXXXXXXGHSRGGXXAFAXALXXXXXXXXXXXXXXXXXXXXXXXXXXXSALXGXDPVXGXXXXXXXXXXXXXPXXLTXXXXXXXXXXXPXXVIGXGLGXXXXXXXXXXXCAPXXVNHXXFXXECXXXXXXXXXVXXXYGHXDMLDXXXXXXXXXXXXXXXXXXXCXXXXXXXXXXMRXXXXGXXVAFLXXXXXXXXXXXXXXXXXXXXXXXXXXXXXXXXXXXXXXXXXXXXP

SEQ ID NO: 113708 - protein, 52 aa, Artificial sequence
  protein pattern
  Variant (2)..(3): Xaa in position 2 to 3 is any amino acid
  Variant (4)..(4): Xaa in position 4 is Ile, Leu or Val
  Variant (5)..(5): Xaa in position 5 is any amino acid
  Variant (6)..(6): Xaa in position 6 is Ile or Val
  Variant (7)..(7): Xaa in position 7 is any amino acid
  Variant (8)..(8): Xaa in position 8 is Ala, Cys, Ser or Thr
  Variant (10)..(12): Xaa in position 10 to 12 is any amino acid
  Variant (14)..(14): Xaa in position 14 is any amino acid
  Variant (15)..(15): Xaa in position 15 is Phe or Tyr
  Variant (18)..(18): Xaa in position 18 is any amino acid
  Variant (19)..(20): Xaa in position 19 to 20 is any or no amino acid
  Variant (22)..(23): Xaa in position 22 to 23 is any or no amino acid
  Variant (26)..(29): Xaa in position 26 to 29 is any amino acid
  Variant (30)..(30): Xaa in position 30 is Asn, Pro or Thr
  Variant (31)..(32): Xaa in position 31 to 32 is any amino acid
  Variant (34)..(34): Xaa in position 34 is Glu, Ser or Thr
  Variant (35)..(35): Xaa in position 35 is any amino acid
  Variant (36)..(36): Xaa in position 36 is Phe, Leu or Val
  Variant (37)..(37): Xaa in position 37 is Phe, Ile, Leu or Met
  Variant (38)..(38): Xaa in position 38 is any amino acid
  Variant (39)..(39): Xaa in position 39 is His or Tyr
  Variant (40)..(40): Xaa in position 40 is Ile or Val
  Variant (41)..(41): Xaa in position 41 is Ala, Ser or Val
  Variant (43)..(43): Xaa in position 43 is Phe, His or Tyr
  Variant (45)..(45): Xaa in position 45 is Phe or Tyr
  Variant (46)..(46): Xaa in position 46 is Ile or Val
  Variant (47)..(47): Xaa in position 47 is any amino acid
  Variant (48)..(48): Xaa in position 48 is Ile or Val
  Variant (49)..(49): Xaa in position 49 is Ala or Gly
  Variant (51)..(51): Xaa in position 51 is any amino acid
  Variant (52)..(52): Xaa in position 52 is Phe, Leu or Val
PXXXXXXXPXXXGXXPVXXXLXXHGXXXXXXXYXXXXXXXXSXGXXXXXPXX

SEQ ID NO: 113709 - protein, 28 aa, Artificial sequence
  protein pattern
  Variant (2)..(2): Xaa in position 2 is any amino acid
  Variant (3)..(3): Xaa in position 3 is Ala, Gly or Pro
  Variant (4)..(4): Xaa in position 4 is Asp, Glu or Asn
  Variant (5)..(8): Xaa in position 5 to 8 is any amino acid
  Variant (9)..(9): Xaa in position 9 is Ala, Gly, Ser or Val
  Variant (10)..(10): Xaa in position 10 is Ile or Leu
  Variant (11)..(11): Xaa in position 11 is Ala, Ser, Thr or Val
  Variant (18)..(19): Xaa in position 18 to 19 is any amino acid
  Variant (20)..(20): Xaa in position 20 is Ala or Val
  Variant (22)..(23): Xaa in position 22 to 23 is any or no amino acid
  Variant (25)..(25): Xaa in position 25 is any amino acid
  Variant (26)..(27): Xaa in position 26 to 27 is any or no amino acid
VXXXXXXXXXXGHSRGGXXXFXXAXXXA

SEQ ID NO: 113710 - protein, 20 aa, Artificial sequence
  protein pattern
  Variant (2)..(2): Xaa in position 2 is any or no amino acid
  Variant (6)..(6): Xaa in position 6 is any amino acid
  Variant (7)..(7): Xaa in position 7 is Asp, Glu or Gly
  Variant (8)..(8): Xaa in position 8 is Leu or Val
  Variant (9)..(9): Xaa in position 9 is Asn or Ser
  Variant (10)..(10): Xaa in position 10 is His or Tyr
  Variant (11)..(11): Xaa in position 11 is any amino acid
  Variant (12)..(12): Xaa in position 12 is Ala, Asp or Glu
  Variant (14)..(14): Xaa in position 14 is Phe or Tyr
  Variant (15)..(15): Xaa in position 15 is any amino acid
  Variant (16)..(16): Xaa in position 16 is Glu or Lys
  Variant (17)..(19): Xaa in position 17 to 19 is any amino acid
  Variant (20)..(20): Xaa in position 20 is Ala, Pro, Ser or Thr
PXCAPXXXXXXXFXXXXXXX

SEQ ID NO: 113711 - protein, 26 aa, Artificial sequence
  protein pattern
  Variant (2)..(4): Xaa in position 2 to 4 is any amino acid
  Variant (5)..(5): Xaa in position 5 is Ala, Gly or Ser
  Variant (7)..(8): Xaa in position 7 to 8 is any amino acid
  Variant (10)..(10): Xaa in position 10 is Ala or Ser
  Variant (13)..(21): Xaa in position 13 to 21 is any amino acid
  Variant (22)..(22): Xaa in position 22 is Ala, Asp, Glu or Gln
  Variant (23)..(25): Xaa in position 23 to 25 is any amino acid
  Variant (26)..(26): Xaa in position 26 is Ile, Leu or Val
RXXXXGXXVXFLXXXXXXXXXXXXXX

SEQ ID NO: 113712 - protein, 11 aa, Artificial sequence
  protein pattern
  Variant (2)..(2): Xaa in position 2 is Ala, Gly or Thr
  Variant (3)..(3): Xaa in position 3 is Ile or Leu
  Variant (4)..(4): Xaa in position 4 is Ile or Val
  Variant (6)..(6): Xaa in position 6 is Ile, Leu or Val
  Variant (10)..(10): Xaa in position 10 is Ala or Asp
SXXXGXDPVXG

SEQ ID NO: 113713 - protein, 10 aa, Artificial sequence
  protein pattern
  Variant (2)..(3): Xaa in position 2 to 3 is any amino acid
  Variant (5)..(5): Xaa in position 5 is Ile or Val
  Variant (7)..(7): Xaa in position 7 is Ser or Thr
PXXVXGXGLG

SEQ ID NO: 113714 - DNA, 1584 bp, Arabidopsis thaliana; identical to SEQ ID NO: 8435
  CDS (1)..(1584)

SEQ ID NO: 113715 - protein, 527 aa, Arabidopsis thaliana; identical to SEQ ID NO: 8436

SEQ ID NO: 113716 - DNA, 1898 bp, Zea mays subsp. mays; identical to SEQ ID NO: 16271
  CDS (88)..(1653)

SEQ ID NO: 113717 - protein, 521 aa, Zea mays subsp. mays; identical to SEQ ID NO: 16274

SEQ ID NO: 113718 - DNA, 1866 bp, Glycine max; identical to SEQ ID NO: 15540
  CDS (48)..(1628)

SEQ ID NO: 113719 - protein, 526 aa, Glycine max; identical to SEQ ID NO: 15541

SEQ ID NO: 113720 - DNA, 1898 bp, Zea mays subsp. mays; identical to SEQ ID NO: 16271
  CDS (70)..(1653)

SEQ ID NO: 113721 - protein, 527 aa, Zea mays subsp. mays; identical to SEQ ID NO: 16272

SEQ ID NO: 113722 - DNA, 1875 bp, Triticum aestivum; identical to SEQ ID NO: 15546
  CDS (86)..(1630)

SEQ ID NO: 113723 - protein, 514 aa, Triticum aestivum; identical to SEQ ID NO: 16276

SEQ ID NO: 113724 - DNA, 1953 bp, Triticum aestivum; identical to SEQ ID NO: 15548
  CDS (152)..(1693)

SEQ ID NO: 113725 - protein, 513 aa, Triticum aestivum; identical to SEQ ID NO: 15549

SEQ ID NO: 113726 - DNA, 1896 bp, Triticum aestivum; identical to SEQ ID NO: 16283
  CDS (80)..(1672)

SEQ ID NO: 113727 - protein, 530 aa, Triticum aestivum; identical to SEQ ID NO: 16284

SEQ ID NO: 113728 - DNA, 1896 bp, Triticum aestivum; identical to SEQ ID NO: 16283
  CDS (98)..(1672)

SEQ ID NO: 113729 - protein, 524 aa, Triticum aestivum; identical to SEQ ID NO: 16286

SEQ ID NO: 113730 - DNA, 1958 bp, Triticum aestivum; identical to SEQ ID NO: 15552
  CDS (174)..(1718)

SEQ ID NO: 113731 - protein, 514 aa, Triticum aestivum; identical to SEQ ID NO: 15555

SEQ ID NO: 113732 - DNA, 1883 bp, Brassica napus; identical to SEQ ID NO: 15560
  CDS (119)..(1651)

SEQ ID NO: 113733 - protein, 510 aa, Brassica napus; identical to SEQ ID NO: 8816

SEQ ID NO: 113734 - DNA, 1911 bp, Brassica napus; identical to SEQ ID NO: 15562
  CDS (85)..(1668)

SEQ ID NO: 113735 - protein, 527 aa, Brassica napus; identical to SEQ ID NO: 8820

SEQ ID NO: 113736 - DNA, 1903 bp, Brassica napus; identical to SEQ ID NO: 16301
  CDS (122)..(1618)

SEQ ID NO: 113737 - protein, 498 aa, Brassica napus; identical to SEQ ID NO: 8854

SEQ ID NO: 113738 - DNA, 2063 bp, Glycine max; identical to SEQ ID NO: 15566
  CDS (192)..(1700)

SEQ ID NO: 113739 - protein, 502 aa, Glycine max; identical to SEQ ID NO: 8880

SEQ ID NO: 113740 - DNA, 1976 bp, Glycine max; identical to SEQ ID NO: 15568
  CDS (116)..(1696)

SEQ ID NO: 113741 - protein, 526 aa, Glycine max; identical to SEQ ID NO: 8826

SEQ ID NO: 113742 - DNA, 2067 bp, Triticum aestivum; identical to SEQ ID NO: 15570
  CDS (115)..(1659)

SEQ ID NO: 113743 - protein, 514 aa, Triticum aestivum; identical to SEQ ID NO: 8828

SEQ ID NO: 113744 - DNA, 2002 bp, Triticum aestivum; identical to SEQ ID NO: 15572
  CDS (128)..(1711)

SEQ ID NO: 113745 - protein, 527 aa, Triticum aestivum; identical to SEQ ID NO: 8830

SEQ ID NO: 113746 - DNA, 1825 bp, Helianthus annuus; identical to SEQ ID NO: 15574
  CDS (128)..(1624)

SEQ ID NO: 113747 - protein, 498 aa, Helianthus annuus; identical to SEQ ID NO: 8834

SEQ ID NO: 113748 - DNA, 1922 bp, Zea mays; identical to SEQ ID NO: 16307
  CDS (148)..(1677)

SEQ ID NO: 113749 - protein, 509 aa, Zea mays; identical to SEQ ID NO: 16308

SEQ ID NO: 113750 - DNA, 2075 bp, Zea mays; identical to SEQ ID NO: 15576
  CDS (198)..(1739)

SEQ ID NO: 113751 - protein, 513 aa, Zea mays; identical to SEQ ID NO: 8894

SEQ ID NO: 113752 - DNA, 1590 bp, Aedes aegypti; identical to SEQ ID NO: 15578
  CDS (1)..(1590)

SEQ ID NO: 113753 - protein, 529 aa, Aedes aegypti; identical to SEQ ID NO: 15579

SEQ ID NO: 113754 - DNA, 1560 bp, Aedes aegypti; identical to SEQ ID NO: 15580
  CDS (1)..(1560)

SEQ ID NO: 113755 - protein, 519 aa, Aedes aegypti; identical to SEQ ID NO: 15581

SEQ ID NO: 113756 - DNA, 1542 bp, Aedes aegypti; identical to SEQ ID NO: 15582
  CDS (1)..(1542)

SEQ ID NO: 113757 - protein, 513 aa, Aedes aegypti; identical to SEQ ID NO: 15583

SEQ ID NO: 113758 - DNA, 1413 bp, Klebsiella pneumoniae subsp. pneumoniae MGH 78578; identical to SEQ ID NO: 15584
  CDS (1)..(1413): transl_table=11

SEQ ID NO: 113759 - protein, 470 aa, Klebsiella pneumoniae subsp. pneumoniae MGH 78578; identical to SEQ ID NO: 15585

SEQ ID NO: 113760 - DNA, 1533 bp, Arabidopsis thaliana; identical to SEQ ID NO: 8391
  CDS (1)..(1533)

SEQ ID NO: 113761 - protein, 510 aa, Arabidopsis thaliana; identical to SEQ ID NO: 8392

SEQ ID NO: 113762 - DNA, 1494 bp, Arabidopsis thaliana; identical to SEQ ID NO: 8393
  CDS (1)..(1494)

SEQ ID NO: 113763 - protein, 497 aa, Arabidopsis thaliana; identical to SEQ ID NO: 8394

SEQ ID NO: 113764 - DNA, 1533 bp, Arabidopsis thaliana; identical to SEQ ID NO: 8395
  CDS (1)..(1533)

SEQ ID NO: 113765 - protein, 510 aa, Arabidopsis thaliana; identical to SEQ ID NO: 8396

SEQ ID NO: 113766 - DNA, 1479 bp, Arabidopsis thaliana; identical to SEQ ID NO: 8397
  CDS (1)..(1479)

SEQ ID NO: 113767 - protein, 492 aa, Arabidopsis thaliana; identical to SEQ ID NO: 8398

SEQ ID NO: 113768 - DNA, 1533 bp, Arabidopsis thaliana; identical to SEQ ID NO: 8399
  CDS (1)..(1533)

SEQ ID NO: 113769 - protein, 510 aa, Arabidopsis thaliana; identical to SEQ ID NO: 8400

SEQ ID NO: 113770 - DNA, 1740 bp, Arabidopsis thaliana; identical to SEQ ID NO: 8401
  CDS (1)..(1740)

SEQ ID NO: 113771 - protein, 579 aa, Arabidopsis thaliana; identical to SEQ ID NO: 8402

SEQ ID NO: 113772 - DNA, 1497 bp, Arabidopsis thaliana; identical to SEQ ID NO: 8403
  CDS (1)..(1497)

SEQ ID NO: 113773 - protein, 498 aa, Arabidopsis thaliana; identical to SEQ ID NO: 8404

SEQ ID NO: 113774 - DNA, 1533 bp, Arabidopsis thaliana; identical to SEQ ID NO: 8405
  CDS (1)..(1533)

SEQ ID NO: 113775 - protein, 510 aa, Arabidopsis thaliana; identical to SEQ ID NO: 8406

SEQ ID NO: 113776 - DNA, 1413 bp, Vibrio cholerae O1 biovar eltor str. N16961; identical to SEQ ID NO: 15602
  CDS (1)..(1413): transl_table=11

SEQ ID NO: 113777 - protein, 470 aa, Vibrio cholerae O1 biovar eltor str. N16961; identical to SEQ ID NO: 15603

SEQ ID NO: 113778 - DNA, 1755 bp, Bacillus halodurans C-125; identical to SEQ ID NO: 15604
  CDS (1)..(1755): transl_table=11

SEQ ID NO: 113779 - protein, 584 aa, Bacillus halodurans C-125; identical to SEQ ID NO: 15605

SEQ ID NO: 113780 - DNA, 1443 bp, Escherichia coli O157:H7 EDL933; identical to SEQ ID NO: 15614
  CDS (1)..(1443): transl_table=11
  misc_feature (850)..(850): r is g or a

SEQ ID NO: 113781 - protein, 480 aa, Escherichia coli O157:H7 EDL933; identical to SEQ ID NO: 15615
  misc_feature (284)..(284): The Xaa at location 284 stands for Ala, or Thr.

SEQ ID NO: 113782 - DNA, 1758 bp, Listeria innocua Clip11262; identical to SEQ ID NO: 15628
  CDS (1)..(1758): transl_table=11

SEQ ID NO: 113783 - protein, 585 aa, Listeria innocua Clip11262; identical to SEQ ID NO: 15629

SEQ ID NO: 113784 - DNA, 1404 bp, Clostridium perfringens str. 13; identical to SEQ ID NO: 8431
  CDS (1)..(1404): transl_table=11

SEQ ID NO: 113785 - protein, 467 aa, Clostridium perfringens str. 13; identical to SEQ ID NO: 8432

SEQ ID NO: 113786 - DNA, 1584 bp, Arabidopsis thaliana; identical to SEQ ID NO: 8439
  CDS (1)..(1584)

SEQ ID NO: 113787 - protein, 527 aa, Arabidopsis thaliana; identical to SEQ ID NO: 8440

SEQ ID NO: 113788 - DNA, 1428 bp, Fusobacterium nucleatum subsp. nucleatum ATCC 25586; identical to SEQ ID NO: 8443
  CDS (1)..(1428): transl_table=11

SEQ ID NO: 113789 - protein, 475 aa, Fusobacterium nucleatum subsp. nucleatum ATCC 25586; identical to SEQ ID NO: 8444

SEQ ID NO: 113790 - DNA, 1665 bp, Drosophila melanogaster; identical to SEQ ID NO: 15642
  CDS (1)..(1665)

SEQ ID NO: 113791 - protein, 554 aa, Drosophila melanogaster; identical to SEQ ID NO: 15643

SEQ ID NO: 113792 - DNA, 1752 bp, Thermoanaerobacter tengcongensis MB4; identical to SEQ ID NO: 8445
  CDS (1)..(1752): transl_table=11

SEQ ID NO: 113793 - protein, 583 aa, Thermoanaerobacter tengcongensis MB4; identical to SEQ ID NO: 8446

SEQ ID NO: 113794 - DNA, 1431 bp, Streptomyces coelicolor A3(2); identical to SEQ ID NO: 8449
  CDS (1)..(1431): transl_table=11

SEQ ID NO: 113795 - protein, 476 aa, Streptomyces coelicolor A3(2); identical to SEQ ID NO: 8450

SEQ ID NO: 113796 - DNA, 1785 bp, Thermosynechococcus elongatus BP-1; identical to SEQ ID NO: 8455
  CDS (1)..(1785): transl_table=11

SEQ ID NO: 113797 - protein, 594 aa, Thermosynechococcus elongatus BP-1; identical to SEQ ID NO: 8456

SEQ ID NO: 113798 - DNA, 1761 bp, Oceanobacillus iheyensis HTE831; identical to SEQ ID NO: 8457
  CDS (1)..(1761): transl_table=11

SEQ ID NO: 113799 - protein, 586 aa, Oceanobacillus iheyensis HTE831; identical to SEQ ID NO: 8458

SEQ ID NO: 113800 - DNA, 1413 bp, Shigella flexneri 2a str. 301; identical to SEQ ID NO: 15660
  CDS (1)..(1413): transl_table=11

SEQ ID NO: 113801 - protein, 470 aa, Shigella flexneri 2a str. 301; identical to SEQ ID NO: 15661

SEQ ID NO: 113802 - DNA, 1539 bp, Drosophila melanogaster; identical to SEQ ID NO: 15666
  CDS (1)..(1539)

SEQ ID NO: 113803 - protein, 512 aa, Drosophila melanogaster; identical to SEQ ID NO: 15667

SEQ ID NO: 113804 - DNA, 1455 bp, Pseudomonas putida KT2440; identical to SEQ ID NO: 15668
  CDS (1)..(1455): transl_table=11

SEQ ID NO: 113805 - protein, 484 aa, Pseudomonas putida KT2440; identical to SEQ ID NO: 15669

SEQ ID NO: 113806 - DNA, 1629 bp, Escherichia coli CFT073; identical to SEQ ID NO: 15672
  CDS (1)..(1629): transl_table=11

SEQ ID NO: 113807 - protein, 542 aa, Escherichia coli CFT073; identical to SEQ ID NO: 15673

SEQ ID NO: 113808 - DNA, 1755 bp, Clostridium tetani E88; identical to SEQ ID NO: 15676
  CDS (1)..(1755): transl_table=11

SEQ ID NO: 113809 - protein, 584 aa, Clostridium tetani E88; identical to SEQ ID NO: 15677

SEQ ID NO: 113810 - DNA, 1758 bp, Enterococcus faecalis V583; identical to SEQ ID NO: 8473
  CDS (1)..(1758): transl_table=11

SEQ ID NO: 113811 - protein, 585 aa, Enterococcus faecalis V583; identical to SEQ ID NO: 8474

SEQ ID NO: 113812 - DNA, 1758 bp, Bacillus cereus ATCC 14579; identical to SEQ ID NO: 15690
  CDS (1)..(1758): transl_table=11

SEQ ID NO: 113813 - protein, 585 aa, Bacillus cereus ATCC 14579; identical to SEQ ID NO: 15691

SEQ ID NO: 113814 - DNA, 1785 bp, Prochlorococcus marinus subsp. marinus str. CCMP1375
  CDS (1)..(1785): transl_table=11
atgacaacgatagatctaaaacgtaggacaaagatcgttgcgacaataggccctgcaacagaaagtccagagaaaatcacagagcttattaaagcaggtgctacaacctttagactgaatttctcgcatggagatcatgaagaacatgcaaaacggataaaaaccatcagatctgttgcatcagatttaggagtaaacataggcattcttcaggatttacaaggtcctaaaatcagattaggaagatttaaagagggtccagtcaacctaaaaacaggagatgtatttgccctaacttcagaaaacaaagactgcaatcaggaaatagctaatgtcacctatgaaaaccttgtcaatgaggtggaaaaaggaaaaagaatattattagatgatggaagagtcgaaatgattgtagagaatgtagacaagaaaaacaaatcacttatttgcaaagtcacagttggtggaattctttcaaacaacaaaggggttaatttccctgacgtacaactatcaattaatgctttaactgaaaaagataaaatagacctttcatttggtctaaaacaaggagttgactgggtagctctaagttttgttaggaatccagcggatattcaagaaatcaaggaattaatcagacggcatggttataccactccaatagttgcaaaaatagagaaatttgaagcaatagaccaaatagattcaatactcagcctttgtgatggggtgatggttgcaagaggcgatttgggtgttgaaatggatgcagaagaagtacctttgctgcagaaagaattaattaaaaaggccaatagccttgggataccaattattacagctacccagatgttggattcgatggcctcgagtcctagaccaactagggcagaagttagcgatgtagctaatgcaatacttgatggtacagatgcagtaatgctttctaacgaaacagcagtgggagattatccaatagaagctgtcgaaaccatggcaaaaatagcaagaagaatcgagagggattacccacaaagagctttagaaagccaccttccaagtacaattcctaatgcaattagtgccgcagtaagtactattgcaagacaattaaacgcagcagcaatacttcccctaactaaaagtggtgcaactgctcataatgtgagtaagtttcgtcctgctaccccaattcttgccataacaagtgaaattagcgtcgcaagaagacttcaattggtatggggtgtatctcccttgttgatagatgctcaaaaaagcacaagcaaaacctttggaatagcaatggagcaggcaatggacatgaaattattaaagcccggagatcaagtagtagaaacagcaggaaccctaacaggcataagtggttcaacagatttaattaaagtaggaattgtcagcaagatagtagcgagcggaaaaacaaaaccaatcgttaaagaaggaacaataagtggcaaacttagagttataaataaagcaaccgatctgtcagatttaaaatcaggcgaaatactagtacttgcagaaaatgtacaatataatttggacactaaaactcatatatcagcaatgatatttgaaggcgaatattcattaatcaatacaaataatcaaattgaagataataatataattcctgctatatataatgtagaaggagcatgtactaaatttaaaaatggcgagattgtcacactagatcttaaagatggaaatataataaagggtcttgctcaggacctgaaaacatataattaa

SEQ ID NO: 113815 - protein, 594 aa, Prochlorococcus marinus subsp. marinus str. CCMP1375
MTTIDLKRRTKIVATIGPATESPEKITELIKAGATTFRLNFSHGDHEEHAKRIKTIRSVASDLGVNIGILQDLQGPKIRLGRFKEGPVNLKTGDVFALTSENKDCNQEIANVTYENLVNEVEKGKRILLDDGRVEMIVENVDKKNKSLICKVTVGGILSNNKGVNFPDVQLSINALTEKDKIDLSFGLKQGVDWVALSFVRNPADIQEIKELIRRHGYTTPIVAKIEKFEAIDQIDSILSLCDGVMVARGDLGVEMDAEEVPLLQKELIKKANSLGIPIITATQMLDSMASSPRPTRAEVSDVANAILDGTDAVMLSNETAVGDYPIEAVETMAKIARRIERDYPQRALESHLPSTIPNAISAAVSTIARQLNAAAILPLTKSGATAHNVSKFRPATPILAITSEISVARRLQLVWGVSPLLIDAQKSTSKTFGIAMEQAMDMKLLKPGDQVVETAGTLTGISGSTDLIKVGIVSKIVASGKTKPIVKEGTISGKLRVINKATDLSDLKSGEILVLAENVQYNLDTKTHISAMIFEGEYSLINTNNQIEDNNIIPAIYNVEGACTKFKNGEIVTLDLKDGNIIKGLAQDLKTYN

SEQ ID NO: 113816 - DNA, 1410 bp, Photorhabdus luminescens subsp. laumondii TTO1; identical to SEQ ID NO: 15702
  CDS (1)..(1410): transl_table=11

SEQ ID NO: 113817 - protein, 469 aa, Photorhabdus luminescens subsp. laumondii TTO1; identical to SEQ ID NO: 15703

SEQ ID NO: 113818 - DNA, 1758 bp, Bacillus cereus ATCC 10987; identical to SEQ ID NO: 15714
  CDS (1)..(1758): transl_table=11

SEQ ID NO: 113819 - protein, 585 aa, Bacillus cereus ATCC 10987; identical to SEQ ID NO: 15715

SEQ ID NO: 113820 - DNA, 1656 bp, Nasonia vitripennis; identical to SEQ ID NO: 15718
  CDS (1)..(1656)

SEQ ID NO: 113821 - protein, 551 aa, Nasonia vitripennis; identical to SEQ ID NO: 15719

SEQ ID NO: 113822 - DNA, 1587 bp, Magnaporthe grisea 70-15; identical to SEQ ID NO: 8497
  CDS (1)..(1587)

SEQ ID NO: 113823 - protein, 528 aa, Magnaporthe grisea 70-15; identical to SEQ ID NO: 8498

SEQ ID NO: 113824 - DNA, 1623 bp, Gibberella zeae PH-1; identical to SEQ ID NO: 8499
  CDS (1)..(1623)

SEQ ID NO: 113825 - protein, 540 aa, Gibberella zeae PH-1; identical to SEQ ID NO: 8500

SEQ ID NO: 113826 - DNA, 1554 bp, Apis mellifera; identical to SEQ ID NO: 15722
  CDS (1)..(1554)

SEQ ID NO: 113827 - protein, 517 aa, Apis mellifera; identical to SEQ ID NO: 15723

SEQ ID NO: 113828 - DNA, 1515 bp, Candida albicans SC5314; identical to SEQ ID NO: 8501
  CDS (1)..(1515): transl_table=12

SEQ ID NO: 113829 - protein, 504 aa, Candida albicans SC5314; identical to SEQ ID NO: 8502

SEQ ID NO: 113830 - DNA, 1587 bp, Ustilago maydis 521; identical to SEQ ID NO: 8503
  CDS (1)..(1587)

SEQ ID NO: 113831 - protein, 528 aa, Ustilago maydis 521; identical to SEQ ID NO: 8504

SEQ ID NO: 113832 - DNA, 1590 bp, Cryptococcus neoformans var. neoformans B-3501A; identical to SEQ ID NO: 15728
  CDS (1)..(1590)

SEQ ID NO: 113833 - protein, 529 aa, Cryptococcus neoformans var. neoformans B-3501A; identical to SEQ ID NO: 15729

SEQ ID NO: 113834 - DNA, 1719 bp, Cryptococcus neoformans var. neoformans B-3501A; identical to SEQ ID NO: 15730
  CDS (1)..(1719)

SEQ ID NO: 113835 - protein, 572 aa, Cryptococcus neoformans var. neoformans B-3501A; identical to SEQ ID NO: 15731

SEQ ID NO: 113836 - DNA, 1539 bp, Tribolium castaneum; identical to SEQ ID NO: 15734
  CDS (1)..(1539)

SEQ ID NO: 113837 - protein, 512 aa, Tribolium castaneum; identical to SEQ ID NO: 15735

SEQ ID NO: 113838 - DNA, 1611 bp, Tribolium castaneum; identical to SEQ ID NO: 15736
  CDS (1)..(1611)

SEQ ID NO: 113839 - protein, 536 aa, Tribolium castaneum; identical to SEQ ID NO: 15737

SEQ ID NO: 113840 - DNA, 1674 bp, Tribolium castaneum; identical to SEQ ID NO: 15738
  CDS (1)..(1674)

SEQ ID NO: 113841 - protein, 557 aa, Tribolium castaneum; identical to SEQ ID NO: 15739

SEQ ID NO: 113842 - DNA, 1593 bp, Tribolium castaneum; identical to SEQ ID NO: 15740
  CDS (1)..(1593)

SEQ ID NO: 113843 - protein, 530 aa, Tribolium castaneum; identical to SEQ ID NO: 15741

SEQ ID NO: 113844 - DNA, 1761 bp, Clostridium difficile 630; identical to SEQ ID NO: 8505
  CDS (1)..(1761): transl_table=11

SEQ ID NO: 113845 - protein, 586 aa, Clostridium difficile 630; identical to SEQ ID NO: 8506

SEQ ID NO: 113846 - DNA, 1758 bp, Listeria monocytogenes str. 4b F2365; identical to SEQ ID NO: 15752
  CDS (1)..(1758): transl_table=11

SEQ ID NO: 113847 - protein, 585 aa, Listeria monocytogenes str. 4b F2365; identical to SEQ ID NO: 15753

SEQ ID NO: 113848 - DNA, 1758 bp, Bacillus thuringiensis serovar konkukian str. 97-27; identical to SEQ ID NO: 15754
  CDS (1)..(1758): transl_table=11

SEQ ID NO: 113849 - protein, 585 aa, Bacillus thuringiensis serovar konkukian str. 97-27; identical to SEQ ID NO: 15755

SEQ ID NO: 113850 - DNA, 1413 bp, Erwinia carotovora subsp. atroseptica SCRI1043; identical to SEQ ID NO: 15756
  CDS (1)..(1413): transl_table=11

SEQ ID NO: 113851 - protein, 470 aa, Erwinia carotovora subsp. atroseptica SCRI1043; identical to SEQ ID NO: 15757

SEQ ID NO: 113852 - DNA, 1758 bp, Bacillus licheniformis ATCC 14580; identical to SEQ ID NO: 15768
  CDS (1)..(1758): transl_table=11

SEQ ID NO: 113853 - protein, 585 aa, Bacillus licheniformis ATCC 14580; identical to SEQ ID NO: 15769

SEQ ID NO: 113854 - DNA, 1755 bp, Bacillus clausii KSM-K16; identical to SEQ ID NO: 8537
  CDS (1)..(1755): transl_table=11

SEQ ID NO: 113855 - protein, 584 aa, Bacillus clausii KSM-K16; identical to SEQ ID NO: 8538

SEQ ID NO: 113856 - DNA, 1431 bp, Anabaena variabilis ATCC 29413; identical to SEQ ID NO: 15790
  CDS (1)..(1431): transl_table=11

SEQ ID NO: 113857 - protein, 476 aa, Anabaena variabilis ATCC 29413; identical to SEQ ID NO: 15791

SEQ ID NO: 113858 - DNA, 1752 bp, Carboxydothermus hydrogenoformans Z-2901; identical to SEQ ID NO: 8561
  CDS (1)..(1752): transl_table=11

SEQ ID NO: 113859 - protein, 583 aa, Carboxydothermus hydrogenoformans Z-2901; identical to SEQ ID NO: 8562

SEQ ID NO: 113860 - DNA, 1749 bp, Moorella thermoacetica ATCC 39073; identical to SEQ ID NO: 8569
  CDS (1)..(1749): transl_table=11

SEQ ID NO: 113861 - protein, 582 aa, Moorella thermoacetica ATCC 39073; identical to SEQ ID NO: 8570

SEQ ID NO: 113862 - DNA, 1734 bp, Desulfitobacterium hafniense Y51; identical to SEQ ID NO: 8579
  CDS (1)..(1734): transl_table=11

SEQ ID NO: 113863 - protein, 577 aa, Desulfitobacterium hafniense Y51; identical to SEQ ID NO: 8580

SEQ ID NO: 113864 - DNA, 1404 bp, Clostridium perfringens ATCC 13124; identical to SEQ ID NO: 15822
  CDS (1)..(1404): transl_table=11

SEQ ID NO: 113865 - protein, 467 aa, Clostridium perfringens ATCC 13124; identical to SEQ ID NO: 15823

SEQ ID NO: 113866 - DNA, 1785 bp, Synechococcus sp. CC9311; identical to SEQ ID NO: 103665
  CDS (1)..(1785): transl_table=11

SEQ ID NO: 113867 - protein, 594 aa, Synechococcus sp. CC9311; identical to SEQ ID NO: 103666

SEQ ID NO: 113868 - DNA, 1431 bp, Nostoc punctiforme PCC 73102; identical to SEQ ID NO: 96434
  CDS (1)..(1431): transl_table=11

SEQ ID NO: 113869 - protein, 476 aa, Nostoc punctiforme PCC 73102; identical to SEQ ID NO: 96435

SEQ ID NO: 113870 - DNA, 1776 bp, Crocosphaera watsonii WH 8501; identical to SEQ ID NO: 8631
  CDS (1)..(1776): transl_table=11

SEQ ID NO: 113871 - protein, 591 aa, Crocosphaera watsonii WH 8501; identical to SEQ ID NO: 8632

SEQ ID NO: 113872 - DNA, 1743 bp, Prochlorococcus marinus str. MIT 9211; identical to SEQ ID NO: 102597
  CDS (1)..(1743): transl_table=11

SEQ ID NO: 113873 - protein, 580 aa, Prochlorococcus marinus str. MIT 9211; identical to SEQ ID NO: 102598

SEQ ID NO: 113874 - DNA, 1413 bp, Photobacterium sp. SKA34; identical to SEQ ID NO: 15858
  CDS (1)..(1413): transl_table=11

SEQ ID NO: 113875 - protein, 470 aa, Photobacterium sp. SKA34; identical to SEQ ID NO: 15859

SEQ ID NO: 113876 - DNA, 1455 bp, Pseudomonas putida GB-1; identical to SEQ ID NO: 8669
  CDS (1)..(1455): transl_table=11

SEQ ID NO: 113877 - protein, 484 aa, Pseudomonas putida GB-1; identical to SEQ ID NO: 8670

SEQ ID NO: 113878 - DNA, 1761 bp, Bacillus sp. SG-1; identical to SEQ ID NO: 15880
  CDS (1)..(1761): transl_table=11

SEQ ID NO: 113879 - protein, 586 aa, Bacillus sp. SG-1; identical to SEQ ID NO: 15881

SEQ ID NO: 113880 - DNA, 1503 bp, Vitis vinifera; identical to SEQ ID NO: 15892
  CDS (1)..(1503)

SEQ ID NO: 113881 - protein, 500 aa, Vitis vinifera; identical to SEQ ID NO: 15893

SEQ ID NO: 113882 - DNA, 1755 bp, Bacillus subtilis; identical to SEQ ID NO: 8681
  CDS (1)..(1755): transl_table=11

SEQ ID NO: 113883 - protein, 584 aa, Bacillus subtilis; identical to SEQ ID NO: 8682

SEQ ID NO: 113884 - DNA, 2100 bp, Ostreococcus tauri; identical to SEQ ID NO: 8685
  CDS (1)..(2100)

SEQ ID NO: 113885 - protein, 699 aa, Ostreococcus tauri; identical to SEQ ID NO: 8686

SEQ ID NO: 113886 - DNA, 1692 bp, Crassostrea gigas; identical to SEQ ID NO: 15908
  CDS (1)..(1692)

SEQ ID NO: 113887 - protein, 563 aa, Crassostrea gigas; identical to SEQ ID NO: 15909

SEQ ID NO: 113888 - DNA, 1536 bp, Capsicum annuum; identical to SEQ ID NO: 8691
  CDS (1)..(1536)

SEQ ID NO: 113889 - protein, 511 aa, Capsicum annuum; identical to SEQ ID NO: 8692

SEQ ID NO: 113890 - DNA, 1590 bp, Medicago truncatula; identical to SEQ ID NO: 15916
  CDS (1)..(1590)

SEQ ID NO: 113891 - protein, 529 aa, Medicago truncatula; identical to SEQ ID NO: 15917

SEQ ID NO: 113892 - DNA, 1620 bp, Phaeodactylum tricornutum; identical to SEQ ID NO: 8699
  CDS (1)..(1620)

SEQ ID NO: 113893 - protein, 539 aa, Phaeodactylum tricornutum; identical to SEQ ID NO: 8700

SEQ ID NO: 113894 - DNA, 1632 bp, Phaeodactylum tricornutum; identical to SEQ ID NO: 8701
  CDS (1)..(1632)

SEQ ID NO: 113895 - protein, 543 aa, Phaeodactylum tricornutum; identical to SEQ ID NO: 8702

SEQ ID NO: 113896 - DNA, 1542 bp, Phaeodactylum tricornutum; identical to SEQ ID NO: 8703
  CDS (1)..(1542)

SEQ ID NO: 113897 - protein, 513 aa, Phaeodactylum tricornutum; identical to SEQ ID NO: 8704

SEQ ID NO: 113898 - DNA, 1533 bp, Solanum tuberosum; identical to SEQ ID NO: 8707
  CDS (1)..(1533)

SEQ ID NO: 113899 - protein, 510 aa, Solanum tuberosum; identical to SEQ ID NO: 8708

SEQ ID NO: 113900 - DNA, 1533 bp, Citrus sinensis; identical to SEQ ID NO: 8709
  CDS (1)..(1533)

SEQ ID NO: 113901 - protein, 510 aa, Citrus sinensis; identical to SEQ ID NO: 8710

SEQ ID NO: 113902 - DNA, 1740 bp, Arabidopsis thaliana; identical to SEQ ID NO: 8711
  CDS (1)..(1740)

SEQ ID NO: 113903 - protein, 579 aa, Arabidopsis thaliana; identical to SEQ ID NO: 8712

SEQ ID NO: 113904 - DNA, 1509 bp, Glycine max; identical to SEQ ID NO: 8713
  CDS (1)..(1509)

SEQ ID NO: 113905 - protein, 502 aa, Glycine max; identical to SEQ ID NO: 8714

SEQ ID NO: 113906 - DNA, 1530 bp, Zea mays; identical to SEQ ID NO: 8715
  CDS (1)..(1530)

SEQ ID NO: 113907 - protein, 509 aa, Zea mays; identical to SEQ ID NO: 8716

SEQ ID NO: 113908 - DNA, 1521 bp, Saccharomyces bayanus; identical to SEQ ID NO: 8719
  CDS (1)..(1521)

SEQ ID NO: 113909 - protein, 506 aa, Saccharomyces bayanus; identical to SEQ ID NO: 8720

SEQ ID NO: 113910 - DNA, 1533 bp, Glycine max; identical to SEQ ID NO: 8723
  CDS (1)..(1533)

SEQ ID NO: 113911 - protein, 510 aa, Glycine max; identical to SEQ ID NO: 8724

SEQ ID NO: 113912 - DNA, 1536 bp, Glycine max; identical to SEQ ID NO: 8725
  CDS (1)..(1536)

SEQ ID NO: 113913 - protein, 511 aa, Glycine max; identical to SEQ ID NO: 8726

SEQ ID NO: 113914 - DNA, 1740 bp, Arabidopsis thaliana; identical to SEQ ID NO: 8731
  CDS (1)..(1740)

SEQ ID NO: 113915 - protein, 579 aa, Arabidopsis thaliana; identical to SEQ ID NO: 8732

SEQ ID NO: 113916 - DNA, 1581 bp, Aspergillus oryzae; identical to SEQ ID NO: 8733
  CDS (1)..(1581)

SEQ ID NO: 113917 - protein, 526 aa, Aspergillus oryzae; identical to SEQ ID NO: 8734

SEQ ID NO: 113918 - DNA, 1545 bp, Arabidopsis thaliana; identical to SEQ ID NO: 8739
  CDS (1)..(1545)

SEQ ID NO: 113919 - protein, 514 aa, Arabidopsis thaliana; identical to SEQ ID NO: 8740

SEQ ID NO: 113920 - DNA, 1533 bp, Lilium longiflorum; identical to SEQ ID NO: 8743
  CDS (1)..(1533)

SEQ ID NO: 113921 - protein, 510 aa, Lilium longiflorum; identical to SEQ ID NO: 8744

SEQ ID NO: 113922 - DNA, 1494 bp, Arabidopsis thaliana; identical to SEQ ID NO: 8751
  CDS (1)..(1494)

SEQ ID NO: 113923 - protein, 497 aa, Arabidopsis thaliana; identical to SEQ ID NO: 8752

SEQ ID NO: 113924 - DNA, 1533 bp, Solanum tuberosum; identical to SEQ ID NO: 8753
  CDS (1)..(1533)

SEQ ID NO: 113925 - protein, 510 aa, Solanum tuberosum; identical to SEQ ID NO: 8754

SEQ ID NO: 113926 - DNA, 1536 bp, Glycine max; identical to SEQ ID NO: 8755
  CDS (1)..(1536)

SEQ ID NO: 113927 - protein, 511 aa, Glycine max; identical to SEQ ID NO: 8756

SEQ ID NO: 113928 - DNA, 1527 bp, Nicotiana tabacum; identical to SEQ ID NO: 15976
  CDS (1)..(1527)

SEQ ID NO: 113929 - protein, 508 aa, Nicotiana tabacum; identical to SEQ ID NO: 8758

SEQ ID NO: 113930 - DNA, 1506 bp, Candida glabrata; identical to SEQ ID NO: 8763
  CDS (1)..(1506)

SEQ ID NO: 113931 - protein, 501 aa, Candida glabrata; identical to SEQ ID NO: 8764

SEQ ID NO: 113932 - DNA, 1413 bp, Escherichia coli O157; identical to SEQ ID NO: 8765
  CDS (1)..(1413): transl_table=11

SEQ ID NO: 113933 - protein, 470 aa, Escherichia coli O157; identical to SEQ ID NO: 8766

SEQ ID NO: 113934 - DNA, 1413 bp, Salmonella typhi; identical to SEQ ID NO: 15984
  CDS (1)..(1413): transl_table=11

SEQ ID NO: 113935 - protein, 470 aa, Salmonella typhi; identical to SEQ ID NO: 15985

SEQ ID NO: 113936 - DNA, 1413 bp, Salmonella typhimurium; identical to SEQ ID NO: 8767
  CDS (1)..(1413): transl_table=11

SEQ ID NO: 113937 - protein, 470 aa, Salmonella typhimurium; identical to SEQ ID NO: 8768

SEQ ID NO: 113938 - DNA, 1503 bp, Saccharomyces cerevisiae; identical to SEQ ID NO: 8769
  CDS (1)..(1503)

SEQ ID NO: 113939 - protein, 500 aa, Saccharomyces cerevisiae; identical to SEQ ID NO: 8770

SEQ ID NO: 113940 - DNA, 1527 bp, Candida glabrata; identical to SEQ ID NO: 8771
  CDS (1)..(1527)

SEQ ID NO: 113941 - protein, 508 aa, Candida glabrata; identical to SEQ ID NO: 8772

SEQ ID NO: 113942 - DNA, 1443 bp, Escherichia coli; identical to SEQ ID NO: 8363
  CDS (1)..(1443): transl_table=11

SEQ ID NO: 113943 - protein, 480 aa, Escherichia coli; identical to SEQ ID NO: 8364

SEQ ID NO: 113944 - DNA, 1443 bp, Salmonella typhimurium; identical to SEQ ID NO: 8773
  CDS (1)..(1443): transl_table=11

SEQ ID NO: 113945 - protein, 480 aa, Salmonella typhimurium; identical to SEQ ID NO: 8774

SEQ ID NO: 113946 - DNA, 1521 bp, Saccharomyces cerevisiae; identical to SEQ ID NO: 8775
  CDS (1)..(1521)

SEQ ID NO: 113947 - protein, 506 aa, Saccharomyces cerevisiae; identical to SEQ ID NO: 8776

SEQ ID NO: 113948 - DNA, 1599 bp, Agaricus bisporus; identical to SEQ ID NO: 16002
  CDS (1)..(1599)

SEQ ID NO: 113949 - protein, 532 aa, Agaricus bisporus; identical to SEQ ID NO: 16003

SEQ ID NO: 113950 - DNA, 1506 bp, Ashbya gossypii; identical to SEQ ID NO: 8777
  CDS (1)..(1506)

SEQ ID NO: 113951 - protein, 501 aa, Ashbya gossypii; identical to SEQ ID NO: 8778

SEQ ID NO: 113952 - DNA, 1581 bp, Aspergillus niger; identical to SEQ ID NO: 8779
  CDS (1)..(1581)

SEQ ID NO: 113953 - protein, 526 aa, Aspergillus niger; identical to SEQ ID NO: 8780

SEQ ID NO: 113954 - DNA, 1758 bp, Bacillus licheniformis; identical to SEQ ID NO: 8781
  CDS (1)..(1758): transl_table=11

SEQ ID NO: 113955 - protein, 585 aa, Bacillus licheniformis; identical to SEQ ID NO: 8782

SEQ ID NO: 113956 - DNA, 1764 bp, Bacillus stearothermophilus; identical to SEQ ID NO: 8785
  CDS (1)..(1764): transl_table=11

SEQ ID NO: 113957 - protein, 587 aa, Bacillus stearothermophilus; identical to SEQ ID NO: 8786

SEQ ID NO: 113958 - DNA, 1758 bp, Bacillus subtilis; identical to SEQ ID NO: 8787
  CDS (1)..(1758): transl_table=11

SEQ ID NO: 113959 - protein, 585 aa, Bacillus subtilis; identical to SEQ ID NO: 8788

SEQ ID NO: 113960 - DNA, 1422 bp, Clostridium acetobutylicum; identical to SEQ ID NO: 8791
  CDS (1)..(1422): transl_table=11

SEQ ID NO: 113961 - protein, 473 aa, Clostridium acetobutylicum; identical to SEQ ID NO: 8792

SEQ ID NO: 113962 - DNA, 1515 bp, Debaryomyces hansenii; identical to SEQ ID NO: 8793
  CDS (1)..(1515)

SEQ ID NO: 113963 - protein, 504 aa, Debaryomyces hansenii; identical to SEQ ID NO: 8794

SEQ ID NO: 113964 - DNA, 1602 bp, Drosophila melanogaster; identical to SEQ ID NO: 16024
  CDS (1)..(1602)

SEQ ID NO: 113965 - protein, 533 aa, Drosophila melanogaster; identical to SEQ ID NO: 16025

SEQ ID NO: 113966 - DNA, 1581 bp, Emericella nidulans; identical to SEQ ID NO: 8795
  CDS (1)..(1581)

SEQ ID NO: 113967 - protein, 526 aa, Emericella nidulans; identical to SEQ ID NO: 8796

SEQ ID NO: 113968 - DNA, 1506 bp, Kluyveromyces lactis; identical to SEQ ID NO: 8797
  CDS (1)..(1506)

SEQ ID NO: 113969 - protein, 501 aa, Kluyveromyces lactis; identical to SEQ ID NO: 8798

SEQ ID NO: 113970 - DNA, 1584 bp, Neurospora crassa; identical to SEQ ID NO: 8799
  CDS (1)..(1584)

SEQ ID NO: 113971 - protein, 527 aa, Neurospora crassa; identical to SEQ ID NO: 8800

SEQ ID NO: 113972 - DNA, 1506 bp, Saccharomyces castellii; identical to SEQ ID NO: 8801
  CDS (1)..(1506)

SEQ ID NO: 113973 - protein, 501 aa, Saccharomyces castellii; identical to SEQ ID NO: 8802

SEQ ID NO: 113974 - DNA, 1506 bp, Saccharomyces kluyveri; identical to SEQ ID NO: 8803
  CDS (1)..(1506)

SEQ ID NO: 113975 - protein, 501 aa, Saccharomyces kluyveri; identical to SEQ ID NO: 8804

SEQ ID NO: 113976 - DNA, 1530 bp, Schizosaccharomyces pombe; identical to SEQ ID NO: 8805
  CDS (1)..(1530)

SEQ ID NO: 113977 - protein, 509 aa, Schizosaccharomyces pombe; identical to SEQ ID NO: 8806

SEQ ID NO: 113978 - DNA, 1617 bp, Trichoderma reesei; identical to SEQ ID NO: 8807
  CDS (1)..(1617)

SEQ ID NO: 113979 - protein, 538 aa, Trichoderma reesei; identical to SEQ ID NO: 8808

SEQ ID NO: 113980 - DNA, 1533 bp, Oryza sativa; identical to SEQ ID NO: 8809
  CDS (1)..(1533)

SEQ ID NO: 113981 - protein, 510 aa, Oryza sativa; identical to SEQ ID NO: 8810

SEQ ID NO: 113982 - DNA, 1536 bp, Oryza sativa; identical to SEQ ID NO: 8381
  CDS (1)..(1536)

SEQ ID NO: 113983 - protein, 511 aa, Oryza sativa; identical to SEQ ID NO: 8382

SEQ ID NO: 113984 - DNA, 1584 bp, Oryza sativa; identical to SEQ ID NO: 8385
  CDS (1)..(1584)

SEQ ID NO: 113985 - protein, 527 aa, Oryza sativa; identical to SEQ ID NO: 8386

SEQ ID NO: 113986 - DNA, 1584 bp, Oryza sativa; identical to SEQ ID NO: 8813
  CDS (1)..(1584)

SEQ ID NO: 113987 - protein, 527 aa, Oryza sativa; identical to SEQ ID NO: 8814

SEQ ID NO: 113988 - DNA, 1584 bp, Oryza sativa; identical to SEQ ID NO: 8387
  CDS (1)..(1584)

SEQ ID NO: 113989 - protein, 527 aa, Oryza sativa; identical to SEQ ID NO: 8388

SEQ ID NO: 113990 - DNA, 1584 bp, Oryza sativa; identical to SEQ ID NO: 16068
  CDS (1)..(1584)

SEQ ID NO: 113991 - protein, 527 aa, Oryza sativa; identical to SEQ ID NO: 16069

SEQ ID NO: 113992 - DNA, 1716 bp, Brassica napus; identical to SEQ ID NO: 8817
  CDS (1)..(1716)

SEQ ID NO: 113993 - protein, 571 aa, Brassica napus; identical to SEQ ID NO: 8818

SEQ ID NO: 113994 - DNA, 1584 bp, Brassica napus; identical to SEQ ID NO: 8823
  CDS (1)..(1584)

SEQ ID NO: 113995 - protein, 527 aa, Brassica napus; identical to SEQ ID NO: 8824

SEQ ID NO: 113996 - DNA, 1584 bp, Brassica napus; identical to SEQ ID NO: 8835
  CDS (1)..(1584)

SEQ ID NO: 113997 - protein, 527 aa, Brassica napus; identical to SEQ ID NO: 8836

SEQ ID NO: 113998 - DNA, 1743 bp, Brassica napus; identical to SEQ ID NO: 8837
  CDS (1)..(1743)

SEQ ID NO: 113999 - protein, 580 aa, Brassica napus; identical to SEQ ID NO: 8838

SEQ ID NO: 114000 - DNA, 1743 bp, Brassica napus; identical to SEQ ID NO: 8839
  CDS (1)..(1743)

SEQ ID NO: 114001 - protein, 580 aa, Brassica napus; identical to SEQ ID NO: 8840

SEQ ID NO: 114002 - DNA, 1764 bp, Brassica napus; identical to SEQ ID NO: 8841
  CDS (1)..(1764)

SEQ ID NO: 114003 - protein, 587 aa, Brassica napus; identical to SEQ ID NO: 8842

SEQ ID NO: 114004 - DNA, 1533 bp, Brassica napus; identical to SEQ ID NO: 8843
  CDS (1)..(1533)

SEQ ID NO: 114005 - protein, 510 aa, Brassica napus; identical to SEQ ID NO: 8844

SEQ ID NO: 114006 - DNA, 1497 bp, Brassica napus; identical to SEQ ID NO: 8845
  CDS (1)..(1497)

SEQ ID NO: 114007 - protein, 498 aa, Brassica napus; identical to SEQ ID NO: 8846

SEQ ID NO: 114008 - DNA, 1584 bp, Brassica napus; identical to SEQ ID NO: 8847
  CDS (1)..(1584)

SEQ ID NO: 114009 - protein, 527 aa, Brassica napus; identical to SEQ ID NO: 8848

SEQ ID NO: 114010 - DNA, 1533 bp, Brassica napus; identical to SEQ ID NO: 8849
  CDS (1)..(1533)

SEQ ID NO: 114011 - protein, 510 aa, Brassica napus; identical to SEQ ID NO: 8850

SEQ ID NO: 114012 - DNA, 1584 bp, Brassica napus; identical to SEQ ID NO: 21831
  CDS (1)..(1584)

SEQ ID NO: 114013 - protein, 527 aa, Brassica napus; identical to SEQ ID NO: 8822

SEQ ID NO: 114014 - DNA, 1584 bp, Brassica napus; identical to SEQ ID NO: 8851
  CDS (1)..(1584)

SEQ ID NO: 114015 - protein, 527 aa, Brassica napus; identical to SEQ ID NO: 8852

SEQ ID NO: 114016 - DNA, 1497 bp, Brassica napus; identical to SEQ ID NO: 8855
  CDS (1)..(1497)

SEQ ID NO: 114017 - protein, 498 aa, Brassica napus; identical to SEQ ID NO: 8856

SEQ ID NO: 114018 - DNA, 1584 bp, Zea mays; identical to SEQ ID NO: 8857
  CDS (1)..(1584)

SEQ ID NO: 114019 - protein, 527 aa, Zea mays; identical to SEQ ID NO: 8858

SEQ ID NO: 114020 - DNA, 1728 bp, Glycine max; identical to SEQ ID NO: 8859
  CDS (1)..(1728)

SEQ ID NO: 114021 - protein, 575 aa, Glycine max; identical to SEQ ID NO: 8860

SEQ ID NO: 114022 - DNA, 1584 bp, Glycine max; identical to SEQ ID NO: 8861
  CDS (1)..(1584)

SEQ ID NO: 114023 - protein, 527 aa, Glycine max; identical to SEQ ID NO: 8862

SEQ ID NO: 114024 - DNA, 1584 bp, Glycine max; identical to SEQ ID NO: 8863
  CDS (1)..(1584)

SEQ ID NO: 114025 - protein, 527 aa, Glycine max; identical to SEQ ID NO: 8864

SEQ ID NO: 114026 - DNA, 1638 bp, Glycine max; identical to SEQ ID NO: 8865
  CDS (1)..(1638)

SEQ ID NO: 114027 - protein, 545 aa, Glycine max; identical to SEQ ID NO: 8866

SEQ ID NO: 114028 - DNA, 1638 bp, Glycine max; identical to SEQ ID NO: 8867
  CDS (1)..(1638)

SEQ ID NO: 114029 - protein, 545 aa, Glycine max; identical to SEQ ID NO: 8868

SEQ ID NO: 114030 - DNA, 1728 bp, Glycine max; identical to SEQ ID NO: 8869
  CDS (1)..(1728)

SEQ ID NO: 114031 - protein, 575 aa, Glycine max; identical to SEQ ID NO: 8870

SEQ ID NO: 114032 - DNA, 1749 bp, Glycine max; identical to SEQ ID NO: 8871
  CDS (1)..(1749)

SEQ ID NO: 114033 - protein, 582 aa, Glycine max; identical to SEQ ID NO: 8872

SEQ ID NO: 114034 - DNA, 1584 bp, Glycine max; identical to SEQ ID NO: 8873
  CDS (1)..(1584)

SEQ ID NO: 114035 - protein, 527 aa, Glycine max; identical to SEQ ID NO: 8874

SEQ ID NO: 114036 - DNA, 1749 bp, Glycine max; identical to SEQ ID NO: 8875
  CDS (1)..(1749)

SEQ ID NO: 114037 - protein, 582 aa, Glycine max; identical to SEQ ID NO: 8876

SEQ ID NO: 114038 - DNA, 1728 bp, Glycine max; identical to SEQ ID NO: 8877
  CDS (1)..(1728)

SEQ ID NO: 114039 - protein, 575 aa, Glycine max; identical to SEQ ID NO: 8878

SEQ ID NO: 114040 - DNA, 1749 bp, Glycine max; identical to SEQ ID NO: 8881
  CDS (1)..(1749)

SEQ ID NO: 114041 - protein, 582 aa, Glycine max; identical to SEQ ID NO: 8882

SEQ ID NO: 114042 - DNA, 1542 bp, Hordeum vulgare; identical to SEQ ID NO: 8883
  CDS (1)..(1542)

SEQ ID NO: 114043 - protein, 513 aa, Hordeum vulgare; identical to SEQ ID NO: 8884

SEQ ID NO: 114044 - DNA, 1713 bp, Oryza sativa
  CDS (1)..(1713)
atggcggcggcggcggctgagatcgtggggtccgcggcggcgcgcatggcggcgccggcagtgaggccggctccgcccgcggcggcggcggcggcggcgcccccgcagccgaggagggccgtggcggcgcgctccctcaggacctccacctccgacagggtggcggcggatctcgcgctcgggagcaacggctccctctccgctcagaacattgctgagaataccgctgacgctacttcgcaagtggtctctgcgaattcccgtaggaagacaaagattgtttgcaccataggcccctcaaccaacacacgcgagatgatatggaaacttgctgagactggaatgaacgtcgcacgcatgaatatgtcccatggtgaccaccagtcgcaccagaaggtgattgatttggtgaaggagtacaatgcgaagaatactgatggcaatgtcattgctattatgctggataccaagggtccagaagtgagaagtggggatgttccagaaccaatcatgctcgaggaaggtcaagagttcaattttactattaaaagaggggtgagcaccaaagacaccgtcagtgtgaattacgatgacttcataaacgatgttgaagttggggacatactgttggtggatggaggaatgatgtcactcgctgtcaagtctaaaacagctgatacggttaagtgtgaagtagttgatggtggggaactgaaatcaaggcgccacctaaatgtccgtggaaagagtgcgactttgccatctattacagagaaagattgggaggacataaagtttggtgttgaaaatggtgttgatttctatgccgtttcctttgtgaaggatgcaaaagttattcatgaactgaaggactaccttaaaagtgctaatgcagatatacatgtcattccaaagattgaaagtgcagattcaataccaaacctccagtccattattgctgcttcagatggggcgatggtggcaagaggggatcttggtgctgaacttccaattgaggaagttcctttgctgcaggaggagattgtcagaacatgccgaagcatgcagaaaccagttattgttgccacgaatatgttagagagcatgatagaccatcccactccaacaagagcagaagtttctgatatagcaattgcagttcgtgaaggttctgatgccatcatgctgtctggtgaaactgcccatggaaagttcccactgaaggcagtcaaggtgatgcacacagtggcacagagaacagaatccagcctgtataacccaactacatctcctagtcttgttgcacatcctcaggctctgctcaacgaggaattttcgcaaagccaactaagcaaaatgtttggatctcatgctacaatgatggccaacaccctttgcaccccaattattgtgtttacacgaaccggctccatggcagtccttctcagccactaccggccctcgtctacaatttttgcatttacaaatgaggaacgagtgaagcaacgtctggcactctaccagggtgtggttcccatttacatgaagttttctgatgatgcagaggaaactttctctagagcaattagtagcttgctgaacgcccaattcgtgaaagaaggggactacgtgacccttgttcagagtggagtgaagtcgatctggagagaggagtctactcaccacattcaagtgaggaaagtccagggctaa

SEQ ID NO: 114045 - protein, 570 aa, Oryza sativa; identical to SEQ ID NO: 8384

SEQ ID NO: 114046 - DNA, 1584 bp, Oryza sativa; identical to SEQ ID NO: 8885
  CDS (1)..(1584)

SEQ ID NO: 114047 - protein, 527 aa, Oryza sativa; identical to SEQ ID NO: 8886

SEQ ID NO: 114048 - DNA, 1803 bp, Zea mays; identical to SEQ ID NO: 8887
  CDS (1)..(1803)

SEQ ID NO: 114049 - protein, 600 aa, Zea mays; identical to SEQ ID NO: 8888

SEQ ID NO: 114050 - DNA, 1698 bp, Triticum aestivum; identical to SEQ ID NO: 8889
  CDS (1)..(1698)

SEQ ID NO: 114051 - protein, 565 aa, Triticum aestivum; identical to SEQ ID NO: 8890

SEQ ID NO: 114052 - DNA, 1584 bp, Zea mays; identical to SEQ ID NO: 8891
  CDS (1)..(1584)

SEQ ID NO: 114053 - protein, 527 aa, Zea mays; identical to SEQ ID NO: 8892

SEQ ID NO: 114054 - DNA, 1728 bp, Zea mays; identical to SEQ ID NO: 8895
  CDS (1)..(1728)

SEQ ID NO: 114055 - protein, 575 aa, Zea mays; identical to SEQ ID NO: 8896

SEQ ID NO: 114056 - DNA, 1707 bp, Zea mays; identical to SEQ ID NO: 8897
  CDS (1)..(1707)

SEQ ID NO: 114057 - protein, 568 aa, Zea mays; identical to SEQ ID NO: 8898

SEQ ID NO: 114058 - DNA, 1629 bp, Zea mays; identical to SEQ ID NO: 8899
  CDS (1)..(1629)

SEQ ID NO: 114059 - protein, 542 aa, Zea mays; identical to SEQ ID NO: 8900

SEQ ID NO: 114060 - DNA, 1548 bp, Zea mays; identical to SEQ ID NO: 8901
  CDS (1)..(1548)

SEQ ID NO: 114061 - protein, 515 aa, Zea mays; identical to SEQ ID NO: 8902

SEQ ID NO: 114062 - DNA, 1542 bp, Zea mays; identical to SEQ ID NO: 8905
  CDS (1)..(1542)

SEQ ID NO: 114063 - protein, 513 aa, Zea mays; identical to SEQ ID NO: 8906

SEQ ID NO: 114064 - DNA, 1530 bp, Zea mays; identical to SEQ ID NO: 8903
  CDS (1)..(1530)

SEQ ID NO: 114065 - protein, 509 aa, Zea mays; identical to SEQ ID NO: 8904

SEQ ID NO: 114066 - DNA, 1707 bp, Zea mays; identical to SEQ ID NO: 8831
  CDS (1)..(1707)

SEQ ID NO: 114067 - protein, 568 aa, Zea mays; identical to SEQ ID NO: 8832

SEQ ID NO: 114068 - DNA, 1584 bp, Zea mays; identical to SEQ ID NO: 8907
  CDS (1)..(1584)

SEQ ID NO: 114069 - protein, 527 aa, Zea mays; identical to SEQ ID NO: 8908

SEQ ID NO: 114070 - DNA, 1554 bp, Zea mays; identical to SEQ ID NO: 8909
  CDS (1)..(1554)

SEQ ID NO: 114071 - protein, 517 aa, Zea mays; identical to SEQ ID NO: 8910

SEQ ID NO: 114072 - DNA, 1707 bp, Zea mays; identical to SEQ ID NO: 8911
  CDS (1)..(1707)

SEQ ID NO: 114073 - protein, 568 aa, Zea mays; identical to SEQ ID NO: 8912

SEQ ID NO: 114074 - DNA, 1728 bp, Zea mays; identical to SEQ ID NO: 8913
  CDS (1)..(1728)

SEQ ID NO: 114075 - protein, 575 aa, Zea mays; identical to SEQ ID NO: 8914

SEQ ID NO: 114076 - DNA, 22 bp, Artificial sequence
  primer
atgcattcaagtcatctccttc

SEQ ID NO: 114077 - DNA, 25 bp, Artificial sequence
  primer
ctaatcctctagctcgatgattttg

SEQ ID NO: 114078 - protein, 504 aa, Artificial sequence
  consensus sequence
  Variant (2)..(2): Xaa in position 2 is any amino acid
  Variant (4)..(5): Xaa in position 4 to 5 is any amino acid
  Variant (7)..(7): Xaa in position 7 is any amino acid
  Variant (10)..(21): Xaa in position 10 to 21 is any amino acid
  Variant (22)..(23): Xaa in position 22 to 23 is any or no amino acid
  Variant (26)..(28): Xaa in position 26 to 28 is any amino acid
  Variant (30)..(30): Xaa in position 30 is any amino acid
  Variant (36)..(39): Xaa in position 36 to 39 is any amino acid
  Variant (41)..(57): Xaa in position 41 to 57 is any amino acid
  Variant (58)..(64): Xaa in position 58 to 64 is any or no amino acid
  Variant (66)..(67): Xaa in position 66 to 67 is any amino acid
  Variant (71)..(71): Xaa in position 71 is any amino acid
  Variant (75)..(88): Xaa in position 75 to 88 is any amino acid
  Variant (89)..(92): Xaa in position 89 to 92 is any or no amino acid
  Variant (94)..(113): Xaa in position 94 to 113 is any amino acid
  Variant (114)..(116): Xaa in position 114 to 116 is any or no amino acid
  Variant (118)..(126): Xaa in position 118 to 126 is any amino acid
  Variant (128)..(169): Xaa in position 128 to 169 is any amino acid
  Variant (170)..(182): Xaa in position 170 to 182 is any or no amino acid
  Variant (185)..(188): Xaa in position 185 to 188 is any amino acid
  Variant (191)..(192): Xaa in position 191 to 192 is any amino acid
  Variant (194)..(196): Xaa in position 194 to 196 is any amino acid
  Variant (197)..(197): Xaa in position 197 is any or no amino acid
  Variant (199)..(203): Xaa in position 199 to 203 is any amino acid
  Variant (205)..(208): Xaa in position 205 to 208 is any amino acid
  Variant (211)..(211): Xaa in position 211 is any amino acid
  Variant (213)..(215): Xaa in position 213 to 215 is any amino acid
  Variant (217)..(220): Xaa in position 217 to 220 is any amino acid
  Variant (222)..(223): Xaa in position 222 to 223 is any amino acid
  Variant (225)..(233): Xaa in position 225 to 233 is any amino acid
  Variant (234)..(237): Xaa in position 234 to 237 is any or no amino acid
  Variant (239)..(239): Xaa in position 239 is any amino acid
  Variant (241)..(250): Xaa in position 241 to 250 is any amino acid
  Variant (251)..(253): Xaa in position 251 to 253 is any or no amino acid
  Variant (255)..(258): Xaa in position 255 to 258 is any amino acid
  Variant (260)..(261): Xaa in position 260 to 261 is any amino acid
  Variant (263)..(263): Xaa in position 263 is any amino acid
  Variant (270)..(270): Xaa in position 270 is any amino acid
  Variant (272)..(272): Xaa in position 272 is any amino acid
  Variant (274)..(274): Xaa in position 274 is any amino acid
  Variant (276)..(280): Xaa in position 276 to 280 is any amino acid
  Variant (283)..(284): Xaa in position 283 to 284 is any amino acid
  Variant (286)..(287): Xaa in position 286 to 287 is any amino acid
  Variant (289)..(291): Xaa in position 289 to 291 is any amino acid
  Variant (296)..(296): Xaa in position 296 is any amino acid
  Variant (297)..(297): Xaa in position 297 is any or no amino acid
  Variant (300)..(301): Xaa in position 300 to 301 is any amino acid
  Variant (303)..(303): Xaa in position 303 is any amino acid
  Variant (306)..(308): Xaa in position 306 to 308 is any amino acid
  Variant (316)..(317): Xaa in position 316 to 317 is any amino acid
  Variant (323)..(324): Xaa in position 323 to 324 is any amino acid
  Variant (327)..(327): Xaa in position 327 is any amino acid
  Variant (329)..(330): Xaa in position 329 to 330 is any amino acid
  Variant (334)..(334): Xaa in position 334 is any amino acid
  Variant (336)..(336): Xaa in position 336 is any amino acid
  Variant (338)..(338): Xaa in position 338 is any amino acid
  Variant (340)..(340): Xaa in position 340 is any amino acid
  Variant (343)..(346): Xaa in position 343 to 346 is any amino acid
  Variant (347)..(356): Xaa in position 347 to 356 is any or no amino acid
  Variant (358)..(391): Xaa in position 358 to 391 is any amino acid
  Variant (392)..(404): Xaa in position 392 to 404 is any or no amino acid
  Variant (406)..(408): Xaa in position 406 to 408 is any amino acid
  Variant (410)..(411): Xaa in position 410 to 411 is any amino acid
  Variant (413)..(414): Xaa in position 413 to 414 is any amino acid
  Variant (416)..(420): Xaa in position 416 to 420 is any amino acid
  Variant (424)..(425): Xaa in position 424 to 425 is any amino acid
  Variant (428)..(444): Xaa in position 428 to 444 is any amino acid
  Variant (445)..(460): Xaa in position 445 to 460 is any or no amino acid
  Variant (462)..(463): Xaa in position 462 to 463 is any amino acid
  Variant (465)..(482): Xaa in position 465 to 482 is any amino acid
  Variant (483)..(497): Xaa in position 483 to 497 is any or no amino acid
  Variant (499)..(503): Xaa in position 499 to 503 is any amino acid
TXIXXTXGPXXXXXXXXXXXXXXGMXXXRXNFSHGXXXXHXXXXXXXXXXXXXXXXXXXXXXXXAXXLDTXGPEXXXXXXXXXXXXXXXXXXGXXXXXXXXXXXXXXXXXXXXXXXYXXXXXXXXXGXXXXXXXXXXXXXXXXXXXXXXXXXXXXXXXXXXXXXXXXXXXXXXXXXXXXXXXLPXXXXKDXXDXXXXGXXXXXDXXXXSFXRXXXDXXXXRXXLXXXXXXXXXXXXXKXEXXXXXXXXXXXXXIXXXXDXXMXARGDLGXEXPXEXXXXXQKXXIXXCXXXGKPVXXATXXLXSMXXXPRPTRAEXXDVANAXXDGXDXXMLSXEXAXGXYPXXXXXXXXXXXXXXEXXXXXXXXXXXXXXXXXXXXXXXXXXXXXXXXXXXXXXXXXXXXXXXIXXXTXXGXXAXXXXXYRPXXPIXXXXXXXXXXXXXXXXXXXXXXXXXXXXXXXXXGXXPXXXXXXXXXXXXXXXXXXXXXXXXXXXXXXXXXGXXXXXD

SEQ ID NO: 114079 - protein, 47 aa, Artificial sequence
  protein pattern
  Variant (2)..(11): Xaa in position 2 to 11 is any amino acid
  Variant (18)..(18): Xaa in position 18 is any amino acid
  Variant (19)..(19): Xaa in position 19 is Gly, Asn, Ser or Thr
  Variant (21)..(21): Xaa in position 21 is Ile or Val
  Variant (22)..(22): Xaa in position 22 is Ala, Gly or Thr
  Variant (25)..(25): Xaa in position 25 is Ile or Val
  Variant (26)..(26): Xaa in position 26 is any amino acid
  Variant (29)..(29): Xaa in position 29 is Ala, Ser or Thr
  Variant (31)..(31): Xaa in position 31 is any amino acid
  Variant (32)..(32): Xaa in position 32 is Ile or Val
  Variant (33)..(33): Xaa in position 33 is Leu, Met or Val
  Variant (35)..(35): Xaa in position 35 is Ala, Gly or Ser
  Variant (36)..(36): Xaa in position 36 is Ala, Gly or Asn
  Variant (38)..(38): Xaa in position 38 is Ser or Thr
  Variant (39)..(40): Xaa in position 39 to 40 is any amino acid
  Variant (42)..(42): Xaa in position 42 is any amino acid
  Variant (43)..(43): Xaa in position 43 is Phe, His, Trp or Tyr
  Variant (44)..(46): Xaa in position 44 to 46 is any amino acid
  Variant (47)..(47): Xaa in position 47 is Ala, Cys, Ser or Thr
TXXXXXXXXXXRPTRAEXXDXXNAXXDGXDXXXLXXEXXXGXXXXXX

SEQ ID NO: 114080 - protein, 18 aa, Artificial sequence
  protein pattern
  Variant (2)..(3): Xaa in position 2 to 3 is any amino acid
  Variant (4)..(4): Xaa in position 4 is any or no amino acid
  Variant (6)..(6): Xaa in position 6 is any or no amino acid
  Variant (8)..(8): Xaa in position 8 is Phe, Leu or Met
  Variant (9)..(9): Xaa in position 9 is Asp or Asn
  Variant (10)..(10): Xaa in position 10 is Phe or Met
  Variant (12)..(12): Xaa in position 12 is His or Trp
  Variant (13)..(13): Xaa in position 13 is any amino acid
  Variant (14)..(14): Xaa in position 14 is Ala, Asp, Ser or Thr
  Variant (15)..(17): Xaa in position 15 to 17 is any amino acid
GXXXVXRXXXSXXXXXXH

SEQ ID NO: 114081 - protein, 10 aa, Artificial sequence
  protein pattern
  Variant (4)..(4): Xaa in position 4 is any amino acid
  Variant (8)..(8): Xaa in position 8 is Ile, Leu or Val
  Variant (9)..(9): Xaa in position 9 is Gln or Arg
  Variant (10)..(10): Xaa in position 10 is Ser, Thr or Val
LDTXGPEXXX

SEQ ID NO: 114082 - protein, 13 aa, Artificial sequence
  protein pattern
  Variant (2)..(2): Xaa in position 2 is any amino acid
  Variant (3)..(3): Xaa in position 3 is Ile or Leu
  Variant (4)..(4): Xaa in position 4 is Ile or Val
  Variant (5)..(5): Xaa in position 5 is Ala, Cys or Gly
  Variant (7)..(7): Xaa in position 7 is Ile, Leu or Val
  Variant (10)..(10): Xaa in position 10 is any amino acid
  Variant (11)..(11): Xaa in position 11 is Cys, Ser or Thr
  Variant (12)..(12): Xaa in position 12 is any amino acid
  Variant (13)..(13): Xaa in position 13 is Ala, Asp, Asn, Ser or Thr
TXXXXTXGPXXXX

SEQ ID NO: 114083 - DNA, 1110 bp, Azotobacter vinelandii
  CDS (1)..(1110): transl_table=11
atgcgcgaaataggtatcggcctgatcggcaccggcttcatggggcgtgcccacgccctggccttccaccatgccgtcagcaccttcgaactgtccgtgaaaccgcgcctggtcgccctggccgacgccgatgcggcgcgcgccgagcgctgcgccgccgactggggcttcgccaaggcctgcgactgggaaagcctggtgaacgacccggccgtggagctggtcgccatcaccacgcccaaccgcctgcattaccccatgaccatggcggcgctggcggcgggcaaggcggtctattgcgagaagcccctggcggtgacgctcgatgaggccagcgccatgcgcgacgcggcgaagcgcgccggggtggtcaaccgggtgggctacaactacctgcagaaccccatgctcaagctggcccgcgaactgatcgagagcggcgaactgggcgagatcaccggctaccacggcgagttcagcgaggacttcatgggcgatccgcaggcgcccttcagttggcgctgcgagacggagcaggccggcggcgccctggccgacctgggcagccacatcctgtcgctgtcgcgctttctgctcggcgacgtcgccgcgctctgcgccgacctgcacaccgcccatgccgagcgcccgcaccagggcggccggcgccgcgtcgagatcgacgaccaggcccacgtcctgctgcgcttcgccaacggcgcgcacggcaccctggccaccagttggctgcggcacggccgcaagaaccatctggcgttcgaggtctacggtacgcgcggcaccctggcctacgaccaggaacggctcaacgaactgcgcctctacggcaccggcgggcgtcccggtctggacggcttccgcaccctgctgtccggcccgcacctgcccgactacgcggccttctgcccggcggccgggcaccagcttggctacaacgagctgaagacgctggaagtgcgttcgctgctggaggccctggccggcaacggcgcgctgaccggggtggacttccaggaggcctgggaagtcgagcgcctggcccaggcggtccgcgactccgcgcgggaagagcgctgggtgaggatctag

SEQ ID NO: 114084 - protein, 369 aa, Azotobacter vinelandii
MREIGIGLIGTGFMGRAHALAFHHAVSTFELSVKPRLVALADADAARAERCAADWGFAKACDWESLVNDPAVELVAITTPNRLHYPMTMAALAAGKAVYCEKPLAVTLDEASAMRDAAKRAGVVNRVGYNYLQNPMLKLARELIESGELGEITGYHGEFSEDFMGDPQAPFSWRCETEQAGGALADLGSHILSLSRFLLGDVAALCADLHTAHAERPHQGGRRRVEIDDQAHVLLRFANGAHGTLATSWLRHGRKNHLAFEVYGTRGTLAYDQERLNELRLYGTGGRPGLDGFRTLLSGPHLPDYAAFCPAAGHQLGYNELKTLEVRSLLEALAGNGALTGVDFQEAWEVERLAQAVRDSAREERWVRI

SEQ ID NO: 114085 - DNA, 1173 bp, Klebsiella pneumoniae subsp. pneumoniae MGH 78578
  CDS (1)..(1173): transl_table=11
atgagcgcgcggttaaatatcggccttatcggctcaggttttatggggcaggcacacgccgacgcttaccgtcgcgcggcgatgttctatcccgatctgcccaagcgcccgcatctctacgcgctggcggatcaggatcaggcgatggccgaacgccacgcggcgaaactgggggcggaaaaggcctacggcgactggcgcgagctggtaaacgatccgcaggttgatgtggtggatatcacctcgccgaaccatctgcactacacaatggcgatggcggcgatcgcggcgggtaaacatgtctattgcgagaagccgctggcggtcaatgagcagcaggcgcaggagatggcgcaggcggcacggcgcgtgggggtgaagaccatggtggcctttaacaacatcaaaacgccggcggcgttgctggcaaagcagattatcgcccggggcgatattggcgaaccggtgcgctttcgcggcacctttgatcaggggttttataacgacccgaacctgccctggtcctggcgctgctcgaaaaccctcggcggcagcggggcgcttggcgaccttggcgcccataccctgtcggtcgcccagtttttgctgggcgggatccgcgaagtgaccgccagcgcgcaaacctgcctgcgccagcgtccggtgccgcagcgcgatgccgggtatgccagccgggtcgcggccgatgccgagtggcgggaagtagaaaatgacgatcaggttcagtgcctggtcaatttcgacagcggcgccgcgggggtgattgaggcctcgcgcatcgccgccgggcggatcttcggcgtgttctgggaggtctccggcaccgaaggcacgctgtatatggacggggagcgctttaacgagctgcaggtctatcgcttcaacgatgataaacatgaccgcggctttaagacgctgtatgccgggagccagatcccggcctatgccggcttcttcggcttcgattttggcggcggcgggctgggctattttgacgtcaaggtgatcgaagtgcatgacctggtgcaggggatttgcggggagggcgactgctatcccaactttgaatttggtttgcagaatcagcgcgtgctgtcggcgattgaagcctcgatggccagccgtcgctgggtgaacgtggttaaagactaa

SEQ ID NO: 114086 - protein, 390 aa, Klebsiella pneumoniae subsp. pneumoniae MGH 78578
MSARLNIGLIGSGFMGQAHADAYRRAAMFYPDLPKRPHLYALADQDQAMAERHAAKLGAEKAYGDWRELVNDPQVDVVDITSPNHLHYTMAMAAIAAGKHVYCEKPLAVNEQQAQEMAQAARRVGVKTMVAFNNIKTPAALLAKQIIARGDIGEPVRFRGTFDQGFYNDPNLPWSWRCSKTLGGSGALGDLGAHTLSVAQFLLGGIREVTASAQTCLRQRPVPQRDAGYASRVAADAEWREVENDDQVQCLVNFDSGAAGVIEASRIAAGRIFGVFWEVSGTEGTLYMDGERFNELQVYRFNDDKHDRGFKTLYAGSQIPAYAGFFGFDFGGGGLGYFDVKVIEVHDLVQGICGEGDCYPNFEFGLQNQRVLSAIEASMASRRWVNVVKD

SEQ ID NO: 114087 - DNA, 1182 bp, Klebsiella pneumoniae subsp. pneumoniae MGH 78578
  CDS (1)..(1182): transl_table=11
atgactttgccgccggcgggagggaataacatgattcaggtcgcgattatcggggcagggtttattggcccggcgcatctggaggcgctgcggcggctgggagatgtcgaggtggtggcgctgtgcgacagccgccttgaggcggcgcagcgcaaggcgcgagcgctgaacattgcccatgcctacgacagcgtggaggcgctgctggcccatccggggctgcaggtggtgcataactgtacgccgaaccatttgcatgcccagattaaccggcagatcctcgccgccgggctgcacgtcttctcggaaaagccgctgtgtatgacggcgggggaggcgcgggagctggtggcgcttgccgcccgggccggcgtggtgcatggcgtcagcttcgtctatcgccagttcgctatggtccagcaggcggcggcgatgatccgccatggcgaggtcggcagaatcttcgcggcccacggcagctatttacaggactggatgctgctggagaccgactacaactggcgggtcgattcggcgcagggcggcgcgtcgcggacggtggccgacatcggctcccactggtgcgataccgtgcagtttatgaccggtcggcggattgtcgaggtgatggcggatctgtctatcgtctggccaacgcgtaaagcgccggtcaatggtaaagcgaccttcagcgccgttcacgaggcgcaggcatatgaaacgcggcctgtcgataccgaggactttggctcggtgctgttgcgttttgacgatggcagcaaaggcagctttatggtctctcaggtgagcgccgggcggaaaaaccgtctggcggtggagattaacggcagcctctgttctctggcctgggatcaggaagtgccccagcggctgtggatcggccaccgcgagcagccggatcgcctgctcagcgatgacccgagcctgctgcggccggaaatcgctgacagcgcccattaccccggcggccatattgagggctggccggacgcctttaagaatatgatggggcatttttatcaggcggtgcgcgccgggaagatgccagcggccggggcccggcgcttcgccgctttcgacgacggcgccgatgtgatgtacatcatcgaggcgattgtcaaaagccatcaggaacagcgctgggtcagcgtcgaacgctga

SEQ ID NO: 114088 - protein, 393 aa, Klebsiella pneumoniae subsp. pneumoniae MGH 78578
MTLPPAGGNNMIQVAIIGAGFIGPAHLEALRRLGDVEVVALCDSRLEAAQRKARALNIAHAYDSVEALLAHPGLQVVHNCTPNHLHAQINRQILAAGLHVFSEKPLCMTAGEARELVALAARAGVVHGVSFVYRQFAMVQQAAAMIRHGEVGRIFAAHGSYLQDWMLLETDYNWRVDSAQGGASRTVADIGSHWCDTVQFMTGRRIVEVMADLSIVWPTRKAPVNGKATFSAVHEAQAYETRPVDTEDFGSVLLRFDDGSKGSFMVSQVSAGRKNRLAVEINGSLCSLAWDQEVPQRLWIGHREQPDRLLSDDPSLLRPEIADSAHYPGGHIEGWPDAFKNMMGHFYQAVRAGKMPAAGARRFAAFDDGADVMYIIEAIVKSHQEQRWVSVER

SEQ ID NO: 114089 - DNA, 1194 bp, Kineococcus radiotolerans SRS30216
  CDS (1)..(1194): transl_table=11
atgtccgctgcaccgaacgaactgcctgagctcggggtcgccgtcatcggccactccttcatgggcgcggtccactcccacgcctggcgcagcgtcgaccacgtcggcaccccgcgcttccgcaccaggcgcctggtgctggccgggcgcgacctgggccgcgcgcaggccgccgccacccagttcggctgggacgagggcgtcgcggactggcgcgaggtgatcgcccgcgacgacgtccacgtcgtggacgtcctcacccccggcgactcccacgccgagatcgccatcgccgccctcgaggccggcaagcacgtcatctgcgagaagccgctggccaagacggtcgaggaggcgcagcggatgaccgccgccgcgcaggccgccgccgcgaagggcgtccgctccatggtggccttcaactaccgccaggtccccgcgatcggcctggcccgccagctcgtcgaggccgggcgcctgggcgaggtccgccaggtccgcgcggtgtacctgcaggactggatcgtcgaccccgagttcccgctgacctggcggctgcagaaggaccgctccggcgccggcgcgctgggcgacatcggctcccacatcatcgacgccgcgcagttcatcaccggccagcgcctgctgggggtgtccggcaccgtcgagaccttcgtcaagacccgcccgctggaggccgcccgcaccggctccaacacaggcctgggtgcggaggcctccaccgagcgcggcgaggtcaccgtcgacgacgcggcggtgttcttcggccgcggcgacggcggcgcgctgatgaccttcgaggcgagccggatggcgctgggccgcaagaacgggatgcgcatcgaggtcaacgggtccaaggggtcgatcgcgttcgacttcgagtccatgaacgagctgcacttcttcgacggcaccctgcccgacgcggagaacggtttccgccgcatcctcgccaccgagcccgagcaccccggggtgtcgaactggtggccggccgggcacgggctgggctacgaccaccccttcgtccacgagctgcaggagttcctgggcgcgatcgccgacgagcgcgaccccagcccgagcttcgccgacggcctgcaggtccagcaggtgctggacgccgtgcagcgcagcgccgagaacgactccgcctacaccacgatctga

SEQ ID NO: 114090 - protein, 397 aa, Kineococcus radiotolerans SRS30216
MSAAPNELPELGVAVIGHSFMGAVHSHAWRSVDHVGTPRFRTRRLVLAGRDLGRAQAAATQFGWDEGVADWREVIARDDVHVVDVLTPGDSHAEIAIAALEAGKHVICEKPLAKTVEEAQRMTAAAQAAAAKGVRSMVAFNYRQVPAIGLARQLVEAGRLGEVRQVRAVYLQDWIVDPEFPLTWRLQKDRSGAGALGDIGSHIIDAAQFITGQRLLGVSGTVETFVKTRPLEAARTGSNTGLGAEASTERGEVTVDDAAVFFGRGDGGALMTFEASRMALGRKNGMRIEVNGSKGSIAFDFESMNELHFFDGTLPDAENGFRRILATEPEHPGVSNWWPAGHGLGYDHPFVHELQEFLGAIADERDPSPSFADGLQVQQVLDAVQRSAENDSAYTTI

SEQ ID NO: 114091 - DNA, 1110 bp, Mesorhizobium loti MAFF303099
  CDS (1)..(1110): transl_table=11
atggtcggcgtcggtcttatcggcacgggtttcatgggcaagtgccacgccattgcgtggagtgccgtcggcgccgtctttcccgacgtggccaagcccaggctcgtccatctcggcgaggtcaatgaggagcttgcccggcgcaaggccggggagttcggcttcgccaaggcctcaggcgactggcgcgccgtcgtcaacgatccggaagtcgatatcgtctcgctgaccacgcccaaccagttccatccggaaatggccatcgccatcctccaggccggcaagcatctgtggtgcgaaaagccgatggcgccgagctttgccgaagccgaggcgatggcggaagcggccaggaaatccggcaaggtcgctgcccttggctacaattacatccagagcccggccatccgtcacatcggcgcgctgctcgacgagaagatcatcggcgaggtcaatcatctgcgcatcgagatggacgaggatttcatggccgatcccgaggcgctgttcttctggaagcacgaagccgcctccggctacggcgcgctcgacgacttcgccgtgcatccgctgtcgctggtctcggtcctgttcggtcgcgtcgccagcgtcatctgcgatatggccaagccttatgccgaccgcaagctggcggcgggcggacgccgcgcggtcgagacctatgatatcgccagcgtcttgatgcatctcgaaaacggcattgccggcacgctccaggtcaatcgctcggcctggggccgcaagggccgcatcgccatccagatcttcggctccaagggctcgatcctgttcgatcaggagcggatgaacgaattgcagctctatctcaccgctgatcgcccgaccgagcagggctaccgcaccatcctggtggcgccgcaccacaagccctacgacgccttcctgccggcgcccggccatggcctgggcttcaacgacctcaagatcatcgaatgccacgaattgctgacgcggctcgccggcagacgggcgcggctcatcgaattcgccgaaggtctggagatagagcgcaccgtccacgccatggcgcgctcctttgaggagaagcgctggatggatgtgcggtaa

SEQ ID NO: 114092 - protein, 369 aa, Mesorhizobium loti MAFF303099
MVGVGLIGTGFMGKCHAIAWSAVGAVFPDVAKPRLVHLGEVNEELARRKAGEFGFAKASGDWRAVVNDPEVDIVSLTTPNQFHPEMAIAILQAGKHLWCEKPMAPSFAEAEAMAEAARKSGKVAALGYNYIQSPAIRHIGALLDEKIIGEVNHLRIEMDEDFMADPEALFFWKHEAASGYGALDDFAVHPLSLVSVLFGRVASVICDMAKPYADRKLAAGGRRAVETYDIASVLMHLENGIAGTLQVNRSAWGRKGRIAIQIFGSKGSILFDQERMNELQLYLTADRPTEQGYRTILVAPHHKPYDAFLPAPGHGLGFNDLKIIECHELLTRLAGRRARLIEFAEGLEIERTVHAMARSFEEKRWMDVR

SEQ ID NO: 114093 - DNA, 1107 bp, Arabidopsis thaliana
  CDS (1)..(1107)
atggcggatgttaaggactcagtgattaccaagtacggaatcgtagggattggtatgatgggaagagaacatctcatcaatcttcaccatctccgtgaccaaggcctcgccgtcgtttgcatcgccgatcctcaccctccttcacagctcctggccattgaactcgctcaatcttttggatgggagcttaaggttttctcaggacacgaggagttgctcaagagtgagctgtgtgacgttattgttgtctcttctccaaatatgactcatcatcagattcttatggacattatcaattattcaaaaccgcatcatgttcttgttgagaagcctttatgcaccacagttgcagattgcaaacaggttttggaggctgcaaagaaaaggtcagatatggtggtgcaagttgggttggagtacagatacatgccgccagttgctaagctaatagaacaagtaaaaggcagagactttggtaatgtcaagatggtagcaatccgagaacatagattccctttcttggttaaggtgaacaactggaatagattcaatgtgaacactggagggaccttagtggagaaatgctgccacttctttgatctaatgaggctctttgccggtgcaaatcctgtctgtgtgatggcttctggaggcatggatgtgaaccacaaggatgaagtttatggtggaaaggtgcctgatataattgataacgcatatgttattattgagtttgacaatggatgtcgtgggatgctcgatctttgcatgtttgctgaaggaagcaaaaacgagcaagaaatttctgttactggtgacattggaaagggggaggcacttgttccagagggtatagttcgatctggcagtcgtattggaggaagagaacacgttcaaacaataaaagcagaagatgaaagaataaaatatgaagggttgcatcacgggtcaagttacttggaacacctcaccttcttatcagcaatcagaggtgaaggaatagcagctgttgatttggaagacggattgatggctgttgccatgggagttgctgcacagctctccattcaggagcgccgctatgtaaccattgacgaggtcttgtga

SEQ ID NO: 114094 - protein, 368 aa, Arabidopsis thaliana
MADVKDSVITKYGIVGIGMMGREHLINLHHLRDQGLAVVCIADPHPPSQLLAIELAQSFGWELKVFSGHEELLKSELCDVIVVSSPNMTHHQILMDIINYSKPHHVLVEKPLCTTVADCKQVLEAAKKRSDMVVQVGLEYRYMPPVAKLIEQVKGRDFGNVKMVAIREHRFPFLVKVNNWNRFNVNTGGTLVEKCCHFFDLMRLFAGANPVCVMASGGMDVNHKDEVYGGKVPDIIDNAYVIIEFDNGCRGMLDLCMFAEGSKNEQEISVTGDIGKGEALVPEGIVRSGSRIGGREHVQTIKAEDERIKYEGLHHGSSYLEHLTFLSAIRGEGIAAVDLEDGLMAVAMGVAAQLSIQERRYVTIDEVL

SEQ ID NO: 114095 - DNA, 1128 bp, Agrobacterium tumefaciens str. C58
  CDS (1)..(1128): transl_table=11
atggccgctcttggcgtgggccttattggcacgggttacatgggcaaatgccacgcgctggcgtggaacaacgtcacgagtgtcttcggcgatgtggaacgcccacggctggtgacgctcgcggaggtcaacccggagctggcggcgaagaaggccgccaaattcggtttcgcccgttccacgggcaactggcgcgacctgctggccgatcccgagatcgacgtcatctcggtcaccacgccaaacgcctttcacccggaaatggccattgccgcccttgaggccggcaagcatgtctggtgtgaaaagccgatggcgcccgcctttgccgacgcagtgaagatgcgcgatgccgcccgccggtcggccaaggcggcggcgatgggttacaactatatccagaaccccgtcatccgccatatccgccgcctgatcgatgagggcgctatcggcaacgtctatcacgtccgcgccgaaatggacgaggacttcatggccgatgccacccagcccttctactggaagagcgaggcgtcctccggttatggtgcgctggatgattttgccgtgcacccgctgtcactgctttatgccctgttcggccacgcgcaaagcgccatcacggacatggtgaaaccttacgagacccgcccgcttgccggcggtggcgaacgcgcggtcgagacccacgatctcgccagcgttctcctgaagctcgaaggcggcatttccgccgtgctcatcgccaaccgttccgcctggggccgcaaggggcgcatcgccatccagatttatggctccaccggctcgatcctgttcgatcaggagcggatgaacgagttccagctctacaccacggacggacgcccggaagaacaggggttccgaaccatcctcaccgccccccatcacaagccctatgaccgcttcatccccgcccccggccacggcctcggtttcaacgacctgaaggtcatcgaatgcagggagctgattgcggcaatcgatggcaacaaggcccatatcatcgatttcgaggaagggctgaagatcgagcgcagcattcacgccatggcccggtcgtttgccgaagggcgatgggtaagggcggaggagattgcggaatag

SEQ ID NO: 114096 - protein, 375 aa, Agrobacterium tumefaciens str. C58
MAALGVGLIGTGYMGKCHALAWNNVTSVFGDVERPRLVTLAEVNPELAAKKAAKFGFARSTGNWRDLLADPEIDVISVTTPNAFHPEMAIAALEAGKHVWCEKPMAPAFADAVKMRDAARRSAKAAAMGYNYIQNPVIRHIRRLIDEGAIGNVYHVRAEMDEDFMADATQPFYWKSEASSGYGALDDFAVHPLSLLYALFGHAQSAITDMVKPYETRPLAGGGERAVETHDLASVLLKLEGGISAVLIANRSAWGRKGRIAIQIYGSTGSILFDQERMNEFQLYTTDGRPEEQGFRTILTAPHHKPYDRFIPAPGHGLGFNDLKVIECRELIAAIDGNKAHIIDFEEGLKIERSIHAMARSFAEGRWVRAEEIAE

SEQ ID NO: 114097 - DNA, 1074 bp, Agrobacterium tumefaciens str. C58; identical to SEQ ID NO: 33469
  CDS (1)..(1074): transl_table=11

SEQ ID NO: 114098 - protein, 357 aa, Agrobacterium tumefaciens str. C58; identical to SEQ ID NO: 33470

SEQ ID NO: 114099 - DNA, 1188 bp, Agrobacterium tumefaciens str. C58
  CDS (1)..(1188): transl_table=11
atggctattgaaggaaagacaaccgacgtggcgaacaagcggattcgcctcggcatggtcggcggcggttcgggcgcattcatcggcggcgttcatcgcatggcagcgcggctcgacaatcgcttcgatctcgtggcgggggccctgtcctcgacaccggaaaaatccctagcttccgggcgtgagctggggctcgactctgagcgttgctacggctcgtttgaagaaatggccgaaaaagaagcgctgcgcgaggatggtatcgaggcggtggcgatcgtcacccccaaccatgtgcactatcccgctgcaaaggccttcctggagcgcggcatccatgtcatctgcgacaagccgctgacttccaatctcgaagacgcgaaaaagctgaaggacgtggccgataaggccgatgcgctgttcatcctgacgcataactacaccggttatccaatggtgcggcatgcgcgcgagctggtggaggccggtgcactcggcaatatccgtctggtgcaaatggaatatccgcaggactggctgacggaggcggtggaacagaccggcgcgaaacaggcagtctggcgtaccgatccggcccaatctggcgttggcggttccaccggtgacatcggcacccatgcctataatctcggctgcttcatttccggtctcgaagcggatgagctggcggcggatgtgcataccttcgtcgaaggccgtcggctcgatgacaatgctcatgtgatgatgcgcttcaagcccaagggcggcaagcaacccgccaggggcatgctctggtgcagccaggtggcagtcggccatgaaaatgggctgaagatccgcctttatggcgacaaggccggtctcgaatggacgcaggccgatccgaattatctgtggtttacgaagctcggcgaaccgaagcagttgatcacccgcggcggggccggggcaggggccgcagccgctcgcgttacccgcataccctccggccatccggaaggatatctggaagccttcgctaccatctataccgaggctgcgcatgccattgaggcgcgccgcaccggttcggcgctggataaggcggtcatctatccgacggtggatgacggcgtcaaaggtgtggccttcgtcacggcctgcatcgagtcaggcaagaagaatggcggctgggtgaagctgtaa

SEQ ID NO: 114100 - protein, 395 aa, Agrobacterium tumefaciens str. C58
MAIEGKTTDVANKRIRLGMVGGGSGAFIGGVHRMAARLDNRFDLVAGALSSTPEKSLASGRELGLDSERCYGSFEEMAEKEALREDGIEAVAIVTPNHVHYPAAKAFLERGIHVICDKPLTSNLEDAKKLKDVADKADALFILTHNYTGYPMVRHARELVEAGALGNIRLVQMEYPQDWLTEAVEQTGAKQAVWRTDPAQSGVGGSTGDIGTHAYNLGCFISGLEADELAADVHTFVEGRRLDDNAHVMMRFKPKGGKQPARGMLWCSQVAVGHENGLKIRLYGDKAGLEWTQADPNYLWFTKLGEPKQLITRGGAGAGAAAARVTRIPSGHPEGYLEAFATIYTEAAHAIEARRTGSALDKAVIYPTVDDGVKGVAFVTACIESGKKNGGWVKL

SEQ ID NO: 114101 - DNA, 1131 bp, Sinorhizobium meliloti 1021
  CDS (1)..(1131): transl_table=11
atgagcggcaagcgcaggctgggcattggcctgatcgggacgggtttcatgggcaaggcgcatgcccttggcttcacgattgcggcacgagtcttcgacctgcccttcgagctggatctcgtgtccgtcgcggacgtgacgcaggagggcgcggaggcggcccgcggacggctcggcttccgcaaggcgaccgccgactggcgcgaacttctgaccgaccccgagatcgacatcatcgacatcaccacgccgaacctcctgcacaaggagatggcgctcgctgcgtttgcccacggcaagcacgtctattgcgaaaagccgctggcaccgacggtcgccgactgcgccgagatggtcgccgccgcggaaaaggccggcgtcgtcacccaggtcggcttcaactatctcaagaacccgctcatttttctcgcgagcgacattatcgaaagcggcgagatcggcgaaatacggtcgtttcgcggcattcacgcggaagatttcatggcggatgagagcgttccgtggggttggcggctggacccgcgcagcggcggcggtgcgctcgccgacatcggcagccacatgatcgcctgcatgcgccatctcgtcgggccgatccggtccgtgctggcagagaccgtcatccacattccgcagcgccctgtcgcgcgcggcgccacagcgacccggacggtcgaggtcgacgacgtcacgcgggccttcgtccgtttcgagagcggcgcgagcggaagcttcgaagcgagctggatcgcgaccggccgcaagatgcagcacgatttcgagatttacggctccaagggaagcatcgtcttcactcaggagcgcctgaacgagatcagggtctactacgccggcgacgacatcaggagccgcggcttccgtacgatctgggcgggaccggagcatccgccctacggagccttctgcgtggcaccgggccaccagatcggcttcaacgagctgaaggcgatcgaggccaacgagttcctggaagcgatcgccaaaggcagcaaaacctcgaccgatttccgagagggctacgaagtgcagaaggtcctttccgcgacctatcactccgcgaggacgaacgagtgggtggagattggctga

SEQ ID NO: 114102 - protein, 376 aa, Sinorhizobium meliloti 1021
MSGKRRLGIGLIGTGFMGKAHALGFTIAARVFDLPFELDLVSVADVTQEGAEAARGRLGFRKATADWRELLTDPEIDIIDITTPNLLHKEMALAAFAHGKHVYCEKPLAPTVADCAEMVAAAEKAGVVTQVGFNYLKNPLIFLASDIIESGEIGEIRSFRGIHAEDFMADESVPWGWRLDPRSGGGALADIGSHMIACMRHLVGPIRSVLAETVIHIPQRPVARGATATRTVEVDDVTRAFVRFESGASGSFEASWIATGRKMQHDFEIYGSKGSIVFTQERLNEIRVYYAGDDIRSRGFRTIWAGPEHPPYGAFCVAPGHQIGFNELKAIEANEFLEAIAKGSKTSTDFREGYEVQKVLSATYHSARTNEWVEIG

SEQ ID NO: 114103 - DNA, 1107 bp, Agrobacterium tumefaciens str. C58
  CDS (1)..(1107): transl_table=11
ttgcagatgtcggataagaaatttcgtgtgggtattattggagcagacactcacgcaagttgggcaggcgcatcgcatgtgccagctctggcgtcacaagctcacctgacgctggcggcagtcgcgacccggcgcgaggaaagcgccagggcggcggctgaagcattcggcgcagagctatggtttgccgatccctacgcgatgatcagtgataaaaccattgacgtcatcacggtcgccgtgaaggtgccggcgcacaagaatctcgtgatggccgccttgcacgcgggtaaagccgtctattgcgaagcgcctctaggcgcaacgctggcggaaacaaacgagatggccgcagcggtcgggtctttgcataccgcgatcggcttgcaaggtcggcataatcctgccgtccgacgagcggcggaactagtcgcgtcaggaaagctgggtcgcttgatgtccgcccgtgtcggcgcaaccacattcggctacggtccgcaatctccgagcatgtacgactatttcaacaaggccgcttctggcgccagtttcatgacgatcacggcaggccacgtgctggacgtcatcgaggctgtgctcggcaacattaccgaggtcgatgcgcgcacggagttgctctggccggagatcgagatcgtcgatacaggcgaaacttcacagcgagaaattccggatcatctcgatctgatcgccaagacggcaagcggtgcgcctgtatctgtgcaggttctggcgggcgtgcctgcagatgaggcgagtgttgtattcgagatccgtggttcccggggctggctgaagctaaccggcaatcatctggcaggcgtacaagtcggagacattttactttcatcgagcgtggaattcgctgcgcccgatagaccggtcgccaacggtgtcggtccgaccgcggccgaattctggtcaggcgccgctatcaatgtcggggaggtctatgcgtccctggggcgcgatttgaggaatggtacatataccactcccggtttcgaccatgcccgccataacagccgtttgatcgcggccgtcgagcttgcggcaagaactggcgaacggcagcacctcgtttga

SEQ ID NO: 114104 - protein, 368 aa, Agrobacterium tumefaciens str. C58
MQMSDKKFRVGIIGADTHASWAGASHVPALASQAHLTLAAVATRREESARAAAEAFGAELWFADPYAMISDKTIDVITVAVKVPAHKNLVMAALHAGKAVYCEAPLGATLAETNEMAAAVGSLHTAIGLQGRHNPAVRRAAELVASGKLGRLMSARVGATTFGYGPQSPSMYDYFNKAASGASFMTITAGHVLDVIEAVLGNITEVDARTELLWPEIEIVDTGETSQREIPDHLDLIAKTASGAPVSVQVLAGVPADEASVVFEIRGSRGWLKLTGNHLAGVQVGDILLSSSVEFAAPDRPVANGVGPTAAEFWSGAAINVGEVYASLGRDLRNGTYTTPGFDHARHNSRLIAAVELAARTGERQHLV

SEQ ID NO: 114105 - DNA, 1131 bp, Caulobacter crescentus CB15
  CDS (1)..(1131): transl_table=11
atggcgctgcggatggccatggtgggcggcgggcccggctcgttcatcgggccggtgcaccggatggccgccgagctggacggccgcattcggcttgtggcgggcgtgttcagccgagaccccgccaagagcgcccaggcggcggtcgcgtggggcgtcgcgcccgatcgcgtctatcccgatcaccacacgatgttcgcggccgagcgggcgcgcgccgacggcgtgcagctggtctcggtggtgacgccgaaccatctgcatttcgatgtgtccgccgcagccctgaaggcgggtctgcatgtgatcagcgacaagcccgcgacgctgaacctcgccgaggcgcaggccttggcgaaggtcgtcgccgcctcgggcaagcagtacggcctgacctacacctacaccggctatccgatggtccgtgaggcccgcgagatcgtggcgcgcggcgatctgggcgcggttcgcaaggtggtggtcgagtactcgcaaggctggctgtcgacgccgctggagcgcgacagcgccaacaagcaggccagttggcgcgccgatcccaagcaatcgggcgtcggcggctgtatcggcgacatcggcgtccacgcgttcaacatcgccgagttcatcaccgggcggcgcgtcgagagactgtgcgcggatgtcgcgacggtcgtgccggggcgcgatctcgacgatgactgcaacgtcttgctgcggttcgagggcggggcgcgcggcgtgctgatcgcctcacagatctcagccggcgcccgcaacggcctgacgatcagcgtctatggcgagaagggcggcctgacctggtcgcacgaggatcccaacattctgacgctggattggctggatgggcccagccacgtgctgcacgccggctctggctatcttggcccggcggcgcgggcggtgacgcgcctgccgaccggtcatcccgagggcttcatcgaggctttcgccacgatctaccgggatttcgccgacgcgatcgaaggccgcgccggcggccttgtgccggacattgccgagggcctacgcggcatgacctttgtcgagcgcgccgttgcggccagccgcgacgatgcgggctgggtgtcgctgcagggagagggctga

SEQ ID NO: 114106 - protein, 376 aa, Caulobacter crescentus CB15
MALRMAMVGGGPGSFIGPVHRMAAELDGRIRLVAGVFSRDPAKSAQAAVAWGVAPDRVYPDHHTMFAAERARADGVQLVSVVTPNHLHFDVSAAALKAGLHVISDKPATLNLAEAQALAKVVAASGKQYGLTYTYTGYPMVREAREIVARGDLGAVRKVVVEYSQGWLSTPLERDSANKQASWRADPKQSGVGGCIGDIGVHAFNIAEFITGRRVERLCADVATVVPGRDLDDDCNVLLRFEGGARGVLIASQISAGARNGLTISVYGEKGGLTWSHEDPNILTLDWLDGPSHVLHAGSGYLGPAARAVTRLPTGHPEGFIEAFATIYRDFADAIEGRAGGLVPDIAEGLRGMTFVERAVAASRDDAGWVSLQGEG

SEQ ID NO: 114107 - DNA, 1101 bp, Agrobacterium tumefaciens str. C58
  CDS (1)..(1101): transl_table=11
atgtcggataagaaatttcgtgtgggtattattggagcagacactcacgcaagttgggcaggcgcatcgcatgtgccagctctggcgtcacaagctcacctgacgctggcggcagtcgcgacccggcgcgaggaaagcgccagggcggcggctgaagcattcggcgcagagctatggtttgccgatccctacgcgatgatcagtgataaaaccattgacgtcatcacggtcgccgtgaaggtgccggcgcacaagaatctcgtgatggccgccttgcacgcgggtaaagccgtctattgcgaagcgcctctaggcgcaacgctggcggaaacaaacgagatggccgcagcggtcgggtctttgcataccgcgatcggcttgcaaggtcggcataatcctgccgtccgacgagcggcggaactagtcgcgtcaggaaagctgggtcgcttgatgtccgcccgtgtcggcgcaaccacattcggctacggtccgcaatctccgagcatgtacgactatttcaacaaggccgcttctggcgccagtttcatgacgatcacggcaggccacgtgctggacgtcatcgaggctgtgctcggcaacattaccgaggtcgatgcgcgcacggagttgctctggccggagatcgagatcgtcgatacaggcgaaacttcacagcgagaaattccggatcatctcgatctgatcgccaagacggcaagcggtgcgcctgtatctgtgcaggttctggcgggcgtgcctgcagatgaggcgagtgttgtattcgagatccgtggttcccggggctggctgaagctaaccggcaatcatctggcaggcgtacaagtcggagacattttactttcatcgagcgtggaattcgctgcgcccgatagaccggtcgccaacggtgtcggtccgaccgcggccgaattctggtcaggcgccgctatcaatgtcggggaggtctatgcgtccctggggcgcgatttgaggaatggtacatataccactcccggtttcgaccatgcccgccataacagccgtttgatcgcggccgtcgagcttgcggcaagaactggcgaacggcagcacctcgtttga

SEQ ID NO: 114108 - protein, 366 aa, Agrobacterium tumefaciens str. C58
MSDKKFRVGIIGADTHASWAGASHVPALASQAHLTLAAVATRREESARAAAEAFGAELWFADPYAMISDKTIDVITVAVKVPAHKNLVMAALHAGKAVYCEAPLGATLAETNEMAAAVGSLHTAIGLQGRHNPAVRRAAELVASGKLGRLMSARVGATTFGYGPQSPSMYDYFNKAASGASFMTITAGHVLDVIEAVLGNITEVDARTELLWPEIEIVDTGETSQREIPDHLDLIAKTASGAPVSVQVLAGVPADEASVVFEIRGSRGWLKLTGNHLAGVQVGDILLSSSVEFAAPDRPVANGVGPTAAEFWSGAAINVGEVYASLGRDLRNGTYTTPGFDHARHNSRLIAAVELAARTGERQHLV

SEQ ID NO: 114109 - DNA, 1122 bp, Brucella melitensis 16M
  CDS (1)..(1122): transl_table=11
atggaaatggctgttatagcaggcttgatcggttccggcttcatgggcaaaacccacgcgctggcgcttgccaatgtcaatcgcatcttcgacctgccgcttgcggtgcagcttcacacgcttggcgatattgacgtgcaaatagcccgcaaagccgcgcggcaactgggctttgcccatgccactggcgactggcgtgacctcatttccaatcccgacatcaacctcatcgatatcaccacccccaaccgcttccataaggaaatggctctggcggccatcaaggccggaaagcatgtctattgtgaaaagccgctggcgccctctgccgccgattgcctggaaatgacgctggccgcagaacgcgagggtatccagacggctgtggatttcaactatctgaaaaaccccatgatgaagcttgcacaagagattatcgcaagcggtgaactgggtgaaatccgaaattttcgcggcattcacgccgaagatttcatggccgacgcccgcattccgtggacatggcggcttgatccggcaggtggcggtggagcacttgccgatatcggcagtcacatcatcgcaaccgcgcgctatctgatcggcccaatcgcggacgtgatgggcgaggccgttacgctcattcgtgagcgccccgacatggctgatctctcccgcacgaaacccgtggaagtggatgatgtctgccacgctttcatgcgttttgaaaacggcgcaaccggcacactggaagcaagctgggtggcaagcgggcgcaagatgcagcacgatttcgagatttcaggatcgaaaggcgccatcttcttctcgcaggagcgtttcaatgaactggaattgttcctctattccgaccgcaaggggcagcagggtttccgcaagatttttgccgggccggaacatgagccctatggcgctttctgcgtggcgggcggccatcagatcggcttcaacgacctcaagaccatcgaagtgcgcgatttcgtgctggccattgccgggcagaaaaccggccatgccgatttccgcgaaggctatgaggttcaaaagacggtggagacgatctatgcctcgtcccgcgagcgccagtggaagaaaatctag

SEQ ID NO: 114110 - protein, 373 aa, Brucella melitensis 16M
MEMAVIAGLIGSGFMGKTHALALANVNRIFDLPLAVQLHTLGDIDVQIARKAARQLGFAHATGDWRDLISNPDINLIDITTPNRFHKEMALAAIKAGKHVYCEKPLAPSAADCLEMTLAAEREGIQTAVDFNYLKNPMMKLAQEIIASGELGEIRNFRGIHAEDFMADARIPWTWRLDPAGGGGALADIGSHIIATARYLIGPIADVMGEAVTLIRERPDMADLSRTKPVEVDDVCHAFMRFENGATGTLEASWVASGRKMQHDFEISGSKGAIFFSQERFNELELFLYSDRKGQQGFRKIFAGPEHEPYGAFCVAGGHQIGFNDLKTIEVRDFVLAIAGQKTGHADFREGYEVQKTVETIYASSRERQWKKI

SEQ ID NO: 114111 - DNA, 1236 bp, Corynebacterium glutamicum ATCC 13032
  CDS (1)..(1236): transl_table=11
gtgactcagcaagaacttcgcgtagctgtcattggtgcaggcatggcaggcaaagcacacgcagcgggctaccgcaccgcatccagcatctactccaccactctgcccaacatccgtttggtttccatcgcggatgccaacgtgcagctagctgaagaaaccgcagcacgctttggctttgagcgctttgatacctcttggcaggcgatcgttgaggccgatgacatcgatgttgtcagcgtcgtggtggctaacttcctgcaccgcgaaatcgtggaagcacttctggcatccggcaagcatgtgctgtgcgagaagccactgtcagacaccatcgaagatgcagaagccatgattgaggcagccggccgtgcagcaacaaatggcaccatcgcccgcatcggactgacctaccgccgttccccaggcgtggcacacatccgtgatctcgtgcagtccggcgagcttggcaaggttctacacgtcaccggccactactggaccgactacggatccaatgcacaggcaccaatcagctggcgttacaaggggccaaacggctccggcgcactggcagatgtgggaagccacctcacctacctggcagaattcgttgcaggatctgacttcgccgccgtccgtggtggccagttgtccaccgtgatcaccgagcgccccaagccactcggcgcgattgtcggccacgaaggcggcgcagtttccgatgaatacgaagcagtggaaaatgatgacattgcatcattctccggatccttcatcggtggcggaaccgcaaccctccaggtcagccgcatttcccagggacacccaaacaccctaggttttgaagtgttctgtgaaaagggctccgtgctctttgatttccgcaactcaggcgaattcaaaatcttcaccccagcaacctccggtgacatcagccaagaagccggctaccgcaccatcaccatcggaccaaagcacccatactggcgcggcggccttgcaatggatgcaccaggcgtgggaattggccaaaacgaaggcttcgttttccaggcgcgcgcattcctcgaagaaatcgcaggaatctccgaagctgaaagcctgccacgctgcgcaactttggaagaagggctacacaatatgcagctcattgatgctgtatcacagtcagctgcagcaggtggcgaaaccgttgcggtcccagcggctgctctgatccctgcaaacaactag

SEQ ID NO: 114112 - protein, 411 aa, Corynebacterium glutamicum ATCC 13032
MTQQELRVAVIGAGMAGKAHAAGYRTASSIYSTTLPNIRLVSIADANVQLAEETAARFGFERFDTSWQAIVEADDIDVVSVVVANFLHREIVEALLASGKHVLCEKPLSDTIEDAEAMIEAAGRAATNGTIARIGLTYRRSPGVAHIRDLVQSGELGKVLHVTGHYWTDYGSNAQAPISWRYKGPNGSGALADVGSHLTYLAEFVAGSDFAAVRGGQLSTVITERPKPLGAIVGHEGGAVSDEYEAVENDDIASFSGSFIGGGTATLQVSRISQGHPNTLGFEVFCEKGSVLFDFRNSGEFKIFTPATSGDISQEAGYRTITIGPKHPYWRGGLAMDAPGVGIGQNEGFVFQARAFLEEIAGISEAESLPRCATLEEGLHNMQLIDAVSQSAAAGGETVAVPAAALIPANN

SEQ ID NO: 114113 - DNA, 1014 bp, Streptomyces coelicolor A3(2)
  CDS (1)..(1014): transl_table=11
atgcgcatcggggtcatcggaacgggccgcatcggcaccgttcacgccaacacgctcagccgccaccgcgacgtcggatccctgatcctcacggacgccgacatcgcgcgggcgcaggagctggcccaccggctgggcgagacggcggcaccaggggtggacgagatcttccagtggggcgtggacgcggtggtgatcaccacggcgacgccggcccatgccgaactgatcggccgggcggcccgctcggggctcccggtgttctgcgagaagcccatcgccctggacctgccgggcacgttacaggcgatcgccgaggtggaggccgccgggacggtcctccagatgggcttccagcgccgcttcgacaccggctacaccggggcccgggaggcggtgcggtccgggcggctgggccggctgcacaccgtccgggcggtgacgagcgaccagaccccgccgccggccgattacctcccgcagtccggcgggctctaccgggacacgctcatccacgacttcgacgtcctgcgctgggtgaccgggcgggaggtcgtcgacgtgtacgccgccgggtccgacgccggtccgccgatgttccgcgcggcggacgacgtggacaccggcgcggtgctgctcacgctggacgacgggacgctggcgacggcgaccgcggcgcggctgaacggggcggggtacgacgtgcgcatggagctggccggggagctggaccagatcgtcgtgggcctggacgaccgtacgccgatcgcgtccaccgagccgaccgggcccccggccgcggacaagccgtggaccggcttcgtggagcgcttcggacccgcctacgaggccgagctgaccaccttcgtgcaggtggtgcgcggcgagcgggccaacccgtgcgacgggcgcgaggcgttgcaggccctgcggatcgcggaggcctgcgacgtctcgcgccgcgagcgcagacccgtacggctggcggaggtgcccgagacgctcacgtcttga

SEQ ID NO: 114114 - protein, 337 aa, Streptomyces coelicolor A3(2)
MRIGVIGTGRIGTVHANTLSRHRDVGSLILTDADIARAQELAHRLGETAAPGVDEIFQWGVDAVVITTATPAHAELIGRAARSGLPVFCEKPIALDLPGTLQAIAEVEAAGTVLQMGFQRRFDTGYTGAREAVRSGRLGRLHTVRAVTSDQTPPPADYLPQSGGLYRDTLIHDFDVLRWVTGREVVDVYAAGSDAGPPMFRAADDVDTGAVLLTLDDGTLATATAARLNGAGYDVRMELAGELDQIVVGLDDRTPIASTEPTGPPAADKPWTGFVERFGPAYEAELTTFVQVVRGERANPCDGREALQALRIAEACDVSRRERRPVRLAEVPETLTS

SEQ ID NO: 114115 - DNA, 1293 bp, Streptomyces coelicolor A3(2); identical to SEQ ID NO: 33485
  CDS (1)..(1293): transl_table=11

SEQ ID NO: 114116 - protein, 430 aa, Streptomyces coelicolor A3(2); identical to SEQ ID NO: 33486

SEQ ID NO: 114117 - DNA, 1164 bp, Streptomyces coelicolor A3(2); identical to SEQ ID NO: 33487
  CDS (1)..(1164): transl_table=11

SEQ ID NO: 114118 - protein, 387 aa, Streptomyces coelicolor A3(2); identical to SEQ ID NO: 33488

SEQ ID NO: 114119 - DNA, 1182 bp, Streptomyces coelicolor A3(2)
  CDS (1)..(1182): transl_table=11
atggccaccgaaccgatacgcatcggcgtggtcggcgcctccccggaccggggctgggccgccgacgcacacctgccggccctgcagcacctgccgcagtacaagatcaccgcggtcggcacccgccgggcggacagtgcgcaccgggccgctcgccggtacggggcgacccacgccttcaccgacccccgcagcctcgccgcacatcccgacgtggaactggtcgcgatcgtcgtgaaagtgccggaccatgcgcggctggtggaggcggcgctcgcggcgggcaagcatgtcctgtgcgagtggccccttgcccggaccaccgaggaggccgcccagctaacggcggccgctcacggagccggtgtggtgaacgccgtcggcctccaggcgcggcacaccccgacggtcgtccgggcccgggaactgatcaggcaggggtacgtcggccgggtcacctcggtcaccgtgtacagcacgcggggggtcgcggccggggggcggctgcccgccgccttcgcctacaccctcgactccacgaacggcgccggcaccctcgaggtcgccggcgggcacacgctcgacgcggtgcagtacctgctcggcagggagatgaccggcctgtcggctgcgctgtccgttcagcatccgcggatcacactcgacgaggacgcccggcagacgggggcgaccagccccgatcatgtcgcgctgcacgcgacgctggaaggcggcgccgcgctggtggtccacatccacgatgccaagaacagcggcgcgggcacccgcatcgagatctccggcacgcaaggggagctggccatcgtatccaccggaccacgaagcggcagcgggctgcagatcagcgaactggccctgctcggagcgcaggggacagagccgtccgggcaggagctgccctttcccggctcctggggcacggccgtgccagcggacggtctcgatgcggcccagcacaccatggctgtgcagtacgcggctctggccgcggacatccgcgagggcggcagtcgtgtgcctcgtttcgccgacgggatcgagctgcaccggctgctggacgccgtacggctgtcctccgcaaccggctgccggctggagcgccgtgcgggcgagcggtggccggtcagctctccctggccgcggcgtcgacgatcgcggtga

SEQ ID NO: 114120 - protein, 393 aa, Streptomyces coelicolor A3(2)
MATEPIRIGVVGASPDRGWAADAHLPALQHLPQYKITAVGTRRADSAHRAARRYGATHAFTDPRSLAAHPDVELVAIVVKVPDHARLVEAALAAGKHVLCEWPLARTTEEAAQLTAAAHGAGVVNAVGLQARHTPTVVRARELIRQGYVGRVTSVTVYSTRGVAAGGRLPAAFAYTLDSTNGAGTLEVAGGHTLDAVQYLLGREMTGLSAALSVQHPRITLDEDARQTGATSPDHVALHATLEGGAALVVHIHDAKNSGAGTRIEISGTQGELAIVSTGPRSGSGLQISELALLGAQGTEPSGQELPFPGSWGTAVPADGLDAAQHTMAVQYAALAADIREGGSRVPRFADGIELHRLLDAVRLSSATGCRLERRAGERWPVSSPWPRRRRSR

SEQ ID NO: 114121 - DNA, 1116 bp, Brucella suis 1330
  CDS (1)..(1116): transl_table=11
atggctgttatagcaggcttgatcggttccggcttcatgggcaaaacccacgcgctggcgcttgccaatgtcaatcgcatcttcgacctgccgcttgcggtgcagcttcacacgcttggcgatattgacgtgcaaacagcccgcaaagccgcgcggcaactgggctttgcccatgccactggcgactggcgtgacctcatttccaatcccgacatcaacctcatcgatatcaccacccccaaccgcttccataaggaaatggctctggcggccatcaaggccggaaagcatgtctattgtgaaaagccgctggcgccctctgccgccgattgcctggaaatgacgctggccgcagaacgcgagggtatccagacggctgtgggtttcaactatctgaaaaaccccatgatgaagcttgcacaagagattatcgcaagcggtgaactgggtgaaatccgaaattttcgcggcattcacgccgaagatttcatggccgacgcccgcattccgtggacatggcggcttgatccggcaggtggcggcggagcacttgccgatatcggcagtcacatcatcgcaaccgcgcgctatctgatcggcccaatcgcggacgtgatgggcgaggccgttacgctcattcgtgagcgccccgacatggctgatctctcccgcacgaaacccgtggaagtggatgatgtctgccacgctttcatgcgttttgaaaacggcgcaaccggcacactggaagcaagctgggtggcaagcgggcgcaagatgcagcacgatttcgagatttcaggatcgaaaggcgccatcttcttctcgcaggagcgtttcaatgaactggaattgttcctctattccgaccgcaaggggcagcagggtttccgcaagatttttgccgggccggaacatgagccctatggcgctttctgcgtggcgggcggccatcagatcggcttcaacgacctcaagaccatcgaagtgcgcgatttcgtgctggccattgccgggcagaaaaccggccatgccgatttccgcgaaggctatgaggttcaaaagacggtggagacgatctatgcctcgtcccgcgagcgccagtggaagaaaatctag

SEQ ID NO: 114122 - protein, 371 aa, Brucella suis 1330
MAVIAGLIGSGFMGKTHALALANVNRIFDLPLAVQLHTLGDIDVQTARKAARQLGFAHATGDWRDLISNPDINLIDITTPNRFHKEMALAAIKAGKHVYCEKPLAPSAADCLEMTLAAEREGIQTAVGFNYLKNPMMKLAQEIIASGELGEIRNFRGIHAEDFMADARIPWTWRLDPAGGGGALADIGSHIIATARYLIGPIADVMGEAVTLIRERPDMADLSRTKPVEVDDVCHAFMRFENGATGTLEASWVASGRKMQHDFEISGSKGAIFFSQERFNELELFLYSDRKGQQGFRKIFAGPEHEPYGAFCVAGGHQIGFNDLKTIEVRDFVLAIAGQKTGHADFREGYEVQKTVETIYASSRERQWKKI

SEQ ID NO: 114123 - DNA, 1149 bp, Pseudomonas syringae pv. tomato str. DC3000; identical to SEQ ID NO: 33501
  CDS (1)..(1149): transl_table=11

SEQ ID NO: 114124 - protein, 382 aa, Pseudomonas syringae pv. tomato str. DC3000; identical to SEQ ID NO: 33502

SEQ ID NO: 114125 - DNA, 1209 bp, Streptomyces avermitilis MA-4680
  CDS (1)..(1209): transl_table=11
atgggacagccgcacccgcgcgacgaggcggacgccgggaagccgccgctcggtatcggcatggtcggctacgccttcatgggcgccgcccactcccagggctggcgcaccgtcggccgcgtcttcgacctgccgtcccgcccggtgctcgccgccgtgtgcggccgcgacggacaggccgtgcgcgccatggccgagcggcacggctgggcggcggccgagaccgactggcgcgccctgatcgcccgtgacgacgtcgacgtcgtcgacatctgcaccccgggtgacagccatgccgagatcgccgtcgccgcgctggccgcgggcaaacacgtcctgtgcgagaaacccctcgcgaacacggtcgaggaagcggaggccatggcggccgcgggcgaacaggcttatcggcagggccggttgaccatggtcggcttcaactaccgtcggctgcccgccacctcgctggcccggcggatggtccgcgaaggccggctgggcaccctgcggcacgtgcgggtgacgtaccttcaggactggctggtcgaccccgagtttccgctcacctggcgactgcgcagggaagtggccggttcgggggcgctcggcgacctgggcgcccacatcgtcgacctggcccagtacctcgcgggcgagcccctggccggagtctccgcgctcaccgagaccttcgtacgggagcgtccgctgcccggcggcacgaccggcgggctcgccgcggtctccgcgggcggtctcggcaccgtcaccgtcgacgacgccgctctcttcaccgcccgcttcgcctccggcgccctcgccaccttcgaggcgtcccggttcgcgaccggccgcaagaactccctgcgcatcgaactcaacggcgagcgcggctcgttggccttcgacctggagcggctcaacgagctcgcgtaccacgaccacaccgaacccctcgcgcacgccggcttccgccgcatcctggtcaccgagcccgaccacccctacctggaagcctggtggccgccgggccacggcctcggctacgagcacaccttcgtccaccaggcccgcgacctggtccatgccatcgcggcgaaccaccgccccgagccgtccttcgccgacgggctgcaagtgcagcgcgtgctggcggcggtggaggagagcgccgccaagaactccgtctacacacccgtagtggtctga

SEQ ID NO: 114126 - protein, 402 aa, Streptomyces avermitilis MA-4680
MGQPHPRDEADAGKPPLGIGMVGYAFMGAAHSQGWRTVGRVFDLPSRPVLAAVCGRDGQAVRAMAERHGWAAAETDWRALIARDDVDVVDICTPGDSHAEIAVAALAAGKHVLCEKPLANTVEEAEAMAAAGEQAYRQGRLTMVGFNYRRLPATSLARRMVREGRLGTLRHVRVTYLQDWLVDPEFPLTWRLRREVAGSGALGDLGAHIVDLAQYLAGEPLAGVSALTETFVRERPLPGGTTGGLAAVSAGGLGTVTVDDAALFTARFASGALATFEASRFATGRKNSLRIELNGERGSLAFDLERLNELAYHDHTEPLAHAGFRRILVTEPDHPYLEAWWPPGHGLGYEHTFVHQARDLVHAIAANHRPEPSFADGLQVQRVLAAVEESAAKNSVYTPVVV

SEQ ID NO: 114127 - DNA, 1185 bp, Streptomyces avermitilis MA-4680; identical to SEQ ID NO: 51206
  CDS (1)..(1185): transl_table=11

SEQ ID NO: 114128 - protein, 394 aa, Streptomyces avermitilis MA-4680; identical to SEQ ID NO: 51207

SEQ ID NO: 114129 - DNA, 1134 bp, Rhodopirellula baltica SH 1
  CDS (1)..(1134): transl_table=11
atgaaacctctgaacattggcctgatcggctacggcttcatgggccgaacgcacaccaacggatatcgccaggcacctcgcttctttgacctggaataccatcccgtcttgaaagcggtttgcgctcgcaacgaagaaaaggccaaagccttcgctgagcaacaaggttacgagtcggtcgaaaccgattggcggaagctgctcgaacgcgatgacattgatgccgtcgacgtttgcacgcctaacaacttgcacaaagaaatctcgatcgccgccgcagaagctggcaagatggttttgtgcgaaaagcctttggcgatgaacaccgctgaaggcatcgaaatgtgcgaagcggttgaaaaggccggagttcgcaacatggtttggtacaactaccgtcgcgtccccgcggtgacgttggcgaaacaattgatcgacgaaggtcggctcggaaagatcttccactaccgcgccaacttcctgcaggactggacgatcaacgcggacgttcctcaaggcggtgcggcaacgtggcgtttggatgcggaagccgccggcagcggcgtgactggtgacttgctcgctcactgcatcgacaccgcactgtggctcaacggcagcattcaagatgtttcggcggtgacggaaacgtttgtcaaagaacgtgtgcactccgaaaccggtgaaaagactcccgtcaaaatcgatgacgcttgtgcgttccattgccacttcggcaacggttcgctcggcttgttcgagtcgacccgatacgcccgcggtcacaaggcgttgtacacgctggaaatcaacggcgagaacggttcgcttcgttgggatttgcacgatctgcatcgcctcgaattcttcgaccacaacgacgacagcatcgtccgcggatggcgcagcatccacgtcagcgatggcgatcagccttacatggcgaattggtgggttcccggattgcagatcggctatgagcacaccttcgtgcaccaagtcgctgacttcttgaagtcgctggaatcagaccagcccgctgcaccgactttccgtgatgcactggaaacccaacgtgtctgcgatgctgtgctagacagtgccgcaacacgcagctggaaagacgtgaagtga

SEQ ID NO: 114130 - protein, 377 aa, Rhodopirellula baltica SH 1
MKPLNIGLIGYGFMGRTHTNGYRQAPRFFDLEYHPVLKAVCARNEEKAKAFAEQQGYESVETDWRKLLERDDIDAVDVCTPNNLHKEISIAAAEAGKMVLCEKPLAMNTAEGIEMCEAVEKAGVRNMVWYNYRRVPAVTLAKQLIDEGRLGKIFHYRANFLQDWTINADVPQGGAATWRLDAEAAGSGVTGDLLAHCIDTALWLNGSIQDVSAVTETFVKERVHSETGEKTPVKIDDACAFHCHFGNGSLGLFESTRYARGHKALYTLEINGENGSLRWDLHDLHRLEFFDHNDDSIVRGWRSIHVSDGDQPYMANWWVPGLQIGYEHTFVHQVADFLKSLESDQPAAPTFRDALETQRVCDAVLDSAATRSWKDVK

SEQ ID NO: 114131 - DNA, 1134 bp, Photorhabdus luminescens subsp. laumondii TTO1
  CDS (1)..(1134): transl_table=11
atggaagagattcgtatcggcctaatcggtactggttacatcggacggacgcatgccattgcttacgcacaagcgccgactgttttccctctggcaggcaaactagtttgtgaaatggtagcggaagtttctgctgaactcgccgcaaaacggtctgagcaattaggtttccggcgttttactgataattggcgcaaattagtatcagatcccgatattcatgttgttgatatctgctcaccaaatttccttcataaagagatggctctcgaagcgatcaaacatggcaagcatgtttattgtgaaaaaccactggcactaaactcacatgatgcaaaattaatggtcgaagccgccaaaaaagccagagtgaaaacattagtcggttttaactatatgaaaaaccctaccgcacaactggctaaagagatcatttcgaatggtgaaataggtgaggttattcacttctacggcactcataacgaagattatatggccgatccattcactcctatccactggcactgtttcaaagataaagctggattaggtgcattaggcgatcttgctgctcatatcatcaatatggcgcagtacctggttggggatatccaaactgtttgcgcagacatgaccactgttatcaaacaacgcccggaaaaaaccggctctagcattatggttgcggtagaaaacgaagatcaagcacatgctatggtacgtttcaacagcggagcaaggggtattattgaaacctcccgtattgcttgcggtcgcaaaatgggtttgagctacaccattacaggaacaaaaggtgctttgagctttacacaagaaagaatggccgaactaaaactttaccgtcacgatgaaccagcaaaccgccaaggctttaaaactattcttattggaccagaacatcctgactatgcgccattctgtctcggtgcaggtcacggcatcggcttcaatgatcaaaaaacagtggaaatcagagacttgatcaatggcatcgccagcaataaagcgatatggccagatttcaccgaaggttggaaagtctcacgtattctggatgccattgctcattcttatcaagagcaacgttgggtgaatgtcactgaaattaattaa

SEQ ID NO: 114132 - protein, 377 aa, Photorhabdus luminescens subsp. laumondii TTO1
MEEIRIGLIGTGYIGRTHAIAYAQAPTVFPLAGKLVCEMVAEVSAELAAKRSEQLGFRRFTDNWRKLVSDPDIHVVDICSPNFLHKEMALEAIKHGKHVYCEKPLALNSHDAKLMVEAAKKARVKTLVGFNYMKNPTAQLAKEIISNGEIGEVIHFYGTHNEDYMADPFTPIHWHCFKDKAGLGALGDLAAHIINMAQYLVGDIQTVCADMTTVIKQRPEKTGSSIMVAVENEDQAHAMVRFNSGARGIIETSRIACGRKMGLSYTITGTKGALSFTQERMAELKLYRHDEPANRQGFKTILIGPEHPDYAPFCLGAGHGIGFNDQKTVEIRDLINGIASNKAIWPDFTEGWKVSRILDAIAHSYQEQRWVNVTEIN

SEQ ID NO: 114133 - DNA, 1137 bp, Yersinia pestis biovar Microtus str. 91001
  CDS (1)..(1137): transl_table=11
atgatgaaagaagtgcgtattggattgattggtaccgggtatatcggtaaggcgcacgccattgcctacgcacaggcaccgacggtgtttgaattgcgcggcaaactggtgcgcgaaatggtggccgaagtctcaccagcgctggcggcacagcgtgcgcaggctttcggtttcaaccggtttacctgcgactggcgggagctggtcgcggatccggctattgatgtggttgatatttgctcacctaattatctacataaagagatggcgctggcggccatccaccacggcaaacatgtctatgcggagaaaccgctggcgctgaatgcccgtgacgccagcgagatggcggcggccgcaacgcgcgctggggtgaaaacgttggtagggttcaattacatcaaaaaccccagtgcgaagctggctaaagagatcattgaacgtggtgaaatcggtgaggtgatccacttttatggcacccataacgaagactatatggccgatcccaatacccctattcactggcactgtttacacgcgacggcagggctgggagcacttggcgatctggcggcccacatcgtcagcatggcgcaatatctggtgggggaaataacgcaggtatgcggtgatctgaaaaccgtcgtggtgacacgcccggcgagcgttggctccagcgccagagtggcggttgaaaacgaagatcaggcccatgccatggtgcgttttgtgaatggcgctcagggagtgattgaagcctcgcgggtggcttgcgggcgcaaaatgggcctctcttacatgattaccggtactcaaggggcgatcagttttacccaagaacgtatggcggaactcaaactctacctgcacaacgacccggtcaaccgacaaggcttccgtaccctgctcgtcggcccggcgcacccagagtatgccgcgttctgtatggctgcgggccacggtattggttttaacgatcaaaaaaccgtggaagtgcgtgacttgatcgacggcatcgcgatggacacgccgctgtggcccgatttcgccgagggctggaaagtctcacgcattctcgatgcgattgctctgtctcatcaggatagccgctgggtgaatgtgaccgacattgtctga

SEQ ID NO: 114134 - protein, 378 aa, Yersinia pestis biovar Microtus str. 91001
MMKEVRIGLIGTGYIGKAHAIAYAQAPTVFELRGKLVREMVAEVSPALAAQRAQAFGFNRFTCDWRELVADPAIDVVDICSPNYLHKEMALAAIHHGKHVYAEKPLALNARDASEMAAAATRAGVKTLVGFNYIKNPSAKLAKEIIERGEIGEVIHFYGTHNEDYMADPNTPIHWHCLHATAGLGALGDLAAHIVSMAQYLVGEITQVCGDLKTVVVTRPASVGSSARVAVENEDQAHAMVRFVNGAQGVIEASRVACGRKMGLSYMITGTQGAISFTQERMAELKLYLHNDPVNRQGFRTLLVGPAHPEYAAFCMAAGHGIGFNDQKTVEVRDLIDGIAMDTPLWPDFAEGWKVSRILDAIALSHQDSRWVNVTDIV

SEQ ID NO: 114135 - DNA, 1083 bp, Aspergillus nidulans FGSC A4
  CDS (1)..(1083)
atggcctccaaaacgtggaacgtcggaatcgttggctacggcttcagtgcgaaaatatttcacatccccttcgtccaggaaaatccccaattcaagctgtatgctgttgtccagcggaccccaaagcctgacgatgacgccgaaaaggaccaccccgggatcaaatcctaccgcagcgctgaggacctcgtccaggatgcgggggtcgatgtagtcgttatcaccactgccccagactcacaccactatctggccaagttggcactggagaacggaaagcacgtcatctgcgagaaaccgtttaccccaacctacaaagaagccgctgagctcgtcgatatctccaagaagcagaacaagttcctcgccgtataccagaaccgccgctgggacgccgacttcgtcaccctctccaagctcgtaaaaaccggccagctcggccgcgtcgtcgaatttgaaacccacttcgaccgccaccgccctgaagaacccgctcctaccgtttcgaaatggaagaacaaggttgtacccggtggcagcgcgatccacgatcttggctctcacctgctcgatcaggcgctgtatctgctcggcaagccggagcgggtgacggggttcgtgggctcgcagcgcgaggtcaatacctccggctttcaggactcgttcacagttctgctgcactataagagcgggacgctggtgacggcgaaggcgggcgttgtgagtccggaggaagagcagttgaggttctgggttaggggagataagggcagtttcaagaagttccacctcgactgtcaagaggatcaactcaaggctggtatgaggccgggcgatagcggatacggcagagagccgagcgagagatacggaaccctgaccaccatcaaggacggcaagcccgtccgcgaggtcactcctacagtcgaaccccctacctattcagaatactacaggaagattgcccgcgctctggccggcgagggcgagctgcctgctagcggagaggaggcggctgaggttatccggctgattgaattggcgcaggagagttccaagcagggcaagacactggacttctaa

SEQ ID NO: 114136 - protein, 360 aa, Aspergillus nidulans FGSC A4
MASKTWNVGIVGYGFSAKIFHIPFVQENPQFKLYAVVQRTPKPDDDAEKDHPGIKSYRSAEDLVQDAGVDVVVITTAPDSHHYLAKLALENGKHVICEKPFTPTYKEAAELVDISKKQNKFLAVYQNRRWDADFVTLSKLVKTGQLGRVVEFETHFDRHRPEEPAPTVSKWKNKVVPGGSAIHDLGSHLLDQALYLLGKPERVTGFVGSQREVNTSGFQDSFTVLLHYKSGTLVTAKAGVVSPEEEQLRFWVRGDKGSFKKFHLDCQEDQLKAGMRPGDSGYGREPSERYGTLTTIKDGKPVREVTPTVEPPTYSEYYRKIARALAGEGELPASGEEAAEVIRLIELAQESSKQGKTLDF

SEQ ID NO: 114137 - DNA, 1176 bp, Bradyrhizobium sp. ORS278
  CDS (1)..(1176): transl_table=11
atggccatcacagcaagccaagaggccggccgacatgatcgcatacgcctcggcatggtcggcggcggacagggcgcgttcatcggcgccgtgcaccgcatcgccgcacggatcgacgaccagttcgagctgatcgcaggcgcgctcgcgtccgatccggcccgcgccaaggcctcggcgaaggagatcggcatcgccgacgatcgcgcctatggctcgttcgaagagatggcccgggccgaagccgcgcgcgccgacgggatcgaggcggtcgcgatcgtcacgccgaaccacatgcatgctcccgttgcgaaagctttcctgcgcgccggcatccacgtcatctgcgacaagccgctgacgacgactgtcgcggaagccgaggagctggtggcgctggtccgatcgacgggcaaggtgttcgtcgtgacgcacaactacaccggctatccgatggtgcggcaggcgcgcgcgatggtcgcgagcggcgaactcggcgacatccgcctggtgcaggcggagtacctgcaggactggctgaccgagcggctggagcagagcgatcacaagcaggcggcgtggcgcaccgacccagcgcgctccggacccggcggatgcatcggcgacatcggcacccatgcctacaatctcgcctgcttcgtcagcggcctcgcgctcgatgagctgctcgcgcagctgacgaccttcgtgccggggcggcgcctcgacgacgacgtccagatcctgctgcgctggaagggaggcgccaagggcatgctgtgggcgagccaggtcgccgtcggtcacgagaacggcctgagtttgcgcatctccggcagcaagggcgggctcgaatgggcccaggagaatccgaaccagctctggttcacgccctatggtcggcccaagcagctgctcacccgcggtggcgccggcgcgatcggcgcggccgcgcgcgtcacccgcatcccctccggccaccccgagggttatctggaaggctttgcgaccatctatgccgaggccgcgcacgccatccgcgccgcgagaaccggagacaggccccatcacgaggtgctgttcccgacggtcgaggacggcctggccggcgtgaagttcatcgatgcggcggtgaggtcgtcggcagcgaagggcgcgtggatccggatcggctga

SEQ ID NO: 114138 - protein, 391 aa, Bradyrhizobium sp. ORS278
MAITASQEAGRHDRIRLGMVGGGQGAFIGAVHRIAARIDDQFELIAGALASDPARAKASAKEIGIADDRAYGSFEEMARAEAARADGIEAVAIVTPNHMHAPVAKAFLRAGIHVICDKPLTTTVAEAEELVALVRSTGKVFVVTHNYTGYPMVRQARAMVASGELGDIRLVQAEYLQDWLTERLEQSDHKQAAWRTDPARSGPGGCIGDIGTHAYNLACFVSGLALDELLAQLTTFVPGRRLDDDVQILLRWKGGAKGMLWASQVAVGHENGLSLRISGSKGGLEWAQENPNQLWFTPYGRPKQLLTRGGAGAIGAAARVTRIPSGHPEGYLEGFATIYAEAAHAIRAARTGDRPHHEVLFPTVEDGLAGVKFIDAAVRSSAAKGAWIRIG

SEQ ID NO: 114139 - DNA, 1134 bp, Erwinia carotovora subsp. atroseptica SCRI1043; identical to SEQ ID NO: 51226
  CDS (1)..(1134): transl_table=11

SEQ ID NO: 114140 - protein, 377 aa, Erwinia carotovora subsp. atroseptica SCRI1043; identical to SEQ ID NO: 51227

SEQ ID NO: 114141 - DNA, 1212 bp, Propionibacterium acnes KPA171202
  CDS (1)..(1212): transl_table=11
atgggggtagtgatggagaagagacgaaccattggtgtcggcgtggtttcgctgggatggatggggaggctgcacactcgtgcgtacaaagcacttgccgaaaagtttccagagattgacgtaaatatccgactggtttcgtgttgcgatgtggtagcggaaaaccgaaggcaagcagtggaccggctgggattctgcactgcggttgaggactaccacgatctcatcggcaatcccgaagtagatgtcgtctccatctgcgcgccaaatttcctgcatcgcgatatcgctcttgccgctgcggaggtgggaaagccgttctggattgagaagccgatggggactaacgcgaagcagtcccgccaaatcgctgaagcagcagaggccaaggggctcgttacctcggtgggattcaactatcggcacactccctctatcgagttcgcacgccagctgatagctgatggtcgcctggggacggtgaccaatgccagggcatggctcatcgcggactacgcgtctgatccgcacgggccactgacgtggcgttatgacagggagcgggccggtgccggcgtcatcctcgatctcatgggtcacggagaggatctcgtccagtatctactcaaagggagattcactgaggtgtccgctgtgtccgagacgttcatccgtcagcgtcccaagccactcaaggagggcatcggccacacaggttgggtcgtctcggacgagctcgggccggtgggcaacgaggattattgcgctgtcatcgcccgtatggaaaacggagtgatgtgcaccctggagtccagtcgggtcagtgttgggccgcgcgcggagtacatcgtcgagatctatggaaccgacggatcaatccggtggaacttcgaggatctcaaccatttgcaggtctgtctggggcgaaacaatcgtgccctgcagggatatgtcaactgcatggccggaccagacttcccggagttcatgcgtttccaaccgggagccggaacatccatgggcttcgacgacatgaaggtcgttgaggctgcgaaattcgtccgaggggtcttggatgggcagcaatatggcccatctgtcgccgatggttgggcctcagcggaggtcaatgacgcgatcgttgcctcctgtggggaccatgcctggcatgacgtgaagccggtttcggggagaaccacgttcgataagtga

SEQ ID NO: 114142 - protein, 403 aa, Propionibacterium acnes KPA171202
MGVVMEKRRTIGVGVVSLGWMGRLHTRAYKALAEKFPEIDVNIRLVSCCDVVAENRRQAVDRLGFCTAVEDYHDLIGNPEVDVVSICAPNFLHRDIALAAAEVGKPFWIEKPMGTNAKQSRQIAEAAEAKGLVTSVGFNYRHTPSIEFARQLIADGRLGTVTNARAWLIADYASDPHGPLTWRYDRERAGAGVILDLMGHGEDLVQYLLKGRFTEVSAVSETFIRQRPKPLKEGIGHTGWVVSDELGPVGNEDYCAVIARMENGVMCTLESSRVSVGPRAEYIVEIYGTDGSIRWNFEDLNHLQVCLGRNNRALQGYVNCMAGPDFPEFMRFQPGAGTSMGFDDMKVVEAAKFVRGVLDGQQYGPSVADGWASAEVNDAIVASCGDHAWHDVKPVSGRTTFDK

SEQ ID NO: 114143 - DNA, 1134 bp, Yersinia pseudotuberculosis IP 32953
  CDS (1)..(1134): transl_table=11
atgaaagaagtgcgtattggattgattggtaccgggtatatcggtaaggcgcacgccattgcctacgcacaggcaccgacggtgtttgaattgcgcggcaaactggtgcgcgaaatggtggccgaagtctcaccagcgctggcggcacagcgtgcgcaggctttcggtttcaaccggtttacctgcgactggcgggagctggtcgcggatccggctattgatgtggttgatatttgctcacctaattatctacataaagagatggcgctggcggccatccaccacggcaaacatgtctatgcggagaaaccgctggcgctgaatgcccgtgacgccagcgagatggcggcggccgcaacgcgcgctggggtgaaaacgttggtagggttcaattacatcaaaaaccccagtgcgaagctggctaaagagatcattgaacgtggtgaaatcggtgaggtgatccacttttatggcacccataacgaagactatatggccgatcccaatacccctattcactggcactgtttacaagcgacggcagggctgggaacacttggcgatctggcggcccacatcgtcagcatggcgcaatatctggtgggggaaataacgcaggtatgcggtgatctgaaaaccgtcgtggtgacacgcccggcgagcgttggctccagcgccagagtggcggttgaaaacgaagatcaggcccatgccatggtgcgttttgtgaatggcgctcagggagtgattgaagcctcgcgggtggcttgcgggcgcaaaatgggcctctcttacatgattaccggtactcaaggggcgatcagttttacccaagaacgtatggcggaactcaaactctacctgcacaacgacccggtcaaccgacaaggcttccgtaccctgctcgtcggcccgacgcacccagagtatgccgcgttctgtatggctgcgggccacggtattggttttaacgatcaaaaaaccgtggaagtgcgtgacttgatcgacggcatcgcgatggacacgccgctgtggcccgatttcgccgagggctggaaagtctcacgcattctcgatgcgattgctctgtctcatcaggatagccgctgggtgaatgtgaccgacattgtctga

SEQ ID NO: 114144 - protein, 377 aa, Yersinia pseudotuberculosis IP 32953
MKEVRIGLIGTGYIGKAHAIAYAQAPTVFELRGKLVREMVAEVSPALAAQRAQAFGFNRFTCDWRELVADPAIDVVDICSPNYLHKEMALAAIHHGKHVYAEKPLALNARDASEMAAAATRAGVKTLVGFNYIKNPSAKLAKEIIERGEIGEVIHFYGTHNEDYMADPNTPIHWHCLQATAGLGTLGDLAAHIVSMAQYLVGEITQVCGDLKTVVVTRPASVGSSARVAVENEDQAHAMVRFVNGAQGVIEASRVACGRKMGLSYMITGTQGAISFTQERMAELKLYLHNDPVNRQGFRTLLVGPTHPEYAAFCMAAGHGIGFNDQKTVEVRDLIDGIAMDTPLWPDFAEGWKVSRILDAIALSHQDSRWVNVTDIV

SEQ ID NO: 114145 - DNA, 1086 bp, Symbiobacterium thermophilum IAM 14863
  CDS (1)..(1086): transl_table=11
atgaaaccctaccgcatcggcatcgtaggttacagcttcggacgcatccacgcagaggcctaccgccagatcccgttctacctggacgtcggcgcaccgatcgagctggtgggggtcgcgaccagccgccccgagaccgcccggcaggcgcaggccgaggccggcttcgctcttgccaccgccgactggcgcgagctcgtcgcctcgcccgatgtcgacatcatccacgtctgcacgccggacgacctgcaccaccccatcgccgccgcagcactggcggccggcaagcacgtctactgcgagaagcccctggcccggacggtggcggaggcggaggacctgtacgacagggcccgggcgtcgggccgggtggcccagatcgccttccagatgcgcttcggctccgccgtccaggcggcgcgccgcctgatccgggacggcaccctgggcgagatcaccagctttcggctcaccttcctgcactcgggctacgaggacccggagcgtcccctcacgtggcggctggacagcgcacgcaccgggggcggcgtgctctacgacctgggatcccacgccgtcgacctgctcacgttcctgctgggccgtccccgccgggtgatgggcctcacccggaccttcatcaaggagcggcctgtggcgacaggcagcgaccggaaggcgccggtgaaggtcgacgacgtcgccctggtgacgatggagatggaggccggctgcgtcggcgtgatggaggcgacccggctcgcgacgggggtgcgcagggggccggacctgacgatctacgggacccgggggtcggtggccttcaacgggttcaccaaccacaacgagctgaacctctacctgaagcaggagaaggtgcccggcctcagcgggtgggagaccatcaacaccggcggccgcaacccggtgccgctcagcgtggccgcccaggctgcgttcctgacggccgtccgggatggccggacggatgcggagcccaactttgccacgggcctgcaggttcagcgggtgctggcagcggtgcaggagtcggcccggacgggacagtgggtgtccgtggattga

SEQ ID NO: 114146 - protein, 361 aa, Symbiobacterium thermophilum IAM 14863
MKPYRIGIVGYSFGRIHAEAYRQIPFYLDVGAPIELVGVATSRPETARQAQAEAGFALATADWRELVASPDVDIIHVCTPDDLHHPIAAAALAAGKHVYCEKPLARTVAEAEDLYDRARASGRVAQIAFQMRFGSAVQAARRLIRDGTLGEITSFRLTFLHSGYEDPERPLTWRLDSARTGGGVLYDLGSHAVDLLTFLLGRPRRVMGLTRTFIKERPVATGSDRKAPVKVDDVALVTMEMEAGCVGVMEATRLATGVRRGPDLTIYGTRGSVAFNGFTNHNELNLYLKQEKVPGLSGWETINTGGRNPVPLSVAAQAAFLTAVRDGRTDAEPNFATGLQVQRVLAAVQESARTGQWVSVD

SEQ ID NO: 114147 - DNA, 1176 bp, Bacillus clausii KSM-K16
  CDS (1)..(1176): transl_table=11
atggagaaaaaagaacttcgcattggtttaattggctatcagtttatggggaaagcacatagccatgcataccgtgatattcctttctttttcgatgttgaggcaaagccggttttaaaggtcgtttgcggtcgcaatgaggaagctgtgcaacaagcggcagaaaaaatgggattcgaatcttacgaaacggattggcgcaaagttgtggaacgtgatgacattgatgtcattgacatcgtgacgccgaacaacacacatgcagaaatcgcaatcgccgcggcaaaagcaggcaaacatgtcatcaccgaaaagcctctagcgatgaatctagacgaagcgcagcgtatgcatgccgcagttacggaaaatcatgtgatccatatggtgtgccacaattaccgctatgtgcctgctgtccagctagctaaacagctcgttgcgtcgggaaagcttggagaaatctatcattttcgtgctcgttatttacaagactttattatgagcccttcctttccgctaacatggcgtctcgatcaaaaggtgtctggttctggcgcacttggggatattgcagcccatagcctcgacattgcccgctttttagttggtgaaatcaatgaagtcgttgccaccgcaaagacatttattaaagagcggccaatcggctctatgacgggagggctaagcgcgaaagtaagcgaagggaaaatggcgcctgttaccgttgatgacgccactgcgattattgctaaatttgaaaatggcgcccttggcacgtttgaagcgacacgttttgctggcgggaaccgcaatcgaaatgaatttgaaatcaacggtgaacatggatctgtgcgttggaatatggaaaacatgaatcagttggaagtgtactttgctcacgacgaagaaggtttgcaagggtttcggacgatcgacgtaaccgaagccagccatccttatgttggatcctattgggccgctggccatatgattggttatgaacacacctttattcatttgttgtatgaattcctccaaggcattgcccgtggcgagcagccaaaacctgattttgctgacggtttgcgcaaccaagctgttcttactgccatagaacaatcgattcaacagcaacgttgggtcaatgtcgaggaactgcttgtaaagagttag

SEQ ID NO: 114148 - protein, 391 aa, Bacillus clausii KSM-K16
MEKKELRIGLIGYQFMGKAHSHAYRDIPFFFDVEAKPVLKVVCGRNEEAVQQAAEKMGFESYETDWRKVVERDDIDVIDIVTPNNTHAEIAIAAAKAGKHVITEKPLAMNLDEAQRMHAAVTENHVIHMVCHNYRYVPAVQLAKQLVASGKLGEIYHFRARYLQDFIMSPSFPLTWRLDQKVSGSGALGDIAAHSLDIARFLVGEINEVVATAKTFIKERPIGSMTGGLSAKVSEGKMAPVTVDDATAIIAKFENGALGTFEATRFAGGNRNRNEFEINGEHGSVRWNMENMNQLEVYFAHDEEGLQGFRTIDVTEASHPYVGSYWAAGHMIGYEHTFIHLLYEFLQGIARGEQPKPDFADGLRNQAVLTAIEQSIQQQRWVNVEELLVKS

SEQ ID NO: 114149 - DNA, 1149 bp, Pseudomonas syringae pv. syringae B728a; identical to SEQ ID NO: 33527
  CDS (1)..(1149): transl_table=11

SEQ ID NO: 114150 - protein, 382 aa, Pseudomonas syringae pv. syringae B728a; identical to SEQ ID NO: 33528

SEQ ID NO: 114151 - DNA, 1107 bp, Pseudomonas fluorescens Pf-5; identical to SEQ ID NO: 33529
  CDS (1)..(1107): transl_table=11

SEQ ID NO: 114152 - protein, 368 aa, Pseudomonas fluorescens Pf-5; identical to SEQ ID NO: 33530

SEQ ID NO: 114153 - DNA, 1116 bp, Novosphingobium aromaticivorans DSM 12444
  CDS (1)..(1116): transl_table=11
atgcgacgtttgcgaatggggatgatcggcggtgggccgggggcgttcatcggccccgtgcaccgctttgcggcggaactcgaccgcgagatcgaactggtggctggcgttttctccagcgatgcaggccgcagcgcggccgcgggcgagagctaccggatcgattcggcgcgcgcctatccctcgctcgaagcgatgtttgccggcgaggccgcccgcgacgatggcatcgatttcgtttccatcgtcacgcccaatcacaatcacctgccctcggcgcgcgcggcgctcgcggcgggctatccggtcatcacggacaagccgctgaccgccactctcgacgaggcgcaccagcttgccggggtcgtcgctgccgcaggcaagccgttcggcgtgacctatacctattccggctatccccttgtccgcgaggcgcgcgcccgcgttgccgcaggagagatcggcaccgtgcgcaaggtcgtggtcgagtatccgcagggctggcttgcgggaccggccgaaggcaagcaggccgaatggcgggtcgatcccgcgcgcgccgggcttggcggctgcatcggcgacatcggcgtccatgcctttcagcttgcggaattcgtcaccggcctgcgcgtgaccgaactcctcgccgatctcggctcggtcgtccctgggcgcctgctcgacgacgattgctcgatccttctgcgcttcgaaaacggcgcgcgcggcgttctgctcgccagccagatcgaagtgggtgaactcaacggcctgcgcattcgcgcctatggcgacatgggcggcattgtctggcggcaggaggagcccaacacgctcaccatcagccgcctcgacggcacatgcacgctggtccgttccggcaccggtgtgctcggcgccgacgcagcctcgcggacccgtaccccaggtggacatccggagggttatctcgaagcctttgcaaatctttaccgcgacttcgcggccatcgtccgaggtgacgccgcgccgctcctgcccggtatcgcagagggcgtgcgcggcatgaccttcatccacaaggccgttaccgccagccgcgagaatgccggctgggtcaagctcgaagactga

SEQ ID NO: 114154 - protein, 371 aa, Novosphingobium aromaticivorans DSM 12444
MRRLRMGMIGGGPGAFIGPVHRFAAELDREIELVAGVFSSDAGRSAAAGESYRIDSARAYPSLEAMFAGEAARDDGIDFVSIVTPNHNHLPSARAALAAGYPVITDKPLTATLDEAHQLAGVVAAAGKPFGVTYTYSGYPLVREARARVAAGEIGTVRKVVVEYPQGWLAGPAEGKQAEWRVDPARAGLGGCIGDIGVHAFQLAEFVTGLRVTELLADLGSVVPGRLLDDDCSILLRFENGARGVLLASQIEVGELNGLRIRAYGDMGGIVWRQEEPNTLTISRLDGTCTLVRSGTGVLGADAASRTRTPGGHPEGYLEAFANLYRDFAAIVRGDAAPLLPGIAEGVRGMTFIHKAVTASRENAGWVKLED

SEQ ID NO: 114155 - DNA, 1080 bp, Acidobacteria bacterium Ellin345
  CDS (1)..(1080): transl_table=11
atgaaaactctcaacctcgccatgatcggccagggctttatgggccgggcgcactccaacgcctttcaccaggtcaaccacttcttcgataccgccttcaacctcaacttgaacgtcgtctgcggacgcgatgaaaacaagcttcgcgaggtggcttcgcgctggggctggtccgagaccgaaaccgattggcgcaaactcattgatcggccagatatcgacgtgatcgacattggagcgccgaaccatctccatgcggagatcgccatcgcggcggccgaggcaggcaagattgtttggtgcgagaagccgctggctatggacgtcgccgaagccgagcgcatggtgaaagccgtggcgggaaaaccgaatctcgtctggttcaactaccgtcgcgtgcctgcgatcgcgttcgcccggcagcttattggcgacggacgcattggcgaggtttaccactaccgcgctacctacctgaacagcagcggactcaacgcaacgcgcggcaacacctggcgctacaagaaagaaactgccggttccggcgccgccggcgatttgctctcgcacctgatcgatctcgcgctctggctcaatgggccgatcagcgaagtctgcgggttgctcaagacgtttgttcccggccgcgaggtggacgacgctgccatcaccatggcgcgcttcgccaacggcagcgtcgggacgctcgaagccacgcgctacggcaccggcaatcgcaaccgcaacatgttcgagatccacggctcaaagggcgcgctcgttttcaacctcgaagatatgaaccgcctccagttctacgacgtcaacgacgcgccggagaatggcatgcggacgatcctcgctaccggcccagggcatccgtacgtgaacgacttctggcctccgggacacctcatcgggtacgaacacagcttcatcgcaacgcttgccgacttccttaaagcgctgcatgaaggaacggagtttcacgcgaacttcgaagacgggctgaaagtgcagaagctggtggcggcggtggaggaatcggcggagaagaagaaatggacgacactggcttaa

SEQ ID NO: 114156 - protein, 359 aa, Acidobacteria bacterium Ellin345
MKTLNLAMIGQGFMGRAHSNAFHQVNHFFDTAFNLNLNVVCGRDENKLREVASRWGWSETETDWRKLIDRPDIDVIDIGAPNHLHAEIAIAAAEAGKIVWCEKPLAMDVAEAERMVKAVAGKPNLVWFNYRRVPAIAFARQLIGDGRIGEVYHYRATYLNSSGLNATRGNTWRYKKETAGSGAAGDLLSHLIDLALWLNGPISEVCGLLKTFVPGREVDDAAITMARFANGSVGTLEATRYGTGNRNRNMFEIHGSKGALVFNLEDMNRLQFYDVNDAPENGMRTILATGPGHPYVNDFWPPGHLIGYEHSFIATLADFLKALHEGTEFHANFEDGLKVQKLVAAVEESAEKKKWTTLA

SEQ ID NO: 114157 - DNA, 1104 bp, Silicibacter sp. TM1040
  CDS (1)..(1104): transl_table=11
atgtcggaaatcggtatcggtatccttgggggtggctacatgggcaaggcgcatgcggtggccatggccgcggtcggagcggtcttcaacacggctcttcgccctcgcttggaaatggtctgcgcttcttctccagatagtgccgagcgctatcggcaggcctatggttttgcccgtgcgaccgcggattggagagagcttgttcacgatccacgcgtggaagcggtagtcattgctacgccacaagaggttcatcgtcagatcgcagaggcatgctttgcgttgggtaaaccggtgctgtgtgaaaaacccatgggtgcatcgctcgcggacagtgcagccatggtcgcggccgccgaagcctccggagtcgcgaatatggtgggtttcaactacatccgcacccctgcgagccaatttgcccgcgccctggttgctgccggtgacattggtgagatcacctggttccgcggcgaacacaccgaggatttttatgctaaccccgagaccccggcgagctggcgaaccagtggcatggcaaatggaaccatgggggacttggcgccacatatggtcaatgcggcactggcactgatcggaccgatcgcgcgtgtcatggctgaggttgaaaccgttcacaaagaacgaccgggcggccaggtcacaaatgacgatcacgctcagatgatgtgccgctttgagaacggggccatggggcagatgtatttcagccgcatcgcgacaggacgcaagatgggctatgcctatgagatcacaggaacaaaaggtgcgatccgctttgatcaagaagatcagaacgcgctgtggctctatcgtatggaaggtccagaagcagagcgaggattccgcaagatcctcactggtcccgcccacccggattacgaacctttctgtcaggggccggggcacggaacgggctatcaggaccagatcatcattgaggcgcgggatttcctgcgcgcgatcgagaccggtgaagcgcagtggcccacgtttcgcgacgggcatgacgtaaaccgggtaatcgctgcggggctggccgcatccgagagcaaaacctggaaagatatcaaagatttctaa

SEQ ID NO: 114158 - protein, 367 aa, Silicibacter sp. TM1040
MSEIGIGILGGGYMGKAHAVAMAAVGAVFNTALRPRLEMVCASSPDSAERYRQAYGFARATADWRELVHDPRVEAVVIATPQEVHRQIAEACFALGKPVLCEKPMGASLADSAAMVAAAEASGVANMVGFNYIRTPASQFARALVAAGDIGEITWFRGEHTEDFYANPETPASWRTSGMANGTMGDLAPHMVNAALALIGPIARVMAEVETVHKERPGGQVTNDDHAQMMCRFENGAMGQMYFSRIATGRKMGYAYEITGTKGAIRFDQEDQNALWLYRMEGPEAERGFRKILTGPAHPDYEPFCQGPGHGTGYQDQIIIEARDFLRAIETGEAQWPTFRDGHDVNRVIAAGLAASESKTWKDIKDF

SEQ ID NO: 114159 - DNA, 1086 bp, Myxococcus xanthus DK 1622; identical to SEQ ID NO: 51238
  CDS (1)..(1086): transl_table=11

SEQ ID NO: 114160 - protein, 361 aa, Myxococcus xanthus DK 1622; identical to SEQ ID NO: 51239

SEQ ID NO: 114161 - DNA, 1164 bp, Rubrobacter xylanophilus DSM 9941; identical to SEQ ID NO: 51240
  CDS (1)..(1164): transl_table=11

SEQ ID NO: 114162 - protein, 387 aa, Rubrobacter xylanophilus DSM 9941; identical to SEQ ID NO: 51241

SEQ ID NO: 114163 - DNA, 1191 bp, Rubrobacter xylanophilus DSM 9941; identical to SEQ ID NO: 33545
  CDS (1)..(1191): transl_table=11

SEQ ID NO: 114164 - protein, 396 aa, Rubrobacter xylanophilus DSM 9941; identical to SEQ ID NO: 33546

SEQ ID NO: 114165 - DNA, 1191 bp, Mesorhizobium sp. BNC1
  CDS (1)..(1191): transl_table=11
atggtttccgcatccgcgacgacattggccgctcggccggtccgcctgggcatggtgggaggagggcagggcgcgttcatcggcgccgttcaccgcatggcggcccgccttgacggacattttattcttctcgccggcgcgctttcctccgatcctgagcgcgccaggacatcaggtgccgatctcgggctagagcccgatcgctgctacggcagtttccaggagatggcagaaaaggaggctgcgcggccggacggcatcgaggcggtgagcatcgttacgcccaaccacatgcattatccggcggcgaaggcctttctggaagccggcattcacgtcatttgcgacaagcctctgacgtccagcctggaggatgccaaggccctggccgagacggtgaagagaagcggaaagctcttcgtgctcacccataattactccgggtatcccatgatccgtcaggcgcggcagatggtcggggatggtgcgctgggcgaaatcattcttgtccaggcggaatatccgcaggactggctcgcagagccggtcgagcagagcggcaacaagcaggcatcctggcgcacggatcccagccgctcgggggtgggcggagcaatcggcgatatcggaacccacgcatatcaactcgtcaccttcgtcacgggtttgcacgccgagagcctggccgccgatctcgatcgtttcgtgccgggccggcagctcgatgacaacgcgcatatcatgctgcgtttcggcgagcgcggcgggcggcgcgccaagggtatgatctgggccagccaggtggcaccgggtaacgaaaacgggctgaagctgagggtctatggaaccaggggcggattggaatgggtgcaggccgatccgaattatctctggttcaccccgcttggcgagccgaaaaggctgctgacgcgcggcggcgcgggcgcgggtccggcggcggccgcggtcacgcgcattccgggcggccatccagaaggttatctggaggcgttcgcaacgctctatacggaagcggcaaaagccattcgcgcggttcagagcggcgggccgcctcctgaagatctggtgcttccaacggtcgaggatggcctggaggggatgcgcttcattcaggcctgcgtgaattcctcgcacaaggatgccgcctggacccgcctggatacgctttga

SEQ ID NO: 114166 - protein, 396 aa, Mesorhizobium sp. BNC1
MVSASATTLAARPVRLGMVGGGQGAFIGAVHRMAARLDGHFILLAGALSSDPERARTSGADLGLEPDRCYGSFQEMAEKEAARPDGIEAVSIVTPNHMHYPAAKAFLEAGIHVICDKPLTSSLEDAKALAETVKRSGKLFVLTHNYSGYPMIRQARQMVGDGALGEIILVQAEYPQDWLAEPVEQSGNKQASWRTDPSRSGVGGAIGDIGTHAYQLVTFVTGLHAESLAADLDRFVPGRQLDDNAHIMLRFGERGGRRAKGMIWASQVAPGNENGLKLRVYGTRGGLEWVQADPNYLWFTPLGEPKRLLTRGGAGAGPAAAAVTRIPGGHPEGYLEAFATLYTEAAKAIRAVQSGGPPPEDLVLPTVEDGLEGMRFIQACVNSSHKDAAWTRLDTL

SEQ ID NO: 114167 - DNA, 1179 bp, Rhodococcus sp. RHA1
  CDS (1)..(1179): transl_table=11
atgacttccaactcgatcggtgtcgccgtcatcggcggcggcatggccggacgagcgcacgccgccggatatcgcatggcgtcgacgctgttcggaaccgaccgccccgacgtgcgtctggtcgcgattgccgacaccaaccaggccgtcgccgacgacaccgcgaagcggtacgggtacgagcgggccgagtacagctggcaggccatcgccgaatcgccggacatcgacgccgtcagcgtcgtcgtcgccaaccagctgcatcgggagatcgtcgaaggcctcctcgctgcggggaagcacgtgctgtgcgagaagcccctggccgggtccatcgcggacgccgaggccatggtcgcggccgccgcggacgccgacacgatcgcgacggtcgggtacacctaccgccggtcgccggccatccaggcgatccgcgacgaactcgcgacgggccgcctcggcgacatcatccacttcaacgggcactactggtgcgactacggcctcgaccccgcctcgccgatcacctggcggtaccgcggcggtcccggaaccggtgcgctggcggacgtcggcagccacctgctcgacatggccgaattcgtgtgcggtccgatcgtcgagatcagtggcgcgaccttcgccacggtgatcacggagcgtcccgtgcctgccggagtcacctacggccacaccaaggccgagaccaccggtgagatggcacccgtcgagaacgaggacctcgcgacgttcacggcgcgcttcgagaacggcgcggtcggaacgttctccgcttcccgtgtcgcgcaccagcttccggacgggctcggtttcgagctgttcgggacgtccggctccgcggcgttcgacctggctcgcgcagcggaattctcggtgtccagcgagggcctcgaccgcaccgtgaacggtcagcgtcgggtgatcatcggaccgcagcacccgtacatccagggcggcctgccgatggatgccggcggcgtcggccacggcaaggcggagttcttcgcctaccaggcccgtgcgttcctcgaccagatcgccggcatcgacgtcctcggcccgctgccgtccttcgcccacgccctgcgcggcatgcagatcgtcaccgccgtcgcggagtccgcccgcgccgacggagcagcagtcaagatcggctga

SEQ ID NO: 114168 - protein, 392 aa, Rhodococcus sp. RHA1
MTSNSIGVAVIGGGMAGRAHAAGYRMASTLFGTDRPDVRLVAIADTNQAVADDTAKRYGYERAEYSWQAIAESPDIDAVSVVVANQLHREIVEGLLAAGKHVLCEKPLAGSIADAEAMVAAAADADTIATVGYTYRRSPAIQAIRDELATGRLGDIIHFNGHYWCDYGLDPASPITWRYRGGPGTGALADVGSHLLDMAEFVCGPIVEISGATFATVITERPVPAGVTYGHTKAETTGEMAPVENEDLATFTARFENGAVGTFSASRVAHQLPDGLGFELFGTSGSAAFDLARAAEFSVSSEGLDRTVNGQRRVIIGPQHPYIQGGLPMDAGGVGHGKAEFFAYQARAFLDQIAGIDVLGPLPSFAHALRGMQIVTAVAESARADGAAVKIG

SEQ ID NO: 114169 - DNA, 1137 bp, Haemophilus somnus 129PT; identical to SEQ ID NO: 51242
  CDS (1)..(1137): transl_table=11

SEQ ID NO: 114170 - protein, 378 aa, Haemophilus somnus 129PT; identical to SEQ ID NO: 51243

SEQ ID NO: 114171 - DNA, 1125 bp, Hyphomonas neptunium ATCC 15444
  CDS (1)..(1125): transl_table=11
atgacgcggacttacaacattgcgctaatcggcacgggctatatcggaaagacccacgctatcgcctatcagggcgtcaatgtcgttttccccgagacaccccggctcgtgagaaagctggtcatagacatcaatgaagaagccggacgcaccttcgccaaccagttcgggtttgaaggcttctctaccaactggcgggacgccatcacgcgcaccgatatcgacatcgtcgcgattgcaaccccgaactatctgcatgcggagatggcaattgctgccttggagcacggcaagcatgtctattgcgaaaagcccctggccgtcacggtcgaagacgccgccgccatggctgcggccgccgccctttaccctggccggacgcttgtcggttacaactatctctgcaacccgattgttcaactcgcaaagcagctcatatccgaaggccggatcggcaagcccctcttcttccgcggcgtgaatgacgaagactatatggccgatccgcagacgccccacagctggcgctgcgaacgccacaaggctggcccaggcaccctgggtgacctcgccactcatcttatcagcatgtccgagttccttatgggcgaaatcacggacgtttcaggtcatctgtacacggcacacacaacgcgtccctctccatcagatgtcgaggtgcagctacctgtggagaatgacgacatcgtctcgatggtcgtatcctacaaaagcggcgcgcgcggcgaactctcctccagccgtatagcatggggccgcaagaaccgcctcgccttcgaaattcatggggagcgaggttcgatcctttttgatcaggaacgccttaacgagcttgaactctactcatcgggcggcccggcccatagcaacggtttccagaagatcctggccggccctgcgcatgagccctacggcgcgttcatcaaatcgacaggtcaccagctaggcttcaacgacctcaagataatcgaagtgcgcaaccttcttgttggcctcgaaagcgaaagccgatcctatccggcattcgaggatgccctacgcgtcgagcaggtcatcaacagcgtcctccgctcagcagacgccggccaatcagtaaatatctaa

SEQ ID NO: 114172 - protein, 374 aa, Hyphomonas neptunium ATCC 15444
MTRTYNIALIGTGYIGKTHAIAYQGVNVVFPETPRLVRKLVIDINEEAGRTFANQFGFEGFSTNWRDAITRTDIDIVAIATPNYLHAEMAIAALEHGKHVYCEKPLAVTVEDAAAMAAAAALYPGRTLVGYNYLCNPIVQLAKQLISEGRIGKPLFFRGVNDEDYMADPQTPHSWRCERHKAGPGTLGDLATHLISMSEFLMGEITDVSGHLYTAHTTRPSPSDVEVQLPVENDDIVSMVVSYKSGARGELSSSRIAWGRKNRLAFEIHGERGSILFDQERLNELELYSSGGPAHSNGFQKILAGPAHEPYGAFIKSTGHQLGFNDLKIIEVRNLLVGLESESRSYPAFEDALRVEQVINSVLRSADAGQSVNI

SEQ ID NO: 114173 - DNA, 1116 bp, Rhizobium leguminosarum bv. viciae 3841
  CDS (1)..(1116): transl_table=11
atgaagccactcggcatcggtttgatcggcaccggttatatgggcaagtgccatgcattggcgtggaatgcggtgaagacggtgttcggcgatgtcgagcgtccgcgtctcgtgcatctggccgaagccaatgccgggcttgctgaggctcgtgccggtgaattcggtttcgagaaggcgacggccgactggcgggcgctgattgccgaccccgaggtcgacgtcgtctccgtcaccacgcccaatcagttccacgccgagatggcgattgaagcccttgcggccggcaagcatgtctggtgcgaaaagccgatggcgccggcctatgccgacgccgagcgcatgctggaaacggcgaagaaatcaggcaaggttgccgcccttggctataattacatccagaatcctgtcatgcggcatatcaggacgctgatcggcgagggcgctatcggcacggtcaaccacatccgcgtcgagatggacgaggatttcatggccgatcccgatgtcttcttctattggaagagcgagctttccgccggctacggcgcgctcgacgatttcgccgtgcacccgctgtcgctgctctggtatctcttcggccatgtcgaggccgtcataacggatatggtcaaaccctatgccgaccgcccgctgagcgagggcggtcgccgtgccgtcgaaaaccacgatggcgccaacgtgctgatgcggcttggcggcggcatctccgccgtgttgatggcgaatcgcgccgcctggggtcgcaagggccgcatcgccctgcagatttttggctcgaaaggctcgatcgtctacgaccaggagcggatgaacgaattcgaactctatcaggccgacggtcgcggctccgagcagggcttccgcaagatactggcggcacccgcccatcagccttatgatcggtttatcccggcaccaggccacggcctcggcttcaacgatctgaagatcatcgaatgccgtgagctgatccgggcaatatcgggcgagccgtcgtcgatcgtgacattcgaagacggtctcaggatagagaagtcggtgcatgccatggcacagtcgttccacgagcgccgctggatcgagatcggctga

SEQ ID NO: 114174 - protein, 371 aa, Rhizobium leguminosarum bv. viciae 3841
MKPLGIGLIGTGYMGKCHALAWNAVKTVFGDVERPRLVHLAEANAGLAEARAGEFGFEKATADWRALIADPEVDVVSVTTPNQFHAEMAIEALAAGKHVWCEKPMAPAYADAERMLETAKKSGKVAALGYNYIQNPVMRHIRTLIGEGAIGTVNHIRVEMDEDFMADPDVFFYWKSELSAGYGALDDFAVHPLSLLWYLFGHVEAVITDMVKPYADRPLSEGGRRAVENHDGANVLMRLGGGISAVLMANRAAWGRKGRIALQIFGSKGSIVYDQERMNEFELYQADGRGSEQGFRKILAAPAHQPYDRFIPAPGHGLGFNDLKIIECRELIRAISGEPSSIVTFEDGLRIEKSVHAMAQSFHERRWIEIG

SEQ ID NO: 114175 - DNA, 1170 bp, Rhizobium leguminosarum bv. viciae 3841
  CDS (1)..(1170): transl_table=11
atgtctgaagtcagagttgcagtgcttggcgcctcgggctggatgggaaaggtccacacgatggcctaccagacctttccgcacttcttcggagtgtcggacggaacggcacggatcgtcgctctcgtcgaaggtccctcgaagacagccggggatctttctcacagggcgccgggtgcaagaattcttcaggattggaatctcgcggtcgctgatccggatgtcgatctgatcgatatctgcctgcctgaccaccttcattaccaggtggccaaggcggccttgctggccggcaaacatgtctattgcgagaagccgttggcaaacaccgcctccgaagcgcgggaactggccgacatcgccagggaaaagggtgtcattacccgcgtcggacacgcctttccccggaaccccgtccatgatctggcgaaagacatcattcagtccggcgaaatcggcgagatcaagctgttccgcggctgccagcacgtcgacatgtatggcgatccgaacgcgcccttcatgtggcgggccgacggaaagctcgcgccgaccgggatcgtcggtgataccggctcgcacatcttcagcttcatggatttcctggtcggccgcgtcagttccctgatcgccgacaatctcatcgtgacgccgcgtcggcctgtcgtcgagggccttgcctatggcgagcaggtgaaactctcaggcaacgagtcctgggctgatatcaccaatcctgatgcaacgaacctgctgtgccggttcgagaacggcgccggcggggtcgtcgatttcagccgtgtcgcgaccggccgcaagttcatgcagacctacgaaatttatggaacgaaaggcagcatcgcctatacctatgacgagataaaccggctgcgcttctactccaacgacgaccggacggggcggcgcggcttccgggagatcgacgtgggtccggagaaccccaccttcagggctttccttcctctgccgaatttcggcctgggctacaatgaaagcaagatcatcgaggtggccgaggtgatccgctcaatcgttgcaaacaggccgatgtggccgacattcgatacaggccatcacctctgccagattgtcgacgcatgcatggagtcctcccggcaaaagcgttgggtcgacatcccgttgggttga

SEQ ID NO: 114176 - protein, 389 aa, Rhizobium leguminosarum bv. viciae 3841
MSEVRVAVLGASGWMGKVHTMAYQTFPHFFGVSDGTARIVALVEGPSKTAGDLSHRAPGARILQDWNLAVADPDVDLIDICLPDHLHYQVAKAALLAGKHVYCEKPLANTASEARELADIAREKGVITRVGHAFPRNPVHDLAKDIIQSGEIGEIKLFRGCQHVDMYGDPNAPFMWRADGKLAPTGIVGDTGSHIFSFMDFLVGRVSSLIADNLIVTPRRPVVEGLAYGEQVKLSGNESWADITNPDATNLLCRFENGAGGVVDFSRVATGRKFMQTYEIYGTKGSIAYTYDEINRLRFYSNDDRTGRRGFREIDVGPENPTFRAFLPLPNFGLGYNESKIIEVAEVIRSIVANRPMWPTFDTGHHLCQIVDACMESSRQKRWVDIPLG

SEQ ID NO: 114177 - DNA, 1161 bp, Solibacter usitatus Ellin6076
  CDS (1)..(1161): transl_table=11
atgaagaagctcaacatcggaatgatcggctacgggttcatgggacggacccactccaacgccttctcgcaggtgaatcacttcttcgacgtgccctatcagcccgtactgaaaacggtgtgcgcacgcaacgcggatcgcgctaaggcgttcgcctccaagtggggctatgaatcggtggagccggactggcgcaaggtggtggaatcgcccgagatcgacctgatcgatatcgccagcccgaacgacacgcacgcggagatcgcggtggcggcggccaaggcgggcaagatggtgatgtgcgagaagccgctgggccgcaacgccgccgagggggagaccatggtgaaggccgtggaagccgccggcgtgccgaacatggtctggtacaactaccggcgcgtgccggcggtgatgctggccaagcaactgatcgacgaaggccggctcggacgcatcttccactatcgcgcgaagttccttcaggactggacgatctcaagtgacctgccgcagggcggcgaagggctgtggcggctcgatgtggcggtggcgggcagcggcgtcacgggcgacctgctggcgcactgcatcgatacggcgatgtggctcaacggcggcatcgacgaagttaccggcgctacagagacgtttatcaaggcgcggcagcataacctcacgggaaaactggagcctgtgggaatcgacgacgccagcctctttctggcgcgcttcaacaacggctcgctcgcaaccttcgaggccacgcggtatgcgcgcgggcacaaggcgctctacaccctggagatcaacggcgagaaggcgtccatcatttgggacctgcacgacctgcatcgcctgcagtacttcgaccatcgcgatgagggccgcctgcgcggttggaagagcgtgcacattaccgattccgatcatccttatatgaagcattggtgggtgcccggcctgcagattggctacgagcatacgttcattcaccaggccgccgatttcctgagcgcgctcggtgagggcaagagcgccgcgccgactttccgcgaggcgctgcttacggactacgtgacggatgcggtgctcgcgtccgcgcaaaatcgcaagtgggtcaaagttcaagggtcggaaaaactggaggccgcatgttag

SEQ ID NO: 114178 - protein, 386 aa, Solibacter usitatus Ellin6076
MKKLNIGMIGYGFMGRTHSNAFSQVNHFFDVPYQPVLKTVCARNADRAKAFASKWGYESVEPDWRKVVESPEIDLIDIASPNDTHAEIAVAAAKAGKMVMCEKPLGRNAAEGETMVKAVEAAGVPNMVWYNYRRVPAVMLAKQLIDEGRLGRIFHYRAKFLQDWTISSDLPQGGEGLWRLDVAVAGSGVTGDLLAHCIDTAMWLNGGIDEVTGATETFIKARQHNLTGKLEPVGIDDASLFLARFNNGSLATFEATRYARGHKALYTLEINGEKASIIWDLHDLHRLQYFDHRDEGRLRGWKSVHITDSDHPYMKHWWVPGLQIGYEHTFIHQAADFLSALGEGKSAAPTFREALLTDYVTDAVLASAQNRKWVKVQGSEKLEAAC

SEQ ID NO: 114179 - DNA, 1137 bp, Haemophilus somnus 2336; identical to SEQ ID NO: 51250
  CDS (1)..(1137): transl_table=11

SEQ ID NO: 114180 - protein, 378 aa, Haemophilus somnus 2336; identical to SEQ ID NO: 51251

SEQ ID NO: 114181 - DNA, 1083 bp, Aspergillus oryzae
  CDS (1)..(1083)
atggcttccaagactttcaacgttggtgtggtcggatacggcttcagcgctaaaacatttcacattccttttgtttccgatgttcctcagttgaaactgtacgctgttgttcagcgtacaccaaagcccgacgatgatgccgagaaggatcaccccggcatcaagtcctatcggactgccgaggacatggtcaaggatgacggagttgatgtcgtcattgtcactaccgccccagactctcattaccagttgaccaagttagccttggagcacggaaagcatgttgtttgcgagaaacccttcacccccaccactcaggaagccgatgagcttgttgcccttgccgagaaacagaacaagttgttggctgtgtaccaaaaccgtcgctgggatgccgactacgtgaccgcctccaagctcgtgaagagtggtgtccttggccgtgtcgccgaattcgagactcacttcgaccgtcatcgccccgaagagcccgctcccgatgtttcgaagtggaagaacaaggtcgttcccggtggtagtgctatctacgatctcggaagtcatctgttagatcaggccgtgcatctgttcggactgcccaaccgtgtcactggatttattggctctcagcgggcggtcaacacctccggctacgaggattctttcactgtcctgttccactataacaacggtcctctggtgactgctaaggccgctgtcgtaagtccagaagaggagcaactgcgattctgggtccgcggagagaagggcagttttaagaagttccatctcgatgtccaggaggagcagctcaagagcggaatcaagcccggcgacagtgtatacggcagagaacctagtgaaagatatggcactctgaccactatccaaaacggcaagcccgtcaaagaagttgcgccgacagtggagcctcccacctggtctgaatactacaggaagcttgcccgcgctcttgccggagaaggcgaccttcccgccagcggagcggaggcccgtgatgttatccggttgattgagttggcacaggagagttcacgacagggaaagacccttgatgtttag

SEQ ID NO: 114182 - protein, 360 aa, Aspergillus oryzae
MASKTFNVGVVGYGFSAKTFHIPFVSDVPQLKLYAVVQRTPKPDDDAEKDHPGIKSYRTAEDMVKDDGVDVVIVTTAPDSHYQLTKLALEHGKHVVCEKPFTPTTQEADELVALAEKQNKLLAVYQNRRWDADYVTASKLVKSGVLGRVAEFETHFDRHRPEEPAPDVSKWKNKVVPGGSAIYDLGSHLLDQAVHLFGLPNRVTGFIGSQRAVNTSGYEDSFTVLFHYNNGPLVTAKAAVVSPEEEQLRFWVRGEKGSFKKFHLDVQEEQLKSGIKPGDSVYGREPSERYGTLTTIQNGKPVKEVAPTVEPPTWSEYYRKLARALAGEGDLPASGAEARDVIRLIELAQESSRQGKTLDV

SEQ ID NO: 114183 - DNA, 1143 bp, Rhizobium sp
  CDS (1)..(1143): transl_table=11
atggaaaaaattcgctttggtatcgtcggctccggctatatggccaaactgcacagcttagcgctgcgaaatatcggcgcctacctctggccgaagctgccccgcatcgagatggtccgcatggcggatatcgtgccggaggcagcgaaggaaggggcggagcgctggggttggcaaagccatacgagtgactggaaagaggtgacccgggcagacgacatcgatgtcgttatcatcatcacgcccaacgatagtcacgcagacatcgccatcgacgcgttctctcatggcaagcatgtcttctgcgagaagccgctgtcaaacaccgtggccgaggccgagcgcatgacggaagccgcccgcgcatccggaaaggtgaacctcgtcaatttctcctatcgcacttggccgggaattgaacttgcgcggcagctcatccgcgagggcgagctcggcgaggtcctccattttgaggggcacttcttccaggattacgcagccgatcctgcgcttcctttctcctggcggtttgacaagccggtttccgggggtggcgctttcggcgatatcggctcccatatcatggacatcgcatccgctttgatgggtcccgtcgagtctatcaccgccaagacgcgccgcctgtacgaaaagcgcccggtcaacgggccggatgcaaagcaggtcactgtcgacgacctgaccgcttcgctggtgcagttctcgaacggcgctcttggttcggttcatgcgtcatgggcagccgctggccacaaatccgatctcagcttctcggtgacgggcaccaagggcgcgctctccttcagctgggaacgcaacaacgaattgcacttcttcagcgccgctgacccgcagcgcgtcggcggtttccgccggatcatgctcggcggcatccatcctgaggcggacccgttctggtacgcgcagggccaggggctcggatatggcgaagccttcgtcgtcaccgcccgccgcgcgattgaggcggtcatcgatgcgaaccccaacgccgcgccgaacttcgcgcaggccctacacatcaatcgcgtcatcgccggtgctttccaggccgcggaagaggaccgctgggtcaagatcgagaaaacctcggcgttcgactga

SEQ ID NO: 114184 - protein, 380 aa, Rhizobium sp
MEKIRFGIVGSGYMAKLHSLALRNIGAYLWPKLPRIEMVRMADIVPEAAKEGAERWGWQSHTSDWKEVTRADDIDVVIIITPNDSHADIAIDAFSHGKHVFCEKPLSNTVAEAERMTEAARASGKVNLVNFSYRTWPGIELARQLIREGELGEVLHFEGHFFQDYAADPALPFSWRFDKPVSGGGAFGDIGSHIMDIASALMGPVESITAKTRRLYEKRPVNGPDAKQVTVDDLTASLVQFSNGALGSVHASWAAAGHKSDLSFSVTGTKGALSFSWERNNELHFFSAADPQRVGGFRRIMLGGIHPEADPFWYAQGQGLGYGEAFVVTARRAIEAVIDANPNAAPNFAQALHINRVIAGAFQAAEEDRWVKIEKTSAFD

SEQ ID NO: 114185 - DNA, 1182 bp, Streptomyces coelicolor
  CDS (1)..(1182): transl_table=11
atggccaccgaaccgatacgcatcggcgtggtcggcgcctccccggaccggggctgggccgccgacgcacacctgccggccctgcagcacctgccgcagtacaagatcaccgcggtcggcacccgccgggcggacagtgcgcaccgggccgctcgccggtacggggcgacccacgctttcaccgacccccgcagcctcgccgcacatcccgacgtggaactggtcgcgatcgtcgtgaaagtgccggaccatgcgcggctggtggaggcggcgctcgcggcgggcaagcatgtcctgtgcgagtggccccttgcccggaccaccgaggaggccgcccagctaacggcggccgctcacggagccggtgtggtgaacgccgtcggcctccaggcgcggcacaccccgacggtcgtccgggcccgggaactgatcaggcaggggtacgtcggccgggtcacctcggtcaccgtgtacagcacgcggggggtcgcggccggggggcggctgcccgccgccttcgcctacaccctcgactccacgaacggcgccggcaccttcgaggtcgccggcgggcacacgctcgacgcggtgcagtacctgctcggcagggagatgaccggcctgtcggctgcgctgtccgttcagcatccgcggatcacactcgacgaggacgcccggcagacgggggcgaccagccccgatcatgtcgcgctgcacgcgacgctggaaggcggcgccgcgctggtggtccacatccacgatgccaagaacagcggcgcgggcacccgcatcgagatctccggcacgcaaggggagctggccatcgtatccaccggaccacgaagcggcagcgggctgcagatcagcgaactggccctgctcggagcgcaggggacagagccgtccgggcaggagctgccctttcccggctcctggggcacggccgtgccagcggacggtctcgatgcggcccagcacaccatggctgtgcagtacgcggctctggccgcggacatccgcgagggcggcagtcgtgtgcctcgtttcgccgacgggatcgagctgcaccggctgctggacgccgtacggctgtcctccgcaaccggctgccggctggagcgccgtgcgggcgagcggtggccggtcagctctccctggccgcggcgtcgacgatcgcggtga

SEQ ID NO: 114186 - protein, 393 aa, Streptomyces coelicolor
MATEPIRIGVVGASPDRGWAADAHLPALQHLPQYKITAVGTRRADSAHRAARRYGATHAFTDPRSLAAHPDVELVAIVVKVPDHARLVEAALAAGKHVLCEWPLARTTEEAAQLTAAAHGAGVVNAVGLQARHTPTVVRARELIRQGYVGRVTSVTVYSTRGVAAGGRLPAAFAYTLDSTNGAGTFEVAGGHTLDAVQYLLGREMTGLSAALSVQHPRITLDEDARQTGATSPDHVALHATLEGGAALVVHIHDAKNSGAGTRIEISGTQGELAIVSTGPRSGSGLQISELALLGAQGTEPSGQELPFPGSWGTAVPADGLDAAQHTMAVQYAALAADIREGGSRVPRFADGIELHRLLDAVRLSSATGCRLERRAGERWPVSSPWPRRRRSR

SEQ ID NO: 114187 - DNA, 993 bp, Rhizobium meliloti
  CDS (1)..(993): transl_table=11
atgacagtgagatttggtcttctgggcgccgggcgtatcggcaaggttcatgcgaaagccgtcagcggcaatgccgatgcccgccttgtcgcggtggcggatgcctttccggccgccgcggaagcgatcgccggcgcctatggatgcgaagtccggacgatcgatgcgatcgaagctgccgccgacatcgacgccgtggtgatctgcacgccgacggatactcatgccgatctgatcgagcgcttcgcccgtgccggcaaggcaatcttctgcgagaagccgatcgatctcgacgccgagcgcgtcagggcctgcctgaaggtcgtgtccgacaccaaggccaagctgatggttggcttcaaccgccgcttcgacccgcatttcatggccgtgcgcaaggcgatcgacgacgggcgcatcggcgaggtcgagatggtgacgatcacctcgcgcgatcccagtgcgccgccagtcgactacatcaagcgttcgggcgggatcttccgggacatgacgatccatgatttcgacatggcgcgtttcctcctcggcgaggagcccgtttcggtcaccgcgactgcggccgtgctcatcgacaaggcgatcggcgacgccggcgactatgacagcgtctcggtcatcctgcagacggcatccggcaagcaggcgatcatctcgaactcgcgccgtgccacctatggttacgaccagcgtatcgaggttcacggctccaagggcgccgtcgccgctgaaaaccagcgccccgtttcgatcgagatcgcgaccggcgatggctacacgcgcccgccgctgcacgatttcttcatgacgcgctatacggaagcctacgccaacgagatcgaaagcttcatagccgcaatagaaaaaggcgccgagatcgcgccgtcgggcaacgacggccttgccgcgctggcgctcgccgatgcggcggtccgctcggttgcggaaaagcgccagatcagcatcgcctga

SEQ ID NO: 114188 - protein, 330 aa, Rhizobium meliloti
MTVRFGLLGAGRIGKVHAKAVSGNADARLVAVADAFPAAAEAIAGAYGCEVRTIDAIEAAADIDAVVICTPTDTHADLIERFARAGKAIFCEKPIDLDAERVRACLKVVSDTKAKLMVGFNRRFDPHFMAVRKAIDDGRIGEVEMVTITSRDPSAPPVDYIKRSGGIFRDMTIHDFDMARFLLGEEPVSVTATAAVLIDKAIGDAGDYDSVSVILQTASGKQAIISNSRRATYGYDQRIEVHGSKGAVAAENQRPVSIEIATGDGYTRPPLHDFFMTRYTEAYANEIESFIAAIEKGAEIAPSGNDGLAALALADAAVRSVAEKRQISIA

SEQ ID NO: 114189 - DNA, 1047 bp, Streptomyces griseus; identical to SEQ ID NO: 33591
  CDS (1)..(1047): transl_table=11

SEQ ID NO: 114190 - protein, 348 aa, Streptomyces griseus; identical to SEQ ID NO: 33592

SEQ ID NO: 114191 - DNA, 1101 bp, Brassica napus
  CDS (1)..(1101)
atggcggcgaactcaacgataaccaagtacggaatcgtagggatcggcatgatgggaagagaacacctcatcaacctccaccatctccgccaccaaaacctcgccgtcgtctccatcgccgatccccaccctccctcacagctcctcgccatcgaactcgctcgatccctcaactggaacctcaaggtcttctcaggacacgaggagctcctcgagagcgagacgtgcgacgtgatcgtcgtctcttcacccaacatgactcaccaccggatcctcatggacatcatcgcttaccccaaaccgcatcatatactcgtcgagaagcctctgtgcaccaccgttacggactgcaaagaggttctcgaggctgcgaagaaacggtcagatatggtggtgcaagttgggctggagtacagatacatgccacctgtcgctaagcttatagagaaagtgaacggcggagagtttggtgatgtcaagatggtagctatccgtgagcataggttccctttcttggttaaggtgaacaactggaatagattcaatgtgaacactggagggactttggtggagaagtgctgccatttctttgatctgatgaggctctttgcgtctgcggatcctgtttgtgtgatggcttctggtggcgtggatgtgaaccataaggatgaagtttatgatgggaaggtgcctgatataattgataacgcttatgttataattgagtttgacaatggatgtcgtgggatgcttgatctctgcatgtttgctgaaggaagcaaaaacgagcaagaaatctctgttactggtgacattggaaagggggaggcacttgttccagagggtataattcgatttgggactcgtgaaggaggaagagaacacgttcagacgataaaagctgaggatgaaagaataaagtatgaagggttgcatcatgggtcaagttacttggaacacctcatgtttttgtcggcaatcaggggtgaaggactagcagctgttgatttggaagacgggttgatggctgttgccatgggagttgctgcacagctctccattcaggagcgccgctatgtatccatggacgaggtcttgtga

SEQ ID NO: 114192 - protein, 366 aa, Brassica napus
MAANSTITKYGIVGIGMMGREHLINLHHLRHQNLAVVSIADPHPPSQLLAIELARSLNWNLKVFSGHEELLESETCDVIVVSSPNMTHHRILMDIIAYPKPHHILVEKPLCTTVTDCKEVLEAAKKRSDMVVQVGLEYRYMPPVAKLIEKVNGGEFGDVKMVAIREHRFPFLVKVNNWNRFNVNTGGTLVEKCCHFFDLMRLFASADPVCVMASGGVDVNHKDEVYDGKVPDIIDNAYVIIEFDNGCRGMLDLCMFAEGSKNEQEISVTGDIGKGEALVPEGIIRFGTREGGREHVQTIKAEDERIKYEGLHHGSSYLEHLMFLSAIRGEGLAAVDLEDGLMAVAMGVAAQLSIQERRYVSMDEVL

SEQ ID NO: 114193 - DNA, 1101 bp, Brassica napus
  CDS (1)..(1101)
atggcggcgaactcagcgatcaccaagtacggaatcgtagggatcggcatgatgggaagagaacacctcatcaacctccaccatctccgccaccaaaacctcgccgtcgtctccatcgctgatccccaccctccctcgcagctcctcgccatcgaactcgctcgatctctcaattgggacctcaaggtcttctcaggacacgaggagctcctcgagagcgagacgtgcgacgtgatcgtcgtctcttcacccaacatgactcaccaccggatcctcatggacatcatcgcttaccctaaaccgcatcatatactcgtcgagaagcctctgtgcaccaccgttgcggactgcaaagaggttcttgaggctgcgaagaaacggtcggatatggtggtgcaagttgggctggagtacagatacatgccacctgtcgctaagcttatagagaaagtgaacggcggagagtttggtgatgtcaagatggtagctatccgtgagcataggttccctttcttggttaaggtgaacaactggaatagattcaatgtgaacactggagggactttggtggagaagtgctgccatttctttgatctgatgaggctctttgcgtctgcggatcctgtttgtgtgatggcttctggtggcgtggatgtgaaccataaggatgaagtttatgatgggaaggtgcctgatataattgataacgcttatgttataattgagtttgacaatggatgtcgtgggatgcttgatctttgcatgtttgctgaaggaagcaaaaacgagcaagaaatctctgttactggtgacattggcaagggggaggcacttgttccagagggtataattcggtttgggactcgtgaaggaggaagagaacacgttcagattataaaagctgaggatgaaagaataaagtatgaagggttgcatcatgggtcaagttacttggaacacctcatgtttttgtcggcaatcaggggtgaaggactagcagctgttgatttggaagacgggttgatggctgttgccatgggagttgctgcacagctctccattcaggagcgccgctatgtatccatggacgaggtcttgtga

SEQ ID NO: 114194 - protein, 366 aa, Brassica napus
MAANSAITKYGIVGIGMMGREHLINLHHLRHQNLAVVSIADPHPPSQLLAIELARSLNWDLKVFSGHEELLESETCDVIVVSSPNMTHHRILMDIIAYPKPHHILVEKPLCTTVADCKEVLEAAKKRSDMVVQVGLEYRYMPPVAKLIEKVNGGEFGDVKMVAIREHRFPFLVKVNNWNRFNVNTGGTLVEKCCHFFDLMRLFASADPVCVMASGGVDVNHKDEVYDGKVPDIIDNAYVIIEFDNGCRGMLDLCMFAEGSKNEQEISVTGDIGKGEALVPEGIIRFGTREGGREHVQIIKAEDERIKYEGLHHGSSYLEHLMFLSAIRGEGLAAVDLEDGLMAVAMGVAAQLSIQERRYVSMDEVL

SEQ ID NO: 114195 - DNA, 20 bp, Artificial sequence
  primer
atgcgcgaaataggtatcgg

SEQ ID NO: 114196 - DNA, 21 bp, Artificial sequence
  primer
ctagatcctcacccagcgctc

SEQ ID NO: 114197 - protein, 399 aa, Artificial sequence
  consensus sequence
  Variant (2)..(4): Xaa in position 2 to 4 is any amino acid
  Variant (5)..(8): Xaa in position 5 to 8 is any or no amino acid
  Variant (10)..(10): Xaa in position 10 is any amino acid
  Variant (11)..(11): Xaa in position 11 is any or no amino acid
  Variant (13)..(65): Xaa in position 13 to 65 is any amino acid
  Variant (66)..(75): Xaa in position 66 to 75 is any or no amino acid
  Variant (77)..(79): Xaa in position 77 to 79 is any amino acid
  Variant (81)..(90): Xaa in position 81 to 90 is any amino acid
  Variant (93)..(93): Xaa in position 93 is any amino acid
  Variant (94)..(95): Xaa in position 94 to 95 is any or no amino acid
  Variant (97)..(98): Xaa in position 97 to 98 is any amino acid
  Variant (102)..(130): Xaa in position 102 to 130 is any amino acid
  Variant (131)..(135): Xaa in position 131 to 135 is any or no amino acid
  Variant (137)..(147): Xaa in position 137 to 147 is any amino acid
  Variant (149)..(150): Xaa in position 149 to 150 is any amino acid
  Variant (152)..(172): Xaa in position 152 to 172 is any amino acid
  Variant (173)..(187): Xaa in position 173 to 187 is any or no amino acid
  Variant (189)..(189): Xaa in position 189 is any amino acid
  Variant (190)..(190): Xaa in position 190 is any or no amino acid
  Variant (192)..(194): Xaa in position 192 to 194 is any amino acid
  Variant (196)..(198): Xaa in position 196 to 198 is any amino acid
  Variant (200)..(208): Xaa in position 200 to 208 is any amino acid
  Variant (210)..(228): Xaa in position 210 to 228 is any amino acid
  Variant (229)..(253): Xaa in position 229 to 253 is any or no amino acid
  Variant (255)..(264): Xaa in position 255 to 264 is any amino acid
  Variant (266)..(276): Xaa in position 266 to 276 is any amino acid
  Variant (277)..(282): Xaa in position 277 to 282 is any or no amino acid
  Variant (284)..(292): Xaa in position 284 to 292 is any amino acid
  Variant (293)..(293): Xaa in position 293 is any or no amino acid
  Variant (295)..(296): Xaa in position 295 to 296 is any amino acid
  Variant (298)..(366): Xaa in position 298 to 366 is any amino acid
  Variant (367)..(394): Xaa in position 367 to 394 is any or no amino acid
  Variant (396)..(398): Xaa in position 396 to 398 is any amino acid
GXXXXXXXGXXHXXXXXXXXXXXXXXXXXXXXXXXXXXXXXXXXXXXXXXXXXXXXXXXXXXXXXXXXXXXXXXXPXXXHXXXXXXXXXXGKXXXVXXEKPXXXXXXXXXXXXXXXXXXXXXXXXXXXXXXXXXXPXXXXXXXXXXXGXXGXXXXXXXXXXXXXXXXXXXXXXXXXXXXXXXXXXXXGXXGXXXDXXXHXXXXXXXXXGXXXXXXXXXXXXXXXXXXXXXXXXXXXXXXXXXXXXXXXXXXXXDXXXXXXXXXXGXXXXXXXXXXXXXXXXXGXXXXXXXXXXGXXGXXXXXXXXXXXXXXXXXXXXXXXXXXXXXXXXXXXXXXXXXXXXXXXXXXXXXXXXXXXXXXXXXXXXXXXXXXXXXXXXXXXXXXXXXXXXXXXXXAXXXS

SEQ ID NO: 114198 - DNA, 567 bp, Azotobacter vinelandii
  CDS (1)..(567): transl_table=11
atgacagcactcacgcccgcgcccggcgatctggcgagcctggcgttccgcgtttcgccggcgccgcaggtgatcaccggaaatcgcctgatactcgactgcaacgaagcgttccaatgcctgttcggctacgagcgccgggaactgctcggccagtcgatcctgcgcctctacccctcgcgcgccgactaccgggcgatcggcgagcgttgcctgagccggctgcgccggagtcgctcctactccgacgaacgcttcatgcagcagagcggcggcgaagtcttctgggcgcacgccgacggctacacgctgacccccgaggagcccttccggctgatggtctggcacttcgagcgcatcgaccggcccatacgcgcggcggtgaacctgacgccccgcgagcgggaaatctcggcgcacatcgtcaacggcctcacctgcaaggagatcggccgcaagctgggcatttcccaccgcaccgtggaagtgcaccgggcgcgcctgatgaagaaactggcggcgaagaacagtgccgatctggtgtcgaaaatcatcgttctgaactga

SEQ ID NO: 114199 - protein, 188 aa, Azotobacter vinelandii
MTALTPAPGDLASLAFRVSPAPQVITGNRLILDCNEAFQCLFGYERRELLGQSILRLYPSRADYRAIGERCLSRLRRSRSYSDERFMQQSGGEVFWAHADGYTLTPEEPFRLMVWHFERIDRPIRAAVNLTPREREISAHIVNGLTCKEIGRKLGISHRTVEVHRARLMKKLAAKNSADLVSKIIVLN

SEQ ID NO: 114200 - DNA, 546 bp, Ralstonia solanacearum GMI1000
  CDS (1)..(546): transl_table=11
atgcccgctctcgactaccagaccgcgttccagcttgctccggtcggcatggtgatgtcgcgcgaacgtgtcatggtcgacgtcaacgaagaggccgcgcgcatcttcggccatccgcgcacggcgatgatcgggcagtcgttcgagctgctctatcccacccacgacgaatacgagcgcaccggcgcgcgcatcgtgccgatcatgaacgcgcgcggcagctattccgacgagcgcatcatgaagcgcgccaacggcgagctgttctggtgccatgtcaccggccgcgcgctggaccgcacccggccgctgggcgaaggcatctggacgttcgaggatctgtccgcgcaccggccggtgacggcggccctgacgccgcgcgagcgcgacatcgccgcgcagctggtggagggcaagaccagcaagcagatcggcaagcagctggacatcagcccgcgcacggtggagatctatcgcgcgcggctgatgaagaagtacgccgccagcacctcgctggaactggtgcagcggctgatggggcactga

SEQ ID NO: 114201 - protein, 181 aa, Ralstonia solanacearum GMI1000
MPALDYQTAFQLAPVGMVMSRERVMVDVNEEAARIFGHPRTAMIGQSFELLYPTHDEYERTGARIVPIMNARGSYSDERIMKRANGELFWCHVTGRALDRTRPLGEGIWTFEDLSAHRPVTAALTPRERDIAAQLVEGKTSKQIGKQLDISPRTVEIYRARLMKKYAASTSLELVQRLMGH

SEQ ID NO: 114202 - DNA, 558 bp, Herminiimonas arsenicoxydans
  CDS (1)..(558): transl_table=11
atggacgcggcaaacatagactatgaaagcatcttccagcatgcacctatcggcatgtgtatctcgcagcatcgggtaatacatgtctgcaatgctgctttaacgcaaatgtttggctacccggacggtgcgctggcgggcttgtcattttccgtgctgtacccgagccacacagaattcgagcgcaccggtgcgcgcatcattcccatcatgaatgaaaaaggttgttattcggacgagcgcatcatgaaacgcgcagatggccggttattctggtgtcatgtaagtggccgtgcactgctgccgcacgacccgcatgcggccggcatctggactttcgacgatttgagtgaaaagcggccggtgacggcggcgctgacgccgcgcgaacgtgaaattgccgccatgctggtcgatggaaaaaccagcaaattgattgcgcggcaaatcggacttagtccgcgcacagtggaaatgcatagagcgaaactgatgcgaaaatttaccgcaagcactaccagcgaactgatccatcgcctgctcggtgtgttgcggtaa

SEQ ID NO: 114203 - protein, 185 aa, Herminiimonas arsenicoxydans
MDAANIDYESIFQHAPIGMCISQHRVIHVCNAALTQMFGYPDGALAGLSFSVLYPSHTEFERTGARIIPIMNEKGCYSDERIMKRADGRLFWCHVSGRALLPHDPHAAGIWTFDDLSEKRPVTAALTPREREIAAMLVDGKTSKLIARQIGLSPRTVEMHRAKLMRKFTASTTSELIHRLLGVLR

SEQ ID NO: 114204 - DNA, 546 bp, Burkholderia vietnamiensis G4
  CDS (1)..(546): transl_table=11
atgcccgcactcgattaccagactgcctttcacctcgcgccgctcggcctcgtgatgtcgcgcgaccgcgtgatcgaggactgcaacgacgcactcgcggcgatcttccgctgcgcgcggaccgatctgatcggcaagtcctacgaagtactgtatccgtcgccggacgagtttcagcgcatcggcgagcgcatttcgcgcgtgatggtcgcgaatggcacgtacggcgacgacagaatcatgaagcgcgcggacggcgagctgttctggtgccacgtgaccggccgcgcgctcgatcgcaccgcgccgctcgccgtgggcgtatggaccttcgaagacctgagcgcgacgcgccgcgtggcggtcgagctgacgccgcgcgagcgggagatcgcagcccagctcgcgaccggcaagaccagcaagcagatcggacgcgtgctcgacatcagttcgcgcaccgtcgacatctaccgtgcgcggctgatgcgcaagtacggcaccagcaatacgccggagctgctgcaacgcctgctcggccagtag

SEQ ID NO: 114205 - protein, 181 aa, Burkholderia vietnamiensis G4
MPALDYQTAFHLAPLGLVMSRDRVIEDCNDALAAIFRCARTDLIGKSYEVLYPSPDEFQRIGERISRVMVANGTYGDDRIMKRADGELFWCHVTGRALDRTAPLAVGVWTFEDLSATRRVAVELTPREREIAAQLATGKTSKQIGRVLDISSRTVDIYRARLMRKYGTSNTPELLQRLLGQ

SEQ ID NO: 114206 - DNA, 537 bp, Silicibacter pomeroyi DSS-3
  CDS (1)..(537): transl_table=11
atgagcgatcccggcttcgaatatgcgcctatcggtctggtagagctggaaaaccgcgtcatccggcggtgcaacctgcattttgccagcatgttcggcgggcaggaaagcgagtatcgcgacatgccgctgctcaggctgtatcccagtcacgaggatttcgagcgcatcggcaagcgtggcctgcaggttatgcgcgaaaccggctattacaccgacgaacgcatcatgcgccgccgcgacggcgatctgttctggtgccgggcgcggggcaagtcgctgacgcccgacgacccgttccgccacgggatctggagctttgccgacatctcggaagagcgccgggtggtcgagctgaccccgcgcgaacgcgaggtggcgctgctgacctgccggggcctctcggccaaggaggtgggcgtcgaactggggctcagctatcgcaccatcgaggcgcatcgcgcccggttgctgcaaaaattcggcgcccgcaaactgccggaactggtggcaaaactgtccgggatgccgctttga

SEQ ID NO: 114207 - protein, 178 aa, Silicibacter pomeroyi DSS-3
MSDPGFEYAPIGLVELENRVIRRCNLHFASMFGGQESEYRDMPLLRLYPSHEDFERIGKRGLQVMRETGYYTDERIMRRRDGDLFWCRARGKSLTPDDPFRHGIWSFADISEERRVVELTPREREVALLTCRGLSAKEVGVELGLSYRTIEAHRARLLQKFGARKLPELVAKLSGMPL

SEQ ID NO: 114208 - DNA, 615 bp, Silicibacter pomeroyi DSS-3
  CDS (1)..(615): transl_table=11
atgccgggaccggtcgacaaggatctgttggacaacgcctatgccacgcgcgaattgcgcgggctggcctttgactgggtgccggtcggcatcgtggtgaccgaggcgcgggtgatccgcgaggtcaatcaccgcttctgctccatgttcggctatgagcgcgaggagttgctggaccggctgtttgtgttcctctacccctcggacgaggagtttcagaacatcctgcatcgcggcgacaaggatctgggcgagggcaatctctattgggacgagcgggtgatgcggcgtcgcgatggcgagctgttctggtgtcgggtgcgcggccagacctttacccccgaggaaccgctggcgcgcgcggtctggacctttgccgacctttccgagatccgccgttatcagccgctgagccggcgcgagcgcgaggtctattcgctgctgggcgagggaaagacaagcaaggagatcgcgcgcgaactggacctcagctatcgcacggtcgaggtgcaccgggcgcggctcttgaagaagttcggggtcagcaataccgccgccctgttccagtcgctgggcgatatcggcggcgaacatgtggtgccgtccgccgggtga

SEQ ID NO: 114209 - protein, 204 aa, Silicibacter pomeroyi DSS-3
MPGPVDKDLLDNAYATRELRGLAFDWVPVGIVVTEARVIREVNHRFCSMFGYEREELLDRLFVFLYPSDEEFQNILHRGDKDLGEGNLYWDERVMRRRDGELFWCRVRGQTFTPEEPLARAVWTFADLSEIRRYQPLSRREREVYSLLGEGKTSKEIARELDLSYRTVEVHRARLLKKFGVSNTAALFQSLGDIGGEHVVPSAG

SEQ ID NO: 114210 - DNA, 546 bp, Ralstonia eutropha JMP134
  CDS (1)..(546): transl_table=11
atgcccgccatcgattaccagaccgctttccagctcgcccccgtggggctggtgctgtcccgcgagcgcaagatcgaagactgcaacgacgaggtctgccgcatcttcggcaccacgcggcaggcgctgatcggcgaatcgttccaggtactctaccccaccgcagacgaattcgagaggaccggcgcacgcatcgtaccgatcatgaacaagcgcggtatgtactcggacgaacggatcatgaagcgggccagcggggaactgttctggtgccacgtcaccggtcgctcgctggaccgatctcagccgctgggtgcgggcatctggacgttcgaggacctctcccagaagcgccaggtcacggcggaactcactgcacgcgagcgcgatatcgccgcgcagcttgtggaaggcaagaccagcaagcagatcggcaagctgctggcgatcagtccgcgcaccgtcgatatctatcgggcgcggctgatgaagaaatatggggccagtacgtcggtggatctggtgcagcggttggtgaaccactga

SEQ ID NO: 114211 - protein, 181 aa, Ralstonia eutropha JMP134
MPAIDYQTAFQLAPVGLVLSRERKIEDCNDEVCRIFGTTRQALIGESFQVLYPTADEFERTGARIVPIMNKRGMYSDERIMKRASGELFWCHVTGRSLDRSQPLGAGIWTFEDLSQKRQVTAELTARERDIAAQLVEGKTSKQIGKLLAISPRTVDIYRARLMKKYGASTSVDLVQRLVNH

SEQ ID NO: 114212 - DNA, 546 bp, Burkholderia xenovorans LB400
  CDS (1)..(546): transl_table=11
atgcccgcactggattaccaaaccgcgttccacctcgctccgatcggactcgtgctgtcgcgcgaacggattatcgaagactgcaatgacgagctcgcgtccattttcggctgcacgcgcgagtcgctgctcggccagtcgttccaggtgctgtatccgtccacggacgaattcgagcggatcggcgcgcggattccgccgatcatgaccgcgcaaggcagttacgcggacgaccgcatcatgaagcgggccaacggagaactgttctggtgccatgtgacaggccgcgcgcaggaacgcgccgacgcgcacgccgcgggcgtctggactttcgaggatctgagcgcgacgcggcgcgtggcgatcgaactgacgccgcgcgaacgcgaaatcgccgcgcaactggtcacgggaaaaaccagcaaacagatcggccgcgtgctggatatcagcccgcgcacggtggatgtctaccgcgcgcggctgatgcgcaaatacgatacgggcaacgcgacggagctgttgcagcgcctgctcgggcattga

SEQ ID NO: 114213 - protein, 181 aa, Burkholderia xenovorans LB400
MPALDYQTAFHLAPIGLVLSRERIIEDCNDELASIFGCTRESLLGQSFQVLYPSTDEFERIGARIPPIMTAQGSYADDRIMKRANGELFWCHVTGRAQERADAHAAGVWTFEDLSATRRVAIELTPREREIAAQLVTGKTSKQIGRVLDISPRTVDVYRARLMRKYDTGNATELLQRLLGH

SEQ ID NO: 114214 - DNA, 546 bp, Ralstonia metallidurans CH34
  CDS (1)..(546): transl_table=11
atgccgtccatcgactaccagaccgctttccagcttgcgcccgtcgggctggtgctgtcgcgcgcccgcatgatcgaggattgcaatgacgaggtttgccggatcttcggcaccacgcgcgatgccctggtcggcgagtccttccaggtgctctaccccaccgccgacgagttcgagcgaaccggtgcgcggatcgtgccaatcatgaatgcaaaggggatgtactcggacgagcggatcatgaagcgcgccaacggcgagctgttctggtgccatgtcaccggccgcgcgctggaccggcaggatccactcggcagcggcatctggacgttcgaagatctatcccagaagcggcccgtaacagccgagctgaccgcgcgggagcgcgatatcgccgcgcagctggtcgagggcaaaaccagcaagcagatcggcaagctgctggcaatcagcccacgcacggtggacatctaccgggcacgtctgatgaagaaatatggcgcgcatacggcggtggatctggtccaacgccttgtcaatcactga

SEQ ID NO: 114215 - protein, 181 aa, Ralstonia metallidurans CH34
MPSIDYQTAFQLAPVGLVLSRARMIEDCNDEVCRIFGTTRDALVGESFQVLYPTADEFERTGARIVPIMNAKGMYSDERIMKRANGELFWCHVTGRALDRQDPLGSGIWTFEDLSQKRPVTAELTARERDIAAQLVEGKTSKQIGKLLAISPRTVDIYRARLMKKYGAHTAVDLVQRLVNH

SEQ ID NO: 114216 - DNA, 558 bp, Silicibacter sp. TM1040
  CDS (1)..(558): transl_table=11
atggagcctctttcaacactcgcgtttgaaagcgcaccggtcggcctcatttatgccgaggaccgggtgatcaagctgtgcaacacgcggttctccgagatgtttggttaccgaaaggccgagcttgaggggcattccttatccaagctttacccctcctccgacgagtttcagcgcattggccagatcggggtcgaaaagatgcgcggccttggacgctatgccgatgaacgcatcatgcgccgcaaggatgagagcctgttttggtgccgcgtgcgcgggcaatcgctcgccccacaagatccctttgctcaatcggtctggagctttgccgatatctcggagaagcgcccggtcacggaaatgacacgccgcgaacggcaggtggccaagatgttggccgaagggctgacttcaaaggagattgcccgtggcctcgagatcagcccccgcacggtcgaggtgcatcgcgcccggctgatggacaagttcggcgcgcgcaacgggcttgagctggtcgcccatctggcggggctgccgcttggcggcacatcctga

SEQ ID NO: 114217 - protein, 185 aa, Silicibacter sp. TM1040
MEPLSTLAFESAPVGLIYAEDRVIKLCNTRFSEMFGYRKAELEGHSLSKLYPSSDEFQRIGQIGVEKMRGLGRYADERIMRRKDESLFWCRVRGQSLAPQDPFAQSVWSFADISEKRPVTEMTRRERQVAKMLAEGLTSKEIARGLEISPRTVEVHRARLMDKFGARNGLELVAHLAGLPLGGTS

SEQ ID NO: 114218 - DNA, 549 bp, Silicibacter sp. TM1040
  CDS (1)..(549): transl_table=11
atgtctgatcccgcaactgatcccgcttttgactatgcgcctgttggacttgcgcttttggaacatcgcatcatcaagcggtgcaatctgctctttgccgagatctttgacgcccccccagaggcgctttgcgagacaccaattgctgcgctttatcccagcgccgaggattaccagcgcataggcgagatcttgcagttgccggaatcacaaagcggaatctaccacgacgaacgcattatgcgtcgcacgtcgggcgcgctgttctggtgccgggtgcgcgggcgatccctcgacggtgcgcgcccgtttcaggccggtgtatggtcctttgccgatctctccgaggagcgccccgttgtcagcctgaccccacgcgaacgcgaagtcgcgatcctcacctgtcgggggctctcggccaaggaaattggcctcaaactggatctctcctatcgtacggtagagactcaccgggcgcgcctcttggtgaaattcaacgccaaaaagctgcccgaactggtcgcaaaactcagtggcatgcctctttga

SEQ ID NO: 114219 - protein, 182 aa, Silicibacter sp. TM1040
MSDPATDPAFDYAPVGLALLEHRIIKRCNLLFAEIFDAPPEALCETPIAALYPSAEDYQRIGEILQLPESQSGIYHDERIMRRTSGALFWCRVRGRSLDGARPFQAGVWSFADLSEERPVVSLTPREREVAILTCRGLSAKEIGLKLDLSYRTVETHRARLLVKFNAKKLPELVAKLSGMPL

SEQ ID NO: 114220 - DNA, 546 bp, Acidovorax sp. JS42
  CDS (1)..(546): transl_table=11
atgaatgttgccgactaccgcttggccttcgagatggcacccgtgggcctggtgatttcgcgcaaccgcaccatggtggattgcaaccgacatgtgtgcgagatattcggcgcctcgcgcgaactgctcatcggccagtcgttccagatcctctaccccagcccggacgaatatgagcggctgggcgcacgcatggcgcccatcctgaacgcacgcggccactatgccgacaaccgcatcatgaagcgcgccaacggcgaaaccttctggtgccacgtgtccggtcgcgcgctggatcgcaacgatccgcacgcctcgggcatctggagcttcgaggacctgagcgcgcagcgccccgtgcgcgccgagttgacggcgcgcgaacgcgaggtggccgcgcggctgctggacggcatgacctccaaggagatcggccgcgcgctggacatcagccaccgcacggtggagatctaccgcgcgcggctcatgcgcaagtacggcgcgtccacggccgcggacctggtgcagaagctgttggcgggataa

SEQ ID NO: 114221 - protein, 181 aa, Acidovorax sp. JS42
MNVADYRLAFEMAPVGLVISRNRTMVDCNRHVCEIFGASRELLIGQSFQILYPSPDEYERLGARMAPILNARGHYADNRIMKRANGETFWCHVSGRALDRNDPHASGIWSFEDLSAQRPVRAELTAREREVAARLLDGMTSKEIGRALDISHRTVEIYRARLMRKYGASTAADLVQKLLAG

SEQ ID NO: 114222 - DNA, 546 bp, Roseovarius nubinhibens ISM
  CDS (1)..(546): transl_table=11
atggacagcctcaacgatatcgcctttacccatgcgcccaccgggcttgtcgtgttggaaaaccggatcatccggctgtgcaatctgcaatttgcccgcaccttcatcggcacgcccgccgatttcatcaacatcccgctggcgcattactacccctcgatcgaggattaccgccgcatcggcgaacgcagcctcgaggcgatgcagcgcaccgggcgctataatgacgaacggatcatgaagcgcagcgatggcagcctgttctggtgccgggtgcgcggccagtcggtgaccccggatgacccgttccggcgcggcgtgtggtcctttgccgatctgtcagaggagcggcccatcgtggcgctcacccaacgcgagcgcgagatcgccattctcaccgcgcgcggcatgacctccaaggaggtagggcttgaactggggctgagctatcgcacgatcgaagtgtaccgcgcccggctcttgaagaaattcagcgcccgcaatctcgccgaactggtcgccaagctgagcggaatgccgcattag

SEQ ID NO: 114223 - protein, 181 aa, Roseovarius nubinhibens ISM
MDSLNDIAFTHAPTGLVVLENRIIRLCNLQFARTFIGTPADFINIPLAHYYPSIEDYRRIGERSLEAMQRTGRYNDERIMKRSDGSLFWCRVRGQSVTPDDPFRRGVWSFADLSEERPIVALTQREREIAILTARGMTSKEVGLELGLSYRTIEVYRARLLKKFSARNLAELVAKLSGMPH

SEQ ID NO: 114224 - DNA, 546 bp, Oceanicola batsensis HTCC2597
  CDS (1)..(546): transl_table=11
ttggacgacttcaccagcctcgccttcgatcacgccccgctcggcatcgtgatgaccgaggcgcgcgtcatacgcagctgcaaccgcaccttcggcgaaatgacgggccacgacccctcgggcctgcccggccaaagcttccggatgttctacgacagcgcccgggccttccggaacatccgcgacatcggcctgcatgtcctgcgctccggggccatctacagcgacgaacgactgttgctgcacgccagcggccgcgcgctgctggtgcggttccgcgcgcgcactctggccccggacgacccgctttcccgtctggtcatgactttcgctgcgctgcgcgacgatcagcccgaccgcgttctgacaccccgcgaacgcaccgtcgtcgccggcctcgcgcggggccagaccagcaaggaaatcgcgcgcgacctcggactgtctccccgcacgatcgaggacgttcgcgcccggcttctgcgccggtacgaggcgcggaacgccgccgagctgctcacccggctcgcggggcccgccttctga

SEQ ID NO: 114225 - protein, 181 aa, Oceanicola batsensis HTCC2597
MDDFTSLAFDHAPLGIVMTEARVIRSCNRTFGEMTGHDPSGLPGQSFRMFYDSARAFRNIRDIGLHVLRSGAIYSDERLLLHASGRALLVRFRARTLAPDDPLSRLVMTFAALRDDQPDRVLTPRERTVVAGLARGQTSKEIARDLGLSPRTIEDVRARLLRRYEARNAAELLTRLAGPAF

SEQ ID NO: 114226 - DNA, 603 bp, Oceanicola batsensis HTCC2597
  CDS (1)..(603): transl_table=11
gtgaaaacacgtatcgacgacgcctaccgcagcggggagttcgcggagctggcctatgcatacgcccccgtaggtctggtcatcaccgaaaaccgggtcatccgcgactgcaaccgggccttcgccgagatgttcgaatacggggtcgaggagctgcggaaccaggtcttcgcgatgctctatcccacggacgaggagttcgtgaacatccgcgaccgcggcgtgcgccagctgcgcgagaccaacacctactgggacgagcgcatcatggcgaagaagtcgggaacgctcttctggtgccgcgtgcggggccattccttcacgcccgaggagccgctgatgcgcgcggtctggagtttcgccgacctcagcgagacccgcccctacatcccgctgacccgccgcgagcgcgagatcatctcgcatctgtcggacgggctgaccagcaaggagatcgcgatcaagctggagctgtcgcaccgcacggtcgaggtctaccgcgccaagctgctcaagaagttcggggtgagcaattccagcgggctgttccattcgctgggcggcatcgggtcggatcacgtggtgtcgcgcagcggcgagtga

SEQ ID NO: 114227 - protein, 200 aa, Oceanicola batsensis HTCC2597
MKTRIDDAYRSGEFAELAYAYAPVGLVITENRVIRDCNRAFAEMFEYGVEELRNQVFAMLYPTDEEFVNIRDRGVRQLRETNTYWDERIMAKKSGTLFWCRVRGHSFTPEEPLMRAVWSFADLSETRPYIPLTRREREIISHLSDGLTSKEIAIKLELSHRTVEVYRAKLLKKFGVSNSSGLFHSLGGIGSDHVVSRSGE

SEQ ID NO: 114228 - DNA, 20 bp, Artificial sequence
  primer
atgacagcactcacgcccgc

SEQ ID NO: 114229 - DNA, 22 bp, Artificial sequence
  primer
tcagttcagaacgatgattttc

SEQ ID NO: 114230 - protein, 170 aa, Artificial sequence
  consensus sequence
  Variant (3)..(4): Xaa in position 3 to 4 is any amino acid
  Variant (7)..(7): Xaa in position 7 is any amino acid
  Variant (9)..(9): Xaa in position 9 is any amino acid
  Variant (11)..(14): Xaa in position 11 to 14 is any amino acid
  Variant (16)..(16): Xaa in position 16 is any amino acid
  Variant (18)..(19): Xaa in position 18 to 19 is any amino acid
  Variant (22)..(27): Xaa in position 22 to 27 is any amino acid
  Variant (29)..(34): Xaa in position 29 to 34 is any amino acid
  Variant (36)..(42): Xaa in position 36 to 42 is any amino acid
  Variant (46)..(53): Xaa in position 46 to 53 is any amino acid
  Variant (55)..(55): Xaa in position 55 is any amino acid
  Variant (57)..(66): Xaa in position 57 to 66 is any amino acid
  Variant (68)..(68): Xaa in position 68 is any amino acid
  Variant (74)..(74): Xaa in position 74 is any amino acid
  Variant (76)..(77): Xaa in position 76 to 77 is any amino acid
  Variant (79)..(79): Xaa in position 79 is any amino acid
  Variant (84)..(84): Xaa in position 84 is any amino acid
  Variant (86)..(86): Xaa in position 86 is any amino acid
  Variant (88)..(94): Xaa in position 88 to 94 is any amino acid
  Variant (96)..(100): Xaa in position 96 to 100 is any amino acid
  Variant (102)..(102): Xaa in position 102 is any amino acid
  Variant (104)..(104): Xaa in position 104 is any amino acid
  Variant (108)..(114): Xaa in position 108 to 114 is any amino acid
  Variant (115)..(115): Xaa in position 115 is any or no amino acid
  Variant (118)..(118): Xaa in position 118 is any amino acid
  Variant (122)..(129): Xaa in position 122 to 129 is any amino acid
  Variant (131)..(131): Xaa in position 131 is any amino acid
  Variant (135)..(135): Xaa in position 135 is any amino acid
  Variant (137)..(139): Xaa in position 137 to 139 is any amino acid
  Variant (141)..(142): Xaa in position 141 to 142 is any amino acid
  Variant (144)..(144): Xaa in position 144 is any amino acid
  Variant (148)..(150): Xaa in position 148 to 150 is any amino acid
  Variant (155)..(156): Xaa in position 155 to 156 is any amino acid
  Variant (158)..(165): Xaa in position 158 to 165 is any amino acid
  Variant (167)..(169): Xaa in position 167 to 169 is any amino acid
AFXXAPXGXVXXXXRXIXXCNXXXXXXFXXXXXXLXXXXXXXLYPXXXXXXXXGXRXXXXXXXXXXYXDERIMXRXXGXLFWCXVXGXXXXXXXPXXXXXWXFXDLSXXXXXXXXLTXRERXXXXXXXXGXTSKXIXXXLXXSXRTVXXXRARLXXKXXXXXXXXLXXXL

SEQ ID NO: 114231 - DNA, 1050 bp, Azotobacter vinelandii
  CDS (1)..(1050): transl_table=11
atggacgagaacaagaagcgcgccttggctgcggccttgggccagatcgaaaagcagttcggcaagggcgcggtgatgcgcatgggcgatcacgagcggcaggcgattccggccatttccaccggttccctggggctggacatcgcgctcggcatcggcggcctgcccaaggggcggatcgtcgagatctacggccccgaatcctccggcaagaccaccctgaccctgtcgaccatcgccgaggctcagaagcagggtgccacctgcgccttcgtcgacgccgagcacgcgctcgatccggactacgccgccaagctcggggtgaacgtcgacgacctcctggtttcccagcccgataccggcgagcaggcgctggagatcaccgacatgctggtgcgttccaacgcggtggacgtgatcatcgtcgactccgtggcggcgctggtgcccaaggcggagatcgagggcgagatgggcgaccagcacgtcggtctgcaggcccgtctgatgtcccaggccctgcgcaagatcaccggcaacatcaagaacgccaactgcctggtcatcttcatcaaccagatccgcatgaagatcggtgtgatgttcggcaacccggaaaccaccaccggcggcaatgccctgaagttctacgcctcggtgcgtctggacatccgccgcaccggcgcggtgaaggagagcgacgaggtgatcggcagcgagacccgcgtcaaggtggtgaagaacaaggtggcgccgccgttccgtcaggccgagttccagattctctacggcaagggcatctaccgtaacggtgagatcatcgacctcggtgtgcaactcggcctgctggagaagtccggcgcctggtacagctaccagggcagcaagatcggccagggcaaggccaatgcggccaagtttctcgaggacaacccggaggtcgccgcagcggtcgagaagagcatccgcgatcagttgctcgccgcgccggccagcgcccgtccggcagccttggccgacgagccggccgacgcggatctcgattattga

SEQ ID NO: 114232 - protein, 349 aa, Azotobacter vinelandii
MDENKKRALAAALGQIEKQFGKGAVMRMGDHERQAIPAISTGSLGLDIALGIGGLPKGRIVEIYGPESSGKTTLTLSTIAEAQKQGATCAFVDAEHALDPDYAAKLGVNVDDLLVSQPDTGEQALEITDMLVRSNAVDVIIVDSVAALVPKAEIEGEMGDQHVGLQARLMSQALRKITGNIKNANCLVIFINQIRMKIGVMFGNPETTTGGNALKFYASVRLDIRRTGAVKESDEVIGSETRVKVVKNKVAPPFRQAEFQILYGKGIYRNGEIIDLGVQLGLLEKSGAWYSYQGSKIGQGKANAAKFLEDNPEVAAAVEKSIRDQLLAAPASARPAALADEPADADLDY

SEQ ID NO: 114233 - DNA, 1212 bp, Aeromonas salmonicida
  CDS (151)..(1212): transl_table=11
tgaccggcgtcaggtacgccagcaggcggtcagacaggccttgtccggactcttggccctgctcagataaattgggcttgatactgtatgaatagacagtatacttagcccaacttcacttattactcacgatttccagcggagattggcatggatcagaacaaacagaaggcactggcggctgcgctgggtcagattgaaaagcagttcggcaaaggctccatcatgcttctgggcgacagcaagaccatggatatcgaagccatctctaccggttccctctccctggacgtggcgctgggtatcggcggtctgccgtgcggccgtatcgtcgagatctatggcccggaatcttccggtaaaaccaccctcaccctgcaggtgattgcggaagcccagaagaaaggcaaggtctgtgcatttatcgatgcagagcatgccctcgaccccatctatgcagccaagctgggtgtcaacgtcgatgacctgctgatctcccagtcggataccggtgagcaggcgctggaaatctgcgacatgctggtgcgttccaacgccgttgacgtcatcatcgtcgactcggtggccgctctgacgccgaaagcagaaatcgaaggcgagatgggtgattcccacgtcggcctgcaggctcgtctgatgtcccaggcgctgcgcaagctgaccgccaacatcaagaacgccaactgcctctgtatcttcatcaaccaaatccggatgaagattggtgtcatgttcggcagcccggaaaccactaccggtggtaacgcgctcaagttctacgcctcagtacgtctggacatccgtcgcatcggcgccatcaaggaaggtgacgaagtggtcggtaacgagacccgcgtcaaggtggtcaagaacaaggttgcccctcccttcaagcaggctgaattccagattttctacggtgtcggtatttccaaggaaggtgagctggtggatctcggcgtcaagcacaagctgatcgacaaggccggtgcctggtacagctataacggcgagaagataggtcagggcaaggccaacgtgatgaagctgttcaccgagaacaaggtgatggcggccgaggtggaagccagactgcgtgagttgctgctctccggcgatgtgccggccgagaagccggtcgtggcggatgccgacgagctcgaagccgaaagcgaacaagagttcgaataa

SEQ ID NO: 114234 - protein, 353 aa, Aeromonas salmonicida
MDQNKQKALAAALGQIEKQFGKGSIMLLGDSKTMDIEAISTGSLSLDVALGIGGLPCGRIVEIYGPESSGKTTLTLQVIAEAQKKGKVCAFIDAEHALDPIYAAKLGVNVDDLLISQSDTGEQALEICDMLVRSNAVDVIIVDSVAALTPKAEIEGEMGDSHVGLQARLMSQALRKLTANIKNANCLCIFINQIRMKIGVMFGSPETTTGGNALKFYASVRLDIRRIGAIKEGDEVVGNETRVKVVKNKVAPPFKQAEFQIFYGVGISKEGELVDLGVKHKLIDKAGAWYSYNGEKIGQGKANVMKLFTENKVMAAEVEARLRELLLSGDVPAEKPVVADADELEAESEQEFE

SEQ ID NO: 114235 - DNA, 1110 bp, Pseudomonas syringae
  CDS (46)..(1110): transl_table=11
gtggccatcaaggccctaattgaatttgattacgtgaggacttcaatggacgacaacaagaagaaagccttggctgcggccctgggtcagatcgagcgtcagttcggtaaaggtgccgtgatgcgcatgggcgaccatgatcgccaggcaattcctgccatctctaccggttcgcttggtctggatatcgcactcggtatcggcggtctgccaaaaggccggatcgtggaaatctacggtcctgaatcttccggtaaaaccacgctgaccctgtcggtcatcgcgcaagcccagaaaatgggcgctacctgtgcgttcgtcgacgccgagcacgcacttgatcctgaatatgccggcaagctgggcgtcaatgtagacgacctgctggtctcgcagccggacaccggtgagcaggcactggaaatcaccgacatgctggtgcgctccaatgccatcgacgtcatcgttgtcgactccgttgcggccctggtgcccaaggcagagatcgaaggcgaaatgggtgacatgcacgtgggtctgcaggcccgcctgatgtcgcaggcgctgcgcaagatcaccggtaacatcaagaacgccaactgcctggttatcttcatcaaccagatccgcatgaagatcggtgtcatgttcggcagcccggaaaccaccaccggtggtaacgcgctgaagttctacgcttcggtacgtctggatatccgtcgcaccggtgcggtgaaggaaggcgacgaagtggtcggtagcgaaacccgcgtcaaggtcgtgaagaacaaagtggcgccgccgttccgtcaggccgagttccagattctctacggcaagggtatctacctcaacggcgaaatcgtcgacctggccgttctgcacggttttgtcgagaagtcgggtgcctggtacagctatcagggcagcaagatcggtcagggtaaagccaactcggccaagttcctggcagataacccggaaatctgcaaagcgctcgagaagcagattcgcgataagctgctcacgcctggcgtcgacaccaaggctgtcggttcccgtgaagctgttgttgccgatgacgtggccgaagcagacgctgatagctga

SEQ ID NO: 114236 - protein, 354 aa, Pseudomonas syringae
MDDNKKKALAAALGQIERQFGKGAVMRMGDHDRQAIPAISTGSLGLDIALGIGGLPKGRIVEIYGPESSGKTTLTLSVIAQAQKMGATCAFVDAEHALDPEYAGKLGVNVDDLLVSQPDTGEQALEITDMLVRSNAIDVIVVDSVAALVPKAEIEGEMGDMHVGLQARLMSQALRKITGNIKNANCLVIFINQIRMKIGVMFGSPETTTGGNALKFYASVRLDIRRTGAVKEGDEVVGSETRVKVVKNKVAPPFRQAEFQILYGKGIYLNGEIVDLAVLHGFVEKSGAWYSYQGSKIGQGKANSAKFLADNPEICKALEKQIRDKLLTPGVDTKAVGSREAVVADDVAEADADS

SEQ ID NO: 114237 - DNA, 1059 bp, Klebsiella pneumoniae subsp. pneumoniae MGH 78578
  CDS (1)..(1059): transl_table=11
atggcgatcgacgaaaacaaacagaaagcgttggcggctgcactgggccagatcgaaaagcaattcggtaaaggctccatcatgcgcctgggtgaagaccgcaccatggatgtggaaaccatctccaccggctcgctttctctggatatcgcgctgggcgccggcggtctgccaatgggccgtatcgtcgagatctacggtccggaatcctccggtaaaaccaccctgacgctgcaggttatcgccgcagcgcagcgtgaaggtaaaacctgtgcgttcatcgatgctgaacatgcgctggatcctgtctatgcacgcaaactgggcgtcgatatcgacaacctgctgtgttctcagccggacaccggcgagcaggcgctggagatctgtgacgcgctggcgcgctctggtgcggttgatgttatcgtcgtcgactccgtcgcggcgttgacgccgaaagcggaaatcgaaggcgaaatcggcgactctcacatgggccttgcggcgcgtatgatgagccaggcgatgcgtaagctggcgggtaacctgaagcagtccaacacgctgctgatctttatcaaccagatccgtatgaaaattggcgtgatgttcggtaacccggaaaccactaccggtggtaacgcgctgaagttctacgcctctgtgcgtctggacattcgccgcatcggcgcggtgaaagagggcgacaacgtcgtcggcagcgaaacccgcgtcaaagtggtgaaaaacaagattgccgcgccgtttaaacaggccgaattccagatcctctacggcgaaggcatcaacttctacggcgagctggtagacctcggcgtaaaagagaagctgattgagaaagcgggtgcctggtatagctacaacggcgacaaaatcggtcagggtaaagcgaacgcgatcacctggctgaaagagaacccggcggcggcgaaagagattgagaagaaagtgcgcgaactgctgctcaacaatcaggatgcgaagccagacttcgttgttgacggcaacgacgcagaagaaaccgaacaggacttctga

SEQ ID NO: 114238 - protein, 352 aa, Klebsiella pneumoniae subsp. pneumoniae MGH 78578
MAIDENKQKALAAALGQIEKQFGKGSIMRLGEDRTMDVETISTGSLSLDIALGAGGLPMGRIVEIYGPESSGKTTLTLQVIAAAQREGKTCAFIDAEHALDPVYARKLGVDIDNLLCSQPDTGEQALEICDALARSGAVDVIVVDSVAALTPKAEIEGEIGDSHMGLAARMMSQAMRKLAGNLKQSNTLLIFINQIRMKIGVMFGNPETTTGGNALKFYASVRLDIRRIGAVKEGDNVVGSETRVKVVKNKIAAPFKQAEFQILYGEGINFYGELVDLGVKEKLIEKAGAWYSYNGDKIGQGKANAITWLKENPAAAKEIEKKVRELLLNNQDAKPDFVVDGNDAEETEQDF

SEQ ID NO: 114239 - DNA, 1047 bp, Kineococcus radiotolerans SRS30216; identical to SEQ ID NO: 100209
  CDS (1)..(1047): transl_table=11

SEQ ID NO: 114240 - protein, 348 aa, Kineococcus radiotolerans SRS30216; identical to SEQ ID NO: 100210

SEQ ID NO: 114241 - DNA, 1086 bp, Xanthobacter autotrophicus Py2; identical to SEQ ID NO: 100227
  CDS (1)..(1086): transl_table=11

SEQ ID NO: 114242 - protein, 361 aa, Xanthobacter autotrophicus Py2; identical to SEQ ID NO: 100228

SEQ ID NO: 114243 - DNA, 1293 bp, Arabidopsis thaliana; identical to SEQ ID NO: 100113
  CDS (1)..(1293)

SEQ ID NO: 114244 - protein, 430 aa, Arabidopsis thaliana; identical to SEQ ID NO: 100114

SEQ ID NO: 114245 - DNA, 1062 bp, Escherichia coli O157:H7 EDL933; identical to SEQ ID NO: 100117
  CDS (1)..(1062): transl_table=11
  misc_feature (78)..(78): y is t or c
  misc_feature (472)..(472): n is a, g, c or t
  misc_feature (702)..(702): r is g or a

SEQ ID NO: 114246 - protein, 353 aa, Escherichia coli O157:H7 EDL933; identical to SEQ ID NO: 100118
  misc_feature (158)..(158): The Xaa at location 158 stands for Arg, Cys, Gly, or Ser.

SEQ ID NO: 114247 - DNA, 1251 bp, Agrobacterium tumefaciens str. C58; identical to SEQ ID NO: 100119
  CDS (1)..(1251): transl_table=11

SEQ ID NO: 114248 - protein, 416 aa, Agrobacterium tumefaciens str. C58; identical to SEQ ID NO: 100120

SEQ ID NO: 114249 - DNA, 1137 bp, Brucella melitensis 16M
  CDS (1)..(1137): transl_table=11
ttgtggcaacgagcctgccgggcttctagcgagacaagaggatggtgtaagatgtctcaaaattcattgcgacttgttgaggataattcagtggacaagacaaaagctctcgacgcggcattgtcgcaaatcgaacgggcgttcggcaaaggctcaatcatgcgtctgggccagaacgatcaggtggtcgaaatcgaaaccgtatcgaccggctcgctctcgctcgatattgccttgggggttggcggcttgcccaagggacgtatcgtggaaatctatgggccggaaagttccggtaaaaccacgcttgccttgcacaccatcgctgaagcgcagaagaagggcggcatctgcgcattcgtcgatgcggaacatgcgcttgacccggtctatgcgcgcaagctcggtgtcgatcttgaaaatcttctgatctcgcagcccgatacgggtgaacaggcgcttgaaatcaccgatacgctcgtgcgctctggcgccatcgacgttctcgttgtcgactcggtcgcagccctgacgccgcgtgctgaaatcgaaggtgaaatgggggattccctgccgggccttcaggcccgtctcatgagccaggcgctgcgcaagcttactggctccatttcccgttcaaactgcatggtgatcttcatcaaccagatccgcatgaagatcggtgtcatgttcggctcgccggaaacgacaacgggcggcaatgcgctcaagttctatgcttcggttcgcctcgatattcgccgtatcggctccatcaaggagcgcgacgaagtggtgggcaaccagacccgcgtgaaggtggtgaagaacaagctcgctcctccgttcaagcaggtcgaattcgatatcatgtatggcgcgggcgtttccaaggtgggcgagctggtcgatcttggtgtcaaggccggtgtggttgagaagtctggtgcctggttctcctataattcccagcgtctcgggcaggggcgcgagaacgccaagcaatatctcaaggataatccggaagtcgcgcgtgaaatcgaaaccacgcttcgccagaatgccggcctgatcgccgagcagttccttgacgatggcggaccggaagaagatgctgccggcgcggcggaaatgtaa

SEQ ID NO: 114250 - protein, 378 aa, Brucella melitensis 16M
MWQRACRASSETRGWCKMSQNSLRLVEDNSVDKTKALDAALSQIERAFGKGSIMRLGQNDQVVEIETVSTGSLSLDIALGVGGLPKGRIVEIYGPESSGKTTLALHTIAEAQKKGGICAFVDAEHALDPVYARKLGVDLENLLISQPDTGEQALEITDTLVRSGAIDVLVVDSVAALTPRAEIEGEMGDSLPGLQARLMSQALRKLTGSISRSNCMVIFINQIRMKIGVMFGSPETTTGGNALKFYASVRLDIRRIGSIKERDEVVGNQTRVKVVKNKLAPPFKQVEFDIMYGAGVSKVGELVDLGVKAGVVEKSGAWFSYNSQRLGQGRENAKQYLKDNPEVAREIETTLRQNAGLIAEQFLDDGGPEEDAAGAAEM

SEQ ID NO: 114251 - DNA, 924 bp, Thermoanaerobacter tengcongensis MB4
  CDS (1)..(924): transl_table=11
ttgatgattgaaaagcaaaaggctttagaaatggccattagtcaaatagaaagacaatttggaaaaggcgctattatgaggcttggcgatactgcaaagttaaacgtagaagttattcctacagggtcattggaattagatattgcattgggagttggaggagtaccaagaggcagaataatagaaatttttggacctgagtcttctggtaagaccactttagcacttcacatgatagcagaagctcagaaaataggaggaacaggtgctttcatagacgcagagcacgcacttgatccagtatatgcaaaaaatctcggggtaaacattgacgatctacttgttgcccagcctgacacaggagagcaagctttagagatagcagaagctttagtaagaagcggagcagtagacataattgtgattgactctgttgcagctttggtgccaaaagctgaaatagaaggagaaatgggagacagccatgtaggtcttcaggcaaggctcatgtcacaagctttgaggaagttggcaggtgttaccagcaagtcgaaatcaattgttgtgttcataaaccagttgagagaaaaagtgggtgtaatgtttggcaatcctgaaactactcctggtggaagagctctaaaattttacgctaccataagattggatgtaagaaaagtggataacatcaaacagggcaatgaaattgtgggaagcaggacccgcgtaaaagtggtgaaaaacaaaatagcacctcctttcaaacaggctgaattcgacatcatgtacggagaaggaatatcaagagagggaagcatacttgatttaggaacagctcttgatataatagagaaaagcggttcttggtactcctataaagacataaaactgggccaggaagagaaaatgcaaagcagtttttaa

SEQ ID NO: 114252 - protein, 307 aa, Thermoanaerobacter tengcongensis MB4
MMIEKQKALEMAISQIERQFGKGAIMRLGDTAKLNVEVIPTGSLELDIALGVGGVPRGRIIEIFGPESSGKTTLALHMIAEAQKIGGTGAFIDAEHALDPVYAKNLGVNIDDLLVAQPDTGEQALEIAEALVRSGAVDIIVIDSVAALVPKAEIEGEMGDSHVGLQARLMSQALRKLAGVTSKSKSIVVFINQLREKVGVMFGNPETTPGGRALKFYATIRLDVRKVDNIKQGNEIVGSRTRVKVVKNKIAPPFKQAEFDIMYGEGISREGSILDLGTALDIIEKSGSWYSYKDIKLGQEEKMQSSF

SEQ ID NO: 114253 - DNA, 1053 bp, Dichelobacter nodosus VCS1703A; identical to SEQ ID NO: 100131
  CDS (1)..(1053): transl_table=11

SEQ ID NO: 114254 - protein, 350 aa, Dichelobacter nodosus VCS1703A; identical to SEQ ID NO: 100132

SEQ ID NO: 114255 - DNA, 1059 bp, Psychrobacter arcticus 273-4; identical to SEQ ID NO: 100135
  CDS (1)..(1059): transl_table=11

SEQ ID NO: 114256 - protein, 352 aa, Psychrobacter arcticus 273-4; identical to SEQ ID NO: 100136

SEQ ID NO: 114257 - DNA, 1038 bp, Colwellia psychrerythraea 34H; identical to SEQ ID NO: 100137
  CDS (1)..(1038): transl_table=11

SEQ ID NO: 114258 - protein, 345 aa, Colwellia psychrerythraea 34H; identical to SEQ ID NO: 100138

SEQ ID NO: 114259 - DNA, 1065 bp, Pseudomonas syringae pv. phaseolicola 1448A
  CDS (1)..(1065): transl_table=11
atggacgacaacaagaagaaagccttggctgcggccttgggtcagatcgagcgtcagttcggtaaaggtgccgtgatgcgcatgggcgaccatgatcgccaggctattcctgccatctccactggttcgctgggtctggatatcgcactgggcatcggcggtctgccgaaaggccggatcgtggaaatctacggtccagagtcttccggtaaaaccacgctgacgttgtcggtcatcgcgcaagcccagaaaatgggtgctacctgtgcgtttgtcgacgccgagcacgcgcttgatccggaatacgccggcaaactgggcgtcaatgtcgacgacctgctggtttcgcagccggacaccggtgagcaggcgcttgaaatcaccgacatgctggtacgttccaacgccatcgacgtcatcgttgtcgactccgttgctgcgctggtgccgaaggcagaaatcgaaggcgaaatgggcgacatgcacgtgggtctgcaggcgcgtctgatgtcgcaggcgctgcgcaagatcacgggtaacatcaagaacgccaactgtctggtgatcttcatcaaccagatccgcatgaaaatcggcgtgatgttcggcagcccggaaaccactaccggtggtaacgccctgaagttctacgcttcggtacgtctggacatccgccgtacaggcgcagtgaaagaaggcgacgaggttgtcggcagcgaaacccgcgtcaaggtcgtgaagaacaaggtggctccgccattccgtcaggccgagttccagattctttacggcaagggtatctacctgaacggtgaaatcgtcgatctggccgttctgcatggttttgtcgagaagtccggcgcctggtacagctaccaaggcagcaagattggtcagggtaaagccaactcggccaagttcctggcagataacccggaaatctgcaaagcgctcgagaagcagattcgcgacaagttgctcacccctggtgtcgacaccaaagcggtcggttcccgcgaagctgccgttgctgatgatatggccgaagcagacgctgatatctga

SEQ ID NO: 114260 - protein, 354 aa, Pseudomonas syringae pv. phaseolicola 1448A
MDDNKKKALAAALGQIERQFGKGAVMRMGDHDRQAIPAISTGSLGLDIALGIGGLPKGRIVEIYGPESSGKTTLTLSVIAQAQKMGATCAFVDAEHALDPEYAGKLGVNVDDLLVSQPDTGEQALEITDMLVRSNAIDVIVVDSVAALVPKAEIEGEMGDMHVGLQARLMSQALRKITGNIKNANCLVIFINQIRMKIGVMFGSPETTTGGNALKFYASVRLDIRRTGAVKEGDEVVGSETRVKVVKNKVAPPFRQAEFQILYGKGIYLNGEIVDLAVLHGFVEKSGAWYSYQGSKIGQGKANSAKFLADNPEICKALEKQIRDKLLTPGVDTKAVGSREAAVADDMAEADADI

SEQ ID NO: 114261 - DNA, 1032 bp, Dechloromonas aromatica RCB; identical to SEQ ID NO: 100139
  CDS (1)..(1032): transl_table=11

SEQ ID NO: 114262 - protein, 343 aa, Dechloromonas aromatica RCB; identical to SEQ ID NO: 100140

SEQ ID NO: 114263 - DNA, 1074 bp, Ehrlichia canis str. Jake; identical to SEQ ID NO: 100143
  CDS (1)..(1074): transl_table=11

SEQ ID NO: 114264 - protein, 357 aa, Ehrlichia canis str. Jake; identical to SEQ ID NO: 100144

SEQ ID NO: 114265 - DNA, 1059 bp, Pseudomonas fluorescens PfO-1
  CDS (1)..(1059): transl_table=11
atggacgacaacaagaagaaagccttggctgcggccctgggtcagatcgaacgtcaattcggcaagggtgccgtaatgcgtatgggcgatcaggaccgtcaggcgatcccggccatttccaccggctctctgggtctggacatcgcactcggcatcggcggcctgccaaaaggccgtatcgttgaaatctacggtcctgaatcttccggtaaaaccacactgacgctgtccgtgatcgcccaggctcaaaaagccggtgcgacctgcgccttcgtcgacgccgaacacgccctcgacccagagtacgccggcaagctgggcgtcaatgtcgacgacctgctggtttcccagccggacaccggcgagcaggccctggaaatcaccgacatgctggtgcgctccaacgccgttgacgtgatcatcgtcgactccgtggccgctctggtaccgaaggcagaaatcgaaggcgaaatgggtgacatgcacgtgggcctgcaagcccgtctgatgtcccaggcgctgcgtaaaatcaccggtaacatcaagaacgccaactgcctggtgatcttcatcaaccagatccgcatgaagatcggcgtgatgttcggcagcccggaaaccaccaccggtggtaacgcgctgaagttctacgcctcggttcgtctcgacatccgccgtaccggcgcggtgaaggaaggcgacgaagtggtcggcagcgaaacccgcgtcaaggttgtgaagaacaaggtggcttcgccgttccgtcaggccgagttccagattctctacggcaagggtatctacctgaacggcgagatgatcgacctgggcgttctgcacgggttcgtcgagaagtccggcgcctggtatgcctacgaaggcaccaagatcggtcagggcaaggccaactcggccaagttcctggcggacaacccggaagtcgcggccaagctcgagaagcaactgcgtgacaagctgctgtcgccagccgtgatcgccgactccaaggcttctgcggtcaaagagaccgaagacgacctggctgacgctgacatctga

SEQ ID NO: 114266 - protein, 352 aa, Pseudomonas fluorescens PfO-1
MDDNKKKALAAALGQIERQFGKGAVMRMGDQDRQAIPAISTGSLGLDIALGIGGLPKGRIVEIYGPESSGKTTLTLSVIAQAQKAGATCAFVDAEHALDPEYAGKLGVNVDDLLVSQPDTGEQALEITDMLVRSNAVDVIIVDSVAALVPKAEIEGEMGDMHVGLQARLMSQALRKITGNIKNANCLVIFINQIRMKIGVMFGSPETTTGGNALKFYASVRLDIRRTGAVKEGDEVVGSETRVKVVKNKVASPFRQAEFQILYGKGIYLNGEMIDLGVLHGFVEKSGAWYAYEGTKIGQGKANSAKFLADNPEVAAKLEKQLRDKLLSPAVIADSKASAVKETEDDLADADI

SEQ ID NO: 114267 - DNA, 1074 bp, Rhodobacter sphaeroides 2.4.1; identical to SEQ ID NO: 100147
  CDS (1)..(1074): transl_table=11

SEQ ID NO: 114268 - protein, 357 aa, Rhodobacter sphaeroides 2.4.1; identical to SEQ ID NO: 100148

SEQ ID NO: 114269 - DNA, 1125 bp, Synechococcus sp. CC9605
  CDS (1)..(1125): transl_table=11
atgcctgcagatatgaaatccggcgcttccgatccccgtccctccggagagagggacaaggcgctgaatctggttttgggtcagatcgaacgcaacttcggcaagggatcgatcatgcggctgggcgatgcctcccgcatgcgggtggagacgatttccaccggtgcgctgacccttgacctcgcgttgggtggtggttatccgaagggtcgcgtggtggagatctacggcccagaaagttccggtaaaaccacgctcactctgcacgcgattgctgaagtgcaaaagcgtggtggtgtggcggcctttgtggatgcggagcatgccctggatcccgtgtatgccgcttctctgggcgttgatgtcgagaacctgctggtctcccagcccgacaccggtgagatggcgctggaaattgttgaccagttggtgcgatccgcggcggttgacctcgtcgtcgtcgactcggtggcggctctcacccctcgtgctgagatcgaaggtgagatgggagacctggcggttggtgctcaagcgcgtctgatgagtcaggcgatgcggaagatcacaggcaacataggcaagtcgggttgcaccgtcatcttcctcaaccagttgcgtctcaagattggtgtgacctacggcaacccagagaccaccactggcggcaacgcgctcaagttctatgcctcggttcgcctcgacatccgtcgaattcagacgctcaagaagggaaccgaagagttcggtatcagggccaaggtgaaagtggcgaagaacaaggtggcgccgcccttccgcatcgctgaattcgacattctcttcggccgcggcatcagcaccctgggctgtctgcttgatctggctgaagaaacgggcgttgttgtccgcaagggcgcctggtacagctacgagggagacaacatcggtcagggtcgcgacaacaccatctcctggatggaggagaacccggacgcaacggccaccatcgaaacgttggtgcgtcagaagttgacggagggttctgaggtgaaggcgaattcgatgcgcccccttgccgctgctgcgaagacggctgctgccgataagtcggctccggccaaggcctcagaggcggcggcctga

SEQ ID NO: 114270 - protein, 374 aa, Synechococcus sp. CC9605
MPADMKSGASDPRPSGERDKALNLVLGQIERNFGKGSIMRLGDASRMRVETISTGALTLDLALGGGYPKGRVVEIYGPESSGKTTLTLHAIAEVQKRGGVAAFVDAEHALDPVYAASLGVDVENLLVSQPDTGEMALEIVDQLVRSAAVDLVVVDSVAALTPRAEIEGEMGDLAVGAQARLMSQAMRKITGNIGKSGCTVIFLNQLRLKIGVTYGNPETTTGGNALKFYASVRLDIRRIQTLKKGTEEFGIRAKVKVAKNKVAPPFRIAEFDILFGRGISTLGCLLDLAEETGVVVRKGAWYSYEGDNIGQGRDNTISWMEENPDATATIETLVRQKLTEGSEVKANSMRPLAAAAKTAAADKSAPAKASEAAA

SEQ ID NO: 114271 - DNA, 1101 bp, Rhodospirillum rubrum ATCC 11170; identical to SEQ ID NO: 100155
  CDS (1)..(1101): transl_table=11

SEQ ID NO: 114272 - protein, 366 aa, Rhodospirillum rubrum ATCC 11170; identical to SEQ ID NO: 100156

SEQ ID NO: 114273 - DNA, 1071 bp, Novosphingobium aromaticivorans DSM 12444; identical to SEQ ID NO: 100161
  CDS (1)..(1071): transl_table=11

SEQ ID NO: 114274 - protein, 356 aa, Novosphingobium aromaticivorans DSM 12444; identical to SEQ ID NO: 100162

SEQ ID NO: 114275 - DNA, 1065 bp, Anaplasma phagocytophilum HZ
  CDS (1)..(1065): transl_table=11
atgaaggactccccctctgataagcagcgggctgttgatgctgctattggtcagattgaacgcgcttttgggcgtggatctattatgaggctgcagaatagccctgtagaagctgttgagtgtgtttctactgggtctattgctctagatgcagctctaggtgttggggggcttcctaggggccgtatcattgagatttttggccctgaaagctcgggtaagactaccttagctcttcatgttattgctgaggctcagaaaaacggtggagcttgcgcctttattgatgccgaacatgctttggatacgttatacgcgagaaagctaggggtatctgtaggagatttgatcgtatctcagcctgacaccggagaacaggcgttgcacattgttgagcatcttgtgaactcgggtgcggtggacgttattgttgtggattctgttgctgctttaactcctcgtgctgaaattgaaggggatatgggagatcagcacatgggtttgcaggctcgtctattgagtcacgcgcttcggaaattgacttctatagtttctaaagccaactgcttgctcgtgtttattaaccaaattcgcatgaaaataggggttgtgtacggtaatcctgaggtcactactggtggtagtgcgctgaagttttacacctctatacgtcttgatattcgcaaggttagtgcactgaaggaaaaagaaaatgttactggacacttggcgcgcgtaaaagtagtcaagaataaggttgcgcctcctttcaagcaagctgagtttgatatcatgtatagtgaaggtatctccaaagttggggagattctggatatgggtgtaagatttggctttatagaaaaagctggctcttattattcacatgaaggtatcaagcttggacaaggccgggagacagctagaagttatctcaagaacaatgctgatctttctcataagttagaagggttgattagggcgaaattattggaaagcatgcgtagcagcgacgtttttggttctgatggacgcgcgccttccgaggaaatagaggaatctttctag

SEQ ID NO: 114276 - protein, 354 aa, Anaplasma phagocytophilum HZ
MKDSPSDKQRAVDAAIGQIERAFGRGSIMRLQNSPVEAVECVSTGSIALDAALGVGGLPRGRIIEIFGPESSGKTTLALHVIAEAQKNGGACAFIDAEHALDTLYARKLGVSVGDLIVSQPDTGEQALHIVEHLVNSGAVDVIVVDSVAALTPRAEIEGDMGDQHMGLQARLLSHALRKLTSIVSKANCLLVFINQIRMKIGVVYGNPEVTTGGSALKFYTSIRLDIRKVSALKEKENVTGHLARVKVVKNKVAPPFKQAEFDIMYSEGISKVGEILDMGVRFGFIEKAGSYYSHEGIKLGQGRETARSYLKNNADLSHKLEGLIRAKLLESMRSSDVFGSDGRAPSEEIEESF

SEQ ID NO: 114277 - DNA, 984 bp, Neorickettsia sennetsu str. Miyayama; identical to SEQ ID NO: 100163
  CDS (1)..(984): transl_table=11

SEQ ID NO: 114278 - protein, 327 aa, Neorickettsia sennetsu str. Miyayama; identical to SEQ ID NO: 100164

SEQ ID NO: 114279 - DNA, 1047 bp, Saccharophagus degradans 2-40; identical to SEQ ID NO: 100167
  CDS (1)..(1047): transl_table=11

SEQ ID NO: 114280 - protein, 348 aa, Saccharophagus degradans 2-40; identical to SEQ ID NO: 100168

SEQ ID NO: 114281 - DNA, 1035 bp, Methylobacillus flagellatus KT; identical to SEQ ID NO: 100169
  CDS (1)..(1035): transl_table=11

SEQ ID NO: 114282 - protein, 344 aa, Methylobacillus flagellatus KT; identical to SEQ ID NO: 100170

SEQ ID NO: 114283 - DNA, 1077 bp, Burkholderia xenovorans LB400; identical to SEQ ID NO: 100171
  CDS (1)..(1077): transl_table=11

SEQ ID NO: 114284 - protein, 358 aa, Burkholderia xenovorans LB400; identical to SEQ ID NO: 100172

SEQ ID NO: 114285 - DNA, 1074 bp, Silicibacter sp. TM1040; identical to SEQ ID NO: 100175
  CDS (1)..(1074): transl_table=11

SEQ ID NO: 114286 - protein, 357 aa, Silicibacter sp. TM1040; identical to SEQ ID NO: 100176

SEQ ID NO: 114287 - DNA, 1044 bp, Mycobacterium sp. MCS; identical to SEQ ID NO: 100195
  CDS (1)..(1044): transl_table=11

SEQ ID NO: 114288 - protein, 347 aa, Mycobacterium sp. MCS; identical to SEQ ID NO: 100196

SEQ ID NO: 114289 - DNA, 1083 bp, Trichodesmium erythraeum IMS101
  CDS (1)..(1083): transl_table=11
atggcttcagctacagataacaaagaaaaacaaaaagctttagattcagtcctcaaaaccatagaaaaaacttttggtaaagggtcaattgtccgtttgggagatgctacccgcatgaaggtagaaacaatctcgagtggcgcacttaccttagatttggcattaggaggtggcttacccaagggcagagttattgaaatttacggaccagaaagttctggaaaaacgactctagcattacatgcgatcgccgaaactcagaaaagtggtggtatagcagcttttgtagatgcagaacacgctctagaccctacttatgctgctgcattaggagtagatattgaaaatttattggtctctcaacctgatactggagagatggccttagaagtagtggatcatcttgttcgttctgtagctgttgatattgtggttgttgactcggtagcagcgttagtacctagagctgaaattgagggagatatgggagattctcacatgggtctccaagctcgtttaatgagtcaagcactacggaaaattacaggaaatattggtaaatcaggttgtacagtagttttcctcaaccaacttcgccaaaagataggtgttgtttatggtaatccagaaactactactggtggtaatgctcttaaattttatgcttcggttagacttgatattcgtcgcacacaaactctcaagaaatcttcagaggaatatggtattcatgctaaggtcaaagttgctaagaataaggtcgctcctccattccgcgtagctgaatttgatattatttttggtaaaggaatttctaatgtcggctgtattattgacttagccgaagagacagatgtaattaaacgtaaaggtgcttggtatagttaccaaggaagtaattttgctcaaggtcgagaaaaagctattgcttatatggaatctaatattgactttgccaaaaaaattgaaaagcaagttcgagatcatttaagtcaaggtgctttggtttctgctaattctgtggcacgggttgatgagatagaagaggatgaagatgaggatgaagctctagaagaagagtaa

SEQ ID NO: 114290 - protein, 360 aa, Trichodesmium erythraeum IMS101
MASATDNKEKQKALDSVLKTIEKTFGKGSIVRLGDATRMKVETISSGALTLDLALGGGLPKGRVIEIYGPESSGKTTLALHAIAETQKSGGIAAFVDAEHALDPTYAAALGVDIENLLVSQPDTGEMALEVVDHLVRSVAVDIVVVDSVAALVPRAEIEGDMGDSHMGLQARLMSQALRKITGNIGKSGCTVVFLNQLRQKIGVVYGNPETTTGGNALKFYASVRLDIRRTQTLKKSSEEYGIHAKVKVAKNKVAPPFRVAEFDIIFGKGISNVGCIIDLAEETDVIKRKGAWYSYQGSNFAQGREKAIAYMESNIDFAKKIEKQVRDHLSQGALVSANSVARVDEIEEDEDEDEALEEE

SEQ ID NO: 114291 - DNA, 1074 bp, Shewanella sp. MR-4; identical to SEQ ID NO: 100181
  CDS (1)..(1074): transl_table=11

SEQ ID NO: 114292 - protein, 357 aa, Shewanella sp. MR-4; identical to SEQ ID NO: 100182

SEQ ID NO: 114293 - DNA, 1044 bp, Alkalilimnicola ehrlichei MLHE-1; identical to SEQ ID NO: 100183
  CDS (1)..(1044): transl_table=11

SEQ ID NO: 114294 - protein, 347 aa, Alkalilimnicola ehrlichei MLHE-1; identical to SEQ ID NO: 100184

SEQ ID NO: 114295 - DNA, 1071 bp, Hyphomonas neptunium ATCC 15444; identical to SEQ ID NO: 100185
  CDS (1)..(1071): transl_table=11

SEQ ID NO: 114296 - protein, 356 aa, Hyphomonas neptunium ATCC 15444; identical to SEQ ID NO: 100186

SEQ ID NO: 114297 - DNA, 1053 bp, Nocardioides sp. JS614
  CDS (1)..(1053): transl_table=11
atggctggaggagaccgcgagaaggccctggacgccgcactcgccaacatcgagaagcagttcggcaagggttcggtcatgcgcctcggtgacgaggtccgggccccgctcgagatcatcccgagcggctcgatcgccctcgacgtcgcactcggcctgggcggcttcccgcgcggtcgcgtcgtggagatctacggcccggagtcctcgggcaagacgaccgtcgccctgcacgcggtggccaacgcccagcgcgccggcggcatcgtggcgttcatcgacgccgagcacgccctcgaccccgactacgcgaagaacctcggcgtcgacaccgacgcgttgctggtctcccagcccgactccggtgagcaggcgctcgagatcgcggacatgctgatccgttccggtgcgctcgacctgatcgtgatcgactcggtcgccgcgctggtgccccgggccgagatcgagggcgagatgggcgacagtcacgtcggcctccaggcccgcctgatgagccaggcgctgcggaagatgaccggtgcgctcaacaactccaagaccacgatgatcttcatcaaccagctgcgcgagaagatcggcgtgatgttcggctcgcccgagaccaccaccggcggcaaggcactgaagttctacgcctcggtccgcctcgacgtgcgccgcatcgagacgctcaaggacggcaccgacatggtcggcaaccggacccgcgtcaaggtcgtgaagaacaaggtggccccgccgttcaagcaggccgagttcgacatcatgtacggcaagggcatcagccgcgagggtggcctgatcgacgtcggcgtcgaggcgggcctggttcgcaaggccggtgcctggtacacctacgagggcgaccagctcggccagggcaaggagaacgctcgcgccttcctgcgcgacaaccccgacctggccaacgagctcgagaagaagatcctcgagaagctcggcgtcgggccgaccgtcgaccaggacgtggccgagctgccggcggagccgatcggtgtcggcgacttctga

SEQ ID NO: 114298 - protein, 350 aa, Nocardioides sp. JS614
MAGGDREKALDAALANIEKQFGKGSVMRLGDEVRAPLEIIPSGSIALDVALGLGGFPRGRVVEIYGPESSGKTTVALHAVANAQRAGGIVAFIDAEHALDPDYAKNLGVDTDALLVSQPDSGEQALEIADMLIRSGALDLIVIDSVAALVPRAEIEGEMGDSHVGLQARLMSQALRKMTGALNNSKTTMIFINQLREKIGVMFGSPETTTGGKALKFYASVRLDVRRIETLKDGTDMVGNRTRVKVVKNKVAPPFKQAEFDIMYGKGISREGGLIDVGVEAGLVRKAGAWYTYEGDQLGQGKENARAFLRDNPDLANELEKKILEKLGVGPTVDQDVAELPAEPIGVGDF

SEQ ID NO: 114299 - DNA, 1035 bp, Azoarcus sp. BH72
  CDS (1)..(1035): transl_table=11
atggacgacaacaaggccaaggcccttgccgccgcgctatcccagatcgaaaagcagttcggcaagggatccatcatgcgcatgggcgacggcaatgtcgaaaaggacatccagaccgtttccaccggctcgctcggcctcgacatcgcgctcggcctgggcggcctgccgcgcggccgcgtcgtcgaaatctacgggccggagtcgtccggcaagaccacgctgacgctgcaggtcgtcgccgaaatgcagaagctcggcggcaccgcggccttcatcgacgccgagcacgcgctcgacgtcggctacgccgaaaagctcggtgtgaacatcaccgacctgctgatctcgcagccggacaccggcgaacaggcgctcgaaatcgccgacatgctggtgcggtccggcggcgtggacgtggtcgtcatcgactcggtcgcggcgctcacccccaaggccgaaatcgaaggcgagatgggcgaccagctccccggcctgcaggcccgcctgatgtctcaggcgctgcgcaagctcaccgccaacatcaagcgcaccaacaccctggtgatcttcatcaaccagattcgcatgaagatcggggtgatgttcggcaacccggaaaccaccaccggcggcaacgcgctcaagttctacgcctcggtgcgcatggacatccgccgcaccggcaccatcaagcgcggcgacgaggtggtcggctccgaaaccaaggtcaaggtcgtcaagaacaaggtctcgccgccgttcaaggaagcgcacttcgacatcctgtacggcgaaggcgtgtcgcgcgagggcgagatcatcgacctcggcgtggaccacaagatcgtcgacaagtccggcgcctggtacgcctacaacggcgacaagatcggccagggcaaggacaacgcgcgcgaattcctgcgcgccaacccggcgctggcacgcgagatcgagaacaaggtccgcgtcgtgctcggcctcaaggaactgccggtcgacggcgcgcagccggccgcggccgaggcctga

SEQ ID NO: 114300 - protein, 344 aa, Azoarcus sp. BH72
MDDNKAKALAAALSQIEKQFGKGSIMRMGDGNVEKDIQTVSTGSLGLDIALGLGGLPRGRVVEIYGPESSGKTTLTLQVVAEMQKLGGTAAFIDAEHALDVGYAEKLGVNITDLLISQPDTGEQALEIADMLVRSGGVDVVVIDSVAALTPKAEIEGEMGDQLPGLQARLMSQALRKLTANIKRTNTLVIFINQIRMKIGVMFGNPETTTGGNALKFYASVRMDIRRTGTIKRGDEVVGSETKVKVVKNKVSPPFKEAHFDILYGEGVSREGEIIDLGVDHKIVDKSGAWYAYNGDKIGQGKDNAREFLRANPALAREIENKVRVVLGLKELPVDGAQPAAAEA

SEQ ID NO: 114301 - DNA, 1122 bp, Acidovorax sp. JS42; identical to SEQ ID NO: 100199
  CDS (1)..(1122): transl_table=11

SEQ ID NO: 114302 - protein, 373 aa, Acidovorax sp. JS42; identical to SEQ ID NO: 100200

SEQ ID NO: 114303 - DNA, 1068 bp, Haemophilus somnus 2336; identical to SEQ ID NO: 100201
  CDS (1)..(1068): transl_table=11

SEQ ID NO: 114304 - protein, 355 aa, Haemophilus somnus 2336; identical to SEQ ID NO: 100202

SEQ ID NO: 114305 - DNA, 1032 bp, Rickettsia sibirica 246
  CDS (1)..(1032): transl_table=11
atgtcaaatacagataaggaaagagccattgccgcagcactcgcacaaattgaaaaaagctacggtaaaggttcggtaatgaaactagggcagcgtccgcatgttgatatagaggccgtatcaaccggctcacttgggctagatatagctcttggaatcggcggtgttcccaaaggtagaatcatcgaaatttttggtcctgaaagctcaggtaaaaccactctaacattgcatttaattgcagaagctcaaaaaaagggtggtacatgtgcttttattgatgccgagcatgcattagaccctgcttatgctaaaaaattaggcgtaaatattgatgagcttattatttcacagcccgatacaggtgaacaagccctagaaattgccgatacgttaattcgctccagcggtattgatatgataataatagatagtgttgcggctttagtaccgaaatcagagattgagggcgaaatgggtgacgctcaaatggcttctcaagcaaggttaatgagccaggctttgcgtaaacttactgcatcaattaatcgcaccaattgtattgctgttttcatcaatcaaatcagaatgaaaataggtgtgatgttcggtagtcctgaaaccacgacaggcggtaatgccttaaaattctatgcttctgttaggatcgatataagaagaatcggctccattaaagataaagaagaagtaataggcagccaaaccaaagtaaaagtagtcaaaaacaaagtatctcctccatttaaaactgcagattttgatataatgtacggttcaggtatttcaaaagaaggcgagataatcgaccttggagttaagcttgatattgttgagaaatccggctcttggttttcctacaagaacgtacgcataggtcaagggcgtgaaaacgtcaaacaatatttaaaagaacatccacaaatttccaacgaaattgagaaaataatacgtgaaaaatcgtcaaaaattactaatataaatcttgaccaaacggaggaagaaaatgattga

SEQ ID NO: 114306 - protein, 343 aa, Rickettsia sibirica 246
MSNTDKERAIAAALAQIEKSYGKGSVMKLGQRPHVDIEAVSTGSLGLDIALGIGGVPKGRIIEIFGPESSGKTTLTLHLIAEAQKKGGTCAFIDAEHALDPAYAKKLGVNIDELIISQPDTGEQALEIADTLIRSSGIDMIIIDSVAALVPKSEIEGEMGDAQMASQARLMSQALRKLTASINRTNCIAVFINQIRMKIGVMFGSPETTTGGNALKFYASVRIDIRRIGSIKDKEEVIGSQTKVKVVKNKVSPPFKTADFDIMYGSGISKEGEIIDLGVKLDIVEKSGSWFSYKNVRIGQGRENVKQYLKEHPQISNEIEKIIREKSSKITNINLDQTEEEND

SEQ ID NO: 114307 - DNA, 1032 bp, Rickettsia rickettsii
  CDS (1)..(1032): transl_table=11
atgtcaaatacagataaggaaagagccattgccgcagcactcgcacaaattgaaaaaagctacggtaaaggttcggtaatgaaactagggcagcgtccgcatgttgatatagaggccgtatcgaccggctcacttgggctagatatagctcttggaatcggcggtgttcccaaaggtagaatcatcgaaatttttggtcctgaaagctcaggtaaaaccactctaacattgcatttaattgcagaagctcaaaaaaagggtggtacatgtgcttttattgatgccgagcatgcattagaccctgcttatgctaaaaaattaggcgtaaatattgatgagcttattatttcacagcccgatacaggtgaacaagccctagaaattgccgatacgttaattcgctccagcggtattgatatgataataatagatagtgttgcggctttagtaccgaaatcagagattgagggcgaaatgggtgatgctcaaatggcttctcaagcaaggttaatgagccaggctttgcgtaaacttactgcatcaattaatcgcaccaattgtattactgttttcatcaatcaaatcagaatgaaaataggtgtgatgttcggtagtcctgaaactacgacaggcggtaatgccttaaaattctatgcttctgttaggatcgatataagaagaatcggctccattaaagacaaagaagaagtaataggcagccaaaccaaagtaaaagtagtcaaaaacaaagtagctcctccatttaaaactgcagattttgatataatgtacggttcaggtatttcaaaagaaggcgagataatcgaccttggagttaagcttgatattgttgagaaatccggctcttggttttcctacaagaacgtacgtataggtcaagggcgtgaaaacgtcaaacaatatttaaaagaacatccacaaatttccaacgaaattgagaaaataatacgtgaaaaatcgtcaaaaattactaatataaatcttgatcaaacggaggaagaaaatgattga

SEQ ID NO: 114308 - protein, 343 aa, Rickettsia rickettsii
MSNTDKERAIAAALAQIEKSYGKGSVMKLGQRPHVDIEAVSTGSLGLDIALGIGGVPKGRIIEIFGPESSGKTTLTLHLIAEAQKKGGTCAFIDAEHALDPAYAKKLGVNIDELIISQPDTGEQALEIADTLIRSSGIDMIIIDSVAALVPKSEIEGEMGDAQMASQARLMSQALRKLTASINRTNCITVFINQIRMKIGVMFGSPETTTGGNALKFYASVRIDIRRIGSIKDKEEVIGSQTKVKVVKNKVAPPFKTADFDIMYGSGISKEGEIIDLGVKLDIVEKSGSWFSYKNVRIGQGRENVKQYLKEHPQISNEIEKIIREKSSKITNINLDQTEEEND

SEQ ID NO: 114309 - DNA, 1032 bp, Bacillus cereus G9241
  CDS (1)..(1032): transl_table=11
atgagtgatcgtcaagcggcattagatatggcgttaaaacaaatagagaagcaattcggtaaaggttcaattatgaaattaggagaacaagcggagcgtagagtttctacagtttctagtggttctttagcacttgatgtggcattaggggtaggcggatacccacgcggccgtattatcgagatttatggacctgagagttcaggtaaaacaacagtttcattacatgcaattgcagaggtacagcgccaaggtggacaagcggcattcattgatgcggagcatgcaatggatcctgtatatgcacaaaaattaggtgttaacatcgatgaattattattatcacaacctgatacaggggagcaaggtttagaaatcgcagaagcacttgtacgaagtggtgcggttgatattatcgtaattgactctgtggcagctcttgtaccgaaagctgagattgaaggagacatgggtgactcacacgtaggtttacaagctcgtttaatgtctcaagcgcttcgtaaactttcaggtgcaatcaataaatcaaaaacaatcgcaatctttattaaccaaattcgtgaaaaagttggggttatgttcggaaacccagaaacaactccaggtggtcgtgcgttgaaattctattcaactgttcgtcttgaagtgcgtcgtgcggagcaattaaaacaaggtaacgacattgttggtaataaaacaaaagtaaaagtagttaaaaataaagtggcaccaccattccgtgttgcggaagttgatattatgtacggagaaggtatttcaagagaaggtgaaatcttggatatggcttctgaacttgatatcgttcaaaagagcggtgcttggtactcttataatgaagaacgcttaggacaaggtcgtgaaaattctaagcagttcttaaaagaaaatacggatttaagagaagaaattgccttctttattcgtgagcatcacggaattagcgaagattctggtgctgaaggtatggaagatccaagtcttcttgattaa

SEQ ID NO: 114310 - protein, 343 aa, Bacillus cereus G9241
MSDRQAALDMALKQIEKQFGKGSIMKLGEQAERRVSTVSSGSLALDVALGVGGYPRGRIIEIYGPESSGKTTVSLHAIAEVQRQGGQAAFIDAEHAMDPVYAQKLGVNIDELLLSQPDTGEQGLEIAEALVRSGAVDIIVIDSVAALVPKAEIEGDMGDSHVGLQARLMSQALRKLSGAINKSKTIAIFINQIREKVGVMFGNPETTPGGRALKFYSTVRLEVRRAEQLKQGNDIVGNKTKVKVVKNKVAPPFRVAEVDIMYGEGISREGEILDMASELDIVQKSGAWYSYNEERLGQGRENSKQFLKENTDLREEIAFFIREHHGISEDSGAEGMEDPSLLD

SEQ ID NO: 114311 - DNA, 1044 bp, Xylella fastidiosa Ann-1; identical to SEQ ID NO: 100211
  CDS (1)..(1044): transl_table=11

SEQ ID NO: 114312 - protein, 347 aa, Xylella fastidiosa Ann-1; identical to SEQ ID NO: 100212

SEQ ID NO: 114313 - DNA, 1071 bp, Sulfitobacter sp. EE-36; identical to SEQ ID NO: 100213
  CDS (1)..(1071): transl_table=11

SEQ ID NO: 114314 - protein, 356 aa, Sulfitobacter sp. EE-36; identical to SEQ ID NO: 100214

SEQ ID NO: 114315 - DNA, 1059 bp, Roseovarius nubinhibens ISM; identical to SEQ ID NO: 100215
  CDS (1)..(1059): transl_table=11

SEQ ID NO: 114316 - protein, 352 aa, Roseovarius nubinhibens ISM; identical to SEQ ID NO: 100216

SEQ ID NO: 114317 - DNA, 1080 bp, Oceanicola batsensis HTCC2597; identical to SEQ ID NO: 100217
  CDS (1)..(1080): transl_table=11

SEQ ID NO: 114318 - protein, 359 aa, Oceanicola batsensis HTCC2597; identical to SEQ ID NO: 100218

SEQ ID NO: 114319 - DNA, 1065 bp, Erythrobacter sp. NAP1; identical to SEQ ID NO: 100219
  CDS (1)..(1065): transl_table=11

SEQ ID NO: 114320 - protein, 354 aa, Erythrobacter sp. NAP1; identical to SEQ ID NO: 100220

SEQ ID NO: 114321 - DNA, 1062 bp, Pseudoalteromonas tunicata D2; identical to SEQ ID NO: 100221
  CDS (1)..(1062): transl_table=11

SEQ ID NO: 114322 - protein, 353 aa, Pseudoalteromonas tunicata D2; identical to SEQ ID NO: 100222

SEQ ID NO: 114323 - DNA, 1050 bp, Photobacterium sp. SKA34; identical to SEQ ID NO: 100223
  CDS (1)..(1050): transl_table=11

SEQ ID NO: 114324 - protein, 349 aa, Photobacterium sp. SKA34; identical to SEQ ID NO: 100224

SEQ ID NO: 114325 - DNA, 1041 bp, Oceanospirillum sp. MED92; identical to SEQ ID NO: 100225
  CDS (1)..(1041): transl_table=11

SEQ ID NO: 114326 - protein, 346 aa, Oceanospirillum sp. MED92; identical to SEQ ID NO: 100226

SEQ ID NO: 114327 - DNA, 1056 bp, Rickettsiella grylli; identical to SEQ ID NO: 100233
  CDS (1)..(1056): transl_table=11

SEQ ID NO: 114328 - protein, 351 aa, Rickettsiella grylli; identical to SEQ ID NO: 100234

SEQ ID NO: 114329 - DNA, 1089 bp, Oceanobacter sp. RED65; identical to SEQ ID NO: 100235
  CDS (1)..(1089): transl_table=11

SEQ ID NO: 114330 - protein, 362 aa, Oceanobacter sp. RED65; identical to SEQ ID NO: 100236

SEQ ID NO: 114331 - DNA, 1059 bp, marine gamma proteobacterium HTCC2143; identical to SEQ ID NO: 100241
  CDS (1)..(1059): transl_table=11

SEQ ID NO: 114332 - protein, 352 aa, marine gamma proteobacterium HTCC2143; identical to SEQ ID NO: 100242

SEQ ID NO: 114333 - DNA, 1044 bp, marine gamma proteobacterium HTCC2080; identical to SEQ ID NO: 100243
  CDS (1)..(1044): transl_table=11

SEQ ID NO: 114334 - protein, 347 aa, marine gamma proteobacterium HTCC2080; identical to SEQ ID NO: 100244

SEQ ID NO: 114335 - DNA, 1077 bp, Candidatus Desulfococcus oleovorans Hxd3; identical to SEQ ID NO: 100245
  CDS (1)..(1077): transl_table=11

SEQ ID NO: 114336 - protein, 358 aa, Candidatus Desulfococcus oleovorans Hxd3; identical to SEQ ID NO: 100246

SEQ ID NO: 114337 - DNA, 1068 bp, Pseudomonas putida GB-1; identical to SEQ ID NO: 100247
  CDS (1)..(1068): transl_table=11

SEQ ID NO: 114338 - protein, 355 aa, Pseudomonas putida GB-1; identical to SEQ ID NO: 100248

SEQ ID NO: 114339 - DNA, 1116 bp, Marinobacter sp. ELB17; identical to SEQ ID NO: 100249
  CDS (1)..(1116): transl_table=11

SEQ ID NO: 114340 - protein, 371 aa, Marinobacter sp. ELB17; identical to SEQ ID NO: 100250

SEQ ID NO: 114341 - DNA, 1041 bp, Moritella sp. PE36
  CDS (1)..(1041): transl_table=11
atggacgcgaataaagaaaaagccttagctgcagcacttggacaaattgaaaaacaatttggtaaaggttctatcatgaagctaggtgataaccgtaccatggacgtagaaactgtttctacaggttcactttctcttgatatcgcgttgggagcaggtggcttaccgatggggcgtatcgttgaaatttatggtcctgaatcaagtggtaaaacgacgttaacgttagaagtcatcgcctcagcacaacgtgaaggtaaagtttgtgcctttattgatgctgagcatgcactggatccgatttacgcgggtaaactgggtgttgatgtgaatgaactattgatatcgcaaccagataccggtgaacaagctctcgagatcactgacatgttagcgcgctcaggtgcagtcgatattatcgtgattgactcggttgcggcattaacgccaaaagctgagattgaaggcaacatgggcgacagccacatgggtctgcaagcgcgtatgttatcgcaagcgatgcgtaaattaacgggtaacttaaaaacgagtaataccatgtgtatcttcattaaccaaattcgtatgaagattggtgtgatgtttggttcacctgaaaccaccacaggtggtaatgcccttaaattttacgcgtcagtacgtttagatattcgtcgtattggttcggttaaagatggcgatgagatcacgggtaatgaaacgcgtgtaaaagtggttaaaaacaaaattgcagcaccgtttagacaagctgaatttcaaatcctatacggtaaaggcttcaaccgtaatggtgagctagttgatttaggtgtaaaagaaaaactgattgaaaaagccggcgcttggtactcatacaagggtgacaagattggtcaaggtaaagcgaaagcatcacagtaccttgctgataatccgaagattgctgctgaaatagacggtatgatccgtgctaacctactgggtaataaaggcgacgaagtggctgacgttaagactcctgaagttgaaacagaattttaa

SEQ ID NO: 114342 - protein, 346 aa, Moritella sp. PE36
MDANKEKALAAALGQIEKQFGKGSIMKLGDNRTMDVETVSTGSLSLDIALGAGGLPMGRIVEIYGPESSGKTTLTLEVIASAQREGKVCAFIDAEHALDPIYAGKLGVDVNELLISQPDTGEQALEITDMLARSGAVDIIVIDSVAALTPKAEIEGNMGDSHMGLQARMLSQAMRKLTGNLKTSNTMCIFINQIRMKIGVMFGSPETTTGGNALKFYASVRLDIRRIGSVKDGDEITGNETRVKVVKNKIAAPFRQAEFQILYGKGFNRNGELVDLGVKEKLIEKAGAWYSYKGDKIGQGKAKASQYLADNPKIAAEIDGMIRANLLGNKGDEVADVKTPEVETEF

SEQ ID NO: 114343 - DNA, 1179 bp, Oryza sativa subsp
  CDS (1)..(1179)
atggcgaacctcctgaggcgcgcgtcgctgcggcgcgccgtcgccgccgtcgcggcagcagccgcgccctgccccgagacttgtaggtatttgtatgcacttaagacaaatactggatcatttgtgacacacacagtcgtagagaagtacctgttgtgtcaactgggtctttctctttggattggcattgggaactggtggacttccaaaggtaaggattcctatgtagttacaaaatatcttggtcgtgttatagaggtgtatggtccagaagcttcaggcaagacaactcttgcacttcacgttattgcagaagcacaaaagcatggcggttattgtgccttcgtagatgcagagcatgccttagatccagctctggctgaatcaattggggtcaacaccagtaatttacttctctctcagccagactgtggcgagcaggcactcagtcttgtggacacactgattcgaagcggctctgttgatgttgttgttgttgatagtgtagcagctcttgtccctaagagtgagcttgcgggggagatgggtgatgcacatgttgctctccaggctagattgatgagccaagctcttcgcaagctgagccactctctctcactttcccagacaattttgttattcattaaccagatcaggtctaaagtgaccacatttggaggatttggaggtccaatggaggttacttctggtggaaatgcccttaaattctatgcttccgttagaatgaacatcaagcgtattggtttggtaaagaaaggcgaagagactataggtagtcaagtgcttgtgaagattgtgaaaaacaagcatgccccaccattcaagacagcacagtttgagctggaatttggtaaagggatatgccgcagttcagagcttattgaacttggattaaagcacaagcttgtcaaaaagttgggtggtgcattttattctttcaacgaagagtcatatcgtggtaaagatgcccttaaatcttacctcaacgaaaatgaaagtatcgcgaaagaactggagacgaatttaaggaaattgatggaaactcaagcacctaaaaagcaggaggatgaaggtgatttcctgagtgatctgcctgaagagagtctcgccactgaaacatcctccgaggaggaactggcagctgtaatagaagcttaa

SEQ ID NO: 114344 - protein, 392 aa, Oryza sativa subsp
MANLLRRASLRRAVAAVAAAAAPCPETCRYLYALKTNTGSFVTHTVVEKYLLCQLGLSLWIGIGNWWTSKGKDSYVVTKYLGRVIEVYGPEASGKTTLALHVIAEAQKHGGYCAFVDAEHALDPALAESIGVNTSNLLLSQPDCGEQALSLVDTLIRSGSVDVVVVDSVAALVPKSELAGEMGDAHVALQARLMSQALRKLSHSLSLSQTILLFINQIRSKVTTFGGFGGPMEVTSGGNALKFYASVRMNIKRIGLVKKGEETIGSQVLVKIVKNKHAPPFKTAQFELEFGKGICRSSELIELGLKHKLVKKLGGAFYSFNEESYRGKDALKSYLNENESIAKELETNLRKLMETQAPKKQEDEGDFLSDLPEESLATETSSEEELAAVIEA

SEQ ID NO: 114345 - DNA, 1152 bp, Oryza sativa subsp
  CDS (1)..(1152)
atggccgccgccaccgtcgcagcctcctcccgcttcggccccgcccacctgcttccccgctcccgcaggaaggggagggcccccgcgccgagcgcgcgcgccacggcctgcggagccgtcgggcgaggccgccggctgcgctgcgagttcgtggccggcggcgggaacggcgcgctctccggggaggacgacccgcgcctcatagaccgcaggcaggaatgtaatcgtggattcagggccaccaacatgaataacaatgtgatgcaaaaagctcttgatgcagccatgaatgacataaacagctcctttggaaaaggcagtgttacaagattaggaagcgcgggtggtgcctttgttgagacatttccaagtggctgcttgacactagattttgccttgggtggtggccttccaaaaggaagagtagtagaggtgtatggtccagaaagcagtggaaagactactctagcgctgcatgccattgctgaagtacagaaattgggaggcaatgccatgcttgtggatgcagagcatgcttttgatccagcttattctaaagcacttggggtagatattgaaaatctgattggtgagatagggatgcagcagatgggtttacaagcacgtctaatgagtcaagcattgagaaagatgtcaggcaatgcctcaaaggctggttgtactcttatgttcttgaatcaaataagatacaagattggagtattttatggtaatcctgaagtcactagtggagggatagctttgaaattcttcgcatcagttcgactagagatacggcccattggcaagataaaatctgccaagggagatgaagatgtgggtgtgaaggttcgtgtcagagtgcagaagagtaaagtctccagaccctacaagcaagctgaatttgagatcatctttggggagggcgttagtaaactgggatgtgttcttgattgtgctgagctgatggaagtcgttgcaaagaaaggctcatggtatagctacaaagaaatgagattgggtcaaggcagagaaaaagcactgcagtatctccgagagagccctaccatctgtgatgagatagaaaagacgtcaacctggtacaaccaacaaatattgaactcaccagttgacactgctttaaatctctaa

SEQ ID NO: 114346 - protein, 383 aa, Oryza sativa subsp
MAAATVAASSRFGPAHLLPRSRRKGRAPAPSARATACGAVGRGRRLRCEFVAGGGNGALSGEDDPRLIDRRQECNRGFRATNMNNNVMQKALDAAMNDINSSFGKGSVTRLGSAGGAFVETFPSGCLTLDFALGGGLPKGRVVEVYGPESSGKTTLALHAIAEVQKLGGNAMLVDAEHAFDPAYSKALGVDIENLIGEIGMQQMGLQARLMSQALRKMSGNASKAGCTLMFLNQIRYKIGVFYGNPEVTSGGIALKFFASVRLEIRPIGKIKSAKGDEDVGVKVRVRVQKSKVSRPYKQAEFEIIFGEGVSKLGCVLDCAELMEVVAKKGSWYSYKEMRLGQGREKALQYLRESPTICDEIEKTSTWYNQQILNSPVDTALNL

SEQ ID NO: 114347 - DNA, 1293 bp, Oryza sativa subsp; identical to SEQ ID NO: 100251
  CDS (1)..(1293)

SEQ ID NO: 114348 - protein, 430 aa, Oryza sativa subsp; identical to SEQ ID NO: 100252

SEQ ID NO: 114349 - DNA, 1347 bp, Oryza sativa subsp
  CDS (1)..(1347)
atggcgaacctcctgaggcgcgcgtcgctgcggcgcgccgtcgccgccgtcgcggcagcagccgcgccctgccccgagacttgtaggtatttgtatgcacttaagacaaatactggatcatttgtgacacacacaagctataagcaagggatctgtggctctactttccactgccggtatttctcgtctaaagccaaaaagaagacaaagtccagtggaactgactctggtgaagagaatctgtcaaagaaagacttggctctacaccaggctattgatcaaataacatctgcatttgggaagggcgcaataatgtggcttggtcgttctgaaggtcgtagagaagtacctgttgtgtcaactgggtctttctctttggatttggcattgggaactggtggacttccaaagggtcgtgttatagaggtgtatggtccagaagcttcaggcaagacaactcttgcacttcacgttattgcagaagcacaaaagcatggcggttattgtgccttcgtagatgcagagcatgccttagatccagctctggctgaatcaattggggtcaacaccagtaatttacttctctctcagccagactgtggcgagcaggcactcagtcttgtggacacactgattcgaagcggctctgttgatgttgttgttgttgatagtgtagcagctcttgtccctaagagtgagcttgacggggagatgggtgatgcacatgttgctctccaggctagattgatgagccaagctcttcgcaagctgagccactctctctcactttcccagacaattttgttattcattaaccagatcaggtctaaagtgaccacatttggaggatttggaggtccaatggaggttacttctggtggaaatgcccttaaattctatgcttccgttagaatgaacatcaagcgtattggtttggtaaagaaaggcgaagagactataggtagtcaagtgcttgtgaagattgtgaaaaacaagcatgccccaccgttcaagacagcacagtttgagctggaatttggtaaagggatatgccgcagttcagagcttattgaacttggattaaagcacaagcttgtcaaaaagttgggtggtgcattttattctttcaacgaagagtcatatcgtggtaaagatgcccttaaatcttacctcaacgaaaatgaaagtatcgcaaaagaactggagacgaatttaaggaaattgatggaaactcaagcacctaaaaagcaggaggatgaaggtgatttcctgagtgatctgcctgaagagagtctcgccactgaaacatcctccgaggaggaactggcagctgtaatagaagcttaa

SEQ ID NO: 114350 - protein, 448 aa, Oryza sativa subsp
MANLLRRASLRRAVAAVAAAAAPCPETCRYLYALKTNTGSFVTHTSYKQGICGSTFHCRYFSSKAKKKTKSSGTDSGEENLSKKDLALHQAIDQITSAFGKGAIMWLGRSEGRREVPVVSTGSFSLDLALGTGGLPKGRVIEVYGPEASGKTTLALHVIAEAQKHGGYCAFVDAEHALDPALAESIGVNTSNLLLSQPDCGEQALSLVDTLIRSGSVDVVVVDSVAALVPKSELDGEMGDAHVALQARLMSQALRKLSHSLSLSQTILLFINQIRSKVTTFGGFGGPMEVTSGGNALKFYASVRMNIKRIGLVKKGEETIGSQVLVKIVKNKHAPPFKTAQFELEFGKGICRSSELIELGLKHKLVKKLGGAFYSFNEESYRGKDALKSYLNENESIAKELETNLRKLMETQAPKKQEDEGDFLSDLPEESLATETSSEEELAAVIEA

SEQ ID NO: 114351 - DNA, 1152 bp, Oryza sativa subsp
  CDS (1)..(1152)
atggccgccgccaccgtcgcagcctcctcccgcttcggccccgcccacctgcttccccgctcccgcaggaaggggagggcccccgcgccgagcgcgcgcgccacggcctgcggagccgtcgggcgaggccgccggctgcgctgcgagttcgtggccggcggcgggaacggcgcgctctccggggaggacgacccgcgcctcatagaccgcaggcaggaatgtaatcgtggattcagggccaccaacatgaataacaatgtgatgcaaaaagctcttgatgcagccatgaatgacataaacagctcctttggaaaaggcagtgttacaagattaggaagcgcgggtggtgcctttgttgagacatttccaagtggctgcttgacactagattttgccttgggtggtggccttccaaaaggaagagtagtagaggtgtatggtccagaaagcagtggaaagactactctagcgctgcatgccattgctgaagtacagaaattgggaggcaatgccatgcttgtggatgcagagcatgcttttgatccagcttattctaaagcacttggggtagatattgaaaatctgattggtgagatagggatgcagcagatgggtttacaagcacgtctaatgagtcaagcattgagaaagatgtcaggcaatgcctcaaaggctggttgtactcttatgttcttgaatcaaataagatacaagattggagtattttatggtaatcctgaagtcactagtggagggatagctttgaaattcttcgcatcagttcgactagagatacggcccattggcaagataaaatctgccaagggagatgaagatgtgggtgtgaaggttcgtgtcagagtgcagaagagtaaagtctccagaccctacaagcaagctgaatttgagatcatctttggggagggcgttagtaaactgggatgtgttcttgattgtgctgagctgatggaagtcgttgcaaagaaaggctcatggtatagctacaaagaaatgagattgggtcaaggcagagaaaaagcactgcagtatctccgagagagccctaccatctgtgatgagatagaaaagacgtcaacctggtacaaccaacaaaaattgaactcaccagttgacactgctttaaatctctaa

SEQ ID NO: 114352 - protein, 383 aa, Oryza sativa subsp
MAAATVAASSRFGPAHLLPRSRRKGRAPAPSARATACGAVGRGRRLRCEFVAGGGNGALSGEDDPRLIDRRQECNRGFRATNMNNNVMQKALDAAMNDINSSFGKGSVTRLGSAGGAFVETFPSGCLTLDFALGGGLPKGRVVEVYGPESSGKTTLALHAIAEVQKLGGNAMLVDAEHAFDPAYSKALGVDIENLIGEIGMQQMGLQARLMSQALRKMSGNASKAGCTLMFLNQIRYKIGVFYGNPEVTSGGIALKFFASVRLEIRPIGKIKSAKGDEDVGVKVRVRVQKSKVSRPYKQAEFEIIFGEGVSKLGCVLDCAELMEVVAKKGSWYSYKEMRLGQGREKALQYLRESPTICDEIEKTSTWYNQQKLNSPVDTALNL

SEQ ID NO: 114353 - DNA, 1308 bp, Physcomitrella patens
  CDS (1)..(1308)
atggcgggagctctgcgagtacttagatctcgccacctctttcagcgcgtatgtgctgcttgtgcggatccttccacctcctatgctctggagactgttaccattcccacgccaggttacttccgcaacaactctggctctgctacagagccaaagagaggcaggcgggtgaagaaggcagcgagggtaatcgaccctgacaaccccaatttggaccatgaatactcgaaacagagtctaatacaagccgcaatcgaccagattgctaagaagcatgggaaggagacagttatgtggcttgggcgggagagtcgtgactttattgatgtcgttcctactggctctctaaacctcgacattgctctaggtgttggcggtctgccaaagggccgggtagtggagatctttggtcaagaagcctctgggaagacgacgattgctcttcacgtgattgcacaggcccaaaaaatgggaaaaggacattgcctatttgtggatgcagagcatgcattagatatgcaatttgctgaaggcatcggtgtgaacacgaaagatcttttgtttgttcagccagattatgctgagcaggccctggatactgtcgatcacttcgttcgctctactggtgtcgatgttattgttgttgacagcgttgctgcacttgtaccgaaagctgaacttgaaggagacatgggtgattctcagatggctttgcaggctcgcctgatgagcaaagcgctccgcagacttactcactctcttaactcctccaattgtctgcttatcttcatcaatcagacacgagcaaagctcaatacgtatggaggtggtggaccaacagctgaggtgacagctggaggaaatgctcttaagttctatgcatccgtgcgcttacaagtcaggaaaaaagaacaactaagacgtggagatgtgccctttggaagttcggttattgtaaaagtggtgaagaacaaagtatcaccaccatttaggactgcggaattcgatattgaatatgggaaaggtatatctcgtgatggtgaagtcctcgatctaggtgtgaagcatggcttgctagggcaatcaggttcatggtattcgtacgagggtaagaacttcgcaaatggaagagaaggtgcgaagaagtacctgcaagaacacacagatctgactgatgctttggtggtagcaatcaaggagaagattttaggccaaccacgtgctagtggggatttggacgacgatgggttcattcaagaggaggacgcttttgaagccgatgctgataatctagaggtgacagggtag

SEQ ID NO: 114354 - protein, 435 aa, Physcomitrella patens; identical to SEQ ID NO: 100254

SEQ ID NO: 114355 - DNA, 1383 bp, Physcomitrella patens
  CDS (1)..(1383)
atggcagcaatagctgtgcagtcgaattgctgctccttcagctccgactgctgctctcagcgatgggatccattcaaaggcaatgggagggtacagcgtggactcttagctggtcccatcaacctgcgcatgccaagcccgtctcagctagtccaacaaggatcatgttccatcagctgcaaggctggcggaacttcaaagcagtctggctctgctcttcgagcaaaagccaagaaaggatcctctgatattaatcctgatgactacctatctgatgaccagttgcaatatgtcgaccggcaaaaggcattagaagccgcgatgagcgacatcaatggctcatttggcaaaggaagtgtgaccaggcttggtagtgctggcggagcgcttgtagagaccttccccagtggttgcctcactttggaccttgcattaggtggtggttttcccaaaggacgtattgtggagatatttggtcccgaaagtagtgggaaaaccacgttagcgcttcatgccatagctgagatacagaagaaaggtgggaacgcaatgttggtggatgctgagcactgttttgatccgtattattcgaaggctctcggtgttgacgtggaaagcttgattgtttgtcaacccgacaatggtgaaatggctttagaaactgctgacaggatgtgcagatctggtgctgtggacataatcgtcattgactctgtatctgcacttaccccccgagctgagattgagggagagattgggatgcaacaaatgggactacaggcccggttaatgagtcaagctcttcgtaagatgtctgccaatgctgcacgcgctaactgcacgattattttcttgaatcagattcgatacaagatagctgttatgtacggaaatcctgaagttacaagtggtggtcttgctctcaagttttttgcttctttgcgccttgacattcgcaacacgggcaagattaagtcgccaagaggtgaggatgatattggcataagggctcgagttcgagtacagaagagcaaggtttcaagaccttacaaacaagcagaattcgatataatatttggcgaaggcatttgcaaattggggagcttactggactcagcagagacagtcggtgttgttgtgaggaaaggtgcttggtacagttatggagaaaccaggttaggtcaagggcgagataaagttgttcaattcctccgagactacccggaagtgtgtgcagacattgagaaggtcgttcgagaaagaattgcagaaatcatgacaacaaagcgagattataacggtcccaatgggagtgctgtggttcatgctggaatggacatcgaggaaatgatgggcgaagacaatttgggagagcttgactga

SEQ ID NO: 114356 - protein, 460 aa, Physcomitrella patens; identical to SEQ ID NO: 100256

SEQ ID NO: 114357 - DNA, 1098 bp, Medicago truncatula; identical to SEQ ID NO: 100257
  CDS (1)..(1098)

SEQ ID NO: 114358 - protein, 365 aa, Medicago truncatula; identical to SEQ ID NO: 100258

SEQ ID NO: 114359 - DNA, 1047 bp, Propionibacterium acnes
  CDS (1)..(1047): transl_table=11
atggcagcgaccgctgaccgcgaaaaggcccttgccacggccttgcagcagatcgagaagcagcacggcaagggctctatcatgcgccttggcgagcaggagaccgttaagatcgccgctatccccacgggctcggtggccctcgacgtcgcgttgggtgtcggaggcctcccacgtggcaggatcgtggagatctatggtcccgaatcctccggcaagacgacggtggctttgcacgcaatcgctaatgcccaggctgaaggcggcatctgtgcctttattgacgccgagcacgctctcgacccggaatacgcacgcaaactcggggtcgatacagattccctgctggtgagccagcctgacaatggtgagcaggctctcgagattgctgacaccctcgtccgctcgggtgccttggagctcatcgttgttgactcggtggccgctctgaccccgaaggctgagatcgagggcgagatgggtgattcccatgttggtttgcaggcccgccttatgagccaggccctgcgcaagatgaccggtgcgttgaatgcggccggtaccactgccatcttcattaatcagctgcgcgagaagatcggtgtcatgtttggctccccggagacaacgacaggtggtcgcgccctcaagttctactcatccgtgcgcctcgacgtgcggcgtgtcgaaactcttaaagacggatcagagatggtcggtaaccgcactcgtgtcaaggttgccaagaacaaggtcgccccaccttttaagcaggcagagtttgacatcctctacggacagggcatttctcgcgagggaagcctcatcgacatgggcgtagattgtggcattatcaccaaatccggttcgtggttcagctacaacaatgagcagttgggtcagggcaaggagaacgtccgaaagttcctcaaaggtaacccggatgttgccaatgagattgaggacaagatcctgactcacctcggcctgcgcgaagccgaggttcctgagggtgtcgatccccgaaccggcgaggtggaattctga

SEQ ID NO: 114360 - protein, 348 aa, Propionibacterium acnes
MAATADREKALATALQQIEKQHGKGSIMRLGEQETVKIAAIPTGSVALDVALGVGGLPRGRIVEIYGPESSGKTTVALHAIANAQAEGGICAFIDAEHALDPEYARKLGVDTDSLLVSQPDNGEQALEIADTLVRSGALELIVVDSVAALTPKAEIEGEMGDSHVGLQARLMSQALRKMTGALNAAGTTAIFINQLREKIGVMFGSPETTTGGRALKFYSSVRLDVRRVETLKDGSEMVGNRTRVKVAKNKVAPPFKQAEFDILYGQGISREGSLIDMGVDCGIITKSGSWFSYNNEQLGQGKENVRKFLKGNPDVANEIEDKILTHLGLREAEVPEGVDPRTGEVEF

SEQ ID NO: 114361 - DNA, 1191 bp, Ostreococcus tauri; identical to SEQ ID NO: 100261
  CDS (1)..(1191)

SEQ ID NO: 114362 - protein, 396 aa, Ostreococcus tauri; identical to SEQ ID NO: 100262

SEQ ID NO: 114363 - DNA, 1131 bp, Streptomyces argillaceus; identical to SEQ ID NO: 100265
  CDS (1)..(1131): transl_table=11

SEQ ID NO: 114364 - protein, 376 aa, Streptomyces argillaceus; identical to SEQ ID NO: 100266

SEQ ID NO: 114365 - DNA, 1050 bp, Moraxella catarrhalis; identical to SEQ ID NO: 100267
  CDS (1)..(1050): transl_table=11

SEQ ID NO: 114366 - protein, 349 aa, Moraxella catarrhalis; identical to SEQ ID NO: 100268

SEQ ID NO: 114367 - DNA, 1056 bp, Mycobacterium fortuitum; identical to SEQ ID NO: 100279
  CDS (1)..(1056): transl_table=11

SEQ ID NO: 114368 - protein, 351 aa, Mycobacterium fortuitum; identical to SEQ ID NO: 100280

SEQ ID NO: 114369 - DNA, 1188 bp, Oryza sativa subsp
  CDS (1)..(1188)
atggccgccgccaccgtcgcagcctcctcccgcttcggccccgcccacctgcttccccgctcccgcaggaaggggagggcccccgcgccgagcgcgcgcgccacggcctgcggagccgtcgggcgaggccgccggctgcgctgcgagttcgtggccggcggcgggaacggcgcgctctccggggaggacgacccgcgcctcatagaccgcaggcaggaatgtaatcgtggattcagggccaccaacatgaataacaatgtgatgcaaaaagctcttgatgcagccatgaatgacataaacagctcctttggaaaaggcagtgttacaagattaggaagcgcgggtggtgcctttgttgagacatttccaagtggctgcttgacactagattttgccttgggtggtggccttccaaaaggaagagtagtagaggtgtatggtccagaaagcagtggaaagactactctagcgctgcatgccattgctgaagtacagaaattgggaggcaatgccatgcttgtggatgcagagcatgcttttgatccagcttattctaaagcacttggggtagatattgaaaatctgattggtgagatagggatgcagcagatgggtttacaagcacgtctaatgagtcaagcattgagaaagatgtcaggcaatgcctcaaaggctggttgtactcttatgttcttgaatcaaataagatacaagattggagtattttatggtaatcctgaagtcactagtggagggatagctttgaaattcttcgcatcagttcgactagagatacggcccattggcaagataaaatctgccaagggagatgaagatgtgggtgtgaaggttcgtgtcagagtgcagaagagtaaagtctccagaccctacaagcaagctgaatttgagatcatctttggggagggcgttagtaaactgggatgtgttcttgattgtgctgagctgatggaagtcgttgcaaagaaaggctcatggtatagctacaaagaaatgagattgggtcaaggcagagaaaaagcactgcagtatctccgagagagccctaccatctgtgatgagatagaaaaggctgttcgagccatgataccagaaggagcaagacatatgagcctgctcgctttcgggcggtcatcattgaccgaagaagaacaagtagacgatgagtga

SEQ ID NO: 114370 - protein, 395 aa, Oryza sativa subsp
MAAATVAASSRFGPAHLLPRSRRKGRAPAPSARATACGAVGRGRRLRCEFVAGGGNGALSGEDDPRLIDRRQECNRGFRATNMNNNVMQKALDAAMNDINSSFGKGSVTRLGSAGGAFVETFPSGCLTLDFALGGGLPKGRVVEVYGPESSGKTTLALHAIAEVQKLGGNAMLVDAEHAFDPAYSKALGVDIENLIGEIGMQQMGLQARLMSQALRKMSGNASKAGCTLMFLNQIRYKIGVFYGNPEVTSGGIALKFFASVRLEIRPIGKIKSAKGDEDVGVKVRVRVQKSKVSRPYKQAEFEIIFGEGVSKLGCVLDCAELMEVVAKKGSWYSYKEMRLGQGREKALQYLRESPTICDEIEKAVRAMIPEGARHMSLLAFGRSSLTEEEQVDDE

SEQ ID NO: 114371 - DNA, 1068 bp, primary endosymbiont of Sitophilus oryzae
  CDS (1)..(1068): transl_table=11
atggctattgatgagaataaacaaaaggcgttagcggcagcactgggtcaaattgaaaagcaattcggcaagtgttcgatcatgcgcctgggtgaagatcgctccatggatgttgaaacgatctccacaggttctctgtctctggatattgcgttgggcgccggtgggctgcccatgggccgtatcgttgaaatctacggcccggaatcatcgggtaaaaccactctgaccctgcaggttatcgccgcggcgcagcgcgaaggcaaaacctgcgcctttatcgatgccgagcatgccctggaccctatctacgccaaaaagctgggcgtcgatatcgataatctgttgtgctcccagccggacaccggcgaacaggcgctggaaatctgcgatgctctgacccgctccggcgctgtagacgtcatcatcgtcgactccgtggcggcactgacgccgaaagcggaaatcgagggtgagatcggcgattcccatatgaggctggccgcccgtatgatgagccaggcgatgcgcaaactggcgggtaatttgaaaaacgccaatacgctgctgattttcattaaccagatccgcatgaagatcggcgtcatgttcggtaacccggagaccacgaccggtggtaatgcgcttaagttttacgcatcggttcgtctggatattcgccgtatcggctcggtgaaagaaggcgatgtggtggtgggcagtgaaacccgcgtcaaagtcgtgaagaacaaagtcgccgcgccgtttaaacaggccgaattccagatcatgtacggcgaaggcatcaacattcgcggtgagctggtcgatctgggcgtcaagcacaagctgatagagaaagcgggcgcctggtacagctataacggcgagaagatcggtcagggcaaggccaatgcctgcacctttctgaaggaccatcccgaactggcggcggagctggacaaaaagctgcgcgacatgctgctgcatagcgccgatggcaacagcctggtcagcgacgtggaaagcgaggacgaaagcgccagcgagagcaatgaagagttttaa

SEQ ID NO: 114372 - protein, 355 aa, primary endosymbiont of Sitophilus oryzae; identical to SEQ ID NO: 100286

SEQ ID NO: 114373 - DNA, 1035 bp, Oryza sativa subsp
  CDS (1)..(1035)
atgtggcttggtcgttctgaaggtcgtagagaagtacctgttgtgtcaactgggtctttctctttggatttggcattgggaactggtggacttccaaagggtcgtgttatagaggtgtatggtccagaagcttcaggcaagacaactcttgcacttcacgttattgcagaagcacaaaagcatggcggttattgtgccttcgtagatgcagagcatgccttagatccagctctggctgaatcaattggggtcaacaccagtaatttacttctctctcagccagactgtggcgagcaggcactcagtcttgtggacacactgattcgaagcggctctgttgatgttgttgttgttgatagtgtagcagctcttgtccctaagagtgagcttgacggggagatgggtgatgcacatgttgctctccaggctagattgatgagccaagctcttcgcaagctgagccactctctctcactttcccagacaattttgttattcattaaccagatcaggtctaaagtgaccacatttggaggatttggaggtccaatggaggttacttctggtggaaatgcccttaaattctatgcttccgttagaatgaacatcaagcgtattggtttggtaaagaaaggcgaagagactataggtagtcaagtgcttgtgaagattgtgaaaaacaagcatgccccaccgttcaagacagcacagtttgagctggaatttggtaaagggatatgccgcagttcagagcttattgaacttggattaaagcacaagcttgtcaaaaagttgggtggtgcattttattctttcaacgaagagtcatatcgtggtaaagatgcccttaaatcttacctcaacgaaaatgaaagtatcgcaaaagaactggagacgaatttaaggaaattgatggaaactcaagcacctaaaaagcaggaggatgaaggtgatttcctgagtgatctgcctgaagagagtctcgccactgaaacatcctccgaggaggaactggcagctgtaatagaagcttaa

SEQ ID NO: 114374 - protein, 344 aa, Oryza sativa subsp
MWLGRSEGRREVPVVSTGSFSLDLALGTGGLPKGRVIEVYGPEASGKTTLALHVIAEAQKHGGYCAFVDAEHALDPALAESIGVNTSNLLLSQPDCGEQALSLVDTLIRSGSVDVVVVDSVAALVPKSELDGEMGDAHVALQARLMSQALRKLSHSLSLSQTILLFINQIRSKVTTFGGFGGPMEVTSGGNALKFYASVRMNIKRIGLVKKGEETIGSQVLVKIVKNKHAPPFKTAQFELEFGKGICRSSELIELGLKHKLVKKLGGAFYSFNEESYRGKDALKSYLNENESIAKELETNLRKLMETQAPKKQEDEGDFLSDLPEESLATETSSEEELAAVIEA

SEQ ID NO: 114375 - DNA, 1044 bp, Bacillus amyloliquefaciens; identical to SEQ ID NO: 100287
  CDS (1)..(1044): transl_table=11

SEQ ID NO: 114376 - protein, 347 aa, Bacillus amyloliquefaciens; identical to SEQ ID NO: 100288

SEQ ID NO: 114377 - DNA, 1245 bp, Chlamydomonas reinhardtii
  CDS (1)..(1245)
atgcagaccgcaattcaaatgcctagtggtggctgcttgagcagtggggcccgggcccggagcagcgcacgggccactcaacagattctttgcgcgccacgtcgcgacgtcgttgcgaaggcgcggcgcaccaaaactgccacgacaacctatactcagggcgaacgcccggatgccgataccaaggccaagctcttcaacgagacagtcgaccgcatcactcgccgctttggtgacgggtccatcatgcgtctcagcgacagcgtcacggcgaacattgagaccttccccagcggctcactcacgctggacgcggccctgggcggcggctacccccgcggccgcattatcgaggtgtacggtccggaggccagcggcaagaccacgctggccatgcacggctgcggcgagatccagcgcctgggcggcacggtcgcctacatagacgtggagcacgccttcgaccgcacctacgcgagcgctgggcatcacctgaacaacttctggtacgcgcagcccatgacgggcgaggaggcgctggaggtgatggacgagctgtgccgcagcaacgtgtgcgacctggtggtcatcgactcggtggcggcgctggtgccgagggccgagctggagggagacatcggcagcgtgcagatcggcagccaggcccgcctgctgagccaggccctgcgcaagctgtccgcctccgcctccaaaagcaagaccaccctgttcttcatcaaccagctgcggaacaagattggcgtcatgttcggcaaccccgagaccacctcgggcggcaacgcgctcaagtactacagcagcgtgcgcatcgacatccgcaagaaggagacactcagcgagtcggaccaggcctacgccaaccgggtccgcgccaaggtggtgaagaacaaggtggcctcgccgcataaggaggctctgtttgagatctactacggccgtggcattgacttcctgggcggactcatcgacaccgcggagcgcctcaaggtgctcacccgccgcggtgccttctactactacggcgaccagcggctgggccagggccgggagaaggtgttggcggcgctgcgcgaggacgcggagcgcacagccgccattgaggccgcggtgcgggacgtgctgcgggccaaccccgacgcggcgctggtggacacggaggagggcgacgacgacgacggcctgggcaccgcctccaccgtggcgctggacatggacgacgtgtag

SEQ ID NO: 114378 - protein, 414 aa, Chlamydomonas reinhardtii; identical to SEQ ID NO: 100290

SEQ ID NO: 114379 - DNA, 1131 bp, Arabidopsis thaliana
  CDS (1)..(1131)
atgtcgaaaaaggagattgctcttcagcaagcacttgatcagattaccagttcatttggcaaagggtccataatgtatctcggtcgtgctgtttctcctagaaatgtcccggttttctctaccggatcttttgcccttgatgtagctttgggagttggtggccttcctaaggggcgtgttgtggagatatatggtcctgaagcatcgggaaagacaacacttgctcttcatgttattgcagaagcacaaaaacaaggaggaacctgtgtctttgtagatgctgagcatgctcttgattcgtcacttgctaaggcaatcggtgtaaatacagaaaatctgcttctatcacagcctgattgtggcgaacaggcccttagtcttgtggatactttaatccgaagtggttcagttgatgttattgtagttgacagtgtggctgctcttgtacctaaaggagaacttgagggcgagatgggtgatgcacatatggctatgcaagccagattgatgagccaagctttgcgtaaattgagccattctttatcgttatcgcaaacacttctgatctttataaatcaggtgagatcaaaactatctacgtttggaggatttggaggtccaacagaagttacttgtggtggaaatgctttgaagttttatgcttctatgcgtttgaatatcaagcgaattggacttatcaagaaaggcgaagagacaacgggaagtcaagtctccgtgaagatagtgaagaacaaactcgctccgccgtttagaactgctcagtttgagcttgaattcggcaaaggaatctgcaagatcacggagataatcgacctgagcataaagcacaagttcatcgcgaaaaacggaacattctacaatctcaacggtaaaaactaccatggaaaagaggctttaaagagattccttaaacagaacgaatctgatcaagaagagctcatgaagaagctccaagacaagctcatcgccgatgaagctgcagataaggaaactgaatctgaatctgaggaagaagattccctgagagttgtggtttcacctgacaacacagatgatgaatcaccagctcttgttgttggagctgctgcagtggttgttgaggcagcatga

SEQ ID NO: 114380 - protein, 376 aa, Arabidopsis thaliana; identical to SEQ ID NO: 100294

SEQ ID NO: 114381 - DNA, 1320 bp, Arabidopsis thaliana
  CDS (1)..(1320)
atggattcacagctagtcttgtctctgaagctgaatccaagcttcactcctctttctcctctcttccctttcactccatgttcttctttttcgccgtcgctccggttttcttcttgctactcccgccgcctctattctccggttaccgtctacgccgcgaagaaactctcccacaaaatcagttctgaattcgatgacagaatcaacggcgctctctctcccgacgctgattcccgcttcctcgaccgccaaaaggctttagaggcagctatgaatgacattaacagttcatttggtaaaggaagtgtaacaagattggggagtgctggtggagcattagtggagaccttttcgagtggtattttgactcttgatcttgctttaggtggaggcctaccaaagggtcgggtagtcgaaatatatggaccagaaagtagtggcaagaccacgctagcactccatgctattgctgaagtgcagaagcttggaggcaatgcaatgcttgttgatgcagagcatgcctttgatccagcgtattctaaagcattaggtgttgatgtagaaaatttgatagtgtgccagccagataatggcgagatggctttagaaactgcagaccgtatgtgtcgctcaggtgcggttgaccttatatgtgttgattctgtttcagcacttactccacgagctgagattgaaggtgagattggaatgcagcaaatgggtttgcaagctcgtcttatgagtcaagctcttcgtaaaatgtcaggaaacgcctctaaagctgggtgtactcttattttcctaaaccaaataagatacaagattggtgtgtactatgggaatccagaggtgactagcggaggaattgcgttaaagttcttcgcgtcggtccgtctagaaattcgttctgctgggaagatcaaatctagcaaaggggatgaagatattggtcttcgggctcgtgtaagagtgcagaagagcaaggtttcaagaccgtataagcaagcagagtttgagattatgtttggggaaggagtcagtaaactgggatgcgttcttgattgtgctgaaattatggaagttgtggtcaagaaaggttcctggtacagctacgaagaccaaaggctcgggcaaggaagagagaaagcactgcagcacttaagggaaaaccctgctcttcaagacgaaattgagaagaaagtgagattgttgatgttagatggagaagttcatcgatcaactcctttgatgagcagcagctcttcctcggcttcacatcgcgaagaagaagaagaagactcgcttgacgatttccaatga

SEQ ID NO: 114382 - protein, 439 aa, Arabidopsis thaliana; identical to SEQ ID NO: 100296

SEQ ID NO: 114383 - DNA, 1170 bp, Arabidopsis thaliana; identical to SEQ ID NO: 100297
  CDS (1)..(1170)

SEQ ID NO: 114384 - protein, 389 aa, Arabidopsis thaliana; identical to SEQ ID NO: 100298

SEQ ID NO: 114385 - DNA, 1050 bp, Acinetobacter sp; identical to SEQ ID NO: 100299
  CDS (1)..(1050): transl_table=11

SEQ ID NO: 114386 - protein, 349 aa, Acinetobacter sp; identical to SEQ ID NO: 100300

SEQ ID NO: 114387 - DNA, 1059 bp, Actinobacillus actinomycetemcomitans; identical to SEQ ID NO: 100301
  CDS (1)..(1059): transl_table=11

SEQ ID NO: 114388 - protein, 352 aa, Actinobacillus actinomycetemcomitans; identical to SEQ ID NO: 100302

SEQ ID NO: 114389 - DNA, 1092 bp, Agrobacterium tumefaciens; identical to SEQ ID NO: 100303
  CDS (1)..(1092): transl_table=11

SEQ ID NO: 114390 - protein, 363 aa, Agrobacterium tumefaciens; identical to SEQ ID NO: 100304

SEQ ID NO: 114391 - DNA, 1047 bp, Amycolatopsis mediterranei; identical to SEQ ID NO: 100305
  CDS (1)..(1047): transl_table=11

SEQ ID NO: 114392 - protein, 348 aa, Amycolatopsis mediterranei; identical to SEQ ID NO: 100306

SEQ ID NO: 114393 - DNA, 1074 bp, Anabaena sp
  CDS (1)..(1074): transl_table=11
atggctatcaataccgatacttctggcaagcaaaaagcgctgacaatggtactcaaccagattgagcgcagcttcggtaaaggagcaatcatgcgcctgggcgatgctacccggatgcgggtagaaacaatctctactggcgcgctcaccttggatttagcattgggaggcggtttacccaaggggcgggtgattgagatttatggcccggaaagttccggtaaaacaacagtagcactccacgcgatcgcagaagtgcaaaaagaaggtggaatagctgccttcgtcgatgctgaacacgcccttgaccccacctacgcctcagctttaggtgtagatattcaaaacttgctggtttcccaaccagacacaggtgaatccgcattggaaattgttgatcaacttgtacgctccgccgccgttgatattgtagttattgactctgtagcagctttggttccccgtgcagaaatcgaaggcgatatgggtgatgcccacgtcggtttacaagcgagattaatgagccaagctctacgtaaaattactggcaatattggtaaatctggttgtacagtaattttcattaaccagttgcggcaaaaaattggtgttacctacggtagcccggaaacgacaactggcggtaacgcattaaagttctatgcttcagtacgcttagatattcgtcggattcaaaccttgaaaaaaggtactgatgaatttggtaaccgagttaaagtcaaagttgcgaaaaataaagttgcaccgccttttagaatcgcagagtttgacattatttttggtaaaggtgtttcgactctaggttgtttagtagatttagcggaagaaactggtattctcatccgtaaaggagcttggtacagttacaacggtgataatatttctcaaggtcgagataacgctatcaaatacctggaagaaaaaccagaatttagtgaacaaatcaaacaacaggtgcgtgaaaaattagataagggagctgttgtttctgcaaactcggtagctaaaaacaacgaagacgatgaagatgaagatgtagaagaggaagaataa

SEQ ID NO: 114394 - protein, 357 aa, Anabaena sp
MAINTDTSGKQKALTMVLNQIERSFGKGAIMRLGDATRMRVETISTGALTLDLALGGGLPKGRVIEIYGPESSGKTTVALHAIAEVQKEGGIAAFVDAEHALDPTYASALGVDIQNLLVSQPDTGESALEIVDQLVRSAAVDIVVIDSVAALVPRAEIEGDMGDAHVGLQARLMSQALRKITGNIGKSGCTVIFINQLRQKIGVTYGSPETTTGGNALKFYASVRLDIRRIQTLKKGTDEFGNRVKVKVAKNKVAPPFRIAEFDIIFGKGVSTLGCLVDLAEETGILIRKGAWYSYNGDNISQGRDNAIKYLEEKPEFSEQIKQQVREKLDKGAVVSANSVAKNNEDDEDEDVEEEE

SEQ ID NO: 114395 - DNA, 1077 bp, Anabaena variabilis
  CDS (1)..(1077): transl_table=11
atggctatcaataccgatacttcaggcaagcaaaaagcgctaacaatggtactcaaccagattgagcgcagcttcggtaaaggagcaatcatgcgcctgggcgatgctacccggatgcgggtagaaacgatttccacaggagcgctcaccttggatttagcattgggtggcggtttgcccaaggggcgggtgattgagatttatggcccggaaagttccggtaaaacaacagtagcactccacgcgatcgccgaagtacaaaaagaaggcggaattgctgcttttgtggatgctgaacacgcccttgaccccacctacgcctcagccttaggtgtagatattcaaaacttgctggtctcccaaccagacacaggtgaatccgcgttggaaattgttgatcagctggtacgctccgccgccgttgatattgtagttattgactcagtagcagcgttggttccccgtgcagaaatcgaaggcgatatgggtgatgcccatgttggtttacaagcgagattaatgagccaagctctacgtaaaattactggcaatattggtaaatctggttgtacagtaattttcattaaccagttgcggcaaaaaattggtgttacctacggtagcccggaaacaaccactggtggtaacgccttaaagttctatgcttcagtgcgtttagatattcgtcggattcaaaccttgaaaaaaggtactgatgaatttggtaaccgagttaaagttaaagttgcgaaaaataaagttgcaccgccttttagaattgcggaatttgacattatttttggtaaaggtgtttccactctaggttgtttagtagatttagctgaagaaactggtatcttactccgtaagggagcatggtatagttacaatggcgataatatttctcaaggtcgagataacgctatcaagtatctggaagaaaaaccagaatttgctgaacagattaaacaacaagtgcgtgaaaaattggacaagggcgctgttgtttctgcaaactcggtagccaaagctaacgaagaagatgaagaagatgttgacttagacgaggaagaataa

SEQ ID NO: 114396 - protein, 358 aa, Anabaena variabilis
MAINTDTSGKQKALTMVLNQIERSFGKGAIMRLGDATRMRVETISTGALTLDLALGGGLPKGRVIEIYGPESSGKTTVALHAIAEVQKEGGIAAFVDAEHALDPTYASALGVDIQNLLVSQPDTGESALEIVDQLVRSAAVDIVVIDSVAALVPRAEIEGDMGDAHVGLQARLMSQALRKITGNIGKSGCTVIFINQLRQKIGVTYGSPETTTGGNALKFYASVRLDIRRIQTLKKGTDEFGNRVKVKVAKNKVAPPFRIAEFDIIFGKGVSTLGCLVDLAEETGILLRKGAWYSYNGDNISQGRDNAIKYLEEKPEFAEQIKQQVREKLDKGAVVSANSVAKANEEDEEDVDLDEEE

SEQ ID NO: 114397 - DNA, 1433 bp, Azotobacter vinelandii; identical to SEQ ID NO: 100313
  CDS (311)..(1360): transl_table=11

SEQ ID NO: 114398 - protein, 349 aa, Azotobacter vinelandii; identical to SEQ ID NO: 100314

SEQ ID NO: 114399 - DNA, 1032 bp, Bacillus anthracis; identical to SEQ ID NO: 100315
  CDS (1)..(1032): transl_table=11

SEQ ID NO: 114400 - protein, 343 aa, Bacillus anthracis; identical to SEQ ID NO: 100316

SEQ ID NO: 114401 - DNA, 1044 bp, Bacillus subtilis; identical to SEQ ID NO: 100319
  CDS (1)..(1044): transl_table=11

SEQ ID NO: 114402 - protein, 347 aa, Bacillus subtilis; identical to SEQ ID NO: 100320

SEQ ID NO: 114403 - DNA, 1044 bp, Bartonella quintana; identical to SEQ ID NO: 100323
  CDS (1)..(1044): transl_table=11

SEQ ID NO: 114404 - protein, 347 aa, Bartonella quintana; identical to SEQ ID NO: 100324

SEQ ID NO: 114405 - DNA, 1062 bp, Bordetella bronchiseptica; identical to SEQ ID NO: 100331
  CDS (1)..(1062): transl_table=11

SEQ ID NO: 114406 - protein, 353 aa, Bordetella bronchiseptica; identical to SEQ ID NO: 100332

SEQ ID NO: 114407 - DNA, 1089 bp, Bradyrhizobium japonicum; identical to SEQ ID NO: 100333
  CDS (1)..(1089): transl_table=11

SEQ ID NO: 114408 - protein, 362 aa, Bradyrhizobium japonicum; identical to SEQ ID NO: 100334

SEQ ID NO: 114409 - DNA, 1044 bp, Burkholderia cepacia; identical to SEQ ID NO: 100337
  CDS (1)..(1044): transl_table=11

SEQ ID NO: 114410 - protein, 347 aa, Burkholderia cepacia; identical to SEQ ID NO: 100338

SEQ ID NO: 114411 - DNA, 1044 bp, Chromatium vinosum; identical to SEQ ID NO: 100343
  CDS (1)..(1044): transl_table=11

SEQ ID NO: 114412 - protein, 347 aa, Chromatium vinosum; identical to SEQ ID NO: 100344

SEQ ID NO: 114413 - DNA, 1059 bp, Clostridium perfringens
  CDS (1)..(1059): transl_table=11
atggcaaatatagataaagataaattaaaagctattgagatggctatgggtcaaatagagaagcaatttggaaagggatcagtaatgaaacttggagagcaaggagctcctcaaatggatgctgtttctactggatgcttagatcttgatatagctttaggaattggtggagtaccaaaaggaagaattattgagatatatggaccagagagttctggtaaaacaacagtggctttacatgtagtagcagaggcacaaaaattaggtggagcagcagcgtatatagatgcagagcatgctttagatccagtttatgcaaaaagattaggtgttaatatagatgatttagtagtttcacaaccagatacaggagaacaagctttagaaataacagaagctttagttagatcaggagctatagatgttttagttgtggactcagttgccgctttagttccaagagcagaaattgaaggtgaaatgggagattctcacgttggtcttcaagctagattaatgtcacaagccttaagaaagttaacaggaacaattaacaaatcaaactgcgtagtaatattcataaaccaattaagagaaaaagttggtataatgtttggtaatccagagacaacaccaggtggtagagcgttaaaattctatgcttcagttagaatggatataagaagaatagattcaataaaacaaggtgacggaataactggtaatagaacaagagttaaaatagttaagaataaggttgctcctccatttaagcaagctgaatttgatataatgtacaatgaaggtatatcaaaagaaggtaatatagtagacgttggagtaaaagaaaatatagtacaaaagagtggagcttggttctcatatggagatataagattaggccaaggtagagaaaatgctaaacaatatttaaaagagaatccagcagttgctttagatatagaaaatcaaataagagaaaaatattctcttcctttagctaaggctgttgaatcaacaagtgtagaagaaaatacagaagagtctgttgaaagctaa

SEQ ID NO: 114414 - protein, 352 aa, Clostridium perfringens
MANIDKDKLKAIEMAMGQIEKQFGKGSVMKLGEQGAPQMDAVSTGCLDLDIALGIGGVPKGRIIEIYGPESSGKTTVALHVVAEAQKLGGAAAYIDAEHALDPVYAKRLGVNIDDLVVSQPDTGEQALEITEALVRSGAIDVLVVDSVAALVPRAEIEGEMGDSHVGLQARLMSQALRKLTGTINKSNCVVIFINQLREKVGIMFGNPETTPGGRALKFYASVRMDIRRIDSIKQGDGITGNRTRVKIVKNKVAPPFKQAEFDIMYNEGISKEGNIVDVGVKENIVQKSGAWFSYGDIRLGQGRENAKQYLKENPAVALDIENQIREKYSLPLAKAVESTSVEENTEESVES

SEQ ID NO: 114415 - DNA, 1131 bp, Corynebacterium glutamicum; identical to SEQ ID NO: 100349
  CDS (1)..(1131): transl_table=11

SEQ ID NO: 114416 - protein, 376 aa, Corynebacterium glutamicum; identical to SEQ ID NO: 100350

SEQ ID NO: 114417 - DNA, 1065 bp, Enterobacter agglomerans; identical to SEQ ID NO: 100357
  CDS (1)..(1065): transl_table=11

SEQ ID NO: 114418 - protein, 354 aa, Enterobacter agglomerans; identical to SEQ ID NO: 100358

SEQ ID NO: 114419 - DNA, 1029 bp, Erwinia carotovora
  CDS (1)..(1029): transl_table=11
atggctattgatgaaaacaagcaaaaagcattggccgcagcacttggtcaaattgaaaagcaatttggtaaagggtctatcatgcgtctgggcgaagatcgttccatgaacgttgaaaccatctctacgggttctttatcattagacgttgctttaggtgctggtggtttaccacgcgggcgtattgttgaaatctatggcccagaatcttatggtaaaacaacattaacactacaagttatcgctgctgctcaacgtgaaggcaaaatttgtgcattcattgatgctgagcacgctttagaccctatctatgctcaaaaactaggcgtagatattgataacctgctctgttctcagcctgatactggtgaacaagccctagaaatttgtgatgcattatctcgttctggtgcagttgatgttatcgttgttgactccgttgcagctttaacaccaaaagcagaaattgaaggtgagattggtgattcacacgttggtttagctgctcgtatgatgagtcaagctatgcgtaagttagcgggtaacttgaaaaactccaacactctgcttattttcatcaaccaaattcgaatgaaaatcggtgttatgtttggtaatccagaaaccacaacaggtggtaatgcacttaaattctacgcatctgttcgtttagatattcgtcgtatcggctctgttaaaaacggtgatgaagttgttggtagtgaaacacgcgttaaagtggtgaaaaacaaaattgcagcaccatttaaacaagctgaattccaaattatgtatggtgaaggtatcaatacctttggcgaattgattgatttaggtgttaaacacaaattggtagagaaagctggtgcatggtacagctacaatggtgagaaaattggtcaaggtaaagccaatgcaacaacttatttaaaagaacaccctgaaatgtacaatgagttaaacactaaacttcgtgaaatgttattaaatcacgcaggtgaatttactagcgcacgtgatttttgctaa

SEQ ID NO: 114420 - protein, 342 aa, Erwinia carotovora; identical to SEQ ID NO: 100360

SEQ ID NO: 114421 - DNA, 1074 bp, Erwinia carotovora subsp
  CDS (1)..(1074): transl_table=11
atggctattgatgagaacaaacaaaaggcacttgcggcagcactgggccaaatcgaaaagcaatttggtaaaggttctatcatgcggttgggcgaagatcgctcaatggatgttgaaaccatttctacaggttctttgtcccttgatattgctttaggtgccggcggtttacctatgggccgcatcgttgagatttatggcccagaatcctctggtaaaaccacgctgaccttacaggtgattgctgctgctcagcgcgaaggcaaaacctgtgcgtttatcgatgctgaacatgcgttggaccctatttatgcgaaaaaacttggtgtagatattgataatctgctgtgttcgcagccggataccggcgagcaggcgttggagatttgtgatgcactaacgcgctctggtgctgttgacgttattatcgtcgactccgttgcagcgctgacgccgaaagctgaaattgaaggcgaaatcggtgactctcacatggggctggctgcacgtatgatgagccaggctatgcgtaaattggcgggtaacctgaagcaagctaatacgctgctgatcttcatcaaccagatccgtatgaaaattggtgtgatgtttggtaaccctgaaaccactaccggcggtaacgcactgaagttttatgcctctgttcgtttggatattcgtcgtactggcgctatcaaggaaggcgaagaagtcgtcggtagcgaaacccgcgttaaagtcgtgaagaataaagtggcagcaccgttcaagcaggctgaattccaaattttgtacggcgaaggcatcaatatccacggtgagctggttgatctgggtgtgaaacacaagctgatcgaaaaagcgggtgcctggtatagctataacggtgacaagatcggtcagggtaaagcgaatgcctgtaatttcctgaaagagaatccgacgatttctgctgaactggataagaaattgcgcgaaatgctgctgcataaaggcaatgagctgaaaccggctgccgcgggaaatagccatgacgaggatgaactcgctggtgaaggtaaagaagagttttaa

SEQ ID NO: 114422 - protein, 357 aa, Erwinia carotovora subsp
MAIDENKQKALAAALGQIEKQFGKGSIMRLGEDRSMDVETISTGSLSLDIALGAGGLPMGRIVEIYGPESSGKTTLTLQVIAAAQREGKTCAFIDAEHALDPIYAKKLGVDIDNLLCSQPDTGEQALEICDALTRSGAVDVIIVDSVAALTPKAEIEGEIGDSHMGLAARMMSQAMRKLAGNLKQANTLLIFINQIRMKIGVMFGNPETTTGGNALKFYASVRLDIRRTGAIKEGEEVVGSETRVKVVKNKVAAPFKQAEFQILYGEGINIHGELVDLGVKHKLIEKAGAWYSYNGDKIGQGKANACNFLKENPTISAELDKKLREMLLHKGNELKPAAAGNSHDEDELAGEGKEEF

SEQ ID NO: 114423 - DNA, 1080 bp, Francisella tularensis subsp; identical to SEQ ID NO: 100361
  CDS (1)..(1080): transl_table=11

SEQ ID NO: 114424 - protein, 359 aa, Francisella tularensis subsp; identical to SEQ ID NO: 100362

SEQ ID NO: 114425 - DNA, 1110 bp, Gloeobacter violaceus
  CDS (1)..(1110): transl_table=11
atggcccgcaccacagacgattccaaaaaggccgcccccgcggccggtaccgccgacgaagcccaaaagcaaaaagcgctcaagatggtgctcacccagatcaagcgcaacttcggcgaaggggcaatcatgcgcctgggcgagaacacgcgcattcgggtggagacggtgccgagcggcgccatcaccctcgatctggccctgggaggcggtctgcccagaggtcgggtcatcgaaatttatggtcctgagtcctcgggcaagacgacgctggctttgcatgccatcgccgagatccaaaaaaccggcggtgtggcggccttcgtggacgccgagcacgccctcgatccggcctacgccaaggtgctgggcgtcaatgtagatgatctcatcatctcccagcccgacaccggcgagatggctatggagatcgtcgatcagctggtacgctcggccgccatcgacgtcatcgtcatcgactcggtggccgccctggtgccgcgcgccgagatcgaaggcgagatgggcgacgcccacgtcggtctgcaggcgcggctgatgagccaggctttgcgcaagatcacaggcaacatcggcaagaccggctgcatggtgattttcctcaaccagctgcgctccaaaattggcgtgatgtacggcaaccccgagaccaccaccggcggcaatgccctcaagttctacgcctcggtgcgcctggatatccgcaaggccgagaccctcaaaaaaggccaggacgagtacggcaaccgcgtgcgggtcaaggtggtcaaaaacaaggtcgccccgccgttccgcaaagccgagttcgacatcatcttcggcaagggcatctcctcgctgggctgcatcctcgatctggccgtcgagatggagatcgtcgagcgcaagggcgcctggtactcctacggcagcgagcggctcggccaaggccgcgagaacgtgctggcgctccttgaggagaatgccgcccaggcccaggagatcgagatcaaggtgcgcgagaagatcgcgagcggtgccgccgttccggccgctgctgtggctgctccggacgagggcgacgacgatctgggcgacgaagaagtctag

SEQ ID NO: 114426 - protein, 369 aa, Gloeobacter violaceus
MARTTDDSKKAAPAAGTADEAQKQKALKMVLTQIKRNFGEGAIMRLGENTRIRVETVPSGAITLDLALGGGLPRGRVIEIYGPESSGKTTLALHAIAEIQKTGGVAAFVDAEHALDPAYAKVLGVNVDDLIISQPDTGEMAMEIVDQLVRSAAIDVIVIDSVAALVPRAEIEGEMGDAHVGLQARLMSQALRKITGNIGKTGCMVIFLNQLRSKIGVMYGNPETTTGGNALKFYASVRLDIRKAETLKKGQDEYGNRVRVKVVKNKVAPPFRKAEFDIIFGKGISSLGCILDLAVEMEIVERKGAWYSYGSERLGQGRENVLALLEENAAQAQEIEIKVREKIASGAAVPAAAVAAPDEGDDDLGDEEV

SEQ ID NO: 114427 - DNA, 1038 bp, Gluconobacter oxydans; identical to SEQ ID NO: 100365
  CDS (1)..(1038): transl_table=11

SEQ ID NO: 114428 - protein, 345 aa, Gluconobacter oxydans; identical to SEQ ID NO: 100366

SEQ ID NO: 114429 - DNA, 1065 bp, Haemophilus influenzae
  CDS (1)..(1065): transl_table=11
atggcaactcaagaagaaaaacaaaaagccctagcggctgcactagggcaaatcgaaaaacaatttggtaaaggctcaattatgaaattaggcgataccaaaacgttggatgtagagtctatttctactggatcacttgggttagatgttgcgcttgggattggtggtttgcctatgggtcgaattgtagaaattttcgggcctgaatcatcgggtaaaacaacattaactctttccgtcattgctcaagcgcaaaaagcaggaaaaacctgtgcatttattgatgcagaacacgcacttgatcctatttatgcagcaaaacttggtgtagatgtaaaagaactttttgtttctcaaccagataatggggaacaggcacttgaaatctgtgatgcattagttcgctcaggtgcaattgatgtaattattgtggactccgttgccgcactgacaccaaaagctgaaattgaaggcgatatgggcgattctcatatgggtctgcaagcacgtttaatgtctcaagctttgcgtaaactcacaggtcaaattaaaaatgcaaactgtctagttgtgtttattaaccaaatccgtatgaaaataggcgtgatgtttggtaatcctgaaaccaccacaggcggtaatgcattaaaattctattcttctgttcgcttagatattcgccgtacaggttctgtaaaagatggcgaaaatattattggaaatgaaactcgcgtaaaagtagtgaaaaacaaattagcggcaccgttccgccaagtggatttccaaattctctatggagaaggcatttcaaaagcaggagaattattagaacttggtgtaaaacacaaacttgtagaaaaatcaggcgcatggtattcctataatggcgaaaaaattggtcaaggaaaggctaattcaatgaaatggcttaacgaaaatatagagaaatcagatgaattagaagctcgtttacgtgctgaattagtggccaatccagaacaagccttaatggcggatattgaacaatctgaaaataatactgaatcagaaagtgattttgaataa

SEQ ID NO: 114430 - protein, 354 aa, Haemophilus influenzae
MATQEEKQKALAAALGQIEKQFGKGSIMKLGDTKTLDVESISTGSLGLDVALGIGGLPMGRIVEIFGPESSGKTTLTLSVIAQAQKAGKTCAFIDAEHALDPIYAAKLGVDVKELFVSQPDNGEQALEICDALVRSGAIDVIIVDSVAALTPKAEIEGDMGDSHMGLQARLMSQALRKLTGQIKNANCLVVFINQIRMKIGVMFGNPETTTGGNALKFYSSVRLDIRRTGSVKDGENIIGNETRVKVVKNKLAAPFRQVDFQILYGEGISKAGELLELGVKHKLVEKSGAWYSYNGEKIGQGKANSMKWLNENIEKSDELEARLRAELVANPEQALMADIEQSENNTESESDFE

SEQ ID NO: 114431 - DNA, 1056 bp, Herbaspirillum seropedicae; identical to SEQ ID NO: 100371
  CDS (1)..(1056): transl_table=11

SEQ ID NO: 114432 - protein, 351 aa, Herbaspirillum seropedicae; identical to SEQ ID NO: 100372

SEQ ID NO: 114433 - DNA, 1119 bp, Idiomarina loihiensis; identical to SEQ ID NO: 100373
  CDS (1)..(1119): transl_table=11

SEQ ID NO: 114434 - protein, 372 aa, Idiomarina loihiensis; identical to SEQ ID NO: 100374

SEQ ID NO: 114435 - DNA, 1047 bp, Legionella pneumophila; identical to SEQ ID NO: 100375
  CDS (1)..(1047): transl_table=11

SEQ ID NO: 114436 - protein, 348 aa, Legionella pneumophila; identical to SEQ ID NO: 100376

SEQ ID NO: 114437 - DNA, 1056 bp, Mannheimia succiniciproducens; identical to SEQ ID NO: 100383
  CDS (1)..(1056): transl_table=11

SEQ ID NO: 114438 - protein, 351 aa, Mannheimia succiniciproducens; identical to SEQ ID NO: 100384

SEQ ID NO: 114439 - DNA, 1044 bp, Methylococcus capsulatus; identical to SEQ ID NO: 100385
  CDS (1)..(1044): transl_table=11

SEQ ID NO: 114440 - protein, 347 aa, Methylococcus capsulatus; identical to SEQ ID NO: 100386

SEQ ID NO: 114441 - DNA, 1035 bp, Methylobacillus flagellatum; identical to SEQ ID NO: 100389
  CDS (1)..(1035): transl_table=11

SEQ ID NO: 114442 - protein, 344 aa, Methylobacillus flagellatum; identical to SEQ ID NO: 100390

SEQ ID NO: 114443 - DNA, 1032 bp, Nitrosomonas europaea; identical to SEQ ID NO: 100399
  CDS (1)..(1032): transl_table=11

SEQ ID NO: 114444 - protein, 343 aa, Nitrosomonas europaea; identical to SEQ ID NO: 100400

SEQ ID NO: 114445 - DNA, 1044 bp, Nocardia farcinica; identical to SEQ ID NO: 100401
  CDS (1)..(1044): transl_table=11

SEQ ID NO: 114446 - protein, 347 aa, Nocardia farcinica; identical to SEQ ID NO: 100402

SEQ ID NO: 114447 - DNA, 1065 bp, Pasteurella multocida
  CDS (1)..(1065): transl_table=11
atggcaacaaaagaagaaaaaaataaagcactggcagcagcacttgggcagattgaaaaacaatttgggaaaggctctattatgaaattgggcgatacccaagccttggatgttgaagccgtgtcaacaggctccttaagcctcgacgtcgcacttggcattggcgggttaccaatgggtcgtattgttgaaattttcggacctgaatcttccggtaaaaccaccttaaccctttctgtcattgcgcaagcacaaaaagaaggcaaaacctgtgcctttattgacgcagaacacgcattagatccaatttatgctgccaaactgggcgtcaatgtgaatgaactgttagtttcccaacctgataacggtgaacaagcactcgaaatttgcgatgcgttagtgcgttcaggtgcagtagatgtgatcattgtggactcagtcgcagcattaaccccgaaagcggaaattgaaggagaaatgggtgactcacacatgggcttacaagcacgtttgatgtcacaagcgttacgtaaactcactggacaaatcaaaaactcaaattgcttagtggtctttattaaccaaatccgtatgaaaattggtgttatgttcggtaacccagaaaccacaacagggggtaatgcactgaaattctatgcctctgtacgtttagatattcgccgtacgggtgcgattaaagagggtgaagaagtgatcggtaacgaaacccgtgtcaaagtggtgaaaaacaaagtggcggcaccattccgtcaagtagatttccaaattctttacggtcaaggtatttctaaaacaggcgagctcatcgagttaggcgtaaaacacaaattagtggataaagcaggtgcatggtacgcttacaatggtgaaaaaatcggtcaaggtaaagctaacgcgatgaaatggttagaagagcatcctgaagaagcattggctttagaaacgaaattacgcaatgagttgctcgcgaatccagaaaaagtactcgcggcagacattgcggaaaaaaatgaaagctctacgggcttagaagcggattattaa

SEQ ID NO: 114448 - protein, 354 aa, Pasteurella multocida; identical to SEQ ID NO: 100408

SEQ ID NO: 114449 - DNA, 1068 bp, Photorhabdus luminescens subsp
  CDS (1)..(1068): transl_table=11
atggctattgatgaaaataaacaaaaagcactagcagcggcactcggccaaattgaaaaacagtttggtaaaggttccatcatgcgtttgggcgaagaccgttcaatggacgttgaaactatctccacgggttcattatcactggatattgcattaggtgctggtggtctgccgatggggcgtattgttgaaatctatggcccggaatcttcgggtaagacaacgctgacattacaggttattgctgcggcacaacgtgaaggtaaaacctgtgcgtttattgatgctgaacacgctcttgatcccatctatgctaagaagttgggtgttgatattgataacttgttgtgttctcaacccgatacgggggaacaggctcttgagatctgtgatgcgttgactcgctccggcgctgttgatgtcattatcgtagactccgttgccgctttaacgccaaaagccgaaatagaaggagaaattggtgattctcatatggggctggccgctcgaatgatgagtcaggcaatgcgtaaactggccggtaacttgaaaagttctaatacgttgttgatctttatcaaccagattcgtatgaaaattggtgtcatgtttggtaaccctgaaactaccaccggtggtaacgcgctgaaattctatgcttctgttcgtctggatattcgccgcattggttctgtgaaaaatggtgaagaggtcgttggtagcgagacccgtgttaaggtggtaaaaaacaaagtggcagcgccatttaagcaagcagaattccagattatgtatggtgaaggcattaacacttatggtgaattaatcgatttaggtgtgaagcataaactggtggaaaaagcaggcgcatggtacagctataatggcgataaaattggtcaaggcaaagcgaatgctaccatctatctgaaagagcatcctgaagttgctactgagctggataaaaaattacgtgaaatgctgttgcacaatgccggcgaattcaatagtgctgcttctgattatgaagacaatgaaaatgaagagatgaataacgaagaattctaa

SEQ ID NO: 114450 - protein, 355 aa, Photorhabdus luminescens subsp
MAIDENKQKALAAALGQIEKQFGKGSIMRLGEDRSMDVETISTGSLSLDIALGAGGLPMGRIVEIYGPESSGKTTLTLQVIAAAQREGKTCAFIDAEHALDPIYAKKLGVDIDNLLCSQPDTGEQALEICDALTRSGAVDVIIVDSVAALTPKAEIEGEIGDSHMGLAARMMSQAMRKLAGNLKSSNTLLIFINQIRMKIGVMFGNPETTTGGNALKFYASVRLDIRRIGSVKNGEEVVGSETRVKVVKNKVAAPFKQAEFQIMYGEGINTYGELIDLGVKHKLVEKAGAWYSYNGDKIGQGKANATIYLKEHPEVATELDKKLREMLLHNAGEFNSAASDYEDNENEEMNNEEF

SEQ ID NO: 114451 - DNA, 1068 bp, Proteus mirabilis
  CDS (1)..(1068): transl_table=11
atggctattgatgaaaacaaacaaaaagcattggccgcagcacttggtcaaattgaaaagcaatttggtaaaggttctatcatgcgtctgggcgaagaccgttccatgaacgtagaaactatctctacaggatctttatcattagacgttgctttaggtgcaggtggattgccacgtggccgtattgttgaaatctatggccctgaatcttctggtaaaacaaccttgactctacaagttattgcctctgctcagcgtgaaggaaaaatttgtgcatttattgatgctgaacatgcattagacccaatttatgctcaaaagctaggtgtcgatatcgataatctactctgctctcaacctgacacaggtgaacaagctctggaaatttgtgatgcattatctcgctctggtgcggtcgatgttattgtcgtggactccgtggcagcattaacaccaaaagctgaaattgaaggtgaaattggtgattcacacgttggtttagccgcacgtatgatgagccaagctatgcgtaaactagcgggtaaccttaaaaactctaatacactgctgattttcattaaccaaattcgtatgaaaatcggtgttatgtttggtaacccagaaaccacgaccggtggtaatgcgcttaaattctatgcttctgttcgtttagacattcgtcgcattggctctgtcaaaaatggtgatgaagtcattggtagtgagactcgcgttaaagttgttaaaaataaagtggctgcaccgtttaaacaagctgaattccaaattatgtacggtgaaggtattaatacctatggcgaactgattgatttaggtgttaaacataagttagtagagaaagcaggtgcttggtatagctacaatggcgaaaaaattggtcaaggtaaagctaacgcaaccaattacttaaaagaacatcctgaaatgtacaatgagttaaacactaaattgcgtgaaatgttgttaaatcatgctggtgaattcacaagtgctgcggattttgcaggtgaagagtcagacagtgatgctgacgacacaaaagagtaa

SEQ ID NO: 114452 - protein, 355 aa, Proteus mirabilis; identical to SEQ ID NO: 100412

SEQ ID NO: 114453 - DNA, 1041 bp, Pseudomonas aeruginosa
  CDS (1)..(1041): transl_table=11
atggacgagaacaagaagcgcgccctggccgcggccctgggacagatcgaacgccaattcggcaaaggcgcggtcatgcgcatgggcgaccatgagcgccaggcgatcccggccatctccaccggctccctgggtctggacatcgccctcggcatcggcggcctgcccaagggccggatcgtcgagatctacggtccggaatcctcgggcaagaccaccctgaccctctcggtgatcgccgaggcccagaaacagggcgccacctgtgccttcgtcgacgccgagcacgcgctcgatcccgactatgccggcaagctgggcgtcaacgtcgacgacctgctggtctcccagccggacaccggcgagcaggccctggaaatcaccgacatgctggtgcgctccaacgcggtcgacgtgatcatcgtcgactccgtggccgcgctggtacccaaggccgagatcgaaggcgagatgggcgacgcccacgtcggcctgcaggcacgcctgatgtcccaggcgctgcgcaagatcaccggcaatatcaagaacgccaactgcctggtcatcttcatcaaccagatccgcatgaagatcggcgtcatgttcggcaacccggaaaccaccaccggcggtaacgcactgaagttctacgcctcggtccgcctggacatccgtcgtaccggcgcggtgaaggaaggcgacgaggtggtgggtagcgaaacccgcgtcaaggtggtgaagaacaaggtttccccgccgttccgccaggccgagttccagatcctctacggtaagggcatctaccgtaccggcgagatcatcgatctgggcgtgcaattgggcctggtcgagaagtccggcgcctggtacagctaccagggcagcaagatcggccagggcaaggcgaacgccgccaagtacctggaagacaatccggaaatcggttcggtactggagaagaccattcgcgaccagttgctggccaagagcggcccggtgaaggccgacgccgaagaagtggctgacgccgaagccgattga

SEQ ID NO: 114454 - protein, 346 aa, Pseudomonas aeruginosa; identical to SEQ ID NO: 100416

SEQ ID NO: 114455 - DNA, 1053 bp, Pseudomonas fluorescens; identical to SEQ ID NO: 100417
  CDS (1)..(1053): transl_table=11

SEQ ID NO: 114456 - protein, 350 aa, Pseudomonas fluorescens; identical to SEQ ID NO: 100418

SEQ ID NO: 114457 - DNA, 1059 bp, Pseudomonas fluorescens
  CDS (1)..(1059): transl_table=11
atggacgacaacaagaagaaagccttggctgcggccctgggtcagatcgaacgtcaattcggcaagggtgccgtaatgcgtatgggcgatcacgaccgtcaagcgatcccggctatttccactggctctctgggtctggacatcgcactcggcattggcggcctgccaaaaggccgtatcgttgaaatctacggtcctgaatcttccggtaaaaccaccctgaccctgtcggtgattgcccaagcgcaaaaaatgggcgccacctgtgcgttcgtcgacgccgagcacgcccttgacccggaatacgccggtaagctgggcgtcaacgttgacgacctgctggtttcccagccggacaccggtgagcaagccctggaaatcaccgacatgctggtgcgctccaacgccatcgacgtgatcgtggtcgactccgtggctgccctggtaccgaaagctgaaatcgaaggcgaaatgggcgacatgcacgtgggcctgcaagcccgcctgatgtcccaggcgctgcgtaaaattaccggtaacatcaagaacgccaactgcctggtgatcttcatcaaccagatccgtatgaagatcggcgtaatgttcggcagcccggaaaccactaccggtggtaacgcgctgaagttctacgcttcggtccgtctggacatccgccgtaccggcgcggtgaaggaaggtgacgaagttgttggtagcgaaactcgcgttaaagtcgtgaagaacaaggtcgctccgcctttccgtcaggcagagttccagattctctacggcaagggtatctacctgaacggcgagatgattgacctgggcgtactgcacggtttcgtcgagaagtccggtgcctggtatgcctacaacggcagcaagatcggtcagggcaaggccaactcggccaagttcctggcagacaacccggatatcgtcgccacgcttgagaagcagattcgcgacaagctgctgaccccagcgccagacgtgaaagctgccgccaaccgcgagccggttgaagaagtggaagaagctgacactgatatctga

SEQ ID NO: 114458 - protein, 352 aa, Pseudomonas fluorescens
MDDNKKKALAAALGQIERQFGKGAVMRMGDHDRQAIPAISTGSLGLDIALGIGGLPKGRIVEIYGPESSGKTTLTLSVIAQAQKMGATCAFVDAEHALDPEYAGKLGVNVDDLLVSQPDTGEQALEITDMLVRSNAIDVIVVDSVAALVPKAEIEGEMGDMHVGLQARLMSQALRKITGNIKNANCLVIFINQIRMKIGVMFGSPETTTGGNALKFYASVRLDIRRTGAVKEGDEVVGSETRVKVVKNKVAPPFRQAEFQILYGKGIYLNGEMIDLGVLHGFVEKSGAWYAYNGSKIGQGKANSAKFLADNPDIVATLEKQIRDKLLTPAPDVKAAANREPVEEVEEADTDI

SEQ ID NO: 114459 - DNA, 1047 bp, Pseudomonas oleovorans
  CDS (1)..(1047): transl_table=11
atggatcaggcaaaaagcaaagcgttagaagcggctctttctcaaattgagaagcagtttggtaagggttccatcatgcggctgggctccgaccgcactatggatatagatgttatatcgactggctcactcggcttggacatcgccttgggggtgggtgggttgccgcgcggccgtatcgttgaaatctatgggccggagtcttctggtaaaaccacgcttacgctgtcggtgattgctgaagcgcagcgtcaaggtttgacttgtgcatttgtcgatgctgagcacgcgcttgatccgatctacgcagccaagctcggcgttaatattgacgaactcctgtgctcacagcctgacactggtgagcaggcacttgaaatcgtagacatcttgacgcgttctggggcagtcaatcttattgtcgttgactctgttgctgctcttgttccgaaggctgagattgaaggcgaaatcggggattcccatgtaggtcttgccgcccgaatgatgtcgcaggcgatgaggaagatcactggtaacctgaagaactccaatactatgtgtatcttcattaaccagattcgtatgaagatcggtgtaatgtttggcaacccggaaaccaccaccggcggtaacgccctgaagttctacgcctcggtgcgcctggacatccgtcgtaccggcgcggtcaaggaaggcgaggaagtggtgggcagcgaaacccgtgtgaaagtggtcaagaacaaagttgctgctccattcaggcaagcagagttccagatcgtttacggtcagggtattagcaaggcgggtgagatcgttgacctcgctgttgctaacaactttgttgaaaagtcaggcgcttggtactccttcgaaggtaacaagatcggccaaggtaaggccaataccatgaaatggctgttggaaaacaaacctactatggacaagctggaaggtatgattcgcgaaaagttgatgtctaagcctcaggctgaaacctctgcacgtctcgcaacccaagaagaactggctgacgactattga

SEQ ID NO: 114460 - protein, 348 aa, Pseudomonas oleovorans
MDQAKSKALEAALSQIEKQFGKGSIMRLGSDRTMDIDVISTGSLGLDIALGVGGLPRGRIVEIYGPESSGKTTLTLSVIAEAQRQGLTCAFVDAEHALDPIYAAKLGVNIDELLCSQPDTGEQALEIVDILTRSGAVNLIVVDSVAALVPKAEIEGEIGDSHVGLAARMMSQAMRKITGNLKNSNTMCIFINQIRMKIGVMFGNPETTTGGNALKFYASVRLDIRRTGAVKEGEEVVGSETRVKVVKNKVAAPFRQAEFQIVYGQGISKAGEIVDLAVANNFVEKSGAWYSFEGNKIGQGKANTMKWLLENKPTMDKLEGMIREKLMSKPQAETSARLATQEELADDY

SEQ ID NO: 114461 - DNA, 1068 bp, Pseudomonas putida; identical to SEQ ID NO: 100419
  CDS (1)..(1068): transl_table=11

SEQ ID NO: 114462 - protein, 355 aa, Pseudomonas putida; identical to SEQ ID NO: 100420

SEQ ID NO: 114463 - DNA, 1068 bp, Pseudomonas putida; identical to SEQ ID NO: 100421
  CDS (1)..(1068): transl_table=11

SEQ ID NO: 114464 - protein, 355 aa, Pseudomonas putida; identical to SEQ ID NO: 100422

SEQ ID NO: 114465 - DNA, 1044 bp, Pseudomonas stutzeri
  CDS (1)..(1044): transl_table=11
atggacgagaacaagaagcgtgccttggccgctgccctgggccagatcgaaaagcagttcggcaaaggcgcggtcatgcgcatgggcgatcatgatcgccaggcgatcccttctatttccaccggctccctggggctggatatcgccctcggcataggcggtctgccgaaaggccggatcgtcgaaatctacggcccggaatcttcgggtaaaaccaccctgaccctctcggtcatcgccgccgcccagagaatgggctccacctgcgccttcgtcgatgccgagcatgcgctggaccccgattacgccggcaagctgggcgtcaacgtcgacgacctgctggtctcgcagcccgacacgggcgagcaggcgctggaaatcaccgacatgctggtgcgctccaatgcagtggacgtgatcatcgtcgactccgtggcagcgctggtgcccaaggcggaaatcgaaggcgagatgggcgatgcccacgtcggtctgcaggcccgcctgatgtcccaggcgctgcgcaagatcaccggcaacatcaagaacgccaactgcctggtgatcttcatcaaccagatccgcatgaagatcggcgtgatgttcggtagcccggaaaccaccaccggcggtaacgcgctgaagttctacgcttcggtccgcctggacatccgccgtactggcgcggtgaaggaaggcgacgaagtggtgggcagcgaaacccgcgtcaaggtcgtcaagaacaaggtggccccgccgttccgccaggccgagttccagatcctctacgatcaagctttctaccgcaacggcgagatcatcgatctcggcgtgcagcagggcctggtggagaaatccggtgcctggtacgcctacaagggcagcaagatcggccagggcaaggccaatgcggccaagtatctggaagagaacccggagatcggccaggagatcgaacagcagattcgcgccaagctgctggtgacttcggccaataccaaggccaccccggtagccgaagatctggcggacgccgacatctga

SEQ ID NO: 114466 - protein, 347 aa, Pseudomonas stutzeri; identical to SEQ ID NO: 100424

SEQ ID NO: 114467 - DNA, 1059 bp, Pseudomonas tolaasii; identical to SEQ ID NO: 100425
  CDS (1)..(1059): transl_table=11

SEQ ID NO: 114468 - protein, 352 aa, Pseudomonas tolaasii; identical to SEQ ID NO: 100426

SEQ ID NO: 114469 - DNA, 1065 bp, Pseudomonas syringae pv; identical to SEQ ID NO: 100427
  CDS (1)..(1065): transl_table=11

SEQ ID NO: 114470 - protein, 354 aa, Pseudomonas syringae pv; identical to SEQ ID NO: 100428

SEQ ID NO: 114471 - DNA, 1098 bp, Rhizobium loti; identical to SEQ ID NO: 100433
  CDS (1)..(1098): transl_table=11

SEQ ID NO: 114472 - protein, 365 aa, Rhizobium loti; identical to SEQ ID NO: 100434

SEQ ID NO: 114473 - DNA, 1056 bp, Rhizobium leguminosarum bv; identical to SEQ ID NO: 100435
  CDS (1)..(1056): transl_table=11

SEQ ID NO: 114474 - protein, 351 aa, Rhizobium leguminosarum bv; identical to SEQ ID NO: 100436

SEQ ID NO: 114475 - DNA, 1047 bp, Rhizobium meliloti; identical to SEQ ID NO: 100437
  CDS (1)..(1047): transl_table=11

SEQ ID NO: 114476 - protein, 348 aa, Rhizobium meliloti; identical to SEQ ID NO: 100438

SEQ ID NO: 114477 - DNA, 1092 bp, Rhodopseudomonas palustris; identical to SEQ ID NO: 100441
  CDS (43)..(1092): transl_table=11

SEQ ID NO: 114478 - protein, 349 aa, Rhodopseudomonas palustris; identical to SEQ ID NO: 100442

SEQ ID NO: 114479 - DNA, 1047 bp, Rhodopseudomonas viridis; identical to SEQ ID NO: 100443
  CDS (1)..(1047): transl_table=11

SEQ ID NO: 114480 - protein, 348 aa, Rhodopseudomonas viridis; identical to SEQ ID NO: 100444

SEQ ID NO: 114481 - DNA, 1065 bp, Serratia marcescens
  CDS (1)..(1065): transl_table=11
atggctattgatgagaacaagcaaaaggcgttagctgcggcactgggccagattgagaaacagttcggcaaaggctccatcatgcgtctgggtgaagaccgctccatggacgtggaaacgatctccaccggctcactgtcactcgatatcgccctgggcgccggcggcctgccgatgggccgcatcgtagaaatctacggcccggaatcgtccggtaaaaccactttgacgctgcaggtgatcgccgccgcgcagcgcgaaggcaaaacctgtgcgttcatcgacgccgaacacgcgctggatcctatctatgcgaaaaagctgggcgtcgatatcgacaacctgctgtgctcccagccggataccggcgagcaggcgctggaaatctgtgatgcgctgacccgctccggcgcggttgatgtcatcatcgtcgactccgtggcggcgctgacgccgaaagcggaaatcgaaggtgaaatcggcgattcgcacatgggcctggcggcgcgcatgatgagccaggcgatgcgtaagctggccggcaacctgaaaaacgccaataccctgctgatcttcatcaaccagatccgtatgaaaattggtgtgatgttcggcaacccggaaaccacgaccggcggtaacgccctgaagttctatgcttcggtgcgtttggatatccgtcgtatcggcgccatcaaagaaggcgacgaagtggtgggcagcgaaacccgcgtgaaagtggtgaagaacaaaatcgctgcgccgttcaaacaggctgagttccaaatcatgtacggcgaaggcatcaacagccgcggcgaactggtcgatctgggcgtgaagcacaagatgatcgaaaaagccggcgcctggtacagctataacggcgagaagatcggtcagggcaaggcgaatgcctgtaacttcctgaaagaaaacccggctattgccgccgagctggataagaagctgcgtgacctgctgctgcacagcggcggtgagctggtggctgcctccggtgacgacttcgaagacgacgaagcggaaaccagcgagcagttctaa

SEQ ID NO: 114482 - protein, 354 aa, Serratia marcescens; identical to SEQ ID NO: 100454

SEQ ID NO: 114483 - DNA, 1062 bp, Shigella sonnei
  CDS (1)..(1062): transl_table=11
atggctatcgacgaaaacaaacagaaagcgttggcggcagcactgggccagattgagaaacaatttggtaaaggctccatcatgcgcctgggtgaagaccgttccatggatgtggaaaccatctctaccggttcgctttcactggatatcgcgcttggggcaggtggtctgccgatgggccgtatcgtcgaaatctacggaccggaatcttccggtaaaaccacgctgacgctgcaggtgatcgccgcagcgcagcttgaaggtaaaacctgtgcgtttatcgatgctgaacacgcgctggacccaatctacgcacgtaaactgggcgtcgatatcgataacctgctgtgctcccagccggacaccggcgagcaggcactggaaatctgtgacgccctggcgcgttctggcgcagtagacgttatcgtcgttgactccgtggcggcactgacgccgaaagcggaaatcgaaggcgaaatcggcgactctcacatgggccttgcggcacgtatgatgagccaggcgatgcgtaagctggcgggtaacctgaagcagtccaacacgctgctgatcttcatcaaccagatccgtatgaaaattggtgtgatgttcggtaacccggaaaccactaccggtggtaacgcgctgaaattctacgcctctgttcgtctcgacatccgtcgtatcggcgcggtgaaagagggcgaaaacgtggtgggtagcgaaacccgcgtgaaagtggtgaagaacaaaatcgctgcaccgtttaaacaggctgaatttcagatcctctacggcgaaggtatcaacttctacggcgaactggttgacctgggcgtaaaagagaagctgatcgagaaagcaggcgcgtggtacagctacaaaggtgagaagatcggtcagggtaaagcgaatgcaactgcctggctgaaagataacccggaaaccgcgaaagagatcgagaagaaagtacgtgagttgctgctgagcaacccgaactcaacgccggatttctctgtagatgacagcgaaggcgtagcagaaactaacgaagatttttaa

SEQ ID NO: 114484 - protein, 353 aa, Shigella sonnei; identical to SEQ ID NO: 100458

SEQ ID NO: 114485 - DNA, 1068 bp, Sodalis glossinidius
  CDS (1)..(1068): transl_table=11
atggctattgatgagaataaacaaaaggcgttagcggcagcactgggccagattgaaaagcaattcggcaagggctcgatcatgcgtctgggtgaagatcgctccatggatgttgaaacgatctccacaggttctctgtctctggatatagcgttgggcgccggtgggcttcccatgggccgcatcgtcgaaatctacggcccggaatcatcgggtaaaacgaccctgaccctgcaggtcatcgccgcggcgcagcgtgaagtcaaaacctgcgcctttatcgatgctgaacacgccctggatcccatctatgccaaaaagctgggcgtcgatatcgacaatctgctgtgctcccagccggataccggcgaacaggcgctggaaatctgtgacgccttgacccgctccggcgcggtagacgtcatcatcgtcgactccgtggcagcgctgacgccgaaagcagaaatcgagggcgaaatcggcgattcccatatggggctggccgcccgtatgatgagccaggcgatgcggaaactggcgggcaacctgaaaaacgccaacacactcctgattttcatcaaccagatccgtatgaagatcggcgtcatgttcggcaatccggaaaccaccaccggcggtaatgcgcttaagttttacgcgtcggttcgcctggatatccgtcgtatcggctcggtaaaagaaggcgatgtggtggtgggcagtgaaacccgcgtcaaagtcgtgaagaacaaagttgccgcgccgtttaaacaggccgaattccagatcatgtacggcgaaggtatcaatattcgcggtgaattggttgatttgggcgtcaagcacaagctaattgagaaagccggcgcctggtacagctacaacggcgagaagatcggccagggcaaagccaatgcctgcagcttcttgaaggatcatcccgaggtggcggctgagctggacaaaaagctgcgcgacatgttgctgcacagcgctgaaggcaacagcctggtcagcgacgtggaaagtgaggatgaaggcgctagcgagagcaatgaagagttttaa

SEQ ID NO: 114486 - protein, 355 aa, Sodalis glossinidius; identical to SEQ ID NO: 100462

SEQ ID NO: 114487 - DNA, 1098 bp, Spirulina platensis
  CDS (1)..(1098): transl_table=11
atggccagcaaaaccgagaattccgaaaagcagaaagccctaaattcagtccttaaccaaatcgaaaagagttttggtaaggggtctattgtccgcctaggagactccgcccgtatgaaggtggaaactatctccagtggcgcattaaccttggatttggcccttggtggtggtttgccgaggggaagggtgattgaaatttatggcccagaaagttccggtaaaactactttggctctccatgcgatcgccgaaatccaaaaaactggcggaatagcagcttttgtggacgctgaacacgccctcgaccctacctatgcagccgccctgggagtagatattgaaaacctcctagtttcccaacctgacaccggggaaatggctttagaaatagtagatcaattggtgcgatcggtagcggttgatattgtagtggtagactcggtagctgctttagttccccgtgctgaaattgaaggggatatgggggattctcacatgggactacaagcccggttaatgagtcaagccctacggaaaattaccggaaatatcggtaaatctggctgtacagttattttcctgaatcagttacgccaaaaaattggtattgtctacggcaacccagaaactaccaccggggggaatgcccttaaattctacgcctcggtccgtcttgatatccgccgcacccaaaccctgaaaaaaggctcggacgagtatggcattcgcgctaaagttaaggtggctaaaaataaggtcgcgccacccttccgaatcgctgaatttgatattattttcggccagggaatctcaactatcggttgtttgattgacctcgcagaagaaaccggagtgattaaacgtaagggcgcttggtatagctacaacaacgagaatatcggtcaaggacgcgatcgcaccatcacctatatgcaggaaaacccagcatttaccgaagaaattgataaacgagtccgtgccgctttagcagggggtgcagttgtatcagccacctctgttgttaaacttgatgataatcctgacacagatgatcatgatgtcgaagacattgacgagaatactgatgaggaataa

SEQ ID NO: 114488 - protein, 365 aa, Spirulina platensis
MASKTENSEKQKALNSVLNQIEKSFGKGSIVRLGDSARMKVETISSGALTLDLALGGGLPRGRVIEIYGPESSGKTTLALHAIAEIQKTGGIAAFVDAEHALDPTYAAALGVDIENLLVSQPDTGEMALEIVDQLVRSVAVDIVVVDSVAALVPRAEIEGDMGDSHMGLQARLMSQALRKITGNIGKSGCTVIFLNQLRQKIGIVYGNPETTTGGNALKFYASVRLDIRRTQTLKKGSDEYGIRAKVKVAKNKVAPPFRIAEFDIIFGQGISTIGCLIDLAEETGVIKRKGAWYSYNNENIGQGRDRTITYMQENPAFTEEIDKRVRAALAGGAVVSATSVVKLDDNPDTDDHDVEDIDENTDEE

SEQ ID NO: 114489 - DNA, 1119 bp, Streptomyces ambofaciens; identical to SEQ ID NO: 100465
  CDS (1)..(1119): transl_table=11

SEQ ID NO: 114490 - protein, 372 aa, Streptomyces ambofaciens; identical to SEQ ID NO: 100466

SEQ ID NO: 114491 - DNA, 1134 bp, Streptomyces avermitilis; identical to SEQ ID NO: 100467
  CDS (1)..(1134): transl_table=11

SEQ ID NO: 114492 - protein, 377 aa, Streptomyces avermitilis; identical to SEQ ID NO: 100468

SEQ ID NO: 114493 - DNA, 1125 bp, Streptomyces coelicolor; identical to SEQ ID NO: 100469
  CDS (1)..(1125): transl_table=11

SEQ ID NO: 114494 - protein, 374 aa, Streptomyces coelicolor; identical to SEQ ID NO: 100470

SEQ ID NO: 114495 - DNA, 1125 bp, Streptomyces lividans; identical to SEQ ID NO: 100471
  CDS (1)..(1125): transl_table=11

SEQ ID NO: 114496 - protein, 374 aa, Streptomyces lividans; identical to SEQ ID NO: 100472

SEQ ID NO: 114497 - DNA, 1131 bp, Streptomyces rimosus; identical to SEQ ID NO: 100473
  CDS (1)..(1131): transl_table=11

SEQ ID NO: 114498 - protein, 376 aa, Streptomyces rimosus; identical to SEQ ID NO: 100474

SEQ ID NO: 114499 - DNA, 1134 bp, Streptomyces violaceus; identical to SEQ ID NO: 100475
  CDS (1)..(1134): transl_table=11

SEQ ID NO: 114500 - protein, 377 aa, Streptomyces violaceus; identical to SEQ ID NO: 100476

SEQ ID NO: 114501 - DNA, 1071 bp, Synechococcus sp
  CDS (1)..(1071): transl_table=11
atggctagcaaatctgacgcgatcgctccagagaaggaaaaagccctaaatctcgtgctcagtcagattgagcgcaatttcggcaagggggcaatcatgcgccttggcgatgcggctcgactgcgggtcgaaacgatttccacgggtgcgctgacgcttgatttagccctgggcggcggtctacccaaggggcggattatcgaggtctacggccctgaaagctcgggtaaaactacgctcacgctccacgcgatcgcagaagtccaaaagcagggtgggatcgccgcttttgtagacgcggagcatgctctcgacccggtttacgccacctccgtaggggtggacattgacaatctgctgatctcgcagcctgacaccggcgagatggccctcgagattgtcgaccagctcgtgcgatcggccgccgtcgatatcgtcgtgatcgactcggtggcagccctcgttccccgtgccgaaattgaaggggaaatgggcgacgcccaagtgggtctgcaggctcgcctgatgagccaagcgatgcggaaaattacaggcaacatcggcaaatcgggttgcacggttatcttcctcaaccaattgcgccaaaaaatcggtgtcacctacggcagccccgagaccaccacaggcggtcaggccctgaagttctatgcgtccgtccgcttagatattcgccgcattcaaaccctgaagaagggcacagaagagtacggcacccgtgccaaggtcaaggtcgtcaagaacaaagtggcaccgcccttccgcattgctgagttcgacattctcttcggcaagggcatttctaccctcggttgcctggtggacttggcggaagaaaccggcgtcatcctgcgcaaaggcgcctggtacagctacaacggcgacaacatcggccaagggcgcgacaacacaatcacccacttggaagagcatcctgacttccgggcaacggtcgaacagcaggtgcgcgaaaaattggccctcggggctcaagtttcggccaacacagtcggggcagcgcctgccaaaaccgctgaagacaccgacagctaa

SEQ ID NO: 114502 - protein, 356 aa, Synechococcus sp
MASKSDAIAPEKEKALNLVLSQIERNFGKGAIMRLGDAARLRVETISTGALTLDLALGGGLPKGRIIEVYGPESSGKTTLTLHAIAEVQKQGGIAAFVDAEHALDPVYATSVGVDIDNLLISQPDTGEMALEIVDQLVRSAAVDIVVIDSVAALVPRAEIEGEMGDAQVGLQARLMSQAMRKITGNIGKSGCTVIFLNQLRQKIGVTYGSPETTTGGQALKFYASVRLDIRRIQTLKKGTEEYGTRAKVKVVKNKVAPPFRIAEFDILFGKGISTLGCLVDLAEETGVILRKGAWYSYNGDNIGQGRDNTITHLEEHPDFRATVEQQVREKLALGAQVSANTVGAAPAKTAEDTDS

SEQ ID NO: 114503 - DNA, 1041 bp, Thiobacillus ferrooxidans; identical to SEQ ID NO: 100479
  CDS (1)..(1041): transl_table=11

SEQ ID NO: 114504 - protein, 346 aa, Thiobacillus ferrooxidans; identical to SEQ ID NO: 100480

SEQ ID NO: 114505 - DNA, 1245 bp, Treponema denticola
  CDS (1)..(1245): transl_table=11
gtggcaaaagcaaaaaacgaagtaccggcagttgcaaacccggatgataagttaaaggctctggaggctgcccgccttcaaatcgaaaaacaattcgggcaaggctctttgatgaagttagggaataattccgctatcggaaacatagaaattattccttcgggaagcatccttttggatgaagctctgggaatcggcggttatccccgcggcagaattatcgagatattcggccccgaatcttcgggtaagactacgatagctcttcatgccgtcgccgaggcacaaaagcagggaggcatagccgcctttatcgatgccgaacatgccttggatccccaatatgcaaaagccttgggagtaaatattgatgagctttgggtttcccaacccgataccggagaacaggcccttgaaatagcagaaagccttgtacgctccggagccgtggacgtaatagtaattgactcggtcgcagccctaacgcctcaggcagaaattgccggagaaatgggagactctcatatgggcttacaggcccgcttgatgagccaagccttgagaaaacttaccgccattataggcaagtccaactgtatgataatatttatcaaccaaatccgaatgaagataggcgttatgttcggaagtcctgaaacaactacgggaggaaatgcccttaaattttacgcctccgtccggctggatgtacggaaaattgaaactctcggcaaggacgatgatgaagcatggggaaataagattcgtgtaaaggttgtaaaaaacaaggtcgctcctccttttagaaaggtagaaatggaaatcctttttggaaagggcgtttgtccctatggaagtctcttggattctgctgtcaaacaagagataataggcaagagcgggtcgtggtattcttacggggacgacaaaatcggtcaaggcaggcccaatgccgttaaattcttagaagaaaacatagacatagctcaaaagattgaaaaagaattgagagaaaaactcttcccgggcaggccctttgtttcaagttttgtcgaaaaaacaaaagaacaaaaagaagcccaggaaaaggccgtagaagctcttaaaaaagaagagggttcaaaggaagatgctctgacaggcaataaagatgaaaccgatgattccgctcaaaaaaattcggccgcttcaaaggcaaaaagggctgaagttgtaggccttccggcggacgacagtcttttttaa

SEQ ID NO: 114506 - protein, 414 aa, Treponema denticola
MAKAKNEVPAVANPDDKLKALEAARLQIEKQFGQGSLMKLGNNSAIGNIEIIPSGSILLDEALGIGGYPRGRIIEIFGPESSGKTTIALHAVAEAQKQGGIAAFIDAEHALDPQYAKALGVNIDELWVSQPDTGEQALEIAESLVRSGAVDVIVIDSVAALTPQAEIAGEMGDSHMGLQARLMSQALRKLTAIIGKSNCMIIFINQIRMKIGVMFGSPETTTGGNALKFYASVRLDVRKIETLGKDDDEAWGNKIRVKVVKNKVAPPFRKVEMEILFGKGVCPYGSLLDSAVKQEIIGKSGSWYSYGDDKIGQGRPNAVKFLEENIDIAQKIEKELREKLFPGRPFVSSFVEKTKEQKEAQEKAVEALKKEEGSKEDALTGNKDETDDSAQKNSAASKAKRAEVVGLPADDSLF

SEQ ID NO: 114507 - DNA, 996 bp, Wigglesworthia glossinidia brevipalpis; identical to SEQ ID NO: 100489
  CDS (1)..(996): transl_table=11

SEQ ID NO: 114508 - protein, 331 aa, Wigglesworthia glossinidia brevipalpis; identical to SEQ ID NO: 100490

SEQ ID NO: 114509 - DNA, 1068 bp, Wolbachia pipientis wMel; identical to SEQ ID NO: 100491
  CDS (1)..(1068): transl_table=11

SEQ ID NO: 114510 - protein, 355 aa, Wolbachia pipientis wMel; identical to SEQ ID NO: 100492

SEQ ID NO: 114511 - DNA, 1077 bp, Xenorhabdus nematophilus
  CDS (1)..(1077): transl_table=11
atggctaacgatgaaaacaaacaaaaagcactcgcagcagcgcttggacagattgagaaacaatttggtaaaggttccatcatgcgtttgggtgaaaaccgctcaatggatgttgaaactatctctactggttccctgtcattggatatcgcactaggcgcaggtggtttgccaatgggccgtattgttgagatatatgggcctgaatcttccggtaaaacaacgttaacattgcaagtgatcgctgctgcccagcgtgaaggcagaacgtgtgcttttattgatgccgaacatgcccttgatccagtttatgctaaaaaactgggcgtagatattgataacctgttgtgttcgcagcctgataccggtgaacaggcgttggaaatctgtgatgctttatcccgttccggcgcagtggatgtcattattgttgactccgttgcggcattgacaccaaaagcggaaattgaaggtgaaatcggtgattctcatatggggctggcagcgcgtatgatgagtcaggccatgcgtaagctggcaggtaacttgaaaaattcaaataccctgttgatcttcatcaaccagatccgtatgaaaattggtgtgatgtttggtaaccctgaaacaccgccgggtggtaatgcgctgaaattctatgcgtctgtccgtttggatatccgccgtacgggttccgtgaaaaatggtgatgaagttgttggtagcgaaacgcgtgtgaaagtcgttaaaaacaaagttgcagcaccattcaaacaggctgaattccaaattctttatggggaaggtattaatactctgggagagttgatcgatctgagtgttaaacacaaaatggtagaaaaagcaggtgcatggtatagctacaatggtgacaaaatcgggcagggtaaagccaacgccacgatttacctgaaagagcatccagaaactgctgctgagttgaataagaaactgcgtgatttgttgttgcacaatactggggatttcagtagcgcagcttcagattatgtgacagattacgaagacaacactgaagaagtgaataacgaagagttctaa

SEQ ID NO: 114512 - protein, 358 aa, Xenorhabdus nematophilus; identical to SEQ ID NO: 100500

SEQ ID NO: 114513 - DNA, 1071 bp, Yersinia pestis; identical to SEQ ID NO: 100505
  CDS (1)..(1071): transl_table=11

SEQ ID NO: 114514 - protein, 356 aa, Yersinia pestis; identical to SEQ ID NO: 100506

SEQ ID NO: 114515 - DNA, 1020 bp, Zymomonas mobilis; identical to SEQ ID NO: 100509
  CDS (1)..(1020): transl_table=11

SEQ ID NO: 114516 - protein, 339 aa, Zymomonas mobilis; identical to SEQ ID NO: 100510

SEQ ID NO: 114517 - DNA, 1290 bp, Oryza sativa; identical to SEQ ID NO: 100107
  CDS (1)..(1290)

SEQ ID NO: 114518 - protein, 429 aa, Oryza sativa; identical to SEQ ID NO: 100108

SEQ ID NO: 114519 - DNA, 1257 bp, Oryza sativa; identical to SEQ ID NO: 100109
  CDS (1)..(1257)

SEQ ID NO: 114520 - protein, 418 aa, Oryza sativa; identical to SEQ ID NO: 100110

SEQ ID NO: 114521 - DNA, 1293 bp, Oryza sativa; identical to SEQ ID NO: 100111
  CDS (1)..(1293)

SEQ ID NO: 114522 - protein, 430 aa, Oryza sativa; identical to SEQ ID NO: 100112

SEQ ID NO: 114523 - DNA, 1293 bp, Zea mays; identical to SEQ ID NO: 100511
  CDS (1)..(1293)

SEQ ID NO: 114524 - protein, 430 aa, Zea mays; identical to SEQ ID NO: 100512

SEQ ID NO: 114525 - DNA, 1077 bp, Zea mays; identical to SEQ ID NO: 100513
  CDS (1)..(1077)

SEQ ID NO: 114526 - protein, 358 aa, Zea mays; identical to SEQ ID NO: 100514

SEQ ID NO: 114527 - DNA, 1173 bp, Brassica napus; identical to SEQ ID NO: 100515
  CDS (1)..(1173)

SEQ ID NO: 114528 - protein, 390 aa, Brassica napus; identical to SEQ ID NO: 100516

SEQ ID NO: 114529 - DNA, 1278 bp, Zea mays; identical to SEQ ID NO: 100517
  CDS (1)..(1278)

SEQ ID NO: 114530 - protein, 425 aa, Zea mays; identical to SEQ ID NO: 100518

SEQ ID NO: 114531 - DNA, 1299 bp, Glycine max; identical to SEQ ID NO: 100519
  CDS (1)..(1299)

SEQ ID NO: 114532 - protein, 432 aa, Glycine max; identical to SEQ ID NO: 100520

SEQ ID NO: 114533 - DNA, 1308 bp, Triticum aestivum; identical to SEQ ID NO: 100521
  CDS (1)..(1308)

SEQ ID NO: 114534 - protein, 435 aa, Triticum aestivum; identical to SEQ ID NO: 100522

SEQ ID NO: 114535 - DNA, 1293 bp, Zea mays; identical to SEQ ID NO: 100523
  CDS (1)..(1293)

SEQ ID NO: 114536 - protein, 430 aa, Zea mays; identical to SEQ ID NO: 100524

SEQ ID NO: 114537 - DNA, 1278 bp, Zea mays; identical to SEQ ID NO: 100525
  CDS (1)..(1278)

SEQ ID NO: 114538 - protein, 425 aa, Zea mays; identical to SEQ ID NO: 100526

SEQ ID NO: 114539 - DNA, 1230 bp, Zea mays; identical to SEQ ID NO: 100527
  CDS (1)..(1230)

SEQ ID NO: 114540 - protein, 409 aa, Zea mays; identical to SEQ ID NO: 100528

SEQ ID NO: 114541 - DNA, 20 bp, Artificial sequence
  primer
atggacgagaacaagaagcg

SEQ ID NO: 114542 - DNA, 21 bp, Artificial sequence
  primer
tcaataatcgagatccgcgtc

SEQ ID NO: 114543 - protein, 354 aa, Artificial sequence
  consensus sequence
  Variant (3)..(3): Xaa in position 3 is any amino acid
  Variant (4)..(28): Xaa in position 4 to 28 is any or no amino acid
  Variant (30)..(31): Xaa in position 30 to 31 is any amino acid
  Variant (34)..(36): Xaa in position 34 to 36 is any amino acid
  Variant (37)..(38): Xaa in position 37 to 38 is any or no amino acid
  Variant (43)..(44): Xaa in position 43 to 44 is any amino acid
  Variant (46)..(47): Xaa in position 46 to 47 is any amino acid
  Variant (49)..(57): Xaa in position 49 to 57 is any amino acid
  Variant (58)..(61): Xaa in position 58 to 61 is any or no amino acid
  Variant (65)..(66): Xaa in position 65 to 66 is any amino acid
  Variant (69)..(69): Xaa in position 69 is any amino acid
  Variant (73)..(73): Xaa in position 73 is any amino acid
  Variant (78)..(78): Xaa in position 78 is any amino acid
  Variant (81)..(82): Xaa in position 81 to 82 is any amino acid
  Variant (96)..(96): Xaa in position 96 is any amino acid
  Variant (98)..(100): Xaa in position 98 to 100 is any amino acid
  Variant (102)..(103): Xaa in position 102 to 103 is any amino acid
  Variant (105)..(106): Xaa in position 105 to 106 is any amino acid
  Variant (107)..(107): Xaa in position 107 is any or no amino acid
  Variant (109)..(110): Xaa in position 109 to 110 is any amino acid
  Variant (111)..(112): Xaa in position 111 to 112 is any or no amino acid
  Variant (115)..(115): Xaa in position 115 is any amino acid
  Variant (124)..(124): Xaa in position 124 is any amino acid
  Variant (127)..(127): Xaa in position 127 is any amino acid
  Variant (128)..(128): Xaa in position 128 is any or no amino acid
  Variant (132)..(135): Xaa in position 132 to 135 is any amino acid
  Variant (137)..(137): Xaa in position 137 is any amino acid
  Variant (138)..(138): Xaa in position 138 is any or no amino acid
  Variant (143)..(143): Xaa in position 143 is any amino acid
  Variant (151)..(151): Xaa in position 151 is any amino acid
  Variant (153)..(153): Xaa in position 153 is any amino acid
  Variant (155)..(155): Xaa in position 155 is any amino acid
  Variant (158)..(160): Xaa in position 158 to 160 is any amino acid
  Variant (162)..(165): Xaa in position 162 to 165 is any amino acid
  Variant (172)..(172): Xaa in position 172 is any amino acid
  Variant (174)..(174): Xaa in position 174 is any amino acid
  Variant (177)..(177): Xaa in position 177 is any amino acid
  Variant (180)..(180): Xaa in position 180 is any amino acid
  Variant (184)..(186): Xaa in position 184 to 186 is any amino acid
  Variant (200)..(212): Xaa in position 200 to 212 is any amino acid
  Variant (217)..(217): Xaa in position 217 is any amino acid
  Variant (219)..(219): Xaa in position 219 is any amino acid
  Variant (224)..(224): Xaa in position 224 is any amino acid
  Variant (225)..(225): Xaa in position 225 is any or no amino acid
  Variant (227)..(227): Xaa in position 227 is any amino acid
  Variant (228)..(231): Xaa in position 228 to 231 is any or no amino acid
  Variant (236)..(236): Xaa in position 236 is any amino acid
  Variant (254)..(257): Xaa in position 254 to 257 is any amino acid
  Variant (259)..(264): Xaa in position 259 to 264 is any amino acid
  Variant (265)..(266): Xaa in position 265 to 266 is any or no amino acid
  Variant (268)..(271): Xaa in position 268 to 271 is any amino acid
  Variant (279)..(279): Xaa in position 279 is any amino acid
  Variant (283)..(284): Xaa in position 283 to 284 is any amino acid
  Variant (286)..(289): Xaa in position 286 to 289 is any amino acid
  Variant (291)..(291): Xaa in position 291 is any amino acid
  Variant (293)..(294): Xaa in position 293 to 294 is any amino acid
  Variant (296)..(296): Xaa in position 296 is any amino acid
  Variant (299)..(301): Xaa in position 299 to 301 is any amino acid
  Variant (303)..(305): Xaa in position 303 to 305 is any amino acid
  Variant (307)..(315): Xaa in position 307 to 315 is any amino acid
  Variant (317)..(317): Xaa in position 317 is any amino acid
  Variant (319)..(319): Xaa in position 319 is any amino acid
  Variant (321)..(322): Xaa in position 321 to 322 is any amino acid
  Variant (324)..(328): Xaa in position 324 to 328 is any amino acid
  Variant (332)..(338): Xaa in position 332 to 338 is any amino acid
  Variant (340)..(352): Xaa in position 340 to 352 is any amino acid
  Variant (353)..(353): Xaa in position 353 is any or no amino acid
ALXXXXXXXXXXXXXXXXXXXXXXXXXXAXXQIXXXXXFGKGXXMXXGXXXXXXXXXXXXXTGSXXLDXALGXGGLPXGRXXEIYGPESSGKTTLXLXXXAXXQXXXGXXXXAFXDAEHALDPXYAXXLGVXXXXLXXSQPDXGEQALEIXDXLXRSXXXDXXXXDSVAALXPXAEXEGXMGDXXXGLQARLMSQALRKXXXXXXXXXXXXXFINQXRXKIGVXXGXXXXXPETTXGGNALKFYASVRLDIRRXXXXKXXXXXXXXGXXXXVKVVKNKXAPPXXFXXXXFXIXXGXGIXXXGXXXDXXXXXXXXXKXGXWXXYXXXXXGQGXXXXXXXLXXXXXXXXXXXXXXR

SEQ ID NO: 114544 - protein, 34 aa, Artificial sequence
  protein pattern
  Variant (3)..(3): Xaa in position 3 is any or no amino acid
  Variant (5)..(5): Xaa in position 5 is any or no amino acid
  Variant (9)..(9): Xaa in position 9 is Leu or Met
  Variant (12)..(12): Xaa in position 12 is Ile, Leu or Met
  Variant (13)..(13): Xaa in position 13 is Ala, Ser or Thr
  Variant (14)..(18): Xaa in position 14 to 18 is any amino acid
  Variant (19)..(19): Xaa in position 19 is Ala, Ser or Thr
  Variant (20)..(20): Xaa in position 20 is any amino acid
  Variant (21)..(21): Xaa in position 21 is Cys or Thr
  Variant (22)..(23): Xaa in position 22 to 23 is any amino acid
  Variant (24)..(24): Xaa in position 24 is Ile, Leu or Val
  Variant (29)..(29): Xaa in position 29 is Ile, Leu or Val
  Variant (31)..(31): Xaa in position 31 is any amino acid
  Variant (33)..(33): Xaa in position 33 is Ile, Leu or Val
  Variant (34)..(34): Xaa in position 34 is Ala, Gly, Gln, Ser or Thr
ARXMXSQAXRKXXXXXXXXXXXXXFINQXRXKXX

SEQ ID NO: 114545 - protein, 35 aa, Artificial sequence
  protein pattern
  Variant (3)..(3): Xaa in position 3 is any amino acid
  Variant (6)..(6): Xaa in position 6 is any amino acid
  Variant (8)..(8): Xaa in position 8 is any amino acid
  Variant (11)..(12): Xaa in position 11 to 12 is Ile or Val
  Variant (14)..(14): Xaa in position 14 is Ile or Val
  Variant (15)..(15): Xaa in position 15 is Phe or Tyr
  Variant (19)..(19): Xaa in position 19 is any or no amino acid
  Variant (21)..(21): Xaa in position 21 is any or no amino acid
  Variant (26)..(26): Xaa in position 26 is Leu, Met or Val
  Variant (27)..(27): Xaa in position 27 is Ala, Cys, Ser or Thr
  Variant (29)..(30): Xaa in position 29 to 30 is any amino acid
  Variant (31)..(31): Xaa in position 31 is Ile, Leu, Met or Val
  Variant (33)..(33): Xaa in position 33 is Ala, Glu, Asn, Gln or Ser
  Variant (34)..(34): Xaa in position 34 is any amino acid
LGXGGXPXGRXXEXXGPEXSXGKTTXXLXXXAXXQ

SEQ ID NO: 114546 - protein, 26 aa, Artificial sequence
  protein pattern
  Variant (2)..(2): Xaa in position 2 is Asn, Pro or Ser
  Variant (3)..(3): Xaa in position 3 is any amino acid
  Variant (5)..(5): Xaa in position 5 is Thr or Val
  Variant (7)..(7): Xaa in position 7 is Cys, Ser or Thr
  Variant (10)..(10): Xaa in position 10 is any amino acid
  Variant (16)..(16): Xaa in position 16 is Ala, Ser or Thr
  Variant (20)..(21): Xaa in position 20 to 21 is any amino acid
  Variant (22)..(24): Xaa in position 22 to 24 is any or no amino acid
  Variant (26)..(26): Xaa in position 26 is Glu, Lys or Arg
GXXEXTXGGXALKFYXSVRXXXXXIX

SEQ ID NO: 114547 - protein, 23 aa, Artificial sequence
  protein pattern
  Variant (3)..(6): Xaa in position 3 to 6 is any amino acid
  Variant (7)..(7): Xaa in position 7 is Leu or Met
  Variant (8)..(9): Xaa in position 8 to 9 is any amino acid
  Variant (14)..(14): Xaa in position 14 is any amino acid
  Variant (20)..(20): Xaa in position 20 is any amino acid
  Variant (21)..(21): Xaa in position 21 is Ile, Leu or Val
  Variant (22)..(22): Xaa in position 22 is Ala, Cys, Thr or Val
  Variant (23)..(23): Xaa in position 23 is Asp or Glu
GVXXXXXXXSQPDXGEQALXXXX

SEQ ID NO: 114548 - protein, 24 aa, Artificial sequence
  protein pattern
  Variant (2)..(3): Xaa in position 2 to 3 is any amino acid
  Variant (4)..(4): Xaa in position 4 is any or no amino acid
  Variant (6)..(6): Xaa in position 6 is any or no amino acid
  Variant (13)..(13): Xaa in position 13 is Thr or Val
  Variant (15)..(15): Xaa in position 15 is Lys or Arg
  Variant (16)..(16): Xaa in position 16 is Ala, Gly or Thr
  Variant (18)..(18): Xaa in position 18 is Ile or Leu
  Variant (19)..(19): Xaa in position 19 is Asp or Glu
  Variant (21)..(21): Xaa in position 21 is Asp, Glu or Asn
  Variant (22)..(22): Xaa in position 22 is Ile or Met
DXXXVXDSVAALXPXXEXXGXXGD

SEQ ID NO: 114549 - protein, 25 aa, Artificial sequence
  protein pattern
  Variant (2)..(2): Xaa in position 2 is Asn or Ser
  Variant (3)..(5): Xaa in position 3 to 5 is any amino acid
  Variant (8)..(8): Xaa in position 8 is Ile or Val
  Variant (13)..(14): Xaa in position 13 to 14 is any amino acid
  Variant (15)..(15): Xaa in position 15 is any or no amino acid
  Variant (17)..(17): Xaa in position 17 is any or no amino acid
  Variant (19)..(19): Xaa in position 19 is Lys or Arg
  Variant (20)..(20): Xaa in position 20 is any amino acid
  Variant (21)..(21): Xaa in position 21 is Ala, Thr or Val
  Variant (22)..(22): Xaa in position 22 is any amino acid
  Variant (23)..(23): Xaa in position 23 is Phe, Met or Val
  Variant (24)..(24): Xaa in position 24 is any amino acid
  Variant (25)..(25): Xaa in position 25 is Ile, Leu or Met
GXXXXVKXVKNKXXXPXFXXXXXXX

SEQ ID NO: 114550 - protein, 14 aa, Artificial sequence
  protein pattern
  Variant (3)..(3): Xaa in position 3 is Ile or Val
  Variant (11)..(11): Xaa in position 11 is Pro or Val
  Variant (12)..(13): Xaa in position 12 to 13 is any amino acid
AFXDAEHALDXXXA

SEQ ID NO: 114551 - protein, 13 aa, Artificial sequence
  protein pattern
  Variant (2)..(2): Xaa in position 2 is Asp, Glu or Thr
  Variant (3)..(4): Xaa in position 3 to 4 is any amino acid
  Variant (5)..(5): Xaa in position 5 is Phe, His or Tyr
  Variant (9)..(9): Xaa in position 9 is Ala, Ser or Thr
  Variant (10)..(10): Xaa in position 10 is Ala, Ile or Val
  Variant (12)..(12): Xaa in position 12 is any amino acid
  Variant (13)..(13): Xaa in position 13 is Phe, Leu or Met
IXXXXGKGXXMXX

SEQ ID NO: 114552 - DNA, 1242 bp, Escherichia coli K12
  CDS (1)..(1242): transl_table=11
atgtctaagcgtcgtgtagttgtgaccggactgggcatgttgtctcctgtcggcaataccgtagagtctacctggaaagctctgcttgccggtcagagtggcatcagcctaatcgaccatttcgatactagcgcctatgcaacgaaatttgctggcttagtaaaggattttaactgtgaggacattatctcgcgcaaagaacagcgcaagatggatgccttcattcaatatggaattgtcgctggcgttcaggccatgcaggattctggccttgaaataacggaagagaacgcaacccgcattggtgccgcaattggctccgggattggcggcctcggactgatcgaagaaaaccacacatctctgatgaacggtggtccacgtaagatcagcccattcttcgttccgtcaacgattgtgaacatggtggcaggtcatctgactatcatgtatggcctgcgtggcccgagcatctctatcgcgactgcctgtacttccggcgtgcacaacattggccatgctgcgcgtattatcgcgtatggcgatgctgacgtgatggttgcaggtggcgcagagaaagccagtacgccgctgggcgttggtggttttggcgcggcacgtgcattatctacccgcaatgataacccgcaagcggcgagccgcccgtgggataaagagcgtgatggtttcgtactgggcgatggtgccggtatgctggtacttgaagagtacgaacacgcgaaaaaacgcggtgcgaaaatttacgctgaactcgtcggctttggtatgagcagcgatgcttatcatatgacgtcaccgccagaaaatggcgcaggcgcagctctggcgatggcaaatgctctgcgtgatgcaggcattgaagcgagtcagattggctacgttaacgcgcacggtacttctacgccggctggcgataaagctgaagcgcaggcggtgaaaaccatcttcggtgaagctgcaagccgtgtgttggtaagctccacgaaatctatgaccggtcacctgttaggtgcggcgggtgcagtagaatctatctactccatcctggcgctgcgcgatcaggctgttccgccaaccatcaacctggataacccggatgaaggttgcgatctggatttcgtaccgcacgaagcgcgtcaggttagcggaatggaatacactctgtgtaactccttcggcttcggtggcactaatggttctttgatctttaaaaagatctaa

SEQ ID NO: 114553 - protein, 413 aa, Escherichia coli K12
MSKRRVVVTGLGMLSPVGNTVESTWKALLAGQSGISLIDHFDTSAYATKFAGLVKDFNCEDIISRKEQRKMDAFIQYGIVAGVQAMQDSGLEITEENATRIGAAIGSGIGGLGLIEENHTSLMNGGPRKISPFFVPSTIVNMVAGHLTIMYGLRGPSISIATACTSGVHNIGHAARIIAYGDADVMVAGGAEKASTPLGVGGFGAARALSTRNDNPQAASRPWDKERDGFVLGDGAGMLVLEEYEHAKKRGAKIYAELVGFGMSSDAYHMTSPPENGAGAALAMANALRDAGIEASQIGYVNAHGTSTPAGDKAEAQAVKTIFGEAASRVLVSSTKSMTGHLLGAAGAVESIYSILALRDQAVPPTINLDNPDEGCDLDFVPHEARQVSGMEYTLCNSFGFGGTNGSLIFKKI

SEQ ID NO: 114554 - DNA, 2058 bp, Zea mays
  CDS (30)..(1520)
cggcacgagcggcacgagggaggggggcaatggcggccgtggcaggcccactctgcacgtggctcgtcgccgcgtgcttatctgcggcatgcgacgctgaagagcacaagcagaagcatttctgcgcaggcggaagccgcgctgggggcggtgtcatgctcggccagcgccgccgcctcggcgcgcggcgtcgcggcttggcgcgctctggaatgactatggctgttgccttacaagctgaaagaagtgtcattgaaaagaagaaacccgatatcaaacaaaggagggtggttgtcactggcatgggtgtagtgacaccattgggccatgatcctgacgtgttttacaacaatcttcttgatggtgttagcggaataagtgagattgagaggtttgactgttccaacttccccacgagaattgcaggagagataaaatccttctctactgatggttgggttgcacctaaacttgcaaagcggatggacaagtttatgctatatctgataactgctggaaagaaggcattagaaaatggtggactcactgaagaactaaggaatgagttggacaaaaccaggtgtggggttcttattggttctgcaatgggtggcatgaaggtttttaatgatgcaattgaagcactgagggtctcttacaagaaaatgaacccattttgtgttccttttgcaactacgaatatgggctctgcgatccttgcaatggatctgggatggatgggaccaaactattctatttccacagcttgtgctaccagtaacttctgtatccttaatgcagcaaaccacatcagaagaggcgaagctgacgttatgctctgcggtggttctgatgcacctcttatcccaatcggattgggaggttttgtggcatgcagagctctttcacagaggaacagtgacccaacaaaagcttctcggccttgggacatgggacgtgatggttttgttatgggggaaggggctggtgtcctcgtattggaagaacttgagcatgccaaggaaagaggtgcaacaatatatgctgaatttcttggtggaagcttcacatgtgatgcttaccacatgactgagccacatcctgaaggaagagggattgctctctgcatcgaaaaggcactagctgatgcaggggtagcaagggaagaaatcaactacgtgaatgcccatgcaacatctacacaagcaggtgacttgaaggagtatgaggctatcgtgcgctgttttcgccagaaccctcaactgagggtgaactcgaccaaatcaatgactgggcatcttataggagcagctggtggaatagaagcagttgcttctatacaagctataagaactggttgggtccatccaaatttgaatttagaaaatccagaggacaccgtggacgtgggcgtcttggtagggtcacagaaggagagatgtgaagtgaaggtggcgttgtccaactcattcggattcggtgggcacaactcatcgattctctttgccccctttaagtgaacatgaccgaggcgaagaaccgacatcttcatcatcgcgcaaatggcttcatatatctggaactccacatagaaatctggtggattctgcaacttcctccgtgccacacatactgcatatggaggtccaaagtgagggtacaatactatgccacacacatttgagcgaacaaaacatcagcccccctacatgtttcatctactatcacaaagttgcaaaatatatatggtaactatcaaagaacttaccgtacctgggccagtgttttcgccttcaccatacctgcccattgtcagtactatttcctacatttggtgtagtcccgtagcttaatcctcttccctgcggaggtgatgggatcttatgttgtattgttgttgccaacagtatcgttattagccatgaattgctggttcccactgtaagcatcactggacgttttcgctttggttgtttctgtttcctgctgttcataaccgagttaaagatatgtaaatggcgaccctgttcggcctttaatcaaaaaaaaaaaaaaaaa

SEQ ID NO: 114555 - protein, 496 aa, Zea mays
MAAVAGPLCTWLVAACLSAACDAEEHKQKHFCAGGSRAGGGVMLGQRRRLGARRRGLARSGMTMAVALQAERSVIEKKKPDIKQRRVVVTGMGVVTPLGHDPDVFYNNLLDGVSGISEIERFDCSNFPTRIAGEIKSFSTDGWVAPKLAKRMDKFMLYLITAGKKALENGGLTEELRNELDKTRCGVLIGSAMGGMKVFNDAIEALRVSYKKMNPFCVPFATTNMGSAILAMDLGWMGPNYSISTACATSNFCILNAANHIRRGEADVMLCGGSDAPLIPIGLGGFVACRALSQRNSDPTKASRPWDMGRDGFVMGEGAGVLVLEELEHAKERGATIYAEFLGGSFTCDAYHMTEPHPEGRGIALCIEKALADAGVAREEINYVNAHATSTQAGDLKEYEAIVRCFRQNPQLRVNSTKSMTGHLIGAAGGIEAVASIQAIRTGWVHPNLNLENPEDTVDVGVLVGSQKERCEVKVALSNSFGFGGHNSSILFAPFK

SEQ ID NO: 114556 - DNA, 1302 bp, Zea mays
  CDS (1)..(1302)
atggctgttgccttacaagctgaaagaagtgtcattgaaaagaagaaacccgatatcaaacaaaggagggtggttgtcactggcatgggtgtagtgacaccattgggccatgatcctgacgtgttttacaacaatcttcttgatggtgttagcggaataagtgagattgagaggtttgactgttccaacttccccacgagaattgcaggagagataaaatccttctctactgatggttgggttgcacctaaacttgcaaagcggatggacaagtttatgctatatctgataactgctggaaagaaggcattagaaaatggtggactcactgaagaactaaggaatgagttggacaaaaccaggtgtggggttcttattggttctgcaatgggtggcatgaaggtttttaatgatgcaattgaagcactgagggtctcttacaagaaaatgaacccattttgtgttccttttgcaactacgaatatgggctctgcgatccttgcaatggatctgggatggatgggaccaaactattctatttccacagcttgtgctaccagtaacttctgtatccttaatgcagcaaaccacatcagaagaggcgaagctgacgttatgctctgcggtggttctgatgcacctcttatcccaatcggattgggaggttttgtggcatgcagagctctttcacagaggaacagtgacccaacaaaagcttctcggccttgggacatgggacgtgatggttttgttatgggggaaggggctggtgtcctcgtattggaagaacttgagcatgccaaggaaagaggtgcaacaatatatgctgaatttcttggtggaagcttcacatgtgatgcttaccacatgactgagccacatcctgaaggaagagggattgctctctgcatcgaaaaggcactagctgatgcaggggtagcaagggaagaaatcaactacgtgaatgcccatgcaacatctacacaagcaggtgacttgaaggagtatgaggctatcgtgcgctgttttcgccagaaccctcaactgagggtgaactcgaccaaatcaatgactgggcatcttataggagcagctggtggaatagaagcagttgcttctatacaagctataagaactggttgggtccatccaaatttgaatttagaaaatccagaggacaccgtggacgtgggcgtcttggtagggtcacagaaggagagatgtgaagtgaaggtggcgttgtccaactcattcggattcggtgggcacaactcatcgattctctttgccccctttaagtga

SEQ ID NO: 114557 - protein, 433 aa, Zea mays
MAVALQAERSVIEKKKPDIKQRRVVVTGMGVVTPLGHDPDVFYNNLLDGVSGISEIERFDCSNFPTRIAGEIKSFSTDGWVAPKLAKRMDKFMLYLITAGKKALENGGLTEELRNELDKTRCGVLIGSAMGGMKVFNDAIEALRVSYKKMNPFCVPFATTNMGSAILAMDLGWMGPNYSISTACATSNFCILNAANHIRRGEADVMLCGGSDAPLIPIGLGGFVACRALSQRNSDPTKASRPWDMGRDGFVMGEGAGVLVLEELEHAKERGATIYAEFLGGSFTCDAYHMTEPHPEGRGIALCIEKALADAGVAREEINYVNAHATSTQAGDLKEYEAIVRCFRQNPQLRVNSTKSMTGHLIGAAGGIEAVASIQAIRTGWVHPNLNLENPEDTVDVGVLVGSQKERCEVKVALSNSFGFGGHNSSILFAPFK

SEQ ID NO: 114558 - DNA, 1302 bp, Glycine max
  CDS (1)..(1302)
atggctgtagctttgcaacctacccaagaggtcacaacaataaaaaaacctcctacaaagcaaaggcgagtagttgtgacaggattgggtgtggttacaccacttgggcatgagccagatatcttctacaataatttgcttgatggtgttagtggcataagtgagattgaaacatttgactgtgcagaatatccaacaaggattgctggtgaaatcaagtctttctcaactgatggctgggtagcaccaaaactttctaagagaatggataaatttatgctctatatgctgacagctggcaaaaaagccttggttgatggtggaattactgatgatgtaatggatgagttaaataaagataagtgtggagttctgattggctcagcaatgggtggcatgaaggttttcaatgatgccattgaagctttacgaatctcatataagaagatgaatcctttttgtgtaccttttgcaacaacaaatatgggttctgccatgcttgcaatggatctgggatggatgggccctaattattctatctctacagcttgtgctacaagtaacttttgtatattgaatgcagcaaaccatatcattagaggtgaagctgatgtgatgctttgtggtggctcagatgctgctattataccaattggtttgggaggctttgtggcatgcagggcactctcacaaaggaatactgatcctaccaaagcttcacgcccttgggacattaaccgtgatggatttgtcatgggagaaggggctggagttttgcttttagaagaactggagcatgctaagaaaagaggtgcaaccatatatgctgaattccttggtggaagtttcacctgtgatgcatatcatgtgactgagccgcgtcctgatggggctggtgttattctttgcattgaaaaggcattagctcagtctggagtatcaaaagaggatgtgaattacataaatgcacatgccacatccacaccagctggagatcttaaggagtaccaagctctaatgcattgttttggtcaaaaccccaagttacgagtgaattctacaaaatctatgattggtcatctactaggggcagctggcgctgtggaagctgtggccacaatacaggcaattaggacagggtgggttcatcccaatatcaacctagaaaagccagataatggagtggatgctaaagtgcttgttggctcaaagaaagagagactggatgtcaaggcagccttgtcgaattcatttggttttgggggtcacaattcttcaatcatatttgcaccttacaagtga

SEQ ID NO: 114559 - protein, 433 aa, Glycine max
MAVALQPTQEVTTIKKPPTKQRRVVVTGLGVVTPLGHEPDIFYNNLLDGVSGISEIETFDCAEYPTRIAGEIKSFSTDGWVAPKLSKRMDKFMLYMLTAGKKALVDGGITDDVMDELNKDKCGVLIGSAMGGMKVFNDAIEALRISYKKMNPFCVPFATTNMGSAMLAMDLGWMGPNYSISTACATSNFCILNAANHIIRGEADVMLCGGSDAAIIPIGLGGFVACRALSQRNTDPTKASRPWDINRDGFVMGEGAGVLLLEELEHAKKRGATIYAEFLGGSFTCDAYHVTEPRPDGAGVILCIEKALAQSGVSKEDVNYINAHATSTPAGDLKEYQALMHCFGQNPKLRVNSTKSMIGHLLGAAGAVEAVATIQAIRTGWVHPNINLEKPDNGVDAKVLVGSKKERLDVKAALSNSFGFGGHNSSIIFAPYK

SEQ ID NO: 114560 - DNA, 2232 bp, Glycine max
  CDS (213)..(1679)
agcagaaacgcagcagcatcgtgttggagagtgagacggaatgcattagtgaagaccgaggtttctcagaatctcaataacccccttcgttgaaaccaaaacgacgacgcgtcacttcactttgatgtgtctcgtcgtttctactttctgttgattagcctcattcactctctcgctcgcttgcaaccacacccttggatttaatttcattcatggcttcgaccaccacctcctccctctgcacgtggctcgttgctgcttgcatgtcagtcacgtgccacgccgaccgcaccaaaacccctcacgcaatgttccgctcctccaaaaagtctcgctactctcaattcaacgtttgtcgatccactcattctggtaaaacaatggctgtagctttgcaacctacccaagagatcacgacaataaaaaaacctcccacgaagcaaaggcgagtggttgtgacaggattgggtgtggttacaccacttgggcatgagccagatatcttctacaataatttgcttgatggtgctagtggcataagcgagattgaaacatttgattgtgcagaatatccaacaaggattgctggtgaaatcaagtctttctcaactgatggctgggtagcaccaaaactttctaagagaatggataaatttatgctctatatgctgacagctggcaaaaaagccttggttgatggtggaattactgatgatgtaatggatgagttaaataaagaaaagtgtggagttctgattgggtcagcaatgggtggcatgaaggttttcaatgatgccatcgaagctttacgaatctcatataagaagatgaagcctttttgtgtaccttttgcaacaacaaatatgggttctgccatgcttgcaatggatctgggatggatgggccctaattattctatctctacagcttgtgctacaagtaacttttgtatattgaatgcagcaaaccatatcattagaggtgaagctgatgtgatgctttgtggaggctcagatgctgctattataccaattggtttgggaggctttgtggcatgcagggcactctcacaaaggaatactgatcctaccaaagcttcacgcccttgggacattaaccgtgatggatttgtcatgggtgaaggggctggagttttgcttttagaggaactggagcatgctaaggaaagaggtgcaaccatatatgctgaattccttggtggaagtttcacctgtgatgcatatcatgtgactgagccgcgtcctgatggggctggtgttatactgtgcattgaaaaggcattagctcagtctggagtatcaaaagaggatgtgaattacataaatgcacatgccacatccacaccagctggagatcttaaggagtaccaagctctaatgcattgttttggtcaaaaccccgagttaagagtgaattctacaaaatctatgattggtcatctactaggggcagctggcggtgtggcagctgtggccacaatacaggcaattaggacagggtgggttcatcccaatatcaacctagaaaacccagataacggagtggatgctaaagtgcttgttggctcaaagaaagagagactggatgtcaaggcagccttgtcgaattcatttggttttgggggtcacaattcttcaatcatatttgcaccatactagtgaaacagatttcagagcagtactttcttattattataagttactgagtacccagacaatgtttattgcatactaactccagtgttttggttggttgagaatatatgcggtgtggattagttggttggatcagtaactgttgagaaacattgttttttgggatggggttggttgtgtgcctacagaatcagagtgttgatagattatcattatctggtgctcctggtgggagagagtgagtcgctatctatccactaccataaaatcctatctttaccatgaatggctagagtaggagttgacccacttttgatgtaaccgtttaacaaccattttgatgggatggatacagtcttttgttttattcccatgtacaaatagaccctcatggctctgggcattgggcaataaccaaatttcagtgattgtttagcggactcgtcgaatagattatgccttttcagtttcactggaatttatataccctggagggtgatttcaattttatgagggttttgagttttccaaaaaaaaaaaaaaaaaaaaaaaaaaa

SEQ ID NO: 114561 - protein, 488 aa, Glycine max
MASTTTSSLCTWLVAACMSVTCHADRTKTPHAMFRSSKKSRYSQFNVCRSTHSGKTMAVALQPTQEITTIKKPPTKQRRVVVTGLGVVTPLGHEPDIFYNNLLDGASGISEIETFDCAEYPTRIAGEIKSFSTDGWVAPKLSKRMDKFMLYMLTAGKKALVDGGITDDVMDELNKEKCGVLIGSAMGGMKVFNDAIEALRISYKKMKPFCVPFATTNMGSAMLAMDLGWMGPNYSISTACATSNFCILNAANHIIRGEADVMLCGGSDAAIIPIGLGGFVACRALSQRNTDPTKASRPWDINRDGFVMGEGAGVLLLEELEHAKERGATIYAEFLGGSFTCDAYHVTEPRPDGAGVILCIEKALAQSGVSKEDVNYINAHATSTPAGDLKEYQALMHCFGQNPELRVNSTKSMIGHLLGAAGGVAAVATIQAIRTGWVHPNINLENPDNGVDAKVLVGSKKERLDVKAALSNSFGFGGHNSSIIFAPY

SEQ ID NO: 114562 - DNA, 1299 bp, Glycine max
  CDS (1)..(1299)
atggctgtagctttgcaacctacccaagagatcacgacaataaaaaaacctcccacgaagcaaaggcgagtggttgtgacaggattgggtgtggttacaccacttgggcatgagccagatatcttctacaataatttgcttgatggtgctagtggcataagcgagattgaaacatttgattgtgcagaatatccaacaaggattgctggtgaaatcaagtctttctcaactgatggctgggtagcaccaaaactttctaagagaatggataaatttatgctctatatgctgacagctggcaaaaaagccttggttgatggtggaattactgatgatgtaatggatgagttaaataaagaaaagtgtggagttctgattgggtcagcaatgggtggcatgaaggttttcaatgatgccatcgaagctttacgaatctcatataagaagatgaagcctttttgtgtaccttttgcaacaacaaatatgggttctgccatgcttgcaatggatctgggatggatgggccctaattattctatctctacagcttgtgctacaagtaacttttgtatattgaatgcagcaaaccatatcattagaggtgaagctgatgtgatgctttgtggaggctcagatgctgctattataccaattggtttgggaggctttgtggcatgcagggcactctcacaaaggaatactgatcctaccaaagcttcacgcccttgggacattaaccgtgatggatttgtcatgggtgaaggggctggagttttgcttttagaggaactggagcatgctaaggaaagaggtgcaaccatatatgctgaattccttggtggaagtttcacctgtgatgcatatcatgtgactgagccgcgtcctgatggggctggtgttatactgtgcattgaaaaggcattagctcagtctggagtatcaaaagaggatgtgaattacataaatgcacatgccacatccacaccagctggagatcttaaggagtaccaagctctaatgcattgttttggtcaaaaccccgagttaagagtgaattctacaaaatctatgattggtcatctactaggggcagctggcggtgtggcagctgtggccacaatacaggcaattaggacagggtgggttcatcccaatatcaacctagaaaacccagataacggagtggatgctaaagtgcttgttggctcaaagaaagagagactggatgtcaaggcagccttgtcgaattcatttggttttgggggtcacaattcttcaatcatatttgcaccatactag

SEQ ID NO: 114563 - protein, 432 aa, Glycine max
MAVALQPTQEITTIKKPPTKQRRVVVTGLGVVTPLGHEPDIFYNNLLDGASGISEIETFDCAEYPTRIAGEIKSFSTDGWVAPKLSKRMDKFMLYMLTAGKKALVDGGITDDVMDELNKEKCGVLIGSAMGGMKVFNDAIEALRISYKKMKPFCVPFATTNMGSAMLAMDLGWMGPNYSISTACATSNFCILNAANHIIRGEADVMLCGGSDAAIIPIGLGGFVACRALSQRNTDPTKASRPWDINRDGFVMGEGAGVLLLEELEHAKERGATIYAEFLGGSFTCDAYHVTEPRPDGAGVILCIEKALAQSGVSKEDVNYINAHATSTPAGDLKEYQALMHCFGQNPELRVNSTKSMIGHLLGAAGGVAAVATIQAIRTGWVHPNINLENPDNGVDAKVLVGSKKERLDVKAALSNSFGFGGHNSSIIFAPY

SEQ ID NO: 114564 - DNA, 1239 bp, Legionella pneumophila
  CDS (1)..(1239): transl_table=11
ttgaatagtcggcgtgtggttattaccggcatgggtatgcttactcctgtcggacttaatgtagaagaaacttggcgaagtattttagctggggttagtggggtaggtttggtagaagattttgacactactgaatacccaactaagatttgggctaaggtcaagaattttaatgttgagaatcacatgccaattaaagacgcccgcaaaatggacgtctttacacaatacggtatggctgctgccgatgaagcgatgcttgactcgggtttaaaaattgatgaaaccttatctcgtcgaatcggtgtcgcagtgggggcaggtattggtggtattcaaacaatcacaaataaccaggataaactggttgccggtggaccacgtaaggtttcgccattttttattccggcaggtattatcaatatggttgctggacagatttctattaaacataatttaaaaggacctaatatttcggttgtgactgcatgtactaccggaacacataatatcgggctagcagggcgcataattgcttatggcgatgccgatgttatgatttgtggtggagcggaaatgaccacaacgccactttgtcttgctgggttttcagcagtaagatctttgtccaagcggaatgatgagcctgagaaagcctcaaggccttgggataaagacagagacggttttgttatgggtgagggtgctggtattttggttttagaagaatatgaacacgctaaagctcgtggagccaaaatttatgctgaattggttggttttggtatgtcaggagatgcttatcatattactgcacccgatgaagatgccgatggagcttcacgagctatggaggcagccatccaggatgctggtatcgatcccagacaagttgattatattaatgctcacgggacgtcgacttatttaaacgatttaaatgaaacaaaagccattaagcgtgttttccagaatcatgcttatgatctggcggttagctcaaccaaatccatgacaggacatttgctcggagctgcaggtgcagtagaggcaattataagtattttagccataagagatcaggtggctccacctacaataaatttggataatcctgatgaaggttgtgatttgaattatgtagcacatgtaccacaaagcagaacaattaattatgttctaagtaattcacttggttttggtgggacaaacggtagcttactgttcaagcgaatctaa

SEQ ID NO: 114565 - protein, 412 aa, Legionella pneumophila
LNSRRVVITGMGMLTPVGLNVEETWRSILAGVSGVGLVEDFDTTEYPTKIWAKVKNFNVENHMPIKDARKMDVFTQYGMAAADEAMLDSGLKIDETLSRRIGVAVGAGIGGIQTITNNQDKLVAGGPRKVSPFFIPAGIINMVAGQISIKHNLKGPNISVVTACTTGTHNIGLAGRIIAYGDADVMICGGAEMTTTPLCLAGFSAVRSLSKRNDEPEKASRPWDKDRDGFVMGEGAGILVLEEYEHAKARGAKIYAELVGFGMSGDAYHITAPDEDADGASRAMEAAIQDAGIDPRQVDYINAHGTSTYLNDLNETKAIKRVFQNHAYDLAVSSTKSMTGHLLGAAGAVEAIISILAIRDQVAPPTINLDNPDEGCDLNYVAHVPQSRTINYVLSNSLGFGGTNGSLLFKRI

SEQ ID NO: 114566 - DNA, 1239 bp, Bacillus licheniformis
  CDS (1)..(1239): transl_table=11
atgaatagtaaaagagtagtcattaccggattaggagctttatcacctcttggtaatgacgtcaaaacaagctggaacaacgcgatcaacggggtttccggagtcggcccgataacaagggtgaacgcggacgagtatcctgctaaagtagccgcagaactgaaagattttaagatagaagattatatggataaaaaagaagcgagaaaaatggaccgcttcacacaatatgccgttgtgtcggcgaaaatggccgtggaagacgcgggcctcgacattaacgaaagcaacgcagaccggatcggcgtctgggtcggttccggaatcggcggccttgaaacgcttgaacagcagttcgaaacatttttaacaaaaggaccgcggcgcgtcagcccgttctttgtaccgatgatgattcctgatatggcgaccggccagatttcgatctctctcggtgcaaaaggggtcaactcttgtacggtgacggcttgcgcgacgggtacaaactcaatcggcgacgctttcaaggtcattcagcgcggcgatgccgatgtcatgatctccggaggaacggaagccccgcttacaagaatgtcatttgccggcttttcagccaataaagcgctatccactaatccggatccgaaaacggcaagccgtccgtttgacaaaaaccgcgacggcttcgtcatgggagaaggagctggaatcgtcgttcttgaggagcttgagcacgccttaaaccgcggagcgacaatctacgcggaagtggtcggctacggatcaacgggagacgcctatcatattacggcacctgcgccaaatggagaaggcggcgtcagagccatgaaagaagcgatcaaagatgcgggtctgtcccctgtggacattgattatatcaatgctcatggaacaagcacgccgtacaatgataaatttgaaacgatcgccattaaagaagtgttcggagagcatgcctacaagcttgccgtcagctcgacaaaatcgatgacagggcacttgctcggggctgccggaggcatcgaagcgattttctccgtccttgccattaaggaaggcatcattcctccgacaatcaatatcgaaacgcctgatgaagattgcgatctggactatgtaccggatcaagcccgccgccaggacgtgaatgttgtgctcagcaactcgcttggtttcggcggacacaacgcaacgctgatcttcaaaaaatatgaataa

SEQ ID NO: 114567 - protein, 412 aa, Bacillus licheniformis
MNSKRVVITGLGALSPLGNDVKTSWNNAINGVSGVGPITRVNADEYPAKVAAELKDFKIEDYMDKKEARKMDRFTQYAVVSAKMAVEDAGLDINESNADRIGVWVGSGIGGLETLEQQFETFLTKGPRRVSPFFVPMMIPDMATGQISISLGAKGVNSCTVTACATGTNSIGDAFKVIQRGDADVMISGGTEAPLTRMSFAGFSANKALSTNPDPKTASRPFDKNRDGFVMGEGAGIVVLEELEHALNRGATIYAEVVGYGSTGDAYHITAPAPNGEGGVRAMKEAIKDAGLSPVDIDYINAHGTSTPYNDKFETIAIKEVFGEHAYKLAVSSTKSMTGHLLGAAGGIEAIFSVLAIKEGIIPPTINIETPDEDCDLDYVPDQARRQDVNVVLSNSLGFGGHNATLIFKKYE

SEQ ID NO: 114568 - DNA, 1329 bp, Oryza sativa (japonica cultivar-group)
  CDS (1)..(1329)
atgcaggcgcacgcccacacgctcgggctccgcatctccccgccgccgcctgcgccgccgcggcgggagacggacccgaggaagcgggtggtgatcacggggatggggctggtgtccgtgttcgggaacgaggtggacgccttctacgagcggctgctcgccggggagagcggggtcggcgccatcgaccgcttcgacgccggcggcttccccacgaggttcgccggccagatacgcgggttctcctcggaggggtacatcgacggcaagaacgaccggaggctcgacgactgcctccgctactgcatcgtcagcggcaagaaggcgctcgagaacgccggcctcggcaagggctccgatggccacaccaagcttgacaaagtccgggctggtgttcttgtgggaactggcatgggtggcctcactgtgttttccgatggtgttcaaaaccttattgagaagggatacaagaaaatttcgcctttctttatcccatacgctataactaacatgggctcggcattgctagcaatggatgctggttttatgggtccaaactactcaatttcaacagcttgtgcgacctccaactactgcttctatgctgctgccaaccatatacgtcggggtgaggctgatgttatcgttgctggtggtactgaagctgcaattattccaattggccttggaggttttgtggcctgtagagcactatcgcagaggaacgatgacccagaaactgcatctaggccatgggacaaagagcgagatggttttgttatgggcgaaggtgctggtgtactggtcatggagagcctggagcatgcgatgaagcgggatgcaccaataattgctgaatatttgggaggtgcagtaaactgtgatgcttaccatatgactgatcctaggtcagatggactgggtgtatcgtcctgtattactcagagccttgaagatgcaggtgttgcgccagaggaggtaaattacatcaatgcacatgcaacttcaactcttgctggtgacttggctgaagtaagagccattaagcaagtcttcaagaatccatctgatattaaaatcaattcaacgaagtctatgataggccattgcctaggtgccgctggtgggttagaagctattgccgttgtcaaagccataactactggatgggtgcatcctactattaaccaatttaaccccgagcctgaagttgattttgatacagtagccaacgagaagcagcagcacgaagtgaatgttgctatctctaattcatttggatttggaggtcacaattcagtggtagtatttgcgccattcaagccatga

SEQ ID NO: 114569 - protein, 442 aa, Oryza sativa (japonica cultivar-group)
MQAHAHTLGLRISPPPPAPPRRETDPRKRVVITGMGLVSVFGNEVDAFYERLLAGESGVGAIDRFDAGGFPTRFAGQIRGFSSEGYIDGKNDRRLDDCLRYCIVSGKKALENAGLGKGSDGHTKLDKVRAGVLVGTGMGGLTVFSDGVQNLIEKGYKKISPFFIPYAITNMGSALLAMDAGFMGPNYSISTACATSNYCFYAAANHIRRGEADVIVAGGTEAAIIPIGLGGFVACRALSQRNDDPETASRPWDKERDGFVMGEGAGVLVMESLEHAMKRDAPIIAEYLGGAVNCDAYHMTDPRSDGLGVSSCITQSLEDAGVAPEEVNYINAHATSTLAGDLAEVRAIKQVFKNPSDIKINSTKSMIGHCLGAAGGLEAIAVVKAITTGWVHPTINQFNPEPEVDFDTVANEKQQHEVNVAISNSFGFGGHNSVVVFAPFKP

SEQ ID NO: 114570 - DNA, 1398 bp, Oryza sativa (japonica cultivar-group)
  CDS (1)..(1398)
atgcagagcctcctcctccccaccttcgccgcggcctccgccgcccccccgcggagggggcgcgtgcctcccgccggtcgcgcctcggtctccgtgcgcgcgtccgcgtccgcggcggcggtggcgccgaggagggagacggatccgaggaagagggtggtgatcacggggatggggctggtgtccgtgttcgggaacgacgtcgacgcctactacgaccgcctcctcgccggggagagcgggattggccccatcgaccgcttcgacgcctccaacttccccacccgcttcgccggccagatccggggcttctcctccgagggctacatcgacggcaagaacgaccgccgcctcgacgactgcctccgctactgcatcgtcagcggcaagaaggccctcgagtccgccggcctcgccctcggctccaaatccatggacaagattgaaaagactcgggctggtgtacttgtgggcaccggtatgggtggtcttacagtgttctctgatggtgttcagaatcttattgagaaggggcacagaaagataactccattcttcattccgtatgccataacaaacatgggatctgcccttcttggaatggacattggtttcatgggtccaaactactccatctcaactgcatgtgctacctcgaactactgtttctatgctgcagcaaaccatattcgcagaggcgaagccgatgtgatgattgctggtggcactgaagccgcaattattccgattggtgtcggtgggtttgtcgcgtgtagagcactttcacagaggaacgatgaccccaaaacagcatcaagaccttgggaccaagaccgtgatggttttgtcatgggtgaaggagctggagtactggtcatggagagcctagaacatgcaatgaagcgtgacgcaccaataattgcggagtatttaggaggtgccgtgaactgtgatgcttaccatatgactgacccgagatctgatggccttggtgtttcgtcttgcattaagcaaagtcttgcagatgctggcgttgcaccggaggaggtcaactacataaatgctcatgcaacgtccaccctagctggtgatctggcagaggtgaacgccattaggcaagtcttcaaggatccatcagagattaaaataaatgcaaccaagtccatgattggacattgccttggtgcggctggtggcttggaagccattgcaactgttaaagctataaccactggatgggtccatccaagcataaaccagtttaacccggagccagctgttgaatttgacacggtacctaatgtaaaaaagcaacatgaagtgaatgttggtatctcgaattcctttggatttggtggacacaattcagttgtagtatttgcaccatttaagccttaa

SEQ ID NO: 114571 - protein, 465 aa, Oryza sativa (japonica cultivar-group)
MQSLLLPTFAAASAAPPRRGRVPPAGRASVSVRASASAAAVAPRRETDPRKRVVITGMGLVSVFGNDVDAYYDRLLAGESGIGPIDRFDASNFPTRFAGQIRGFSSEGYIDGKNDRRLDDCLRYCIVSGKKALESAGLALGSKSMDKIEKTRAGVLVGTGMGGLTVFSDGVQNLIEKGHRKITPFFIPYAITNMGSALLGMDIGFMGPNYSISTACATSNYCFYAAANHIRRGEADVMIAGGTEAAIIPIGVGGFVACRALSQRNDDPKTASRPWDQDRDGFVMGEGAGVLVMESLEHAMKRDAPIIAEYLGGAVNCDAYHMTDPRSDGLGVSSCIKQSLADAGVAPEEVNYINAHATSTLAGDLAEVNAIRQVFKDPSEIKINATKSMIGHCLGAAGGLEAIATVKAITTGWVHPSINQFNPEPAVEFDTVPNVKKQHEVNVGISNSFGFGGHNSVVVFAPFKP

SEQ ID NO: 114572 - DNA, 1524 bp, Oryza sativa (japonica cultivar-group)
  CDS (1)..(1524)
atggcggccgtggcggtgcccccgctctccgcgtggctcgtcgccgcgcgctcctcgacgcaggcggaatgcggcggcgccgacgagcaccaccaccaccaccatcagcagcagcaccagtgctgcgtcggcggcgggtccagcacggtgatgttcggcccgcgccgccgccgcttcctcggcggcggcgcgcggcggcgcggcgcggcgcgctctggaatggccatggctgttgccctgcagcctgaaaggagaactgttgaaaagaaacctgatgttaaacaaagaagggtggttatcactggcatgggtgtagtaacaccgttgggccatgatcctgatgtgttttacaacaaccttctggatggtgttagtggaataagcgagatagaaaggttcgactgctccacgtttccgacgagaattgcaggagagataaaatccttttctactgatggttgggttgctcctaagctagctaggcgaatggacaagttcatgctatatttgataactgctggaaagaaggcgttggaacatggtggtctcactgaagaactcaggaatgaattggataaaaccagatgcggtgttctcattggttctgcaatgggtggcatgaaggtttttaatgatgcgattgaagcattgagggtctcctacaagaaaatgaacccattttgtgtcccttttgcaactacaaatatgggctctgcaatacttgcaatggatctgggctggatggggccgaactattctatttccaccgcgtgtgctaccagtaatttctgtatcctcaatgcagcaaaccatatcagaagaggggaagctgatgttatgctctgtggtggttctgatgcaccactcatcccaattggattaggaggttttgtggcttgcagagcactttcacagagaaacagtgacccaactaaagcttcccggccatgggatgtggaccgtgacggttttgttatgggggaaggggcaggtgttcttgtgttggaagaacttgaacacgccaagcaaagaggtgcaaaaatatatgctgaatttctaggtggaagcttcacgtgtgatgcataccacatgactgagccacatcctgaaggaagagggattattctttgtatagaaaaggcactggctgattcaggagtagcaagggaagaaatcaactatgtcaatgctcacgcaacgtctacacagtcaggtgatttgaaggagtatgaagctattgtccgctgctttggccagaaccctcagctaagggtgaactcaacaaaatcaatgactggacatctaataggtgcagctggtggaatagaagctgttgctgctattcaagctataagaactggctgggtccatccgaatctgaatttggagaacccagagaaaatagtggatgtgggcgtgctggtcgggtcgcagaaggagagatgcaaagtgaatgtggcactgtcaaactcatttggatttggtgggcacaactcatcaattctgtttgcacccttcaagtga

SEQ ID NO: 114573 - protein, 507 aa, Oryza sativa (japonica cultivar-group)
MAAVAVPPLSAWLVAARSSTQAECGGADEHHHHHHQQQHQCCVGGGSSTVMFGPRRRRFLGGGARRRGAARSGMAMAVALQPERRTVEKKPDVKQRRVVITGMGVVTPLGHDPDVFYNNLLDGVSGISEIERFDCSTFPTRIAGEIKSFSTDGWVAPKLARRMDKFMLYLITAGKKALEHGGLTEELRNELDKTRCGVLIGSAMGGMKVFNDAIEALRVSYKKMNPFCVPFATTNMGSAILAMDLGWMGPNYSISTACATSNFCILNAANHIRRGEADVMLCGGSDAPLIPIGLGGFVACRALSQRNSDPTKASRPWDVDRDGFVMGEGAGVLVLEELEHAKQRGAKIYAEFLGGSFTCDAYHMTEPHPEGRGIILCIEKALADSGVAREEINYVNAHATSTQSGDLKEYEAIVRCFGQNPQLRVNSTKSMTGHLIGAAGGIEAVAAIQAIRTGWVHPNLNLENPEKIVDVGVLVGSQKERCKVNVALSNSFGFGGHNSSILFAPFK

SEQ ID NO: 114574 - DNA, 1329 bp, Saccharomyces cerevisiae
  CDS (1)..(1329)
atgtcaagaagagtggttatcacaggattgggctgtgtaacgccgttgggaagatcattaagtgagtcatgggggaatctgctctcttccaaaaatggactcacaccaatcacatctttgcccaactataatgaggactacaaactcagagaaaaaagtatcccatcaacgataacagtggggaagattccagagaattttcaaaacgaaaattcagccatcaataaactgctgttcactagccaggatgagagaagaacctcaagctttatcaagctagcactacgtacaacttatgaagcgcttcacaatgctggtctcttgaacccaaatgatataaccatcaatacatctctgtgcaatctggatcactttggttgcctgataggttctggtataggatccattcaagacatataccaaacttctctacaattccataacgacaataaaagaataaatccatatttcgtccctaaaatccttacaaatatggcagctggtaatgtttccatcaagtttaaccttagaggattatcccatagtgtttccacagcatgcgcaacaggtaataactccattggcgatgcattcaattttattcggttaggcatgcaagacatctgtgtcgccggtgcaagtgaaacgagtttgcatccgttaagtttagcaggtttcatcagagcaaagtcgattactacaaacgggatctctagaccctttgatacacaacgttctggattcgtacttggtgaaggatgcggaatgattgtcatggaatcgctagaacatgctcaaaagagaaatgcaaacataatttctgagctcgtgggctatggtttaagcagtgatgcctgccatattacctcccctcctgctgatggaaatggtgccaaaagagcaatagagatggctctaaaaatggctagattagaaccaactgatgttgactacgtcaatgcacatgctacatcaactttactaggcgataaagcagagtgtctggcagtagcctcagcactcttaccaggaagatccaaaagcaagccactgtacatatccagtaacaaaggtgcaattggccatcttttaggtgcacgtggcgccgtagaaagtatatttacaatttgttccttgaaggatgataagatgccgcataccttaaacctggacaatgttctgactctagaaaataacgaggccgataagctacatttcataagagacaaacctattgtgggagctaatccgaagtacgcattatgcaacagcttcggatttggaggagttaacacatctcttctcttcaagaaatgggaagggagttaa

SEQ ID NO: 114575 - protein, 442 aa, Saccharomyces cerevisiae
MSRRVVITGLGCVTPLGRSLSESWGNLLSSKNGLTPITSLPNYNEDYKLREKSIPSTITVGKIPENFQNENSAINKLLFTSQDERRTSSFIKLALRTTYEALHNAGLLNPNDITINTSLCNLDHFGCLIGSGIGSIQDIYQTSLQFHNDNKRINPYFVPKILTNMAAGNVSIKFNLRGLSHSVSTACATGNNSIGDAFNFIRLGMQDICVAGASETSLHPLSLAGFIRAKSITTNGISRPFDTQRSGFVLGEGCGMIVMESLEHAQKRNANIISELVGYGLSSDACHITSPPADGNGAKRAIEMALKMARLEPTDVDYVNAHATSTLLGDKAECLAVASALLPGRSKSKPLYISSNKGAIGHLLGARGAVESIFTICSLKDDKMPHTLNLDNVLTLENNEADKLHFIRDKPIVGANPKYALCNSFGFGGVNTSLLFKKWEGS

SEQ ID NO: 114576 - DNA, 1263 bp, Mesorhizobium loti MAFF303099
  CDS (1)..(1263): transl_table=11
atgaggcgtgtcgtcgtcacgggccttgggttgttgtcgccattcggcatgggcttcgagcacagctggaaggaacttctgaccggccgcagcgcggccaagcgcatcaccgagttcgaggtggaggatcttgcctgcaagatcgcccacgtcgttccgcgtggtgacggcagcaatgccaccttcaatcctgaatccgtgctcgagccgaaggaattgcgcaagatcggtgacttcatcctgtacgggattgccgccgccgacgaagcgctgaaggattccggctgggagcccaagacccacgaggagcaatgcgccaccggcgtgctcatcggttccggcattggcggcatcgagggcatcgccgagaacgcgatgatcctcaaggaacgcggtccgcgccgcatcagccccttcttcatcccgggccagatcatcaatctcgtctccggccaggtttcgatccggcacgggctgaaaggtccgaaccatgccgtcgtcacggcctgctcgaccggcgcgcatgccattggcgatgcggcccggctgatcatgtggggcgatgccgacgtcatggtcgccggtggcgcggaggcgccggtgaccagactttcgatcgccggcttcgccgcctgccgggcgctgtcgaccgagcgcaatgacacgccgcagacggcgtcgcgtccctatgaccgtgaccgcgacggcttcgtcatgggcgagggcgccggtgttgtggtgctggaagaactcgagcacgccaaggcgcgcggcgccaagatttatgccgaggtgaccggctacggcctcaccggcgatgcctatcacatcaccgcaccggccgaagacggcgatggcgctttccgttgcatgaccgcggcgttgaaccgggccaagcttacgcccgccgatgtcgactacatcaacgcgcatggcacctcgaccatggccgacacgatcgaactcggcgctgtcgagcggcttgtcggcaacgccgcgtcgaagatttcgatgtcgtcgaccaagtcgtcgatcggccatctccttggtgcagcgggagccgccgaagcgatcttttcgatccttgcgatcagggacaatgtcgcgccggcgaccatcaacctcgacaatccagagcgcgaaaccgcgatcgacctggtgccgaacaagcctcgctcccgccagatcgacgttgcgctctccaattccttcggcttcggcggcacaaacgcatcgcttgtgttccagcgctacaatggctga

SEQ ID NO: 114577 - protein, 420 aa, Mesorhizobium loti MAFF303099
MRRVVVTGLGLLSPFGMGFEHSWKELLTGRSAAKRITEFEVEDLACKIAHVVPRGDGSNATFNPESVLEPKELRKIGDFILYGIAAADEALKDSGWEPKTHEEQCATGVLIGSGIGGIEGIAENAMILKERGPRRISPFFIPGQIINLVSGQVSIRHGLKGPNHAVVTACSTGAHAIGDAARLIMWGDADVMVAGGAEAPVTRLSIAGFAACRALSTERNDTPQTASRPYDRDRDGFVMGEGAGVVVLEELEHAKARGAKIYAEVTGYGLTGDAYHITAPAEDGDGAFRCMTAALNRAKLTPADVDYINAHGTSTMADTIELGAVERLVGNAASKISMSSTKSSIGHLLGAAGAAEAIFSILAIRDNVAPATINLDNPERETAIDLVPNKPRSRQIDVALSNSFGFGGTNASLVFQRYNG

SEQ ID NO: 114578 - DNA, 1248 bp, Aquifex aeolicus VF5
  CDS (1)..(1248): transl_table=11
atgaagagaagagttgttatcaccggcatcggggcggttacgccccttggaacaggcgtaaagaagttctgggaaaaccttgtaaagggtgtaagcggtgttgattacataaagagctttaaccccgacgaatacggaatacccgtaaagatagcggcggaagtaaaggactttaatccagaagactttatggataaaaaagaggcgagaaaagcctcccgctttgtccagtttgcaatagctgcggtaaaggaagcccttgaagacagcggactccttgaaagtgagtacgacccttacagagtaggggtaattatagggacaggaattggcggtctcaaggatatagaagatcagactttaatccttaaagaaaagggagcgagaagggtatctccctttttcataccctacggcatatccaacatggcttcggggcttgtggccataaagtggggctttaaaggtccaaattactgcgtgacttccgcctgtgctacgggaaaccacgctataggagacgccttcagactcattcaaaagggtgatatagacattgctatagcgggaggaacggaagctgcgataacccccctcggtgttgcgggatttgcatccatgaaggcactctctacgaggaacgacgagccccagaaagcttcaagaccctttgacagggacagggacggcttcgtaatgggagaaggagcaggaatactgattttggaagaatacgagagggcaaaggcaaggggtgcgaagatatacgctgaactcgtgggctacggtgcaaccgacgacgcttaccacataacttccccccacgagtgcggtgagggagcttacgagtgcatgaggttagcactggaagacgctggaattaaacccgaagaggtggattacataaacgcccacggaacatcaacaccgctcaacgacaaaacagagacgatggcgataaagcagctcttcggagaacacgcatacaaacttaaaatttcttcaaacaagtccatgatagggcacctgctcggagccgcagcggctgtggaagctgtagcaacgataaaaaccatagaaactggagtgatacctcctaccattaacctggaaaaccccgatccagagtgtgatctggactacgttccaaacaaagccgtggaataccccgtaagggttgcactttctaacgcctttggttttggaggaactaacgcaacgctagtgttcagaaaaatagaagaatga

SEQ ID NO: 114579 - protein, 415 aa, Aquifex aeolicus VF5
MKRRVVITGIGAVTPLGTGVKKFWENLVKGVSGVDYIKSFNPDEYGIPVKIAAEVKDFNPEDFMDKKEARKASRFVQFAIAAVKEALEDSGLLESEYDPYRVGVIIGTGIGGLKDIEDQTLILKEKGARRVSPFFIPYGISNMASGLVAIKWGFKGPNYCVTSACATGNHAIGDAFRLIQKGDIDIAIAGGTEAAITPLGVAGFASMKALSTRNDEPQKASRPFDRDRDGFVMGEGAGILILEEYERAKARGAKIYAELVGYGATDDAYHITSPHECGEGAYECMRLALEDAGIKPEEVDYINAHGTSTPLNDKTETMAIKQLFGEHAYKLKISSNKSMIGHLLGAAAAVEAVATIKTIETGVIPPTINLENPDPECDLDYVPNKAVEYPVRVALSNAFGFGGTNATLVFRKIEE

SEQ ID NO: 114580 - DNA, 1257 bp, Chlamydia trachomatis D/UW-3/CX
  CDS (1)..(1257): transl_table=11
atgaacaaaaaacgtgtagtcgttacaggaatggggatcgtctcctgccttgggaatgaagtagaatctttctatgatagcctattggcgggaattagtggagtgcgaacaatcacgtcttttccctgcgatgattatgctacgcgttttgctggctggatagaagaatttaactcagagccttacttagataaaaaacaagctagacgagttgatccttttattacttatgcagttgtagctgcaaagaaggcaatagctatgtcccgttgggatcaagatactcttcccgcagattctcatcgttgtggggtgattattggttctggaatgggaggattacgaaccctggatgaggggattgaaaaactatcggctggaaatagaaaattatctccattctttattccttacatcattacgaatatggctccggctttaatcgcaatggattatgggttaatgggacctaattattctatttcaacagcctgtgcaacagcaaactactgtattgatgccgcttatcaacacctcattgagggtcgagcagatgttatcgtttgtggaggaactgaagcggctattaaccgtgttggtttagctggatttattgcgaatcgcgcattgtcagaaagaaatgatgctccagaacaagcttcgcgcccttgggatagggatcgagacggttttgttttgggggagggtgcaggaattcttgttttggaaacccttgataatgctttgaaaagaggggctccgatttttgcggaggtacttggcacatatacaacgtgcgatgcttttcatattactgctcctagagatgatggcgaaggaatcactgcctgtatattgggagccttgaataaggctgggattcctaaagaacgggtgaattatattaatgcacacggaacgtcgacgcctctaggggatctatcagaggtattggctttgaagaaagcttttggaagccacgtcaaaaacttgcgaatgaattcaacgaagtcgttgatagggcactgcttgggagctgcaggaggagtagaagctgttgcaaccattcaagccatccagactgggaagttgcacccaacaatcaatgtagaaaatccgatagcagaaatagaagaattcgatgtggttgcgaacaaagctcaagattgggatgtcgatgtagctatgtcaaattcttttggttttggcggacacaattcaacgatattattttcgaggtatgaaccttcattatga

SEQ ID NO: 114581 - protein, 418 aa, Chlamydia trachomatis D/UW-3/CX
MNKKRVVVTGMGIVSCLGNEVESFYDSLLAGISGVRTITSFPCDDYATRFAGWIEEFNSEPYLDKKQARRVDPFITYAVVAAKKAIAMSRWDQDTLPADSHRCGVIIGSGMGGLRTLDEGIEKLSAGNRKLSPFFIPYIITNMAPALIAMDYGLMGPNYSISTACATANYCIDAAYQHLIEGRADVIVCGGTEAAINRVGLAGFIANRALSERNDAPEQASRPWDRDRDGFVLGEGAGILVLETLDNALKRGAPIFAEVLGTYTTCDAFHITAPRDDGEGITACILGALNKAGIPKERVNYINAHGTSTPLGDLSEVLALKKAFGSHVKNLRMNSTKSLIGHCLGAAGGVEAVATIQAIQTGKLHPTINVENPIAEIEEFDVVANKAQDWDVDVAMSNSFGFGGHNSTILFSRYEPSL

SEQ ID NO: 114582 - DNA, 1239 bp, Thermotoga maritima MSB8
  CDS (1)..(1239): transl_table=11
ttgaagcgggtagttatcacgggtatgggtatcgtgagtccctttggtgttggaaaagagagaaatttagaaggacttagagaaactaaagtaacgatagatcgaatatcttcttttgatgcttctaaccttcccgtccagatcgccgcagaggtgagagatttcaaaccggaggagtacataaatccgaaactggtcaggagaacagaccgtttcgttcacttcgctctggtcagcgcgaaagaagctgtggaagacgccggtataaacttcgaaccgtacgccgacaggacagccaccatcataggatccggcatgggaggatttctgacgctcgacagcgagaacaacaaattcctgagtcagggtccaagcagagtcagtccgttcctgattccgatgatcctcatcgatatggcttccggtgtcgttgcaatggaatacggactgaaaggaccgaacttctcttctgtaagcgcctgtgcttcatccctccacgcggtagctctcggtgctctcctcataagacacggatacgcggatgtggcagtcgtcgggggaaccgaggcaacgattgctccacttcccatcaccgggtttgccaacatgagagcactctcaaggaggaacgacgatccaaagcgtgcttctcgtccgttcgataaagacagagacggctttgtgatgggtgaaggcggtgcggttctcatactcgaagccgaggaagtggcaaaatcgagaggagcgaaaattctcgcggagatcaagggagtgggtatgacggacgacgcgtaccacttcagtgctccagatccagagggcagaggggcagcagaagccatgaaactcgccctgaaagaatccagtctggctgtcgaagacatcgactacgtgagctgtcacgccacaagcacaccagcaggtgatgaagcggaactcaaagcgataaagaaagtccttggagaacacgtaaagaacgtcgccataaactcttcgaaagcccttataggacatctccttggtgccgccggtgcttccgaactcgttcttgccatccttcagatgcagaactctttcgtccacggcatgccgaaccttgacaatccgatcgacgaagcgaaaggaaccggccttgtcggtaaagaacccgttcagatggagatcaaaaacttcataaagaactcctttggtttcggcgggcacaacgtgtccatcgtggtggggaggtatgaatcatga

SEQ ID NO: 114583 - protein, 412 aa, Thermotoga maritima MSB8
MKRVVITGMGIVSPFGVGKERNLEGLRETKVTIDRISSFDASNLPVQIAAEVRDFKPEEYINPKLVRRTDRFVHFALVSAKEAVEDAGINFEPYADRTATIIGSGMGGFLTLDSENNKFLSQGPSRVSPFLIPMILIDMASGVVAMEYGLKGPNFSSVSACASSLHAVALGALLIRHGYADVAVVGGTEATIAPLPITGFANMRALSRRNDDPKRASRPFDKDRDGFVMGEGGAVLILEAEEVAKSRGAKILAEIKGVGMTDDAYHFSAPDPEGRGAAEAMKLALKESSLAVEDIDYVSCHATSTPAGDEAELKAIKKVLGEHVKNVAINSSKALIGHLLGAAGASELVLAILQMQNSFVHGMPNLDNPIDEAKGTGLVGKEPVQMEIKNFIKNSFGFGGHNVSIVVGRYES

SEQ ID NO: 114584 - DNA, 1215 bp, Campylobacter jejuni subsp. jejuni NCTC 11168
  CDS (1)..(1215): transl_table=11
ttgaaaagagttgtagttacaggtattggtatgatcaatgcccttggtttagataaagaaagttcatttaaagcaatttgcaatggagaaagcggagtaaataaaattactctttttgatgctacggactttcctgttcaaattgcagctgaagttaaaaattttgatccattagaggttgttgatggcaaagaagtaaaaaaaattgaccgtttcatacaacttggaattaaagcagcaagagaagcaatgcaggatgctggatttagtgaagaattagataaagaagaatttggcattgtttcggcttctggtattggaggtttgcctaacatagaaaaaaattccattatttgttccgagcgaggtccgcgtaaaatttccccttttttcataccttcagcacttgtaaatatgttaggaggtttgatttctatagagcatggacttaaagggccaaatatttcttgtgttacagcttgtgcagcaggaactcatgctataggagaagcttataaaagtatagctttgggaaatgctaaaaagatgttagtcataggtgcagaagctgcgatttgtcctgtgggtataggtggttttgcttcaatgaaagctttatcaactagaaatgaagatccacagcatgcttcaagaccatttgacaaagaaagagatggttttgtcatgggagaaggtgctggagctttagtttttgaggaatatgaagaggctaaaaaacgcggtgctacgatttatgctgaattaattggatttggagaaagtgcagatgcgcatcatattacttcaccaactttagatgggcctttaagggctatgaaaaaagctttaaatatggcagggaatccaaaggtagattatatcaatgcacatggaacttcaacccctgtaaatgacaaaaatgaaacagcagcaattaaagagctttttggcaataatatcccgcttataagttccaccaaaggacaaacaggtcattgcttgggtgctgcaggtgcaattgaagcagttgttagtgttatggttttaagagatggggtagttccacctacaatcaatcagcttgtaaaagatgatgaatgtgatcttgattatattccaaatatatcaagaaaagtagatttaaaagtggtgatgagtaattcttttggttttggtggcacaaatggctgtgttgtatttaaaaaagtagattaa

SEQ ID NO: 114585 - protein, 404 aa, Campylobacter jejuni subsp. jejuni NCTC 11168
MKRVVVTGIGMINALGLDKESSFKAICNGESGVNKITLFDATDFPVQIAAEVKNFDPLEVVDGKEVKKIDRFIQLGIKAAREAMQDAGFSEELDKEEFGIVSASGIGGLPNIEKNSIICSERGPRKISPFFIPSALVNMLGGLISIEHGLKGPNISCVTACAAGTHAIGEAYKSIALGNAKKMLVIGAEAAICPVGIGGFASMKALSTRNEDPQHASRPFDKERDGFVMGEGAGALVFEEYEEAKKRGATIYAELIGFGESADAHHITSPTLDGPLRAMKKALNMAGNPKVDYINAHGTSTPVNDKNETAAIKELFGNNIPLISSTKGQTGHCLGAAGAIEAVVSVMVLRDGVVPPTINQLVKDDECDLDYIPNISRKVDLKVVMSNSFGFGGTNGCVVFKKVD

SEQ ID NO: 114586 - DNA, 1230 bp, Escherichia coli O157:H7 EDL933
  CDS (1)..(1230): transl_table=11
  misc_feature (1131)..(1131): y is t or c
atgacacgtcgcgtagtgattacaggaatgggcggcgtgactgcctttggtgaaaactggcaggacgtttctgcacgcttactggcatatgaaaatgcggtgcgcaaaatgccggagtggcaggtctacgatgggctgcacaccctgcttggcgcgcctgttgatgatttcacgctaccggagcactacacccgcaagcgtatccgtgcgatgggccgcgtgtcgcaaatgtcgacccgtgccagcgagctggcgttagagcaggcagggttgattggcgatccgatattaaccagcggcgaaacgggcattgcgtacggttcatcgaccggcagtaccggcccggtaagcgagttcgccaccatgctgacggaaaagcacaccaataacatcactggcaccacctatgtgcagatgatgccgcacaccaccgccgttaatactggcctctttttcggcctgcgcgggcgggtgatcccaacctccagcgcctgtacttccggcagccaggcaatcggttatgcgtgggaagccattcgccacggttatcaaacggtgatggttgctggtggtgccgaagagttatgtccttcagaagcagcggtatttgatacgcttttcgccaccagccagcacaatgatgcgccgaaaaccacaccttcaccgttcgatgaaaaccgcgacgggctggtgattggtgaaggcgcaggtacgctcattctcgaagaactggagcacgccaaagcgcgcggcgcgaccatttacggtgaaatcgtcggctttgcgactaactgcgacgcggcacatattacccagccgcagcgcgaaaccatgcagtattgtatggagcaatcgctgaaaatcgccgggttaagcgcacaagatatcggctatatttcagcgcatggtacggcgaccgatcgcggtgatatggcagaaagtctggcgacagcaaccatttacggtgataatgtgccgctctcctcgctgaaaagttattttggtcatacgcttggtgcctgtggcgcgctcgaagcctggatgagtctgcaaatgatgcgcgaaggttggtttgcgcctacgctaaacctgaataaaccagacccgaattgtggcgcgctggattacatyatgcatgaagcccgcaaggttgattgtgagtttttgcagagtaacaactttgcctttggcggcattaatacatccatcatcattaaacgttggccctga

SEQ ID NO: 114587 - protein, 409 aa, Escherichia coli O157:H7 EDL933
MTRRVVITGMGGVTAFGENWQDVSARLLAYENAVRKMPEWQVYDGLHTLLGAPVDDFTLPEHYTRKRIRAMGRVSQMSTRASELALEQAGLIGDPILTSGETGIAYGSSTGSTGPVSEFATMLTEKHTNNITGTTYVQMMPHTTAVNTGLFFGLRGRVIPTSSACTSGSQAIGYAWEAIRHGYQTVMVAGGAEELCPSEAAVFDTLFATSQHNDAPKTTPSPFDENRDGLVIGEGAGTLILEELEHAKARGATIYGEIVGFATNCDAAHITQPQRETMQYCMEQSLKIAGLSAQDIGYISAHGTATDRGDMAESLATATIYGDNVPLSSLKSYFGHTLGACGALEAWMSLQMMREGWFAPTLNLNKPDPNCGALDYIMHEARKVDCEFLQSNNFAFGGINTSIIIKRWP

SEQ ID NO: 114588 - DNA, 1287 bp, Deinococcus radiodurans R1
  CDS (1)..(1287): transl_table=11
atgtgggctttcaatgttcaatttgggacttcaaaaggagacgacatgatttctggactcaaacgggtcgttatcaccggcctcggcccggtcacgcccatcggcgtcggggcaaaggcctacgccgaggcgcagcgggccggcaaaaacggcatcgggccgatcacgcgcttcgacgccaaagacacggcgagcaaaatcgcgggcgaagtgcacgacagcctcgacgatttcgtggatccccgcgaggcccgcaaactcgaccgctacaccctgctggccctgagcgccgccgaactcgcggtgcgcgacagtggcctgagcgccgaggacctgcgcggcgagcgcaccggcacgctggtcggcagcggcatcggcggcatgaagaccttcgaggaccaggcccgcgtgtacgtggagcgcggcgctggacgcatttcacccatgttcatccctatgcagattgccaacatggcgaccggccacatcgccatgcgctacggcgcaatggggccgagcagcaccgtcgtcaccgcctgcgccaccggcaccggggcgattggcgaagcggcccgttacatccaactcggcctggccgacgtgatgctcgcgggcggcgcggaggcctccattacggcgatggcggtgggcggcttttccaacatgaaggcgctctcgacccgcaacgacgaccccgagcacgccagccggcccttttctgccacccgcgacggcttcgtgctcagcgagggcgcgggcgtggtggtcctcgaagaatacgagcacgccaaagcccgcggcgcgaccatctacgccgaagtcgccgggtttggcgtgagtgccgacgcctaccacatcaccatgccagccccgcagggcgcgggcgcgcagctcgccatgaaaatggccctgcacacggcgggcgtgaaccccgagcaggtggggtacatcaacgcgcacggcaccagcacccatttcaacgacctgcacgagacgcaggccattcagcacgtgtttggcgaccacgcggcgcagctcgcggtcagctccaccaagtccatgaccgggcacctgctcggcgcagcgggcgcgattgaagcgattgccgtggcgcaggccctcgccgacgggctgctgccccccaccatcaacctgaccgaccccgaccccgagctgcccctcgacttcatccccgagggcgcccgcgagcggcaggtggactacgcgctgagcaactcgttcgccttcggtggacagaacgcggcgctgctgctgggacgggtctga

SEQ ID NO: 114589 - protein, 428 aa, Deinococcus radiodurans R1
MWAFNVQFGTSKGDDMISGLKRVVITGLGPVTPIGVGAKAYAEAQRAGKNGIGPITRFDAKDTASKIAGEVHDSLDDFVDPREARKLDRYTLLALSAAELAVRDSGLSAEDLRGERTGTLVGSGIGGMKTFEDQARVYVERGAGRISPMFIPMQIANMATGHIAMRYGAMGPSSTVVTACATGTGAIGEAARYIQLGLADVMLAGGAEASITAMAVGGFSNMKALSTRNDDPEHASRPFSATRDGFVLSEGAGVVVLEEYEHAKARGATIYAEVAGFGVSADAYHITMPAPQGAGAQLAMKMALHTAGVNPEQVGYINAHGTSTHFNDLHETQAIQHVFGDHAAQLAVSSTKSMTGHLLGAAGAIEAIAVAQALADGLLPPTINLTDPDPELPLDFIPEGARERQVDYALSNSFAFGGQNAALLLGRV

SEQ ID NO: 114590 - DNA, 1236 bp, Xylella fastidiosa 9a5c
  CDS (1)..(1236): transl_table=11
atgaatcgtcgggttgtcgttactgggatggggatggtgtcgccattgggcaatgatttgaccacaagttgggatggcatcgttcacggacgttcgggtatcgctcccatcgtccagattgatgcttctaagttatccacgcagattgctggcgaaatcaagggattcgatccaatgaagttcgtatccgcaaaggatgcgaagaaaatggattcgttcatttactatggtataggcgcagcgtttatggcgctggatgatgcaggtttggagattaatgagatcaatgctgagcgtgttggtgccttgatcggttctggtattggtggcgtgtttggtattgaggaacagaccatcaagttctatgaggggggcgtacgcaagatatcccctttctatgtgccatcgacgatcatcaacatgctgccaggacagttgagtgttttgaaaggcttgaaaggcccgacgttctctgcggtatctgcctgcgcgacttcaaaccactccattggtatggcaatgcgcatgatccagtatggtgatgctgatgtcatgttggctggtggttctgagcgcgcttcttcgccaactgcgattggtggcttttgtgcgatgagggcgatgtctacgcgtaacgatgatccaaccggcgcttcgcggccgtgggacaaggggcgcgatggctttgtgcttggtgatggtgccggcattctagtgctggaagagtatgagtatgctaaagcgcgaggcgcacgcatctatgctgaattggctggtttcggcgccacttccgatgccttccacatgacgatgccggtcgaggatggtgaaggtgcagcgcgttgtatgcgcatagcgttgcaggatgcgaaggttactccggagcaaattgattatctcaatgcacacggtacctcaactcctttgggcgatctgtgcgaaaccaacgcgatcaagacggtattaggagatcatgcctacaaagtgatggttagctcgaccaaatcaatgaccggacatctactcggtgcggccggtggtgtggaagcaattttctcagtgatggcgttgcatactggcatcgttccgccgacgattaatctcgaagaaccagacgaaggctgtgatcttgattacgtgccgcatgtggcgcgtgaggccaaactggatgtggtggtttcaaacggttttggtttcggtggtactaacggcacattagtgttcaagcgtatatga

SEQ ID NO: 114591 - protein, 411 aa, Xylella fastidiosa 9a5c
MNRRVVVTGMGMVSPLGNDLTTSWDGIVHGRSGIAPIVQIDASKLSTQIAGEIKGFDPMKFVSAKDAKKMDSFIYYGIGAAFMALDDAGLEINEINAERVGALIGSGIGGVFGIEEQTIKFYEGGVRKISPFYVPSTIINMLPGQLSVLKGLKGPTFSAVSACATSNHSIGMAMRMIQYGDADVMLAGGSERASSPTAIGGFCAMRAMSTRNDDPTGASRPWDKGRDGFVLGDGAGILVLEEYEYAKARGARIYAELAGFGATSDAFHMTMPVEDGEGAARCMRIALQDAKVTPEQIDYLNAHGTSTPLGDLCETNAIKTVLGDHAYKVMVSSTKSMTGHLLGAAGGVEAIFSVMALHTGIVPPTINLEEPDEGCDLDYVPHVAREAKLDVVVSNGFGFGGTNGTLVFKRI

SEQ ID NO: 114592 - DNA, 1329 bp, Agrobacterium tumefaciens str. C58
  CDS (1)..(1329): transl_table=11
gtgctatcccatggtgcccggtgttgcagaaagaccgatgatttggataagggcggagcattggcgatgaggcgtgtcgttatcaccggtaccggcatggtatctcctcttggatgcggaacggaagtgacctgggagcggctgttggccggccagaatggtgcccgtctcgtgactgaattcgaggtcgaagacctgcccgcaaagatcgcctgccgcattcccgtcggcgacggctccaacggcaccttcaatgccgatgactggatggagcccaaggaacaacgcaaggtcgatcctttcattctctacggcatggctgccgccgacatggcgcttgccgacgcaaactggcatccggaaacggacgacgaccagatcgctaccggcgttctgatcggctccggcattggcggtctggaaggcattgtcgaggcgggttacacgctgcgcgacaagggcccacgccgcatttctccattcttcattcccggccgtctgatcaacctcgtatccggtcaggtttccattcgccacaagctgcgtggaccgaatcattccgtggtaacggcctgctcgaccggcgcacacgctatcggcgacgccgcccgactgatcgcgcttggcgatgccgaggtcatggtcgccggtggtgccgaatcgccggtctgccgcatttcgctcgccggatttgccgcctgcaaggcgctctccacccagcacaatgacgatccgcaaaaggcctcgcgcccctatgatcgcgaccgcgacggtttcgtcatgggcgagggtgccggcatcgttgttctcgaagaactcgaacacgccaaggcgcgcggcgcgaagatttacgccgaagtcgtcggttatggcctgtccggcgatgccttccacatcacggcgccgtccgaggatggcgacggtgcgtatcgctgcatgtccatggcgctgaagcgcgctggcctcacgcctgacgatatcgactatatcaacgcccacggcacctccaccatggccgacacgatcgagcttggcgcggtcgaacgtctggtcggcgaatctgctccgaagatttccatgtcttccaccaagtcggccaccggccatcttctcggcgctgccggcgcaatcgaggcgattttcgcgacgcttgcgatccgcgacaatatcgttccgccgacgctcaacctcgacaatcccgatgtcgagacgaagatagacctcgtgccgcacaaggcccgcaagcggcaggtcaatgtggcgctttcgaattccttcggtttcggcggcaccaacgcatcgctcgtgctgcgtcgttacgaagcataa

SEQ ID NO: 114593 - protein, 442 aa, Agrobacterium tumefaciens str. C58
MLSHGARCCRKTDDLDKGGALAMRRVVITGTGMVSPLGCGTEVTWERLLAGQNGARLVTEFEVEDLPAKIACRIPVGDGSNGTFNADDWMEPKEQRKVDPFILYGMAAADMALADANWHPETDDDQIATGVLIGSGIGGLEGIVEAGYTLRDKGPRRISPFFIPGRLINLVSGQVSIRHKLRGPNHSVVTACSTGAHAIGDAARLIALGDAEVMVAGGAESPVCRISLAGFAACKALSTQHNDDPQKASRPYDRDRDGFVMGEGAGIVVLEELEHAKARGAKIYAEVVGYGLSGDAFHITAPSEDGDGAYRCMSMALKRAGLTPDDIDYINAHGTSTMADTIELGAVERLVGESAPKISMSSTKSATGHLLGAAGAIEAIFATLAIRDNIVPPTLNLDNPDVETKIDLVPHKARKRQVNVALSNSFGFGGTNASLVLRRYEA

SEQ ID NO: 114594 - DNA, 1281 bp, Agrobacterium tumefaciens str. C58
  CDS (1)..(1281): transl_table=11
atgaccaattttaaggatcatctcggtcgcccgatcgttgccgtgaccggcatgggcatcatcacctcgctcggtcagggacttgccgacaactgggcagcgctgacatcaggcaagtcgggtattcacaagatcacccgcttcccgactgaagggctttcgacccgcatcagcggcacggtggatttcatcgatatcccggttcccaactccgtcgagcgttcttatgctttcgcgcgtgaaaccaccatcgaggcgctggcgcaggccggtatatcgggtgatttcgatgggccgctgtttctcgcagcgccaccgattgagccggaatggagcgcccgtttcgagcttgccgaccggtctccgccagccgcaaagccgggtgacgcctatgagcggttcatgacggcgttgcgccagcgtcccgatccggcattccaggaagccgcattgttcggcgcgatttccgaacgtctttccgaccgttttggcacgcgcggcctgccggtcacgctgtctacggcctgtgcttcgggtgcgactgcgatccagctcggcgtcgaggcgatccgccagggccgcacggagcgcgctctgacggttgcgactgacggttccgtcagcgccgaagccctgatccgcttctcgcttctgtctgcgctttcgacccagaacgatccgcccgaaaaggcctccaagccgttcagcaaggatcgcgatggtttcgtgatcgctgaaggtgcggcgacgctggtgttggaatcgctcgaagctgccgttgcccgtggcgccaaggttctcggcatcatcaagggcgccggcgaaaaggccgacagcttccaccgcacgcgttcttcgcccgatggcggcccggcgatcgcgacgatccgtgcggcacttgccgatgcgggcgtggccgaaagcgatatcggctatatcaacgctcacggcacctcgacgcctgagaatgacaagatggaatatggctcgatgctggccgtcttcggcgaaggcctgaagaatattccgctgtcgtctaacaagtcgatgattggccatacgctgacggccgcaggcgccgtggaagcggtgttctcgctgcagaccatgctgaccgggaccctgccgccgacgatcaactacaacaatcccgatccgaccatcaccctcgacgtggtgccgaatgtgaagcgggatgcgcaggtgggtgcggttctctccaactccttcgggtttggcgggcagaatgcaagccttgtcatgacgcgggaaccggcttaa

SEQ ID NO: 114595 - protein, 426 aa, Agrobacterium tumefaciens str. C58
MTNFKDHLGRPIVAVTGMGIITSLGQGLADNWAALTSGKSGIHKITRFPTEGLSTRISGTVDFIDIPVPNSVERSYAFARETTIEALAQAGISGDFDGPLFLAAPPIEPEWSARFELADRSPPAAKPGDAYERFMTALRQRPDPAFQEAALFGAISERLSDRFGTRGLPVTLSTACASGATAIQLGVEAIRQGRTERALTVATDGSVSAEALIRFSLLSALSTQNDPPEKASKPFSKDRDGFVIAEGAATLVLESLEAAVARGAKVLGIIKGAGEKADSFHRTRSSPDGGPAIATIRAALADAGVAESDIGYINAHGTSTPENDKMEYGSMLAVFGEGLKNIPLSSNKSMIGHTLTAAGAVEAVFSLQTMLTGTLPPTINYNNPDPTITLDVVPNVKRDAQVGAVLSNSFGFGGQNASLVMTREPA

SEQ ID NO: 114596 - DNA, 1242 bp, Bacillus subtilis subsp. subtilis str. 168
  CDS (1)..(1242): transl_table=11
atgactaaaaaaagagtagttgttacaggacttggagcattatctccacttggcaacgacgtcgatacaagttggaataacgcaatcaacggtgtgtccggaatcggtccgatcactcgtgttgacgctgaagaatatccggcaaaagttgccgctgaattaaaagattttaatgttgaagattatatggataaaaaagaagccagaaaaatggaccgctttacacaatatgcggttgtggctgcgaaaatggcggttgaagatgcagatcttaacattaccgatgagatcgcgccgagagtcggtgtttgggtaggctccggtatcggaggacttgaaacactagagtctcaatttgaaatcttcttaacaaaaggcccaagacgggtaagcccgtttttcgtgccaatgatgattcctgacatggcgacaggccagatttctattgcattaggagcaaaaggggtgaactcttgtacggttacagcatgtgctacaggaacgaactccatcggtgacgcgtttaaggttattcagcgcggtgatgcagacgtgatggtcacaggcggaacagaagcgccgctgacaagaatgtcattcgccggctttagtgccaacaaagcgctgtctactaatccagatccgaaaacagcgagccgcccgtttgataaaaaccgtgatggctttgtcatgggggaaggtgcagggattatcgttcttgaagaacttgagcatgccctggcccgcggcgctaaaatttacggagaaattgtcggctacggctcaaccggagacgcttatcatatcacagcgccggcccaagacggtgaaggcggagcgagagcgatgcaagaagccattaaagatgcaggcattgcacctgaagaaattgattacatcaatgctcacgggacaagcacgtattacaacgacaaatacgaaacaatggcgattaagaccgtttttggcgagcatgcgcataaacttgcggtaagctctacaaaatcgatgacaggccacctcttaggagcagccggcggtattgaagccattttctctatcctggccattaaagaaggcgtgattccgccgacaatcaatattcaaacacctgacgaagaatgtgatttggattatgtgcctgatgaagcccgcagacaggaacttaattatgttctcagcaactcattaggattcggcggacacaacgcaacattaatctttaaaaaatatcaatcataa

SEQ ID NO: 114597 - protein, 413 aa, Bacillus subtilis subsp. subtilis str. 168
MTKKRVVVTGLGALSPLGNDVDTSWNNAINGVSGIGPITRVDAEEYPAKVAAELKDFNVEDYMDKKEARKMDRFTQYAVVAAKMAVEDADLNITDEIAPRVGVWVGSGIGGLETLESQFEIFLTKGPRRVSPFFVPMMIPDMATGQISIALGAKGVNSCTVTACATGTNSIGDAFKVIQRGDADVMVTGGTEAPLTRMSFAGFSANKALSTNPDPKTASRPFDKNRDGFVMGEGAGIIVLEELEHALARGAKIYGEIVGYGSTGDAYHITAPAQDGEGGARAMQEAIKDAGIAPEEIDYINAHGTSTYYNDKYETMAIKTVFGEHAHKLAVSSTKSMTGHLLGAAGGIEAIFSILAIKEGVIPPTINIQTPDEECDLDYVPDEARRQELNYVLSNSLGFGGHNATLIFKKYQS

SEQ ID NO: 114598 - DNA, 1281 bp, Caulobacter crescentus CB15
  CDS (1)..(1281): transl_table=11
atgcgtagagtcgtcgtcacgggtatcggcctgttgaccccgctcggccaaggtgtcgacatcacctggaagaacatcctcgccggcaagtccggcgcgaaccgcatcagcgcgttcgaccccaccgactattcgtgccaggtcgcctgcgaggtgccgcgcgtcgatggtcgcggcggcggcggcccggatgtcgaaggctcgttcgatcctgaccagaccatgagcccgcgcgatcagaagcgcgtcgatgacttcatcctgtacggcgtcgccgccgccgatgaggccatcaaggattcgggctgggttccggaaaccgacgaggacaagtggcgcacgggcgtcatcctgggctcgggcatcggcggtctgtcgaccatcgccgacacggcgctggagcttgaggccaagggcccgcgacgcgtcagcccgttctttatctcgtcagccctgatcaacctgatctcgggtcaggtctcgatcaagtacggcttcaagggcccgaaccacgcggtcgtgaccgcctgcgccaccggtgcccatgcgatcggcgacgccgcgcgcctgatcaagtatggcgacgccgacgtgatggtggccggcggggccgaggcggccgtctgcaaggtcggcatcgccggtttccaggcctgccgcgccgtggccaccgcgttcaacgacacgcccgagaaggcctcgcgcccgtacgacaaggaccgcgacggcttcgtcatgggcgagggcgcgggcgttctggtgctggaagagtacgaacacgccaaggcgcgcggcgccaagatctatgctgaagtcgcaggctatggcctgtcgggcgacgcctaccacatcaccgccccgtcggaagacggcgagggtggcgcgcgggccctggccgccgccgtgcgtgacgcgggcctgaagccctcggacatcaactatgtcaatgctcacggcacctcgaccatggctgacggcatcgaggctaaggcggtcgagcggttcctcggcgatcacgccaagaacgtcgtcatgtcctcgaccaagtcgatgacgggccaccttctgggcgcggccggcgcgatcgaggcggcgttctcgatcctggcgatccgcgatcagatcgccccgccgaccatcaacctcgacaatcccgatgtcgaggtcgcgatgaatctcgccccgcacaaggccgtgccgatgaagatcgatgtggccgtgtccaacagcttcggcttcggcggcaccaacgcctccgtcgtgttcaagaaggtctcgtga

SEQ ID NO: 114599 - protein, 426 aa, Caulobacter crescentus CB15
MRRVVVTGIGLLTPLGQGVDITWKNILAGKSGANRISAFDPTDYSCQVACEVPRVDGRGGGGPDVEGSFDPDQTMSPRDQKRVDDFILYGVAAADEAIKDSGWVPETDEDKWRTGVILGSGIGGLSTIADTALELEAKGPRRVSPFFISSALINLISGQVSIKYGFKGPNHAVVTACATGAHAIGDAARLIKYGDADVMVAGGAEAAVCKVGIAGFQACRAVATAFNDTPEKASRPYDKDRDGFVMGEGAGVLVLEEYEHAKARGAKIYAEVAGYGLSGDAYHITAPSEDGEGGARALAAAVRDAGLKPSDINYVNAHGTSTMADGIEAKAVERFLGDHAKNVVMSSTKSMTGHLLGAAGAIEAAFSILAIRDQIAPPTINLDNPDVEVAMNLAPHKAVPMKIDVAVSNSFGFGGTNASVVFKKVS

SEQ ID NO: 114600 - DNA, 1242 bp, Listeria monocytogenes EGD-e
  CDS (1)..(1242): transl_table=11
atggataagagaagagtagttgttactggtgttggagctgttacacctattggaaacgatgcggaaacttcttgggaaaacgcaaaaaaaggtgttaatggtgttgcaaaaatgacaagacttaatccggatgactttccggttaaaattgcagcagagttaaaagattttgatgtagaaaaatatctagagaaaaaagaagctcgtaaaatggaccgttttacgcattatgcaattgcaagtgctgaaatggctgtacaagactctggtttagttattgatgattccaatgcaaaccgcgttggtgtttggattggttcaggaattggcggaatggaaactttcgaaacacaatatgaaattttcttaaatcgtggacatcgtcgagttagtccgtttttcgtacctatgatgattccagatatgggttcaggccaagtttctattcgttttggagctaaaggcattaactctacaacagttacagcttgtgcaacagcaacaaactcaatcggcgacgcgtttaaagttattgagcgtggggatgctgatgcaatgattactggtggagcagaagcaccaatcactaaaatgtcacttgcaggatttactgctaataaagctttgtcattaaatccagatccagaaactgcttgtcgtccatttgataaagaccgtgatggttttattattggcgaaggagcaggtatcgttattttagaagaatacgaacatgcaaaagcacgtggggcaaaaatttacgctgaaatcgttggttacggtgcaacaggagatgcttaccacattactgctccagcaccaaacggcgaaggtgctgctcgcgcaatgaaaatggcgattgatgatgctgggcttactcctgataaagtagattacattaatgcccacggaacaagtacaccatacaatgatgaatacgaaacacaagctattaaaactgtctttggagagcatgcgaaaaaattagcgattagttctactaagtcaatgacaggacatactttaggtgcgtctggcgggatagaagctattttcgcgcttttgactattcgtgataatattattgcaccaacgattcatttgaaaaaccaagatgaagtttgtgacttggattatgttccaaatgaagcacgtgaagcaaatgtaaatgttgtaatttctaactcttttggctttggtggtcataatgcgactttagtatttaaaagaatagaagactaa

SEQ ID NO: 114601 - protein, 413 aa, Listeria monocytogenes EGD-e
MDKRRVVVTGVGAVTPIGNDAETSWENAKKGVNGVAKMTRLNPDDFPVKIAAELKDFDVEKYLEKKEARKMDRFTHYAIASAEMAVQDSGLVIDDSNANRVGVWIGSGIGGMETFETQYEIFLNRGHRRVSPFFVPMMIPDMGSGQVSIRFGAKGINSTTVTACATATNSIGDAFKVIERGDADAMITGGAEAPITKMSLAGFTANKALSLNPDPETACRPFDKDRDGFIIGEGAGIVILEEYEHAKARGAKIYAEIVGYGATGDAYHITAPAPNGEGAARAMKMAIDDAGLTPDKVDYINAHGTSTPYNDEYETQAIKTVFGEHAKKLAISSTKSMTGHTLGASGGIEAIFALLTIRDNIIAPTIHLKNQDEVCDLDYVPNEAREANVNVVISNSFGFGGHNATLVFKRIED

SEQ ID NO: 114602 - DNA, 1242 bp, Listeria innocua Clip11262
  CDS (1)..(1242): transl_table=11
atggatagaagaagagtagttgttactggtattggagcagttacaccaattgggaatgatgcagaaacttcgtgggaaaacgcaaaaaaaggtgtcaatggtgttgcagaaatgacaagacttaatccggatgactttccggttaaaattgcagcagaattaaaagactttgatgtagaaaaatatttagagaaaaaagaagctcgtaaaatggaccgtttcacccattatgccattgcaagtgctgaaatggctgtgcaagattctggtttaattattgatgattccaatgccactcgtgttggtgtatggattggatccggtatcggtggaatggaaacattcgaaacacaatatgaagttttcctaaatcgtggacatcgtcgtgttagtccgttctttgtaccaatgatgattccggatatgggttcaggacaagtttcgattcgttttggagcaaaaggaattaactctactacagtaacagcatgtgcgactgcaaccaactctatcggtgacgcatttaaagttatcgaacgcggggatgcagatgcaatgattactggtggagcagaggcgccaattacaaaaatgtcactagcaggatttacagcaaataaagctttatcattaaacccagacccagaaacagcatgtcgtccatttgataaagaccgtgatggttttattattggtgaaggtgctggggttgtaattttagaagaatatgaacatgcaaaagctcgtggtgctaaaatttatgcagaagttgttggttacggtgcaacaggtgatgcatatcatattactgcaccagcgccaaatggtgaaggcgctgcacgtgcaatgaaaatggcgattgacgatgcgggacttactcctgacaaagttgactacattaacgcgcacggaacaagtactccttacaatgatgaatacgaaacacaagcgattaaaactgtgttcggtgagcatgcgaagaaattggctattagctctaccaaatcaatgacaggacatactttaggtgcatcaggtggtattgaagctatttttgctttattaagtattcgtgataatattatcgcgccaacaatccacttggaaaatcaagatgaagtttgtgacttggactatgttccaaacaaagctcgtgaagcagaagtaaatgtcgtaatgtctaactcttttggcttcggtggccacaatgcgacactagtattcaaaagaatagaagactaa

SEQ ID NO: 114603 - protein, 413 aa, Listeria innocua Clip11262
MDRRRVVVTGIGAVTPIGNDAETSWENAKKGVNGVAEMTRLNPDDFPVKIAAELKDFDVEKYLEKKEARKMDRFTHYAIASAEMAVQDSGLIIDDSNATRVGVWIGSGIGGMETFETQYEVFLNRGHRRVSPFFVPMMIPDMGSGQVSIRFGAKGINSTTVTACATATNSIGDAFKVIERGDADAMITGGAEAPITKMSLAGFTANKALSLNPDPETACRPFDKDRDGFIIGEGAGVVILEEYEHAKARGAKIYAEVVGYGATGDAYHITAPAPNGEGAARAMKMAIDDAGLTPDKVDYINAHGTSTPYNDEYETQAIKTVFGEHAKKLAISSTKSMTGHTLGASGGIEAIFALLSIRDNIIAPTIHLENQDEVCDLDYVPNKAREAEVNVVMSNSFGFGGHNATLVFKRIED

SEQ ID NO: 114604 - DNA, 1251 bp, Nostoc sp. PCC 7120
  CDS (1)..(1251): transl_table=11
atgacagattataatcgtaaacgcgttgttgtcacgggtgttggcgcgattacacctattggtaacacagcctctgaatattgggaaggattgttaagcggacgcaatggcattgactacatcacccactttgatgcgtctagccatgattgtcggattgctggtgaagtgaaaaacttcgacccccatgagtacttggagcgcaaagaagccaagcgcatggatcggttttcccaatttgcagttgcagcagccaaacaagcacttgtggattcccagttagtcattaatgaactgaacgccgaacaagtgggggttattattggttctggggtaggcggactcaaggtcatggaagaccagcaaaccatctatctcaaccgggggcctgatcgctgtagtcccttcatgattcccatgatgatcgccaacatggcggctggactgacagcaattcacactggtgccaaagggccaaataactgtactgtcaccgcttgcgccgcaggctctaatgcgatcggcgacgctttccgcctagtccaaggtggttatgcccaagccatgatttgtggtggggctgaggcagcaattacaccattaggtgtggctgggtttgcggctgcaagggcgttatcaactcgcaatgatgacccagctcatgcttgtcgtccctttgaccgcgatcgcgatggatttgtcatgggtgaaggtgcgggaattctcattctggaagagctgcaacacgccataagtcgcggcgctcgcatttatgccgaaatcgttggttatggtatgacttgcgatgcctaccacatgacatccccagtccctggcggcgaaggagcctccagagccatccaactggcactcaaagacgcaaacatcaccccagaacaagttagctacattaatgctcacggtaccagcacctcagcaaacgataccaccgaaaccgcagcgattaaacgagcgctaggagaccatgcttataaaatagcagtcagctccaccaaatcgatgacaggtcatcttttgggtggttctggcggtattgaagctgtagccacagtgttggcaactgctcatgaccaaattccacctacaattaatattgaaaaccttgacccagattgtgacctagattacgtgcctgactctagtcgcgctcacaaagtccaggtagcattgtctaattcttttggatttggtggtcataatgtcacactagctttcaaaaagtacgtgtga

SEQ ID NO: 114605 - protein, 416 aa, Nostoc sp. PCC 7120
MTDYNRKRVVVTGVGAITPIGNTASEYWEGLLSGRNGIDYITHFDASSHDCRIAGEVKNFDPHEYLERKEAKRMDRFSQFAVAAAKQALVDSQLVINELNAEQVGVIIGSGVGGLKVMEDQQTIYLNRGPDRCSPFMIPMMIANMAAGLTAIHTGAKGPNNCTVTACAAGSNAIGDAFRLVQGGYAQAMICGGAEAAITPLGVAGFAAARALSTRNDDPAHACRPFDRDRDGFVMGEGAGILILEELQHAISRGARIYAEIVGYGMTCDAYHMTSPVPGGEGASRAIQLALKDANITPEQVSYINAHGTSTSANDTTETAAIKRALGDHAYKIAVSSTKSMTGHLLGGSGGIEAVATVLATAHDQIPPTINIENLDPDCDLDYVPDSSRAHKVQVALSNSFGFGGHNVTLAFKKYV

SEQ ID NO: 114606 - DNA, 1224 bp, Agrobacterium tumefaciens str. C58
  CDS (1)..(1224): transl_table=11
atgagacgagttgttgtcaccggcctcggtattgtttcctccatcggcggtgatgccgctgaggtcaccgcgtcgctgcgccaagccaagtccggcatttcattttcgccggattttgccgagcacggtttcaaatgccaggtctggggcaagccctctctcgacccgaccgatctggtcgaccgccgcgccatgcgcttcctgtcgcagggtggcgcgtggaaccatgtggccatgaagcaggcgatcgccgattccggtctcgaagagagcgatatcagcggcaatgagcgcactggcatcatcatgggttcgggcggcccttccacccgcaccatcgtcgaagccgccgatattacgctcaagaacaacagcccgaagcgcatcggccccttcgccgtgccgaaggccatgtcatcgaccgcctcggccacgctcgcgacctggttcaagatccacggcgtcaactattcgatctcgtcggcctgctccacctcggcgcattgcatcggcaacgccgccgagatgatccagtggggcaaacaggacgtgatgtttgcgggcggccatgaggatctcgactggtcgatgtccaacctcttcgacgccatgggcgcaatgtcgtccaaatacaatgaaacacccggcgtcgcctcgcgcgcctatgacgtcaaccgcgacggtttcgtgatcgccggcggtgcaggcgtgctggttctcgaagaactggaacatgccaaggcgcgcggcgccaagatttacgccgagatcgtcggttatggcgcaacctctgatggttacgacatggtggctccttcaggcgaaggcgcgatccgctgcatgcgtcaggcgcttgccaccgtcaagggtgacattgactacatcaacacccacggcacctccacgccggttggcgacagcaaggaaatcggcgcgatccgcgaagtcttcggcgacaagattccgcatatccagtcgaccaagtcgctcaccggccattcgcttggtgctgctggcgtgcaggaatcgatctacggcctgttgatgatgcaggaacgtttcatcggcgaaagcgcgcatatttccgaactcgatccggaatttgcgggcgttccgattgttcgcagccgcatcgacgacgccaagatcgacaccatcctttccaattccttcggcttcggcggcaccaacgccacgctcgtcttccagcgtcataacggataa

SEQ ID NO: 114607 - protein, 407 aa, Agrobacterium tumefaciens str. C58
MRRVVVTGLGIVSSIGGDAAEVTASLRQAKSGISFSPDFAEHGFKCQVWGKPSLDPTDLVDRRAMRFLSQGGAWNHVAMKQAIADSGLEESDISGNERTGIIMGSGGPSTRTIVEAADITLKNNSPKRIGPFAVPKAMSSTASATLATWFKIHGVNYSISSACSTSAHCIGNAAEMIQWGKQDVMFAGGHEDLDWSMSNLFDAMGAMSSKYNETPGVASRAYDVNRDGFVIAGGAGVLVLEELEHAKARGAKIYAEIVGYGATSDGYDMVAPSGEGAIRCMRQALATVKGDIDYINTHGTSTPVGDSKEIGAIREVFGDKIPHIQSTKSLTGHSLGAAGVQESIYGLLMMQERFIGESAHISELDPEFAGVPIVRSRIDDAKIDTILSNSFGFGGTNATLVFQRHNG

SEQ ID NO: 114608 - DNA, 1263 bp, Agrobacterium tumefaciens str. C58
  CDS (1)..(1263): transl_table=11
atgaggcgtgtcgttatcaccggtaccggcatggtatctcctcttggatgcggaacggaagtgacctgggagcggctgttggccggccagaatggtgcccgtctcgtgactgaattcgaggtcgaagacctgcccgcaaagatcgcctgccgcattcccgtcggcgacggctccaacggcaccttcaatgccgatgactggatggagcccaaggaacaacgcaaggtcgatcctttcattctctacggcatggctgccgccgacatggcgcttgccgacgcaaactggcatccggaaacggacgacgaccagatcgctaccggcgttctgatcggctccggcattggcggtctggaaggcattgtcgaggcgggttacacgctgcgcgacaagggcccacgccgcatttctccattcttcattcccggccgtctgatcaacctcgtatccggtcaggtttccattcgccacaagctgcgtggaccgaatcattccgtggtaacggcctgctcgaccggcgcacacgctatcggcgacgccgcccgactgatcgcgcttggcgatgccgaggtcatggtcgccggtggtgccgaatcgccggtctgccgcatttcgctcgccggatttgccgcctgcaaggcgctctccacccagcacaatgacgatccgcaaaaggcctcgcgcccctatgatcgcgaccgcgacggtttcgtcatgggcgagggtgccggcatcgttgttctcgaagaactcgaacacgccaaggcgcgcggcgcgaagatttacgccgaagtcgtcggttatggcctgtccggcgatgccttccacatcacggcgccgtccgaggatggcgacggtgcgtatcgctgcatgtccatggcgctgaagcgcgctggcctcacgcctgacgatatcgactatatcaacgcccacggcacctccaccatggccgacacgatcgagcttggcgcggtcgaacgtctggtcggcgaatctgctccgaagatttccatgtcttccaccaagtcggccaccggccatcttctcggcgctgccggcgcaatcgaggcgattttcgcgacgcttgcgatccgcgacaatatcgttccgccgacgctcaacctcgacaatcccgatgtcgagacgaagatagacctcgtgccgcacaaggcccgcaagcggcaggtcaatgtggcgctttcgaattccttcggtttcggcggcaccaacgcatcgctcgtgctgcgtcgttacgaagcataa

SEQ ID NO: 114609 - protein, 420 aa, Agrobacterium tumefaciens str. C58
MRRVVITGTGMVSPLGCGTEVTWERLLAGQNGARLVTEFEVEDLPAKIACRIPVGDGSNGTFNADDWMEPKEQRKVDPFILYGMAAADMALADANWHPETDDDQIATGVLIGSGIGGLEGIVEAGYTLRDKGPRRISPFFIPGRLINLVSGQVSIRHKLRGPNHSVVTACSTGAHAIGDAARLIALGDAEVMVAGGAESPVCRISLAGFAACKALSTQHNDDPQKASRPYDRDRDGFVMGEGAGIVVLEELEHAKARGAKIYAEVVGYGLSGDAFHITAPSEDGDGAYRCMSMALKRAGLTPDDIDYINAHGTSTMADTIELGAVERLVGESAPKISMSSTKSATGHLLGAAGAIEAIFATLAIRDNIVPPTLNLDNPDVETKIDLVPHKARKRQVNVALSNSFGFGGTNASLVLRRYEA

SEQ ID NO: 114610 - DNA, 1299 bp, Agrobacterium tumefaciens str. C58
  CDS (1)..(1299): transl_table=11
atgcgtcgtatcgttgtaacaggaatgggagccgtcagccctcttggcgcgaatgtggatatctcatggtcgcggctccttgctggccaaagcgggatccggcgactgaccgacgatgtcgtcggagatcttcctgcgaaagtgggaggcgttgtcccttctctcgccgaagacccagaaagaggattcgatccggacaggatcattgcacccaaggatcagcgcaaggtcgaccgcttcatcatcttcgcgctggcggcggcggaagaagcgctcgtgcaggcaaactggaagccggtctcgaatgaagacaggttgcgaaccgcgacaatcatcgcatccggcatcggcggtttccctgccatcacggaagccgtgcgaaccgttgatcaacgcggtgtacgccgcctctctcccttcacgataccgtcgttcctcgtcaatctcgcagccgggcaagtctcgatccgccacggtttcaaaggtccgctgggagcacccgtaacggcgtgtgctgccggcgttcaggcgatcggcgacgctgcacggcttatccggtccaatgaagccgacattgcggtttgcggtggaacggaagcttgcatgaacatcgtcagcctcggcggcttcgcggcggcaaggtcgctttccaccggtttcaacgagacgccgaccaaggcgtcgcgtcccttcgataccgcgcgtgacggcttcgtcatgggtgaaggcgcgggcgtactcgtcatcgaggcactcagccacgctctcgcccgcggagccaccccgattgccgaactcgttggatacggcacgacagccgacgcccaccacatcacgtcaggccccgaggatggaagtggggcacgcagggccatggagattgccatcgcgcaagcgggcatcgcccctcatgagattggtcatctgaacgcgcatgcgacatcgacgccggttggggacctcggagaaatcagggccatcaagagtgtgtttgggcaacgaaagtcggttgctgtcagtgggaccaagtcggcgacggggcacctgcttggcgcggccggcgggctggaagccatcttcacgattctagcgctcaaaaatcggatcgcccctccgacactgaacctgaacgcgccggatacggaatcggacgggatcgattttgttgcaaacctggcacgatccctggacgctgaatatgccatatccaacggcttcggttttggcggcgtcaatgccagcgttcttttccgacgttggccaaaggcaagcaatagcgggatatcctccgtgcgctga

SEQ ID NO: 114611 - protein, 432 aa, Agrobacterium tumefaciens str. C58
MRRIVVTGMGAVSPLGANVDISWSRLLAGQSGIRRLTDDVVGDLPAKVGGVVPSLAEDPERGFDPDRIIAPKDQRKVDRFIIFALAAAEEALVQANWKPVSNEDRLRTATIIASGIGGFPAITEAVRTVDQRGVRRLSPFTIPSFLVNLAAGQVSIRHGFKGPLGAPVTACAAGVQAIGDAARLIRSNEADIAVCGGTEACMNIVSLGGFAAARSLSTGFNETPTKASRPFDTARDGFVMGEGAGVLVIEALSHALARGATPIAELVGYGTTADAHHITSGPEDGSGARRAMEIAIAQAGIAPHEIGHLNAHATSTPVGDLGEIRAIKSVFGQRKSVAVSGTKSATGHLLGAAGGLEAIFTILALKNRIAPPTLNLNAPDTESDGIDFVANLARSLDAEYAISNGFGFGGVNASVLFRRWPKASNSGISSVR

SEQ ID NO: 114612 - DNA, 1281 bp, Schizosaccharomyces pombe 972h-
  CDS (1)..(1281)
atgaaacgtgtggtaataactggactgggggccgtaacccctctaggcaatggagttaaaaccaattggcgaaatctaattcaaggaaaatcaggtatcgtatctcttaaaggatttcctgagtatgagcaaataccaagcaaagttgctggagtgataccaaggggaaaagaaaaggaagagtggaatgtattagactacgttgaccaagggaaattacgtgaagtagctacttttacccagttagctctcacttctgcagctgaagcattaaaagatgcaaggtggattgacatagatgaacaagaaaagctagcaacgggagtttgctttggaactggcataggaaatcttgacgatgctttaaatgaaaacggtgtattaaataaggctggaataagaaaagtttcaccgagggtcatttctaaaatactaattaatatgccagcagggtatatttcacaaagatatggttttactgccttaaatcacacaacaactacagcatgtgcagcaggttgtcatgctataggagatgccttcaattttataaagcttggacatgcagatgttattattgccggtggttctgaatcctgtattaatccgctaaccgttgctggtttttcaaaagcaagaagcttgtcaaccaagttcaacgataatccaaaagcggcctcaagaccgtttgatgcaaatcgtgatggatttgtaattggagaaggctccgctgccttagtccttgaggaattggagcatgccaaaaatcgaaatgctcatatatatgctgaaatagtcggttatggtttggcatctgattcatatcatattacagctccaaatccaaatggggatgctgcttactatgctatgaagcgttccttaaaacaagctggtctttctgcaagtcaattggattatatcaatgctcatgcaacttcaaccaagcttggagatgtagcagaaagcatagcgattactaggttactttgtgatgtgaaccggaatcctgaggcatttcctgtatctagtagcaaaggctctattggccatcttttaggagcagcaggtgcaatcgaatctgtctatacggtcttgactgtccaaaagggcgtcttaccccctacgttaaatttcgaatactctgatattcctcagcagtttcagtgcgattatgtgccgaatgtggctaaagagagccgcattaatgttgctttgtcaaacagctttggatttggtggtaccaatgcgtctttatgctttaagaaattcttacagtaa

SEQ ID NO: 114613 - protein, 426 aa, Schizosaccharomyces pombe 972h-
MKRVVITGLGAVTPLGNGVKTNWRNLIQGKSGIVSLKGFPEYEQIPSKVAGVIPRGKEKEEWNVLDYVDQGKLREVATFTQLALTSAAEALKDARWIDIDEQEKLATGVCFGTGIGNLDDALNENGVLNKAGIRKVSPRVISKILINMPAGYISQRYGFTALNHTTTTACAAGCHAIGDAFNFIKLGHADVIIAGGSESCINPLTVAGFSKARSLSTKFNDNPKAASRPFDANRDGFVIGEGSAALVLEELEHAKNRNAHIYAEIVGYGLASDSYHITAPNPNGDAAYYAMKRSLKQAGLSASQLDYINAHATSTKLGDVAESIAITRLLCDVNRNPEAFPVSSSKGSIGHLLGAAGAIESVYTVLTVQKGVLPPTLNFEYSDIPQQFQCDYVPNVAKESRINVALSNSFGFGGTNASLCFKKFLQ

SEQ ID NO: 114614 - DNA, 1242 bp, Fusobacterium nucleatum subsp. nucleatum ATCC 25586
  CDS (1)..(1242): transl_table=11
atgaaaagagttgttgtaacaggattaggacttatttcttcattaggaataggtttagaagaaagttggaaaaaacttatagatggtgaaacaggaatagatttaataacttcttatgatacaacagaccaaccagttagaatagctggggaagtaaaaggttttgaaccaactgattatggaatagaaaaaaaagaagttaaaaaattagcaaggaatactcaatttgctttaatagccacaaaaatggctttggaagatgctaattttaaaatagatgaaactaatgcagatgatgtaggagttcttgtatcagctggtgttggtggaattgaaataatggaagaacaatataagaatatgttggaaaagggacctaaaagaatatctcctttcacaattccagcaatgatagaaaatatggcagctggaaacatagctatatactatggagcaaaaggacctaataaatcaatagttactgcttgtgcatcaggaactcactcaataggagacggttttgatttaattcgtcatggtagagcaaaagctatgatagttggaggaacagaagcaagtgtaactaaattctgtataaattcatttgctaatatgaaagctctttcaactagaaatgaaactcctaaaacagcttcaagaccattttcaaaagatagagatggttttgtaatgggagaaggagcgggaatcttaatattagaagaattagaaagtgctttagcaagaggagcaaaaatatatgcagaaatggtaggatatggagaaacttgtgatgcaaatcatatcactgcaccaatagaaactggagaaggagcaacaaaagctatgagagctgcattaaaagatgcaaatattcctcttgaagatgtgacatatataaatgctcatggaacttcaactcctacaaatgatgttgtagaaacaagagcaataaaagcactatttggtgataaagcaaaagacttatatatctcttctacaaagggagcaactggacatggactaggagctgctggaggaattgaaggagtaattattgcaaaagcaatagcagatggaataatacctcctacaatcaatttacatgaaacagaagaagaatgtgatttaaactatgtacctaacaaagctataaagacagatgtaaaagtagcaatgtctaactcactaggttttggaggacataactcagttattgttatgaaaaaatttgaaaaataa

SEQ ID NO: 114615 - protein, 413 aa, Fusobacterium nucleatum subsp. nucleatum ATCC 25586
MKRVVVTGLGLISSLGIGLEESWKKLIDGETGIDLITSYDTTDQPVRIAGEVKGFEPTDYGIEKKEVKKLARNTQFALIATKMALEDANFKIDETNADDVGVLVSAGVGGIEIMEEQYKNMLEKGPKRISPFTIPAMIENMAAGNIAIYYGAKGPNKSIVTACASGTHSIGDGFDLIRHGRAKAMIVGGTEASVTKFCINSFANMKALSTRNETPKTASRPFSKDRDGFVMGEGAGILILEELESALARGAKIYAEMVGYGETCDANHITAPIETGEGATKAMRAALKDANIPLEDVTYINAHGTSTPTNDVVETRAIKALFGDKAKDLYISSTKGATGHGLGAAGGIEGVIIAKAIADGIIPPTINLHETEEECDLNYVPNKAIKTDVKVAMSNSLGFGGHNSVIVMKKFEK

SEQ ID NO: 114616 - DNA, 1230 bp, Thermoanaerobacter tengcongensis MB4
  CDS (1)..(1230): transl_table=11
atgaacagagtagttgtaacaggattgggagtaatcagccctttaggcaacactgttgaaaagttctggaattcactgataaatggagaaaatggaataggacttgtcaccaaatttgatacctctgaatttcccacaaaagtggctgctgaagtgaaagactttgaccctactttatacatagacaaaaaagaagccagaagaatggataggtttatacagtttgctgtggcaagcacaaaacttgcactggaggatgcggggattgaacttgacaaagtagacttaaatagatttggagtgatttacgggacaggcatagggggaattgagacctttgaaaatcagatgaaagtgatgtacgaaaaaggccccagcaaagtaagtccctttttcatccctatgatgatagccaatatggcagctgggcagatagccataacctttggccttaagggaatcaatgagactatagtaaatgcatgtgcttccagcactaacgccataggagaagcttttaaagccattcaaagaggagatgcagatttaatagtgactggaggtacagaagctgcgataactcccatgtcctttgcaggtttttgcgctatgaaagctatgtccacaaatcctgacccttccactgcttcaaggccctttgatttgaatagagatggatttgttatgggagaagggtctgctacgttgattctggagtcattggaacatgctcaaaaaagaggggcgaagatatacgcagagataatagggtatggcgctacagatgatgcttaccacataacagctccagctccagaaggggaaggggcagcgagagcgatggaagcagcccttaaagacggaaaagtaagttatgatatggtagactacatcaatgcccatggaacctctacagagtacaacgataagttcgaaactatggcaataaagaaagttttcaaagaccacgcttataagctctgcgtaagctctaataagtccatgttgggacatttgttaggagcagcaggggcagtagaagctgtagctacggtgctgaccataactcacgggatagtgcctccaaccattaattaccagactcccgatccagagtgcgatttaaactacgttccaaacaaggcaatagaaagggaagtgaattacgccatttctaactcttttggttttggcggacacaatgctactttgctctttaaaaaattttga

SEQ ID NO: 114617 - protein, 409 aa, Thermoanaerobacter tengcongensis MB4
MNRVVVTGLGVISPLGNTVEKFWNSLINGENGIGLVTKFDTSEFPTKVAAEVKDFDPTLYIDKKEARRMDRFIQFAVASTKLALEDAGIELDKVDLNRFGVIYGTGIGGIETFENQMKVMYEKGPSKVSPFFIPMMIANMAAGQIAITFGLKGINETIVNACASSTNAIGEAFKAIQRGDADLIVTGGTEAAITPMSFAGFCAMKAMSTNPDPSTASRPFDLNRDGFVMGEGSATLILESLEHAQKRGAKIYAEIIGYGATDDAYHITAPAPEGEGAARAMEAALKDGKVSYDMVDYINAHGTSTEYNDKFETMAIKKVFKDHAYKLCVSSNKSMLGHLLGAAGAVEAVATVLTITHGIVPPTINYQTPDPECDLNYVPNKAIEREVNYAISNSFGFGGHNATLLFKKF

SEQ ID NO: 114618 - DNA, 1290 bp, Streptomyces coelicolor A3(2)
  CDS (1)..(1290): transl_table=11
gtgagctcgaccaatcgcaccgtggtcgtcaccggtatcggcgcaaccacaccgctgggtggcgacgcagcctcgacctgggagggtctggtcgccggcaggtccggcgtccggcccctggagcaggagtgggccgccgaccaggcggtccgtatcgccgcgccggccgccgtcgacccctccgaggtcatcccgcggccgcaggcccgccgcctggaccgctcggcgcagttcgcgctgatcgcggcgcaggaggcctggaaggacgccgggtacgccggcaaggcgggcgagagccccgccgaggacggcgcggcccacgtcgaccccgaccggctcggtgcggtcatcgcctccggcatcggcggcgtgaccacgctgctcgaccagtacgacgtgctgaaggagaagggcgtccgccgcgtctccccgcacaccgtccccatgctgatgccgaacggtccctccgccaacgtcggcctggccgtgggcgcccgcgcgggcgtgcacaccccggtctcggcctgcgcgtcgggcgccgaggccatcggctacgccatcgagatgatccgcaccggccgcgccgacgtcgtcgtcgcgggtggcacggaggcggcgatccacccgctgcccatcgccgcgttcggcaacatgatggcgatgtccaagaacaacgacgacccgcagggcgcctcccgccccttcgacacggcgcgcgacggcttcgtcctcggcgagggcgccggcgtcctggtcctggagtccgccgagcacgccgccgcgcgcggcgcccgcgtctacgcggaggcggtcggccagggcatctccgccgacagccacgacatcgtgcagccggagccggagggccgcggcatctccgccgccctgcagaacctgctggacggcaacgacctggacccggccgagatcgtgcacgtcaacgcgcacgccacctcgacgccggccggtgacatcgccgagctgaaggcgctgcgcaaggtcctcggcgacgacgtcgaccacatggcggtctccggcaccaagtcgatgaccggtcacctgctcggtggcgcgggcggcgtggagtccgtggcgaccgtgctcgcgctgtaccaccgggtggcgccgccgaccatcaacgtcgagaacctcgacccggaggccgaggccaacgcggacatcgtccgcggggaggcccgcaagctcccggtggagggccgtatcgccgcgctgaacgactcgttcggcttcggcgggcacaacgtggtgctcgcgttccggtcggtctga

SEQ ID NO: 114619 - protein, 429 aa, Streptomyces coelicolor A3(2)
MSSTNRTVVVTGIGATTPLGGDAASTWEGLVAGRSGVRPLEQEWAADQAVRIAAPAAVDPSEVIPRPQARRLDRSAQFALIAAQEAWKDAGYAGKAGESPAEDGAAHVDPDRLGAVIASGIGGVTTLLDQYDVLKEKGVRRVSPHTVPMLMPNGPSANVGLAVGARAGVHTPVSACASGAEAIGYAIEMIRTGRADVVVAGGTEAAIHPLPIAAFGNMMAMSKNNDDPQGASRPFDTARDGFVLGEGAGVLVLESAEHAAARGARVYAEAVGQGISADSHDIVQPEPEGRGISAALQNLLDGNDLDPAEIVHVNAHATSTPAGDIAELKALRKVLGDDVDHMAVSGTKSMTGHLLGGAGGVESVATVLALYHRVAPPTINVENLDPEAEANADIVRGEARKLPVEGRIAALNDSFGFGGHNVVLAFRSV

SEQ ID NO: 114620 - DNA, 1224 bp, Streptomyces coelicolor A3(2)
  CDS (1)..(1224): transl_table=11
atgaccgacccctccctcgccgtgaccgggctgggtctggtgaccgcggccggcatgggcgtcgacgccacctgggagggggtgttgcgcggccggtcggcgggcgccagggacgagcggctcgccggactgcccgtggacatcgcctgtgcggtgccgggcctgcaaccggcgcgtcacgtggaccggcgcagcgtcctgatccacgaccgcttcgtccagctggcgatcgtggccgcccgggaggccgtggccgacgccggactcgacccgctgacctgggacggcgcccgggtgggcgtggtcgtcggctgcgggctcggcggggtgacgacgtgggagacccagcaccggcgcctgctggagcgcggccccgaagcggtgtccgcgctcctggtgccgatgctggtgcccaacatggcggccgggcacctcgcgatggacctgcgtgcgctgggcccgaacctggtgacggcgaccgcctgcgcctcgggcggcaccgcgctgggcaccgcggcccggctgctgcgggacgggacgtgcgacatcgtcgtggccggtggcaccgaggcgggcgtcagccccctcatggtcaccggtttcgcgcagatgggcgcgctgtcgcgccgggtcgacgatccggcggcggcgtccaggcccttcgacgccgaccgggacggcttcgtgatcggtgagggcagcggcatgctcgtcctggagcgcgcggcggacgccgaggcgcgcggcgcgacggtgcgcgcgcggctgctgggccacggcgcgtcggcggacgcccaccacgtcaccgcgcccgacccggagggcgccggcgccctgcgggcgatggaggcggccctcgcccaggcgggcgtcaccggccgcgacatcgaccacgtgaacgcgcacggcacctcgaccccgctcaacgacgcggtggaggccgcggtgctgggccggctgctgggcgaccgggcgaccgtgacctcggccaagggcgtcctcgggcacacgctgggcgccgccggtgcgatcgaggcggcgctgaccgtgctcagcatcgagcgctccaccgttcccccgaccgcgaacctgcgacggcgggacccggccgtcgacctggacgtggtcgccgacgctccgcgggagcagaaggtggagctggcgatgagcaactccttcggcttcggcgggcagaacgcggtcctggtcttcgcctccccgtga

SEQ ID NO: 114621 - protein, 407 aa, Streptomyces coelicolor A3(2)
MTDPSLAVTGLGLVTAAGMGVDATWEGVLRGRSAGARDERLAGLPVDIACAVPGLQPARHVDRRSVLIHDRFVQLAIVAAREAVADAGLDPLTWDGARVGVVVGCGLGGVTTWETQHRRLLERGPEAVSALLVPMLVPNMAAGHLAMDLRALGPNLVTATACASGGTALGTAARLLRDGTCDIVVAGGTEAGVSPLMVTGFAQMGALSRRVDDPAAASRPFDADRDGFVIGEGSGMLVLERAADAEARGATVRARLLGHGASADAHHVTAPDPEGAGALRAMEAALAQAGVTGRDIDHVNAHGTSTPLNDAVEAAVLGRLLGDRATVTSAKGVLGHTLGAAGAIEAALTVLSIERSTVPPTANLRRRDPAVDLDVVADAPREQKVELAMSNSFGFGGQNAVLVFASP

SEQ ID NO: 114622 - DNA, 1236 bp, Xanthomonas campestris pv. campestris str. ATCC 33913
  CDS (1)..(1236): transl_table=11
atgagtcgtcgtgttgtcgttaccggcatgggcatggtgtcgccgctgggcaatgatctggccaccagttgggatgggatcatccacggtcgctcgggcattggcccgatcaggcagatcgatgcctcgcagttcaccaccaggatcgcgggcgagatcaagaatttcgatcccacccagtttgtgtccgccaaggacgtcaagaagatggattcgttcatccactacggtgtcggcgcctcgttcatggcgttggacgattccgggctggagatcaacgaaagcaatgccgaacgcgtgggcgccattctgggctccggtatcggcgggctgctcggcatcgaagagcagaccatcaaattgcatgagggcggcgcgcgcaagatttcgccgttctatgtgcccagcaccatcatcaacatgctgccgggccaggtgagcctgatcaaaggcctgaagggcccgacgttctcggccgtgtcggcctgcgccacctccaaccattcgatcggcactgcgatgcgcatgatccagcacggcgatgccgacgtgatgctggccggtggcgccgagcgcggttcgtccccaagttcggtgggcgggttctgcgccatgaaggcgatgtccacgcgcaacgacgaccccaccgctgcatcgcgtccgtgggacaagcagcgcgacgggttcgtgctgggtgacggcgccggcgtgctggtgctggaagagtacgaacacgccaaggcacgcggcgcgcgcatctatgcagagctggtcggtttcggtgccagttcggatgcgttccacatgactgcgcccagcgaagatggcgaaggcgcggcgcgcagcatggccgcggcgatgcgcgatgccaagctcaaccccgagcagatcggctacctcaacgcgcacggcacctccacgccgctgggcgatctggccgaaaccatggcgatgaagcgtgcgctgggcgaccacgcgtacaagaccatggtcagctcgaccaagtcgatgaccggccacctgctcggcgcggccggcggcgtggaagcgatcttctcggtgatggcgctgcataccggcatcattccgccgaccatcaacctggaagagcccagcgaaggctgcgatctggactacgtgccgaacgtggcgcgcgaggtgcaggtggatgcggtgatgtccaacggcttcggctttggcggcaccaacggcaccctggtgttcaagcgcatctga

SEQ ID NO: 114623 - protein, 411 aa, Xanthomonas campestris pv. campestris str. ATCC 33913
MSRRVVVTGMGMVSPLGNDLATSWDGIIHGRSGIGPIRQIDASQFTTRIAGEIKNFDPTQFVSAKDVKKMDSFIHYGVGASFMALDDSGLEINESNAERVGAILGSGIGGLLGIEEQTIKLHEGGARKISPFYVPSTIINMLPGQVSLIKGLKGPTFSAVSACATSNHSIGTAMRMIQHGDADVMLAGGAERGSSPSSVGGFCAMKAMSTRNDDPTAASRPWDKQRDGFVLGDGAGVLVLEEYEHAKARGARIYAELVGFGASSDAFHMTAPSEDGEGAARSMAAAMRDAKLNPEQIGYLNAHGTSTPLGDLAETMAMKRALGDHAYKTMVSSTKSMTGHLLGAAGGVEAIFSVMALHTGIIPPTINLEEPSEGCDLDYVPNVAREVQVDAVMSNGFGFGGTNGTLVFKRI

SEQ ID NO: 114624 - DNA, 1317 bp, Drosophila melanogaster
  CDS (1)..(1317)
atgcgagttttaggaaagtgcactgttttggtcaggcaaacccgcagcttatccacgccatctgggcgccgcagagtggtggtcacgggaagtggcgcagtcactccgctgggcaacaatggaccggattcttggcgacgcatcctggccggcgagtcggcaatttctcggctgagtgcggagtttaagggcttgccctgccaggttgcggctcaaatcccgagggaaaacctacagctggatcaacacctgaccaagtcggacattaagctgatgagccccgccacgcagcttgccgtattggcggctgaggaggccttgtcaaccggaaagctgtgccccaagcaattgagcgaggaggagcttgagcggttcggagtgtgcgtgggcatgggcatgttcgaccttgcagaggtctatggcgcctggaaccagctgcaacgaggttacaacagagtaagcccctttttcgtgcccaggctgctgcccagtatggcgtgtggtcacataagcatgcgacatggcttaagaggacctaaccactcggtgtccacggcctgcgccacaggtgcccatgccctgggcgatgccatgcgcttcattcgcagcggagatgccgacttgatgctggcggggagtggtgaggcctgcatagatccgctctccatcgctggattttgcagactgcgggctctgagcaccgcattcaacgataatccggcggttgcgtccagaccgtttgacaagtcccgggatggcttcgtgatgggcgagggcgcagctgtgctcttgctggaagaactggagcacgcccgcgctcggggagctcccattctagctgagattctgggctacggcttgtccggcgatgcctatcacataacgtcgcccagcgatgacggcgccggagccactcttgccatgaagcgggccatacaagatgctgggattgcaccagaggatgttacgtatgtaaatgcccacgcaacctccacgcccaccggggatcgcattgagtcacacgctataggtcgtgttttcggggcgcacactccgcaggtgagggtctcctccaccaagggagcacatggccacctgctgggctcctctggcaacctggaagcgctctttgtggtgctcgcctgcgcgaataacaagctgccgccctccatcaacattgagcacctcgatgtggacgtcaatgtggtcacgaaagctactgattggtcggcggaccaaaagcggcgtgttgccctcaagaattccttcggctttggaggaaccaatgcctccctctgcattgctagctacatttaa

SEQ ID NO: 114625 - protein, 438 aa, Drosophila melanogaster
MRVLGKCTVLVRQTRSLSTPSGRRRVVVTGSGAVTPLGNNGPDSWRRILAGESAISRLSAEFKGLPCQVAAQIPRENLQLDQHLTKSDIKLMSPATQLAVLAAEEALSTGKLCPKQLSEEELERFGVCVGMGMFDLAEVYGAWNQLQRGYNRVSPFFVPRLLPSMACGHISMRHGLRGPNHSVSTACATGAHALGDAMRFIRSGDADLMLAGSGEACIDPLSIAGFCRLRALSTAFNDNPAVASRPFDKSRDGFVMGEGAAVLLLEELEHARARGAPILAEILGYGLSGDAYHITSPSDDGAGATLAMKRAIQDAGIAPEDVTYVNAHATSTPTGDRIESHAIGRVFGAHTPQVRVSSTKGAHGHLLGSSGNLEALFVVLACANNKLPPSINIEHLDVDVNVVTKATDWSADQKRRVALKNSFGFGGTNASLCIASYI

SEQ ID NO: 114626 - DNA, 1242 bp, Chlorobium tepidum TLS
  CDS (1)..(1242): transl_table=11
atgaaaagagtcgtcgtcaccggaatcggggttctgtcgccaatcggcctttcggctggggcattctggaacgccctcatggagggaaaaagcggcgctgcaccgatcacctatttcgatacgaccaatttcgcgaccaccttcgcctgcgagctcaagaatttcaaggccgatgagtacatcgaccggaaatccgcggatcgcatggatccatactgtcagtacggcgttatctctgccgaacaggcgctgaaagattccgggcttgacctgaccgcgatcgatccgaccaggatcggcgtcgtgcacggctcgggcatcggcggcatgacggtctacgaccagcagtttcgccagtatctggaacgcggcccccgcagggtcagcccgttcttcattccgatgctcattcccgacatcgccgccggacagatttcgatccgcaacggtctgatggggccaaactatgcgacagcatccgcctgcgcgacctccctgcacgctatcatggacgccgtcatgctcctgcagatgggcatggccgactacatggtctgcggcggctcggaagcaccgatcacgcagatgagcgtggctggcttcaactcggccaaagcgctctcgacccgcaacgacgctccgacaaaagcctcacgcccgtacgatgtggatcgcgacggtttcgtcatgggtgaaggcgccggttcgctggtgatcgaaacctacgagtcggctgtgaagcgcggcgcaaaaatctacgcagagatcgtcggcatgggcgcgtctgccgatgcgtatcacctcaccgctccgcacccggagggtcttggcgcttgcagcgcgatgaccaccgccctgaacatggcgggcatcaccccggacaagatcgactacatcaacacccacggcaccgccacgccgcttggcgatctggcggaaatcaaggcaatcaagaaggtgttcggcgagcacgcatcaaaactcagcatcagctcgaccaagtcgatgaccggtcacctgcttggtgcggcgggcgtggtcgaatcgatcgcctgcatccttgcgctgcagaaccagaccgttcctccaaccatcaacctcgacaatgtcgatcccgagatcgatgtggatgtgacgccgaacgtcccgaaacagcgctcgattgagtatgcgctgaacaacggtttcggattcggcgggcacaacggctgcctgatcttcaggaaggctccggccgcctga

SEQ ID NO: 114627 - protein, 413 aa, Chlorobium tepidum TLS
MKRVVVTGIGVLSPIGLSAGAFWNALMEGKSGAAPITYFDTTNFATTFACELKNFKADEYIDRKSADRMDPYCQYGVISAEQALKDSGLDLTAIDPTRIGVVHGSGIGGMTVYDQQFRQYLERGPRRVSPFFIPMLIPDIAAGQISIRNGLMGPNYATASACATSLHAIMDAVMLLQMGMADYMVCGGSEAPITQMSVAGFNSAKALSTRNDAPTKASRPYDVDRDGFVMGEGAGSLVIETYESAVKRGAKIYAEIVGMGASADAYHLTAPHPEGLGACSAMTTALNMAGITPDKIDYINTHGTATPLGDLAEIKAIKKVFGEHASKLSISSTKSMTGHLLGAAGVVESIACILALQNQTVPPTINLDNVDPEIDVDVTPNVPKQRSIEYALNNGFGFGGHNGCLIFRKAPAA

SEQ ID NO: 114628 - DNA, 1242 bp, Yersinia pestis KIM
  CDS (1)..(1242): transl_table=11
gtgtctaagcgtcgagttgttgtgactggactgggcatgttgtctcctgtcggtaatacagtcgaatccacatggaaagctgttcttgccgggcagagtggcatcagcctgatcgaccatttcgatactagtgcctacgcaacgcgatttgctggcttagtaaaagattttaattgtgaagattacatttcgcgtaaagatgcacgcaaaatggatgctttcattcagtacggtgttgctgctggcatgcaagccatgcaagacgccgggcttgacattacagaagccaacgcttcccgtattggtgccgctatcggttctggtattggcgggctgggtctgattgaagaaaaccacaccgcattggtgaacggtgggccacgtaaaattagcccattctttgtgccttcaaccattgtgaacatgattgctggtcatctgactatcatgtatggcctgcgtggaccaagcatatctattgctaccgcttgtacttctggcgtacataatatcggtcacgcggcacgtatcattgcttataatgatgctgatgtcatggtggctgggggtgctgaaaaagccagtacaccactaggtgtcggcggttttggtgcagcccgcgcattgtctacccgtaacgataacccacaagcagcaagtcgcccgtgggataaagaccgtgatggtttcgttctgggtgatggtgccggcatgatggtgttggaagagtacgaacacgcgaagaagcgtggtgcaaaaatctatgctgaagttgttggttttggtatgagcagcgatgcctaccatatgacctctccgccggaagacggttcaggagccgctttggccatggtgaatgcattacgtgatgctggcatcacaacctcgcaaattggttatattaatgcccacggcacatcaactcctgctggcgataaagccgaaacgcaggccgttaagtctgtatttggtgaagatgcctataaagttatggtcagttccaccaaatccatgactgggcacttattgggtgcagctggtgccgtagagtctatctttaccgtgttggcgctgcgtgatcaggctattcctgcaacgatcaacttggataacccagatgaaggttgcgatttggattatgttccgcatgatgcgcgtcaagtaaaagatatggaatacaccctgtgtaattcctttggtttcggcggcactaacggctctttggtattccgtaaggtataa

SEQ ID NO: 114629 - protein, 413 aa, Yersinia pestis KIM
MSKRRVVVTGLGMLSPVGNTVESTWKAVLAGQSGISLIDHFDTSAYATRFAGLVKDFNCEDYISRKDARKMDAFIQYGVAAGMQAMQDAGLDITEANASRIGAAIGSGIGGLGLIEENHTALVNGGPRKISPFFVPSTIVNMIAGHLTIMYGLRGPSISIATACTSGVHNIGHAARIIAYNDADVMVAGGAEKASTPLGVGGFGAARALSTRNDNPQAASRPWDKDRDGFVLGDGAGMMVLEEYEHAKKRGAKIYAEVVGFGMSSDAYHMTSPPEDGSGAALAMVNALRDAGITTSQIGYINAHGTSTPAGDKAETQAVKSVFGEDAYKVMVSSTKSMTGHLLGAAGAVESIFTVLALRDQAIPATINLDNPDEGCDLDYVPHDARQVKDMEYTLCNSFGFGGTNGSLVFRKV

SEQ ID NO: 114630 - DNA, 1263 bp, Thermosynechococcus elongatus BP-1
  CDS (1)..(1263): transl_table=11
atggcaaaggcgcatcaaaaacgggtcgttgtcaccgggatgggggcgattacccccctcggcaacacccttgcggagtattgggaaggattaatggccggtcgcaacggcattgattacatcacggcttttgatgccagtcgtcatgactgccgcattgcggctgaggtgcgtggctttgatcccaccctctacatggatcgcaaagatgccaagcgcatggatcgctttgctcaatttgccgtggccgccagtaagcaagcccttgcggatgcccaattgaccattgacgagggcaatgccactgacattggcatcattattgggactggtgtggggggtctaaaggtgatggaggatcagcaggaggtctatctcactagggggcccgatcgctgtagtccttttatgatcccaatgatgattgccaatatggccgcaggactcaccgccattcacaccggtgccaagggccccaattcctgttcggtaaccgcctgtgcagcaggttccaatgccattggcgatgccttccgcatggtgcaacacggttacgccaaggcgatgatctgtggtgggacagaggcggcgattactcccctatcggtggctggttttgcggcagctcgtgccctttccacccgcaatgatgacccccaccatgccagccgtccctttgacctcaaccgcgatggctttgtccttggggaaggggcaggcatcttgatcctggaagaattggagtttgcccttgcccggggagcacgcatctatgcggaaatggtgggctacggcttgacctgtgatgcctaccacatgactgctccctcaccggggggagaaggggcggcccgtgccattgaagcctgcctcaaggatgcgcagattgctccggatcaggtgagctatatcaacgcccacggtaccagtacccccgccaacgacagtacggaaactgccgccattaaacgtgcccttggcgaagaaaatgcgcgtcgcgttcccgtgagttcgacaaaatccatgacaggacacctgctggggggatcaggggggatcgaggcgatcgcgacggtaatggccatagcccacgatcgcatcccccctacaattaacttggagcaaccggatcccgcctgcgatctggactatgttccccatcagagccgggcctgtccggtgacggtggctttgtccaactcctttggctttggtgggcacaacgtcacgttggccttccgcaagtttactcccgacctttaa

SEQ ID NO: 114631 - protein, 420 aa, Thermosynechococcus elongatus BP-1
MAKAHQKRVVVTGMGAITPLGNTLAEYWEGLMAGRNGIDYITAFDASRHDCRIAAEVRGFDPTLYMDRKDAKRMDRFAQFAVAASKQALADAQLTIDEGNATDIGIIIGTGVGGLKVMEDQQEVYLTRGPDRCSPFMIPMMIANMAAGLTAIHTGAKGPNSCSVTACAAGSNAIGDAFRMVQHGYAKAMICGGTEAAITPLSVAGFAAARALSTRNDDPHHASRPFDLNRDGFVLGEGAGILILEELEFALARGARIYAEMVGYGLTCDAYHMTAPSPGGEGAARAIEACLKDAQIAPDQVSYINAHGTSTPANDSTETAAIKRALGEENARRVPVSSTKSMTGHLLGGSGGIEAIATVMAIAHDRIPPTINLEQPDPACDLDYVPHQSRACPVTVALSNSFGFGGHNVTLAFRKFTPDL

SEQ ID NO: 114632 - DNA, 1239 bp, Oceanobacillus iheyensis HTE831
  CDS (1)..(1239): transl_table=11
ttgaataagcgagttgttattacgggactaggagcattaagcccagtgggcaataatgtagatgaaatgtgggaaagtgttacgacaggaaaatcaggaatagattttgttacaaaggtggataaagatttatttccagcaaaggtagcggcagaagtgaaaaactttgatcctacactgtatatggataaaaaagacgcacgtaaaatggatccatttacacaatatgcagttgctgctgctaaaatggctgtagaagatgctaatttaaccattaatgaagcgaacgctgaacgagtaggtgtatggattggatctggtattggtggtatgaagacttgggaagaccaacataccaagttcatggagaaaggcgcaaaacgcgtaagtcctttctttgtaccgatgatgattccagatatggctgctggtcaggtttcgattcaattaggagcgaagggaattaattcttgttcggttacagcatgtgcatctggtgccaattctatcggtgatgctttcaaggctattcagcgtggagatgcagatattatgatttcgggcggtacagaggctccgatatcagatatggcattcgctggattctcttcttcaaaagcgttatctacaaatgaggatccacaaaaagcaagtagaccttttgataaaaatcgtaacggatttgttatgggagaaggagcagggatcttgatattagagtctttagaatctgccctgcaaagagatgcgacgatttatggagagatagtaggatatggtgccactggagacgcttatcatatcactgcgcctgcagagaatggcgagggtgcaacccgagcaatgcaaatagcgttaaaagatgctaatctagaaccttcggatgtacagtatgtgaatgctcatggaacaagcacagatttaaatgataaatatgagacgcaagcaatcaaagctgtatttggtgaccatgcaagtgatttagcaatttcgtctacgaagtcgatgactggccacttattaggagctgctggtggaattgaagcggtaatatctattaaagcaattcaagatagtataattccgccgacgattaattatgaaacgcctgatccagattgtgatttggattatgtaccaaatgaagcaagaaaacaaacagtagatgcggtggtaagtaattcattaggttttggcggacataacgttgccttggtatttaaaaaatttgtgaaataa

SEQ ID NO: 114633 - protein, 412 aa, Oceanobacillus iheyensis HTE831
MNKRVVITGLGALSPVGNNVDEMWESVTTGKSGIDFVTKVDKDLFPAKVAAEVKNFDPTLYMDKKDARKMDPFTQYAVAAAKMAVEDANLTINEANAERVGVWIGSGIGGMKTWEDQHTKFMEKGAKRVSPFFVPMMIPDMAAGQVSIQLGAKGINSCSVTACASGANSIGDAFKAIQRGDADIMISGGTEAPISDMAFAGFSSSKALSTNEDPQKASRPFDKNRNGFVMGEGAGILILESLESALQRDATIYGEIVGYGATGDAYHITAPAENGEGATRAMQIALKDANLEPSDVQYVNAHGTSTDLNDKYETQAIKAVFGDHASDLAISSTKSMTGHLLGAAGGIEAVISIKAIQDSIIPPTINYETPDPDCDLDYVPNEARKQTVDAVVSNSLGFGGHNVALVFKKFVK

SEQ ID NO: 114634 - DNA, 1263 bp, Brucella suis 1330
  CDS (1)..(1263): transl_table=11
atgaggcgtgtcgtcatcaccggtctcggtctggtgtcaccgctcgcaagcggtgtggaagagacttggaagcggcttcttgccggtgaaagcggggctcgccgcgttacggaattcgaggtggacgatctggcctgccagattgcctgccgcattcccgttggcgatggcacgaacggtacgttcaatcccgacctgcatatggacccgaaggaacagcgcaaggtcgatcctttcatcgtttatgccgtcggtgcagccgatcaggctctggatgatgccggctggcacccggaaaatgatgaggatcaggtccgcaccggcgttcttatcggttcgggcatcggcggcatcgaaggcattgtcgaggcgggctacacgctgcgcgacaagggcccgcgccgtatttcgcccttcttcattccgggccgtctcatcaatctggcctccggccatgtgtcgatcaagcacaagctgcgcgggccgaaccactcggtcgtcacggcctgtgcaaccggcacgcacgctattggcgatgccgcccgcctcattgctttcggcgatgcggatgtgatggttgccggtggcacggaatcgccggtgagccgcatttcgcttgctggctttgccgcctgcaaggcgctttccaccaagcgcaatgacgatccgaccgccgcttcacgtccttatgacgaggatcgtgacggcttcgtcatgggcgaaggcgctggcattgtggtgcttgaagagctggaacacgctttggcgcgcggtgcgaagatttatgccgaagtcatcggctatggcatgtcgggcgatgccttccatatcacggccccgaccgagagcggtgagggcgcacagcgctgcatggtggcggctctcaagcgtgccgggatcgtgccggacgagatcgactatatcaatgcgcatggcacgtccaccatggccgatacgatcgagcttggcgcggtggagcgcgtggtgggtgaggcggctgcgaagatttcgatgtcttccaccaaatcatccatcggccacctgttgggtgcggcaggggctgccgaagcgatcttctccacgctggccattcgcgacaatatcgcgcctgccacactcaatctggacaatccggcggcgcagaccaggatcgatctcgtgccgcacaagccgcgcgaacgcaagatcgatgtggcgctgtcgaattcgttcggtttcggtggcaccaatgcatcgctggtgctgcgccgctacacggcctga

SEQ ID NO: 114635 - protein, 420 aa, Brucella suis 1330
MRRVVITGLGLVSPLASGVEETWKRLLAGESGARRVTEFEVDDLACQIACRIPVGDGTNGTFNPDLHMDPKEQRKVDPFIVYAVGAADQALDDAGWHPENDEDQVRTGVLIGSGIGGIEGIVEAGYTLRDKGPRRISPFFIPGRLINLASGHVSIKHKLRGPNHSVVTACATGTHAIGDAARLIAFGDADVMVAGGTESPVSRISLAGFAACKALSTKRNDDPTAASRPYDEDRDGFVMGEGAGIVVLEELEHALARGAKIYAEVIGYGMSGDAFHITAPTESGEGAQRCMVAALKRAGIVPDEIDYINAHGTSTMADTIELGAVERVVGEAAAKISMSSTKSSIGHLLGAAGAAEAIFSTLAIRDNIAPATLNLDNPAAQTRIDLVPHKPRERKIDVALSNSFGFGGTNASLVLRRYTA

SEQ ID NO: 114636 - DNA, 1239 bp, Shewanella oneidensis MR-1
  CDS (1)..(1239): transl_table=11
gtgtctaaacgtcgtgtagtggtaaccggtttagggttagtaacgcccgtgggcaatactgtcgacacaacttggaaagccctgctttcgggtaagagtgggattgcgcccataaccaaatttgatgccagcgaattcaccactcgtttcagtggttctgtaaaagatttcgatgttgagcagtacttaaccaaaaaagacgcccgcaaaatggacctctttattcagtatggtatggctgcaggcatccaagctatccaagactcaggtctggatatgagcaaagtaaacccaggccgcgttggtaccgctatcggtgctggtatgggtggaatgtggttgattgagcaaaatcacagtgcgttaatgaacggtggtccacgtaaaatttcgcctttcttcgtgccgagcaccatcattaatatgattgcaggccatttatcgattatgtacggaatgacaggccctaactttgccgtcactaccgcctgtacaaccggtgtgcataatatcggttttgcggcgcgcaccatcgcctatggtgatgctgacgtaatggttgccggtggggcggaagatgtcacgtgcccattaggtgtaggtggttttggtgcagcaaaagccctctcaactcgcaatgatgatccaactgcagcgagccgtccatgggataaagaccgtgatggttttgtgatcggtgatggcgctggtgtaatggtgatggaagaatacgagcacgctaaagcgcgcggtgcgaccatttatggtgaactcgttggctttggtatgagcggtgatgctttccatatgacctcgccaccaagtgatggtgcgggtgccgcagcggctatggtcaatgccgttaatgatgctaagctaccacttgagaaaattggctatatcaatgcccatggcacttcaacccccgcaggtgataaagcggaagcggcggcggttaagtcggtctttggtgatcacgcttataatctgcttgtgagttcgactaagtcgatgacgggtcacctattaggtgctgcgggcgcggtggaggcgattttcactttattggcactacgtgaccaagcggtaccaccgaccattaacctcgataatcctgacgaagggtgtgatttagactttgtggcacacactgcccgcgatgtgaagttagattacgctctatgtaactccttcggctttggtggaactaacggttcattactgtttaagaaagtctaa

SEQ ID NO: 114637 - protein, 412 aa, Shewanella oneidensis MR-1
MSKRRVVVTGLGLVTPVGNTVDTTWKALLSGKSGIAPITKFDASEFTTRFSGSVKDFDVEQYLTKKDARKMDLFIQYGMAAGIQAIQDSGLDMSKVNPGRVGTAIGAGMGGMWLIEQNHSALMNGGPRKISPFFVPSTIINMIAGHLSIMYGMTGPNFAVTTACTTGVHNIGFAARTIAYGDADVMVAGGAEDVTCPLGVGGFGAAKALSTRNDDPTAASRPWDKDRDGFVIGDGAGVMVMEEYEHAKARGATIYGELVGFGMSGDAFHMTSPPSDGAGAAAAMVNAVNDAKLPLEKIGYINAHGTSTPAGDKAEAAAVKSVFGDHAYNLLVSSTKSMTGHLLGAAGAVEAIFTLLALRDQAVPPTINLDNPDEGCDLDFVAHTARDVKLDYALCNSFGFGGTNGSLLFKKV

SEQ ID NO: 114638 - DNA, 1245 bp, Pseudomonas putida KT2440
  CDS (1)..(1245): transl_table=11
gtgtcgcgtagacgcgtcgtggtcaccggtatgggtatgctgtcgccactgggtaccgatgtaccgagcacctggcagggcattctggctggccgcagtggcatcggtccgatcgaacacacggacctgtctgcctactccacccgttttggcggctcggtgaaaggcttcgaggttgagcagtacctgtcggccaaagaggcccgcaagctcgacctgttcatccagtacggcctggcggctggtttccaggccgtgcgtaatgccggcctggaggtcaccgatgccaaccgcgagcgtattggcgtggccatgggctcgggtatcggtggtttgaccaacatcgaagaaaccagccgcaccctgcacgattcagggccgcgccgcatttcgccgttcttcgtgccgggttcgatcatcaacatgatctccggtttcctgtcgatccacctgggtctgcaagggccgaactatgccatcgccactgcgtgcaccactggcacccattgcatcggcatggccgcgcgcaatatcgcctacggtgaggctgacgtgatgatcgccggtggcgccgaaatggccgcttgtggtctgggcatgggcggttttggcgcttcgcgcgcactgtctacccgcaacgatgaacccagccgggccagccgcccgtgggacaagggtcgtgacggctttgtattgtccgacggtgccggagccctggtgctcgaggagctggagcacgccaaggcccgcggtgcgactatctatgccgagctggttggctttggcatgagcggcgacgcctaccacatgacctcgccacccgactctggcgagggcgctgcccgctgcatggccaacgccttgcgcgatgccggtatccagccggaagaagtcagctacatcaacgcccacggcacttctaccccggcgggcgatgtggccgaagtggcggcgatcaagcgcgtgttcggcgagcatgcctacaagctggcggtcagctcgaccaagtcgatgaccggtcacttgctgggcgccgcgggcgcggtggaggcgatcttcagcgtgctggccatcaatagccagatggccccgccgaccatcaacctggacgagccggacgaggggtgtgacctcgacttcgttccccaccaggcgcgcagcatgccgatcgacgtggtgctgtccaactcgttcggctttggcggcaccaacggctcgctggtattccgccggtttgccggctga

SEQ ID NO: 114639 - protein, 414 aa, Pseudomonas putida KT2440
MSRRRVVVTGMGMLSPLGTDVPSTWQGILAGRSGIGPIEHTDLSAYSTRFGGSVKGFEVEQYLSAKEARKLDLFIQYGLAAGFQAVRNAGLEVTDANRERIGVAMGSGIGGLTNIEETSRTLHDSGPRRISPFFVPGSIINMISGFLSIHLGLQGPNYAIATACTTGTHCIGMAARNIAYGEADVMIAGGAEMAACGLGMGGFGASRALSTRNDEPSRASRPWDKGRDGFVLSDGAGALVLEELEHAKARGATIYAELVGFGMSGDAYHMTSPPDSGEGAARCMANALRDAGIQPEEVSYINAHGTSTPAGDVAEVAAIKRVFGEHAYKLAVSSTKSMTGHLLGAAGAVEAIFSVLAINSQMAPPTINLDEPDEGCDLDFVPHQARSMPIDVVLSNSFGFGGTNGSLVFRRFAG

SEQ ID NO: 114640 - DNA, 1278 bp, Pseudomonas putida KT2440
  CDS (1)..(1278): transl_table=11
ttgatgcaggcccgagaggttctggtcaccggctatggactggtggctcccacggcactggatgcggcctcgctgttcaccacgatcagcgaaaaccgttcctgcattggccagcacccggcgtttgtcgaactggggtttgcgaacccggcggccggatttatcgatgagcaacaatggcaggtcatcgcggcggcctttccgggcgacctgcagaccacctcccgccaggaatggctggcgcattacgtggcccgtcaggcgctggcccatgccgggttggccgacggcgcttttgcccgagtcgccagcggtattttcgtcggggccaacaaatattgcgtgagcggtgatttgcgggacgccagccgttacatggacgatcaggggcgggtcgatctcgaccagttcctggataaccacaccctcagcggtggggcgtttgcccggcgggttgatcagcaaacccgccatctcgccgaatggctgggtgtacgtgaccatatttccacacattccgatgcctgtgccgccggcaccatggccatcggcagcgcctatcgagcgatcgcccgtggcgagatcgacctggcgttgtgtggcgcggtggagttgatggcccatgaattgtcctactacagctttgatgggctgggcgcactctgccagcgcgtggacttttccccgcaagaacagagccggccattcatgccggaccgctgcggctttgtgctgagtgaaggggcggcgctgttggtgctggaatcccgcgagcatgccgagcgtcgtcaggcctgttcgctgggccgggtgctgggttacgcgaatctgtgcgaggcagagaaaatcacctccagcagccgcgacggcagcaagtatgccgcctgcatgacggcggccctggccgatgccgaactgaccagtgcggctgtggaccatgtgaatgttcacggtacgtcgacacaggccaatgaccgttgcgaggccctgggcctggcgcaggttttcggcgaaaccctggagcagatgacgttcaccgccaacaaatctgccgtagggcattcgttggccggcagtggtgccattgaggcggtgctgtcgttgatgagcattcagttgggcgtggccttgccgaccctcaattttcagccggaaaaatccgaatttccggcgttgaaattcctttgcgaaccgttgcagcaaccgatcaatgtcgtgctctccaactccttcgggtttggtggcgtgaacagttcgttggtgctgggcagggcatga

SEQ ID NO: 114641 - protein, 425 aa, Pseudomonas putida KT2440
MMQAREVLVTGYGLVAPTALDAASLFTTISENRSCIGQHPAFVELGFANPAAGFIDEQQWQVIAAAFPGDLQTTSRQEWLAHYVARQALAHAGLADGAFARVASGIFVGANKYCVSGDLRDASRYMDDQGRVDLDQFLDNHTLSGGAFARRVDQQTRHLAEWLGVRDHISTHSDACAAGTMAIGSAYRAIARGEIDLALCGAVELMAHELSYYSFDGLGALCQRVDFSPQEQSRPFMPDRCGFVLSEGAALLVLESREHAERRQACSLGRVLGYANLCEAEKITSSSRDGSKYAACMTAALADAELTSAAVDHVNVHGTSTQANDRCEALGLAQVFGETLEQMTFTANKSAVGHSLAGSGAIEAVLSLMSIQLGVALPTLNFQPEKSEFPALKFLCEPLQQPINVVLSNSFGFGGVNSSLVLGRA

SEQ ID NO: 114642 - DNA, 1314 bp, Pseudomonas putida KT2440
  CDS (1)..(1314): transl_table=11
atgatccaacgagaggtcgaaatgactcacaacgttaatcaaaagcgcatcgtggtgaccggcaccggcgttgtcagcccgctgggctgcggcgtaaaggaagtctggcggcgattgctggctgggcagtccgggattcgcgcgcttgctggcgatgtcgtcgaaggcactggcgtgtcagtgggcggcagcgtgcccacattggccgaggatgcagtggcaggctatcaacccgagcgggtcatccacgccaaggaacgcaagaagatggatcggttcatcgagtttgcgctggtagcagcggatgaagcattgcagcaagccggctggaatcccgagcgtcaggctgaacgcgcgcgcaccgccaccatcatcgcatcaggcgtcggtggcttcggcgccatcgcagaggcggtgcgcaccactgacgcacgtggccctcgcaagttgtcgcccttcacggcgccatcgttcctggccaatatggcagcgggtcatgtctccatacgctatggcttcgaaggcccacttggggcacccgtcacagcctgcgctgcgggggtgcaggccattggcgacgccgctcggctcatcagaagcggcgaagcggatatcgcgatctgcggtggcgccgaggcggcaattgatcgtgtgacgctaggctgctttgcggctgcacgagcgctcagcacgggcttttcggatagccctgagcaagcctcccgtcctttcgatagccaacgggacgggtttgtcatggctgaaggggctggcttgctggtgatcgagtcgctggaacatgcgctggcccgtggcgccaagccgctggccgagctggtcggctacggaacgagcgctgatgcctatcatctgaccgctggccccgaagacggaagcggtgccaggcgcgccatgcaactcgcgctgcaacaggcgtcgatagcgcctggggacgtggaccatatcaatgcgcatgcgacttcgacccaggttggcgacaagggtgaacttgcagcaattcgcgccgtattcggtagcggcagcggcgtggcgattacatcgaccaaatcggccaccggccacctcctgggggcggcaggcggtgtcgaagccattttcacggtgttggcgctgcaagatcagatcgttccacccacgctcaacctgactcaggtcgatgatgctgcgcttggccttgacctggttgcacgaatagcccgtgaaatgcccatcgaatatgccttgtccaacggtttcggattcggtggtgtgaacgccagcgtactgttccgccgctgggaggccaacgtatga

SEQ ID NO: 114643 - protein, 437 aa, Pseudomonas putida KT2440
MIQREVEMTHNVNQKRIVVTGTGVVSPLGCGVKEVWRRLLAGQSGIRALAGDVVEGTGVSVGGSVPTLAEDAVAGYQPERVIHAKERKKMDRFIEFALVAADEALQQAGWNPERQAERARTATIIASGVGGFGAIAEAVRTTDARGPRKLSPFTAPSFLANMAAGHVSIRYGFEGPLGAPVTACAAGVQAIGDAARLIRSGEADIAICGGAEAAIDRVTLGCFAAARALSTGFSDSPEQASRPFDSQRDGFVMAEGAGLLVIESLEHALARGAKPLAELVGYGTSADAYHLTAGPEDGSGARRAMQLALQQASIAPGDVDHINAHATSTQVGDKGELAAIRAVFGSGSGVAITSTKSATGHLLGAAGGVEAIFTVLALQDQIVPPTLNLTQVDDAALGLDLVARIAREMPIEYALSNGFGFGGVNASVLFRRWEANV

SEQ ID NO: 114644 - DNA, 1266 bp, Bradyrhizobium japonicum USDA 110
  CDS (1)..(1266): transl_table=11
atgaggcgggttgtcgtcacgggtctcggcatggtctcgccactcggctgtggcgtcgagccgacctggaaacgcatcctcaacggcgaaagcggtgcgcgcaggatcgagagcttcgatgtctccgatcttcagaccaagatcgcctgcacggtggtgcgcggcgacgggtcgaacgacaccttcaatcccgacaagtggatggagccgaaggaccagcgcaaggtcgacgacttcatcatcttcggcatggccgcagccggccaggcgctcgacgatgccaactggcatcccgaaaccgaagaggacaagtgtgcgaccggcaccatgatcgggtccggcatcggcggccttaacggcatcgcggaaaccgccatcctgctgaaggagcgcggaccgcgccgggtgtcgccgttcttcattccgggccgcctgatcaatctcgcctccggctacgtctcgatcgcgcacgggctgaaggggccgaaccattcggtggtcacggcctgctcgaccggcgcgcatgcggtcggcgatgccgcccgcctgatcgcgctgggcgatgccgacgtgatggtcgccggcggcgctgagtcgccgatcagccgcatcggcattgccggcttcaacgccgcgcgcgcgctctcgaccggtttcaacgacacacccgagaaggcctcacgtccctacgacaaggatcgcgacggcttcgtgatgggcgagggcgccggcgtcctcgttctggaagaactcgagcacgcgaggcgacgcggcgccaagatctatgccgaggtgatcggctatggtctgtcgggcgacgcctatcacatcacgtcgccgtcgcccgacggcgatggcggcttccgcagcatgcaggccgcgctcaagcgcgccggcctcacggcgtccgatctcgactacatcaacgcgcacggcacctcgacgccgctcggtgacgagatcgagctcggcgcggtcgagcgtctgctcggcaatgccgcctccaaggtcgcgatgtcctcgaccaaatcgtcgaccggccatctgctcggcgcggccggtgcgatcgaggcgatcttcgccattctcgcgattcgcgataatgtcgtgccgccgactatcaacctcgacaatccgtcggtcgaaactacgatcgatctcgtgccgcacacggcgaagaagcgagaggtcaacgtcgcgttgtcgaattctttcggttttggcggtaccaatgcgtcggtgatcgtccgccgtttggccaattag

SEQ ID NO: 114645 - protein, 421 aa, Bradyrhizobium japonicum USDA 110
MRRVVVTGLGMVSPLGCGVEPTWKRILNGESGARRIESFDVSDLQTKIACTVVRGDGSNDTFNPDKWMEPKDQRKVDDFIIFGMAAAGQALDDANWHPETEEDKCATGTMIGSGIGGLNGIAETAILLKERGPRRVSPFFIPGRLINLASGYVSIAHGLKGPNHSVVTACSTGAHAVGDAARLIALGDADVMVAGGAESPISRIGIAGFNAARALSTGFNDTPEKASRPYDKDRDGFVMGEGAGVLVLEELEHARRRGAKIYAEVIGYGLSGDAYHITSPSPDGDGGFRSMQAALKRAGLTASDLDYINAHGTSTPLGDEIELGAVERLLGNAASKVAMSSTKSSTGHLLGAAGAIEAIFAILAIRDNVVPPTINLDNPSVETTIDLVPHTAKKREVNVALSNSFGFGGTNASVIVRRLAN

SEQ ID NO: 114646 - DNA, 1251 bp, Vibrio parahaemolyticus RIMD 2210633
  CDS (1)..(1251): transl_table=11
gtgtccaagcgtcgtgtagttgtcactggcatgggtatgttgtcaccggtaggcaacacagtagaatcatcttggaaagccctgcttgaaggtaaaagcggtatcgtaaatatcgaacacttcgatactacgaacttctcaactcgttttgcaggtcttgttaaagatttcgattgcacagagtacatgtctaaaaaagatgctcgtaaaatggatctattcatccagtacggcattgcagcgggtatccaagcgctagatgactctggcttacaaattaccgaagaaaacgctcctcgagttggtgttgcaatcggctcaggtattggcggcctagacctcattgaaactggtcactcagcactggttgagaaaggtcctcgcaaagttagcccattttttgttccttcgaccatcgtaaacatggttgcgggtaacctgtctatcatgcgtggtcttcgtggtccaaacatcgcgatctctactgcatgtactacaggtctacataacattggccacgctgctcgtatgattgcatacggtgatgcagacgcgatggttgctggtggtgcagagaaagcttctacgcctcttggtatggctggcttcggtgctgctaaagcactttctactcgcaatgacgaacctcaaaaggcatctcgcccatgggataaaggccgtgacggcttcgttctaggtgatggtgctggcgtgatggttcttgaagaatacgaacatgcgaaagcacgtggcgctaagatttacgcagagctagttggctttggtatgtctggcgatgcttaccacatgacttcaccaagtgaagatggttcaggtggtgcgttagcaatggaagcagcaatgcgtgatgcgaacatcacgggtactcaagtaggttacgtgaatgctcacggtacatctactcctgctggcgacgttgctgaaatcaagggtgtgaaacgtgctcttggtgaagaaggtgcaaaacaagttcttgtttcttcaactaagtcaatgactggtcacctattgggtgctgctggttcagttgaagctatcatcacgattatgtctttggttgaccaaattgttccaccaacgattaaccttgatgatccagaagaaggtctagatattgaccttgtgccacacactgcgcgcaaagttgaaggtatggaatacgcaatctgtaactcgtttggctttggtggtacaaacggttctttgatcttcaaaaagttcgctgagtaa

SEQ ID NO: 114647 - protein, 416 aa, Vibrio parahaemolyticus RIMD 2210633
MSKRRVVVTGMGMLSPVGNTVESSWKALLEGKSGIVNIEHFDTTNFSTRFAGLVKDFDCTEYMSKKDARKMDLFIQYGIAAGIQALDDSGLQITEENAPRVGVAIGSGIGGLDLIETGHSALVEKGPRKVSPFFVPSTIVNMVAGNLSIMRGLRGPNIAISTACTTGLHNIGHAARMIAYGDADAMVAGGAEKASTPLGMAGFGAAKALSTRNDEPQKASRPWDKGRDGFVLGDGAGVMVLEEYEHAKARGAKIYAELVGFGMSGDAYHMTSPSEDGSGGALAMEAAMRDANITGTQVGYVNAHGTSTPAGDVAEIKGVKRALGEEGAKQVLVSSTKSMTGHLLGAAGSVEAIITIMSLVDQIVPPTINLDDPEEGLDIDLVPHTARKVEGMEYAICNSFGFGGTNGSLIFKKFAE

SEQ ID NO: 114648 - DNA, 1242 bp, Salmonella enterica subsp. enterica serovar Typhi Ty2
  CDS (1)..(1242): transl_table=11
gtgtctaagcgtcgtgtagttgtgaccggacttggcatgttgtctcctgtcggcaataccgtagagtctacctggaaagctctccttgccggtcagagtggcatcagcctgatcgaccatttcgatactagcgcctatgcaacgaaatttgctggcttagtaaaggattttaactgtgatgacattatctcgcgcaaagaacagcgcaagatggatgccttcattcaatatggaattgtcgctggcgtacaggccatgcaggattctggccttgaagtgacggaagagaacgcaagccgtattggcgccgctatcggctccggtatcggtggtctcggtctgatcgaagaaaaccacagttcgctggtaaaaggcggaccgcgtaagattagcccgttctttgtcccgtcgacgattgttaacatggtagcaggccatctgactatcatgtatggcctgcgtgggccaagcatctctattgcgactgcctgtacttcaggcgtgcataacatcggccatgccgcgcgtatcatcgcctatggtgatgcggacgcgatggtggcaggtggcgcagaaaaagccagtacgccgctgggcgtaggtggttttggcgcagcgcgcgcgctgtcgacccgcaacgataacccacaggcggcgagccgtccgtgggataaagaacgcgatggttttgtactgggcgacggtgccggtatgttggtgcttgaagagtacgaacatgcaaaagcgcgtagtgcgaaaatctatgctgaaatcgtcggctttggtatgagcagcgatgcttaccatatgacgtcgccgccggaaaatggcgcaggcgctgcgctggcgatggttaacgcgttgcgtgatgccgcgattgagcctgctcagattggctacgtcaacgcgcacggcacgtcgacgcctgccggcgacaaagctgagacgcaggcggttaagtcagtctttggcgatgctgcaagccgagtgatggtgagctcgaccaaatcgatgaccggccatctgttgggcgccgcaggcgcagtagagtctattttctctattctggcgctacgcgatcaggccattccgccaaccattaatctggataacccggatgaaggttgcgatctggacttcgtgccgcatgaagcgcgccaggtcagcgatctggagtacgcgctgtgtaactcctttggctttggcggaactaacggttccttgatctttaaaaagatctaa

SEQ ID NO: 114649 - protein, 413 aa, Salmonella enterica subsp. enterica serovar Typhi Ty2
MSKRRVVVTGLGMLSPVGNTVESTWKALLAGQSGISLIDHFDTSAYATKFAGLVKDFNCDDIISRKEQRKMDAFIQYGIVAGVQAMQDSGLEVTEENASRIGAAIGSGIGGLGLIEENHSSLVKGGPRKISPFFVPSTIVNMVAGHLTIMYGLRGPSISIATACTSGVHNIGHAARIIAYGDADAMVAGGAEKASTPLGVGGFGAARALSTRNDNPQAASRPWDKERDGFVLGDGAGMLVLEEYEHAKARSAKIYAEIVGFGMSSDAYHMTSPPENGAGAALAMVNALRDAAIEPAQIGYVNAHGTSTPAGDKAETQAVKSVFGDAASRVMVSSTKSMTGHLLGAAGAVESIFSILALRDQAIPPTINLDNPDEGCDLDFVPHEARQVSDLEYALCNSFGFGGTNGSLIFKKI

SEQ ID NO: 114650 - DNA, 1263 bp, Bacteroides thetaiotaomicron VPI-5482
  CDS (1)..(1263): transl_table=11
atggaattaaaaagagtggtagtaacaggccttggcgccattactcctgttggcaatgatgtacccgaattctgggaaaatctagtgaacggggttagtggagcagggcctattactcattttgatgcgtcgcaattcaagacccagtttgcatgcgaagtgaaaaacttcgatgtaactaaatatatcgaccgtaaagaggcaagaaagatggacttatacactcagtatgctgtcgctgttgccaaagaagcggtatcggactccggtcttgacgtcgaaaaagaagatttgaacagaatcggtgttatttttggcgccggtatcggtggtatacatacattcgaggaagaagtaggcaactactacactcatcaggaaataggtcccaagttcaatccgttcttcatcccgaagatgatctcggatattgctgccggacagatttctatcatgtatggcttccatggtcctaactacgcgacttgttcagcatgtgctacttctaccaatgccattgcggatgccttcaacctgattcgtctgggtaaagcaaacgtaatcgtatccggtggttcggaagcagccatcttccctgcaggcgtaggcggtttcaacgctatgcatgctctgtcaacacgcaacgatgagccgagcaaggcttcacgtccattcagcgcaagccgtgacggcttcatcatgggcgaaggtggcggttgcctgatcttggaagaactggaacacgctaaggcccgtggtgcgaaaatctatgcagaagttgccggtgtaggtatgtctgcagatgctcatcacctgacagcttcccatccggaaggtcttggtgccaaactggtaatgctgaacgctctggaagatgcagaaatggatccgaaagaagtagattacatcaacgttcacggaacatctactccggtaggtgatatttctgaagcgaaagcaattaaggaagtattcggtgatcacgcatacgaactgaacatcagttctacaaaatcaatgactggtcacttgctgggagctgccggtgcggtagaatctatcgcaagcatccttgccatcaagaacggcattgttcctccgactatcaaccacgaagaaggtgacaacgacgagaacattgactacgaccttaatttcacgttcaacaaagctcagaaacgtgaggttaatgttgccctgtccaatacatttggattcggtggtcacaatgcgtgcgttatcttcaagaaatacgctgagtaa

SEQ ID NO: 114651 - protein, 420 aa, Bacteroides thetaiotaomicron VPI-5482
MELKRVVVTGLGAITPVGNDVPEFWENLVNGVSGAGPITHFDASQFKTQFACEVKNFDVTKYIDRKEARKMDLYTQYAVAVAKEAVSDSGLDVEKEDLNRIGVIFGAGIGGIHTFEEEVGNYYTHQEIGPKFNPFFIPKMISDIAAGQISIMYGFHGPNYATCSACATSTNAIADAFNLIRLGKANVIVSGGSEAAIFPAGVGGFNAMHALSTRNDEPSKASRPFSASRDGFIMGEGGGCLILEELEHAKARGAKIYAEVAGVGMSADAHHLTASHPEGLGAKLVMLNALEDAEMDPKEVDYINVHGTSTPVGDISEAKAIKEVFGDHAYELNISSTKSMTGHLLGAAGAVESIASILAIKNGIVPPTINHEEGDNDENIDYDLNFTFNKAQKREVNVALSNTFGFGGHNACVIFKKYAE

SEQ ID NO: 114652 - DNA, 1239 bp, Enterococcus faecalis V583
  CDS (1)..(1239): transl_table=11
atgaaaagagtggtcataaccggcatgggtgccgtaacaccattaggcaataccgtaaaagaattttggcataatctagtggatggcaagctaggaattggcaaaattactaaatttgattctgaagatactggggtggctttggctggtgaagtgaaagagtttgacccaagtgctgttttagaacgcaaagagcaaaaaagaatggacttattttctcaatatggcttggtcgctgctttagaagcgtgggaaatgagtggtttaacagaagcaacgattgacccgactcgtttaggtgtgattgtcggtagtgggattggcgggatgactaccttacaagaccaagtacgggtaatggataaaaaaggcgcaaaacgcgtaacaccatttttcgtgcccatggtaattgctaatatggcagcgggaaatatttcgattcgtctaggtgcaaaaggaccttctcaaactatcgtgactgcttgtgcttctgcgacgaatgcgattggtgaagcttttcgcacgattaaatatggtttagcggacatgatggtaactggggggacagaagccacagtatgtgaaattgggattgcaggctttgcagcattgaatgctttaaatacaacagaagatgcgactcgggcttcgattccttttgataaagaacgaaaaggttttgtgatgggtgaaggcgcaggaatgctggttttagaagaactcgagcatgcacagaaacgtggcgcaactatctacggcgaaattgttggatatggcagcaactgtgatgctagccacatgaccgctcctttaaaagacggtagtggcgcggcagctgcgatggaaatggcgattgcagaagcagggattacaccggaacaaattgggtatatcaatgctcatggtacgtcaaccccagcgaatgacgctgcggaaacaacggccatcaaacgtgtctttggtgagcgagcatcgcaaattccaatttcaagtacaaagagtatgactggacatttattgggcgcggctggcggtatcgaagcgatcgcttgtgtgcaaacattgcaagaaggaaaagctcatccgacagtaggctaccaagttgctgatccagattgtgatttagattatgtcacagaaggtgcacgtgacattacagcggactatacaattagtaattcgtttggctttggtggccataatggtgtaatttgcttgaagaaatgggaggaaaactag

SEQ ID NO: 114653 - protein, 412 aa, Enterococcus faecalis V583
MKRVVITGMGAVTPLGNTVKEFWHNLVDGKLGIGKITKFDSEDTGVALAGEVKEFDPSAVLERKEQKRMDLFSQYGLVAALEAWEMSGLTEATIDPTRLGVIVGSGIGGMTTLQDQVRVMDKKGAKRVTPFFVPMVIANMAAGNISIRLGAKGPSQTIVTACASATNAIGEAFRTIKYGLADMMVTGGTEATVCEIGIAGFAALNALNTTEDATRASIPFDKERKGFVMGEGAGMLVLEELEHAQKRGATIYGEIVGYGSNCDASHMTAPLKDGSGAAAAMEMAIAEAGITPEQIGYINAHGTSTPANDAAETTAIKRVFGERASQIPISSTKSMTGHLLGAAGGIEAIACVQTLQEGKAHPTVGYQVADPDCDLDYVTEGARDITADYTISNSFGFGGHNGVICLKKWEEN

SEQ ID NO: 114654 - DNA, 1245 bp, Coxiella burnetii RSA 493
  CDS (1)..(1245): transl_table=11
ttggagaaacggcgcgttgtaataaccgggttgggggttgtgagccccctcggaaataaagtttcggatatgtggcaggcgctcttggcgggtaaaagtggagtgaagccgattactcgattcgatgcgtcctcttttcctacccaaattgcggccgaagtcagggattttgacccggccttagtattagatcttaaaagcattcgtaaaacggacgtttttgtgcaattcgccatggaatctgcccgtcaggcgtgggaggattcaggactagaaatcaacgaaactaacgcgcctcgcgtgggggtggctattgggtccggcatcggagggatgccttggattgaaaaaaattatgacgcgttattaacttccggtccgcgaaaaatttctcccttttttattccgggggctattattaatatggcttctggtatggtgtctattaaatacgatttaaagggtcctaatatctcaatcgtgaccgcctgtacgacgggtcttcataacatcggccacgcagcgagaatgattgcccacaatgatgcagatgcgatgattgcagggggaacggagatggcatccactcccctcggtattggcggctttgctgctgtgcgcgctttatcgacacgaaatgatgagcccgaaaaagcgagccgtccgtgggataaaggtcgcgatggttttgtgttgggggaaggcgccgcgtgtgtagtagtagaagagttagaacacgccaaaaagcgcaacgcgaccatctacgccgaaattatcggatttgggatgagtggtgatgcttatcacatgacacgcccagaccccgaagctgaaggatttaccacttgcatgaaaaattccctccgggatgccggcatcgctcctgagcgggtcgactacataaacgcccacggtacctcgacgcctgccgccgatccgcttgaggcgcgggccattaaaaaaacatttggggatcatgcttataaactagccgtaagctccacaaaatcaatgacaggacacatgctaggggcagcaggtgccttagaaaccgtaatttcagtgttagcgattcgcgataatacggcaccaccgacgattaatcttgaaaatcccgatgaaggctgtgatttagattttgtacccaatgaggcgcgggagatgaagatcgataccgtaatgtcaaattcatttggctttggtggcactaacggaaccttggttttaagccgagtttttgactaa

SEQ ID NO: 114655 - protein, 414 aa, Coxiella burnetii RSA 493
MEKRRVVITGLGVVSPLGNKVSDMWQALLAGKSGVKPITRFDASSFPTQIAAEVRDFDPALVLDLKSIRKTDVFVQFAMESARQAWEDSGLEINETNAPRVGVAIGSGIGGMPWIEKNYDALLTSGPRKISPFFIPGAIINMASGMVSIKYDLKGPNISIVTACTTGLHNIGHAARMIAHNDADAMIAGGTEMASTPLGIGGFAAVRALSTRNDEPEKASRPWDKGRDGFVLGEGAACVVVEELEHAKKRNATIYAEIIGFGMSGDAYHMTRPDPEAEGFTTCMKNSLRDAGIAPERVDYINAHGTSTPAADPLEARAIKKTFGDHAYKLAVSSTKSMTGHMLGAAGALETVISVLAIRDNTAPPTINLENPDEGCDLDFVPNEAREMKIDTVMSNSFGFGGTNGTLVLSRVFD

SEQ ID NO: 114656 - DNA, 1272 bp, Streptomyces avermitilis MA-4680
  CDS (1)..(1272): transl_table=11
gtgagcccgaccaatcgcaccgtggtcgtcaccggtatcggcgcaaccacaccgctgggtggcgacgtagcctctacctgggagggcctggtcgccggacgttccggtgtccgtcccctggagcaggagtgggccgccgagcaggcggtccgcatcgcagcacagatcgccgtggagcccggcgaggtcattccccgtccgcaggcccgccgcctcgaccgctcggcgcagttcgcgctgatcgcggccaaggaggcctgggcggatgccggtttcaccgacaaggcgggcgccgacccggccgtcgacccggaccgcctcggcaccgtgatcgcctccggcatcggtggtgtgacgactctgctcgaccagtacgacgtgctgaaggagaagggcgtacgccgtgtctccccgcacaccgtgccgatgctgatgccgaacggcccgtccgccaacgtgggcctcgccgtgggcgcccgcgccggtgtgcacaccccggtctccgcctgcgcgtcgggcgccgaggccatcggctacgcgatcgagatgatccgcaccgggcgcgccgacgtcgtcgtcgccggtggtacggaggcggcgatccacccgctgcccatcgccgcgttcggcaacatgatggcgatgtccaagaacaacgacgacccgcagggcgcctcgcgtccctacgacgtcgcccgggacggcttcgtcctcggcgagggcgccggcgtcatcgtgctggagtcggccgagcacgccgcgaagcgcggtgcccgcgtgtacgcggaggcggtcggccagggcatctccgccgacagccacgacatcgtgcagccggagcccgagggccggggcatctcgcacgccctgcagaacctgctcgacagcaccgacctgaaccccgccgagatcgtgcacgtcaacgcgcacgccacctcgacgccggccggtgacgtcgccgaactgaaggcgctgcgcaaggtgttcggcgacgacgccgaccacttcgcggtctccgccaccaagtcgatgaccggtcacctcctcggcggcgccggcggtgtcgagtcggtcgcctcggtgctcgccctgtaccaccgggtggcgccgccgaccatcaacgtcgacaacctcgaccccgaggccgaggccaacgccgacatcgtccgcggcgaggcgcgcaagctccccgtcgagggccgcatcgccgcgctgaacgactcgttcggcttcggcgggcacaacgtggtgctggcgttccggacggtctga

SEQ ID NO: 114657 - protein, 423 aa, Streptomyces avermitilis MA-4680
MSPTNRTVVVTGIGATTPLGGDVASTWEGLVAGRSGVRPLEQEWAAEQAVRIAAQIAVEPGEVIPRPQARRLDRSAQFALIAAKEAWADAGFTDKAGADPAVDPDRLGTVIASGIGGVTTLLDQYDVLKEKGVRRVSPHTVPMLMPNGPSANVGLAVGARAGVHTPVSACASGAEAIGYAIEMIRTGRADVVVAGGTEAAIHPLPIAAFGNMMAMSKNNDDPQGASRPYDVARDGFVLGEGAGVIVLESAEHAAKRGARVYAEAVGQGISADSHDIVQPEPEGRGISHALQNLLDSTDLNPAEIVHVNAHATSTPAGDVAELKALRKVFGDDADHFAVSATKSMTGHLLGGAGGVESVASVLALYHRVAPPTINVDNLDPEAEANADIVRGEARKLPVEGRIAALNDSFGFGGHNVVLAFRTV

SEQ ID NO: 114658 - DNA, 1242 bp, Nitrosomonas europaea ATCC 19718
  CDS (1)..(1242): transl_table=11
ttgtccaaacgtaaagtagccattaccgggttaggcataatttcacccgtcggcaatacggtttctgaagcatgggaaaacgtcattgccggaaaatccggtattacacgaatcacgcgcttcgatgcatcagacttttcctcgaaaattgcaggagaagtcaacggattcgacataacagagtacctctccgccaaagaagcgcgccgtatggatatatttatccagtacggaatggcggctgccatccaagctatcagagatgccggcatcagtgatgtaagcgggttcaacgcagatcgtattggtgtgaacatcggctccgggatcggcggcctgcccatgattgaaaataccgatgctgcctatcatgctggcggcccccggaaaatctcccccttcttcatccctagtaccatcatcaacatggtagccggtaatctgtctatcatgttcgggtacaaagggcccaatcttgccatcgttactgcctgtacaactgccacgcactgtataggcagttctgccagaatgatcgaatatggcgatgctgatatcatggtctgcgggggtacggaatcatgtgttacaccacttgctgtcggtggatttgcttcagcacgtgccttgtcatcgaacaatgatgacccggcggcagcaagtcgaccatgggatctcaaaagagatggattcgttctgggagaaggagcaggtattctcgttctggaagagatggagcatgccagaaaacgtggtgcaaagatttatgcggaactggccggattcggtatgagtgcagatgctcatcacatgactgcaccctgtgaagatggagaaggcgcagcccgttgcatgacaaatgcattgtctgatgcgcaaatgcacgctgatgagcttcattacatcaatgcacacggaacatcgactccattgggagatattgcagaaacgattgcagtcaagcgctgctttggtgaacatgcaaaagatctggcagtcagctccaccaaatcgatgaccgggcatttattgggtgctgcaggaggtgtagaggcaattttttctgctttggctgtttatcaccagattgcccctcccactatcaatctcgatgacccggatcctgcatgcgatctggattatgtgcccaacaatgccagagaaatgaaaattgatgcagctctgtcgaactcgttcgggtttggcggaactaatggcacactagtcttcagaaaaatctga

SEQ ID NO: 114659 - protein, 413 aa, Nitrosomonas europaea ATCC 19718
MSKRKVAITGLGIISPVGNTVSEAWENVIAGKSGITRITRFDASDFSSKIAGEVNGFDITEYLSAKEARRMDIFIQYGMAAAIQAIRDAGISDVSGFNADRIGVNIGSGIGGLPMIENTDAAYHAGGPRKISPFFIPSTIINMVAGNLSIMFGYKGPNLAIVTACTTATHCIGSSARMIEYGDADIMVCGGTESCVTPLAVGGFASARALSSNNDDPAAASRPWDLKRDGFVLGEGAGILVLEEMEHARKRGAKIYAELAGFGMSADAHHMTAPCEDGEGAARCMTNALSDAQMHADELHYINAHGTSTPLGDIAETIAVKRCFGEHAKDLAVSSTKSMTGHLLGAAGGVEAIFSALAVYHQIAPPTINLDDPDPACDLDYVPNNAREMKIDAALSNSFGFGGTNGTLVFRKI

SEQ ID NO: 114660 - DNA, 1626 bp, Arabidopsis thaliana
  CDS (1)..(1626)
atggtgggtgcgtcttcctcttacgcatctccgttatgtacctggtttgttgctgcttgcatgtccgtctctcacggtggaggagatagccgtcaggctgttgctcttcaatctggtgggcggagtcggcgaaggaggcagcttagcaaatgctctgtcgcttctggatccgctagcattcaggctctcgtcacttcttgtttggattttggtccttgtactcactacaacaacaacaatgcattgtcttctctctttggatcgaatagtgtttctttgaatcgaaaccagaggagattgaatcgtgctgctagctccggtggagccatggcagtgatggagatggaaaaggaagctgcggttaacaagaaaccacctacggagcagcgtcgagttgtagtgacaggcatgggagttgaaacatcattgggtcatgacccacataccttctatgagaatttgctacaaggcaacagtggtattagccagattgaaaattttgattgttctgaatttcctacgcgaattgcgggagagatcaaaagcttctcgactgaaggatgggttgctccaaaactttctaaaaggatggacaaattcatgctctatcttctcacagctggtaagaaagctttggctgatggtggggttactgatgaagtaatggcagagtttgacaaaaccaaatgtggagttttgattggctcggcaatgggaggaatgaaggtcttttacgatgctattgaagctctgagaatctcttacaagaagatgaatcctttttgtgtaccttttgcgacaacaaacatgggttctgctatgcttgccatggatctgggatggatggggccaaactattctatttcaactgcttgtgccacaagcaacttttgcattctgaattcagcaaaccacattattaaaggtgaagctgatgtaatgctctgtggtggctcagatgcagttattattccaatagggttgggaggttttgttgcatgccgggctctttcacaaaggaataatgatcccacaaaagcttcacgtccttgggataccaatcgagatggtttcgtgatgggagagggagctggagttctacttttggaagaactcgagcatgctaagaaaagaggtgcaactatctacgcagagttcctcggtgggagtttcacatgtgatgcctatcacatgaccgagcctcaccctgatggggctggtgttattctctgtattgagagagcgttagctagtgctgggatttccaaggaacaaataaattacataaatgcacatgcaacctcaacgcatgctggagatattaaggaataccaagcccttgctcactgttttggccaaaatcctgagcttaaggtaaattccacaaaatctatgattggacacttgctgggagctgctggggccgtggaggctgttgcaactgtgcaggcgatacggaccggatgggttcatccaaatatcaacctcgagaatccagacagtggagtggatacaaagctgctggtgggtcctaagaaggagagactggacattaaagcagccttgtcaaattcattcgggtttggtggtcataactccagcatcatttttgctccttacaagtga

SEQ ID NO: 114661 - protein, 541 aa, Arabidopsis thaliana
MVGASSSYASPLCTWFVAACMSVSHGGGDSRQAVALQSGGRSRRRRQLSKCSVASGSASIQALVTSCLDFGPCTHYNNNNALSSLFGSNSVSLNRNQRRLNRAASSGGAMAVMEMEKEAAVNKKPPTEQRRVVVTGMGVETSLGHDPHTFYENLLQGNSGISQIENFDCSEFPTRIAGEIKSFSTEGWVAPKLSKRMDKFMLYLLTAGKKALADGGVTDEVMAEFDKTKCGVLIGSAMGGMKVFYDAIEALRISYKKMNPFCVPFATTNMGSAMLAMDLGWMGPNYSISTACATSNFCILNSANHIIKGEADVMLCGGSDAVIIPIGLGGFVACRALSQRNNDPTKASRPWDTNRDGFVMGEGAGVLLLEELEHAKKRGATIYAEFLGGSFTCDAYHMTEPHPDGAGVILCIERALASAGISKEQINYINAHATSTHAGDIKEYQALAHCFGQNPELKVNSTKSMIGHLLGAAGAVEAVATVQAIRTGWVHPNINLENPDSGVDTKLLVGPKKERLDIKAALSNSFGFGGHNSSIIFAPYK

SEQ ID NO: 114662 - DNA, 1290 bp, Rhodopirellula baltica SH 1
  CDS (1)..(1290): transl_table=11
atgacggacgcttcttcaacgccttcttacgatccttccatgtcacgacgtgtcgtgatcaccggcttgggtaccgtcacacctttgggctgcgacgtcgaaactctttggtcagccttgttggccggaaagtccgggatccatgagttgtccatcatggacacgtcgaaatacaaggttcactttggcggcgacattcctgacttcaatgttgcggatcatgtcgaacccaaagaagccaaacgtctggatcgtttcactcagttcgccgttcacgctggtgcacaagcggtccaggattccggcatcgactgggaaaaaaccgaccgaacacgctgtggtgtgatattgggttcgggcattggtggcctcaacgaaatcgaagaacaaatcgagcgaatgctcaacaagggccccgaccgagtcagcccgttcaccgtcccaaagatgatggtcaacgccgccgggggaaacatctccatccgctatggactcaaaggccccaactacgcggtcgcaaccgcatgtgccagtgcaaccaacgccatgggagacgctctacgcagtatccgtggtggcgaaaccgatgttgtgatcaccggcggaaccgaagccgcgatcactcgcatgggcttggctgctttccaaaacatgaaagccctttcgacccgcaatgacgaacctcaacgggccagccgtccgtttgattctgaccgcgatggttttgtcttggccgaaggcgcagggctgctcgtcttcgaagaactcgagcacgcgaaagctcgcggtgcaaagatctacgcggaagtcctcggctatggaacaaccagcgacgcgggccatatcaccgctcctgatccagaaggattgggtgccgccgctgccatgcgagccgcgattcaggacagtggccgcgcggcctctgaaattgattatattaacgctcacgggacgagcacacctttgggtgacaaagcagaaactcgcgcgatccacaccgttttaggtgaccatgcccaaaacgttgcgatcagcagtaccaaaagcgctctgggacactccttgggtgctagcggcgggattgaagcggtgattctttgccaaacgatccaaaacaatgtgattgccccgacaattaatctcgacacaccagatccaagttgcgatctcgactatgttcccaaccaaccccgggaacaaaaagttgacctggcaatgagcaatagcttcggatttggcggtcacaacgcatgcgttctctttggacggttctctcatgacggctcttga

SEQ ID NO: 114663 - protein, 429 aa, Rhodopirellula baltica SH 1
MTDASSTPSYDPSMSRRVVITGLGTVTPLGCDVETLWSALLAGKSGIHELSIMDTSKYKVHFGGDIPDFNVADHVEPKEAKRLDRFTQFAVHAGAQAVQDSGIDWEKTDRTRCGVILGSGIGGLNEIEEQIERMLNKGPDRVSPFTVPKMMVNAAGGNISIRYGLKGPNYAVATACASATNAMGDALRSIRGGETDVVITGGTEAAITRMGLAAFQNMKALSTRNDEPQRASRPFDSDRDGFVLAEGAGLLVFEELEHAKARGAKIYAEVLGYGTTSDAGHITAPDPEGLGAAAAMRAAIQDSGRAASEIDYINAHGTSTPLGDKAETRAIHTVLGDHAQNVAISSTKSALGHSLGASGGIEAVILCQTIQNNVIAPTINLDTPDPSCDLDYVPNQPREQKVDLAMSNSFGFGGHNACVLFGRFSHDGS

SEQ ID NO: 114664 - DNA, 1230 bp, Bordetella bronchiseptica RB50
  CDS (1)..(1230): transl_table=11
gtgaagcgacgagtcgtcatcaccggcctgggtatcgttagccccgtgggcaacgacattgccagcgcctgggacaatatcgtcaacggacgttccggcatcagccgcatctcccgtttcgaccctaccccgctgacgacgcacatcgccggcgaggtcaaggatttcgacgtcacccagtacatgcccgccaaagaagcccgccagatggataccttcatccattatggcctggccgccggcatgcaggcgtggcgcgattgcggccttgaggtcaccgaaaccaatgccgagcgcattggcgtgatcgtggggtcgggcatcggtggcctgccgcgcatcgaagaaacccagaccgagatgttggccaagggaccgcgccgcatttcgccgttcttcgtgcctgcgtcgttgatcaatctcatttccggccagctctccatcgcctatggcatgaagggcccgagctacgcggtcgtgtccgcgtgcaccaccggcctgcattgcatcggcgatgccgcgcgcctgatcgaatacggcgatgccgatgtcatgcttgccggtggggccgaatcgaccgtctcgccgctgggcatcggcggctttgccgcgatgcgcgcgctgtcgacgcgcaacgacgatccgaccaccgcctcgcgtccctgggaccgcgaccgcgatggtttcgtgctgggcgaaggcgccggcgtgctggtgctcgaagagtacgagcatgccaagaagcgcggcgcgcgcatctacggcgaactggccggctacggcatgagctccgacgcgcaccatatcaccgcccccgacaaggacggcccgcgccgcggcattctcaatgcgctgcgcaacggcggcatcaatgccgacgaggtttcctatgtcaatgcgcacggcacgtccacgccgctgggcgacaagaacgaaaccgacgcgttgaaactggctttcggcgaccatgcctccaagctggtggtgaattcgaccaaatccatgaccgggcacctgctgggcgccgctggcgggatcgaagccgtattcacgaccctggccgtccataatcagatttcgccgccgaccatcaacatcttcaaccaggatccggagtgcgacctggattactgcgccaacgaggcgcggcccatgaagatcgagatcggcctgtcgaattcgttcgggtttggcggcaccaacggttcgatggccgttcgtcgggtctga

SEQ ID NO: 114665 - protein, 409 aa, Bordetella bronchiseptica RB50
MKRRVVITGLGIVSPVGNDIASAWDNIVNGRSGISRISRFDPTPLTTHIAGEVKDFDVTQYMPAKEARQMDTFIHYGLAAGMQAWRDCGLEVTETNAERIGVIVGSGIGGLPRIEETQTEMLAKGPRRISPFFVPASLINLISGQLSIAYGMKGPSYAVVSACTTGLHCIGDAARLIEYGDADVMLAGGAESTVSPLGIGGFAAMRALSTRNDDPTTASRPWDRDRDGFVLGEGAGVLVLEEYEHAKKRGARIYGELAGYGMSSDAHHITAPDKDGPRRGILNALRNGGINADEVSYVNAHGTSTPLGDKNETDALKLAFGDHASKLVVNSTKSMTGHLLGAAGGIEAVFTTLAVHNQISPPTINIFNQDPECDLDYCANEARPMKIEIGLSNSFGFGGTNGSMAVRRV

SEQ ID NO: 114666 - DNA, 1248 bp, Synechococcus sp. WH 8102
  CDS (1)..(1248): transl_table=11
atggtggacggtctccatcgcgtcgtcgttacgggcctcggcgcggtcacaccgatcggcaatacggttcaggactactggagcggcctgatctccggacgcaacggggttgatgccatcaccctgtttgatgcgtcagcccatgcctgtcgtttcgcagcggaagtcaaggacttcgaccctgctgggttgattgaaccgaaggaagccaaacgctgggatcgcttctgcaagttcggtgtcgtggccgccaaacaggccatcgctgatgccggtctcacgatttccgacgccaacgccgatcgcatcggcacgatgattggttccggcgtgggcggtctgctcaccatggagacccaggctcacgtgctggagggcaaaggaccgggacgggtgagtccgttcacggtgccgatgatgattcccaacatggcgacgggtcttgccgccattgccttaggcaccaaggggccgagctccgccgtggccaccgcttgtgccgccggctccaatgccatcggagatgccttccggctgctccagctgggcaaagccgacgccatggtgtgcggtggtgccgaatcggcaatcacccctttgggggttgccggcttcgccagcgccaaggccctgtcgttccgcaacgacgaccccgccaccgctagtcgcccgttcgacaaggaacgcgacggcttcgtaatcggcgaaggtgccggtgtgctggtgctcgaaacgctggagcacgcccaagcccgcggcgccacgatcctcggtgaagtggtgggctacggcatgacttgcgatgcccaccacatcacctcacccacaccgggcggtgtcggcggcgctgaagcgatgcgactggccctggctgatggcggcatcgatccttcggagatcgattacgtgaacgcccacggcaccagcacccccgccaacgacaaaaacgagacctcggccatcaagagtgctctgggggatcgtgcgctgcagatcccagtgagctccaccaaatcgatgaccggccacctgctgggtggatcgggcggcatcgaggcggtggcctgcgtgctggccctccagcatggggtcgtgcccccgaccatcaaccacaccaacccggatcctgactgtgatctggatgtcgtgcccaatcaggcgcgggatcagacactgggaacggtgttgtccaactccttcggcttcggcggccacaacgtctgcctggctttcaaacgcgccagttga

SEQ ID NO: 114667 - protein, 415 aa, Synechococcus sp. WH 8102
MVDGLHRVVVTGLGAVTPIGNTVQDYWSGLISGRNGVDAITLFDASAHACRFAAEVKDFDPAGLIEPKEAKRWDRFCKFGVVAAKQAIADAGLTISDANADRIGTMIGSGVGGLLTMETQAHVLEGKGPGRVSPFTVPMMIPNMATGLAAIALGTKGPSSAVATACAAGSNAIGDAFRLLQLGKADAMVCGGAESAITPLGVAGFASAKALSFRNDDPATASRPFDKERDGFVIGEGAGVLVLETLEHAQARGATILGEVVGYGMTCDAHHITSPTPGGVGGAEAMRLALADGGIDPSEIDYVNAHGTSTPANDKNETSAIKSALGDRALQIPVSSTKSMTGHLLGGSGGIEAVACVLALQHGVVPPTINHTNPDPDCDLDVVPNQARDQTLGTVLSNSFGFGGHNVCLAFKRAS

SEQ ID NO: 114668 - DNA, 1242 bp, Chromobacterium violaceum ATCC 12472
  CDS (1)..(1242): transl_table=11
gtgtccaaacgcagagtagtagtcaccggcctgggccatgtgtccccggtcggcaacgacgtcgccaccggctgggccaatctgttggccggcaagagcggcatcgccaagatcacccgtttcgacgccagcgacatggcctgccagatcgcgggcgaggtcaaggacttcaatatcggcgactacatttcgccgaaggaagcgcgtcgcaacgacctgttcattcactacggcatcgccgcggccttgcaggccgtcgccgacgccgggctggacgacatcccgggcctggacaagacccgcgtcggcgtcaacatcggctccggcatcggcggcctgccgctgatcgaggaaaccggcgtggcgctgatggaaggcggtccgcgcaagatcggcccgtttttcatcccgggctcgctgatcaacctgatcgccggccaggtgtccatcctgaagggctatcaaggccccagctacggcatcgtgtccgcctgcaccaccggcgcgcactgcatcggcgacgccgcgcgcctgatccagtacggcgacgccgacatcatggtcgccggcggcgccgagggcgcggtgtcgcgcctgggcatcggcggcttcgccgcgatgaaggcgctgtccacgcgcaacgacgaccccgaggccgcctcccgtccgtgggacaagggccgcgacggcttcgtgatgggcgagggcgccggcgtgctggtgctggaagagtacgagcacgcggtcaagcgcggcgccaagatctatgccgagctgatcggtttcggcatgagctcggacgcgcaccacatcaccgcgcccaacgccgagggcccggcccgcggcgtggtcaacgcgctgcgcgacgccggcatcaatgccgacgcggtgcagtacgtgaacgcgcacggcacgtccaccccgctgggcgacgccaacgagaccaacgcgctgaagatcgcttttggcgatcacgccaagaagctggtcgtcaactccaccaagtccatgaccggccacttgctgggcggcgcgggcggcgtggaggcgatctacaccatcctggcgatccacaaccaggtgtctccgccgaccatcaacctggtcgagcaggatctggaagccggctgcgatctcgattacgcggccaacaccgcgcgcgagatgaagatcgaggtgggcatttccaactccttcggcttcggcggcaccaacggcaccctggtgttcaagcgcgtctga

SEQ ID NO: 114669 - protein, 413 aa, Chromobacterium violaceum ATCC 12472
MSKRRVVVTGLGHVSPVGNDVATGWANLLAGKSGIAKITRFDASDMACQIAGEVKDFNIGDYISPKEARRNDLFIHYGIAAALQAVADAGLDDIPGLDKTRVGVNIGSGIGGLPLIEETGVALMEGGPRKIGPFFIPGSLINLIAGQVSILKGYQGPSYGIVSACTTGAHCIGDAARLIQYGDADIMVAGGAEGAVSRLGIGGFAAMKALSTRNDDPEAASRPWDKGRDGFVMGEGAGVLVLEEYEHAVKRGAKIYAELIGFGMSSDAHHITAPNAEGPARGVVNALRDAGINADAVQYVNAHGTSTPLGDANETNALKIAFGDHAKKLVVNSTKSMTGHLLGGAGGVEAIYTILAIHNQVSPPTINLVEQDLEAGCDLDYAANTAREMKIEVGISNSFGFGGTNGTLVFKRV

SEQ ID NO: 114670 - DNA, 1248 bp, Gloeobacter violaceus PCC 7421
  CDS (1)..(1248): transl_table=11
atggaaaaaaagcgggtggtggtgaccggcgtcggcgcggtgacgcctcttggcaacacggcggccgacttctgggaaggcttgctcgcaggccgttccggtgtggcacctatcagtctgtttgacccgagccgccacgacgcgcgcatcgcggccgaggtcaaaaattttgatccccaccagtacctcgagaaaaaagaagtcaagcgcacggtgcgctttacccagatggcggtggccgcgagcaagcaggcggtcgccgacgcggctcttgccatcaacgagttcaacagcgaacaggtcggggtgattatcggcaacggcaccggcggcatggagtggctggagcagcaggacggcatcctgcgcgagcagggacccaaccgcgtttcaccctttatggtgccgctgtttatcgccaatatggccgccggcttcaccgccattcagctgggcgccaaaggccccaattcctgcaccgtcaccgcctgcgccgccggctccaacgccatcggcgacgcttttcggcttatccagtacggcgaagcccaggcggtgatctgcggcggcaccgaggcgtgcatcaccccgctggtggtggcgggcttcgccgcgtcgcgcgccctttcgacccgcaacgacgaacctgaaacagcgagccggcctttcgatttaaaccgcgacggctttgtgattggcgagggggcgggcattctggtgctcgaagaactcagccacgccctggcgcgcggcgcgcgcatctacgccgaaatctgcggctacgcgatgacctgcgacgcttatcacatgacctcgcccgcaccggccggcgaaggggccgctcgggccatccggctggcgctcaaggatgcaggcgtgttcccggaccaggtgagctacatcaacgcccacggcaccagtacgcccctcaacgacaccaacgagacccaggcgattaagaccgtgctgggagaggctgcctacagcgtggcggtcagttccaccaaatcgatgaccggtcacctgctgggcggatccgggggcatcgaggcggtggccacggctctggctgtttaccacgacatcgcgccgcccaccatcaaccttgagacccccgacccgagctgcgacctcgactacgtgccgggggtcgcccggacgatgcctatcgaggtggctctatccaattccttcggcttcggcggccacaacgtcaccctggtatttagaaagttccgcgaagcctag

SEQ ID NO: 114671 - protein, 415 aa, Gloeobacter violaceus PCC 7421
MEKKRVVVTGVGAVTPLGNTAADFWEGLLAGRSGVAPISLFDPSRHDARIAAEVKNFDPHQYLEKKEVKRTVRFTQMAVAASKQAVADAALAINEFNSEQVGVIIGNGTGGMEWLEQQDGILREQGPNRVSPFMVPLFIANMAAGFTAIQLGAKGPNSCTVTACAAGSNAIGDAFRLIQYGEAQAVICGGTEACITPLVVAGFAASRALSTRNDEPETASRPFDLNRDGFVIGEGAGILVLEELSHALARGARIYAEICGYAMTCDAYHMTSPAPAGEGAARAIRLALKDAGVFPDQVSYINAHGTSTPLNDTNETQAIKTVLGEAAYSVAVSSTKSMTGHLLGGSGGIEAVATALAVYHDIAPPTINLETPDPSCDLDYVPGVARTMPIEVALSNSFGFGGHNVTLVFRKFREA

SEQ ID NO: 114672 - DNA, 1251 bp, Photorhabdus luminescens subsp. laumondii TTO1
  CDS (1)..(1251): transl_table=11
gtgtctaagcgtcgagtagttgtgaccggactaggcatgttatctcctgtcggtaatacagctgaatcttcttggaaagctgtttgtgccggacagagtggtatcagccttattgaccattttgacaccagtcaccatgcaactaagtttgctggtctggttaaaggttttaatcatgaagatttcaatatttcgcgcaaggatgcacgaaaaatggatgatttcattcaatatggtattgcagcaggtgtgcaagccattgaagattctggaattgaagtaacagaagccaatgctagtcgttttggtgctgctattggttctggtattggtggtttgggtctgattgaagaaaatcacggggcgttggtggcgagtggtcctcgtaagatcagcccgttcttcgtaccttctacgatcgtaaacatggtagcaggtcatctgagtattatttacggtttgcgtggcccaagtatttctatcgccacagcatgtacgtcaggtgtacataatattggtcatgctgcccgtattattgcttataatgatgctgacattatgctggccggtggtgcagaaaaagccagtactcctctgggggttggtggttttggtgctgcccgagctttatctacccgtaacggtaatccacaaggtgcaagtcgtccgtgggataaagaccgcgatggctttgttctgggggatggcgcaggtatcctggtactggaagagtatgagcatgcgaagagacgtggtgcgaaaatttacgcagaaatcgttggctttggcatgagcagcgatgcttatcatatgacgtcaccaccagaaaatggtgcaggtgctgcgttggcgatggaaaatgcgctgagagatgccggtatcactaccaagcaagtgggatatattaatgctcacggtacttcaacatctgctggcgacttagcagaagcgcatgcagttgagtccgtgtttggtgaaggcactgatgttttagtgagctccactaaatcaatgacgggtcatttgttgggcgctgcgggggccgttgaatctattttcactatcctggcattgcgtgatcaagttgttccgccgactatcaacctggaaaatcaggatgagaactgccgtctggatttcgtgccaaatgagtcccgtaaggtagaggggatggaatatgcattgtgtaactctttcggcttcggtggtactaacggctcactgattttccgtaagattaaacctgattaa

SEQ ID NO: 114673 - protein, 416 aa, Photorhabdus luminescens subsp. laumondii TTO1
MSKRRVVVTGLGMLSPVGNTAESSWKAVCAGQSGISLIDHFDTSHHATKFAGLVKGFNHEDFNISRKDARKMDDFIQYGIAAGVQAIEDSGIEVTEANASRFGAAIGSGIGGLGLIEENHGALVASGPRKISPFFVPSTIVNMVAGHLSIIYGLRGPSISIATACTSGVHNIGHAARIIAYNDADIMLAGGAEKASTPLGVGGFGAARALSTRNGNPQGASRPWDKDRDGFVLGDGAGILVLEEYEHAKRRGAKIYAEIVGFGMSSDAYHMTSPPENGAGAALAMENALRDAGITTKQVGYINAHGTSTSAGDLAEAHAVESVFGEGTDVLVSSTKSMTGHLLGAAGAVESIFTILALRDQVVPPTINLENQDENCRLDFVPNESRKVEGMEYALCNSFGFGGTNGSLIFRKIKPD

SEQ ID NO: 114674 - DNA, 1242 bp, Vibrio vulnificus YJ016
  CDS (1)..(1242): transl_table=11
gtgtccaagcgtcgtgtagttgtcactggcatgggtatgttgtcaccggttggcaacaccgtagcagaatcctggaaatccctgcttgaaggcaaaagtggtatcgtcaatatcgaacatttcgatgcaactaacttctctacccgtttcgccggtttggtaaaagacttcaactgcgaagaatacatgtctaaaaaagatgcacgtaaaatggatctcttcatccagtacggcattgcagcaggtattcaggctttagacgattcaggtcttgaaattacggatgaaaacgcacaccgcgttggtgttgcgatcggctctggtatcggcggtcttgatcttattgaagctggccacaccgctttagttgaaaaaggcccacgtaaagttagcccattcttcgttccttcaactattgtaaacatggttgcaggtaatctatctatcatgcgtggcatgcgcggtccgaacatcgcgatttctactgcatgtactactggtctgcataacatcggccatgcagcgcgaatgatcgcttacggcgatgctgatgctatggttgctggtggtgctgagaaagcatcaacaccgcttggtatggctggctttggtgcggcgaaagctctttctactcgtaacgatgaaccacaaaaagcgtctcgtccttgggataaagatcgcgatggtttcgtattaggcgatggtgctggcatcatggtacttgaagagtacgaacatgcaaaagcacgtggcgcaaaaatttacgctgagctggttggctttggtatgtcgggtgatgcttatcacatgacttcaccaagcgaagacggctctggtggcgctctagcgatggaagcggcaatgcgtgacgcaggtattgttggtacacaagtgggttatgtgaacgctcacggtacatcaacaccagcaggcgatgtggctgaaattaaaggcgtaaaacgtgctcttggtgaagagggcgcaaaacaagttaaagtatcttcaacaaaatctatgaccggccacctacttggtgctgctggctctgttgaagcgatcattaccgtgttgtcgttggttgatcagatcgttccaccaaccattaacctggataatccagaagaaggtttggatatcgatcttgttccacatactgcgaagaaagtggatatggaatacgcgatctgtaactcattcggcttcggtggaacaaacggctcactcgtatttaagaaaatctaa

SEQ ID NO: 114675 - protein, 413 aa, Vibrio vulnificus YJ016
MSKRRVVVTGMGMLSPVGNTVAESWKSLLEGKSGIVNIEHFDATNFSTRFAGLVKDFNCEEYMSKKDARKMDLFIQYGIAAGIQALDDSGLEITDENAHRVGVAIGSGIGGLDLIEAGHTALVEKGPRKVSPFFVPSTIVNMVAGNLSIMRGMRGPNIAISTACTTGLHNIGHAARMIAYGDADAMVAGGAEKASTPLGMAGFGAAKALSTRNDEPQKASRPWDKDRDGFVLGDGAGIMVLEEYEHAKARGAKIYAELVGFGMSGDAYHMTSPSEDGSGGALAMEAAMRDAGIVGTQVGYVNAHGTSTPAGDVAEIKGVKRALGEEGAKQVKVSSTKSMTGHLLGAAGSVEAIITVLSLVDQIVPPTINLDNPEEGLDIDLVPHTAKKVDMEYAICNSFGFGGTNGSLVFKKI

SEQ ID NO: 114676 - DNA, 1272 bp, Wolbachia endosymbiont of Drosophila melanogaster
  CDS (1)..(1272): transl_table=11
atgagcagaagagtagtagtcactggtgttggtttaatcactccactagcggcagatgttgacaacacttggtcaaggctaataaaaagtgagtctggcataaaagcaatcaatacggagagatttgactcttctgatcttgcttgcaaaattgcagggcaggtgccgttgcaatcagacaacattgagcaccatttcaatccactagattatatttctgagaaagactcaaaaaggacagatcgttttatccattacggtattgcagcagctattcaggcagtagatgattcattaattttggaaagccaaaatatcaatcgggaacgtgttggtgtgactattggctctggtataggtggtcttccgtcaattcaggaaaatgttattaccatgcaggaaaaagggcccagacgtgtcagtccattttttgtccctgcaagtctaataaatttgatatctggccatatttctattaaatacgaatttacaggtccaaacgattcagcagtaaccgcatgtgcaacaggtgcgcatgcaatcataaactcagcaagaactataaaacttggtgaagcggatgttatgattgcaggtggagcagaaagtgcactgtgtagagttggaattgcaggttttgcatctatgaaggcgttatcaactaaatttaacgataaaccggaagaagcttcaaggccatgggatgaagaacgcgatggttttgttatgggtgaaggagcaggtatattggtgctggaggaatacgaacatgcgaaaaaaaggggggcaaaaatacatgctgaactggttgggtacggactcacaggagatgcgcaccacattacagcaccacatccagaaggaagaggcgcatttaaggcaatgcagcttgctttaaagagcgcacaaattaatcccaatcaagtagggtatatcaatgcacatggaacttcaacgccacttggagataaaattgaagtaatagcaatgaaacagttattcggtgactacgtttataaaatacctgtttcttcaactaaatcttctataggacatttacttggtgctgcagggagcgttgaagcaatattcagtattcttgcgttaaataatggaattattccgccaaccttaaatttacacaagccttcagaaggatgtgatttaaattttgtaccgtttaaagctcaggagcataaaattcaatatgcactttctaattcgtttggttttggtggcactaatgcatcgctcatatttggacaagtttag

SEQ ID NO: 114677 - protein, 423 aa, Wolbachia endosymbiont of Drosophila melanogaster
MSRRVVVTGVGLITPLAADVDNTWSRLIKSESGIKAINTERFDSSDLACKIAGQVPLQSDNIEHHFNPLDYISEKDSKRTDRFIHYGIAAAIQAVDDSLILESQNINRERVGVTIGSGIGGLPSIQENVITMQEKGPRRVSPFFVPASLINLISGHISIKYEFTGPNDSAVTACATGAHAIINSARTIKLGEADVMIAGGAESALCRVGIAGFASMKALSTKFNDKPEEASRPWDEERDGFVMGEGAGILVLEEYEHAKKRGAKIHAELVGYGLTGDAHHITAPHPEGRGAFKAMQLALKSAQINPNQVGYINAHGTSTPLGDKIEVIAMKQLFGDYVYKIPVSSTKSSIGHLLGAAGSVEAIFSILALNNGIIPPTLNLHKPSEGCDLNFVPFKAQEHKIQYALSNSFGFGGTNASLIFGQV

SEQ ID NO: 114678 - DNA, 1272 bp, Bdellovibrio bacteriovorus HD100
  CDS (1)..(1272): transl_table=11
atgaactcccgatttgaacgtccatccaaaccacaaagaagagttgtcgtcaccggagtaggcgcagtcactccccttggtaataccattgaggacagctgggctgccgcaatccgtggtcaatctgggatcgccaagatcaccaaattcgacacgacaggcttcgatgtgacttttgccggcgaagtaaaaggtttcaacacagaccaatacgtcgagaaaaaagagcaaaagaaaatggacgagttcattcactactcgatcgcagcttccaaaatggccgtggaaatggccaagctggaactgaccgaagaagtgaagaatcaagcgggagtgattattggtgtcggtatcggtggtcttgcgaacatcgaagaaaccgccataaaaatgaaggaaagaggaccgggccgtatcagtccgttcttcatcccttctgtgatcacgaacctggccgcgggtcaggtgacgatctcattgggactgaaaggtcctaactattctgtgacttccgcgtgtgcttcaggtgttcactctatcggagatgcggttcgctatattcgcgacggcgtgactgatgtgatgcttgcaggtggcgcagaaagcacgatctgcggactggctgttggaggctttgcttccatgcgcgccctgtccacccgcaacgatgctcctgaaaaagccagccgtccttgggataaagaccgtgacggatttgttttggcagagggtgcggcggttctttgcatcgaatcccttgagcacgcggtcaaacgtggcgccaatattctttgcgaaatcacaggctacggagtttcctccgatgcttaccacatgacttccccggctccggaaggcgctggtggttatgcggcgatgtccatggctttgaaagactccggtctgaaagcggaagacatcaactatatcaacgctcacggcacaagtacgccggtgggtgacggccttgaaaccgcggcaatcaaacgcctgctgggtgatcatgcgaaaaaggtctgggtttccagcaccaagtccatgatgggtcacgcgttgggcgcagctggcgcaattgaatctgctttctgtgtgatggcaattcgcgaccaggtggctcctccaacgatcaacttggaaaatccaagtgaagactgtgatttggattacgttcctaatgaggcacgtaaaggtaaaatcaccaatgtcatcaacaacagctttggtttcggtggaaccaacgcctccatgatcttctctaaatacgaaggataa

SEQ ID NO: 114679 - protein, 423 aa, Bdellovibrio bacteriovorus HD100
MNSRFERPSKPQRRVVVTGVGAVTPLGNTIEDSWAAAIRGQSGIAKITKFDTTGFDVTFAGEVKGFNTDQYVEKKEQKKMDEFIHYSIAASKMAVEMAKLELTEEVKNQAGVIIGVGIGGLANIEETAIKMKERGPGRISPFFIPSVITNLAAGQVTISLGLKGPNYSVTSACASGVHSIGDAVRYIRDGVTDVMLAGGAESTICGLAVGGFASMRALSTRNDAPEKASRPWDKDRDGFVLAEGAAVLCIESLEHAVKRGANILCEITGYGVSSDAYHMTSPAPEGAGGYAAMSMALKDSGLKAEDINYINAHGTSTPVGDGLETAAIKRLLGDHAKKVWVSSTKSMMGHALGAAGAIESAFCVMAIRDQVAPPTINLENPSEDCDLDYVPNEARKGKITNVINNSFGFGGTNASMIFSKYEG

SEQ ID NO: 114680 - DNA, 1236 bp, Treponema denticola ATCC 35405
  CDS (1)..(1236): transl_table=11
atgagaagagttgtaattacaggcctcggtgccgtaacccccataggaaacaccctggatgaaacatgggaaggaatcaaagcaggtaaatgcggaatcggaaacattacccaatttgattgttccgattttaagattcagatagcggcagaagtaaaaaactttgacgcttcacaatttatggataaaaaagatgcccgtaaaatggcgcggttcactcaatttgccgtagccgcagcttcgcaggcaatgaaggatgccggcctttcaaaagaaaacatcgatgcaaaccgcacaggtataatactcggaaacggtataggcggttttgaaatctaccaagaagcctttaaaaaatactttcaagttgctccggatcgtattccgcctatgactgttcctcttcttattccgaatgaggcagccggaaacataagtatgcagttcggcataaagggaccgtcttggacattggccacggcctgtgcttccggtaccgatgctctcggaaacgctttagaccttgtccgctcaggaaggcttgatgtatgtgtatcgggcggtacggaagctacaattaccggtttcggcataagcggttttacgattttgcaaaccctcgcctcaggcgatcctgccaaggcttgctgtcccttcgataaaaagcgttcaggctttgtgatgggcgaaggctcaggcattctcatccttgaagaatatgaacatgcaaaaaaaaggggagctaaaatatatgcagaatttgcgggctatggagcctcctccgatgcctaccacttaaccagccccgacccctcaggtgacggaggagcattggctatcaccaacgccctcgccgatgcaggcgtaaaacctgaagaagttcaatactataatgctcacggaacatcgacgccgattaacgaccctgcagaaacggccatgattaaaaaagcttttggagaccatgcatataaaatgaaggtttcttcaaccaaatcgatgataggccattgcttaggtgccgcaggagctcttgaagctatcttctgtataaaggcaatggaagaaggattttatcccccgaccattaacctaaccgaacccgaccttgaagccggctgcgatttggactatgttccgaacaagggcgtcaaaggcgaaataaactgtgccgcctcaggctctctcggcttcggaggccataacggcgtcgccgtctttaaaaagataaagtaa

SEQ ID NO: 114681 - protein, 411 aa, Treponema denticola ATCC 35405
MRRVVITGLGAVTPIGNTLDETWEGIKAGKCGIGNITQFDCSDFKIQIAAEVKNFDASQFMDKKDARKMARFTQFAVAAASQAMKDAGLSKENIDANRTGIILGNGIGGFEIYQEAFKKYFQVAPDRIPPMTVPLLIPNEAAGNISMQFGIKGPSWTLATACASGTDALGNALDLVRSGRLDVCVSGGTEATITGFGISGFTILQTLASGDPAKACCPFDKKRSGFVMGEGSGILILEEYEHAKKRGAKIYAEFAGYGASSDAYHLTSPDPSGDGGALAITNALADAGVKPEEVQYYNAHGTSTPINDPAETAMIKKAFGDHAYKMKVSSTKSMIGHCLGAAGALEAIFCIKAMEEGFYPPTINLTEPDLEAGCDLDYVPNKGVKGEINCAASGSLGFGGHNGVAVFKKIK

SEQ ID NO: 114682 - DNA, 1341 bp, Strongylocentrotus purpuratus
  CDS (1)..(1341)
atggcaaggtgtttttccagatttacttacgatagcgaaggtgtggtgtgtcctctaggagtaggcattgatgtggtgtggccaaggcttttagaaggacagagtgggatcaccaaaataataggagatgagttcaaaggcatcccatgccaagttgctggttttgttccaaggggcaacaaacagggtgaatttgatgcacttcgatatgtctcatcatcagactttcggagcatgagtctggcaaccatcttttctcttgctgctgcacaggaagccctcttacaagcagagtggaaaccagagagtgacgatgacagaaacaacacgggtgtggccgttgggatgattatggcagaattgcaagatattgtggacgccggtcagactctcagagaaaagggctacaagaaacttactccatactttgtcccgaagattcttgctaaccttgcagccggtcacatcagcatcaagtacaacctcagaggtccaaaccatagcgtatcgacagcctgtactacgggggttcatgcgctgggtgatgcatcacggttcattcgtcacggggatgccaacgtcatgatagcaggagggacagaggcgtgcatatgtccattaggcttggctggatttgacagagcaagggcattgagcacaaagttcaacgacacacctgcacaggcatcaagaccatttgacaaggagagggatggctttgtgatgtcagaaggagctgctgtagtggttctggaggaattggagcacgctaaatcaagaggtgccacaatccttgctgaaatccttggttatggtttatcaggtgatgcaaatcacatgacctccccaagtgattatggcattggatctgagctgtgcatgaggaatgccctccgagatgccaagctgggccctgaggacgttacatacatcaacgcacacgcgacctctacacccaaaggagatgtcattgagaacatggcggtgaagaagctctttggttcccatggcgatcatcttccagctgtatcctccaccaagggagcaacaggtcacctcttaggagcagcgggtgcattggaagctgtgttcaccatcatggcatgccatacagcacaactcccacctacaatcaacttgacgtctacgactcccgagtttgatctgaactacgtccctctgacctcccaaccgtgggaaccgacgggtgaagggtcaggacgtcgggtcgctctcaccaactcctttggttttggaggaaccaatgcttgcctttgtgccagcctcaccgaggctaacctgaagtttgcattcgtgttattctacctgttgaccaggtga

SEQ ID NO: 114683 - protein, 446 aa, Strongylocentrotus purpuratus
MARCFSRFTYDSEGVVCPLGVGIDVVWPRLLEGQSGITKIIGDEFKGIPCQVAGFVPRGNKQGEFDALRYVSSSDFRSMSLATIFSLAAAQEALLQAEWKPESDDDRNNTGVAVGMIMAELQDIVDAGQTLREKGYKKLTPYFVPKILANLAAGHISIKYNLRGPNHSVSTACTTGVHALGDASRFIRHGDANVMIAGGTEACICPLGLAGFDRARALSTKFNDTPAQASRPFDKERDGFVMSEGAAVVVLEELEHAKSRGATILAEILGYGLSGDANHMTSPSDYGIGSELCMRNALRDAKLGPEDVTYINAHATSTPKGDVIENMAVKKLFGSHGDHLPAVSSTKGATGHLLGAAGALEAVFTIMACHTAQLPPTINLTSTTPEFDLNYVPLTSQPWEPTGEGSGRRVALTNSFGFGGTNACLCASLTEANLKFAFVLFYLLTR

SEQ ID NO: 114684 - DNA, 1362 bp, Nasonia vitripennis
  CDS (1)..(1362)
atgtcaggccgcggtttcctgaagagtttacgaggcttcggacgaaggagctcgagctcgtcgagcagcgatggtactggctcgagggcctccaggaggcgagtcgtcgtcacgggcatcgggatcgtgtcgccgctgggagtcggtaccaggcattcctggaaggaactgctcaaatgcaagtgcggagtcgtgaagctcgacgggccggattacgagaagcttccttgcagagttgctgctgtggtaccaaaaggagatggcccaaatgaattggacttgaagacaagattcacaacaagtgaattgcgaacaatgtgtccagctactgcctacgcgttaattgctgctgaagaagctcttacagatgctaattggaagccggaagatgaggatgacaaaagaaacactggagttgctgtgggaataggaatgattgacttggtggatgtatgcacgacttatgagcagttaaaaaaaggatactctaaagtcagtccatactttgtcccaagaatactccccaatatggctgctggacaaataagtattaaatatggattcagaggtcctaatcattcggtatcaactgcatgtgctacaggagctcatgccattggtgatgcttttcgattcgttcgaggtggagaaacgagcgtcatgttatgcggtggagctgaagcatgcatcagtccactggctatcgccgcgttttgtcgattgcgtgctttgagcacagccaaaaacgattttccgcaagaatcctccagaccattcgacaaagaaagagatggttttgttatgggcgagggatctgctattttagtattagaggagctcaaccatgcactggaaagaaacgcaaaaatatacgcagaagttttgggttacggattatctggtgacgcagttcatttaacagctccgagcgaagacggaactggcgcgcttctcgctatggatcgagccctaaaagatgctggcactgacactagcgaaataacttatgttaatgcacatgcgacgtcaacacctctcggtgatgccatagaattacgcgctatagagtcactatttggtgagcacagcaaaaatgtaaccgtctcgagtactaaaggagctcacgggcatttgcttggagcagctggtaatcttgaagctgcttttacgattcttgcattgcaagaaaaagtaatccctccgacgataaatttacacaacattgatggcgagacaaatttaaaattcgcacctaatagtaaacaaagatggtctgtcgatacgagacgtgttgcgttgaaaaatgcatttggatttggcggaactaacgcatctctatgcctggcagagtatactgactaa

SEQ ID NO: 114685 - protein, 453 aa, Nasonia vitripennis
MSGRGFLKSLRGFGRRSSSSSSSDGTGSRASRRRVVVTGIGIVSPLGVGTRHSWKELLKCKCGVVKLDGPDYEKLPCRVAAVVPKGDGPNELDLKTRFTTSELRTMCPATAYALIAAEEALTDANWKPEDEDDKRNTGVAVGIGMIDLVDVCTTYEQLKKGYSKVSPYFVPRILPNMAAGQISIKYGFRGPNHSVSTACATGAHAIGDAFRFVRGGETSVMLCGGAEACISPLAIAAFCRLRALSTAKNDFPQESSRPFDKERDGFVMGEGSAILVLEELNHALERNAKIYAEVLGYGLSGDAVHLTAPSEDGTGALLAMDRALKDAGTDTSEITYVNAHATSTPLGDAIELRAIESLFGEHSKNVTVSSTKGAHGHLLGAAGNLEAAFTILALQEKVIPPTINLHNIDGETNLKFAPNSKQRWSVDTRRVALKNAFGFGGTNASLCLAEYTD

SEQ ID NO: 114686 - DNA, 1326 bp, Magnaporthe grisea 70-15
  CDS (1)..(1326)
atgtctctgaggcgagtcgtcgtcacgggcataggcgccgtcacgcccttgggcgtgggagcccagcgatcctggcagcggctaatcgccggggcttcgggcatcacgagtgtcacgcaccttgagccgcttgacaggtggcaggagcttcccagcaccgttgcaggcctggtgccaacttctgcagctgcagacgcaaatgcaaatgcagcaaaatcacatggaggtgcaggcgacgtagacggcggcaaggcttcgggactgtggcgtccctcggactggctcgacgccacggaccagcgacgtatgtccaggtttgcccaatatgccttggcctcggctgacatggctttggaggatgctcggtggatgccggagacgccccatgatctcgaggcgactggagtttgcttgggaagtgggttacaaaaagtatcaccactgttcgcccccaagattctcatcaacctggctgccggtcatattgcgatgcaccatggcttccgtggcccaaaccatgccgcgaccactgcatgcacgacgggtgcccactccattggtgatgcagcgcgctttatcgcgttcggggacgcagacgttatggttgcgggaggctccgagtcgtgcatccacccgctgacctttgccggattcgcgaggtcccgatcgttgtcgacggctttcaatgacaaccctaccgccagctgcagaccatttgacgagagccgcgacggcttcgtagttgccgagggtgcagccgtcgtagtgctcgaggagcttgaacatgctctacgtaggggggcgcggatcctggccgagctgagaggatatggatgcagtggcgatgcgcaccacatgacggcaccgagggaggacggatctggtgctctggcggccatgaaaaaggctttgaagcatgctggagtcaggccggccgaggtcgactacatcaatgcccatgctaccgggactcggtcaggggatgcggccgaggcccttgccattcgatctctcatgctcggcgaggagggtctcgaaagagaggaccaggtgacagttagtagcaccaaagggtctaccgggcatttgctgggtgctgctggtgcagtagaggctgttttcacggcactggcagttgcagagaaccgagtaccgccaacaaagaacctcttcaaccccggggtcgggcccaacttcaactttgtggcaaatcaaacccaggagaggactgtcaatgttgcagtatcaaacagctttggatttggcggcacgaatgcctccctagtgttctcaaagcttgagcgtggaatgcaagggagtatctga

SEQ ID NO: 114687 - protein, 441 aa, Magnaporthe grisea 70-15
MSLRRVVVTGIGAVTPLGVGAQRSWQRLIAGASGITSVTHLEPLDRWQELPSTVAGLVPTSAAADANANAAKSHGGAGDVDGGKASGLWRPSDWLDATDQRRMSRFAQYALASADMALEDARWMPETPHDLEATGVCLGSGLQKVSPLFAPKILINLAAGHIAMHHGFRGPNHAATTACTTGAHSIGDAARFIAFGDADVMVAGGSESCIHPLTFAGFARSRSLSTAFNDNPTASCRPFDESRDGFVVAEGAAVVVLEELEHALRRGARILAELRGYGCSGDAHHMTAPREDGSGALAAMKKALKHAGVRPAEVDYINAHATGTRSGDAAEALAIRSLMLGEEGLEREDQVTVSSTKGSTGHLLGAAGAVEAVFTALAVAENRVPPTKNLFNPGVGPNFNFVANQTQERTVNVAVSNSFGFGGTNASLVFSKLERGMQGSI

SEQ ID NO: 114688 - DNA, 1284 bp, Gibberella zeae PH-1
  CDS (1)..(1284)
atgcgccgggtagtagtgactggcctcggagccatcacgcccttgggtgtaggcgtgaaacgaacctggacccgtcttctcagtggcgaatgcggaatcgtcagtgtcgcagatcttgagcctcaaacgcgatggaaagagttgacaagcacagtctctgggttagtgcccagcggtgacggtgaaggacaatggagggcatcagactggctcagcgcaaatgagcaaaggcgaatgtccaagtttacacaatatgccattgctgctagcgacatggctctcaaagatgcagggtgggagccaaagagcgaagaacaactggaagctactggtgtttgtctagggagtggtattggaaatctggatgagatttatgacaccagcttagtacaccataaagatggctacaaaaaggtatcaccactattcgtacccaaaattttgatcaatatggcggctggtcacatagccatgaaatatggtttccaaggccccaaccatgcagcaactacagcttgcacaaccggtgcgcattcaattggagatgcatcacgcttcatcagcatgggagacgccgatatcatggttgcaggaggctcagaatcgtgcattcatcccttgacatttgcaggcttcggcagagcaagatccttatcgacagcatacaacaacaatcccacagcgagctgccgcccatttgatgccgaccgcaacggtttcgtggtttctgagggtgctgcggttctgattctcgaagagctggagcacgccaaagcacgaggagctcgcatctatgctgaaattaaaggctatggctgcagcggcgatgcccatcatatgacagcaccacgagaagacggtcgcggcgcatttcttgctatgaagaaagctttaaagaatgctggagttaagccttcacaagttgattatatcaacgcacacgcgacagcgacaaacgttggagatgtggcagagacttcggctattaggcgactcatgttaggtgaagagggacatgaaaaagaatcagacattacagtcagcagtaccaaaggtgcagttggacatttgttaggtgctgctggagccattgaggccttgttctctgtcctagccattcaccagagagttgtacctgcgactttgaatttacagaagccagatgttggtgctgcctttaactttgtaccgaatgcggcacaggaaagaaacgttggcgtagctgtatccaacagctttggatttggtggtacgaatagctcattggtattctccaagtactga

SEQ ID NO: 114689 - protein, 427 aa, Gibberella zeae PH-1
MRRVVVTGLGAITPLGVGVKRTWTRLLSGECGIVSVADLEPQTRWKELTSTVSGLVPSGDGEGQWRASDWLSANEQRRMSKFTQYAIAASDMALKDAGWEPKSEEQLEATGVCLGSGIGNLDEIYDTSLVHHKDGYKKVSPLFVPKILINMAAGHIAMKYGFQGPNHAATTACTTGAHSIGDASRFISMGDADIMVAGGSESCIHPLTFAGFGRARSLSTAYNNNPTASCRPFDADRNGFVVSEGAAVLILEELEHAKARGARIYAEIKGYGCSGDAHHMTAPREDGRGAFLAMKKALKNAGVKPSQVDYINAHATATNVGDVAETSAIRRLMLGEEGHEKESDITVSSTKGAVGHLLGAAGAIEALFSVLAIHQRVVPATLNLQKPDVGAAFNFVPNAAQERNVGVAVSNSFGFGGTNSSLVFSKY

SEQ ID NO: 114690 - DNA, 1323 bp, Apis mellifera
  CDS (1)..(1323)
atgtttatctcgtttgttattattaatcgtacattaacaaccgctgcaagatgcaaacggcgagttgtggttacaggattaggagtagtatctcctcttggaattggtacacagaatgcttggcaagctctcattgcttccaaatcaggtatcactaagctgattaatccagaatatgacaaattaccttgcaaagtcggtgcattaatacccaaaggaaataatcctaatgaattaaacattgattcatattttacaaaaagtgagttacgtacaatgtgccctgctactgcttatgctttaatagctactgaagaagcattaaataatgcaaattggaaaccaaaagatgaaactgataaaagagatacaggtgtagcagtaggaattggaatgatagatttaattgatgtatgtgcaacatatgaagctttaaaaaaaggatataataaagttagtccttattttgtaccaagaatattaccaaatatggctgcaggacaaattagtattaaatatggttttcgtggtccaaatcattctgtttcaacagcatgtgcaactggagcacatgcaattggtgatgcatttcgttttattcgtggtggagaaactagtgtaatgatatgtggtggagcagaagcatgtattagtcctcttgctatagctgcattttgtagacttcgtgcattaagtactaataaaaatgattttccatatgaagcatcacgaccatttgataaagatagagatggatttgttatgggagaaggtgctgctatattagtattagaagaattaaatcatgcacttgaaagaaaagctaatatttatgcagaagtattaggatatggtttatctggtgatgcagcacatttaactgcacctagtgaagatggtactggtgctatattagctatggatagagcaataaaagatgctggcataaaaaccatagaaattacttttattaatgcacatgcaacttcaactcctttgggtgatagcattgaattaaaagctatagaatcatttatgggtcatcatagtaaaaatataacagtgtctagtacaaaaggtgctcatggtcatttgttaggagcagcaggaaacttagaagctgtttttactattttagcaataaaagagggtatcattcctccaacattaaatttacataaattagacacaaaaacaaatttaagttttgctcctaatgtaaagaaaaattggaatacagtttcgagacgtgtagctttaaaaaatgcttttggctttggaggaacaaatgcatgcttatgctttgcccaatataatgaataa

SEQ ID NO: 114691 - protein, 440 aa, Apis mellifera
MFISFVIINRTLTTAARCKRRVVVTGLGVVSPLGIGTQNAWQALIASKSGITKLINPEYDKLPCKVGALIPKGNNPNELNIDSYFTKSELRTMCPATAYALIATEEALNNANWKPKDETDKRDTGVAVGIGMIDLIDVCATYEALKKGYNKVSPYFVPRILPNMAAGQISIKYGFRGPNHSVSTACATGAHAIGDAFRFIRGGETSVMICGGAEACISPLAIAAFCRLRALSTNKNDFPYEASRPFDKDRDGFVMGEGAAILVLEELNHALERKANIYAEVLGYGLSGDAAHLTAPSEDGTGAILAMDRAIKDAGIKTIEITFINAHATSTPLGDSIELKAIESFMGHHSKNITVSSTKGAHGHLLGAAGNLEAVFTILAIKEGIIPPTLNLHKLDTKTNLSFAPNVKKNWNTVSRRVALKNAFGFGGTNACLCFAQYNE

SEQ ID NO: 114692 - DNA, 1347 bp, Candida glabrata CBS 138
  CDS (1)..(1347)
atgtctagaagggtggtagttacggggcttggttgcgtgacaccgctggggaagagcgtgaaggaatcatggcataggctgttgcaacgggacagcaatggtctggtaaagttggatcaattgaccaaaggtgatttcgccaagtggcgtggtatattcccgccagagctgcgagttggtgctgtttcaccaattgaatcatttgaagtaaactcgcagctgttcacttcgcaggacgacagaaggatgtcccggttcatcaagctggctacaattgctagttatgaggccctagtgagtagtggactagtgaataaggaaacaaagatgtcggaggatggtaggataccaatcgaccagcataatcaagggatcgaccccgataaagtaggatgtctcatcggatcagggattggatcaatcgaggacatatatgagacatcggtaacctttgactcaaacacgaagaagaacagaataaatccatactttgtgccgaggatcctgaccaacatggctgcaggtaacattgcgataaagtttaacctgagaggtccgacgcatagtgtatccaccgcatgtgctactggaaacaacgccataggtgatggctataacatgatcaagttggggatgcaagatatctgcctcgctggtgcgtcagaggcaagtgttcacccgttaagtctggctggtttcctgagggctaagagtctatcaccagatggtatatccagacctttcgatgaagagagaaacggttttgtcctgggtgaaggtgccggtattgtggtgttggaatcactcgagagtgctgagcgtagaggagcgccaattcttgcagagatagtcggttatgggctaagttgtgacgcacaccacataacgtcaccaccgaatgacggagaaggtgcaagccgtgcaatcaagatggcactagatttatcacatgggaatgtgaatgccagggatattgaatacgttaacgctcatgcaacatctacaaagttgggcgataataccgaatgctgtgccatacagaacactctaattgataatgtgaatagacagaagcccctatacatatcgagtaataagggctctattgggcacttgcttggtgcagctggtgcagctgagagtatttttacgatattgtcactgtataacaggactattccgcacacttacaatctgaagaatgttttgggaaattttgaaagctcgtcaatgcgttttgtcaagagccagccacacaaagtagcagatttggaatatgctttatgtaatagtttcggatttgggggtgttaatacatctctactcttcaggagatggcatgaataa

SEQ ID NO: 114693 - protein, 448 aa, Candida glabrata CBS 138
MSRRVVVTGLGCVTPLGKSVKESWHRLLQRDSNGLVKLDQLTKGDFAKWRGIFPPELRVGAVSPIESFEVNSQLFTSQDDRRMSRFIKLATIASYEALVSSGLVNKETKMSEDGRIPIDQHNQGIDPDKVGCLIGSGIGSIEDIYETSVTFDSNTKKNRINPYFVPRILTNMAAGNIAIKFNLRGPTHSVSTACATGNNAIGDGYNMIKLGMQDICLAGASEASVHPLSLAGFLRAKSLSPDGISRPFDEERNGFVLGEGAGIVVLESLESAERRGAPILAEIVGYGLSCDAHHITSPPNDGEGASRAIKMALDLSHGNVNARDIEYVNAHATSTKLGDNTECCAIQNTLIDNVNRQKPLYISSNKGSIGHLLGAAGAAESIFTILSLYNRTIPHTYNLKNVLGNFESSSMRFVKSQPHKVADLEYALCNSFGFGGVNTSLLFRRWHE

SEQ ID NO: 114694 - DNA, 1290 bp, Kluyveromyces lactis NRRL Y-1140
  CDS (1)..(1290)
atgagtctcaaacgtgtagttgtcactggtcttggggcctacacgccccttggttctacagtttcaaagtcttgggcaggtttgcttgctgctaagcaatcactaatacccttagatgctttctacaacagagaagactttgcaaaagtgaaaaagttggtcccactagatacagcagtgagtaggttacatgccgatccattagatactttcccagagtatgatcagcgaagaatgacacctgctcaccagatcgttttggaaaagactaaagaagcattacttcaagcgaatttaattgctgatgagaatctaaacactttgaccgaagatatagataagacaaaagtgggatgcgttatcggtactgggatgccttctatgcctgatttagaatctacgatttctacacttttcactaaaccgaaggtgtctcctttcttgatcccgcgtgtgctacccaatatggccatggggaacgtcatgatcaaatacgggatacaaggtccttccagctgtccttcaacggcatgtgcaaccggaaattctagcataatcgagggattcaactcaattcaattaggtctcgcagatgtcatgatttgtggttcttatgaattcagtatagatccaatatctattgccggattttatagatcgaaaaccatcagtaaaaaacaccaaacgagaccatttgatgtggaacgtgatgggtttatcatgggagaagggtgtggtatacttacgcttgagtccctagaatctgcactcaagagaggttctccaatactggccgaaattagtggtgtcggcttgagcaatgatggatatcatattacttctccattaccagatggatcggggggcaaactggcgatgcaaaacgcattgaaaagagcaaatattgctccacaacaagtaggatatattaacgcccatgctacttcgacacaactaggagatgtggctgaaagtacagcaatcacagaattatttggcaccaaaagtacaggaacggcaccatatgtcagtagtaacaaaggtcacattggccacttactgggcgcgtctggctcagtagaatctatatttaccgtcttgtcgttgaaatatggccgcttcccccatactctcaacttgaagactgttgatgaaacatcaatcataaacgagttaaatctaataaagaacgaatctatgattgataactccattgaatatgcattgacaaattcatttgggttcggtggagttaatacatccattttgttccgtaaatatcatcaataa

SEQ ID NO: 114695 - protein, 429 aa, Kluyveromyces lactis NRRL Y-1140
MSLKRVVVTGLGAYTPLGSTVSKSWAGLLAAKQSLIPLDAFYNREDFAKVKKLVPLDTAVSRLHADPLDTFPEYDQRRMTPAHQIVLEKTKEALLQANLIADENLNTLTEDIDKTKVGCVIGTGMPSMPDLESTISTLFTKPKVSPFLIPRVLPNMAMGNVMIKYGIQGPSSCPSTACATGNSSIIEGFNSIQLGLADVMICGSYEFSIDPISIAGFYRSKTISKKHQTRPFDVERDGFIMGEGCGILTLESLESALKRGSPILAEISGVGLSNDGYHITSPLPDGSGGKLAMQNALKRANIAPQQVGYINAHATSTQLGDVAESTAITELFGTKSTGTAPYVSSNKGHIGHLLGASGSVESIFTVLSLKYGRFPHTLNLKTVDETSIINELNLIKNESMIDNSIEYALTNSFGFGGVNTSILFRKYHQ

SEQ ID NO: 114696 - DNA, 1314 bp, Debaryomyces hansenii CBS767
  CDS (1)..(1314)
atgtctaaaagaattgtcgtgacaggtcttgggctagtaacaccattgggagttggggtaaagtcatcatgggctaatcttattgcaaacaagagtggattgatttcaacaactacgttaccggattatgaatcggccgggtgggataaaataccatcgaaagttgtaggtaaagtcccacaaggcccaattactgaaggaaaatggacttcgacggatcattttgaaaaaggagaagcaagaaggtttgcattgttttcacaatacggcctcgttgctacagaagaagcgttgaaggatgctaattggtttccgcaaagtgaagaggaacagaattataccggggtagctgtgggaagtggaataggttcattcgaagatgtatatgaaaactctgtgaatttttcacaatctggatataaaaaggttcaaccattattcgtacctaaaatattgactaatatggctgctgggaatatatctataaagtatggattaaagggccctaatcattcagtttcaacagcatgcgctacaggtttacattccataggagatgcatataattttattaaaaacggctatgcgaaggttatggttgcaggtggaactgaagccaccattcatccattggcattagctggttttgcaagagccaagtcagttgtgacgaattataatgatgatccaacaaaagcatctagaccatttgacaaagatagaagtggattcgtattatcagagggatgcgggatgatgattttagaagagcttgaccatgctttgaatagaggcctcacagagaaggatatatatggagaaatcaaagggtatggtttatcgggagatgcaaatcatattaccgctccacgcgaagatggtgatggtgcttacagagctatgacgatggccttgaaatttgccggagtatcaccagaggaagttgattacgtcaatgctcatgctacgtctacagtaataggggatagatcagagaataatgcaattgcagaattatttaaaaataataacaatttatctgtatcatccaccaagtcgtcaattggtcatttattgggagcagccggagccgttgagctgatatttacggtcaaaactataaaggagaatatgatgccaccatctttaaacttggataatattggtggtcatgaagacgacgactcatctatgtttaacaagtttgattacattccgaatgaaagcaaacagaagcaagctaattactccctttgtaattcctttgggtttggtgggaccaatagttcattatgtttaagcaagtacaagtag

SEQ ID NO: 114697 - protein, 437 aa, Debaryomyces hansenii CBS767
MSKRIVVTGLGLVTPLGVGVKSSWANLIANKSGLISTTTLPDYESAGWDKIPSKVVGKVPQGPITEGKWTSTDHFEKGEARRFALFSQYGLVATEEALKDANWFPQSEEEQNYTGVAVGSGIGSFEDVYENSVNFSQSGYKKVQPLFVPKILTNMAAGNISIKYGLKGPNHSVSTACATGLHSIGDAYNFIKNGYAKVMVAGGTEATIHPLALAGFARAKSVVTNYNDDPTKASRPFDKDRSGFVLSEGCGMMILEELDHALNRGLTEKDIYGEIKGYGLSGDANHITAPREDGDGAYRAMTMALKFAGVSPEEVDYVNAHATSTVIGDRSENNAIAELFKNNNNLSVSSTKSSIGHLLGAAGAVELIFTVKTIKENMMPPSLNLDNIGGHEDDDSSMFNKFDYIPNESKQKQANYSLCNSFGFGGTNSSLCLSKYK

SEQ ID NO: 114698 - DNA, 1263 bp, Yarrowia lipolytica CLIB122
  CDS (1)..(1263)
atgacaagagtagtggtgacaggacttggtctggtcagtcccctcggagtcggagtaaaacaggcatggaaccgacttattgctggaaaatctggaattgtggctctcgacgaacggttcgacgctttatcctgccgagtaggaggagtggtccctcaggacgaatggtctgaagcttcatctgccaacctcgcagctggagagatcaaacgggtacctctgtttgcccagtatgccatggtggctgcccaggaggctgtcaacgacagcaaattgctagctgacgcaggggagtcagctaaacacacagatattggatgttcgattggtactggaatcgccaacatggctgaactggcagatacagtcacagctttcaacaacaagggtccccgaggtatttcaccactatttgttccccgaatcattgctaacatgggtgcgggacacgtcagtatgcggttcggtctccaaggacccaatcactctgtatccactgcctgtgccactggagctcacagcataggagatgcagccaacttcattcgactgggatacgcgaaggctatgattgccggatcaaccgaggcctgtatgcacccaattgcacttggtggatttgcacgggccaagagtgtggctaccaagtggaacgactccccctctgaagcatccagaccctttgataaagatcgaggaggatttgttatgggcgagggatctgctgttcttgtcctagaggaatatgaacacgccgttgcccgtggtgctcccatttacgctgaagtgtgtggttacggtctttctggagatgctcatcacattactgcccctcctgatgatggaaacggggcctatcgagccatgaaacaggctctcaagcaggccaatgtttctgccgtcaagatcgattatgttaacgcccatgccacttccacccctcttggtgacgcggctgaaaatgctgctctgactcaactctttgagggcagaaacctgtctgatatcgccgtttcttccaccaagggtgccattggccatcttctgggtggagctggatctgtggaggctctgttcaccatcaaggctctcgaaactggagacttgcctcccactctcaacctcaatgagctttctgaccctgatgtcttcaagttcaactttgtgcccaaggagactcagcaccgtgatgtccggtatgcactcaacaacagtttcggattcggaggcaccaactccagtcttctttttggtaaggtatag

SEQ ID NO: 114699 - protein, 420 aa, Yarrowia lipolytica CLIB122
MTRVVVTGLGLVSPLGVGVKQAWNRLIAGKSGIVALDERFDALSCRVGGVVPQDEWSEASSANLAAGEIKRVPLFAQYAMVAAQEAVNDSKLLADAGESAKHTDIGCSIGTGIANMAELADTVTAFNNKGPRGISPLFVPRIIANMGAGHVSMRFGLQGPNHSVSTACATGAHSIGDAANFIRLGYAKAMIAGSTEACMHPIALGGFARAKSVATKWNDSPSEASRPFDKDRGGFVMGEGSAVLVLEEYEHAVARGAPIYAEVCGYGLSGDAHHITAPPDDGNGAYRAMKQALKQANVSAVKIDYVNAHATSTPLGDAAENAALTQLFEGRNLSDIAVSSTKGAIGHLLGGAGSVEALFTIKALETGDLPPTLNLNELSDPDVFKFNFVPKETQHRDVRYALNNSFGFGGTNSSLLFGKV

SEQ ID NO: 114700 - DNA, 1326 bp, Candida albicans SC5314
  CDS (1)..(1326): transl_table=12
atgacacgagtagtagttacaggaatggggatggtcagtcctcttggagttggattatcacgtaactggaaacaattaattgccaataaatcaggattaatatcaacaacaacattacccgattatgaatcagctggatgggacaaaatcccatcaaaagtaattggtaaagtaccgcatggaactatcctggagggtcattggcaagttggagatcatatacctgcaagtgaagcacgaagaatggctacatttagtcattatgcactagcatctactcatgaagctttacaggatgctcgattattaactgaagataataatgctttaaatatggatacaaataaggttggagtagcagtaggaagtgggattggatcatttgaagatatttataataattcaattgcttataatgcatccgggtataaaaaagttcaaccattatttatccccaaattgttaaacaatatggctgcaggaaatatttcaattaagtatcaaactaaaggtcccttacattcagtatcaacggcatgtgccactggtttacaggccattggtgatggatttaattttttgaaaatgggatatggtcaagtaatgatttgtggtggtacggaaagttcaatacatccattagcattagccggttttgctagagcaagatcagtagtcacagattctgaatttaattctaatccaacgaaagctagtcgaccatttgataaatcaagaaatggatttgtgttaagtgaaggatgtgggattttagttttagaaactttatctcatgctttagaaagaggagttacacctgatcaaatttatggggaaattcttgggtatggtgtttctggtgatgcgtatcatataacggcaccccatgaagatggtactggggcatataatgccatgaatcaagcaattgaaagaagtggtatagatccagaacaaatcgattatgtgaatgctcatgctacatcaactgtgattggtgatcgggcggaaaataatgccatgatgaggttatttaatccacagaaaacaaaagtatcatcgacaaaatcttcaattggtcatttattaggtgccgcgggtgccgttgaatcaattttcacattaaatgccatcaaaacaggtcaaataccagcaactttaaatctcgataatgtaggacaacatgaaggagatgaacaatcacaatttaagtttgattatgttgctaataagagtattactatggatgttaattatgcagtatgcaattcttttggatttggcggtgtcaatagtagtttatgcttcgcaaaataccacaattga

SEQ ID NO: 114701 - protein, 441 aa, Candida albicans SC5314
MTRVVVTGMGMVSPLGVGLSRNWKQLIANKSGLISTTTLPDYESAGWDKIPSKVIGKVPHGTISEGHWQVGDHIPASEARRMATFSHYALASTHEALQDARLLTEDNNALNMDTNKVGVAVGSGIGSFEDIYNNSIAYNASGYKKVQPLFIPKLLNNMAAGNISIKYQTKGPLHSVSTACATGLQAIGDGFNFLKMGYGQVMICGGTESSIHPLALAGFARARSVVTDSEFNSNPTKASRPFDKSRNGFVLSEGCGILVLETLSHALERGVTPDQIYGEILGYGVSGDAYHITAPHEDGTGAYNAMNQAIERSGIDPEQIDYVNAHATSTVIGDRAENNAMMRLFNPQKTKVSSTKSSIGHLLGAAGAVESIFTLNAIKTGQIPATLNLDNVGQHEGDEQSQFKFDYVANKSITMDVNYAVCNSFGFGGVNSSLCFAKYHN

SEQ ID NO: 114702 - DNA, 1272 bp, Strongylocentrotus purpuratus
  CDS (1)..(1272)
atggcatgtagtgtgaagataattaagagattaaaagttagaacactattgcaaatccacgaaaggagtatttctacgtctgtatgtacactgagtcgcaggagagttgtggtcactggagtaggtgtggtgtgtcctctaggagtaggcattgaggtggtgtggccaaggcttttagaaggacagagtgggatcaccaaaataacaagagatgaattcaaaggcatcccatgccaagttgctggttttgttccaaggggcaacaaagagggtgaatttgatgcacttcaatatgtctcatcatcagactttcgaagcatgagtctggcaaccatctttgctcttgctgctgcacaggaagccctcttgcaagcagaatggaaaccagagagtgacgaagacagaaacaaaacgctacccatgcagggctacaagaagcttagtccatactttgtcccaaagattcttccaaaccttgccgccggtcacatcagcatcaggtacaacctcagaggtccaaaccactgtgtatctacagcctgtactacaggggttcatgcgctgggtgatgcgtcacggttcattagtcacggggatgccaaggtcatgatagcaggagggacagaggcgtgcatatgtccactaggcttggctggattcgccagagcaagggcattaagcacaaagttcaacgacacacctgcacaagcatcaagaccgtttgacaaggatagggatggctttgtgatgtcagaaggagcggctgtagtggttctggaagaattggagcatgctaaatcaagaggtgccacaatcctggctgaaatccttggttatggtttatcaggtgatgcaagtcacatgacctccccaagtgagtctgggattggatctgagctgtgcatgaggaatgctctctccgatgccaagctgggccctgaggacattacatacatcaacgcacacgcgaccgctacacccacaggagatgtcattgagaacacggcggtgaagaggctctttggttcccatggcaaccatcttccggctgtatcctccaccaagggagcaacaggtcacctcttattagcacaactcccaccgacaatcaacttgacatctacgactcctgagtttgatctgaactacgtccctctgacctcgcaaccatgggaaccaacgggcgaagggtcaagacgtcgggtcgctctcaccaactcctttggttttggaggaaccaatgcttgcctgtgtgttggaagcatttcttga

SEQ ID NO: 114703 - protein, 423 aa, Strongylocentrotus purpuratus
MACSVKIIKRLKVRTLLQIHERSISTSVCTLSRRRVVVTGVGVVCPLGVGIEVVWPRLLEGQSGITKITRDEFKGIPCQVAGFVPRGNKEGEFDALQYVSSSDFRSMSLATIFALAAAQEALLQAEWKPESDEDRNKTLPMQGYKKLSPYFVPKILPNLAAGHISIRYNLRGPNHCVSTACTTGVHALGDASRFISHGDAKVMIAGGTEACICPLGLAGFARARALSTKFNDTPAQASRPFDKDRDGFVMSEGAAVVVLEELEHAKSRGATILAEILGYGLSGDASHMTSPSESGIGSELCMRNALSDAKLGPEDITYINAHATATPTGDVIENTAVKRLFGSHGNHLPAVSSTKGATGHLLLAQLPPTINLTSTTPEFDLNYVPLTSQPWEPTGEGSRRRVALTNSFGFGGTNACLCVGSIS

SEQ ID NO: 114704 - DNA, 1266 bp, Tribolium castaneum
  CDS (1)..(1266)
atgacgcgccgagtcgtcgtgacgggcatgggggtcctggcccccgtcggccttaacctcactcaggcctgggcgaccataacttcgggcaaatcgggcatttcccagctcgagggccccgcgtacgcccccttgccgtgccgaatcgccggcttgatcaaagaaaagggggctcgaatcgacctaacctcccgtttcaaaaaaaccgaactcaaatcaatgggggctgcgaccgcttacgccctccttgccgcccacgaggccttgaccgattccggccttgtgagcccccctgacagtgttaagctccggacaggggtcgccgtcggtatggggatggtcgatttggaggatatttgcgcaactagtgacgccctcaagcggggctacaaccaagtgagcccctttttcgtcccgcggattctccccaacatgtgcgccgggcagattagcatcaagtatggtttcagggggcccaaccatgccgtttcaacggcgtgtgccacgggggctcacgctattggagactcgttcaggtttataagacacggggatgcggatgtgatggtgtgtgggggcgccgaggcgtgcatttcgccccttgctatcgcggcgttttgccggctgagggcactaagtaccgggtttaatgacagcccccagaaggggtcccggccgtttgataaagcgcgcgatgggtttgtgatgggtgaaggtagtgcgattttaattttggaagagttgcaacatgccaaagacaggggggctaaaatttatgcggagattttggggtatgggttatcgggggacgcttcgcatttaacggcgcctaggtccgacgggacgggggctattttagccatgagccgggcggtggaagacgccggtgtggataagggggctgtggggtatatcaatgcccatgcaacttcaactccaattggggatgccattgagacaactgcgattaaaaccttgtttaaggattatttggggcccaatttcgccgtgtcgtcgactaagggggctcatggccatttgttaggggcggcggggaacctcgaaactgtctttacggttaaagcggttgaggaaggggtgctaccgcctacaattaatctcgaaaattgtgaagattcaagtttgaactttgtgccaaatcagagccaaccttgggcccccacaagtccaagggtggcccttaaaaatgcgtttggcttcgggggcaccaacgcttgtctctgtatctcccaatttgtaaattaa

SEQ ID NO: 114705 - protein, 421 aa, Tribolium castaneum
MTRRVVVTGMGVLAPVGLNLTQAWATITSGKSGISQLEGPAYAPLPCRIAGLIKEKGARIDLTSRFKKTELKSMGAATAYALLAAHEALTDSGLVSPPDSVKLRTGVAVGMGMVDLEDICATSDALKRGYNQVSPFFVPRILPNMCAGQISIKYGFRGPNHAVSTACATGAHAIGDSFRFIRHGDADVMVCGGAEACISPLAIAAFCRLRALSTGFNDSPQKGSRPFDKARDGFVMGEGSAILILEELQHAKDRGAKIYAEILGYGLSGDASHLTAPRSDGTGAILAMSRAVEDAGVDKGAVGYINAHATSTPIGDAIETTAIKTLFKDYLGPNFAVSSTKGAHGHLLGAAGNLETVFTVKAVEEGVLPPTINLENCEDSSLNFVPNQSQPWAPTSPRVALKNAFGFGGTNACLCISQFVN

SEQ ID NO: 114706 - DNA, 1248 bp, Prochlorococcus marinus str. MIT 9303
  CDS (1)..(1248): transl_table=11
atgatggaggatctccatcgggttgtgatcaccggtctcggagcggtcacaccgattggcaacacggtcgcggactatttagaagggttgaagacagccaacaatggcgtaggcgccatcagcctgtttgacgcgtcagcccatgcatgtcgctttgccgcagaggtcaaagactttgacccaaccggtttcctcgaagcgaaggaatcaaaaagatgggatcgattcagcaaattcggtgtagtagccgccaagcaggcagttgctgatgccggtctaagcatcgaagaggaaaatgcctcccgcatcggggtgattattggttcaggtgtcggtggtctgctcaccatggagacccaagcccacgttttgaatgagaaaggtcccggtcgggtcagcccattcacagtgccgatgatgatccccaacatggctactgggcttgccgccattgcgttgggggccaaaggacccagctcagcagtagccacagcctgtgcagctggatccaatgccatcggcgatgctttcaggctgctgcaactcggcaaagctgatgtaatggtgtgtggtggtgcagaagcaagcatcacgccactaggtgtggctggcttcgccagtgccaaggccctctccttccgcaatgatgaccccgccacggctagccgtccgttcgatgcagaacgagatggattcgtcatcggggaaggatctggcgtcctggtccttgaaacccttgagcacgccaaaaatcgcgatgccacgatccatgctgagattgtgggctatggcatgacctgcgatgcccaccacatcacctcaccaacccctggcggcgttggtggtgcagaagcaatccgcctggccctaaaagacggacagctggagcccaccagcgtggattacatcaatgcccatggcaccagtactcctgccaatgacagcaacgaaacagcagccatcaaaaatgctctcggcgagagggcttatcagattcctgtgagctccacaaaatccatgacgggtcaccttcttggtggatctggcggcattgaagctgtggcatgcgtgcttgcccttcagcacggcatggtgcctcccaccattaattacctcaacccagatccacagtgtgatctggactatgtccccaacatcgccagagaacacagattaagcgtggtgctctccaattccttcggcttcggcggccacaacgtctgcctcgccttccgccaaatggcctaa

SEQ ID NO: 114707 - protein, 415 aa, Prochlorococcus marinus str. MIT 9303
MMEDLHRVVITGLGAVTPIGNTVADYLEGLKTANNGVGAISLFDASAHACRFAAEVKDFDPTGFLEAKESKRWDRFSKFGVVAAKQAVADAGLSIEEENASRIGVIIGSGVGGLLTMETQAHVLNEKGPGRVSPFTVPMMIPNMATGLAAIALGAKGPSSAVATACAAGSNAIGDAFRLLQLGKADVMVCGGAEASITPLGVAGFASAKALSFRNDDPATASRPFDAERDGFVIGEGSGVLVLETLEHAKNRDATIHAEIVGYGMTCDAHHITSPTPGGVGGAEAIRLALKDGQLEPTSVDYINAHGTSTPANDSNETAAIKNALGERAYQIPVSSTKSMTGHLLGGSGGIEAVACVLALQHGMVPPTINYLNPDPQCDLDYVPNIAREHRLSVVLSNSFGFGGHNVCLAFRQMA

SEQ ID NO: 114708 - DNA, 1239 bp, Clostridium difficile 630
  CDS (1)..(1239): transl_table=11
atgaataaaagagtagtaataacaggacttggatgtgttacgccgttgggaacaggaaaagaagagttctggagtaatataaaatctggagtatctggtatagataaaataactaattttgatgctagcacatatcaaactcagatagcaggagaagttaagaattttcatccagaagaatatataagtaaaaaagaattgaagagattagataaatttgctcaatttgcaatagtatctgctaaattagcagttgaagatgcaaatcttgatttagataaagttgatagagaacgttttggtgttataataggttctggaataggtggagttgaagctatagaaactcaacataaaattcttttggaaaaaggaaataaaagagtaagttcactttttgtacctatgatgataggaaatatggcagctggtcaagtttcaatatttttaggagcaaaagggcctaacactaatgtatgtacagcttgtgcatcaggaactcattcaataggtgatgcttttaaggtaattcaaagaggtgatgcagacatcatggtagcagggggctctgaagctgctgtaacaggtcttgcttttgctggattctgtaacatgaaggctatgtcaactagaaatgatgaccctaaaactgcatcaagaccatttgataaagacagagatggttttgtaatgggagaaggagcaggtattgttatcttagaagacttagaacatgctttagcaagaggcgctaaaatatatgcagaagtagttggatatggtttaactgctgatgcataccatatgacaactccagctgaaaatggagagggagcagctaggtctatgaatatggctttgaaagatggaaatgttccattagaagaagtagattatataaatgctcatggaacttcaacttattacaatgatttatatgaaactatggctataaaaactgtatttggagaaaaggcatatgacttatgtgtgtcatcaacaaaatctatgactggtcacttattaggagcatcaggtgctatagaggctgttgtttgtgctatgagtatagaagatagttttgtgcctccaactataaacatacaagaagttggtgaagatttggatttagattatgttccaaatcaaggtaaagaaaaaaatattagatatgcactatcaaattctttaggatttggtgggcataatgctacaatagtactaaaaaaatatgtataa

SEQ ID NO: 114709 - protein, 412 aa, Clostridium difficile 630
MNKRVVITGLGCVTPLGTGKEEFWSNIKSGVSGIDKITNFDASTYQTQIAGEVKNFHPEEYISKKELKRLDKFAQFAIVSAKLAVEDANLDLDKVDRERFGVIIGSGIGGVEAIETQHKILLEKGNKRVSSLFVPMMIGNMAAGQVSIFLGAKGPNTNVCTACASGTHSIGDAFKVIQRGDADIMVAGGSEAAVTGLAFAGFCNMKAMSTRNDDPKTASRPFDKDRDGFVMGEGAGIVILEDLEHALARGAKIYAEVVGYGLTADAYHMTTPAENGEGAARSMNMALKDGNVPLEEVDYINAHGTSTYYNDLYETMAIKTVFGEKAYDLCVSSTKSMTGHLLGASGAIEAVVCAMSIEDSFVPPTINIQEVGEDLDLDYVPNQGKEKNIRYALSNSLGFGGHNATIVLKKYV

SEQ ID NO: 114710 - DNA, 1242 bp, Herminiimonas arsenicoxydans
  CDS (1)..(1242): transl_table=11
ttgagccgctctagtaaacgtcgtgtcgtagtcactggtctaggttgtgtttctcccgttggtaacaatgttgctgatgcatggaatgccctccttgcaggacaatccggtatagctaccattaccaagtttgatgcgactcccttcagcacgcactttgctggagaagtaaaaaacttcaatatcgaggactacattcccggtaaggaagcgcgccacatggatacattcatccattacggcgtggcagcaggtatgcaagcctggcaggattgcggattggttgtgaccgaggaaaatgccgagcgtatcggcgtcatcgtcggttccggcatcggtggcttgcccctgatcgagaacacgcacgccgaactcgtcaaccgtggccctcgtcgtatcagcccgttctttgtgccggcgtctatcatcaacatgatttccggccatctttcgatcatttatggtttgaagggtccgaacatggcagtggtaacggcttgcaccaccggtttgcattcgatcggcacagccggtcgcatgattgaatacggtgatgcagacgtgatgattgccggcggcgcagaatcgaccatttcgccattgggtctgggcggtttcgcttccgcccgtgcgctgtcttcacgcaatgatgatccgacgacggcttcgcgtccgtgggacaaggatcgtgacggcttcgtgcttggcgaaggtgccggtgtcatggtgctggaagaatatgagcatgccaaggcgcgcggtgcgaaaatctatgcagagctggttggcttcggtatgagcggcgatgcctatcatatcaccgcgccgaacatggatggtccgcgtcgcagcatggccaacgccttgaagagcgcggaaatcgcagccgatcaagtgcagtacctgaatgcgcatggcacatcgactccgttgggcgacaaaaatgaaacagatgcagtgaaagccgcatttggcgcacatgcgaagaaactgaccgtgaattcgacaaaatcgatgaccggtcatttgcttggcggtgcgggtgggcttgaatcggtattcacagtgcttgcactgcatcaccagatttcgccgccgaccatcaatatcctcaatcaggatccggaatgcgatctcgattattgcgccaatacggcgcgtgagatgccgatgcagtacgccatgaaaaataacttcggttttggcggtaccaacggcaccctgatttttggtaaagcctga

SEQ ID NO: 114711 - protein, 413 aa, Herminiimonas arsenicoxydans
MSRSSKRRVVVTGLGCVSPVGNNVADAWNALLAGQSGIATITKFDATPFSTHFAGEVKNFNIEDYIPGKEARHMDTFIHYGVAAGMQAWQDCGLVVTEENAERIGVIVGSGIGGLPLIENTHAELVNRGPRRISPFFVPASIINMISGHLSIIYGLKGPNMAVVTACTTGLHSIGTAGRMIEYGDADVMIAGGAESTISPLGLGGFASARALSSRNDDPTTASRPWDKDRDGFVLGEGAGVMVLEEYEHAKARGAKIYAELVGFGMSGDAYHITAPNMDGPRRSMANALKSAEIAADQVQYLNAHGTSTPLGDKNETDAVKAAFGAHAKKLTVNSTKSMTGHLLGGAGGLESVFTVLALHHQISPPTINILNQDPECDLDYCANTAREMPMQYAMKNNFGFGGTNGTLIFGKA

SEQ ID NO: 114712 - DNA, 1227 bp, Thermus thermophilus HB27
  CDS (1)..(1227): transl_table=11
atgcgacgcgtggtggtcaccggcctaggcgccctcacgcccatcggcgtggggcaggaggccttccacaaggcccagctcgcgggcaaaagcggggtcaggcccatcacccgctttgacgcctcggccctccccgtgcgcatcgccgccgaggtggacgtggaccccggggcctacctggaccggaaggagctcaggcgcctggaccgcttcgtccagtacgccctcatcgccgctcagcttgccctggaggacgcggggctaaagcccgaagaccttgaccccgagcgggtgggcaccctggtgggcacggggatcgggggcatggagacctgggaggcccaaagccgggtcttcctggagcggggcccaaaccgcataagccccttcttcatccccatgatgatcgccaacatggcctcggcccacatcgccatgcgctacggcttcaccgggccttcctccacggtggtcaccgcctgcgccacgggggcggacgccctgggaagcgccctgcgcatgatccagctcggcgaggccgacctcgtcctggcgggggggacggaggccgccatcacccccatggccatcggggccttcgccgtgatgcgggccctttccacaaggaacgaggagcccgagaaggcgagccgccccttcaccctctcccgggacgggttcgtcatgggggagggggccggggtcttggtcctggaggcgtacgagcacgcgaagaagcggggcgcccgcatctacgccgagctcgtgggcttcggccggagcgccgacgcccaccacatcaccgagccccaccccgagggaaagggcgccgccttggccatggcccgggccctgaaggacgcgggcatcgcccccgagcaggtgggctacatcaacgcccacggcacctccacccccgcgggggaccgggcggaggtgctggccatcaagcgggtcttcggggaccacgccaagaggctcatggtctccagcaccaagagcatgatcggccacctcctgggagcggcgggggcggtggaggccatcgccacggtccaggccctctaccacggggtcatccctcccacgatcaacctcgaggaccccgaccccgagctggacctggacttcgtccccgagccccgggaggccaaggtggactacgccctctccaactccttcgccttcgggggccacaacgccgtcctggtcttcaagagggtctga

SEQ ID NO: 114713 - protein, 408 aa, Thermus thermophilus HB27
MRRVVVTGLGALTPIGVGQEAFHKAQLAGKSGVRPITRFDASALPVRIAAEVDVDPGAYLDRKELRRLDRFVQYALIAAQLALEDAGLKPEDLDPERVGTLVGTGIGGMETWEAQSRVFLERGPNRISPFFIPMMIANMASAHIAMRYGFTGPSSTVVTACATGADALGSALRMIQLGEADLVLAGGTEAAITPMAIGAFAVMRALSTRNEEPEKASRPFTLSRDGFVMGEGAGVLVLEAYEHAKKRGARIYAELVGFGRSADAHHITEPHPEGKGAALAMARALKDAGIAPEQVGYINAHGTSTPAGDRAEVLAIKRVFGDHAKRLMVSSTKSMIGHLLGAAGAVEAIATVQALYHGVIPPTINLEDPDPELDLDFVPEPREAKVDYALSNSFAFGGHNAVLVFKRV

SEQ ID NO: 114714 - DNA, 1257 bp, Candidatus Protochlamydia amoebophila UWE25
  CDS (1)..(1257): transl_table=11
ttgaggaaaatgagcaaaaaacgaattgtcattacaggaatgggtattgtttcatgttttggaaacgatgttgatgctttttatcaaaatcttttagccggtcagagtggtattcaacctatcacagaattcccatgtgaagattatccaacgcgatttgctggaattatccccaattttgaagctggtgagtatttagacaaaaagcaggctcgtcgagtggataaatcgattgcttatacgatggtagcaggaaaaaaatcactagaatcagctaatttaaatgaagaaaacttaaaaagacttcaaaaagaacggtgcggtattttgattggttctggaatgggaggaatgacaatgtttgctgatggagtgcaaacattagttgaaaaaggacctcgaaaagtatctcctttttttgttccttttattttgacaaatatgtgtggggcgttgctgggaatagatattggttttatgggccctaactattctatttcaacagcttgtgctaccgcaaataattcgattatttctgctgctcaacacatcagaaatggagaggctgatttgatgctgtgtggaggtgtagaagcggctgtgatgccgatgggattagcaggtttttgcgcatgtaaagccctttctcaacgaaacgaaaatccagctaaagcttctcgcccttgggatcagggaagagatggtttcgtccttggtgaaggagctggtgttcttgtgatggaaagtttagatcacgctttagctcgagaagcacctattttggctgagtatttaggaggtggattgtcgtgtgatgcttatcatatgacagagccacgttcagacggagagggtgttgctttatgtattcgcagagctttacaggatgcaggaatccaacccgaagagattaattatattaatgctcatgccacttctactcctgcgggagatatggctgaggttaatgccctaaaaaaagtttttaaaaacccttcttcgatcaaaatgaacgcaacaaaatcgatgataggtcacttgttaggcgctgcaggtggggtggaagcaattgcgacaattaaagcgattcttgaacatcaaattcatccaaccattaatttagaaaacccagaacctaatttagaatttgatgtttcatccgaggcgcaacgatttatcgtgaaacgtgcgatttctaattcgtttggctttggaggtcataatgcttctgttatttttgctccttatgaaccctag

SEQ ID NO: 114715 - protein, 418 aa, Candidatus Protochlamydia amoebophila UWE25
MRKMSKKRIVITGMGIVSCFGNDVDAFYQNLLAGQSGIQPITEFPCEDYPTRFAGIIPNFEAGEYLDKKQARRVDKSIAYTMVAGKKSLESANLNEENLKRLQKERCGILIGSGMGGMTMFADGVQTLVEKGPRKVSPFFVPFILTNMCGALLGIDIGFMGPNYSISTACATANNSIISAAQHIRNGEADLMLCGGVEAAVMPMGLAGFCACKALSQRNENPAKASRPWDQGRDGFVLGEGAGVLVMESLDHALAREAPILAEYLGGGLSCDAYHMTEPRSDGEGVALCIRRALQDAGIQPEEINYINAHATSTPAGDMAEVNALKKVFKNPSSIKMNATKSMIGHLLGAAGGVEAIATIKAILEHQIHPTINLENPEPNLEFDVSSEAQRFIVKRAISNSFGFGGHNASVIFAPYEP

SEQ ID NO: 114716 - DNA, 1242 bp, Erwinia carotovora subsp. atroseptica SCRI1043
  CDS (1)..(1242): transl_table=11
gtgtctaagcgtcgagtagttgtgaccggactgggcatgttatctcctgtcggcaatacagttgagtctacctggagtgctcttcttgccggtcagagtggtatcagcctgatcgaccatttcgatactagtgcctacgcaacgcgttttgctggcttagtaaagaattttaattctgaggaattcatttcgcgtaaagaagcacgcaaaatggatgcctttattcaatatggtgttgctgctggcgttcaggctatgcaggactccggtttggaagtaacggaagaaaacgctccgcgtatcggtgcggcgattggttccggcatcggcggtctgggtcttattgaagagaaccacactgcgctggtgaacggtggcacgcgtaaaatcagcccgttcttcgtaccgtcaaccatcgtcaatatggtggctgggcatcttactatcatgttcggactgcgtggccccagcatttctatcgctactgcctgtacgtctggcgtgcataatattggccatgccgcacgtatcattgcctacaacgatgcggatgtgatgttggccggtggtgcagaaaaagccagtacgccattaggcgtcggtggattcggtgccgctcgtgcattgtctacgcgcaatgacgatcctcaggcggcaagccgtccgtgggataaagatcgtgatggttttgtactgggcgacggcgctggcctcatggtgctggaagagtatgaacacgcgaaaaagcgcggtgcgaaaatctatgcagaaattgttggatttggcatgagcagcgatgcgtatcatatgacgtctccgccggaggacggttcaggcgccgcgctggcgatggagaacgcactgcgtgatgctggtgtatcaacgagccagatcggttatatcaacgcgcatggcacttctacgcctgcgggtgataaagctgaaacacaggccgtgaaatccgtgtttggtgcggacgccagtcgtgtactggttagctcgacaaaatccatgacgggtcacttgttgggtgcagcaggcgcggtggagtcaatcttcagtattcttgctctgcgcgatcaggctgttccgccaacgctcaacctggataatccagatgaaggctgcgatctggattttgtgccgcatgaggcgcgtcaggtcagcaatctggaatacgtactctgcaactctttcggtttcggtggaaccaacggttctctgatcttccgtaaagtttga

SEQ ID NO: 114717 - protein, 413 aa, Erwinia carotovora subsp. atroseptica SCRI1043
MSKRRVVVTGLGMLSPVGNTVESTWSALLAGQSGISLIDHFDTSAYATRFAGLVKNFNSEEFISRKEARKMDAFIQYGVAAGVQAMQDSGLEVTEENAPRIGAAIGSGIGGLGLIEENHTALVNGGTRKISPFFVPSTIVNMVAGHLTIMFGLRGPSISIATACTSGVHNIGHAARIIAYNDADVMLAGGAEKASTPLGVGGFGAARALSTRNDDPQAASRPWDKDRDGFVLGDGAGLMVLEEYEHAKKRGAKIYAEIVGFGMSSDAYHMTSPPEDGSGAALAMENALRDAGVSTSQIGYINAHGTSTPAGDKAETQAVKSVFGADASRVLVSSTKSMTGHLLGAAGAVESIFSILALRDQAVPPTLNLDNPDEGCDLDFVPHEARQVSNLEYVLCNSFGFGGTNGSLIFRKV

SEQ ID NO: 114718 - DNA, 1233 bp, Streptococcus pyogenes MGAS10394
  CDS (1)..(1233): transl_table=11
atgacatttaaaagagtagtggtaacaggttatggtctaacatctccaatcgggcatgatcctgaaacgttttggaacaatctgaaagctggccaaattggtattggtcctattactaaatttgacacgactgattatgcagtcaagaatgctgctgaaattcaggattttccatttgacaaatactttgtgaaaaaagatttgaaccgtttcgatagatattctctttatgctctttatgcagcgaaagaggctattaatcatgctgatttaaatattgagatgattgattccgatcgatttggcgttattgttgcttcaggtattggtggaattgcggagattgaagagcaggtgattcgcttacatgaaaaagggccaaaacgtgtgaagccaatgacgttgccaaaagcgctaccaaatatggctgcaggaaatgtcgccatgtctttaaaagctcaaggagtatgtaaatcaattaatactgcctgcgcttcttcaaatgatgcgattggggatgcctttcgtgccattaaatttgggactcaagatgtgatgatagttggtgggtcagaggcggccataaccaagtttgccattgctggcttccaaagtttaacagctctctcaacaactgaagatccaagcagaagctctattccatttgataaagaccgaaatggttttatcatgggagaaggatcaggaatgcttgttttagaaagcctagaacatgcgcaagaacgcggggcgacaatcttagcagaaattgtgggttatggaaatacctgcgatgcctaccatatgacatctccaaatcctgagggattaggagctcgtaaagccatccacttagccttacaagaagctggtattgaagccagtgctattaattatgtcaatgcgcacggaacttcaaccccagctaatgaaaaaggagaaagtcaagcaattgtagccgttcttggtaaggatgttccggtgtcttcaacaaaatcgtttacgggtcaccttcttggagcagcaggcgctattgaagctattgccactatcgaggctatgcgtcataactatgttccgatgacggctgggacacaagctttatcagaggatatcgaagcaaatgtcatctttggagaaggaaaagaaacagctatcaactatgccatttcaaatacttttggatttggtggtcataatgctgtattagctttcaaatgttgggaggagtag

SEQ ID NO: 114719 - protein, 410 aa, Streptococcus pyogenes MGAS10394
MTFKRVVVTGYGLTSPIGHDPETFWNNLKAGQIGIGPITKFDTTDYAVKNAAEIQDFPFDKYFVKKDLNRFDRYSLYALYAAKEAINHADLNIEMIDSDRFGVIVASGIGGIAEIEEQVIRLHEKGPKRVKPMTLPKALPNMAAGNVAMSLKAQGVCKSINTACASSNDAIGDAFRAIKFGTQDVMIVGGSEAAITKFAIAGFQSLTALSTTEDPSRSSIPFDKDRNGFIMGEGSGMLVLESLEHAQERGATILAEIVGYGNTCDAYHMTSPNPEGLGARKAIHLALQEAGIEASAINYVNAHGTSTPANEKGESQAIVAVLGKDVPVSSTKSFTGHLLGAAGAIEAIATIEAMRHNYVPMTAGTQALSEDIEANVIFGEGKETAINYAISNTFGFGGHNAVLAFKCWEE

SEQ ID NO: 114720 - DNA, 1242 bp, Symbiobacterium thermophilum IAM 14863
  CDS (1)..(1242): transl_table=11
atggagcgacgggtagtggtcaccggcatggggctgatctcgcccctgggcaacagcgtccgggccaactgggaggcggcggtggcgggccgctcaggcatcggcccgatcacccgcttcgacgcctcccgcctgccgacccggttcgccggcgaggtgcgcgacttcgaccccgcgacggtgatggaccccaaggaggtccggcggtacgatcccttcatccactacgccctggccgcggccgcggaggcggtggaggacgcgggcctcaccttcgagggcgagctggccgagcgcaccggcgtcgtgttcggcagcggcatgggcggtctggagggcatcgtggagaacgccctgatcctgcaggagcggggcccccggcggatctcgccgttcttcgtcccgcgctgcatcatcaacagcgccgccggcctgatctcgatgaagtacggcgtgcatgggcccaactacgggacggtgtccgcctgtgcctcggcgggccacgccatcgccgacgcgatgcacatcatccgtcgcggcgacgccgacgtcatgatcaccggcggcagcgaggcgaccatcacggagctggcgtttgccggcttcagctccgccaaggcgctctccacccggaacgacgacccccagggcgcctcccgcccgtttgacgcggaccgggacggctttgtcatgagcgagggcgcgggctgcctggtgctggaggagctggagcacgccaggcggcggggcgcccggatctacgccgaactggccggcgccggcatgtcgggggatgcgtaccacatcaccgcgccgcacccggagggccggggcgcggtcctggcgatgaagggcgccctgcgcagcgcccggctgaacccggaggacgtgggctacatcaacgcgcacgccacctccaccgacctgggcgacgtgcaggagagcctggcgatcgagcaggtcttcggcgatcacgcccggaagctggccgtctccggcaccaagtcgatgcacggccacctcctgggggcggcgggggccatcgaggcgatcctgaccgtgctctcgctgtaccaccaggtgctgctgccgaccatcaacctgcacaggcccgacccggagtgccgcttggactacgtgccccacacggcccgggaggtccgcggtgtggaggctgccctctgtaacaacttcggcttcggcggcaccaacgtgtcgctcgcgttccgccgctttgtctag

SEQ ID NO: 114721 - protein, 413 aa, Symbiobacterium thermophilum IAM 14863
MERRVVVTGMGLISPLGNSVRANWEAAVAGRSGIGPITRFDASRLPTRFAGEVRDFDPATVMDPKEVRRYDPFIHYALAAAAEAVEDAGLTFEGELAERTGVVFGSGMGGLEGIVENALILQERGPRRISPFFVPRCIINSAAGLISMKYGVHGPNYGTVSACASAGHAIADAMHIIRRGDADVMITGGSEATITELAFAGFSSAKALSTRNDDPQGASRPFDADRDGFVMSEGAGCLVLEELEHARRRGARIYAELAGAGMSGDAYHITAPHPEGRGAVLAMKGALRSARLNPEDVGYINAHATSTDLGDVQESLAIEQVFGDHARKLAVSGTKSMHGHLLGAAGAIEAILTVLSLYHQVLLPTINLHRPDPECRLDYVPHTAREVRGVEAALCNNFGFGGTNVSLAFRRFV

SEQ ID NO: 114722 - DNA, 1239 bp, Legionella pneumophila subsp. pneumophila str. Philadelphia 1
  CDS (1)..(1239): transl_table=11
ttgaatagtcggcgtgtggttattaccggcatgggtatgcttactcctgtcggacttaatgtagaagaaacttggcgaagtattttagctggggttagtggggtaggtttggtggaagattttgatactactgaatacccaactaagatttgggctaaggtcaagaattttaatgttgagaatcacatgccaattaaagacgcccgcaaaatggacgtctttacacaatatggtatggctgctgctgatgaagcgatgcttgactcgggtttaaaaattgatgaagtcttatctcgtcgaatcggtgtcgcagtgggcgcaggtattggtggtattcaaacaatcacaaataaccaggataaactggttgccggtggaccacgtaaggtttcgccattttttattccggcaggtattatcaatatggttgctggacagatttctattaaacataatttaaaaggacctaatatttcggttgtgactgcatgtactaccggaacacataatatcgggctagccgggcgtataattgcttatggcgatgccgatgtcatgatttgtggtggagcggaaatgaccacaacgccactttgtcttgctgggttttcagcagtaagatctttatccaaacggaatgatgagcctgagaaagcctcaaggccttgggataaagacagagacggttttgttatgggtgagggtgctggtgttttggttttagaagaatatgaacacgctaaagctcgtggagccaaaatttatgctgaattggttggttttggtatgtcaggagatgcttatcatattaccgcacccgatgaagatgccgatggagcttcacgagctatggaggcagccatccaggatgctggtatcgatcccagacaagttgattatattaatgctcacggtacgtcgacttatttaaacgatttaaatgaaacaaaagccattaagcgtgttttccagaaccatgcttatgatctggcggttagctcaaccaaatccatgacaggccatttgctcggagctgcaggtgcagtagaggcaattataagtattttagccataagagatcaggtggctccacctacaataaatttggataatcctgatgaaggttgtgatttgaattatgtagcacatgtaccacaaagcagaacaattaattatgttctaagtaattcacttggttttggtgggacaaacggtagcttactgttcaagcgaatctaa

SEQ ID NO: 114723 - protein, 412 aa, Legionella pneumophila subsp. pneumophila str. Philadelphia 1
MNSRRVVITGMGMLTPVGLNVEETWRSILAGVSGVGLVEDFDTTEYPTKIWAKVKNFNVENHMPIKDARKMDVFTQYGMAAADEAMLDSGLKIDEVLSRRIGVAVGAGIGGIQTITNNQDKLVAGGPRKVSPFFIPAGIINMVAGQISIKHNLKGPNISVVTACTTGTHNIGLAGRIIAYGDADVMICGGAEMTTTPLCLAGFSAVRSLSKRNDEPEKASRPWDKDRDGFVMGEGAGVLVLEEYEHAKARGAKIYAELVGFGMSGDAYHITAPDEDADGASRAMEAAIQDAGIDPRQVDYINAHGTSTYLNDLNETKAIKRVFQNHAYDLAVSSTKSMTGHLLGAAGAVEAIISILAIRDQVAPPTINLDNPDEGCDLNYVAHVPQSRTINYVLSNSLGFGGTNGSLLFKRI

SEQ ID NO: 114724 - DNA, 1239 bp, Azoarcus sp. EbN1
  CDS (1)..(1239): transl_table=11
ttgacccgtcgcagagtcgtcattaccggtctcggaatcatctcgccggtcggtaataccgttccggaggcctgggacaacattgtcaacggccgctccggcatcggcgaaatcacgcgtttcgatgcttccagcttcccggtcaggatcgccggcgaagtgaggggtttcgacattggcgcctacctgtctccgaaggaggcgcgtcgtatggatgttttcatccactacggcctggccgcaggcatccaggcgttcagggatgccgggctggacgttaccgcctccaatgcggaacgcataggggtcaacctcgggtcgggaatcggcggcttgccgatgatcgaagcgacccacgacgatttcctcaagggcggggcacgcaagatttcccctttcttcattcccggcacgatcatcaacatgatcgccggcaacctgtcgatcatgctcggactgaagggtccgtgcctggcgatggttaccgcatgcaccacggcgacgcactgcatcggcgaggcagcgcggctcatccagtacggggatgtcgatgtgatggtggccggcggcgcggaatccaccgtcactccgctcgccgttggcggcttcgcctccgcgaaggcgttgtcgacgcgcaacgatgatccgcttactgccagccgtccatgggacaaggggcgcgacggtttcgtgctcggcgaaggggccggcgtgctggtcctcgaagagtacgagcacgcgaaggcgcggggcgcccggatctacgccgaaatatccggctacggcatgagcgccgatgcctatcacatgactgcaccggccgaggacggtgacggcgccgcgcgctgcatggcgaacgcgatgcgcgatgcgcgcatgacggtcgaggagatcgactacgtcaacgcccacggcacttcgacgccccttggagacttggccgaaacgaccgcggtaaagcgctgtttcggcgatcgggcaagatcgatcgtggtgaactccaccaagtcgatgaccggccatctgctcggcgccgcgggaggtgtcgaagcggtgttcaccgcgctggccctgcacaaccagatcgctccgccgacgatcaacattttcgagcaggacgagcggtgcgaccttgattacgtcgcgaacaaggcgcgtccgatggagatccgggcagcgctttcgaattcgttcggcttcggtggcacgaacggcacgctggcgtttcgtcgcatctga

SEQ ID NO: 114725 - protein, 412 aa, Azoarcus sp. EbN1
MTRRRVVITGLGIISPVGNTVPEAWDNIVNGRSGIGEITRFDASSFPVRIAGEVRGFDIGAYLSPKEARRMDVFIHYGLAAGIQAFRDAGLDVTASNAERIGVNLGSGIGGLPMIEATHDDFLKGGARKISPFFIPGTIINMIAGNLSIMLGLKGPCLAMVTACTTATHCIGEAARLIQYGDVDVMVAGGAESTVTPLAVGGFASAKALSTRNDDPLTASRPWDKGRDGFVLGEGAGVLVLEEYEHAKARGARIYAEISGYGMSADAYHMTAPAEDGDGAARCMANAMRDARMTVEEIDYVNAHGTSTPLGDLAETTAVKRCFGDRARSIVVNSTKSMTGHLLGAAGGVEAVFTALALHNQIAPPTINIFEQDERCDLDYVANKARPMEIRAALSNSFGFGGTNGTLAFRRI

SEQ ID NO: 114726 - DNA, 1266 bp, Silicibacter pomeroyi DSS-3
  CDS (1)..(1266): transl_table=11
atgcgcagagtcgttgtaaccggactgggactgatcacacctttggccagcggggtcgaggaaacctggtcccgtctgctggagggacaatcgggcgcgggtccgattacgcggtttgatgcggtggcgtcgggtgttaccacgacctatgcctgcgaagtgccgcgcggcgatggcagcgatggcaccttcaatcccgatgactggatggcgccgaaagagcagcgcaagatcgaggatttcatcctctattccatcgcggccgccgagatggcctgcaaggatgccaactggctgcccgaggacgaagaggaccgcttgcgcaccggcgtgctgatcggctcgggtatcggcgggctgggctcgattgccgagaccgccaacctgatcaaggagaagggcccccgccgggtgtcgcccttctttatccccggcgcgctgatcaacctggcctcgggccaggtgtcgatccgtcacgggttcaaggggccgaaccactcggtggtgaccgcctgttcgaccggcgcgcatgcgattggcgatgccagccggatcatccgggccggtgacgcggatgtgatgatcgccggtggtggcgaggcctgtatctgcgaaatcggcattgccgggttcaacgcctgcaaggcgctgtcgaccaaatatgccgacaaccccaaggccgccagccgaccctatgacgccgaccgcgacgggttcgtgatgggtgagggcgccggcatcgtggtgctggaggactatgaacacgccaaggcgcgcggtgccaagatttatgccgaagtcttgggctatggcatgtcgggcgatgcctatcacatcactgcgccctccgagaccggcgacggggccgaacgctcgatgcgcgccgctctgcgcagcgccgggctggagccgtcggatctggattacatcaacgcccatggcacctcgaccatggccgacacgatcgagctgggcgcggtggagcggctgttgggcaaccatgcggccaatgtcaccatgtcctcgaccaaatcggccaccgggcacctgttgggcgctgccggcgcgatcgaggcgatcttttcgatcctggcgatccgcgatcaggtggccccgccaaccatcaacctggacaacccggcagttgagaccccggtcgatctggcgcccaatgccaagcgtgcgcgcaagatcgacgtggctctgtcgaactccttcggttttggcggcaccaatgcgagcgtgatcttcggaaaggccgactga

SEQ ID NO: 114727 - protein, 421 aa, Silicibacter pomeroyi DSS-3
MRRVVVTGLGLITPLASGVEETWSRLLEGQSGAGPITRFDAVASGVTTTYACEVPRGDGSDGTFNPDDWMAPKEQRKIEDFILYSIAAAEMACKDANWLPEDEEDRLRTGVLIGSGIGGLGSIAETANLIKEKGPRRVSPFFIPGALINLASGQVSIRHGFKGPNHSVVTACSTGAHAIGDASRIIRAGDADVMIAGGGEACICEIGIAGFNACKALSTKYADNPKAASRPYDADRDGFVMGEGAGIVVLEDYEHAKARGAKIYAEVLGYGMSGDAYHITAPSETGDGAERSMRAALRSAGLEPSDLDYINAHGTSTMADTIELGAVERLLGNHAANVTMSSTKSATGHLLGAAGAIEAIFSILAIRDQVAPPTINLDNPAVETPVDLAPNAKRARKIDVALSNSFGFGGTNASVIFGKAD

SEQ ID NO: 114728 - DNA, 1269 bp, Dehalococcoides ethenogenes 195
  CDS (1)..(1269): transl_table=11
atgactgataaccagccccaaaacagggttgtcataaccggcatcggcattgtcagccctcttggacttgatactcaaaccacctgggaaggcctgataaacggccgttcaggtatagaccatatcagcctctttgacgcatcaaatctggctgtccgctttggcggagaggtcaaagattttgacccggcgaactatatatcccgcaaggatatccgccgcatggaccgttttgcccagctggcggtagccgccggcaaacaggcactggaaaattcgggactgggggcagatgaaagcgtccggcaggatatcggggtaattgtaggcagcggcataggcgggctttcggttctctttgaacaaatcaaagttttcctggaacaagggccggacagagtcagcccttttttagtacccatgatgattgcagacatggccggagcccaggtttctatccagctgggtcttaaagggcctaatttctgtactacttcggcctgttcttctggttcagacgccataggcacagcatttgaaaaaatacgttttggttcggccaagattatcctggcgggcggtgccgaatctattatgaacccggttggttttgccggtttttcagccttaaaagccctatccacccgcaatgaagacccccagacggcttcgcgcccgtttgatgccaaccgggacggctttgttattgcggagggtgcggcgattttggttttggaagaaatggagtctgccaaagccaggggagcaaatatcattgccgagataatcggttacggcggctcttcagacgcttttcacataacccagccggtggaatccggtgtagaagccgcccgggctataaatattgccctgaataccgccggcatcaaaccggaagcggtagactatataaatgcccacggcacatctacccccctgaatgacaagatggaaaccaatgctattaaagtggccttcggggaacacgcccggaaactggccatcagctccaccaaatccatgctggggcatctgataggcggggccggggctattgaagcctctatctgcgccctgactattaaaaacggcattataccgcctaccataaactacaccactcctgaccctgactgtgatttagattacacccccaacaccgcccgcagagccaaggtaagggtggcgcttaataattcattcggtttcggcgggcataattcggtgcttatcctcagggaaatgggtgatgaaaatattggctaa

SEQ ID NO: 114729 - protein, 422 aa, Dehalococcoides ethenogenes 195
MTDNQPQNRVVITGIGIVSPLGLDTQTTWEGLINGRSGIDHISLFDASNLAVRFGGEVKDFDPANYISRKDIRRMDRFAQLAVAAGKQALENSGLGADESVRQDIGVIVGSGIGGLSVLFEQIKVFLEQGPDRVSPFLVPMMIADMAGAQVSIQLGLKGPNFCTTSACSSGSDAIGTAFEKIRFGSAKIILAGGAESIMNPVGFAGFSALKALSTRNEDPQTASRPFDANRDGFVIAEGAAILVLEEMESAKARGANIIAEIIGYGGSSDAFHITQPVESGVEAARAINIALNTAGIKPEAVDYINAHGTSTPLNDKMETNAIKVAFGEHARKLAISSTKSMLGHLIGGAGAIEASICALTIKNGIIPPTINYTTPDPDCDLDYTPNTARRAKVRVALNNSFGFGGHNSVLILREMGDENIG

SEQ ID NO: 114730 - DNA, 1245 bp, Staphylococcus epidermidis RP62A
  CDS (1)..(1245): transl_table=11
atgaataaaaataatagagttgttataacgggtatcggagccttatctccaattggtaacgatgctaaaacaacatgggacaatgcactaaaaggtgttaacggtatagataaaatcacaagaatagatactgatgattataatgtacatcttgctggtgaattgaaagattttaatatagaagaccacattgatagaaaagaagctcgccgtatggatcggtttacacaatacgcggtggttgctgcaagagaagcggttaaagatgcacaattaaatattaatgaaaaaaatgccgaccgtattggtgtatggattggttctggtatcggtggtatggaaactttcgaagttgcacatacaacacttgtagaaagaggaccacgtcgagtaagtccatttttcgttccaatgttaattcctgatatggctactggtcaagtttctattgatttaggtgccaaagggcccaatggttctacagtaacagcttgtgctacggggactaactcaataggtgaggcatttaaaattattcaacgtggtgatgcagatgcaatggtgactggtggaacagaggcacctattacacatatggcaatcgcagggtttagtgcaagtcgtgcattatctacaaacaatgaccctgaaacagcttgtcgaccattccaagaaggccgtgatggctttgttatgggtgaaggggcaggtattgttgtacttgaatcattagattcagctaaagagagaggcgctgaaatttacgctgaagttgtaggttatggttcctctggcgatgcacatcatattacagcacctgcgcctgaaggtgaaggtggctcacgagctatgcaagctgctttagatgatgctggaatcaaagctcaagatgtacagtatttaaatgcacatggcacaagtacacctgttggagatttatatgaggttcaagcgattaaaaatacattcggtgatgctgcgaagtcattaaaagtaagttcaactaaatcaatgactggacatttattaggtgctacaggtggaattgaagctattttttctgcgctatcaattcgtgattcaaaggtagcccctacaatacatgcaatcacaccagacgaagaatgtgatttggacattgttccgaatgtagcccaagacttagacattacctatgcaatgagtaatagtttaggatttggtggacataatgcagtgttagtatttaaaaaatttgaagactaa

SEQ ID NO: 114731 - protein, 414 aa, Staphylococcus epidermidis RP62A
MNKNNRVVITGIGALSPIGNDAKTTWDNALKGVNGIDKITRIDTDDYNVHLAGELKDFNIEDHIDRKEARRMDRFTQYAVVAAREAVKDAQLNINEKNADRIGVWIGSGIGGMETFEVAHTTLVERGPRRVSPFFVPMLIPDMATGQVSIDLGAKGPNGSTVTACATGTNSIGEAFKIIQRGDADAMVTGGTEAPITHMAIAGFSASRALSTNNDPETACRPFQEGRDGFVMGEGAGIVVLESLDSAKERGAEIYAEVVGYGSSGDAHHITAPAPEGEGGSRAMQAALDDAGIKAQDVQYLNAHGTSTPVGDLYEVQAIKNTFGDAAKSLKVSSTKSMTGHLLGATGGIEAIFSALSIRDSKVAPTIHAITPDEECDLDIVPNVAQDLDITYAMSNSLGFGGHNAVLVFKKFED

SEQ ID NO: 114732 - DNA, 1416 bp, Psychrobacter arcticus 273-4
  CDS (1)..(1416): transl_table=11
atgagccagcacagcagtttacccaacgactcacttatcgaccaagctatgaatagtactattaatagccctactgccaatactcctgccaccgctcagacaaaaaaacgtcataagccgccacatttcgagcgcactgatgatatgcgtgtcgtagtgactggcatgggtgccgttacgccattgggattagatgtcgaaagctcatgggcgaagctccttaaaggtgaaagcggtatcacagctatcagtcattttgatgcgtctggttatcgcgcgcaaatcgcaggcgtggtcaaagactttgatgccaagcaatacatgaacgccaaagacgcgcgccgttatgatgagtttatacattatgcggttgctgcctcttctatggcgctacatcaagcaggttttatcgaggaagtgagcgctgctgacgctccggtacaaggggttgatcaagagcgctttggggtgattataggttcagggattggtggtattcaaaacatcgaaaacagccgtgataccttacgtgaaaaaggctcaagcaaagtctccccctttattattccaggctctattgttaatatggcagcgggcttagtagctattaaacactgtttgaaaggtcccaatcttgcaacctcaactgcctgtaccacagcgactcatgcgattggtctagcagcgcggttgattgcttatggtgacgccgatgtgatactggcaggcggtagtgaaaaaggctcaagcccgcttggtatctcaggttttggtgctatgcatgccctctcaacccgcaatgatgagccaactcgcgcttcacgcccgtttgataaagatcgcgatggttttgtacttggtgatggtgctggcgtaatgatactagaaagccttgctcatgcaaaagcacgcggtgcgacgatattggctgaattggttggctttggtatgagtgacgatgccagtcatatcaccgcgcctccagaagatggtagcggtgcggcacgagcgatgcgtaatgccttaaatgatgcgggtattgagccgtcagtcgtgggctatgtcaatgcccatggcaccagcacgcctgccggtgatgtcgcggaatctatcgccattgaaacggtattttcgcctgtgaaagacaccattttggtcagctcaaccaaatcgatgaccggtcatctgcttggcgctgcgggtggtgttgaagctatttttactgtacttgctctgcaacatcagcaagtaccgccaacgattaatttggacaatattgaagacaactgtaatttggattatgtcgccaatcaatcgcgtcaagtagataatttgcagtacgcggtatccaatagctttggttttggcggcaccaacggctcactaatatttgcacgttggcctgtcaatcagtaa

SEQ ID NO: 114733 - protein, 471 aa, Psychrobacter arcticus 273-4
MSQHSSLPNDSLIDQAMNSTINSPTANTPATAQTKKRHKPPHFERTDDMRVVVTGMGAVTPLGLDVESSWAKLLKGESGITAISHFDASGYRAQIAGVVKDFDAKQYMNAKDARRYDEFIHYAVAASSMALHQAGFIEEVSAADAPVQGVDQERFGVIIGSGIGGIQNIENSRDTLREKGSSKVSPFIIPGSIVNMAAGLVAIKHCLKGPNLATSTACTTATHAIGLAARLIAYGDADVILAGGSEKGSSPLGISGFGAMHALSTRNDEPTRASRPFDKDRDGFVLGDGAGVMILESLAHAKARGATILAELVGFGMSDDASHITAPPEDGSGAARAMRNALNDAGIEPSVVGYVNAHGTSTPAGDVAESIAIETVFSPVKDTILVSSTKSMTGHLLGAAGGVEAIFTVLALQHQQVPPTINLDNIEDNCNLDYVANQSRQVDNLQYAVSNSFGFGGTNGSLIFARWPVNQ

SEQ ID NO: 114734 - DNA, 1239 bp, Colwellia psychrerythraea 34H
  CDS (1)..(1239): transl_table=11
atgagacgtgtagtagtaactggcattggcatgcttagcccattagccaacaccgcagaagaaacatggcaaaacctgctacttggtaaaagtggtataggtaatattgatcattttgataccacagattaccccactaaatttgctggtttagtaaaagactttgatgcccagaattatatggaacgaaaagaagccaaaaaaatggatctttttattcaatatggtattgcagcgggcgtacaagcttttaaagactcaggtcttgaagttactgagcaaaatgcaccacgtattggtgttgctattggctctggcattggcggtttaggcttaattgaacaaaatcataacaagctaatcaaagccgaaggtaatcctcgtaagttatcgccattttttgtgccttcaaccattatcaatatgattgcgggtcacttatcaataatgtttggcctgcaaggtcctaatattgccataactacagcgtgtacgagtggcgtgcataatattggccatgctgcccgtatgattgcttacggagatgccgacgcagttgttgccggaggtgctgaaaaagcgtccacaacactaggcatgggcggctttggtgctgctcgcgctttatctcgtcgaaatgatgaccctgaagcggcatctcgtccttgggacaaagatcgtgatggttttgttcttggtgatggtgctggtgttatcgttgttgaagaatatgaacatgcaaaagcccgtggcgcaaaaatttatgctgagctagttggttttggtatgagcggtgatgcttaccatatgacttcaccacctgaaaatggtgatggcgcagcgcgtgctatgcaaaatgctattaatgatgcgaaagtagatattagtagaattggttacattaatgcccacggtacttctacacaagccggtgatatggctgaaactaatgcggttaagactgtatttggtgctggtgcaaagaatgtaatgatgggttctaccaagtctatgactggacatttgttaggcgctgcaggagctattgaagctattttcagtatccaagcactagtgaataagcaagttccaccgacgataaatttagataaccctgatgaaggttgtgatctagattatattgctggtgcagcacgtgatgttgaacttgaatatgtactttgtaattcgtttggttttggtggtactaacggctcattaatctttaagaagatttag

SEQ ID NO: 114735 - protein, 412 aa, Colwellia psychrerythraea 34H
MRRVVVTGIGMLSPLANTAEETWQNLLLGKSGIGNIDHFDTTDYPTKFAGLVKDFDAQNYMERKEAKKMDLFIQYGIAAGVQAFKDSGLEVTEQNAPRIGVAIGSGIGGLGLIEQNHNKLIKAEGNPRKLSPFFVPSTIINMIAGHLSIMFGLQGPNIAITTACTSGVHNIGHAARMIAYGDADAVVAGGAEKASTTLGMGGFGAARALSRRNDDPEAASRPWDKDRDGFVLGDGAGVIVVEEYEHAKARGAKIYAELVGFGMSGDAYHMTSPPENGDGAARAMQNAINDAKVDISRIGYINAHGTSTQAGDMAETNAVKTVFGAGAKNVMMGSTKSMTGHLLGAAGAIEAIFSIQALVNKQVPPTINLDNPDEGCDLDYIAGAARDVELEYVLCNSFGFGGTNGSLIFKKI

SEQ ID NO: 114736 - DNA, 1236 bp, Dechloromonas aromatica RCB
  CDS (1)..(1236): transl_table=11
ttggcacgtcgcagagtcgtaattaccggtttggggctcatttccccggtcggcaacagcgtagaggaaggctggcagaacatcatcgccggccgttctggtatcgctcccgttacccgattcgatacttccaccttcccggttcagtttgccggtgaggtcaagaatttcgatattacccaatatatttcggccaaggatgcccggcgcatggataggtttatccattacggtctggctgccggcatacaggctgtccgcgatgccggtctggataaggaaggtgctgctgaccccgagcgcgtcggtgtcgccattggctccggtatcggcggtctgccgctgatcgaggaaaccaaagacgaatacattgctggcggtgtgcgcaaggtttcgccgttcttcgtgcccggttcgatcattaacatgatctccggcaacctgtcgatcgagtacggcttcaaggggccgaatctggctatcgtcaccgcttgtacgacgggtacccactcgatcggcgaggccgcgcgcatcattgaatacggcgatgccgatgtgatggtggccggtggtgctgaatcgacggtttcgccgctgggcatggggggcttcagtgccgctcgtgctctgtctactcgcaatgatgatccgacgacggccagtcgtccgtgggacaaggatcgtgatggctttgtcctcggcgaaggtgccggtgttctggttctcgaagagtacgagcatgccaaggcccgcggcgcaaagatctatgccgaagtggctggctacggccggagcgctgatgcttatcacattactgcgccgaacatggacggcccacgtcgttccatggtcaatgcactgaagaatgctggcattgcgccgtccgacgtgcagtacgtcaacgcgcatggcacttcgactccgcttggtgacaagaacgagtcggatgccatcaaggctgctttcggtgatgccgcttataagatcgtcgtcaattcgacaaagtcgatgaccggtcacctgttgggtggcgctggtggcgtcgagtctttgttcacggttctggccatccatcaccagatatctccgccaaccatcaacatcttcaaccaggatccggagtgcgacctggactactgtgccaacaaggcacggccgatgaagattgatattgcgctgaaaaacaacttcggcttcggcggtacgaacggctcgctggttttcaagcgcgtctaa

SEQ ID NO: 114737 - protein, 411 aa, Dechloromonas aromatica RCB
MARRRVVITGLGLISPVGNSVEEGWQNIIAGRSGIAPVTRFDTSTFPVQFAGEVKNFDITQYISAKDARRMDRFIHYGLAAGIQAVRDAGLDKEGAADPERVGVAIGSGIGGLPLIEETKDEYIAGGVRKVSPFFVPGSIINMISGNLSIEYGFKGPNLAIVTACTTGTHSIGEAARIIEYGDADVMVAGGAESTVSPLGMGGFSAARALSTRNDDPTTASRPWDKDRDGFVLGEGAGVLVLEEYEHAKARGAKIYAEVAGYGRSADAYHITAPNMDGPRRSMVNALKNAGIAPSDVQYVNAHGTSTPLGDKNESDAIKAAFGDAAYKIVVNSTKSMTGHLLGGAGGVESLFTVLAIHHQISPPTINIFNQDPECDLDYCANKARPMKIDIALKNNFGFGGTNGSLVFKRV

SEQ ID NO: 114738 - DNA, 1239 bp, Thermobifida fusca YX
  CDS (1)..(1239): transl_table=11
atgagtaaccgcgaagtcgtcgtcaccggccttggagcgagcagtcctctgggaggtgacgtcgccacgacctggtcggcgctgctcgaaggtcgatccggcatcacttccctgcccgaggagtggcatgagaagctcccggtgcacttcgcgggcctcctcgctgaggagccgtccgagaagctggaacgccaccgactgcgccgcctggaccggacccagcagttggcgttgatcaccgcgcgggaagcgtgggacgacgcgggctcccctgaagtagacccgttgcgtctgggtgtcgtgatgtccagcggtatcggtggcatcttgaccaccctccaccagtacgacatcttccgggagaagggctggaagcgggtctccccgttcaccgtgccgatgctcatgcccaacagcccggccgccgctgtggcgctggagttcactgcccgggcgggggctcacgccgcggtcagcgcctgcgcgtccagtgcggaggccatcgctgacggcatcaacatgatccgctccggccgcgccgacgtggtgatcgcgggagggtgcgaggcggcgatccacccgctgaacattgccgcgttcgctgcgatgcgtgccttgtccacccgcaacgacgacccgcagggcgcgtcgcgtccgttcgacgtcaaccgggacggtttcgtcatgggtgagggggcagccactctcatcctggagtcggctgagcacgctgcggcccgcggggcccgcgtgtacgcggtggccgcgggagccggatacacctgcgacgcctacgacattgtgcagcctgacccggtcggtgctggggcttcccgtgcgatctctgccgcgatcgcggacgctgggctgagcccgtccgatatcgcgcacatcaacgcgcacgccacttccacgccggcgggtgacgtgccggagaccgtggcgatccgcagtgccctgggcgactcggctgctgacgctgtcgcggtgacctccaccaagtccatgaccggccacctgctgggtggtgctggtgcgttggagtcggtggccaccgtcttggcgctgtaccacggggtggtgcctgcaaccatcaacgttgaggagatcgaccccggcgtggtggttgacgtggtggtggacaagcctcgggagctgccgtcttccgcggtggctgcgctgaacaactctttcggtttcggcggacacaacatcgccttggcgttccgccgtccttga

SEQ ID NO: 114739 - protein, 412 aa, Thermobifida fusca YX
MSNREVVVTGLGASSPLGGDVATTWSALLEGRSGITSLPEEWHEKLPVHFAGLLAEEPSEKLERHRLRRLDRTQQLALITAREAWDDAGSPEVDPLRLGVVMSSGIGGILTTLHQYDIFREKGWKRVSPFTVPMLMPNSPAAAVALEFTARAGAHAAVSACASSAEAIADGINMIRSGRADVVIAGGCEAAIHPLNIAAFAAMRALSTRNDDPQGASRPFDVNRDGFVMGEGAATLILESAEHAAARGARVYAVAAGAGYTCDAYDIVQPDPVGAGASRAISAAIADAGLSPSDIAHINAHATSTPAGDVPETVAIRSALGDSAADAVAVTSTKSMTGHLLGGAGALESVATVLALYHGVVPATINVEEIDPGVVVDVVVDKPRELPSSAVAALNNSFGFGGHNIALAFRRP

SEQ ID NO: 114740 - DNA, 1233 bp, Ralstonia eutropha JMP134
  CDS (1)..(1233): transl_table=11
gtgagccgtcgtcgcgtcgttgtcactgggcttggccttgtgtctccggtcggaaacacggttgccgaaggctgggccaacctggttgccggcaagtccggtatcgccaccgtcaccaaattcgatcattccgcgctttccgtgcactttgccggtgaagtgaagggcttcaatgccgaggattacatcccggccaaggaagcccgcaatatggatacgttcatccactatggcattgctgccggcgcccaggcgctcaaggacagcggctatgaggtgaccgatgccaatgcggagcgcatcggcgtgctggtcggctcgggcattggcggcttgccgatgatcgaggacacgcatgccacgctgaccgagcgtggtccacgccgtatttcgccgttcttcgtgccgggatcgatcatcaacatgatctctggccacctgtcgatcatgcacggcctgaagggcccgaacctcgccgcggtgaccgcctgcacgaccggcctgcacagcattggcctggctgctcgcctgattcaggccggcgacgccgacgccatgctggcgggcggtgccgagtcgaccgtgtcgccgctgggcatcggcggtttcgcggccgcgcgcgccttgtcgacgcgcaatgacgatcccgcagccgcttcgcgcccgtgggacaaggaccgcgacggcttcgtgctgggcgagggtgccggcgtcatgatgctggaagagtacgaatctgcgaaggcgcgcggtgcgcgcatctatgcggagctcgtgggcttcggcatgagtggagacgcattccacatgactgcgccgaacatggacggcccgcgccgctgcatggtcaacgcgctgcgggacgccggcatcaacgcggacgaggtgcagtacctgaacgcgcacggcacgtcgacgccgctcggcgacaagaacgaaaccgatgctatcaaagcagccttcggtgaccatgcctacaagatggtggtgaattcgaccaagtcgatgaccggccacttgctgggcggcgcaggtggcctggaatcggtgttcaccgtgctcgcactgcataaccaggtgtcgccgccgaccatcaacatcgataaccaggatccggaatgtgacctggactacgtggccaacacggcgcgtgaaatgaaaatcgatgtggccgtgaagaacaacttcggcttcggcggtaccaacggcacgctggtcttccgtcgcgcctga

SEQ ID NO: 114741 - protein, 410 aa, Ralstonia eutropha JMP134
MSRRRVVVTGLGLVSPVGNTVAEGWANLVAGKSGIATVTKFDHSALSVHFAGEVKGFNAEDYIPAKEARNMDTFIHYGIAAGAQALKDSGYEVTDANAERIGVLVGSGIGGLPMIEDTHATLTERGPRRISPFFVPGSIINMISGHLSIMHGLKGPNLAAVTACTTGLHSIGLAARLIQAGDADAMLAGGAESTVSPLGIGGFAAARALSTRNDDPAAASRPWDKDRDGFVLGEGAGVMMLEEYESAKARGARIYAELVGFGMSGDAFHMTAPNMDGPRRCMVNALRDAGINADEVQYLNAHGTSTPLGDKNETDAIKAAFGDHAYKMVVNSTKSMTGHLLGGAGGLESVFTVLALHNQVSPPTINIDNQDPECDLDYVANTAREMKIDVAVKNNFGFGGTNGTLVFRRA

SEQ ID NO: 114742 - DNA, 1269 bp, Ehrlichia canis str. Jake
  CDS (1)..(1269): transl_table=11
atgacaacaagaagaatcgtgatcactggtttaggattggttacttctttaggaagtgatgtaaaaacagtatgggaccttttatctaatggagtatcaggcataagcaaaattaatagatttgacacatctgaccttgactgtaagatagctggacaagtaataatgaagtctgaatctgaagaatacgtttttaatgctgcagactacattccagaaaaagacttaaaaaaaatggataactttattcattttggcatagcagctgccacacaagcagttaacgattctaatttacttgattgtaaagatcttgattatgacagagtaggagtaatagtaggatcaggaataggtggtcttccatttatagaaaaaacagttatatgcttacaagagagaggtcccagaaggattagtcctttcttcataccagcaagtttaattaatcttgtctctggtcatatatctataaagtatgggttcacagggttgactgacgcagtagtaactgcatgctctacaggagcacaagctataggtaatgcagcaagagtgattcaatctggtgaagcagatgtaataatagcaggtggagctgaaggtgcggtatgccgcataggaattgcaggattttcagctatgaaagcattatcaacaaaattcaatgatactccagagctagcatcacgaccttgggataaacaaagagatgggtttgtcatgggagaaggtgcaggaatagttatattagaagattatgagcatgcaaaaaaacgtggagcaaaaatatacggagaactgttaggatatggcatgacatcagatgcatatcatatatcagcacctcatccagaaggcaaaggagggatgaaagctatggaactagcgttatctagcgcacaattaaatccagagtctatcaattatataaacgcacatggcacttctactcctctaggagacagtacagaaattcaagcaataaaaagtatatttaaagaaagcatctacaaagttccaatatcatcaactaaatcttctataggtcacctacttggagcagcaggaagcgttgaagctatcttttctatacttgctatgaatacaagcattacaccccctacattaaacttatatgaatcatcagaggatccacaattaaatctcgttccactcaatgcacaggaacataagattaattattgtctttctaattctttcggctttggtggagtaaatatatcattagtttttgggaaattataa

SEQ ID NO: 114743 - protein, 422 aa, Ehrlichia canis str. Jake
MTTRRIVITGLGLVTSLGSDVKTVWDLLSNGVSGISKINRFDTSDLDCKIAGQVIMKSESEEYVFNAADYIPEKDLKKMDNFIHFGIAAATQAVNDSNLLDCKDLDYDRVGVIVGSGIGGLPFIEKTVICLQERGPRRISPFFIPASLINLVSGHISIKYGFTGLTDAVVTACSTGAQAIGNAARVIQSGEADVIIAGGAEGAVCRIGIAGFSAMKALSTKFNDTPELASRPWDKQRDGFVMGEGAGIVILEDYEHAKKRGAKIYGELLGYGMTSDAYHISAPHPEGKGGMKAMELALSSAQLNPESINYINAHGTSTPLGDSTEIQAIKSIFKESIYKVPISSTKSSIGHLLGAAGSVEAIFSILAMNTSITPPTLNLYESSEDPQLNLVPLNAQEHKINYCLSNSFGFGGVNISLVFGKL

SEQ ID NO: 114744 - DNA, 1251 bp, Anabaena variabilis ATCC 29413
  CDS (1)..(1251): transl_table=11
atgacagattataatcgtaaacgcgttgttgtcacgggtgttggcgcgattacacctattggtaacacagcctctgaatattgggaaggattgttaagcggacgcaatggcattgactacatcacccactttgatgcgtctagccatgattgtcgtattgctggtgaagtgaaaaacttcgacccccatgagtacttggagcgcaaagaagccaagcgcatggatcggttttcccaatttgcagttgcagcagccaaacaagcacttgcggattcccagttagtcattaatgaactgaacgccgaacaagtggggattattattggttctggggtaggcggactcaaggtcatggaagaccagcaaaccatctatctcaaccgtggtcccgatcgctgtagtcccttcatgattcccatgatgatcgccaacatggcggctggactgacagcaattcacactggtgctaagggtccaaataactgtaccgtcaccgcttgcgccgcaggctctaatgcgatcggcgacgctttccgcctagttcaaggcggttatgcccaagccatgatttgcggtggggctgaggcagcaattacaccattaggtgtagctgggtttgcggctgcacgggcgttatcaactcgcaatgatgaccctgctcatgcttgtcgtccctttgaccgcgatcgcgatggatttgtcatgggtgaaggtgcgggagttctgattctggaagagctgcaacacgccataagtcgcggcgctcgcatttatgccgaaattgttggttatggtatgacttgcgatgcttaccacatgacatccccagttccgggcggcgaaggagcctccagagccatccaactggcactcaaagacgcaaacatcaccccagaacaagttagctacattaatgctcacggcaccagcacttcagcaaacgataccactgaaaccgcagcgattaaacgagcgctaggagaccacgcttataaaatagcagtcagctccaccaaatcgatgacaggtcatcttttgggtggttctggaggtattgaagctgtagccacagtgttggcaactgctcacgaccaaattccacctacaattaatattcaaaaccttgacccagattgtgacctagactacgtgcctgactctagtcgcgctcacaaagtccaggtagcattgtctaattcttttggatttggtggtcataatgtcacactagctttcaaaaagtacgtgtga

SEQ ID NO: 114745 - protein, 416 aa, Anabaena variabilis ATCC 29413
MTDYNRKRVVVTGVGAITPIGNTASEYWEGLLSGRNGIDYITHFDASSHDCRIAGEVKNFDPHEYLERKEAKRMDRFSQFAVAAAKQALADSQLVINELNAEQVGIIIGSGVGGLKVMEDQQTIYLNRGPDRCSPFMIPMMIANMAAGLTAIHTGAKGPNNCTVTACAAGSNAIGDAFRLVQGGYAQAMICGGAEAAITPLGVAGFAAARALSTRNDDPAHACRPFDRDRDGFVMGEGAGVLILEELQHAISRGARIYAEIVGYGMTCDAYHMTSPVPGGEGASRAIQLALKDANITPEQVSYINAHGTSTSANDTTETAAIKRALGDHAYKIAVSSTKSMTGHLLGGSGGIEAVATVLATAHDQIPPTINIQNLDPDCDLDYVPDSSRAHKVQVALSNSFGFGGHNVTLAFKKYV

SEQ ID NO: 114746 - DNA, 1278 bp, Pseudomonas fluorescens PfO-1
  CDS (1)..(1278): transl_table=11
atgcaaagtcgtcatttgaaaaaggagagtgctgtgtcgcgtagacgcgtcgtagtcaccggtatgggtatgttgtcgccactgggcacggatgtgccgagcagttggcagggcattctggctggccgcagtggcattggtctgatcgaacacaccgacctttctgcctattccacccgctttggcggctcggtaaagggcttcaatgtcgaggaatacctgtcggtcaaggaagcgcgcaagctcgacctgttcattcagtacggtctggcggccggctttcaagccgtacgcaatgccggtctggaagtcaccgatgccaaccgtgaacgcatcggcgtggccatggggtcgggtatcggcggtctgaccaacatcgaagaaaccagccgcaccctgcacgagactggcccacgccggatttctccgttctttgtgcctggctcgatcatcaatatgatttccggtttcctgtccatccacctgggtgcacaggggcctaactatgccatcgccacggcgtgtaccaccggtacgcactgcatcggcatggcggcgcgcaacatcatgtacgacgaagccgacgtgatgattgccggcggtgccgagatggccgcgtgcggtctgggcatgggcggcttcggtgcttcccgtgcgctgtcgacccgcaacgacgagccgacccgcgccagccgtccgtgggacaagggccgtgacggcttcgtgctgtccgacggcgccggtgcgctggtgctcgaagagctcgagcacgccaaggcccgtggcgcgaccatctacgccgagctgatcggtttcggcaccagtggcgacgccttccacatgacttcgccacccgccgacggcgccggtgctgcacgctgcatcaccaacgcgctgcgcgatgcgaagatcaacgtcgatcaagttcaatacatcaacgcccacggcacttcgaccccggccggcgaccttgccgaagccaacgcgatcaagtcggtgttcggtgatcacgcctacaaactggcagtcagctccaccaagtccatgaccggtcacctgctgggtgcggcgggcgcggtcgaggcgatcttcagcgtcctggcgatcaacagccaggtggcgccaccgaccatcaacctcgaagagccggacgaaggctgcgacctcgatttcgtgccgcacaccgcgcgcaatatggatatcgatgtcgtgctgtccaactcgttcgggtttggcggcaccaacggcacgctggcgttccgtcggttcgccggctga

SEQ ID NO: 114747 - protein, 425 aa, Pseudomonas fluorescens PfO-1
MQSRHLKKESAVSRRRVVVTGMGMLSPLGTDVPSSWQGILAGRSGIGLIEHTDLSAYSTRFGGSVKGFNVEEYLSVKEARKLDLFIQYGLAAGFQAVRNAGLEVTDANRERIGVAMGSGIGGLTNIEETSRTLHETGPRRISPFFVPGSIINMISGFLSIHLGAQGPNYAIATACTTGTHCIGMAARNIMYDEADVMIAGGAEMAACGLGMGGFGASRALSTRNDEPTRASRPWDKGRDGFVLSDGAGALVLEELEHAKARGATIYAELIGFGTSGDAFHMTSPPADGAGAARCITNALRDAKINVDQVQYINAHGTSTPAGDLAEANAIKSVFGDHAYKLAVSSTKSMTGHLLGAAGAVEAIFSVLAINSQVAPPTINLEEPDEGCDLDFVPHTARNMDIDVVLSNSFGFGGTNGTLAFRRFAG

SEQ ID NO: 114748 - DNA, 1263 bp, Rhodobacter sphaeroides 2.4.1
  CDS (1)..(1263): transl_table=11
atgcgtcgagtggttgtcacggggctgggcatggtcacgccgctggcgtgcggcgtcgaggagacctggaagcggctgctggccgggcagtccggcgcgggtccgatccagcggttcgacacgtccaacgtgaccacgcaatatgcctgcgagatcccggtgggcgacggcagcgacggcaccttcaacgccgacgactggatggagcccaaggacaggcgcaaggtcgacgatttcatcctctatgccatggccgcggccacgcaggcggtgaaggattccggctgggagccgcaatccgaggaagaccgctgccgcacgggcgtgatgatcggctcgggcatcggcggcctctcggccatcgccgacacggccgtgctcatcaaggaaaaggggccgaagcgcgtctcgcccttcttcatcccctcggcgctcatcaacctggcctcggggcaggtctcgatccgcttcggctacaagggtccgaaccatgccgtcgtgaccgcctgctcgaccggcgcccatgcgatcggcgacgcggcccggctgatccagctcggcgatgccgacgtgatgctcgcgggcggcgccgagagcccgatctccgagatcggcatcgcgggcttcaacgcctgcaaggcgctctcgaccaagcggggcaacgagcccgaggccgcctcgcggccctgggacgccgaccgcgacggattcgtgatgggcgagggcgcgggcgtcgtcgtgctcgaggaatatgaacatgccagggcgcgcggcgccaagatctatgccgaggtgctgggctacggtctttccggcgatgcctaccacatcaccgccccctcggaagacggggacggcggcttccgctcgatgaccatggcgctgaagcgcgcgggcctcgaaccctcggcggtcgactatatcaacgcccacggcacctcgaccatggccgacgtgatcgaactcggcgcggtcgagcggcttctgggcgaggcggcggcggcggccaccatgtcctcgaccaagtcgagcatcgggcacctgctgggcgctgcgggcgcggtcgaggcgatcttctgcgtgctggccatccgcgatcaggtggcgccgcccacgctgaacctcgacaacccggccgtggaggcgaggatcgacctcgcacccaaggcggcgcgcccgcgcaagatcgacgtggcgctatcgaattccttcggcttcggcggcacgaacgcgtcgctggtgctgggacgggtcacctcgtga

SEQ ID NO: 114749 - protein, 420 aa, Rhodobacter sphaeroides 2.4.1
MRRVVVTGLGMVTPLACGVEETWKRLLAGQSGAGPIQRFDTSNVTTQYACEIPVGDGSDGTFNADDWMEPKDRRKVDDFILYAMAAATQAVKDSGWEPQSEEDRCRTGVMIGSGIGGLSAIADTAVLIKEKGPKRVSPFFIPSALINLASGQVSIRFGYKGPNHAVVTACSTGAHAIGDAARLIQLGDADVMLAGGAESPISEIGIAGFNACKALSTKRGNEPEAASRPWDADRDGFVMGEGAGVVVLEEYEHARARGAKIYAEVLGYGLSGDAYHITAPSEDGDGGFRSMTMALKRAGLEPSAVDYINAHGTSTMADVIELGAVERLLGEAAAAATMSSTKSSIGHLLGAAGAVEAIFCVLAIRDQVAPPTLNLDNPAVEARIDLAPKAARPRKIDVALSNSFGFGGTNASLVLGRVTS

SEQ ID NO: 114750 - DNA, 1239 bp, Carboxydothermus hydrogenoformans Z-2901
  CDS (1)..(1239): transl_table=11
atgaaaagggttgtagttactggtttgggtctaatttccccgcttggtattgggattaaagaaaattgggataacttaatgaaaggagtatcgggggttagagaagtaagttcctttgataccactggctttgcaacccgtattgctgctgaagttagggattttgaccctttaaaatttattgataaaaaagaagcccggcgcatggaccgttttactcagtttgctgttgcggcaactaaattggcaatcgaagatgcggggcttgagctcagtaaaattaatcctgaaagagcaggaatatttattggaagtggaattggtgggataaaaactctggaggagcaggctgctattttacgggagaaggggccagaccgagtcagtcctttttttgtacctatgatgattgccaacatggctggggggcagatagcaattacctttggcttaaccggccccaatgaaacgattgtttcagcgtgtgcttcgggagctaatgcggtgggggatgcttttcgctgtttgcaaaggggcgaggttgatgttgccattgccggtggtgcggaagcagcgataactcctctctcttttgccgggttttgttctatgaaagctatgtctacgagaaatgacgagccggaaaaagcttcccggccttttgataaagaccgggacgggtttgttatgggtgaaggtgccggaattttgatattagagactttggaacatgccctggcccgcggagcacggatttatggagagattgtggggtatggcgttacgagcgatgcataccatatcaccgctcctgatcctgaaggaaaaggtgccgcccgagcaatggagttagccctgaaagatgcccggttaaatcccgaagatatcgattacattaatgctcacgggacttcgacgccattaaatgacaaagtagaaactttagcaataaaaaaggtttttggtgatcatgcttacaagctgatggtaagctcaacgaagtcgatgacggggcatttgttaggagcggccggggggatagaaaccatttattcgattttggcagtatttttcaatcaagttccccctactttaaattgcgatgaaccggaggaaggattagatcttgattatgttcccaataccggtcgggatacggtggtaaaagctgccctttctaactcattgggatttggcggtcataatgtaagtttaattgtaaaaaaatttaacgggtga

SEQ ID NO: 114751 - protein, 412 aa, Carboxydothermus hydrogenoformans Z-2901
MKRVVVTGLGLISPLGIGIKENWDNLMKGVSGVREVSSFDTTGFATRIAAEVRDFDPLKFIDKKEARRMDRFTQFAVAATKLAIEDAGLELSKINPERAGIFIGSGIGGIKTLEEQAAILREKGPDRVSPFFVPMMIANMAGGQIAITFGLTGPNETIVSACASGANAVGDAFRCLQRGEVDVAIAGGAEAAITPLSFAGFCSMKAMSTRNDEPEKASRPFDKDRDGFVMGEGAGILILETLEHALARGARIYGEIVGYGVTSDAYHITAPDPEGKGAARAMELALKDARLNPEDIDYINAHGTSTPLNDKVETLAIKKVFGDHAYKLMVSSTKSMTGHLLGAAGGIETIYSILAVFFNQVPPTLNCDEPEEGLDLDYVPNTGRDTVVKAALSNSLGFGGHNVSLIVKKFNG

SEQ ID NO: 114752 - DNA, 1233 bp, Geobacter metallireducens GS-15
  CDS (1)..(1233): transl_table=11
atgagaagagttgttgtgacgggagttggagccatttctcccctggggaccggcaatggcaagaactgggatgcactcgtcgcgggacggtcaggaatcgatctgattacccgtttcgacgcctcggagcttcctgtaaagattgccggcgaagttaaggatttcactcctgaggatttcattgaaaaaaaagaggtcaagaaaatggacctctttattcagtatgcccttgcggctgcccagtttgccatggaggattcggggcttcagattaccgatgagaacgctgaacgcgtcggggtgattgtcggagctggtctcggcggactgccgaccattgagaaatatcatgcggcaatgctggaagggggctacaagaagatctctcctttctttattccgatgctcattatcaacctggctccggggcatatttccatcaagtacggggcaaaaggaccaaacctttcgtcagtttcagcctgcgcgaccggtacccactcaatcggtgatgcctatcacatgatcaagcggggagatgcggatgccatgattgccggcggtaccgagtcgacggtgacacctctcggcataggtggttttgccgtgatgaaggccctctctacccgtaatgacgacccgaaaggggcatcgcgccccttcgagaagagccgtgacggattcgtcctcgctgaaggcgccggaatcgtgattcttgaggagtatgagtctgccaagaagcgcggagcgaagatttatgccgaggtagtcggttatggcctctcgggcgatgcctatcacctgacagcgcctgccccggaaggagaaggggccgcccgctgcatcaagatggcgctcaacaacgccggcatcaatgctgatcaggttgactacatcaatgctcatggtacttcaactcattttaatgattactatgagacgcttgccatcaaaaaagtcttcggagaccacgcaaagaaaatcatggtctcttccaccaaatcgatgaccggtcaccttctcggggcagcaggcggtgtcgaggcggtattcagcctcatggcgatggacaagggtgttgttcctccgaccatcaactaccaggagcaggattctgagtgcgatctcgattatgtccccaacactgcccgggatgcaaagatcacctatgccatgagcaacaacttcggtttcggcggcaccaatgcctcgcttctcttcaagaagatatag

SEQ ID NO: 114753 - protein, 410 aa, Geobacter metallireducens GS-15
MRRVVVTGVGAISPLGTGNGKNWDALVAGRSGIDLITRFDASELPVKIAGEVKDFTPEDFIEKKEVKKMDLFIQYALAAAQFAMEDSGLQITDENAERVGVIVGAGLGGLPTIEKYHAAMLEGGYKKISPFFIPMLIINLAPGHISIKYGAKGPNLSSVSACATGTHSIGDAYHMIKRGDADAMIAGGTESTVTPLGIGGFAVMKALSTRNDDPKGASRPFEKSRDGFVLAEGAGIVILEEYESAKKRGAKIYAEVVGYGLSGDAYHLTAPAPEGEGAARCIKMALNNAGINADQVDYINAHGTSTHFNDYYETLAIKKVFGDHAKKIMVSSTKSMTGHLLGAAGGVEAVFSLMAMDKGVVPPTINYQEQDSECDLDYVPNTARDAKITYAMSNNFGFGGTNASLLFKKI

SEQ ID NO: 114754 - DNA, 1263 bp, Rhodospirillum rubrum ATCC 11170
  CDS (1)..(1263): transl_table=11
atgagacgtgttgtcgtcaccgggttgggcatggtcacgcccctcggatgcggggtgaaaaccaattggacgagtctcgtccagggcaaatccggcattcgacccattcaaaaattcgacgtatcggacatgccggcccgcgttgccggacaaatcccgacggccgccgacgggcctcacggctttgaccccgatacggtcgtgtcctccaaggaccgccgccgcatggacgatttcatcgtctatggtctggccgccgccaaagaggcggtggaagacagcggctggatgcccgaagacgaggagtcccgcgagcgcaccggcgtgatgatcggctctggcatcggcggtttgacgtcgatcgccgagacggcgttgatcctcaaggagcacgggccgcgcaaggtcagccccttcttcattcccagcgcgctgatcaatctggtctcgggccatgtctcgatccgctacggcttcaagggtcccaaccacgcggtggtgacggcctgttcgaccggagcccatgccatcggtgacgccagccggctgatcattcacggcgatgccgatgtgatggtggccggtggcgccgaatccgcggtctgccggatcggcatcgccggtttcgccgccgcccgggcgctgtcgacccattacaacgacaccccggaagaggcctcgcgcccctatgacaagggccgggacggcttcgtcatgggcgagggcgcgggcatcgtcgtgcttgaggaatacgagcacgccaaggcgcgcggcgcccatatctacgccgagatcctcggctatggcatgtcgggcgacgcctaccacatcaccgccccggccgaagacggcaacggtggcttccgcgccatgcgggccgccctggccaatgccaagctgaccgtcgaagacatcgattacgtcaatgcccatggcacctcgacgccgctgggcgacgagatcgaactgggcgcggtcaagcggctgtttggcgatcacgcctataagctgaccatgtcgtcgaccaaatcggccatcggtcatctgctgggcgccgcaggcagcgtcgaggcgatttattcgatcctggccattcgtgatcaggtcgccccgccgacgcttaatctgcacgatccgtccgacgcctgcgacatcgatctggcgccgctggtggccaaggaacggccgatccgcaaggcgctgtcgaattccttcggctttggcggcaccaatgcctcgctgatcttcgggggagccccctaa

SEQ ID NO: 114755 - protein, 420 aa, Rhodospirillum rubrum ATCC 11170
MRRVVVTGLGMVTPLGCGVKTNWTSLVQGKSGIRPIQKFDVSDMPARVAGQIPTAADGPHGFDPDTVVSSKDRRRMDDFIVYGLAAAKEAVEDSGWMPEDEESRERTGVMIGSGIGGLTSIAETALILKEHGPRKVSPFFIPSALINLVSGHVSIRYGFKGPNHAVVTACSTGAHAIGDASRLIIHGDADVMVAGGAESAVCRIGIAGFAAARALSTHYNDTPEEASRPYDKGRDGFVMGEGAGIVVLEEYEHAKARGAHIYAEILGYGMSGDAYHITAPAEDGNGGFRAMRAALANAKLTVEDIDYVNAHGTSTPLGDEIELGAVKRLFGDHAYKLTMSSTKSAIGHLLGAAGSVEAIYSILAIRDQVAPPTLNLHDPSDACDIDLAPLVAKERPIRKALSNSFGFGGTNASLIFGGAP

SEQ ID NO: 114756 - DNA, 1236 bp, Moorella thermoacetica ATCC 39073
  CDS (1)..(1236): transl_table=11
ttgcaaaagcgtgtcgtaataaccggcctggcggccatctccccggtgggaaccggtaaagacaaattttggcgggctttagttgccgggcaatcgggcatcggccccatcacccgctttgatgccgccgccatgcccgtccgtttcgccggggaagtaaaggactttgatgcgggcctgttttttgaccgtaaagaagcccggcgtatggaccgtttcgcccagtacgccgtggcaggcgcgcgcatggctgtcgaagatgccgccctggacctggataaagagaatcgcgaccgggtcggggttatttttgccactggaatcggtggcatggagacctttgaggaacagaccagggtcctgttagaaaggggccccaaccgggtgagtcccttctttgtgcccatgatgattgccaatatggccgccggtcagatctctataaacctgggtaccaggggggtaaactttacagtggtcaatgcgtgtgcctcgggtaccaacgccgtcggtgaggccttccgcgccctgcaacggggcgatgccgacgtggtgataaccggtggcagtgaggcaagtgtcactcctctggcagttgccggttttgctgctttaaaggccctatcagtgcgtaatgacgacccgacccgggccagccggccctttgaccggggcagggatggttttgtcttgggggaaggggctggagtactggtcctggagaccctggagcacgcccgggcccggggtgcccgcatctatgccgaggtagccgggtacggctgtacggctgacgcctaccacattacagccccggcgcccgacggcagcgccgccagccgggccatggccctggccctggaggatgcaggtttaaaacccggggatgttgattatattaacgcccatgggacctccacggaactcaatgaccgccaggagaccctggccatcaagaacctttttggcgccgacgcctacagggtggctattagctccaccaaatccatgattggccatctcctgggagctgccggggccattgagcttgtagccacggccctgacaatcgctactggggtcatccctccaactataaattatgaagagcctgacccggaatgtgacctggattatgttcccaacgtcgcccgggaacggcaggtggcggtggccatgtccaattccttcggctttggcggccataatgccgcgatagttttacgtaaactttag

SEQ ID NO: 114757 - protein, 411 aa, Moorella thermoacetica ATCC 39073
MQKRVVITGLAAISPVGTGKDKFWRALVAGQSGIGPITRFDAAAMPVRFAGEVKDFDAGLFFDRKEARRMDRFAQYAVAGARMAVEDAALDLDKENRDRVGVIFATGIGGMETFEEQTRVLLERGPNRVSPFFVPMMIANMAAGQISINLGTRGVNFTVVNACASGTNAVGEAFRALQRGDADVVITGGSEASVTPLAVAGFAALKALSVRNDDPTRASRPFDRGRDGFVLGEGAGVLVLETLEHARARGARIYAEVAGYGCTADAYHITAPAPDGSAASRAMALALEDAGLKPGDVDYINAHGTSTELNDRQETLAIKNLFGADAYRVAISSTKSMIGHLLGAAGAIELVATALTIATGVIPPTINYEEPDPECDLDYVPNVARERQVAVAMSNSFGFGGHNAAIVLRKL

SEQ ID NO: 114758 - DNA, 1266 bp, Burkholderia thailandensis E264
  CDS (1)..(1266): transl_table=11
ttgtcattcaatggaaaagaggttaccgtgagccgccgtcgtgttgttgttacaggccttgggctgatttcgcctgttggcaataatgttgccgacggctgggccaatctcgtggccggcaagtccggcatcgtcaatatcacgaagttcgacgcgacgaacttctcgacccgcttcgcaggcgaggtgaagggcttcaacgtcgaggattacatcccggcgaaggaagcgcgccacatggatacgttcatccattacgggatcgcggccggcatgcaggcgatgcaggacagcggcttccaggtcaccgacgaaaacgcggagcgcgtcggcgtcgtggtcggctcgggcatcggcgggctgccgatgatcgaggtcacgcagaccgagctgcttaaccgcggcccgcgccggatctcgccgttcttcgtgccggcgtcgatcatcaatatggtgtccggccatctgtcgatcaagttcggcatcaagggcccgaatctggcgatcgtcaccgcttgcacgaccggcctgcactgcatcggcgaagctgcgcgcctcatcgaatacggcgacgcggacgtgatgatcgcgggcggcgcggaggcgacggtgtcgccgctcggcatcggcggcttcgcggcggcgcgcgcgctgtcgcagcgcaacgacgatccggcgaccgcgagccgcccgtgggacaaggaccgcgacggcttcgtgctcggcgaaggcgcgggcgtgatggtgctcgaggagtacgagcacgcgaaggcgcggggcgcgaagatctacgcggaaatcgggggctacgggatgagcggcgacgcgtatcacatgacggctccgctcgaggatggcgacggtgcgcgacgctgcatgctggccgcgctgcgcaacgccggcatcaacgtcgatcaggtcaactacctgaacgcgcacggcacgtcgacgccgcttggcgacgtcgcggaaacggtcgcgatcaagcgggcgttcggcgatcacgcgaagcaaatcgtcgtcaactcgacgaagtcgatgacgggccacctgctcggcgggtcgggcgggctcgaatcggtgttcacggtcctcgccgtccacaaccaggtgtcgccgccgacgatcaacatcttcaaccaggatcccgcgtgcgatctggattattgcgcgaacgaagcgcgcgagatgaagatcgatgtcgcgttgaagaactccttcggcttcggcgggactaacggcacgctggtcttcaagcgcgtctga

SEQ ID NO: 114759 - protein, 421 aa, Burkholderia thailandensis E264
MSFNGKEVTVSRRRVVVTGLGLISPVGNNVADGWANLVAGKSGIVNITKFDATNFSTRFAGEVKGFNVEDYIPAKEARHMDTFIHYGIAAGMQAMQDSGFQVTDENAERVGVVVGSGIGGLPMIEVTQTELLNRGPRRISPFFVPASIINMVSGHLSIKFGIKGPNLAIVTACTTGLHCIGEAARLIEYGDADVMIAGGAEATVSPLGIGGFAAARALSQRNDDPATASRPWDKDRDGFVLGEGAGVMVLEEYEHAKARGAKIYAEIGGYGMSGDAYHMTAPLEDGDGARRCMLAALRNAGINVDQVNYLNAHGTSTPLGDVAETVAIKRAFGDHAKQIVVNSTKSMTGHLLGGSGGLESVFTVLAVHNQVSPPTINIFNQDPACDLDYCANEAREMKIDVALKNSFGFGGTNGTLVFKRV

SEQ ID NO: 114760 - DNA, 1260 bp, Syntrophus aciditrophicus SB
  CDS (1)..(1260): transl_table=11
ttgagagtgagacaaccattgagaaggagagttgtcataaccgggatgggagcggtgacgccccttggaaactccgtcatggatacgtggtcagccctctgtgcgggccgctcgggtatcggaccgatcacgaaatttgatgcagcggattttgaaacgcgcattgccggagagctcaagaattttgaccctctcgtgtatgtcagtaaaaaagaagtgcgccgactcgatcctttcattatctattgcctggcatcggcggaaatggctgtggccgattccggactggtccttgacgagccccgggcgacccgaacgggcgtggtgatcggttcggcaatcggcggtctgacaactctcgaaaaagaaaaagaaatcctttcacgcaacggtccccgcagggtttcgccttttactattccttccgtgctgcccaatctgggggcaggtcaagtatccattcgcttcggggccagaggacccgtcaactgtcccgtgacggcctgcgcttcagggacaaccgccgtgggagaggctttccggctcattgctttcgactatgccgacgtggtttttgccggcggcgccgatgccgcgatcagccccatggctgttgccggtttcaatgccatgcatgccatttcacagcgaaacgacgagccgcagaaggccagtcgccctttcgatctttgccgtgacgggtttgtcctcagcgaggggtgcggtatcctgatccttgaagagctggactccgccagaaagcggggggcacgcatctacgcggaagttcttgggtatggagcgacgagcgacgcctttcatctggccgtccctcctcccggacatgaaggggctgcccgatgcatgcatgcggctctccgtgatgccggcatgactccctccgacgtcgactatatcaacgcccatggcacctccacgccactgaacgaccaatatgaaacggaggcgatcaagtccgttttcggagaacacagcagccgacttgccgtcagctcgacgaaatccatgaccggtcacctcctcggtgcaacggggggtgtcgaagcgatttttacggcaaaggcgctcgagaccggaattctgcctcccaccattaatctcgatcagcccgaccccgcctgtgatctcgattatgtccctcattcggcgcggcggcgcgacattcagatcgccatgtccaacaccttcggtttcggcggcgtcaacgcctcgattcttttaaaaaaattcttcgagtag

SEQ ID NO: 114761 - protein, 419 aa, Syntrophus aciditrophicus SB
MRVRQPLRRRVVITGMGAVTPLGNSVMDTWSALCAGRSGIGPITKFDAADFETRIAGELKNFDPLVYVSKKEVRRLDPFIIYCLASAEMAVADSGLVLDEPRATRTGVVIGSAIGGLTTLEKEKEILSRNGPRRVSPFTIPSVLPNLGAGQVSIRFGARGPVNCPVTACASGTTAVGEAFRLIAFDYADVVFAGGADAAISPMAVAGFNAMHAISQRNDEPQKASRPFDLCRDGFVLSEGCGILILEELDSARKRGARIYAEVLGYGATSDAFHLAVPPPGHEGAARCMHAALRDAGMTPSDVDYINAHGTSTPLNDQYETEAIKSVFGEHSSRLAVSSTKSMTGHLLGATGGVEAIFTAKALETGILPPTINLDQPDPACDLDYVPHSARRRDIQIAMSNTFGFGGVNASILLKKFFE

SEQ ID NO: 114762 - DNA, 1227 bp, Frankia sp. CcI3
  CDS (1)..(1227): transl_table=11
gtgaccacgccccccaggcaggtcgtcgtcaccggcctcggggctactactcccctcggtggcgatgtcgcctcgacgtgggagggtctgctctcgggccgctccggcgtccggcgtctcaccgagggctgggtcgagcagctcccggtccatatcgccgcgccgctggcggtcgagccgccgctgggtcgggtcgaggctcgtaccctcgaccgcagccagcagatggctctgaccgccgcgcgtgaggcgtgggctgacgcgggctcacccgaggtcgaccaggaacgcctcgccgcgtgtgtggcctcggggatcgggggcgtgctcaccctgctccaccagcatgacgtgatccgggagaagggcccccggcgggtatccccgcacctggtgccgatgctcatgccgaacggcccggccagcaccgtgggcctggcgttcggcgcgaaggcgggggtgcacgccccggtcagcgcgtgcgcctccggctcggaggccatcgcgctggcgctggacatcatccgggccgggcgcgccgacgtcgtgatcgccggcggtaccgaggcggcgatctcggcgctgaccatggccggcttcgcgcagatgcaggcgctgtcccgccgcaacgacgcacccgaggccgcctcccgtccgttcgacaaggcgcgggacggcttcgtgctcggcgagggcgcggcaatcctcatcctcgaggcggccgagcacgcggccgcccgcggtgcccgggtccacggcaccctggccggcgccggcatcagctcggacgcctaccacatcgccgcgccggagccgaccggcgccggcgcggcccgggcgatccgggcggcgctgcggtccggctcgttggaaccccgtgacgtcgtccacgtcaacgcccacgccacgtccacccccgccggtgacgcggcggaggcgctggcgttgcgcagcgccttcggtgaccacatcgacgagatcgcggtgacgtcgaccaagtcgaccaccgggcacctgctcggtgccgccggcgcggtagaggccgtgttcagcgtcctggcgctgcgggagcacctggttcccgcgacgcgcaacctcgacgctctcgacgacgagatcgcgctcgacgtcgtgcggatcgacaaccggaccatccgcccgggcgccgcgctgtcgaactcgttcgggttcggcggtcacgacatctgcctggccttcaccgcctga

SEQ ID NO: 114763 - protein, 408 aa, Frankia sp. CcI3
MTTPPRQVVVTGLGATTPLGGDVASTWEGLLSGRSGVRRLTEGWVEQLPVHIAAPLAVEPPLGRVEARTLDRSQQMALTAAREAWADAGSPEVDQERLAACVASGIGGVLTLLHQHDVIREKGPRRVSPHLVPMLMPNGPASTVGLAFGAKAGVHAPVSACASGSEAIALALDIIRAGRADVVIAGGTEAAISALTMAGFAQMQALSRRNDAPEAASRPFDKARDGFVLGEGAAILILEAAEHAAARGARVHGTLAGAGISSDAYHIAAPEPTGAGAARAIRAALRSGSLEPRDVVHVNAHATSTPAGDAAEALALRSAFGDHIDEIAVTSTKSTTGHLLGAAGAVEAVFSVLALREHLVPATRNLDALDDEIALDVVRIDNRTIRPGAALSNSFGFGGHDICLAFTA

SEQ ID NO: 114764 - DNA, 1263 bp, Novosphingobium aromaticivorans DSM 12444
  CDS (1)..(1263): transl_table=11
atgcgtcgtgtcgtcgtaaccggacttggactggtcaccccgctgggtgcggacgttgaaacagtgtggaagaacctgcttgccggcaagagcggcgcggggctcatcaccaagttcgacaccacggaccagaagtgcaagatcgcctgtgaggtgaagccggccgaccacgagtatggtttcgatgccggcaagcgcgtggaccacaagatccagcgccaggtcgatcccttcatcgtcttcggcatcgatgccgcagggcaggcgctcgaagacgcagggctcgccgacatggacgacgatctcaagatgcgcaccggctgctcgatcggttcgggcatcggcggcctgccgggaatcgagagcgaatcgatcatcctgcacgaaaagggccccggccgtgtttcgccgcacttcgtccatggtcgcctgatcaacctgatttccggtcaggtctcgatcaagtacggcctgatggggccgaaccatgcggtcgtcaccgcctgctcgaccggcgcacactcgatcggcgacgccgcgcgcatgatcaaggacggagatgccgacgtcatgctggccggcggcgccgagagcacgatcaacccgctgggcgttgccggcttcgcccaggcccgcgcgctgaactgcagctacaacgaccgcccgaccgaggcgagccggccctacgacaaggaccgcgacggcttcgtcatgggcgagggcgcgggcgttgtggtgctcgaggaatacgagcacgccaaggcgcgcggcgcgaagatctatgccgaagtcgtcggttatggcctgtcgggcgacgcttaccacgtcacggcgccgcatcctgaaggcaagggcgcggaactggcgatgcgcatggcgctgcgcaaggcaggtctttcggccggcgacatcgattacgtcaatgcccacggcacctcgaccatggccgacacgatcgagctggcggccgtgaagcgcgtgctgggcgacgacctttccggcgcttcgatgagcagtaccaagtctgccattggccaccttcttggcggtgccggcgcggtcgagacgatcttctgcatcctggcgatccgcgaccagatcgtgccgccgacgctcaacctgcacaatccggacgaaggcaccgaaggcgtggacctcgtcccgctcaaggccaagccccgcaaggtgcgcgcggcgctgaacaattcgttcggctttggcggcaccaatgccagtgtgatcgtcaaggcggtcgaagactga

SEQ ID NO: 114765 - protein, 420 aa, Novosphingobium aromaticivorans DSM 12444
MRRVVVTGLGLVTPLGADVETVWKNLLAGKSGAGLITKFDTTDQKCKIACEVKPADHEYGFDAGKRVDHKIQRQVDPFIVFGIDAAGQALEDAGLADMDDDLKMRTGCSIGSGIGGLPGIESESIILHEKGPGRVSPHFVHGRLINLISGQVSIKYGLMGPNHAVVTACSTGAHSIGDAARMIKDGDADVMLAGGAESTINPLGVAGFAQARALNCSYNDRPTEASRPYDKDRDGFVMGEGAGVVVLEEYEHAKARGAKIYAEVVGYGLSGDAYHVTAPHPEGKGAELAMRMALRKAGLSAGDIDYVNAHGTSTMADTIELAAVKRVLGDDLSGASMSSTKSAIGHLLGGAGAVETIFCILAIRDQIVPPTLNLHNPDEGTEGVDLVPLKAKPRKVRAALNNSFGFGGTNASVIVKAVED

SEQ ID NO: 114766 - DNA, 1248 bp, Neorickettsia sennetsu str. Miyayama
  CDS (1)..(1248): transl_table=11
atgtcgaagagagttgtagtaaccggattggggttgcttacttgtctatccagtactagggaaagatcttgggcgctgatccttgagtcgaggtctggggtgcgggcactttctactatagaaacggaaggacttcctgttactataggcggggaggtgttagagaacggggaagatggctttgactgtaaaaagtttagtgatccacgaaaacatgatcgctatatatcgtatggtatagccgcgtctagagaggcagtacaacattcgcaattgctggaatatccttctttggataagagaagggtcggcgtatcaataggttctggtataggagggttaccacttatcgagaaaaactcgattcttctccgtgaagagggtatacggaaggtgagtccgttttttattccggcaagtttgatcaatcttacttcagggaatgttgccattgaaaacggatttactgggccaaatgatgctttggtcactgcatgtgcaacgggtgctcacgcaatagtgaattcttggcgcataattgctaacgatgaagctgatgtgatgatagctggtgcttctgaaggggctttatgtcgagtcggtatagctgggtttgcaaatatgaaagccctttcgaggcgtaatgatgagccggagaaggcttctaggccatgggatgttgatagggacggtttcgtaatgagtgatggtgccggggttatggtgctcgaagagtatggccatgcgaaaagacgtggagcgcgaatttacgctgagttagtaggttttggtgtctctggagatgcatatcatgtcgctgctcctaatccgaatggagatggcgcgcttgctgcaatggcttctgcaataaaaatggcggggattgggttggacgagattgattatatcaatgcacacggaacgtccactccaaatggcgacgctgctgagttgaatgctctacggcgtttgtttggcagctccttaggaatgggtgtgtcttcaacgaagtcatctatagggcatgctttgggtgctgctggcggtatagaagcggttctttgtgtactcgctatgcgtgattcggtaatgcctccaacgcttaatttggataaacctgatgattgtgctagtggatttaatttagtaccacacacatctcaagagaagaatttgcggtatgtactctcgaattcttttgggtttgggggaaccaatgtatcattactgtttgggcaatattcataa

SEQ ID NO: 114767 - protein, 415 aa, Neorickettsia sennetsu str. Miyayama
MSKRVVVTGLGLLTCLSSTRERSWALILESRSGVRALSTIETEGLPVTIGGEVLENGEDGFDCKKFSDPRKHDRYISYGIAASREAVQHSQLLEYPSLDKRRVGVSIGSGIGGLPLIEKNSILLREEGIRKVSPFFIPASLINLTSGNVAIENGFTGPNDALVTACATGAHAIVNSWRIIANDEADVMIAGASEGALCRVGIAGFANMKALSRRNDEPEKASRPWDVDRDGFVMSDGAGVMVLEEYGHAKRRGARIYAELVGFGVSGDAYHVAAPNPNGDGALAAMASAIKMAGIGLDEIDYINAHGTSTPNGDAAELNALRRLFGSSLGMGVSSTKSSIGHALGAAGGIEAVLCVLAMRDSVMPPTLNLDKPDDCASGFNLVPHTSQEKNLRYVLSNSFGFGGTNVSLLFGQYS

SEQ ID NO: 114768 - DNA, 1233 bp, Saccharophagus degradans 2-40
  CDS (1)..(1233): transl_table=11
gtgagtcgtaaaagggtagtggtaaccggcataggcatggtgagcgcgcttggcaatagcgtagatgaaacctggtcacgcatactaaatggcgaaagtggtattcgagaaattaccgcattcgacgcttcagcttttgcaacccgaattagtggctctgttcaaaaccttgatataactccttacttgcaagaaaaagaagcccgtaaattagacccgtttattcaatatggcatggctgctggtattcaggcagtagaagactccggcctagtagtaaccgacgaaaatgccgcgcgtattggctgtattgtgggttcgggtattggtggtttaggcagcattgaagacaccgccgttttaattgaagaaaaaggcccgcgccgtatttcgccattctttgtgcctggcgcaattatcaatatgattgccggcaacctttctattcgctacggctttaaaggtattaacttagcagtaagtacagcgtgtacctcgggtacacactccattggcttagctgcacgcgaaattttttatggtactgccgatgtaatgattgccggtggtgctgaaatggctacaactaaagtaggcataggtgggtttgccgctgcacgcgcgctttcccgcagaaacgacgagccaaccaaagcaagccgcccatgggataaagaccgcgacggttttgtgcttggcgatggcgcaggtattttagtactagaagaatatgagcacgcaaaagcgcgtggtgccaaaatatatgccgagctaacgggtgttggtacaagcgccgatgcgtaccacattacttcgccttccggtgacggcgctgagctttccatgcgcaatgccattgccgactctggtatgagcttagaagaaattaaccatgtaaatgctcacggcacgtctacacctgctggcgataccgccgagtgtaaagcgcttaaaaatgtatttggaagccacgcacctaatcttgcggttagctcaaccaaatctatgattggtcacttactgggtgccgccggcgccgtagaagctatttttactgtgctagctattcgcgatcaagtggcaccgccaaccattaatttggataacccagacgaaggttgtgatttaaacttcgttgcgcacaaggcgcaaaaaatggaaattaacggcgccatgagtaactcttttggttttggtggtaccaacggtacgctagttttcaaaaaagtataa

SEQ ID NO: 114769 - protein, 410 aa, Saccharophagus degradans 2-40
MSRKRVVVTGIGMVSALGNSVDETWSRILNGESGIREITAFDASAFATRISGSVQNLDITPYLQEKEARKLDPFIQYGMAAGIQAVEDSGLVVTDENAARIGCIVGSGIGGLGSIEDTAVLIEEKGPRRISPFFVPGAIINMIAGNLSIRYGFKGINLAVSTACTSGTHSIGLAAREIFYGTADVMIAGGAEMATTKVGIGGFAAARALSRRNDEPTKASRPWDKDRDGFVLGDGAGILVLEEYEHAKARGAKIYAELTGVGTSADAYHITSPSGDGAELSMRNAIADSGMSLEEINHVNAHGTSTPAGDTAECKALKNVFGSHAPNLAVSSTKSMIGHLLGAAGAVEAIFTVLAIRDQVAPPTINLDNPDEGCDLNFVAHKAQKMEINGAMSNSFGFGGTNGTLVFKKV

SEQ ID NO: 114770 - DNA, 1254 bp, Myxococcus xanthus DK 1622
  CDS (1)..(1254): transl_table=11
gtgtcacaacgtcgagtcgtcgtcaccggaaccgggcttgtttcggctctgggaaccggaaccgagaagaactggcaggcgttgatcgccggcaagtcgggtattgcccaggtcacgcgctttgacgttggcaaaatcgacacgcgcatcgcgggcgaggtgaaggacttcgagcccgaggcgttcatcgaaaagcgcgaagtgcgccggatggacctgtatgcgcagttcgcgttggccgccgcgcagatggccgtgacggagtcgggcattcccattggcccggatgctccgcacggctacatcccggagaaggtcggcgtcatcgtcggctcgggcatcggcggtatctcttcgctggaagagcagcaccgcaaggggttggagaaggggttcgaccggttgtcgcccttcttcatcatccagatgatcatcaacatggcgccgggcctcatctccatgcggtacaactgcaaggggccgaactgggcgccggtgtccgcgtgtgccaccagtgcccacgccattggcgaggcctggaagtccatccgcctgggtgagacggacgcggtcatcgccggcggcgccgaggcggccatcaccccgttggggctgggtggcttctcggtgatgaaggcgctgtccacacgcaatgatgatccggccggggccagccgtcccttcgacaaggaccgtgacggcttcgtcatgggcgagggcgcgggcatcctggtgctggaggagatggaggccgcgaagaagcgcggcgccaacatcctcgcggaggtggtggggtacggtgccaactcggacgcgtaccacgtcacccagccggcgccggaaggcgagggcgcggcgcgctgcatgcggctggcgctccagtccgcggggatgaacccggaggacgtgggctacatcaacgctcacggcacctcgacgccgttcaacgacgcgaatgagacgaaggccatcaagacggtgttcggcgaccacgcgcggaagatcgccgtgtcgtcgaccaagtcgatgacgggccacatgctcggcgcggcgggcggcttcgagggcgtggtcagcgcgctggcgctggcgcgcaacatcctgccgcccaccatcaaccagacgacgcctgatccggactgcgacctggactacgtgcccaaccaggcgcgtgaggcccgggtggacgcggtgatgagcaactcgtttggcttcggcggcaccaacgccgtgctggtgttcaagcgcttctag

SEQ ID NO: 114771 - protein, 417 aa, Myxococcus xanthus DK 1622
MSQRRVVVTGTGLVSALGTGTEKNWQALIAGKSGIAQVTRFDVGKIDTRIAGEVKDFEPEAFIEKREVRRMDLYAQFALAAAQMAVTESGIPIGPDAPHGYIPEKVGVIVGSGIGGISSLEEQHRKGLEKGFDRLSPFFIIQMIINMAPGLISMRYNCKGPNWAPVSACATSAHAIGEAWKSIRLGETDAVIAGGAEAAITPLGLGGFSVMKALSTRNDDPAGASRPFDKDRDGFVMGEGAGILVLEEMEAAKKRGANILAEVVGYGANSDAYHVTQPAPEGEGAARCMRLALQSAGMNPEDVGYINAHGTSTPFNDANETKAIKTVFGDHARKIAVSSTKSMTGHMLGAAGGFEGVVSALALARNILPPTINQTTPDPDCDLDYVPNQAREARVDAVMSNSFGFGGTNAVLVFKRF

SEQ ID NO: 114772 - DNA, 1248 bp, Cytophaga hutchinsonii ATCC 33406
  CDS (1)..(1248): transl_table=11
atgaatttaaaaagagttgttgtaacgggattgggctccttaacgccaattggtaatactgttcctgaatattgggattcactaataaaaggagtaagtggagctgcgctcattacaaaattcaatccggaaaaacacaagaccaagtttgcgtgtgaagttaaaaactttaatgttgaagacttcattgaaaagaaagaagcccgtaagatggatcctttcacgcagtatgcggtagttgtggccgatgaagcgatcaaagatgctggcattacagcagatttggatcatgacagaatcggcgtgatttggggagccggcatcggtggccttaaaacatttgaagatgaagtatcggcattctccaaaggagatggaacacctcgtttcaacccgttctttattccgaaaatgattattgatatcagtgccggctacatttctatcagaaatggttttcgtggccctaatttttcaactgtatctgcctgtgcatcttcttcaaatgcaatcctggatgcgttcaattatatccgtttaaacaaagctaatattattattgccggtgggtctgaagctgctgttgtagaatcaggaatcggtggttttaatgcctgcagagctttatctgaaagaaacgatgatccggcaacggcttcacgtccattcgataaagaccgggatggttttgttatgggtgaaggcgctggtgctcttgtgcttgaagaatatgaacatgcgaaagcccgtggtgcaaaaatttattgtgaagttattggcggcggtatgtctgctgatgcttaccatttaactgctccccacccggaaggcttaggtgcaaaaaatgtaatgctcaacgcgatcagcgatgccgaaatagctaaagaagacgttgattatattaacgttcacggtacatctactcctttaggtgatatcgctgaagtaactgctattcaagctgtttttggtgaacaagcgtacaaactgaatatcagttcaacgaaatcaatgaccggacacttattaggtgctgccggtgctattgaatccattgcaaccatacttgcaattaaaaaccagatcatccctcctactattaacaaccacaacagagacgaagcatttgatgcaagattaaagcttacattgaataaagctgaaaagcgtgaagttaacgttgcgatgtgtaatacatttggttttggtggacataactgctctatcgtcttccgcaaaattgattaa

SEQ ID NO: 114773 - protein, 415 aa, Cytophaga hutchinsonii ATCC 33406
MNLKRVVVTGLGSLTPIGNTVPEYWDSLIKGVSGAALITKFNPEKHKTKFACEVKNFNVEDFIEKKEARKMDPFTQYAVVVADEAIKDAGITADLDHDRIGVIWGAGIGGLKTFEDEVSAFSKGDGTPRFNPFFIPKMIIDISAGYISIRNGFRGPNFSTVSACASSSNAILDAFNYIRLNKANIIIAGGSEAAVVESGIGGFNACRALSERNDDPATASRPFDKDRDGFVMGEGAGALVLEEYEHAKARGAKIYCEVIGGGMSADAYHLTAPHPEGLGAKNVMLNAISDAEIAKEDVDYINVHGTSTPLGDIAEVTAIQAVFGEQAYKLNISSTKSMTGHLLGAAGAIESIATILAIKNQIIPPTINNHNRDEAFDARLKLTLNKAEKREVNVAMCNTFGFGGHNCSIVFRKID

SEQ ID NO: 114774 - DNA, 1251 bp, Rhodococcus sp. RHA1
  CDS (1)..(1251): transl_table=11
gtgacttccgcctcgaccaacgggaagcagttccccaacatcgtcgtcaccagcctcgcggccacgacgtcgatcgctggtgacgtggatgccacgtggaagggcctgttggccggcgagagcggcatcgacaccatccgggaagccttcgtcacggagaacgaccttccggtgacgatcggcggcaagctcaaggtgtcgcccgacgagtcgctgtcccgggtggagatccgccggatgagcttcgtcgagcggctggcgctcgtcttgggccgtcaggtctgggagaacgccggcagcccggaggtcgacaaggatcgcctcggcgtcgtgatcggcaccggactgggcggcggcgaagctctgatcgacgccgtcgagaagatgaaggccggtgggtaccgcaaggtgtcgccgttcgccgtccagatggtgatgcccaacggtccgtcggccaccgtcggactcgagctcggggcccgcgccggagtgatcactcccgtgtcggcctgttcctcgggttccgaggccatcgcccatgcgtaccgcatgctggtgatgggcgacgcggacatcatcgtcgccggtggtgtggagggttacctcgacgccgtgccgatcgcgagtttcgcgatgatgcgcgcgctgagcacccgcaacgacgatccgaaggcggcttcgcggccgttcgacaaggatcgtgacggcttcgtgttcggtgaagccggagcgatgatggtcctcgaaaccgaggagcacgccaaggctcgcggtgccaccatccacgcccgtttgctgggcgcgggaatcacctccgacgggttccacatcgtcgctcccgatccttcgggttcgggcgctgcgcgggccatgacgagggcgatcgagacggctggattgacgaagacggacatccagcacatcaacgcgcacgccacggcaacgccgatcggtgacacggcagaggcgaacgccatcaaggctgccgtcggcaaccatgctgcggtgtacgcaccgaagtccgcgttggggcactcgatcggcgccgtcggtgcgctcgaggcggtgctcacggtcctgagtctgcgtgacggagtcattccgcccacgctgaatctcgagaatcaggatccagagatcgacctggatgtcgtcaagggcgaagcccgttacggcgagatcgatttcgcgatcaacaactcgtttggtttcggtgggcacaatgtcgcgctcgccttcggccgggcctga

SEQ ID NO: 114775 - protein, 416 aa, Rhodococcus sp. RHA1
MTSASTNGKQFPNIVVTSLAATTSIAGDVDATWKGLLAGESGIDTIREAFVTENDLPVTIGGKLKVSPDESLSRVEIRRMSFVERLALVLGRQVWENAGSPEVDKDRLGVVIGTGLGGGEALIDAVEKMKAGGYRKVSPFAVQMVMPNGPSATVGLELGARAGVITPVSACSSGSEAIAHAYRMLVMGDADIIVAGGVEGYLDAVPIASFAMMRALSTRNDDPKAASRPFDKDRDGFVFGEAGAMMVLETEEHAKARGATIHARLLGAGITSDGFHIVAPDPSGSGAARAMTRAIETAGLTKTDIQHINAHATATPIGDTAEANAIKAAVGNHAAVYAPKSALGHSIGAVGALEAVLTVLSLRDGVIPPTLNLENQDPEIDLDVVKGEARYGEIDFAINNSFGFGGHNVALAFGRA

SEQ ID NO: 114776 - DNA, 1251 bp, Trichodesmium erythraeum IMS101
  CDS (1)..(1251): transl_table=11
atgacaaacaaagagcttaaacgggtagttgtcacaggaatgggtgcaataacaccaattggcaacactctgtctgaatattgggatggtttattaaacggtaaaagtggtgtagacaaaataaccctatttgatagttctaaacacaaatgttgtattgcggcagaggtcaaaggctttgaccctcttgaacatatggatcgcaaacaggcaaaacacatggaccgctttactcagtttgcagttgcagccagcaaacagacaattgctgatgcaaaatttgaaatcaacgatctaaacgcagaacaggtgggagtaattattggtactggggtgggtggcattaaagtcttagaagaccagcaagaaatatatttaaatcgtggccctaataagtgtagtccttttatgattccgatgatgattgctaatatggccgcaggtctaacagcaattcatactggggctaaaggaccaaattcttgtactatgactgcttgtgcttctgggtcaaatgctataggagatgctttccgtttgatccaaagaggatatgctcaagcaatgatttgtggtggaactgaatctccagtaacacctttgggattagcaggattttcttctgttaaggctttgtctactcgtaatgatgaccccacttctgccagtcgtccttttgaccgcgatcgcgatggctttgtcatgggtgaaggtgcaggtattctaatcttagaagaattagaatgtgctcttagtaggggagcaagaatatatgcagagatggtcggttatggtatgacctgtgatgcctatcacatgacttccccagtacctgatggagagggggcaactagagctatccaattagcaatgaaagacgctggcttaactcctgcacaaattagttatataaatgctcatggtaccagtacacgagcaaacgatacaacagaaacaaaagccatcaaaaaggtactaggagaaagtgcctctcaggtagcaattagttcaactaagtcaatgactggccatttattgggtggctctggaggtattgaagcgatcgctacagtaatggcgatcgccaatgataaaatcccaccaactattaatttggataatcctgatccagagtgtgacctagattatgtccccaaaaaaagtcgctctcaaataatagaagtagctttatctaattcatttggatttggaggccataatgtgactctggcatttaaaaaatatcgataa

SEQ ID NO: 114777 - protein, 416 aa, Trichodesmium erythraeum IMS101
MTNKELKRVVVTGMGAITPIGNTLSEYWDGLLNGKSGVDKITLFDSSKHKCCIAAEVKGFDPLEHMDRKQAKHMDRFTQFAVAASKQTIADAKFEINDLNAEQVGVIIGTGVGGIKVLEDQQEIYLNRGPNKCSPFMIPMMIANMAAGLTAIHTGAKGPNSCTMTACASGSNAIGDAFRLIQRGYAQAMICGGTESPVTPLGLAGFSSVKALSTRNDDPTSASRPFDRDRDGFVMGEGAGILILEELECALSRGARIYAEMVGYGMTCDAYHMTSPVPDGEGATRAIQLAMKDAGLTPAQISYINAHGTSTRANDTTETKAIKKVLGESASQVAISSTKSMTGHLLGGSGGIEAIATVMAIANDKIPPTINLDNPDPECDLDYVPKKSRSQIIEVALSNSFGFGGHNVTLAFKKYR

SEQ ID NO: 114778 - DNA, 1239 bp, Alkalilimnicola ehrlichei MLHE-1
  CDS (1)..(1239): transl_table=11
gtgtccaaacgtcgagtagcagttaccgggctgggtctggtgtgcccgcagggcaataccgtagatgaggcctgggaaaacatcctggccggccggtccgctgcccgcagcatcgaccgcttcgatgccagtgagttcccggtacagttcgcggccatgcttcagggcttcgacgtcggccggtacctgtcgcccaaggaagctcgcaagatggaccccttcatccactatgcgattgccgccggtgtgcaggccatggaggactccggcctggccgtcagcgacgagaacgcggaccgcattggggtgtccatcggttcaggcattggtggcatcagcgggatcgaggccaacatggccgtgctgaaccggagcggtgcccgccgcatctcgcctttcttcgtccccagcagcatcatcaacatggcctcgggccacctctcgatccgctacggccttaaggggcctaacctggccacggtcaccgcctgcgccgcgggcacccataacatcggccaggcggcccgcgccatcgcctatggtgatgtggacgccatgctggcgggcggctccgagatgcccatctcgcccctggggctggcgggctttgccgccgcccgggcgctctccaaccgcaatgacgagcccgctcaggccagccgcccctttgaaaagggacgggacggcttcgtcctgggcgagggcgccggcatcgtggtgctcgaggagatggaggcggccaagcgccgcggtgcgaccatttacggcgaactggctggctttggcatgagcggcgacgcctatcacatcaccttgccggcggaggggggcgacggcgcccgtcggtgcatggtgcatgcgctgcgggatgcgcacatcacgcccgatcaggtggactacatcaatgcccacggcacctccacaccggccggtgaccgcgttgaggtggaggccgtgcgcaccgccttcggggaccacgccgatcgcctggcgatgagttccaccaagtccatgaccggccacctgctcggcgccgccggcggggtggaggcgatcttctcactgctcgccttgcgcgatcaggtggcgccaccaacgatcaattacgaggagccggacccggactgccggctggacttcgtgcccaatgaggcccgggacctgaccatgaatgtggccctgtccaactccttcggtttcggcgggaccaacggcagtctggtcttccggcgcgtctag

SEQ ID NO: 114779 - protein, 412 aa, Alkalilimnicola ehrlichei MLHE-1
MSKRRVAVTGLGLVCPQGNTVDEAWENILAGRSAARSIDRFDASEFPVQFAAMLQGFDVGRYLSPKEARKMDPFIHYAIAAGVQAMEDSGLAVSDENADRIGVSIGSGIGGISGIEANMAVLNRSGARRISPFFVPSSIINMASGHLSIRYGLKGPNLATVTACAAGTHNIGQAARAIAYGDVDAMLAGGSEMPISPLGLAGFAAARALSNRNDEPAQASRPFEKGRDGFVLGEGAGIVVLEEMEAAKRRGATIYGELAGFGMSGDAYHITLPAEGGDGARRCMVHALRDAHITPDQVDYINAHGTSTPAGDRVEVEAVRTAFGDHADRLAMSSTKSMTGHLLGAAGGVEAIFSLLALRDQVAPPTINYEEPDPDCRLDFVPNEARDLTMNVALSNSFGFGGTNGSLVFRRV

SEQ ID NO: 114780 - DNA, 1287 bp, Hyphomonas neptunium ATCC 15444
  CDS (1)..(1287): transl_table=11
atgtcgaagcgtcgtgttgtcatcaccggtatcggtattgtttctcctctggccaatggccgggaggcgacttgggagcgtctgattgccggtaaatccggcgcaggcaagatcgacaatttcgacgcttcggacctgccgtgcaaaatcgcttttcaggttccgtgggcctctggccgcggcggcggagaaggcgatgagcacgctttcgatcctgataaagtgctgtcctccaaggaacagcgccggatcgacgagttcattctgtacggcattgccgctgcagacgaggcgttggccgattccggcctgaagctcgaaaccgatgatcaaaaagaacgcgcaggcgtgatgatcggatctggtatcggtggtcttgagaccatttatgaaacctcgatcacactgcatgagcacggaccccggaaggtcagcccgttcttcattccggcgtcgctgatcaaccttgcctctggacagatttcgatccggcatggcctcaagggccccaaccactctgttgttacggcctgtgcgactggcgcgcatgcgatcggcgattctgcgcgtctcatctcttacggcgatgctgatgtgatggtggccggtggggctgaagcggtgatcggcagacttggcattgcgggtttctgcgccgccaaggccatgtcgaccagcttcaacgatacgcccgagaaggcatcccgcccttatgacaaggatcgggatggtttcgtcatgggtgagggcgctgctgtgctcgtgcttgaagagtatgaacacgccaaggcacgcggcgcgaagatctacgctgaagtggcgggctatggcctgaccggcgacgcgcatcacatcaccgcgccggctgaaggcgccgagggcggctatcgggccatgaagatggcgctgaaaaattccggtatcgacccggccgagatcgactacgtcaatgctcacggcacctccacgccgaaaggcgatgagggtgaggctggcgccgtcgaacgcgcgttcggcgatcacgcgaagaacatctccatgtcgtcaaccaaatcggctgtcggacacctgctcggcgccgctggcgcgatcgaggccgcattctgcgcgctcgcgatccgtgaccaggtcatgccgccgacgttgaacctcgacaatccgagcttcgaaaccgtgcttgatctcattccgcacaaggccaagaaaggccgcgttcgcgcagccatgtcgaacagctttggctttggcggcaccaacgcatccctggttctgcgcaaggtcgattga

SEQ ID NO: 114781 - protein, 428 aa, Hyphomonas neptunium ATCC 15444
MSKRRVVITGIGIVSPLANGREATWERLIAGKSGAGKIDNFDASDLPCKIAFQVPWASGRGGGEGDEHAFDPDKVLSSKEQRRIDEFILYGIAAADEALADSGLKLETDDQKERAGVMIGSGIGGLETIYETSITLHEHGPRKVSPFFIPASLINLASGQISIRHGLKGPNHSVVTACATGAHAIGDSARLISYGDADVMVAGGAEAVIGRLGIAGFCAAKAMSTSFNDTPEKASRPYDKDRDGFVMGEGAAVLVLEEYEHAKARGAKIYAEVAGYGLTGDAHHITAPAEGAEGGYRAMKMALKNSGIDPAEIDYVNAHGTSTPKGDEGEAGAVERAFGDHAKNISMSSTKSAVGHLLGAAGAIEAAFCALAIRDQVMPPTLNLDNPSFETVLDLIPHKAKKGRVRAAMSNSFGFGGTNASLVLRKVD

SEQ ID NO: 114782 - DNA, 1263 bp, Rhizobium leguminosarum bv. viciae 3841
  CDS (1)..(1263): transl_table=11
atgagacgtgtcgtcatcaccggtaccggcatggtatcacccttgggatgcggaaccgaggtgacgtggtcccggctgcttgccggtcagaacggcgcccgcctcgtcaccgaattcgaggtcgacgaccttcccgccaagatcgcctgccgtattcctatcggtgacggcaccgacggcaccttcaatgtcgatcagtggatggagccgaaggagcagcgcaaggtcgatcccttcatcatctacggcatggccgccgccgacatggcgcttgccgatgccggctggcatcctgaaaccgatgaggaccagatcgccaccggcgtgctgatcggctccggcatcggcggcatcgaaggcatcgtcgaggcgggttacaccctgcgcgacaaaggcccgcgccgcatctcccccttcttcattcccggccgcctgatcaacctcgtctccggccaggtctcgatccgccacaagctgcgcggccccaaccattcggtcgtcaccgcctgctcgacgggtgcgcatgcgatcggcgatgccgcgcggctgatcgcgcttggtgatgccgacgtcatggtcgccggcggcacggaatcgcctgtcagccgcatttcgcttgcaggttttgccgcctgcaaggcgctgtcgacccagcacaacgacgacccgcagaaggcttcgcgcccctatgaccgcgaccgcgacggcttcgtcatgggcgaaggcgccggcatcgtcgtgctcgaggaactggaacacgccaaggcgcgcggcgccaggatctacgccgaaatcgtcggctacggcctgtcgggcgacgcctatcacatcaccgcgccctccgaagacggcgagggcgccggccgctgcatggcgatggcgctgaagcgcgccgggctgacgccggccgatatcgactacatcaatgcccacggtacttcgaccatggccgacacgatcgaactcggcgctgtcgagcggctggtcggcaatgcggcgtcgaagatctccatgtcctcgaccaagtcggcgacaggacaccttcttggtgctgccggcgcgatcgaggcgatcttcaccacgctcgccattcgcgacaatatcgcgccgccgacgctcaatctcgacaatcccgaacgggagacggcgatcgatcttgttccgcacacggcgcgtgagcgagacatcaatgtggcgctgtccaactcgttcggattcggcggcacgaacgcgtcgctcgtactgcgccgttacgcgcaataa

SEQ ID NO: 114783 - protein, 420 aa, Rhizobium leguminosarum bv. viciae 3841
MRRVVITGTGMVSPLGCGTEVTWSRLLAGQNGARLVTEFEVDDLPAKIACRIPIGDGTDGTFNVDQWMEPKEQRKVDPFIIYGMAAADMALADAGWHPETDEDQIATGVLIGSGIGGIEGIVEAGYTLRDKGPRRISPFFIPGRLINLVSGQVSIRHKLRGPNHSVVTACSTGAHAIGDAARLIALGDADVMVAGGTESPVSRISLAGFAACKALSTQHNDDPQKASRPYDRDRDGFVMGEGAGIVVLEELEHAKARGARIYAEIVGYGLSGDAYHITAPSEDGEGAGRCMAMALKRAGLTPADIDYINAHGTSTMADTIELGAVERLVGNAASKISMSSTKSATGHLLGAAGAIEAIFTTLAIRDNIAPPTLNLDNPERETAIDLVPHTARERDINVALSNSFGFGGTNASLVLRRYAQ

SEQ ID NO: 114784 - DNA, 1227 bp, Pediococcus pentosaceus ATCC 25745
  CDS (1)..(1227): transl_table=11
atgggtagacgagtagtagtaacaggcatgggagctttgactcctcttggaaatgatcgagaatccttcattcaaggactaaatagttcaaaagttggaatcgataaaattacacattttgatgccgaactaacaggtatcacggttgccggtgaggttaaggactttgatccaactgttagaattgaaagaaaaattgcgaaacggatggatgcattttctcaatatgctctgtattctgccgttgaagcaatggaacaagctgattttaaagaaggcgagttagatccttaccaagtcggtgtaatttatggttcaggaattggtggattaactaccatccaagaacaagtcattaaaatggatcataaagggccaagacgggtttcaccattatttgtaactaactcaattactaacatggcagctgggaacatttcaatgtatttcaatgcaaaaaataccagtcaagcaatcgttactgcttgtgctagcgcaaataatgcaattggaaatgcattccaccatatcaaaaatggttacgcagatgttatgattacaggtggttcagaatcatcaattaatgaaattggaatcgctggtttcgcttcattaactgcattaactgcatcagaagatcgtttacgtgcctcaattccatttgataaggatcgcaatggttttgtaatgggtgaaggagcagctactttaatccttgaagactacgaccatgctaaagcacgtggtgctaatattttagctgaaatcgttggttacggtatgacaagtgatgctttccatatgacccaaccagatcctgaaggtcgcggtgccattcgtgcaatgcaaatggcaatggacgaaggtggcattaaagccaatgatattgattatatcaatgctcatggtaccagtacgcatgctaacgatagtgcagaatcaaaagctatcgaaagcatctttactgaaaacgaccattataaggtaagtagtactaagtcaatgactggtcatttgcttggtgcggctggagcaattgaagctgttgcaactattgcagcacttcaaaatggtattatgccggttaacgtaggtttagaaactaaagaccctgaagttaacattccattagttacagaagataaccgtaaggcttctgttaactatgccttgagtaattcatttggttttggtggacataacgctgtattagcattcaagaggtga

SEQ ID NO: 114785 - protein, 408 aa, Pediococcus pentosaceus ATCC 25745
MGRRVVVTGMGALTPLGNDRESFIQGLNSSKVGIDKITHFDAELTGITVAGEVKDFDPTVRIERKIAKRMDAFSQYALYSAVEAMEQADFKEGELDPYQVGVIYGSGIGGLTTIQEQVIKMDHKGPRRVSPLFVTNSITNMAAGNISMYFNAKNTSQAIVTACASANNAIGNAFHHIKNGYADVMITGGSESSINEIGIAGFASLTALTASEDRLRASIPFDKDRNGFVMGEGAATLILEDYDHAKARGANILAEIVGYGMTSDAFHMTQPDPEGRGAIRAMQMAMDEGGIKANDIDYINAHGTSTHANDSAESKAIESIFTENDHYKVSSTKSMTGHLLGAAGAIEAVATIAALQNGIMPVNVGLETKDPEVNIPLVTEDNRKASVNYALSNSFGFGGHNAVLAFKR

SEQ ID NO: 114786 - DNA, 1233 bp, Oenococcus oeni PSU-1
  CDS (1)..(1233): transl_table=11
atgacacgagtagtaatcactggtatgggtgccgtaacgccgttgggaagttcggttaatgaatttgtttccggcttgcgaaaacaacaggttggttttcgaccgatctcgacttttgattcaagcgcaaccggcgtgactttagctggtgaagcagcagactttgatcctttggttcgtttaagcaaaaaagatttgcggagaatggatcgcttttcgcaatttgccgtttattcggctttggaagcttatcaacaagctgggttggaagatcaaacacccgatcccgaacgttttggagtaatttatggttctggaatcggcggtttaacaactattcaagaacaggttattagaatgcacgatcttggtgctgatcgcgtttcgccaatgtttgttccaactgcaatcgcgaatatggcggccggaaatttggcgatccgttttcatgcacaaaatatctgcatgacgatcgtaacagcatgttcttccggcgcaaacgcgatcggcgaagcttttcgagcaatcgagtccggccgagccgatataatgctaaccggtggttctgaggcttcgattaatgaaattggaatcggtggtttcgctgctctttcgactctgtccaaagcaactgatccaacaaaagcttctctaccctttgataaaaaccgtaacggctttgtgatgggagaaggaggcggaacacttattttagagtcgctcgaacacgcccaaaaacgtggcgctgaaattcttggcgaattagttggctatggtgccagcgaagatgcttaccatattacaagtcccgacccggctggaactcaagcagctagagctatgcgattggcaattgaagaggctggcttaaaagcagaacaaattggttacataaatgctcatggcacagctactcatggcaatgatttcgctgaagctgccgcaattaatcaagttttctctaaagatcagcaggttttggtcagcagctctaaatcaatgaccggtcatttgcttggtgcagctggtgcgatcgaggcagttgcgactgttagcgcattgcgtgatgggcagttgccagtcaacgtcgggattactgaacaggatccggaatgtcaagttaatctagttactgaagagaatgctcaaacaaaagttgactatgctttgagtaattcctttgggtttgggggccataacgctgttttggcctttaaaaaatggagtgattaa

SEQ ID NO: 114787 - protein, 410 aa, Oenococcus oeni PSU-1
MTRVVITGMGAVTPLGSSVNEFVSGLRKQQVGFRPISTFDSSATGVTLAGEAADFDPLVRLSKKDLRRMDRFSQFAVYSALEAYQQAGLEDQTPDPERFGVIYGSGIGGLTTIQEQVIRMHDLGADRVSPMFVPTAIANMAAGNLAIRFHAQNICMTIVTACSSGANAIGEAFRAIESGRADIMLTGGSEASINEIGIGGFAALSTLSKATDPTKASLPFDKNRNGFVMGEGGGTLILESLEHAQKRGAEILGELVGYGASEDAYHITSPDPAGTQAARAMRLAIEEAGLKAEQIGYINAHGTATHGNDFAEAAAINQVFSKDQQVLVSSSKSMTGHLLGAAGAIEAVATVSALRDGQLPVNVGITEQDPECQVNLVTEENAQTKVDYALSNSFGFGGHNAVLAFKKWSD

SEQ ID NO: 114788 - DNA, 1263 bp, Leuconostoc mesenteroides subsp. mesenteroides ATCC 8293
  CDS (1)..(1263): transl_table=11
atgacacgcgtagtaattacaggacttggcgcagtaacgccattaggaaacgatacacagtctttcttggacggtattttcaatgaaaaaattggtattaaaccaattacaaaatttgatgcatcagagacgggaatcaccgtggcaggacaggttgatggttttgatcccgcagctcgtgttggtaagcgtgatgcacgtaagatggatttgttttcacagtatgcggttgatgctgcagatcaggctttgactaatgctggattaaaggcagaagaaggtgctgaagcaccaaccactgttgctgatcctactcgattcggtgtaattttaggtaatggtattggtgggttgactactatacaagatcaagtaatcaagatgcatgataaggggccacaacgtgttagtccattgtttgtgcctgaatcaattcccaacatggtatcaggaaatgtttcgttacgttttggtgcaaagggtattaattcaacaattgttacggcttgtgcttcagcaacaaatgcgattggggaagcgttctggcgtattcaatctggtaaagccgatgtcatgttaactggtggttcagaagcaacggttaacgaaattggtattgctggtttcgcagccttgactgcgttatcaaaggaagaagatccaacacaagcttcaaagccttttgataagaatcgtcatggatttgttttgggtgaaggttcaggaattttggttattgaaagtctagaacatgctcaagcacgtggtgctcatattcttgcggaattagttggttatggtgcatcatctgatgcatatcacatgacgtcaccatccccagatggtgaaggtgctgcacgcgcaattcgtgatgcattaaatgacgctaatttggaagccaatcaaatttcatatatcaatgctcacggaacagcaacaggagcaaatgattcgggtgaagcacatgctattgccactgtgtttggagaaaatacagtacctgtttcttcaacaaagggaatgacaggtcatttgcttggtgctgctggtgccatagaagctttgatttctgtaggttctttgacacgtggtgaattaccagtaaacgtcggtcttgatgaacaggacgaggacactaaggtagttaatttagttgatcaagaaaacaagcatcaagcacctgagtatgtaatgagtgctaattatggttttggtggtcacaacgctgtcatcgtatttaagaaatggcatgaaggagtgtaa

SEQ ID NO: 114789 - protein, 420 aa, Leuconostoc mesenteroides subsp. mesenteroides ATCC 8293
MTRVVITGLGAVTPLGNDTQSFLDGIFNEKIGIKPITKFDASETGITVAGQVDGFDPAARVGKRDARKMDLFSQYAVDAADQALTNAGLKAEEGAEAPTTVADPTRFGVILGNGIGGLTTIQDQVIKMHDKGPQRVSPLFVPESIPNMVSGNVSLRFGAKGINSTIVTACASATNAIGEAFWRIQSGKADVMLTGGSEATVNEIGIAGFAALTALSKEEDPTQASKPFDKNRHGFVLGEGSGILVIESLEHAQARGAHILAELVGYGASSDAYHMTSPSPDGEGAARAIRDALNDANLEANQISYINAHGTATGANDSGEAHAIATVFGENTVPVSSTKGMTGHLLGAAGAIEALISVGSLTRGELPVNVGLDEQDEDTKVVNLVDQENKHQAPEYVMSANYGFGGHNAVIVFKKWHEGV

SEQ ID NO: 114790 - DNA, 1242 bp, Solibacter usitatus Ellin6076
  CDS (1)..(1242): transl_table=11
ttgtcacgaagagtggtagtgaccggcgtcggacttctgacgccgttggggattggaacacagacgacctgggacgccctgcttgcgtcgaaatcgggcatcgccggtatcacccagtttgatgcgaccgccttttcctgcaggattgcaggggaagtcaaaggcttcgatccctccaattacatcgagaaaaaagaaattaagaagatggggcgcttcatccagttcgccattgcggcggcggattttgccctcaaggattccggactcgtggtcacgccggagatcgccgaggaagtcggcgtctatatcggcagtggaatcggcggcttcgaagtgatcgagcgcgagcaccagacgctgctggaacacgggccgcgccgcatctcacccttctttattccggccacaattattaacctggcgtccggctatgtttcgataaaaagcggtgcgaagggtccgaattcggctaccgcgacggcctgcaccaccagcgcacattcgatcggcgattcgttccggatgattcagcgcggtgacgctgtcgccatgatttgcggcggcaccgaggccgccgttacgccgatgggaatcggggggttcgctgccatgcgagctctttccacgcgcaatgacgatccggaacgggcttcgcgtccctgggataaggaccgcgacggtttcgtggtgggcgaaggcgccggaatcatcgtattggaagcgctggaacatgccactgcccgcggcgcgaagatcctcgccgagattgtggggtatggcatgagcgccgacgcgttccacgtgacggctcccccggacgacggcgacggggcattccgggtgatgcggaacgccataaaggacgccggcttgagtcctgaacagatcgattacatcaacgcgcacggcacctctaccgatgtgggcgataaggcagagacgatggcgatcaagcgcgcttttggcgagcatgcttacaaggtcgcagtcagctccaccaagtccatgaccggacacctgctgggcggcgccggcggtctggaggccggcatcacagtgatggcgattcacgaccaggtggcgccgccgactatcaatcatgagtgtcccgacccggcatgcgatctggattacgtgccgaatcacgcgcgcaaaatgccgatcgaatatgccttgtcgaacagtttcgggttcggcggcactaacggctgccttattttcaagcgatactctgagtag

SEQ ID NO: 114791 - protein, 413 aa, Solibacter usitatus Ellin6076
MSRRVVVTGVGLLTPLGIGTQTTWDALLASKSGIAGITQFDATAFSCRIAGEVKGFDPSNYIEKKEIKKMGRFIQFAIAAADFALKDSGLVVTPEIAEEVGVYIGSGIGGFEVIEREHQTLLEHGPRRISPFFIPATIINLASGYVSIKSGAKGPNSATATACTTSAHSIGDSFRMIQRGDAVAMICGGTEAAVTPMGIGGFAAMRALSTRNDDPERASRPWDKDRDGFVVGEGAGIIVLEALEHATARGAKILAEIVGYGMSADAFHVTAPPDDGDGAFRVMRNAIKDAGLSPEQIDYINAHGTSTDVGDKAETMAIKRAFGEHAYKVAVSSTKSMTGHLLGGAGGLEAGITVMAIHDQVAPPTINHECPDPACDLDYVPNHARKMPIEYALSNSFGFGGTNGCLIFKRYSE

SEQ ID NO: 114792 - DNA, 1245 bp, Magnetococcus sp. MC-1
  CDS (1)..(1245): transl_table=11
gtgaatcatagagtcgtcatcaccggtgtgggtttggtcacgcccttgggcgtgggtaatgatgtaacttggtcacgcttgatcgccggagagtctggcatcggcctgctcacctcttttgataccgaagagtacagctgtaaaatcggcggcgagattaaagattttaatcccgagcagtggatcgagaaaaaagaggtcaaaaaaatggaccgctttatccattatggattggcggcctcccaattggcatgggaagatagcggcttggaagcccccgatgaagaagccagctaccgctatggcgccattgtgggttcgggtattggcggtctgatcgcgatccaaaatcaagccattgcattaaaggaaaaggggccgcgccgcatctctcctttctttattcccatgtccttgatcaacttggtttccggtcaattggccatcaaatatggtttacgtggtcccaaccatgcggtggttacagcgtgtgccaccggcacccacgccattggcgatgcttaccgtattgtgcaacggggcgaggctgatgtcatggtggcagggggggccgaggcggccatttgtgagttgggcatcggtggttttgcagcggcacgggcgctctcgacccgcaacgacgatcccacccgcgcctcccgtccttgggacaaggggcgcgatggttttgtgcagtcggatggtgcgggcgtggtggtggtcgagagcatggaacacgccaaggcccgtggcgcgcgcatctatgccgaggtcgttggctacggcatgtctggcgatgcctaccatatcacggccccccatcccagtggcgatggcgcggcccgttgtatggctgcggctctaaaggatgcccagatggatcccagtggaatcggatatattaacgcccatggtacctccaccccccaaggggatgtgattgagaccaaggcggtgaaaaaaatctttggtgagagcggtgcaaaaaaggtgatggtctcttcgaccaaatctatgacgggccacctgttgggtgctgcgggggggatcgaggcgatctttaccgccaaggccctgcatgagggggttattcccccgaccatcaacttggatgatccggatcctgagtgcgatttggattttgtgccccacacggcccgccaagagcaggtagaggctgccctttccaactccttcggttttgggggaaccaacgcgacgttggtgttaaagagggtacggtaa

SEQ ID NO: 114793 - protein, 414 aa, Magnetococcus sp. MC-1
MNHRVVITGVGLVTPLGVGNDVTWSRLIAGESGIGLLTSFDTEEYSCKIGGEIKDFNPEQWIEKKEVKKMDRFIHYGLAASQLAWEDSGLEAPDEEASYRYGAIVGSGIGGLIAIQNQAIALKEKGPRRISPFFIPMSLINLVSGQLAIKYGLRGPNHAVVTACATGTHAIGDAYRIVQRGEADVMVAGGAEAAICELGIGGFAAARALSTRNDDPTRASRPWDKGRDGFVQSDGAGVVVVESMEHAKARGARIYAEVVGYGMSGDAYHITAPHPSGDGAARCMAAALKDAQMDPSGIGYINAHGTSTPQGDVIETKAVKKIFGESGAKKVMVSSTKSMTGHLLGAAGGIEAIFTAKALHEGVIPPTINLDDPDPECDLDFVPHTARQEQVEAALSNSFGFGGTNATLVLKRVR

SEQ ID NO: 114794 - DNA, 1251 bp, Mycobacterium smegmatis str. MC2 155
  CDS (1)..(1251): transl_table=11
gtgaccaggccttccactgccaacggcggttaccccaatgtggtggtgaccgccgtcacggcgacgacgtcgatcgcgccggacatcgagagcacgtggaagggcctgctggccggcgagagcggtatccgcgtcctcgaagacgagttcgtcaccaagtgggacctgccggtgcgtatcggcgggcacctggtcgacaacatcgacgatcacatgacccgtctggacatgcgccgcatgtcctacgtccagcgcatgtcgaagttcctcagcaagcagctgtgggagaacgcaggcgcgcctgaggtcgatccggaccgcttcgcggtcgtgatcggcaccgggctcggcggcggcgagaagatcgtcgagacgtacgacgcgatgaacgagggtggcccccgcaaggtgtcgccgctcgcggtgcagatgatcatgcccaacggcgcggcagccgtcgtcgggctcgaactcggcgcccgcgccggtgtcatcacgccggtgtcggcctgctcgtccggttcggaggccatcgcgcacgcgtggcgtcagatcgtcatgggcgacgccgatttcgcggtctgcggtggtgtcgaaggcggtatcgaggcgttgcccatcgcggcgttctcgatgatgcgcgcgatgagcacccgcaacgatgatccgcagggcgcgtcgcgtccgttcgacaaggaccgcgacggcttcgtgttcggcgaggcaggcgcgatgatgatcatcgagaccgaggagcacgccaaggcgcgcggcgccaagccgctggcgcgtctgatgggtgcgggcatcacgtccgacgcgttccacatggtggccccggccgccgacggtctgcgtgccggtcaggcgatgaagcgtgcgatggagaccgcgggcctcgatcccaaggacatcgaccacgtcaacgcccacgccaccgccaccccgatcggggacaccgccgaggccaacgccctccgggttgccggtgtggaacacgccgcggtgtacgcccccaagtccgcgctcggccactccatcggtgcggtcggtgcgctggaatcgatcctcacggtcctggctctccgcgacggcgtcatccccccgacgctgaactacgagaccccggatcccgagatcgatctcgatatcgttgcaggtgagcctcggtacggcgaatacaagtacgccatcaacaactcgttcgggttcggcggccacaatgtggctctggcattcgggcgttactga

SEQ ID NO: 114795 - protein, 416 aa, Mycobacterium smegmatis str. MC2 155
MTRPSTANGGYPNVVVTAVTATTSIAPDIESTWKGLLAGESGIRVLEDEFVTKWDLPVRIGGHLVDNIDDHMTRLDMRRMSYVQRMSKFLSKQLWENAGAPEVDPDRFAVVIGTGLGGGEKIVETYDAMNEGGPRKVSPLAVQMIMPNGAAAVVGLELGARAGVITPVSACSSGSEAIAHAWRQIVMGDADFAVCGGVEGGIEALPIAAFSMMRAMSTRNDDPQGASRPFDKDRDGFVFGEAGAMMIIETEEHAKARGAKPLARLMGAGITSDAFHMVAPAADGLRAGQAMKRAMETAGLDPKDIDHVNAHATATPIGDTAEANALRVAGVEHAAVYAPKSALGHSIGAVGALESILTVLALRDGVIPPTLNYETPDPEIDLDIVAGEPRYGEYKYAINNSFGFGGHNVALAFGRY

SEQ ID NO: 114796 - DNA, 1251 bp, Nocardioides sp. JS614
  CDS (1)..(1251): transl_table=11
atgtcgaagcgagtcgtcgtcaccggcctcgggaccacctcccccgtgggcggtgacgtgcccagcacctgggacgcgctggtcaacggacgctcgggcgtccggttcctgaccgacgactgggccgagcagatgccggtcaagatcgccggccggatcgccgtcgagcccaccgagatcctcgaacgggtcaaggcgcgtcggctggaccggtcctcgcagttcgcgatggtggccgccatggaggcctggaaggacgccggtctcgagggctcggacgtcgaccgggaccggctcggcgtcgccatggcctccggcatcggcggcgtcacgacgctcctcgacaactacgacgcgctgcgggagaaggggccgcgccgggtctcgccgctcgcggtcccgatgctgatgcccaacgcgccggcagcgcagctgagcctgtacgtcggagcgcgcgcggcggtcaacacgccggtctcggcgtgcgcctccggcaacgaggcgatctcgttggcggtcgaccagatccggctcggccgggccgacgtcgtgctcgcgggcggcaccgaggcggcgatccacccgctgccgatggcggccttcgcgaacatgatggcgctctcgaagaccgccagcggccccgacggcggcgacccgaccgccgtgtcgcggccgtgggacgtcgcccgcgacggcttcgtgctcggggagggcgccggcgtcctggtcctcgagtccgaggagcacgcccgcgcccggggcgcccggatctacgccacggtgctcggggccggcatcaccgcggactcccacgacatcgcccagcccgacccggagggccgcggcggctcccgcgcgatcctgcgggcgctcgcagaggccgacatcagcccgggcgacatcgcgcacgtcaacgcgcacgccacgtcgaccccgcagggcgacatcgccgagggcctgatgctgcacgcgacgctcggcgcgcacgcgaccgacgtcgtcgtgaccagcaccaagtcgatgaccggccacctgctcggcggcgccggcgcactggaggcgatcgcgaccgtgctggcgctccaccaccgggtcgccccgccgacgatcaacctggacaaccaggacccgcaggtcgagctggacatcgccaccaaggcccgcgacctgccgctcggcgacatcgccgcgctcaacaactccttcgggttcggcggcgccaacgtcgcggtcgcgttcgggtccgtctga

SEQ ID NO: 114797 - protein, 416 aa, Nocardioides sp. JS614
MSKRVVVTGLGTTSPVGGDVPSTWDALVNGRSGVRFLTDDWAEQMPVKIAGRIAVEPTEILERVKARRLDRSSQFAMVAAMEAWKDAGLEGSDVDRDRLGVAMASGIGGVTTLLDNYDALREKGPRRVSPLAVPMLMPNAPAAQLSLYVGARAAVNTPVSACASGNEAISLAVDQIRLGRADVVLAGGTEAAIHPLPMAAFANMMALSKTASGPDGGDPTAVSRPWDVARDGFVLGEGAGVLVLESEEHARARGARIYATVLGAGITADSHDIAQPDPEGRGGSRAILRALAEADISPGDIAHVNAHATSTPQGDIAEGLMLHATLGAHATDVVVTSTKSMTGHLLGGAGALEAIATVLALHHRVAPPTINLDNQDPQVELDIATKARDLPLGDIAALNNSFGFGGANVAVAFGSV

SEQ ID NO: 114798 - DNA, 1251 bp, Mycobacterium sp. KMS
  CDS (1)..(1251): transl_table=11
gtgaccaggccttccactgctaacggcggtttcccgagcgtcgtggtgactgccgtcgaggccaccacgtcgctcgccgcggacatcgagagcacgtggaagggcctgctggctggcgagagcggcatccgcgttctcgaagacgacttcgtcaccaagtgggacctgcccgtgcggatcggcggtcatctcgtcgacaacgtcgacgaccacatgacccgcatcgacatgcgtcgcatgtcgtacgtgcagcgcatgtccaagctggtctcgggtcgcctgtgggagaccgcgggcaggcccgaggtcgatccggaccggttcgccgtgatcatcggcaccggtctgggcggcggcgagaagatcgtcgagacctacgacgcgatgaacgagggcggcccccgcaaggtgtcgccgctcgcggtccagatgatcatgccgaacggtgcggcggccgtcgccggtctggaactgggcgcccgcgccggggtcatcaccccggtgtcggcctgctcgtccggctcggaggcgatcgcgcacggctggcgtcagatcgtcatgggtgacgcggacttcgccgtcgtcggcggcgtggagggcggcatcgaggcgctgcccatcgcggcgttctcgatgatgcgcgccatgtcgacccgcaacgacgaccccgccggggcgtcgcggccgttcgacaagaaccgcgacgggttcgtgttcggcgaagccggggcgatgatgatcatcgagaccgaggagcatgccctggcccgcggcgccaagccgttggcccgcctcatgggcgcgggcatcaccagcgacgcgttccacatggtggccccggccgcggacggtcttcgggccggccacgcgatgaagcgtgcgatggagactgcggggatcgatcccaaggacgtcaaccacgtcaacgcacacgccaccgcgacgccgatcggtgacacggccgaggccaacgccatccgggtcgccggtgtggagcacgccgcggtgtacgcgccgaagtcggcgctcggccactccatcggggcggtcggtgcgctcgagtcgatcctcacggtgctcgcactgcgtgacggcgtcatcccgccgacactgaactacgagacaccggaccccgagatcgatctcgatgtcgttgcgggcgagccacggtatggcgactaccagtacgccatcaacaactcgttcggattcggcggccacaatgtggccttggcgttcggtcgttactga

SEQ ID NO: 114799 - protein, 416 aa, Mycobacterium sp. KMS
MTRPSTANGGFPSVVVTAVEATTSLAADIESTWKGLLAGESGIRVLEDDFVTKWDLPVRIGGHLVDNVDDHMTRIDMRRMSYVQRMSKLVSGRLWETAGRPEVDPDRFAVIIGTGLGGGEKIVETYDAMNEGGPRKVSPLAVQMIMPNGAAAVAGLELGARAGVITPVSACSSGSEAIAHGWRQIVMGDADFAVVGGVEGGIEALPIAAFSMMRAMSTRNDDPAGASRPFDKNRDGFVFGEAGAMMIIETEEHALARGAKPLARLMGAGITSDAFHMVAPAADGLRAGHAMKRAMETAGIDPKDVNHVNAHATATPIGDTAEANAIRVAGVEHAAVYAPKSALGHSIGAVGALESILTVLALRDGVIPPTLNYETPDPEIDLDVVAGEPRYGDYQYAINNSFGFGGHNVALAFGRY

SEQ ID NO: 114800 - DNA, 1248 bp, Neisseria meningitidis FAM18
  CDS (1)..(1248): transl_table=11
atgagtcagagaagagtagtcattacaggcttaggtcaggtttcccctgtcggcaacactgtcgcagaggcttgggacaccctgctcgccggcaaaagcggcatcggcgcgattacccgctttgacgcatccgacatcaacagccgtgtcgccggcgaagtgcgcggtttcgacatcggacaatacatcagcgcgaaagaagcgcgccggatggacgtattcatccactacggcattgccgccgcattgcaggcaatcgccgattcgggcttggacgatgtggaaaacctcgacaaagaccgcatcggcgtgaacatcggttccggcatcggcggactgcccagcatcgaggtcaccggcaaagccgtaatcgaaggcggcgcgcgcaaaatcaaccctttctttatccccggttcgctgatcaacctgatttccggacacgttaccatcctcaaaggctaccgcggcccgagctacgggatggtttccgcctgtaccaccggcgcgcacgccatcggcaattccgcccgactgatcaaatacggcgacgcggacataatggttgccggcggcgcggaaggcgcaatcagcactttgggcgtgggcggttttgccgcgatgaaagccctctccacccgcaacgacgaccccgccaccgcttcccgtccgtgggacaaaggccgcgacggcttcgttatcggcgaaggcgcgggcatattggtgttggaagaattggaacacgccaaaaaacgcggcgcgaaaatctacgccgaaatcgtcggcttcggcatgagttccgatgcttaccatatcaccgcgccgaacgaagaaggccccgcccttgccgttacccgcgcgctgaaagatgccggcatcaatcccgaagacgtggattacgtcaacgcgcacggcacgtccacccccttgggcgatgccaacgaaaccaaagccctcaaacgcgcgttcggcgaacacgcctacaaaaccgtcgtcagctcgaccaaatccatgaccggccacctgctcggcgcggcgggcggcgtggaggccgtgtacagcattttggcgatacacgacggcaaaatcccgccgaccatcaacatttttgaacaagacgttgaagccggctgcgatttggactactgcgccaacgaagcgcgcgacgcggaaatcgacgttgccatttccaactccttcggcttcggcggcaccaacggcacgctggtcttcaaacgcttcaaaggctga

SEQ ID NO: 114801 - protein, 415 aa, Neisseria meningitidis FAM18
MSQRRVVITGLGQVSPVGNTVAEAWDTLLAGKSGIGAITRFDASDINSRVAGEVRGFDIGQYISAKEARRMDVFIHYGIAAALQAIADSGLDDVENLDKDRIGVNIGSGIGGLPSIEVTGKAVIEGGARKINPFFIPGSLINLISGHVTILKGYRGPSYGMVSACTTGAHAIGNSARLIKYGDADIMVAGGAEGAISTLGVGGFAAMKALSTRNDDPATASRPWDKGRDGFVIGEGAGILVLEELEHAKKRGAKIYAEIVGFGMSSDAYHITAPNEEGPALAVTRALKDAGINPEDVDYVNAHGTSTPLGDANETKALKRAFGEHAYKTVVSSTKSMTGHLLGAAGGVEAVYSILAIHDGKIPPTINIFEQDVEAGCDLDYCANEARDAEIDVAISNSFGFGGTNGTLVFKRFKG

SEQ ID NO: 114802 - DNA, 1245 bp, Acidovorax sp. JS42
  CDS (1)..(1245): transl_table=11
atgagccgtcgtcgcgttgtcgtgaccggcctgggttgcatcacccccgttggcaatacggtggccgatgcctgggccaacatcctcgccgggaaatccggcatagacctcatcaccaagttcgatacgacgaactttgcctgcaagatagctggcgaggtcaagggttttgacctggactccttcatcagtgccaaagatgcgcgcacgatggatacgttcatccattacggtatcgcggcggccgaagaggcagtgcgcgacgctggtctgcccaagggcgaggtgctggacgatgaattggccacccgcatcggctgcatcattggttccggcatcggcggactgccgctgatcgagaacacgcatgcggagttgaccaaccgggggccgcgccgcatcacgccgtttttcgtccctgcatccatcatcaacatggtggctggccaggtgtcgatgcgctttggcttcaagggaccgaacctgtcggtggtcacagcctgcaccacgggcctgcactgcatcggcgaagcggcccgcaagatcgaatacggggacgccgatgtgatcgtcgctggcggtacggagtccaccgtctcgcccctgggtgtgggcggcttcgcagccatgcgtgccctgtctacgcgcaacgatgatccgcagacggcgtcacgcccctgggataaggaccgcgatggcttcgttctcggcgagggcgcgggggttctggtgctggaagagtatgaacacgctaaggcgcgtggcgcgcgcatctacgccgaggtgttgggctatggcatgagcgctgacgccgggcacatgacggcacccaatatggatggcccgcggcgtgccatggttgccgcactgcgcaatgccggcgtgaatgccgacgaggtggattacctcaatgcgcacggtacgtccacgccgctgggggatctcaacgaaaccaatgccatcaaggcggcactgggtgaccatgccaagaagatggtggtgagttcgaccaaatcgatgaccgggcatttgcttggtggagcgggaggcattgagagtgtgttcaccgtactcgctttgcaccagcagaaggtgcctcctaccacgaatatcttcgagcaggatccggagtgcgatctggactactgtgccaacacggcgcgggacatgaagatcgacatcgcagtcaagaacaattttggctttggtggcaccaacggaacgctggtgtttcggcgcgtctga

SEQ ID NO: 114803 - protein, 414 aa, Acidovorax sp. JS42
MSRRRVVVTGLGCITPVGNTVADAWANILAGKSGIDLITKFDTTNFACKIAGEVKGFDLDSFISAKDARTMDTFIHYGIAAAEEAVRDAGLPKGEVLDDELATRIGCIIGSGIGGLPLIENTHAELTNRGPRRITPFFVPASIINMVAGQVSMRFGFKGPNLSVVTACTTGLHCIGEAARKIEYGDADVIVAGGTESTVSPLGVGGFAAMRALSTRNDDPQTASRPWDKDRDGFVLGEGAGVLVLEEYEHAKARGARIYAEVLGYGMSADAGHMTAPNMDGPRRAMVAALRNAGVNADEVDYLNAHGTSTPLGDLNETNAIKAALGDHAKKMVVSSTKSMTGHLLGGAGGIESVFTVLALHQQKVPPTTNIFEQDPECDLDYCANTARDMKIDIAVKNNFGFGGTNGTLVFRRV

SEQ ID NO: 114804 - DNA, 1281 bp, Rickettsia akari str. Hartford
  CDS (1)..(1281): transl_table=11
atgtcgaatcaaagagtaaataaaagagtagttattaccggacttggacttgttactcctgttgggcttaatgttagctcatcttggaaaaatattgtaaatggggtaagcggtataaaaactattacggaatttgatgcttctaaacttgcgtgtaaaattgctggacttatagattactctgagaaagatggatttaaacttgaaaatttcacgcaagcagataacgttaatagactaagtaaaatggataaatttatccattacggagtagcagccgcaaccgaagcagttgaagatagcggctggttacccgaaaatgaagaatctcgtgatagaaccggcttgatattaggttcaggaatcggcgggcttaaaatgatcgaagatacctctatcaagctttatcaagaaaataatggcaaagttagtcccttctttattcctgcatcactaattaatcttttatccggtcttgtgtctataaaatacggttttagcggtccaaatcaagcagcagtaacggcttgctctacaggagcacatgctataggcgatgctatgcgtatgataaaacacggctatgcagacgttatggtcgcaggcggtgcagaagctccagttacacctgttggagttgcaggtttcgttgctgctagagcattatgtactaaatataacgataatcctgaaaaagcctcaagaccttgggataaagaccgcagcggttttgttatgggtgaaggagcaggcgttgtagtcttggaagaatatgagcatgccttaaatcgaggggctaaaatttacggtgaagttataggatacggctctacaggtgatgcgtaccatatgacagcaccacatcctgaaggtagaggggcttatagagcgatgagaaatgcaatgctagatgcagctatcacccccaatatgattgattacattaatgcacatggcacttctactaatctcggtgatgagatagaattagcagccgtacaaaaattatttttagaagcgaatcctcaaattttaatgtcttctactaaatcatcaataggacatttactcggtgcagcaggaagcgttgagtttatcttttcagctcttgcaattcgagatcagattgcaccgccaactttaaatttagataaccccatggatgaggttaagatagatttagtaaaattaaaagctagagaaactaaaatagactacgtgctttctaattcatttggattcggcggtactaatgctagtttagtaattaagagagtttga

SEQ ID NO: 114805 - protein, 426 aa, Rickettsia akari str. Hartford
MSNQRVNKRVVITGLGLVTPVGLNVSSSWKNIVNGVSGIKTITEFDASKLACKIAGLIDYSEKDGFKLENFTQADNVNRLSKMDKFIHYGVAAATEAVEDSGWLPENEESRDRTGLILGSGIGGLKMIEDTSIKLYQENNGKVSPFFIPASLINLLSGLVSIKYGFSGPNQAAVTACSTGAHAIGDAMRMIKHGYADVMVAGGAEAPVTPVGVAGFVAARALCTKYNDNPEKASRPWDKDRSGFVMGEGAGVVVLEEYEHALNRGAKIYGEVIGYGSTGDAYHMTAPHPEGRGAYRAMRNAMLDAAITPNMIDYINAHGTSTNLGDEIELAAVQKLFLEANPQILMSSTKSSIGHLLGAAGSVEFIFSALAIRDQIAPPTLNLDNPMDEVKIDLVKLKARETKIDYVLSNSFGFGGTNASLVIKRV

SEQ ID NO: 114806 - DNA, 1251 bp, Crocosphaera watsonii WH 8501
  CDS (1)..(1251): transl_table=11
atgacaaattcacaattgaagcgagtagtggtaacggggttaggtgcaatcacccccattggcaacaccctaacagattattggcaaggtttaatgaatggaaaaagtggtatcgctgagattaccaattttgacccgtctaaacacgcttgtcgcattgctggggaagtgaaaggatttgacccccaggactacttagatcgcaaggaagcaaaacggatggaccgttttgctcaatttggtgtctccgccagtttacaggcattggctgactctaagttagttattaatgaccttaatgctgaacaaattggcgtaatcatcggtacaggagtggggggaatcaaagttctcgaagatcaacaagaagtttatctcaacaaaggcccgagtcgttgtagtccttttatgattcccatgatgataggcaatatggcatccggtttaaccgccattaatacaggagcgaagggcccgaacacttgtactgtgacagcttgtgctgccgggtctaatgccatcggggatgcctttcgtctggtacaacggggttatgcgaaagccatgatttgtggtggcactgaggcttctgttacccccttatccttggctggttttgcctcagctagagccttatcaacccgtaacgatgagcctcaaaaggccagtcgcccgtttgataaagatcgagatggctttgttatgggggaagggtcaggaattttaattcttgaagaattagaacacgctttagcacgaggggcaacaatttatggagagatggtgggttatgccatgacttgtgatgcctatcacatgacggcacctgtcccagatggtgccggtgctacccgtgccatggagttagccctcaaagatgggggtatttctcccgaacaagtaacttatatcaatgctcacggcaccagtaccgcagctaacgatgttaccgaaaccaaagccattaaaaaggctttgggagatcgtgcttatgccattgctgtcagttccactaaatccatgaccggtcatttattagggggatctggagggatcgaagctgtagctaccctaatggcgatcgctaacgatcgcattcccccaactcttaatttagataatcctgatccagactgcgatcttgattatgtaccttatgagagtcgtcctctagagattgatgtagctttatctaattcctttggctttggtggtcataacgtgactttagtctttagaaaatatcgttaa

SEQ ID NO: 114807 - protein, 416 aa, Crocosphaera watsonii WH 8501
MTNSQLKRVVVTGLGAITPIGNTLTDYWQGLMNGKSGIAEITNFDPSKHACRIAGEVKGFDPQDYLDRKEAKRMDRFAQFGVSASLQALADSKLVINDLNAEQIGVIIGTGVGGIKVLEDQQEVYLNKGPSRCSPFMIPMMIGNMASGLTAINTGAKGPNTCTVTACAAGSNAIGDAFRLVQRGYAKAMICGGTEASVTPLSLAGFASARALSTRNDEPQKASRPFDKDRDGFVMGEGSGILILEELEHALARGATIYGEMVGYAMTCDAYHMTAPVPDGAGATRAMELALKDGGISPEQVTYINAHGTSTAANDVTETKAIKKALGDRAYAIAVSSTKSMTGHLLGGSGGIEAVATLMAIANDRIPPTLNLDNPDPDCDLDYVPYESRPLEIDVALSNSFGFGGHNVTLVFRKYR

SEQ ID NO: 114808 - DNA, 1239 bp, Exiguobacterium sibiricum 255-15
  CDS (1)..(1239): transl_table=11
atgatgagaaaacgtgtagtagtaacaggtatgggcgcactgacgccaatcggtaatgatgtcgatacattctggaatgccttaaatgccggtgaaaacgggattcgtccgatggaacgtctcgatatcgatgagtatccgacgaaagtaacgggagaattacagaattttgatgtcacggaattcattgaagccaaggaagcccggaaaatggaccgtttcgttcattattcgctcgtcgcaagtatggaagccgttaaaaatgctgatttggatgttaaacccaatgctgaacgtatcggcgtctggatcggatccggtatcggcggcgtcgagacgattgaaaaacaggcgaaaatctattttgaacggggtcatcgtcgtgtcagcccattcttcatcccaatgatgattccaaacatggccagtggccaagtttcgatttatacaggcgcaaaaggaccgaataactgttccgtcactgcatgtgcttccggtacaaacgcgattggtgaagcgttacgcgttattgaacgcggtgacgcggacgtcatgatcgccggtggagcagaagcaccgattaccaatcttgcatttgctggtttttgtgccaataaagcgatgtcgacgaaccatgatccaaacacggcaagccgtccgtttgatgaaggccgtgacggattcgtcatgggagagggtgccggaatcctggtacttgaagagtatgaacatgcggtcgcccgtggtgccaaaatctatgcagaagtcagcggatacggattaacagccgatgcttaccatatcacagcaccagatccagacggcgacggcggagcgcgcgcaatggcgatggcgattaaagatgcaggtatcgaaccggctgccgttcaatacatcaatgcacacggaacgagtacaccgatgaatgatgtgttagagacgaaagcaatccatacggtcttcggcgagcacgctgaaaaattagccgtcaactcgacgaaatcaatgatcggtcatttactcggcggtgccggtggagtggaagccatcgcaacgattaaatcgctgcaggagcaaaccgttcacccgacgattcatttggagaatccaagtgaaggatgtaatctcgattacgtgcgtgagggaagccggtcatgggatcttgagtatgcactcagcaactcgcttggatttggtggtcataatgcttcactcgtcttcaaacgatatcacacataa

SEQ ID NO: 114809 - protein, 412 aa, Exiguobacterium sibiricum 255-15
MMRKRVVVTGMGALTPIGNDVDTFWNALNAGENGIRPMERLDIDEYPTKVTGELQNFDVTEFIEAKEARKMDRFVHYSLVASMEAVKNADLDVKPNAERIGVWIGSGIGGVETIEKQAKIYFERGHRRVSPFFIPMMIPNMASGQVSIYTGAKGPNNCSVTACASGTNAIGEALRVIERGDADVMIAGGAEAPITNLAFAGFCANKAMSTNHDPNTASRPFDEGRDGFVMGEGAGILVLEEYEHAVARGAKIYAEVSGYGLTADAYHITAPDPDGDGGARAMAMAIKDAGIEPAAVQYINAHGTSTPMNDVLETKAIHTVFGEHAEKLAVNSTKSMIGHLLGGAGGVEAIATIKSLQEQTVHPTIHLENPSEGCNLDYVREGSRSWDLEYALSNSLGFGGHNASLVFKRYHT

SEQ ID NO: 114810 - DNA, 1263 bp, Kineococcus radiotolerans SRS30216
  CDS (1)..(1263): transl_table=11
atgaccacgacctcgacgagttcgtcgcgccgtgtcgtcgtcaccgggatgggcgccacgacaccgctcggcggcgacgtccgcaccagctgggaggccgcgctcgccggccgttccggcgcccggccgatcaccgacccgtggatcgaggagttcgagctcccggtcaccttcgccgcgcaggccgcggtccgcgccgacaccatcctggaacgccgggagatcaagcggctggacccctcccagcagttcgcggtgatcgccgcgcgcgaggcctgggccgacgccggcacccccgaggtcgacccgctgcggctggggtcggtcgtggcgaccggcatcggcggcatctggacgctgctgacgtcctacgacacgctgaaggagaagggcgcccgccgcgtcctgcccctcaccgtcccgatgctcatggccaacggcccgacggccgcgatcagcatcgagttcaccgcccgcgccggggcgcacaccccggtcagcgcgtgcgcctccggcgcggaggccatcgcctacggcgccgacatgatccgcaccgggcgcgccgacatcgtgatctgcggcggcaccgaggccgcgatccacccgctgcccatcgcctccttcacctcgatgcacgccatgtcccggcgcaacgaggaccccgagcgggcgtcgcgccccttcgacaccgcccgcgacggcttcgtgctcggggagggggccgggatcctggtcctggagtccgaggagcacgcccgggcgcgcggggcgcgcgtccacgccgaggtcctgggcgtgggcctgtccgccgacgcctaccacgtggcggctccggagccggagggcgcggggaccagccgcgccatgctggacgcgctgcaccaggccgacctgaccccggccgacctgtgccacgtcaacgcccacgcgacctcgaccccggtcggggacgtggccgaggacaagggcctgcgactggccttcggagacgccaccgacgggatcgcggtgtcggcgaccaagtcgatgaccggtcacctgctgggagccgcgggggccgtggagagcatcttcacgatcctcgccctgcgcgaccgcctcgccccgccgacgatcaacgtcgacgacctcgacccggcgatcaccctggacgtcgtccgcaaggacccgcggccgctgcccgccgaggggcggctggtggggctgaacaacgcgttcggcttcggcggtcacaacgtcagcgcggtcttcgccaccccctga

SEQ ID NO: 114811 - protein, 420 aa, Kineococcus radiotolerans SRS30216
MTTTSTSSSRRVVVTGMGATTPLGGDVRTSWEAALAGRSGARPITDPWIEEFELPVTFAAQAAVRADTILERREIKRLDPSQQFAVIAAREAWADAGTPEVDPLRLGSVVATGIGGIWTLLTSYDTLKEKGARRVLPLTVPMLMANGPTAAISIEFTARAGAHTPVSACASGAEAIAYGADMIRTGRADIVICGGTEAAIHPLPIASFTSMHAMSRRNEDPERASRPFDTARDGFVLGEGAGILVLESEEHARARGARVHAEVLGVGLSADAYHVAAPEPEGAGTSRAMLDALHQADLTPADLCHVNAHATSTPVGDVAEDKGLRLAFGDATDGIAVSATKSMTGHLLGAAGAVESIFTILALRDRLAPPTINVDDLDPAITLDVVRKDPRPLPAEGRLVGLNNAFGFGGHNVSAVFATP

SEQ ID NO: 114812 - DNA, 1254 bp, Croceibacter atlanticus HTCC2559
  CDS (1)..(1254): transl_table=11
atggagttaaagcgagttgtagtaacaggtttaggggcattaaccccaattggtaacaatattaacgaatattggaacgggttggtagaagggaagagcggctgtgccggaatcacttcctttgatcctgctaactttaaaacgcaatttgcttgcgaaatcaaagatttcgatcctttaaagcattttgatagaaaagaagcccgtaagttagataagtttgcacagtacgcccttgtttcttcagacgaagctattgcagatgcaggtatagacctagatgcagtagataagtttcgtgtaggagtaatatggggagctggtattggaggaatacaaacatttcaagatgaggttgtaaattttgctcaaggcaatggtacaccacgttttaatccgttttttattcctaagatgattgcagatatagcgccaggaaacatttctattaaacatggatttatgggtcctaattataccacagtttctgcttgtgcatcatctgctaacgcaatgatagatgccttaaattatattcgactaggccattgtgatgttattatcacaggaggaagcgaagcagcagtgactgaggctggtatgggtggttttaatgctatgcatgcactatctaccagaaatgataacccacaatctgcttccagaccttttgatgctaaccgagatggttttgtattaggagaaggtgctggagctttggttctcgaagaacttgaacacgcaaaagcacgtggcgcaagaatttatgcagaagttataggtggcggtatgtctagtgatgcttatcacatgacagcacctcatccagatggcataggcgtaaaacgcgttatggaaaactgtttaagagatgcaggtatagatgcctctgaagttgatgctataaacacacacggtacatctactcctttaggagatgttgccgaattaaaagcaatcagtcaagtatttggacagcatgccgggaagattaatattaattcaacaaagtctatgactggtcaccttttaggtgctgctggtgcaattgaggctattgcgtctatcttatcgatggaacatagtgtcgtgccaccaacaattaaccacgaaacggttgacgagaatatagacccaaatttgaacttaacattaaacaaagcacaggaaagagaagtaaatgttgctatgagcaatacatttggtttcggaggacacaatgcttgtgtattgtttagaaaacttaatgagtaa

SEQ ID NO: 114813 - protein, 417 aa, Croceibacter atlanticus HTCC2559
MELKRVVVTGLGALTPIGNNINEYWNGLVEGKSGCAGITSFDPANFKTQFACEIKDFDPLKHFDRKEARKLDKFAQYALVSSDEAIADAGIDLDAVDKFRVGVIWGAGIGGIQTFQDEVVNFAQGNGTPRFNPFFIPKMIADIAPGNISIKHGFMGPNYTTVSACASSANAMIDALNYIRLGHCDVIITGGSEAAVTEAGMGGFNAMHALSTRNDNPQSASRPFDANRDGFVLGEGAGALVLEELEHAKARGARIYAEVIGGGMSSDAYHMTAPHPDGIGVKRVMENCLRDAGIDASEVDAINTHGTSTPLGDVAELKAISQVFGQHAGKININSTKSMTGHLLGAAGAIEAIASILSMEHSVVPPTINHETVDENIDPNLNLTLNKAQEREVNVAMSNTFGFGGHNACVLFRKLNE

SEQ ID NO: 114814 - DNA, 1230 bp, Sulfitobacter sp. EE-36
  CDS (1)..(1230): transl_table=11
atgcgccgcgtcgtcgtcacaggattgggaattgtctcgtccatcggaaacaatgcagaagaagttctggcatcgctgaaagacgggaccagcggcatcgtcgccagccccgaaatgacagagcacggctttcgcagccgcgttgcagggacgctcaagattgatgtggccgaccacatcgacaaacgcgcgctgcgtttcatgggcggcggtgcggcttatgcctatatcgccatgcagcaagccatcgcggatgcgggcctgagcgaagaccagatcagcaacccgcgcaccggccttgtggcgggctctggcgggccgtcgacatcggcgctgttcaccgcgcataacgtggtgcgcgacaccggcgcgaccaagcgtatcgggccgtttgccgtgccgaaatgcatgtcctccacggtcagcgcgaacctctcgaccgccttcaagatcaagggcatcaactactccatcacctcggcctgctctacctcgctgcattgcatcggcaacgcggcggaacagatcatgctgggcaagcaggacgtgatgttcgcgggcggcggcgaagagcttgactggacgctgtcctgcctgttcgacgccatgggcgcgatgagcagtaaatataacgacgcccccgaaaccgcgagccgcgcctttgacgccaaccgcgacgggttcgtcatctcgggcggcggcggcatgctggtgctcgaagagcttgagcacgccaaggcgcgcggtgccacgatctatgcagaagtcactggctatgcggcgacatccgatggtcatgacatggtggccccgtccggcgagggcggcgaacgcgccatgcgtctggcgctggaaaccctgcccgagggccgcaaggtcggctatatcaacgcgcacggtacctccacacccgtcggcgacgtgggcgagatcgaagcggtccgtcgcgtttttggccagggcagcacgccccccgtcagctcgaccaagtcgatgaccggccacgctcaaggcgccgccggcgcactcgaggcgatcttctgcctgctgatgctcaagaatgactttatcgccaaatccatcaacgtcgttgatctagacccgaaactggacccgtcagaaatcgcgctggagcgtgtggacaatgccggtctggattcggtgatgaccaactccttcgggttcggcggcaccaacggatcgatgatcctttccaaattccaagagtaa

SEQ ID NO: 114815 - protein, 409 aa, Sulfitobacter sp. EE-36
MRRVVVTGLGIVSSIGNNAEEVLASLKDGTSGIVASPEMTEHGFRSRVAGTLKIDVADHIDKRALRFMGGGAAYAYIAMQQAIADAGLSEDQISNPRTGLVAGSGGPSTSALFTAHNVVRDTGATKRIGPFAVPKCMSSTVSANLSTAFKIKGINYSITSACSTSLHCIGNAAEQIMLGKQDVMFAGGGEELDWTLSCLFDAMGAMSSKYNDAPETASRAFDANRDGFVISGGGGMLVLEELEHAKARGATIYAEVTGYAATSDGHDMVAPSGEGGERAMRLALETLPEGRKVGYINAHGTSTPVGDVGEIEAVRRVFGQGSTPPVSSTKSMTGHAQGAAGALEAIFCLLMLKNDFIAKSINVVDLDPKLDPSEIALERVDNAGLDSVMTNSFGFGGTNGSMILSKFQE

SEQ ID NO: 114816 - DNA, 1266 bp, Oceanicola batsensis HTCC2597
  CDS (1)..(1266): transl_table=11
atgcgtcgtgtcgttgtcaccgggcttgggctggtcacgccgctggccagcggggtcgaggaaagctggtcgcggatcctggacgggcagtcgggcgcgggccccatcacgcggttcgacgccggtcgggtcaccaccaaatacgcctgcgaggttcccctcggcgacggtagcgacggcacgttcaactcggacgactggatggagccgaaggagcgtcgcaaggtcgacgatttcatcctctacggcatcgccgcctcggagatggcggtgcgtgacgccggctggacgcccgaggacgaggagagccgcctgcggaccggggtgatgatcgggtcgggcatcggcgggctgcagtcgatcgaacagacgacgctcttgatggccgagaaggggccgcggcgtgtctcgccgttcttcatccccggcgcgctgatcaacctgatctcgggccaggtgcagatccgcttcggcttcaaggggccgaaccattcggttgtcaccgcctgttccaccggcgcccatgccatcggcgacgcggcgcggctgatccagtggggcgacgcggacgtgatggtcgccggcggcgccgaggcggcgatctgcgagatcggcatcgccgggttcaacgcctgcaaggcgctctcgaccaaatgggccgaggatcccacacgggcctcacgcccctacgacgccggtcgcgacgggttcgtcatgggcgagggcgcgggcatcgtggtgctcgaggaatacgaacatgccgtggcgcgcggcgcgaagatctatggcgagtacctgggctacggcctgtcgggcgacgcctatcacatcaccgcgccggacgagacgatggacggcggcttccgctcgatgaaggcggcgatcgaacgggccggcctggcccccgccgacatcgactatatcaacgcgcacggcacctcgaccatggccgacacgctggagctggccgcggtcgagcggctgatgggcgaggaggcggccgcgcgcgccaccatgtcctcgaccaagtccgccaccgggcacctgctgggcgcggccggcgcgatcgaggcgatcttctcgatcctcgccatccgcgaccaggtggcgccgccgacgatcaacctcgacaatccggcggtcgagccccggctctcgctcgccccgaaccgcaaggaagagcgcgagatcgacgtggcgctgtcgaattccttcggcttcggcggcaccaacgcctcgatcatcttcgggaaggtgcgcgcctag

SEQ ID NO: 114817 - protein, 421 aa, Oceanicola batsensis HTCC2597
MRRVVVTGLGLVTPLASGVEESWSRILDGQSGAGPITRFDAGRVTTKYACEVPLGDGSDGTFNSDDWMEPKERRKVDDFILYGIAASEMAVRDAGWTPEDEESRLRTGVMIGSGIGGLQSIEQTTLLMAEKGPRRVSPFFIPGALINLISGQVQIRFGFKGPNHSVVTACSTGAHAIGDAARLIQWGDADVMVAGGAEAAICEIGIAGFNACKALSTKWAEDPTRASRPYDAGRDGFVMGEGAGIVVLEEYEHAVARGAKIYGEYLGYGLSGDAYHITAPDETMDGGFRSMKAAIERAGLAPADIDYINAHGTSTMADTLELAAVERLMGEEAAARATMSSTKSATGHLLGAAGAIEAIFSILAIRDQVAPPTINLDNPAVEPRLSLAPNRKEEREIDVALSNSFGFGGTNASIIFGKVRA

SEQ ID NO: 114818 - DNA, 1260 bp, Erythrobacter sp. NAP1
  CDS (1)..(1260): transl_table=11
atgcgccgcgttgtcgtaaccggtcttggccttgtcacaccgcttggcggtgatgttgaaacctcgtggaagaacttgatcgctggcgaaagcggcgcgggtccgatcacgcgcttcgacaccgaaggccagaaatgcacgattgcctgcgaagtcaaaggcaaggaccacccgtggggctttgacgcagacaagcgcgtcgacagcaaggttcagcggcaggtggacccgttcatcgtctatggcatcgatgctgccggacaggcgctcgaagatgcgggccttactgacctttccgacgaggaaaaggagcgcgtgggctgctcgatcggcgcaggcatcggcgggcttccaggtatcgaatatgaaagcgtcaacctgcacgagcgcggccctggccgggtcagcccgcactttgtgcatggccgcctgatcaatctcgtcaccggacaggtgcagatcaaatatggtttcatgggcccgaaccacgcggtcgtgaccgcctgttcgaccggcgcacactcgattggtgatgccgcgcgtatgatcgcgatggatgatgcggacgtgatgctggccggaggtgcggagagcactatcaacccgctgggcatcgccggatttgcacaggcccgcgcacttaacaccaatttcaatgaccgccccaaggaagcaagtcgcccttacgacaaggaccgcgaaggcttcgtgatgggcgagggtgcaggcgtcgtagtgcttgaagaatatgagcgcgccaaggcacgcggcgcaaagatctacgccgaagtcaccggctacggcctctcaggtgatgcttaccacgtcaccgcaccgcaccccgaaggaaagggcgcagagctcgccatgaagatggcgctgcgcaaggctggccttggtccgggcgacatcgactacgtgaacgcgcatggcactagcacgatggccgatacgatcgaactcgccgcagttaagcgcgtgttgggcgatgacctgagcggtgcttcgatgagctcgaccaagagcgctattggccaccttctgggcggcgctggcgcggttgaggctgtgttctgcattctcgcgatgcgcgacgggatcgtcccgccgacgctcaacctcgacaatccggacgaggggaccgaaggcatcgacctcgtaccgcacacggcgaagaagcgcgaagtgcgcgcggtgctcaacaacagcttcggtttcggcggcaccaacgcctcgctgatcatgcagaaggtcgactga

SEQ ID NO: 114819 - protein, 419 aa, Erythrobacter sp. NAP1
MRRVVVTGLGLVTPLGGDVETSWKNLIAGESGAGPITRFDTEGQKCTIACEVKGKDHPWGFDADKRVDSKVQRQVDPFIVYGIDAAGQALEDAGLTDLSDEEKERVGCSIGAGIGGLPGIEYESVNLHERGPGRVSPHFVHGRLINLVTGQVQIKYGFMGPNHAVVTACSTGAHSIGDAARMIAMDDADVMLAGGAESTINPLGIAGFAQARALNTNFNDRPKEASRPYDKDREGFVMGEGAGVVVLEEYERAKARGAKIYAEVTGYGLSGDAYHVTAPHPEGKGAELAMKMALRKAGLGPGDIDYVNAHGTSTMADTIELAAVKRVLGDDLSGASMSSTKSAIGHLLGGAGAVEAVFCILAMRDGIVPPTLNLDNPDEGTEGIDLVPHTAKKREVRAVLNNSFGFGGTNASLIMQKVD

SEQ ID NO: 114820 - DNA, 1239 bp, Pseudoalteromonas tunicata D2
  CDS (1)..(1239): transl_table=11
gtggctaaacgtcgagttgtagttactggcttaggtatgttaaccccgttaggtaatgacgttacgtctacttggcaagggttgctaaatggcaaaagtggaattgatttaattacacactttgatacgtcggactttggtactaaatttgctggcacattaaaaaactttgatgcttcgttatacatggcacctaaagatactaaaaaaatggatttatttatccaatacggtatcgctgcaggggttcaagcgtttaaagattccggtcttgaagtgacagagcaaaatgcaacgcgcattggtgttgctgttggttcaggcattggtggtttaactttaatagaagaaaaccacattaaattattaaatagtggccctcgtaaactttctcctttttatgtgccatcgaccatcatcaatatgatttcaggtcacttatcgattatgcacggcttacgaggcccaaatatttctattgttacggcctgtacaacgggtttacataatattggccatgccgcgcgtatgattgcgtatggcgatgccgatgctatggttgcaggtggcgctgaaaaagcatcaaccccaatcggtatgggcggcttttgtgccgcacgagcactgtcaacacgtaacgataacccacaagctgcgtctcgcccttgggatagagatcgtgatggttttgtactggccgatggtgcgggtgtaattgtgcttgaagaatatgagcatgccaaagcgcgtggtgcaaaaatttatgctgaactggttggttttggtatgagtggtgatgcttaccatatgacatcgcctccagaagatggttcaggcgctgcattggccatggtgaatgcacttaatgatgcgcatgttaacgctgagcaagtaggttatattaatgctcatggtacttctaccaatgcgggtgataaagctgaaaccgcagcagtaaaatcagtatttggtcacaatgctcataatgttatggtgagttcatcaaaatcaatgatgggtcatttattaggtgcggcaggctctgttgaatcaattatcagtattttatcattacaagatcaaaaagttacaccaacgattaacttagataatccggacgaagggtgtgatcttgattacgtacctcataccgcccgtgatgccaaacttgagtatgcgttatgtaactcatttggttttggtggcacaaatgggtcactattgtttaagaaaatctaa

SEQ ID NO: 114821 - protein, 412 aa, Pseudoalteromonas tunicata D2
MAKRRVVVTGLGMLTPLGNDVTSTWQGLLNGKSGIDLITHFDTSDFGTKFAGTLKNFDASLYMAPKDTKKMDLFIQYGIAAGVQAFKDSGLEVTEQNATRIGVAVGSGIGGLTLIEENHIKLLNSGPRKLSPFYVPSTIINMISGHLSIMHGLRGPNISIVTACTTGLHNIGHAARMIAYGDADAMVAGGAEKASTPIGMGGFCAARALSTRNDNPQAASRPWDRDRDGFVLADGAGVIVLEEYEHAKARGAKIYAELVGFGMSGDAYHMTSPPEDGSGAALAMVNALNDAHVNAEQVGYINAHGTSTNAGDKAETAAVKSVFGHNAHNVMVSSSKSMMGHLLGAAGSVESIISILSLQDQKVTPTINLDNPDEGCDLDYVPHTARDAKLEYALCNSFGFGGTNGSLLFKKI

SEQ ID NO: 114822 - DNA, 1263 bp, Xanthobacter autotrophicus Py2
  CDS (1)..(1263): transl_table=11
atgagacgtgttgtcgtcaccggcctcggcatggtgacgccgctcggctgcggcgtcgagccgacctggcggcggctcatcgccggcgagagcggcgtgaaggcggtcagccatttcgaagtggcagacctcgcctgcaagatcgccgcgaatgttccgcgcggtgatggttccgacgggaccttcaatcccgaccagtggatggagccgaaagagcagcgcaaggtggacgagttcatcgtctatgccatggctgccgcgacccaggcgctggatgacgccggctggcacccatcctcctacgaggaccagatcaacaccggcgtgctcatcggctccggcatcggcggcatcgaaggcatcgccgaatcagccctgctgctcaaggagcgcgggccgagacgcatctcgcccttcttcattcccggccgtctcatcaatctggccggcggctacgtctccatcacccacgggctgaaggggccgaaccacgccgtggttacggcctgctccaccggcgcccatgccatcggcgatgccgggcggctcatcgcgctgggggatgcggacgtgatggtggccggcggcaccgaatcgacggtcaaccgcctggcgttggccggctttgccgcctgcaaggcgctctgcaccgctttcaacgacgaccccacccgcgcctcgcgcccctatgacaaggaccgcgacggcttcgtgatgggtgagggcgccggcgtggtggtgcttgaggagctcgagcatgccaaggcgcgcggcgcgcgcatctatgcggaactggtgggctacggcctgtcgggcgacgccttccacatcaccgccccctcgccggacggcgacggcgccttccgctgcatgcaggcggctctgaagcgggcgggcctgacggcgggcgacatcgactacatcaacgcccatggcacctccaccatggctgacgagatcgagctgaaggcggtggaacggctgctcggcaatgccgcggcgaccacctccatgtcgtccaccaagtcgtccatcggtcacctgctcggggccgccggcgcggtggaggcgatcttctccgtccttgccatccgcgaccagatcgccccggcgacgctcaatctcgacaatccgtcggtggagactcccatcgatctggttccgctcaaggcgaagccgcgcaagatcgatgccgtgctctccaattccttcgggttcggcgggaccaacgcatccctcatcttccagcgcttcgacgcctga

SEQ ID NO: 114823 - protein, 420 aa, Xanthobacter autotrophicus Py2
MRRVVVTGLGMVTPLGCGVEPTWRRLIAGESGVKAVSHFEVADLACKIAANVPRGDGSDGTFNPDQWMEPKEQRKVDEFIVYAMAAATQALDDAGWHPSSYEDQINTGVLIGSGIGGIEGIAESALLLKERGPRRISPFFIPGRLINLAGGYVSITHGLKGPNHAVVTACSTGAHAIGDAGRLIALGDADVMVAGGTESTVNRLALAGFAACKALCTAFNDDPTRASRPYDKDRDGFVMGEGAGVVVLEELEHAKARGARIYAELVGYGLSGDAFHITAPSPDGDGAFRCMQAALKRAGLTAGDIDYINAHGTSTMADEIELKAVERLLGNAAATTSMSSTKSSIGHLLGAAGAVEAIFSVLAIRDQIAPATLNLDNPSVETPIDLVPLKAKPRKIDAVLSNSFGFGGTNASLIFQRFDA

SEQ ID NO: 114824 - DNA, 1248 bp, Flavobacteria bacterium BBFL7
  CDS (1)..(1248): transl_table=11
atggaattaaagcgagtagtcataacaggaatgggagcccttacaccgataggtaataatctaacggagtattgggatgcgttaaaagcaggtaagagtggttgcgctcctatcacatattttgatacagaacatttcaagactaagttcgcttgtgaaatcaagaactttaatgtgactgatttcatagaccgcaaggaagctagacgcatggatcgctttgcccagtatgcactggtagcaggtgatgaggcgatagcagactcaggattagatatcgactctatagataaatatagagtcggtgttatctggggcgcaggaattggtggtcttgaaacatttcaggaagaggttaaatcatttgctgctggtaacggtacgcctcgatttaatcctttctttatacctaagatgattgctgatatagctccggcacatatttctattaaatatggatttatgggtcctaactatacgacagtatctgcttgtgcttctagcgcaaatgcaatgctggatgcagtaaattatattagattaggacattgtgatgtgattgttactggtggctctgaggctgctgtagcacaagctggaatgggtggttttaatgccatgcatgccttatcaacacgtaatgaaagtccagaaaccgcaagtcgcccttttgacgcgacacgtgatggttttgttctaggagaaggcgctggtgcgctggttctagaagattatgagtatgcaaaagctcgcggagcaaaaatctatgccgaagttataggtggtggtttctctagtgatgcataccacattactgcgccagatcctgaaggacgtggtgtaattgcagtaatgaaaaacactctacaaaatgcaggtattaatcctgaggatgtagaccacattaacactcatggtacttctactccattaggtgatgttgcagaattaaaggctattaaagcagtatttggcgatcatgcacctagtataagtatcaattctactaaatctatgactggtcaccttttaggtgctgctggtgcaatagagtctattgcaagtgttatggcaattaatgaagggattattcctcctactattaaccatactacggtagatgaaaatatagacccatcattaagattagtattgaataaacctgagaaacgagaggtaaatgtagccttgagtaacacattcggttttggtggtcataactgctgtatcgcattcagaaaactataa

SEQ ID NO: 114825 - protein, 415 aa, Flavobacteria bacterium BBFL7
MELKRVVITGMGALTPIGNNLTEYWDALKAGKSGCAPITYFDTEHFKTKFACEIKNFNVTDFIDRKEARRMDRFAQYALVAGDEAIADSGLDIDSIDKYRVGVIWGAGIGGLETFQEEVKSFAAGNGTPRFNPFFIPKMIADIAPAHISIKYGFMGPNYTTVSACASSANAMLDAVNYIRLGHCDVIVTGGSEAAVAQAGMGGFNAMHALSTRNESPETASRPFDATRDGFVLGEGAGALVLEDYEYAKARGAKIYAEVIGGGFSSDAYHITAPDPEGRGVIAVMKNTLQNAGINPEDVDHINTHGTSTPLGDVAELKAIKAVFGDHAPSISINSTKSMTGHLLGAAGAIESIASVMAINEGIIPPTINHTTVDENIDPSLRLVLNKPEKREVNVALSNTFGFGGHNCCIAFRKL

SEQ ID NO: 114826 - DNA, 1293 bp, Rickettsiella grylli
  CDS (1)..(1293): transl_table=11
ttgaaagggggtccggacgtgaagaaaaagcgacgtatagtgataaccggtataggtatgatgacaccattaggccttaatgccaaaacaacttgggaagcaatattagcaggaaaaagcggtgtttctacgattacgcaatttgatgtttctacttttccttgtcaaatctcagcgagtgtaaaagactttaaagctgaaaattatggtatctcagcaaaagaaagccggaaaatggatttatttattcaatatggtttagcggctgcgatcgaggcgatgaccgattcaaaacttgaaatcactgaaaaaaatgcagaccgtatcggtgttgccgtaggttctggcattggtgggttgccttttattgaagaaaatcatagcaaattagaacaaggaggtccgcggaaaatatctccattttttataccaggcgccattacgaatatgctcgcaggtcagatttccattcgttatggtttacgcggcccgaatatagcggtagtgactgcctgtactacaggtacgcacaacattggattgggtgctcgcaccattctgtatggagatgctgacgtgatggttgtcggtggctcagaaatggcaaccacttctttaggtttaggtgggttttcggcttgtcgtgcgttgtctaatcggaataaagaaccgcaaacagcgagtcgtccttgggataaagcgcgcgatggttttgtgctgggtgatggtgcgggagttttagttctcgaagaatatgaacgcgcaaaacagcgcaatgcgcctatttacgccgaattggtgggctttggtatgagtgcagacgcttttcatatgacaagtcctgcgcctgacggtcagggagcgatgacagcaatgttgaatacattacatgatgccaacattgacaaagaaaaaatagcttatattaatgcgcatgcgacgtctacattgcaaggtgattatttagaattaagggcgatacgccgcgtatttggtgatcatgttaaaaaattggcgataagttcgacgaaatcaatgacgggacatttactgggcgctgcgggcgcagttgaggcgattttcactattttagcactaaaagatcaaaaagcgccgccaacaattaacttagataatcctgggaatccccctgagcttaatattcccgacgatgattatgtggatttaaattttgttccacatgttccacaagagttaaaaatgaattacgcactttctaattcctttggatttggtggaacaaacgcttcattgctttttgctcgattatga

SEQ ID NO: 114827 - protein, 430 aa, Rickettsiella grylli
MKGGPDVKKKRRIVITGIGMMTPLGLNAKTTWEAILAGKSGVSTITQFDVSTFPCQISASVKDFKAENYGISAKESRKMDLFIQYGLAAAIEAMTDSKLEITEKNADRIGVAVGSGIGGLPFIEENHSKLEQGGPRKISPFFIPGAITNMLAGQISIRYGLRGPNIAVVTACTTGTHNIGLGARTILYGDADVMVVGGSEMATTSLGLGGFSACRALSNRNKEPQTASRPWDKARDGFVLGDGAGVLVLEEYERAKQRNAPIYAELVGFGMSADAFHMTSPAPDGQGAMTAMLNTLHDANIDKEKIAYINAHATSTLQGDYLELRAIRRVFGDHVKKLAISSTKSMTGHLLGAAGAVEAIFTILALKDQKAPPTINLDNPGNPPELNIPDDDYVDLNFVPHVPQELKMNYALSNSFGFGGTNASLLFARL

SEQ ID NO: 114828 - DNA, 1230 bp, Oceanobacter sp. RED65
  CDS (1)..(1230): transl_table=11
atgtctaaacgtcgcgtagtggtaacaggtatcggagcggtaacgccgctcgccaataatgcgaaagaaacttggcagcgtttaatttcggggcaaagtggtattgatattatctcgcactttgacgccagtaatctcgcaacgcaatttgccggtaccattaaagacttcgaattagatgatgtactttccgccaaagacgctaagaaaatggatacgtttatccaatacggcatggttgcctgcgctgaagcgatagagcagtctggtttggatggaaatagcgttgatttgaatcgcgtaggttgtgctttgggctctggcattggtggtttagctacaatcgaacacaattatacgcaattggttaactctggtccgcgacgagtgagtcctttctatatacctgcttccatcgtaaatatgattgcgggccatgtagctatgaaatggggttttacagggccaaactttgcgatttctactgcttgtaccacaggtactcataatattggctatggtgcgcgtacgattgcgtatggcgatgcagatgtgatgattgtcggtggggctgaggcggcgtgtactcctagcggtatggcaggcttctgtgcagcacgcgcgatgtcgacacgtaatgatgatcctaaagccgcgtcgcgtccatgggataaagatcgagatggcttcgtcttgggtgatggtgctggagctttagtgattgaggagtacgaacacgccaaagcacgcggtgcgaacattctagccgagattacgggttttggtatgagtgatgatgccttccacatgacgagcccgccagaagatggtgccggtgctgcaaaagccatggccaatgcgttgaaagatgcagggcttgtaggcagtgatattcaatacattaatgctcatggaacttctacaccgcaaggagatgtggcggaaactcgagccattcaaagcattgtcgggaatgacgtattagtgtcctcaaccaaatcaatgacaggacatttgttgggcgcagcgggcgccattgaagcggtcttcagcatccaggctttgacgcacaatgttgtaccaccaacgatcaatatcgaaaaccaggatgatcagtgcgcgttagattatgtagcaaatactgcccgtgatgttgagcttgcccacgtacttagtaattcatttggtttcggcgggaccaatggtagtttgattttcagtaaggtttaa

SEQ ID NO: 114829 - protein, 409 aa, Oceanobacter sp. RED65
MSKRRVVVTGIGAVTPLANNAKETWQRLISGQSGIDIISHFDASNLATQFAGTIKDFELDDVLSAKDAKKMDTFIQYGMVACAEAIEQSGLDGNSVDLNRVGCALGSGIGGLATIEHNYTQLVNSGPRRVSPFYIPASIVNMIAGHVAMKWGFTGPNFAISTACTTGTHNIGYGARTIAYGDADVMIVGGAEAACTPSGMAGFCAARAMSTRNDDPKAASRPWDKDRDGFVLGDGAGALVIEEYEHAKARGANILAEITGFGMSDDAFHMTSPPEDGAGAAKAMANALKDAGLVGSDIQYINAHGTSTPQGDVAETRAIQSIVGNDVLVSSTKSMTGHLLGAAGAIEAVFSIQALTHNVVPPTINIENQDDQCALDYVANTARDVELAHVLSNSFGFGGTNGSLIFSKV

SEQ ID NO: 114830 - DNA, 1239 bp, Alteromonadales bacterium TW-7
  CDS (1)..(1239): transl_table=11
gtggctaaacgtcgtgtcgtcgtaactggcttaggaatgttgacgccgctaggcaatgatgttcaatcaacctggcaaggcttattagatgctaaaagtggaatacaaacaataacacactttgatacatcaaaatttggaacaaagttcgctggtttaatcaacgactttgacgcatcggcttatatgccaccaaaagatgcaaaaaaaatggatttatttatccaatatggtttagcagcgggtgttcaagcctttaaagattcgggcctagaaatcacagaagaaaacgcaacgcgcattggtgttgctgtgggttctggtattggtggcctaacgctaattgaagaaaaccacgttaagttacttaacagtggcccacgtaaactatctccattttatgtgccttctaccattattaatatgatctcgggtcatttatcaataatgtacggactgcgtggccctaatatttcaattgtaactgcgtgtactacaggtttgcataacattggccatgcagcgcgtatgattgcctacggcgatgccgacgcaatggtagctggtggagcagaaaaagcctgtacacctattggtatgggtggctttaacgcagcacgtgctttatcaacccgtaacgacgacccacaagccgcatcacgcccgtgggataaagaccgtgacggttttgtactgtctgacggtgccggtgttgttgtggttgaagaatacgaacacgcaaaagcacgtggcgcaaacatttatgccgagctagttggttttggtatgagtggcgatgcattccatatgacatcaccaccagaagatggtgccggtgcagcccttgccatggaaaacgcattaaaagatgcgcaagtaaatgcagaacaagttggttacataaacgcacacggtacatcgaccaacgcaggcgacaaagccgaaacagccgccgttaaatctatatttggtaatgcagcaaaagacgtaatggtgggctcgtctaaatcgatgatgggtcacttactgggggcagccggctcggttgaatcaattgtgtcgatattgtcgctaaaagatcaaaaagtgtcgccaactattaaccttgataacccagatgaaggctgtgacctagattacattgcgcatacagcacgcgatgcaaaactagattactcactgtgtaactcatttggctttggtggtactaatggctcgttgctatttaaaaaggtataa

SEQ ID NO: 114831 - protein, 412 aa, Alteromonadales bacterium TW-7
MAKRRVVVTGLGMLTPLGNDVQSTWQGLLDAKSGIQTITHFDTSKFGTKFAGLINDFDASAYMPPKDAKKMDLFIQYGLAAGVQAFKDSGLEITEENATRIGVAVGSGIGGLTLIEENHVKLLNSGPRKLSPFYVPSTIINMISGHLSIMYGLRGPNISIVTACTTGLHNIGHAARMIAYGDADAMVAGGAEKACTPIGMGGFNAARALSTRNDDPQAASRPWDKDRDGFVLSDGAGVVVVEEYEHAKARGANIYAELVGFGMSGDAFHMTSPPEDGAGAALAMENALKDAQVNAEQVGYINAHGTSTNAGDKAETAAVKSIFGNAAKDVMVGSSKSMMGHLLGAAGSVESIVSILSLKDQKVSPTINLDNPDEGCDLDYIAHTARDAKLDYSLCNSFGFGGTNGSLLFKKV

SEQ ID NO: 114832 - DNA, 1287 bp, marine gamma proteobacterium HTCC2143
  CDS (1)..(1287): transl_table=11
atgttgtccaagttacatattttcaatgtgctggaggatagagaagtgtccaagcgtagagtggtcgttaccgggctgggtcttataacacccctgggaaatgacgttgagtcaagctggaataatatcgtcaatggcaaaagtggaatcggtcctttagaaaattttgacgtctctgcatacactacgcggattggtgggtcggtgaaaaatttcgatgtcactgattacatggaagccaaagaagcgcggaagatggatacctttatccaatacggcatggcggctggaattcaggcaattgaagattcaggtattgctgttactgaagaaaatgctgcccggatcggtctagctattggttcgggcattggtggtgttagttttattgaaaaaaacgatgccatattaattaagagtggtccccgcagaatttcgcccttttttgtgcccggtacagttatcaatatggtcgcgggaaatctatcaataaaatatggtatgcaaggccccaattttgcgattacaacagcctgcacaaccggcacccataatattggtcatgccgccagaactatagcttacggcgatgctgatgttatggtagcgggaggcgctgaaatgtcctcgacgccacttggcctcggtggcttcgctgcagtcagagcactgtctactcgcaatgacgatccgcaggcggcaagtcggccgtgggacaaagatcgcgatggcttcgttttatcggatggtgcagggatgatggtactcgaagagtatgagttcgcaagagcgcggggtgcggatatttacgccgaacttgttggttttggcatgagcggggatgcctatcacattacttccccaccggaagatgggcgcggtgcggcagccgcgatgactagtgctatcgctgatgcaggaatcaatgccgcggaaataggttacattaatgcccatggtacatcgacaccggcaggcgatattgccgaaagccttgcgatcgagtctgtttggggggcagctgcgaatgacgttgcggtcagctcaacaaagtctatgatagggcacttgctgggagcagcgggtgcagttgaggcggtattttcaatattggctattcgtgatcagattgctccaccgacaataaatttggataacgtggatgaaaattgtcgactcaattatgtaccgcattcagctcagcaaaagtcgataaattttgccctgtctaactcttttgggtttggcggtacgaatggcagcttactgttcggcaagctggattaa

SEQ ID NO: 114833 - protein, 428 aa, marine gamma proteobacterium HTCC2143
MLSKLHIFNVLEDREVSKRRVVVTGLGLITPLGNDVESSWNNIVNGKSGIGPLENFDVSAYTTRIGGSVKNFDVTDYMEAKEARKMDTFIQYGMAAGIQAIEDSGIAVTEENAARIGLAIGSGIGGVSFIEKNDAILIKSGPRRISPFFVPGTVINMVAGNLSIKYGMQGPNFAITTACTTGTHNIGHAARTIAYGDADVMVAGGAEMSSTPLGLGGFAAVRALSTRNDDPQAASRPWDKDRDGFVLSDGAGMMVLEEYEFARARGADIYAELVGFGMSGDAYHITSPPEDGRGAAAAMTSAIADAGINAAEIGYINAHGTSTPAGDIAESLAIESVWGAAANDVAVSSTKSMIGHLLGAAGAVEAVFSILAIRDQIAPPTINLDNVDENCRLNYVPHSAQQKSINFALSNSFGFGGTNGSLLFGKLD

SEQ ID NO: 114834 - DNA, 1245 bp, marine gamma proteobacterium HTCC2080
  CDS (1)..(1245): transl_table=11
atgaacggcaatcgagtggtagtaaccgggcttggtgcagtgacgccggtggggttggatgtggcatcaagttggcaagccatttgcgatggaaaaagtggtgcggccagtattgaagggttcgatacagacgccttcagcacccaatttagttgttcagttaaaaacttttcaactgagggatacctggcgcctaaggattcaaagcgaatggatccgtttattcagttcggcatggtcgcaggtattcaggcgatccgagacagtggtctggagattactgaggcgaactgtgagcgtattggttgtgctatcggttcgggcatcgggggtattggctccattgagcgtaacaacgagctgatcttaaatgcagggcctcgacgcatgtcacccttttttgtgccgggtgccattattaatatgataagcgggaatctgtcggttatgtataaccttcagggaccgaatttggccattgtcactgcttgcaccagtggcacgcacaatattggaatgggcgcgcgcttaattgctactggggaggccgacgccatgctggtgggtggcgccgaaatggcaaccacgcctgttggattaggtggattcgccgccgcgagggcgctttcgactcgaaatgcgactcctgaattggcatctagaccttgggatgcagaccgtgacggatttgtactgggtgacggcgcggcaatgctcatgctcgaatcactagaaagcgcaaaagctcgcaaggctactatctacgcagagctaacgggttttggtatgagcggtgacgcttaccacatgacctctcccccagaagatggtcgcggggccgcccggtccatggccaatgccctacgtgattcgggtttgaacgcgtcagatatcggttacataaacgcccacggcacttcaaccattgtcggtgaccgagctgagacgatggctgtaaagtctattttcggggatgttgcagcacagctcgcagtcagttccaccaaatcgatgattggacatctattaggggctgcgggtgcggtcgaagcagtatttacgattctagccatacgtgacgatgttgctccgcccactataaatcttgataacccaggagagggctgcgatcttaattacgtacctcatcatgcacagcaacggaaaattaaccacgccattagcaattcttttggatttggtgggacgaatggatcactggtttttagtcagtttgcagagtaa

SEQ ID NO: 114835 - protein, 414 aa, marine gamma proteobacterium HTCC2080
MNGNRVVVTGLGAVTPVGLDVASSWQAICDGKSGAASIEGFDTDAFSTQFSCSVKNFSTEGYLAPKDSKRMDPFIQFGMVAGIQAIRDSGLEITEANCERIGCAIGSGIGGIGSIERNNELILNAGPRRMSPFFVPGAIINMISGNLSVMYNLQGPNLAIVTACTSGTHNIGMGARLIATGEADAMLVGGAEMATTPVGLGGFAAARALSTRNATPELASRPWDADRDGFVLGDGAAMLMLESLESAKARKATIYAELTGFGMSGDAYHMTSPPEDGRGAARSMANALRDSGLNASDIGYINAHGTSTIVGDRAETMAVKSIFGDVAAQLAVSSTKSMIGHLLGAAGAVEAVFTILAIRDDVAPPTINLDNPGEGCDLNYVPHHAQQRKINHAISNSFGFGGTNGSLVFSQFAE

SEQ ID NO: 114836 - DNA, 1221 bp, Pseudomonas putida GB-1
  CDS (1)..(1221): transl_table=11
atgcgccgcgtcgttatcactggtctgggcatcgtatcgtgcctgggcaatgacaaagagaccgtcaccgaaaacctgcgtaacagccgtccgggtatccgtttcaacccggaatacaaggaaatggggctgcgcagccaggtttccgggtccatcgacctcaacctcgaagaactgatcgaccgcaaggtctaccgcttcgtcggccacgccgcggcctacgcctatctggcgatgcaggacgcgatcaaggacgctggcctgaccgaagagcaggtttccaacccgcgtactggcctggtggctggctccggcggcgcctcgaccctgaaccagatggaagcgctggacaccctgcgcgagaaaggcgtcaagcgcgtcggcccgtaccgcgttacccgcaccatgggcagcaccgtttcggcgtgcctggccactccgttcaagatcaagggcctgaactactcgatctcgtcggcctgcgccacttcggcacactgcatcggcaccgccctggagcagatccagtggggcaagcaagacatcgtcttcgccggtggtggtgaagaagagcactggagccagtcgttcctgttcgatgccatgggcgccctgtcgaccaaacgcaacgaaaccccggaactggcttcgcgcgcctatgacgccgaccgtgatggcttcgtcatcgcaggtggcggcggcatggtggtggtcgaggagctggaacacgccctggcccgtggcgccaagatctacgccgaaatcgttggctacggtgcaacttccgacggctatgacatggttgccccgagcggcgaaggtgccatccgctgcatgcagcaggcgctggctaccgtcgacaccccgatcgactacctgaacacccacggtacttcgactccggtcggtgacgtggccgagatcaaaggtgttcgcgccgtgttcggcgacaaggcaccgaagatcagctcgaccaagagcctgtcgggccactcgctgggcgccgccggcgtgcacgaggcgatctactgcctgctgatgatggaaaacaacttcatcgccggctccgccaacatcgatgagctggacccagaggtcgccgacctgccaatcctgcgtaacaccgaagaaaacgccaagatcgacacggtcatgagcaacagcttcggcttcggtggcacaaacgccaccctggtgctcaagcgctgggaaggcaagtaa

SEQ ID NO: 114837 - protein, 406 aa, Pseudomonas putida GB-1
MRRVVITGLGIVSCLGNDKETVTENLRNSRPGIRFNPEYKEMGLRSQVSGSIDLNLEELIDRKVYRFVGHAAAYAYLAMQDAIKDAGLTEEQVSNPRTGLVAGSGGASTLNQMEALDTLREKGVKRVGPYRVTRTMGSTVSACLATPFKIKGLNYSISSACATSAHCIGTALEQIQWGKQDIVFAGGGEEEHWSQSFLFDAMGALSTKRNETPELASRAYDADRDGFVIAGGGGMVVVEELEHALARGAKIYAEIVGYGATSDGYDMVAPSGEGAIRCMQQALATVDTPIDYLNTHGTSTPVGDVAEIKGVRAVFGDKAPKISSTKSLSGHSLGAAGVHEAIYCLLMMENNFIAGSANIDELDPEVADLPILRNTEENAKIDTVMSNSFGFGGTNATLVLKRWEGK

SEQ ID NO: 114838 - DNA, 1272 bp, Streptomyces echinatus
  CDS (1)..(1272): transl_table=11
atgagcaggcgcgtggccatcaccggaatcggggtcgtcgcccccggcggaagcggcgggaccaagccgttctggtcgctgctgaccgagggacgcaccgccacccgcaccatctccctgttcgacgcctcgtcgttccgctcccgggtggccgccgaggtcgacttcgatcccgtcgcctccggactgcgtccgcaggagatccggcgcatggaccgcgcggcgcagttcgccgtggtagccgcccgtgaggcggtggcggacagcgggctggagacggccggcacggacccctgccgcaccggcgtcaccatcggcagcgccgtcggggccacgatgggcctggacagcgagtacgcggtggtcagcgacggcggtgccacctggctggtggaccacacgtacgccgttccccacctgttcgacttcttcgtccccagttccttcgcccgggaggtggcctgggcggtcggcgcacagggcccgacggcgctggtctccaccggctgcacctccggcctcgactccgtcgggcacgcggtggaactcatccgtgagggcagcgcggacgtcatggtggccggggccaccgacgcccccgtctcgcccatctccgtcgcctgcttcgacgcgatcaaggcgaccaccccgcgcaacgacgacgcggcccacgcctcccggcccttcgaccggacccgcaacgggttcgtgctgggcgagggcgcggccgtgttcgtcctggaggaactggagcgggcccgcgcccgcggcgcccatgtgtacgccgagatcgccgggttcgcctcgcgcagcaacgcgtaccacatgacgggcctgcgtgcggacggcgccgagatggccgaggcgatccgtagcgccctcgacgacgcccggaccgaccccaccgacgtcgactacgtcaacgcccacggttcgggcaccaagcagaacgaccggcacgagaccgccgcgttcaaacgcagcctgggtgagcaggcctacgccgtcccggtcagctcgatcaagtcgatgatcggccactcgctgggcgcgatcggcgcgctggagatcgccgcctgcgcgctcgccgtcgagcacggcgtcgtaccgccgaccgcgaacctgcatgagcccgacccggagtgtgacctggactacacgccgctgacggcgcgcgagacacgggtggacacggtgctgacggtcggcagtggattcggcggcttccagagcgccatggtgctcacccgcccggatcggagggccgcatga

SEQ ID NO: 114839 - protein, 423 aa, Streptomyces echinatus
MSRRVAITGIGVVAPGGSGGTKPFWSLLTEGRTATRTISLFDASSFRSRVAAEVDFDPVASGLRPQEIRRMDRAAQFAVVAAREAVADSGLETAGTDPCRTGVTIGSAVGATMGLDSEYAVVSDGGATWLVDHTYAVPHLFDFFVPSSFAREVAWAVGAQGPTALVSTGCTSGLDSVGHAVELIREGSADVMVAGATDAPVSPISVACFDAIKATTPRNDDAAHASRPFDRTRNGFVLGEGAAVFVLEELERARARGAHVYAEIAGFASRSNAYHMTGLRADGAEMAEAIRSALDDARTDPTDVDYVNAHGSGTKQNDRHETAAFKRSLGEQAYAVPVSSIKSMIGHSLGAIGALEIAACALAVEHGVVPPTANLHEPDPECDLDYTPLTARETRVDTVLTVGSGFGGFQSAMVLTRPDRRAA

SEQ ID NO: 114840 - DNA, 1538 bp, Helianthus annuus
  CDS (57)..(1445)
aaagtcgacggatcccatatatgactagtgaattccccgggaggcctgattccaccatgcaagctcaagctctcctccaatcaccccacctccgggtctccccactcgacccgctccgaacccgccccaaacccaccaacttcaaaccccgaaccaccgtcattgcatccgccaccgcccctaaacgcgaaaaagaccccaaaaaacgggtcgtcattacgggtatgggtctggtatccgtattcggaaacgatgtggatacttactatgagaaattgttagcaggggagagtggaatcgggttgattgatcggtttgatgcgtccaagttcccgacccgattcggtgggcagattcgtgggtttaagtctgatgggtatattgatgggaagaatgataggaggcttgatgattgtttgaggtattgcattgttgctggtaaaaaggcgcttgaagatgctgatcttggtggtgataaattatctaagatcgataaggagcgtgccggtgtgctcgttgggacaggaatgggaggtcttactgtgttttccgacggagttcagaatctaatcgaaaagggttacagaaaaatcacaccttttttcattccttacgctataacaaacatgggttcggctctgctcgctattgatgttggattcatgggtccaaattactcgatttcaaccgcatgtgctacttcaaattattgcttttatgctgctgcaaatcatattcgaagaggggaagctgacatgatgattgctggtggcactgaagctgcgattattcctattggtttgggtggttttgtggcgtgcagggccctttctcagagaaatgatgacccgcaaacggcttctagaccatgggataaagacagagatggttttgtcatgggtgaaggtgctggtgtgttggtgatggagagcttagaacatgcaatgaaaaggggtgcaccaataattgccgaatacttgggcggggcggttaattgtgacgcttatcatatgactgatccacgatccgacggtcttggtgtttcttcttgcattcaaagcagccttgaagatgctggtgtgtcaccagaggaggttaactacataaatgcacacgcgacgtcaacattggttggtgatctggcggaggtaaatgctgtaaagaaggtgttcaaaagcactgacgggatcaaaatgaattcaaccaagtctatgattggacactgcctaggtgcagccggaggtctagaagccattgctacagtcaaagccattcaaacaggatggttgcatcccaccataaatcaatttaacccagagcctgcagttgaatttgacactgttgccaatcaaaagcaacaacacgaagtcaacgttgccatttcaaattcatttggttttggtggacacaactccgttgtagcgttctctgcattcaaaccttgatatgatctcttccaagtcatttttgaggcttcatcagttgttcttgttctttattgtatgtcattataagcgcgttttgattttgtaatcgtt

SEQ ID NO: 114841 - protein, 462 aa, Helianthus annuus
MQAQALLQSPHLRVSPLDPLRTRPKPTNFKPRTTVIASATAPKREKDPKKRVVITGMGLVSVFGNDVDTYYEKLLAGESGIGLIDRFDASKFPTRFGGQIRGFKSDGYIDGKNDRRLDDCLRYCIVAGKKALEDADLGGDKLSKIDKERAGVLVGTGMGGLTVFSDGVQNLIEKGYRKITPFFIPYAITNMGSALLAIDVGFMGPNYSISTACATSNYCFYAAANHIRRGEADMMIAGGTEAAIIPIGLGGFVACRALSQRNDDPQTASRPWDKDRDGFVMGEGAGVLVMESLEHAMKRGAPIIAEYLGGAVNCDAYHMTDPRSDGLGVSSCIQSSLEDAGVSPEEVNYINAHATSTLVGDLAEVNAVKKVFKSTDGIKMNSTKSMIGHCLGAAGGLEAIATVKAIQTGWLHPTINQFNPEPAVEFDTVANQKQQHEVNVAISNSFGFGGHNSVVAFSAFKP
